United States Patent Application Publication US 2007/0042381 A1 - sequence listing, part 10

SEQ ID NO: 404735 - RNA, 22 nt, Human
uauaaaauggcaucagcuccaa

SEQ ID NO: 404736 - RNA, 22 nt, Human
aaguuucauuguucauguaaca

SEQ ID NO: 404737 - RNA, 22 nt, Human
caguuucagaaucaaaacauca

SEQ ID NO: 404738 - RNA, 22 nt, Human
ucuaaacacgucucuuugaaua

SEQ ID NO: 404739 - RNA, 22 nt, Human
uggauuagugcugaaaugaugg

SEQ ID NO: 404740 - RNA, 22 nt, Human
aauacuaguuauuaaagcuuuu

SEQ ID NO: 404741 - RNA, 22 nt, Human
uuuccaaauaaggucacacuca

SEQ ID NO: 404742 - RNA, 22 nt, Human
acuggaugaggggaaagagaca

SEQ ID NO: 404743 - RNA, 22 nt, Human
aucagaaaucuaggauucagaa

SEQ ID NO: 404744 - RNA, 22 nt, Human
uaaacauguugacaucuuaccu

SEQ ID NO: 404745 - RNA, 22 nt, Human
uuccuuaguguuagauucugug

SEQ ID NO: 404746 - RNA, 22 nt, Human
gucaacuugcaagaugcugggc

SEQ ID NO: 404747 - RNA, 22 nt, Human
aguccuuagaacagugccuggg

SEQ ID NO: 404748 - RNA, 22 nt, Human
uuggcuucuucgcacagcagua

SEQ ID NO: 404749 - RNA, 22 nt, Human
uuuauccauaucauuaaaaucu

SEQ ID NO: 404750 - RNA, 22 nt, Human
uuucagacagauucuucucagu

SEQ ID NO: 404751 - RNA, 22 nt, Human
guacagaauuaugccaugaggg

SEQ ID NO: 404752 - RNA, 22 nt, Human
gauagucaccucccuuaacuuu

SEQ ID NO: 404753 - RNA, 22 nt, Human
aucuauacuacaaauggcuggu

SEQ ID NO: 404754 - RNA, 22 nt, Human
ugcuuaaacacauacauacaua

SEQ ID NO: 404755 - RNA, 22 nt, Human
gucaaacaaauuaacauaucca

SEQ ID NO: 404756 - RNA, 22 nt, Human
cuugccuuugucuucaaaggcu

SEQ ID NO: 404757 - RNA, 22 nt, Human
ugcagagacuugugugcauuug

SEQ ID NO: 404758 - RNA, 22 nt, Human
acagaauugauggaaaucucag

SEQ ID NO: 404759 - RNA, 22 nt, Human
auguuucaaauauauagaguug

SEQ ID NO: 404760 - RNA, 22 nt, Human
ucacagaagaugcuggauguug

SEQ ID NO: 404761 - RNA, 22 nt, Human
acagaguucccacuccagaagc

SEQ ID NO: 404762 - RNA, 22 nt, Human
gcuggauccugauucgucuuug

SEQ ID NO: 404763 - RNA, 22 nt, Human
cauggucuacaauuucauuuua

SEQ ID NO: 404764 - RNA, 22 nt, Human
ccagaucuaguguuguaaagcu

SEQ ID NO: 404765 - RNA, 22 nt, Human
aacauguaucgcuuuuuaauau

SEQ ID NO: 404766 - RNA, 22 nt, Human
uuucaacuuguuugcuuccaua

SEQ ID NO: 404767 - RNA, 22 nt, Human
auggcuuaugaauaacaguagg

SEQ ID NO: 404768 - RNA, 22 nt, Human
aaugugauuagccucuacugga

SEQ ID NO: 404769 - RNA, 22 nt, Human
aaaacugaaauacgauccaaug

SEQ ID NO: 404770 - RNA, 22 nt, Human
agaucauaugaaaaauuucaag

SEQ ID NO: 404771 - RNA, 22 nt, Human
aaagaaucguguguaguuugaa

SEQ ID NO: 404772 - RNA, 22 nt, Human
cauuuacacacagaggugugcu

SEQ ID NO: 404773 - RNA, 19 nt, Human
uacauacuuauucuaaaag

SEQ ID NO: 404774 - RNA, 22 nt, Human
uuucaacuagccccuaaguccu

SEQ ID NO: 404775 - RNA, 20 nt, Human
uauuccaaggguagagaaaa

SEQ ID NO: 404776 - RNA, 22 nt, Human
uucacagaguuauuuuuaugcu

SEQ ID NO: 404777 - RNA, 19 nt, Human
agauuuaccucauauaguu

SEQ ID NO: 404778 - RNA, 22 nt, Human
uaaguccuucaccuaauccuca

SEQ ID NO: 404779 - RNA, 22 nt, Human
uuauaagaguauauaguguacu

SEQ ID NO: 404780 - RNA, 22 nt, Human
gugcauuuaggucacaugaugu

SEQ ID NO: 404781 - RNA, 22 nt, Human
uaacagaagaugaaacuucuuu

SEQ ID NO: 404782 - RNA, 20 nt, Human
guaaugaauguaaacaguaa

SEQ ID NO: 404783 - RNA, 22 nt, Human
ucuggaucuccagcacuuauca

SEQ ID NO: 404784 - RNA, 22 nt, Human
aaacuuuggauugugauugugc

SEQ ID NO: 404785 - RNA, 22 nt, Human
acacaagauuguguauugaauu

SEQ ID NO: 404786 - RNA, 22 nt, Human
guuauaaaugacugcaaaaguu

SEQ ID NO: 404787 - RNA, 22 nt, Human
acagaauuaucaggaaauguua

SEQ ID NO: 404788 - RNA, 22 nt, Human
ucaaauaccagcaauuucaugu

SEQ ID NO: 404789 - RNA, 22 nt, Human
gauuuacagguuagguccugua

SEQ ID NO: 404790 - RNA, 22 nt, Human
uucccaauauucugcuuuuaug

SEQ ID NO: 404791 - RNA, 22 nt, Human
uagucaccugugagcugcguag

SEQ ID NO: 404792 - RNA, 22 nt, Human
uuccuuagaguuuccagaaagc

SEQ ID NO: 404793 - RNA, 22 nt, Human
auggcauuugaccgcuuugugg

SEQ ID NO: 404794 - RNA, 22 nt, Human
uuugaagaccuuaucucuaaau

SEQ ID NO: 404795 - RNA, 22 nt, Human
acaacaaagacacuugaaauga

SEQ ID NO: 404796 - RNA, 22 nt, Human
cauuaauauuguucuucuuuag

SEQ ID NO: 404797 - RNA, 22 nt, Human
guaaauuauuucaagaucaucu

SEQ ID NO: 404798 - RNA, 22 nt, Human
acaacuuuguagcaauuccacg

SEQ ID NO: 404799 - RNA, 20 nt, Human
uacaauacacaugcauauga

SEQ ID NO: 404800 - RNA, 22 nt, Human
caaugaaaauuuaaguugcagc

SEQ ID NO: 404801 - RNA, 22 nt, Human
aaucagaaaggcuaaggaagca

SEQ ID NO: 404802 - RNA, 22 nt, Human
acuauacauugaauguuaaggu

SEQ ID NO: 404803 - RNA, 22 nt, Human
cucuaacacuguaaugcuuucu

SEQ ID NO: 404804 - RNA, 22 nt, Human
gaugaaaaauugcugugucaua

SEQ ID NO: 404805 - RNA, 22 nt, Human
cuagaaaucucuguuuacauca

SEQ ID NO: 404806 - RNA, 22 nt, Human
cagucaccaccagguggcagua

SEQ ID NO: 404807 - RNA, 22 nt, Human
agaucuauuagcaaacugccau

SEQ ID NO: 404808 - RNA, 22 nt, Human
uuuauaaaauagacugggucua

SEQ ID NO: 404809 - RNA, 22 nt, Human
ucauagaaugaguuaaugaacu

SEQ ID NO: 404810 - RNA, 22 nt, Human
cuucuuaaucccuuauauauuu

SEQ ID NO: 404811 - RNA, 21 nt, Human
caauuucaugggaagauggga

SEQ ID NO: 404812 - RNA, 22 nt, Human
uucauuuguugacagagacaug

SEQ ID NO: 404813 - RNA, 22 nt, Human
aacaugucuggguauucacaag

SEQ ID NO: 404814 - RNA, 22 nt, Human
aaguuucaaauauaaaauuaca

SEQ ID NO: 404815 - RNA, 22 nt, Human
uuuaggcacagggaguugguuu

SEQ ID NO: 404816 - RNA, 22 nt, Human
aaaacagacagccaguguagag

SEQ ID NO: 404817 - RNA, 22 nt, Human
auggcuuuccugggacaugggc

SEQ ID NO: 404818 - RNA, 22 nt, Human
gauaauaagcacagcaggaugu

SEQ ID NO: 404819 - RNA, 22 nt, Human
ugauaauauuuugaaucauaag

SEQ ID NO: 404820 - RNA, 22 nt, Human
auauccaagaaacaauuaauuc

SEQ ID NO: 404821 - RNA, 22 nt, Human
caaaauuguugaugcugcuuug

SEQ ID NO: 404822 - RNA, 22 nt, Human
uuccugggacuggagcagccca

SEQ ID NO: 404823 - RNA, 22 nt, Human
auacauaauuacuuccgauguu

SEQ ID NO: 404824 - RNA, 22 nt, Human
guaaugaaugaaagaaacuggg

SEQ ID NO: 404825 - RNA, 22 nt, Human
ugauuuaugcauuauacuguug

SEQ ID NO: 404826 - RNA, 22 nt, Human
uguccuuaucuccaaacaauca

SEQ ID NO: 404827 - RNA, 22 nt, Human
aagcauuuuguuuuaagaauga

SEQ ID NO: 404828 - RNA, 22 nt, Human
uguccuuaaggagcuuaauguc

SEQ ID NO: 404829 - RNA, 22 nt, Human
uugaauaauaugcuucguucuc

SEQ ID NO: 404830 - RNA, 23 nt, Human
aguucacugagguugaccacugg

SEQ ID NO: 404831 - RNA, 22 nt, Human
aagccagauuucacucuuaauu

SEQ ID NO: 404832 - RNA, 22 nt, Human
gucauaaagcuuguugcauuua

SEQ ID NO: 404833 - RNA, 22 nt, Human
uaguccuuacuuacuagaauaa

SEQ ID NO: 404834 - RNA, 22 nt, Human
aauagaaaggaggggcucuugu

SEQ ID NO: 404835 - RNA, 22 nt, Human
ccauggcucuagagauugaaaa

SEQ ID NO: 404836 - RNA, 22 nt, Human
uguguaaaaucugauuaauacu

SEQ ID NO: 404837 - RNA, 22 nt, Human
aaugggauaauuguucauggga

SEQ ID NO: 404838 - RNA, 22 nt, Human
cagaauguagaucaucaucaag

SEQ ID NO: 404839 - RNA, 22 nt, Human
guuauaaaaugcacaguuguuu

SEQ ID NO: 404840 - RNA, 22 nt, Human
uggcauuuggcuuacuuauguu

SEQ ID NO: 404841 - RNA, 22 nt, Human
cugaauaaagcccucgcgcgcu

SEQ ID NO: 404842 - RNA, 22 nt, Human
uggcauuuucuccuuugaguuu

SEQ ID NO: 404843 - RNA, 22 nt, Human
gugugaaaguuccuaagacuau

SEQ ID NO: 404844 - RNA, 20 nt, Human
acuggaucuggcuggagcug

SEQ ID NO: 404845 - RNA, 22 nt, Human
uugauuaaucccaugugaguag

SEQ ID NO: 404846 - RNA, 18 nt, Human
agaugaaagcaaaugaca

SEQ ID NO: 404847 - RNA, 22 nt, Human
aauaaaauggucaguuuucuca

SEQ ID NO: 404848 - RNA, 22 nt, Human
auuucauacuaaggcucaaaaa

SEQ ID NO: 404849 - RNA, 23 nt, Human
cagaaaucugaaaucuagaaaug

SEQ ID NO: 404850 - RNA, 22 nt, Human
uuuauucuugagagugagaaga

SEQ ID NO: 404851 - RNA, 22 nt, Human
auacaaugaaguauagaugaaa

SEQ ID NO: 404852 - RNA, 22 nt, Human
aucagcaucuuuaacaauuacc

SEQ ID NO: 404853 - RNA, 22 nt, Human
cuuaaccagaaaaugcacuugu

SEQ ID NO: 404854 - RNA, 22 nt, Human
aaaucaguuagugguaggauug

SEQ ID NO: 404855 - RNA, 22 nt, Human
uuccuuaguuauuugguccccu

SEQ ID NO: 404856 - RNA, 22 nt, Human
ucacaccaguuuccuuucaauu

SEQ ID NO: 404857 - RNA, 22 nt, Human
acuauacauaaaacauuugggu

SEQ ID NO: 404858 - RNA, 22 nt, Human
auuucacaucuaucucagauuu

SEQ ID NO: 404859 - RNA, 22 nt, Human
uuacaaaguguuaugauaaaca

SEQ ID NO: 404860 - RNA, 22 nt, Human
auucuucacaaauauauagaag

SEQ ID NO: 404861 - RNA, 22 nt, Human
auucauaacggcaaaugucacc

SEQ ID NO: 404862 - RNA, 22 nt, Human
ggauuugaauuguugaaaugau

SEQ ID NO: 404863 - RNA, 22 nt, Human
agaauucauaggaaguuuccua

SEQ ID NO: 404864 - RNA, 22 nt, Human
gaguguucccacaccccaguug

SEQ ID NO: 404865 - RNA, 22 nt, Human
uaaagccauacugaaagccacu

SEQ ID NO: 404866 - RNA, 22 nt, Human
caacauuugaguaaagaaaugg

SEQ ID NO: 404867 - RNA, 22 nt, Human
agucaaaugaguaaauauauaa

SEQ ID NO: 404868 - RNA, 22 nt, Human
auuucaacacuuuuggaauuag

SEQ ID NO: 404869 - RNA, 21 nt, Human
aaauggauagggcaauggaag

SEQ ID NO: 404870 - RNA, 22 nt, Human
caguccuuaaggaaacauuugu

SEQ ID NO: 404871 - RNA, 22 nt, Human
uggcauuugcucccuuguguuc

SEQ ID NO: 404872 - RNA, 22 nt, Human
cagaauaaagguacaauugagu

SEQ ID NO: 404873 - RNA, 22 nt, Human
guuccaaagcaaaggaggugag

SEQ ID NO: 404874 - RNA, 22 nt, Human
auauaauacaaccugcuaagug

SEQ ID NO: 404875 - RNA, 22 nt, Human
gauuucaaaaguagauccauca

SEQ ID NO: 404876 - RNA, 22 nt, Human
gugaauaaucacccuucuggau

SEQ ID NO: 404877 - RNA, 22 nt, Human
cauuuacagcagacugaugaaa

SEQ ID NO: 404878 - RNA, 22 nt, Human
uuuuccaaaguaccaugucccu

SEQ ID NO: 404879 - RNA, 22 nt, Human
uuauagugggcccaacauggcg

SEQ ID NO: 404880 - RNA, 22 nt, Human
uagcaucuggagaaacaagucc

SEQ ID NO: 404881 - RNA, 22 nt, Human
aggauuuaccgucauuuagucu

SEQ ID NO: 404882 - RNA, 22 nt, Human
uuccaaacugccaauucagaag

SEQ ID NO: 404883 - RNA, 22 nt, Human
uuuauuauucucuggagaaugu

SEQ ID NO: 404884 - RNA, 22 nt, Human
auggcuuuguuccaauaaaacu

SEQ ID NO: 404885 - RNA, 22 nt, Human
acaugucuguaauuauuuuagg

SEQ ID NO: 404886 - RNA, 22 nt, Human
ccagauuugagcgucuuaaacc

SEQ ID NO: 404887 - RNA, 22 nt, Human
uucagaaagguaaauggauuuc

SEQ ID NO: 404888 - RNA, 22 nt, Human
uauaaagcugacucaugaaacu

SEQ ID NO: 404889 - RNA, 22 nt, Human
cauuuauauaaaauguccagaa

SEQ ID NO: 404890 - RNA, 22 nt, Human
uucaauaggaugcaugauauaa

SEQ ID NO: 404891 - RNA, 22 nt, Human
caucagaauagcucuguggaua

SEQ ID NO: 404892 - RNA, 22 nt, Human
uuggaucaaauuucaugcuguc

SEQ ID NO: 404893 - RNA, 22 nt, Human
cauauaauguuugaagaugugg

SEQ ID NO: 404894 - RNA, 22 nt, Human
ugaagaauaagauagauggagc

SEQ ID NO: 404895 - RNA, 22 nt, Human
ccauaauauuaaaugcuuuugu

SEQ ID NO: 404896 - RNA, 22 nt, Human
auuaaagacagcagauggaugg

SEQ ID NO: 404897 - RNA, 22 nt, Human
aacauuggauauuuauuaaaag

SEQ ID NO: 404898 - RNA, 22 nt, Human
auccaaaccuggacaugagugg

SEQ ID NO: 404899 - RNA, 22 nt, Human
aauuucaaagcucacuggcaua

SEQ ID NO: 404900 - RNA, 22 nt, Human
uaggaagaugaguaucaacuug

SEQ ID NO: 404901 - RNA, 22 nt, Human
ucaguucaguauacacuauucu

SEQ ID NO: 404902 - RNA, 22 nt, Human
caugcuuuucaaucuaucuuaa

SEQ ID NO: 404903 - RNA, 22 nt, Human
ugugaauaaugccgcaauaaac

SEQ ID NO: 404904 - RNA, 22 nt, Human
uuuacagagaauguacauaaag

SEQ ID NO: 404905 - RNA, 22 nt, Human
caugcuuuuuucuaguauaaau

SEQ ID NO: 404906 - RNA, 22 nt, Human
gugaauaaccuacuccaggccu

SEQ ID NO: 404907 - RNA, 22 nt, Human
cuuacagagaagaaaauguagu

SEQ ID NO: 404908 - RNA, 22 nt, Human
uaaagccaacacuuuacugcuc

SEQ ID NO: 404909 - RNA, 22 nt, Human
uuuauccagcagcuauucaaaa

SEQ ID NO: 404910 - RNA, 22 nt, Human
ucagagaagcugccaggcgagc

SEQ ID NO: 404911 - RNA, 22 nt, Human
uacauauacugagugauuugcu

SEQ ID NO: 404912 - RNA, 20 nt, Human
ucuuauacagaaaacauuuu

SEQ ID NO: 404913 - RNA, 22 nt, Human
acaauauuguacccagaaguuu

SEQ ID NO: 404914 - RNA, 22 nt, Human
aguguuuauauuauggaaauau

SEQ ID NO: 404915 - RNA, 22 nt, Human
gaauaaucaugaaauucaguga

SEQ ID NO: 404916 - RNA, 22 nt, Human
uaucagaacacauguuuugcag

SEQ ID NO: 404917 - RNA, 22 nt, Human
uaucagaaggaagugccuuuaa

SEQ ID NO: 404918 - RNA, 22 nt, Human
ugcagagaaaguguagacaggc

SEQ ID NO: 404919 - RNA, 22 nt, Human
guucuaauaggagaaaagacag

SEQ ID NO: 404920 - RNA, 22 nt, Human
uaauuacagguccaaaacaauc

SEQ ID NO: 404921 - RNA, 21 nt, Human
uaucagaagagaaagaaugau

SEQ ID NO: 404922 - RNA, 19 nt, Human
aaaauugcguauuuugagg

SEQ ID NO: 404923 - RNA, 22 nt, Human
ugugaaaagcguguguucuagg

SEQ ID NO: 404924 - RNA, 22 nt, Human
uucagaaaaagaccauugcaau

SEQ ID NO: 404925 - RNA, 22 nt, Human
uacaagaaugucuuaaaagcuc

SEQ ID NO: 404926 - RNA, 22 nt, Human
gaacuuuaccauuuagguaacu

SEQ ID NO: 404927 - RNA, 22 nt, Human
agaacaucuaaauaucugagac

SEQ ID NO: 404928 - RNA, 22 nt, Human
auccuuagaagggagugaggac

SEQ ID NO: 404929 - RNA, 22 nt, Human
auauaacauacauacagaaaag

SEQ ID NO: 404930 - RNA, 22 nt, Human
aauacauguuuucuacuauucu

SEQ ID NO: 404931 - RNA, 22 nt, Human
uaucagaacacagccacagcca

SEQ ID NO: 404932 - RNA, 22 nt, Human
gagaagguggaccugaaggagc

SEQ ID NO: 404933 - RNA, 22 nt, Human
ugcaggaacauagguuccuugg

SEQ ID NO: 404934 - RNA, 22 nt, Human
cuuugaauugccguuucaucug

SEQ ID NO: 404935 - RNA, 22 nt, Human
augguuuuccucugcugcuuaa

SEQ ID NO: 404936 - RNA, 22 nt, Human
gauaaaauaacuauggaauacu

SEQ ID NO: 404937 - RNA, 22 nt, Human
gaguccuuuguuccuugccaca

SEQ ID NO: 404938 - RNA, 22 nt, Human
aaacaugaauagauauuaaaca

SEQ ID NO: 404939 - RNA, 22 nt, Human
aaguccuuguauacagaaucaa

SEQ ID NO: 404940 - RNA, 22 nt, Human
agaaacauccugcuuuccauuu

SEQ ID NO: 404941 - RNA, 20 nt, Human
aaguuacauuguauuguacc

SEQ ID NO: 404942 - RNA, 22 nt, Human
auuaggcauucugaaugagguc

SEQ ID NO: 404943 - RNA, 22 nt, Human
aaaguccuugcaguuuccucuu

SEQ ID NO: 404944 - RNA, 22 nt, Human
aauacagaggggucacaauuca

SEQ ID NO: 404945 - RNA, 22 nt, Human
gaauuucauugcucugcugugu

SEQ ID NO: 404946 - RNA, 23 nt, Human
cuuucauugugguuucacagagc

SEQ ID NO: 404947 - RNA, 22 nt, Human
augcacaagcaagagauaaugg

SEQ ID NO: 404948 - RNA, 22 nt, Human
caaauucaaugaacauguuuaa

SEQ ID NO: 404949 - RNA, 22 nt, Human
auguuaaauaaucccuuaaagc

SEQ ID NO: 404950 - RNA, 22 nt, Human
aaggacagggaugguugauugu

SEQ ID NO: 404951 - RNA, 22 nt, Human
gauuucaauccagcuuucuucu

SEQ ID NO: 404952 - RNA, 22 nt, Human
cuuaauuuaaaauaguucaggc

SEQ ID NO: 404953 - RNA, 22 nt, Human
gaaugaaaaccuuggcucaaau

SEQ ID NO: 404954 - RNA, 22 nt, Human
cuuaggcauccaggguucuucc

SEQ ID NO: 404955 - RNA, 22 nt, Human
ugaauagauuuuuaacauauaa

SEQ ID NO: 404956 - RNA, 22 nt, Human
uuccuuagggucagccagaucu

SEQ ID NO: 404957 - RNA, 22 nt, Human
caguccuugcucaaagucuaca

SEQ ID NO: 404958 - RNA, 22 nt, Human
cacaaagucugcagcugcugua

SEQ ID NO: 404959 - RNA, 22 nt, Human
ucaaacaggacuacauucucau

SEQ ID NO: 404960 - RNA, 22 nt, Human
auauuuaaacaggguaccaaua

SEQ ID NO: 404961 - RNA, 22 nt, Human
uguggaaaauuggaacguuccu

SEQ ID NO: 404962 - RNA, 18 nt, Human
auacaagaucaaguguuc

SEQ ID NO: 404963 - RNA, 22 nt, Human
augguuuaguuagggcuuuuca

SEQ ID NO: 404964 - RNA, 22 nt, Human
auaaaaucagaguuggauugga

SEQ ID NO: 404965 - RNA, 22 nt, Human
caacuuugugugaccuagauag

SEQ ID NO: 404966 - RNA, 22 nt, Human
ucacagaacaauguuuaguucu

SEQ ID NO: 404967 - RNA, 22 nt, Human
auaauucaugggccuuucaccu

SEQ ID NO: 404968 - RNA, 22 nt, Human
aacagacaacuccuguggcuca

SEQ ID NO: 404969 - RNA, 22 nt, Human
uaggcaacaugucgaauacugu

SEQ ID NO: 404970 - RNA, 22 nt, Human
aagacagugaucucugagagau

SEQ ID NO: 404971 - RNA, 22 nt, Human
gauuuauaaagguugcacugga

SEQ ID NO: 404972 - RNA, 22 nt, Human
guaaacaucagccacucuauuu

SEQ ID NO: 404973 - RNA, 22 nt, Human
uacuuguagcagguggcauuua

SEQ ID NO: 404974 - RNA, 22 nt, Human
uccaaaaaacguuugaauaguu

SEQ ID NO: 404975 - RNA, 22 nt, Human
ggauuuccucuugacucuaaag

SEQ ID NO: 404976 - RNA, 22 nt, Human
acuuuaucaggaaucacacagc

SEQ ID NO: 404977 - RNA, 22 nt, Human
aggauuuaccuccagcuaggcu

SEQ ID NO: 404978 - RNA, 22 nt, Human
guuaggcauuugccuuaauuuu

SEQ ID NO: 404979 - RNA, 22 nt, Human
cagaaagcuuaggcaaguugga

SEQ ID NO: 404980 - RNA, 22 nt, Human
acacaauacagggcucaaaaua

SEQ ID NO: 404981 - RNA, 17 nt, Human
uccauacaauucucucu

SEQ ID NO: 404982 - RNA, 22 nt, Human
auugaaaauaaggccagaaaca

SEQ ID NO: 404983 - RNA, 22 nt, Human
uaguccuugcugggcacagagu

SEQ ID NO: 404984 - RNA, 22 nt, Human
uagcagaaacuguuacagaagg

SEQ ID NO: 404985 - RNA, 22 nt, Human
auguuucaccagcaaauuaccu

SEQ ID NO: 404986 - RNA, 22 nt, Human
gauggcuucagucuccuugggu

SEQ ID NO: 404987 - RNA, 22 nt, Human
gcauaauauacaugcuugaucc

SEQ ID NO: 404988 - RNA, 22 nt, Human
cagaaucagcccuugcuauuaa

SEQ ID NO: 404989 - RNA, 22 nt, Human
uccuggauaucaaacaaacauu

SEQ ID NO: 404990 - RNA, 22 nt, Human
uucaccacagucucaucuacgc

SEQ ID NO: 404991 - RNA, 22 nt, Human
auggcuuucagauuucuauguu

SEQ ID NO: 404992 - RNA, 22 nt, Human
caaguccuuuucuuggcucagg

SEQ ID NO: 404993 - RNA, 22 nt, Human
acuggaucuaauugguuauagu

SEQ ID NO: 404994 - RNA, 22 nt, Human
ucagaauuugauuccugggaua

SEQ ID NO: 404995 - RNA, 22 nt, Human
agaugaaaagauaagcagcaau

SEQ ID NO: 404996 - RNA, 22 nt, Human
auuauaaaccuuugaggguggg

SEQ ID NO: 404997 - RNA, 22 nt, Human
aauuucaaguggcaucuuugau

SEQ ID NO: 404998 - RNA, 22 nt, Human
gguacaauucugggguaugcuc

SEQ ID NO: 404999 - RNA, 22 nt, Human
gaucagaaugggacauauccug

SEQ ID NO: 405000 - RNA, 22 nt, Human
cuuccaaaauuuauauguugaa

SEQ ID NO: 405001 - RNA, 22 nt, Human
aagaaaucauaucauuucuugg

SEQ ID NO: 405002 - RNA, 22 nt, Human
gcuuaauucuggcucaguuucc

SEQ ID NO: 405003 - RNA, 22 nt, Human
caguccuuggcuucauccgagu

SEQ ID NO: 405004 - RNA, 22 nt, Human
auauacaguuuuacaggguuuc

SEQ ID NO: 405005 - RNA, 22 nt, Human
uuaaaauuauggcccauuugga

SEQ ID NO: 405006 - RNA, 22 nt, Human
acuauacaccaaaauauuaagg

SEQ ID NO: 405007 - RNA, 22 nt, Human
auaaaauuugcuacuguuaaau

SEQ ID NO: 405008 - RNA, 22 nt, Human
auuuccagacuuuuuccaggaa

SEQ ID NO: 405009 - RNA, 22 nt, Human
aauucuaaauguaauuuagaau

SEQ ID NO: 405010 - RNA, 18 nt, Human
uaagucauuuugccagca

SEQ ID NO: 405011 - RNA, 22 nt, Human
auaauaaaccaggaugggucug

SEQ ID NO: 405012 - RNA, 22 nt, Human
acagaacugggggcacagauag

SEQ ID NO: 405013 - RNA, 22 nt, Human
aaaagccaugcauaccuaagag

SEQ ID NO: 405014 - RNA, 22 nt, Human
uagucaccuguugugugaugcc

SEQ ID NO: 405015 - RNA, 22 nt, Human
uugguacagaugagguauucuc

SEQ ID NO: 405016 - RNA, 23 nt, Human
aggauuuaaaggcaaugcauuuu

SEQ ID NO: 405017 - RNA, 22 nt, Human
auaucagaaauaguaagcagag

SEQ ID NO: 405018 - RNA, 22 nt, Human
uugaauaauauguucaggagga

SEQ ID NO: 405019 - RNA, 22 nt, Human
ucaauaaaucccucugacccug

SEQ ID NO: 405020 - RNA, 22 nt, Human
gauagaaagguguugaaaucca

SEQ ID NO: 405021 - RNA, 20 nt, Human
agaaaucagaccacacacua

SEQ ID NO: 405022 - RNA, 22 nt, Human
cuacagaauucaacaaaugguu

SEQ ID NO: 405023 - RNA, 22 nt, Human
agcucacaguguccuuccucaa

SEQ ID NO: 405024 - RNA, 22 nt, Human
ugaaaauggccugaagaagcaa

SEQ ID NO: 405025 - RNA, 22 nt, Human
ucacagaagagauauugacaga

SEQ ID NO: 405026 - RNA, 18 nt, Human
gcaggcuuuuccuggguc

SEQ ID NO: 405027 - RNA, 22 nt, Human
augaaaauucuaugcaggccag

SEQ ID NO: 405028 - RNA, 22 nt, Human
gcaacuuucaagcaccaugggg

SEQ ID NO: 405029 - RNA, 20 nt, Human
gaaguccuguuauauccuuu

SEQ ID NO: 405030 - RNA, 22 nt, Human
uauuuaucgagugucuacuaug

SEQ ID NO: 405031 - RNA, 22 nt, Human
auguucaaacaaguuaaugcca

SEQ ID NO: 405032 - RNA, 22 nt, Human
uaucagaaacucuggggcaggg

SEQ ID NO: 405033 - RNA, 22 nt, Human
caaguccuaaauguauuuguug

SEQ ID NO: 405034 - RNA, 22 nt, Human
aguccuuaugugguggagagag

SEQ ID NO: 405035 - RNA, 22 nt, Human
aaauuucaguuggaaugagcuc

SEQ ID NO: 405036 - RNA, 22 nt, Human
acaacuuuagucuggagggaaa

SEQ ID NO: 405037 - RNA, 22 nt, Human
aauguuaauuuacugucuucau

SEQ ID NO: 405038 - RNA, 22 nt, Human
caguucacacugugcuaucugc

SEQ ID NO: 405039 - RNA, 22 nt, Human
aauaacuggcacauaucacaua

SEQ ID NO: 405040 - RNA, 22 nt, Human
ucagaaaugaucguuauucauu

SEQ ID NO: 405041 - RNA, 22 nt, Human
uuacagaaaagggcuuuaagag

SEQ ID NO: 405042 - RNA, 22 nt, Human
cuuauaaaguccaucugaacaa

SEQ ID NO: 405043 - RNA, 22 nt, Human
guuccaaagucucugagcugag

SEQ ID NO: 405044 - RNA, 20 nt, Human
acaauacagguugugucuga

SEQ ID NO: 405045 - RNA, 22 nt, Human
ccagaauucagaaagggcauaa

SEQ ID NO: 405046 - RNA, 21 nt, Human
uucaaagacuugaugcugacc

SEQ ID NO: 405047 - RNA, 22 nt, Human
uuauacaguuuauacuuagaau

SEQ ID NO: 405048 - RNA, 22 nt, Human
cauuucaaugccuucaacauag

SEQ ID NO: 405049 - RNA, 19 nt, Human
ugcuuaauuccuaguaggu

SEQ ID NO: 405050 - RNA, 22 nt, Human
gaucagaauuuacuuauaauug

SEQ ID NO: 405051 - RNA, 22 nt, Human
acuucacagaaauuuuaugagg

SEQ ID NO: 405052 - RNA, 22 nt, Human
gcugcaggcauuuuccugggca

SEQ ID NO: 405053 - RNA, 22 nt, Human
ccuggaucuaaggaagcuggga

SEQ ID NO: 405054 - RNA, 22 nt, Human
gaaagccagagagaaagggcuc

SEQ ID NO: 405055 - RNA, 22 nt, Human
agacugaauaacaagcaaauaa

SEQ ID NO: 405056 - RNA, 20 nt, Human
auaggaaagggaggggcuuu

SEQ ID NO: 405057 - RNA, 22 nt, Human
gagcccagcuugcacauggagc

SEQ ID NO: 405058 - RNA, 22 nt, Human
cauuuacaauguacagguugug

SEQ ID NO: 405059 - RNA, 22 nt, Human
ucaacuuuaguguagcuauuua

SEQ ID NO: 405060 - RNA, 22 nt, Human
ccagauaaggcuuuuuaaaagc

SEQ ID NO: 405061 - RNA, 22 nt, Human
aauguuuuaaaagagauugaga

SEQ ID NO: 405062 - RNA, 22 nt, Human
uuugaaguguuauuucuaucac

SEQ ID NO: 405063 - RNA, 22 nt, Human
auggcuuaugguaaauauuucu

SEQ ID NO: 405064 - RNA, 22 nt, Human
uacacagaggcugaugucuuag

SEQ ID NO: 405065 - RNA, 22 nt, Human
cuggaagagcauuugcauaggg

SEQ ID NO: 405066 - RNA, 22 nt, Human
ugcuuuaagagauuguuaguac

SEQ ID NO: 405067 - RNA, 22 nt, Human
aguuacagugaccauuuauuua

SEQ ID NO: 405068 - RNA, 22 nt, Human
cauuuaguuauacuaaaacauu

SEQ ID NO: 405069 - RNA, 22 nt, Human
uuacuacugcuuuacuacuggg

SEQ ID NO: 405070 - RNA, 22 nt, Human
agagaauuggagcagugacagg

SEQ ID NO: 405071 - RNA, 21 nt, Human
aaagaaucauggguaauuuca

SEQ ID NO: 405072 - RNA, 22 nt, Human
ugugaauaccuugaauucauca

SEQ ID NO: 405073 - RNA, 22 nt, Human
uaugcuguggaaaauacaaaga

SEQ ID NO: 405074 - RNA, 22 nt, Human
acagaauugaaaguauaaucug

SEQ ID NO: 405075 - RNA, 22 nt, Human
aauaacagauuuucaagcugug

SEQ ID NO: 405076 - RNA, 22 nt, Human
ggccuuuaagcaauugaaaaga

SEQ ID NO: 405077 - RNA, 22 nt, Human
ucaguuucuucaucucccuaac

SEQ ID NO: 405078 - RNA, 22 nt, Human
cauggcuucuaagugauaacgu

SEQ ID NO: 405079 - RNA, 22 nt, Human
agauuggaucaagcagcaguug

SEQ ID NO: 405080 - RNA, 22 nt, Human
aguuauccgaaggcacugagau

SEQ ID NO: 405081 - RNA, 22 nt, Human
cacaagaaauaagcugccuuuc

SEQ ID NO: 405082 - RNA, 22 nt, Human
agcauuuauuucuuagaaauug

SEQ ID NO: 405083 - RNA, 22 nt, Human
auaaaacuuggguaugaucccu

SEQ ID NO: 405084 - RNA, 22 nt, Human
ucagccaggccaggcauucaca

SEQ ID NO: 405085 - RNA, 22 nt, Human
aauaauaagauacuaagggagu

SEQ ID NO: 405086 - RNA, 22 nt, Human
gcuauacaaguguagaauagag

SEQ ID NO: 405087 - RNA, 22 nt, Human
uaauccaaaacugaaucugugg

SEQ ID NO: 405088 - RNA, 22 nt, Human
augguuuugaagggaggucaaa

SEQ ID NO: 405089 - RNA, 19 nt, Human
uuccaaaaucaggauuuga

SEQ ID NO: 405090 - RNA, 22 nt, Human
aagucacaagcauauaugcauu

SEQ ID NO: 405091 - RNA, 22 nt, Human
ccagaucuucuuuucagugucu

SEQ ID NO: 405092 - RNA, 22 nt, Human
gcaggcuccaaggccugggaga

SEQ ID NO: 405093 - RNA, 22 nt, Human
caauuucaaugaggccacaggg

SEQ ID NO: 405094 - RNA, 22 nt, Human
aauuaauggaaaguaaggaagg

SEQ ID NO: 405095 - RNA, 22 nt, Human
ucaaaaguuucacauagagaua

SEQ ID NO: 405096 - RNA, 22 nt, Human
gccuaauaacuagcuguguaac

SEQ ID NO: 405097 - RNA, 22 nt, Human
uucagaaacccauugggucucu

SEQ ID NO: 405098 - RNA, 22 nt, Human
gaaauagacacuuucuaugaau

SEQ ID NO: 405099 - RNA, 22 nt, Human
cagaucuagagcuuuuccaucu

SEQ ID NO: 405100 - RNA, 18 nt, Human
cuggcuuucuuauccauc

SEQ ID NO: 405101 - RNA, 22 nt, Human
acaucagauuaugcuuugcuua

SEQ ID NO: 405102 - RNA, 22 nt, Human
uauauacuuucuuccuggguag

SEQ ID NO: 405103 - RNA, 22 nt, Human
cagauuucuauuucaaauacau

SEQ ID NO: 405104 - RNA, 22 nt, Human
aaugguuugauggacaaaauga

SEQ ID NO: 405105 - RNA, 19 nt, Human
ugcugaaguugucagucug

SEQ ID NO: 405106 - RNA, 22 nt, Human
uuuccauauuuaaucaaaauaa

SEQ ID NO: 405107 - RNA, 23 nt, Human
uggaauaauaagguacauuaaca

SEQ ID NO: 405108 - RNA, 22 nt, Human
guauagaaacccagaaagauag

SEQ ID NO: 405109 - RNA, 22 nt, Human
uauacagucuuuugcuauauuc

SEQ ID NO: 405110 - RNA, 23 nt, Human
uauggcuuacagugcuuuaggua

SEQ ID NO: 405111 - RNA, 23 nt, Human
uguaacaauuucauauacaugca

SEQ ID NO: 405112 - RNA, 22 nt, Human
aguaaacauuucagauuuauuu

SEQ ID NO: 405113 - RNA, 22 nt, Human
ucaauaaaauuguuuuccuauc

SEQ ID NO: 405114 - RNA, 22 nt, Human
augaacaauaaaauagaucaca

SEQ ID NO: 405115 - RNA, 22 nt, Human
uggcaauuuuaggugguuuagu

SEQ ID NO: 405116 - RNA, 22 nt, Human
auaucagacagaaagcauugac

SEQ ID NO: 405117 - RNA, 22 nt, Human
aucuaacagcaacaccagaaua

SEQ ID NO: 405118 - RNA, 22 nt, Human
ugcuuuaacauaagauaucuuu

SEQ ID NO: 405119 - RNA, 22 nt, Human
uaaagaucuuaggaagauuuuc

SEQ ID NO: 405120 - RNA, 22 nt, Human
caugcuuauucauucugcuaac

SEQ ID NO: 405121 - RNA, 21 nt, Human
uuuuauugaugaauggccacu

SEQ ID NO: 405122 - RNA, 22 nt, Human
uacugaaaguggucaacagugg

SEQ ID NO: 405123 - RNA, 22 nt, Human
aaucagaacgcucgaucuucgg

SEQ ID NO: 405124 - RNA, 22 nt, Human
auaaagcaaauaggacuauugc

SEQ ID NO: 405125 - RNA, 22 nt, Human
uaagaaucggucgcaacagagg

SEQ ID NO: 405126 - RNA, 22 nt, Human
uucauuugccaucaguguaaug

SEQ ID NO: 405127 - RNA, 22 nt, Human
caggccagguggcaggcaaaac

SEQ ID NO: 405128 - RNA, 22 nt, Human
aagauauacuauuaaguaccau

SEQ ID NO: 405129 - RNA, 22 nt, Human
gcuuuaaugaagucacgcaaag

SEQ ID NO: 405130 - RNA, 20 nt, Human
aacacacugguggcaucagg

SEQ ID NO: 405131 - RNA, 22 nt, Human
aauaaugucuuuggcuugacca

SEQ ID NO: 405132 - RNA, 22 nt, Human
acaugcuuuucccacaauuaua

SEQ ID NO: 405133 - RNA, 22 nt, Human
uaugcugugcuagauacaauau

SEQ ID NO: 405134 - RNA, 22 nt, Human
ccauggcucuuaccuuguuaua

SEQ ID NO: 405135 - RNA, 22 nt, Human
ccaguuuaagacuuaucucaau

SEQ ID NO: 405136 - RNA, 22 nt, Human
uguaaauaguuagcuugccucu

SEQ ID NO: 405137 - RNA, 22 nt, Human
ucagagaaaugaaguagggauu

SEQ ID NO: 405138 - RNA, 22 nt, Human
uuuccaaaggaggaaccaguuu

SEQ ID NO: 405139 - RNA, 22 nt, Human
cucuacucuuaacacagcuagg

SEQ ID NO: 405140 - RNA, 22 nt, Human
augaauaaaacauuuuaaucag

SEQ ID NO: 405141 - RNA, 22 nt, Human
caauuucagaccuuuccuugga

SEQ ID NO: 405142 - RNA, 22 nt, Human
caguaaauuugagggaucuaau

SEQ ID NO: 405143 - RNA, 22 nt, Human
aaagucauuuuccagaccagua

SEQ ID NO: 405144 - RNA, 22 nt, Human
ucugaagauuaccagcuaaaug

SEQ ID NO: 405145 - RNA, 22 nt, Human
gaaauauacauugcaggaagag

SEQ ID NO: 405146 - RNA, 22 nt, Human
agccagucggggccaugcuggg

SEQ ID NO: 405147 - RNA, 22 nt, Human
ggauucuaacugaacagaauau

SEQ ID NO: 405148 - RNA, 22 nt, Human
uguacaauguggccaguguuaa

SEQ ID NO: 405149 - RNA, 22 nt, Human
auaaacucaugccaagaaauga

SEQ ID NO: 405150 - RNA, 18 nt, Human
gaaagccaugcagcagug

SEQ ID NO: 405151 - RNA, 22 nt, Human
acagaauuuacacaucucuaaa

SEQ ID NO: 405152 - RNA, 22 nt, Human
uuucacacaacgugaauauacu

SEQ ID NO: 405153 - RNA, 22 nt, Human
acuuauuagcugugugaccuug

SEQ ID NO: 405154 - RNA, 22 nt, Human
uucuuuuacauuaagauuucag

SEQ ID NO: 405155 - RNA, 22 nt, Human
ggcauuuagagggcuuuucuga

SEQ ID NO: 405156 - RNA, 22 nt, Human
uaggauuuaggcuuuaacaucu

SEQ ID NO: 405157 - RNA, 22 nt, Human
acagauuuuugguaaauaauuu

SEQ ID NO: 405158 - RNA, 22 nt, Human
ugauauuuaagcaaaaauaugg

SEQ ID NO: 405159 - RNA, 22 nt, Human
aaaggcaugauuaauucugugu

SEQ ID NO: 405160 - RNA, 22 nt, Human
acauaaguuauggauaaaaugu

SEQ ID NO: 405161 - RNA, 22 nt, Human
auguuacacauaggcauaaaug

SEQ ID NO: 405162 - RNA, 22 nt, Human
uugaucaucuaagaguaauagu

SEQ ID NO: 405163 - RNA, 22 nt, Human
uauuacaauuuacauugcacuu

SEQ ID NO: 405164 - RNA, 22 nt, Human
aggauuuauuacaagccauggu

SEQ ID NO: 405165 - RNA, 22 nt, Human
auagaauucguguuuguaauuc

SEQ ID NO: 405166 - RNA, 22 nt, Human
ucuuuaauauaaaggaaugaau

SEQ ID NO: 405167 - RNA, 22 nt, Human
cuuaggcagggcuggaagaucu

SEQ ID NO: 405168 - RNA, 22 nt, Human
augcuuaauacacuguuaaagg

SEQ ID NO: 405169 - RNA, 22 nt, Human
caucagaauguuauggggggcu

SEQ ID NO: 405170 - RNA, 22 nt, Human
augcaaaauaaggcagaaacau

SEQ ID NO: 405171 - RNA, 22 nt, Human
auaaacaguagagaaagguggu

SEQ ID NO: 405172 - RNA, 22 nt, Human
uacuauaccauguaagauauga

SEQ ID NO: 405173 - RNA, 22 nt, Human
gagacaggauuuaaccaaagcu

SEQ ID NO: 405174 - RNA, 22 nt, Human
ugaaacaaauuuggaaaaucua

SEQ ID NO: 405175 - RNA, 22 nt, Human
cuuaggcaagcagagcccaucc

SEQ ID NO: 405176 - RNA, 22 nt, Human
uuacagaaaggaaggacugacu

SEQ ID NO: 405177 - RNA, 22 nt, Human
ugaaauagacacagugcuauac

SEQ ID NO: 405178 - RNA, 22 nt, Human
aguaaaauuucugcugaggaga

SEQ ID NO: 405179 - RNA, 22 nt, Human
ugcagagagauauggcaagagg

SEQ ID NO: 405180 - RNA, 22 nt, Human
aaaugcuuguaaauuuuccaug

SEQ ID NO: 405181 - RNA, 22 nt, Human
cuaaagaagcuagcaaucuaua

SEQ ID NO: 405182 - RNA, 23 nt, Human
uaagaacagacaagcauuuacau

SEQ ID NO: 405183 - RNA, 22 nt, Human
ccagaucuaaguccaaaguacu

SEQ ID NO: 405184 - RNA, 22 nt, Human
acaugcuuugauguauuuugca

SEQ ID NO: 405185 - RNA, 22 nt, Human
gcaacuuuagaaaaaucuauaa

SEQ ID NO: 405186 - RNA, 22 nt, Human
uuuagaaugugacuguauuuga

SEQ ID NO: 405187 - RNA, 22 nt, Human
aucauaaagugcuaucugauug

SEQ ID NO: 405188 - RNA, 22 nt, Human
auaacaugaccugugcuucaca

SEQ ID NO: 405189 - RNA, 22 nt, Human
aaaugcuuauuagugucacaaa

SEQ ID NO: 405190 - RNA, 22 nt, Human
auacagaacaagccucaccucc

SEQ ID NO: 405191 - RNA, 22 nt, Human
guuccaaacaagucauaaagua

SEQ ID NO: 405192 - RNA, 22 nt, Human
uuaauuacuaagcacaaugcaa

SEQ ID NO: 405193 - RNA, 22 nt, Human
ucaacuuugaaaccauagugaa

SEQ ID NO: 405194 - RNA, 22 nt, Human
acaugcuucauauuauaaccaa

SEQ ID NO: 405195 - RNA, 22 nt, Human
uauggcuugucuuuauaccagg

SEQ ID NO: 405196 - RNA, 22 nt, Human
guuaggcaguuuucuucauucu

SEQ ID NO: 405197 - RNA, 18 nt, Human
auagaaaccuuuaaucag

SEQ ID NO: 405198 - RNA, 22 nt, Human
uaaguccuggcugguuugaagc

SEQ ID NO: 405199 - RNA, 22 nt, Human
gauuuccauuuucaacuccugc

SEQ ID NO: 405200 - RNA, 22 nt, Human
caaguccucaaagggcucugcu

SEQ ID NO: 405201 - RNA, 19 nt, Human
ucucuacacuacauuucua

SEQ ID NO: 405202 - RNA, 22 nt, Human
uaauuucacaguucaacgcaca

SEQ ID NO: 405203 - RNA, 22 nt, Human
ucagaaauacaaaacacuuacu

SEQ ID NO: 405204 - RNA, 22 nt, Human
uacuuaaugccacugaauugua

SEQ ID NO: 405205 - RNA, 22 nt, Human
ucaauacauacaauguauagug

SEQ ID NO: 405206 - RNA, 22 nt, Human
uccaauauggauaaaaggggcc

SEQ ID NO: 405207 - RNA, 22 nt, Human
gaguccuuuucauagcaguggg

SEQ ID NO: 405208 - RNA, 22 nt, Human
gcagagaacccagcagauuggc

SEQ ID NO: 405209 - RNA, 22 nt, Human
caauuucagugcuguggagagg

SEQ ID NO: 405210 - RNA, 23 nt, Human
aagucaccaagaggaaggcggag

SEQ ID NO: 405211 - RNA, 22 nt, Human
guaggaaaguaaaugaaauaca

SEQ ID NO: 405212 - RNA, 22 nt, Human
aauguuaauguguuugcuuaug

SEQ ID NO: 405213 - RNA, 22 nt, Human
ucuucaauuuagaauggauuua

SEQ ID NO: 405214 - RNA, 22 nt, Human
uuuucauuuuuguagaugcaag

SEQ ID NO: 405215 - RNA, 22 nt, Human
gauuucaaguaucuugggcgag

SEQ ID NO: 405216 - RNA, 22 nt, Human
uaugcccagcuuaaaguacaca

SEQ ID NO: 405217 - RNA, 22 nt, Human
aaaucagucccucuuggaauuu

SEQ ID NO: 405218 - RNA, 22 nt, Human
uguccuuagggauauaaaauau

SEQ ID NO: 405219 - RNA, 22 nt, Human
auuuagaagcuaauuuuucaga

SEQ ID NO: 405220 - RNA, 22 nt, Human
uaaaaugacuuccuccaacauc

SEQ ID NO: 405221 - RNA, 22 nt, Human
uuuaggcauugggugcucaagu

SEQ ID NO: 405222 - RNA, 22 nt, Human
aucugacuucacgcccaugcca

SEQ ID NO: 405223 - RNA, 22 nt, Human
uacaagaaauuucugcauauau

SEQ ID NO: 405224 - RNA, 22 nt, Human
auuuagcaaaaaaugaugaagc

SEQ ID NO: 405225 - RNA, 22 nt, Human
caucagaaagaguccuggacuu

SEQ ID NO: 405226 - RNA, 22 nt, Human
uaccaaaaccaagccauuaucu

SEQ ID NO: 405227 - RNA, 22 nt, Human
aaguccauucuuccagccagcu

SEQ ID NO: 405228 - RNA, 22 nt, Human
ucauaaaguuacccaaauuuua

SEQ ID NO: 405229 - RNA, 20 nt, Human
uucuauacauaucacugaaa

SEQ ID NO: 405230 - RNA, 22 nt, Human
ccuucaaucagcagucuagcuu

SEQ ID NO: 405231 - RNA, 22 nt, Human
cuaucaaacagccauuaauaua

SEQ ID NO: 405232 - RNA, 22 nt, Human
uagcaucuguucuuucauuaaa

SEQ ID NO: 405233 - RNA, 22 nt, Human
augaaaauguacauguguauaa

SEQ ID NO: 405234 - RNA, 22 nt, Human
gcacaauaacagccaagguuau

SEQ ID NO: 405235 - RNA, 22 nt, Human
ccguagcacaugcuccuggggc

SEQ ID NO: 405236 - RNA, 22 nt, Human
gagucaccacugugauagucga

SEQ ID NO: 405237 - RNA, 22 nt, Human
caguaaauuaucucaucucugu

SEQ ID NO: 405238 - RNA, 22 nt, Human
aaacugugcuucccaaaugccc

SEQ ID NO: 405239 - RNA, 22 nt, Human
ugucaccacuggcugaaacacc

SEQ ID NO: 405240 - RNA, 19 nt, Human
augcuuuauguuauuucuu

SEQ ID NO: 405241 - RNA, 22 nt, Human
ucucuuaacugguucagcaauu

SEQ ID NO: 405242 - RNA, 22 nt, Human
acaaaauuaugaagaggccuug

SEQ ID NO: 405243 - RNA, 22 nt, Human
auauacaaagggcaaccucgcu

SEQ ID NO: 405244 - RNA, 22 nt, Human
uugauccaguugaaagugauga

SEQ ID NO: 405245 - RNA, 22 nt, Human
uaaagucaucuuuacaucuuug

SEQ ID NO: 405246 - RNA, 22 nt, Human
aagaaaucagaaaagcauucgu

SEQ ID NO: 405247 - RNA, 20 nt, Human
aauaaacuacugagagaugu

SEQ ID NO: 405248 - RNA, 22 nt, Human
gagauuuagcugcuuaacuccu

SEQ ID NO: 405249 - RNA, 22 nt, Human
guuaaagaagaauaguuccuuu

SEQ ID NO: 405250 - RNA, 22 nt, Human
aaucagaauuuauugaaucuuu

SEQ ID NO: 405251 - RNA, 22 nt, Human
uaaagacacugguuuuaaucau

SEQ ID NO: 405252 - RNA, 22 nt, Human
uuccaaaccucaaauaauuaau

SEQ ID NO: 405253 - RNA, 22 nt, Human
ucuuuaaugugauuguaauuau

SEQ ID NO: 405254 - RNA, 22 nt, Human
uugaagaaauuauuuuauauag

SEQ ID NO: 405255 - RNA, 22 nt, Human
acaacuuuaauggguuucagcu

SEQ ID NO: 405256 - RNA, 22 nt, Human
aaaguccuagcgauccacagaa

SEQ ID NO: 405257 - RNA, 22 nt, Human
aucuaaacagguguucuuuaga

SEQ ID NO: 405258 - RNA, 22 nt, Human
gaagaauccaugcuaauuuacc

SEQ ID NO: 405259 - RNA, 22 nt, Human
aggauuuacaaugauucuaggu

SEQ ID NO: 405260 - RNA, 23 nt, Human
uucaaaacuggaaaaucagaugc

SEQ ID NO: 405261 - RNA, 22 nt, Human
uuucauaauacuguacaugaaa

SEQ ID NO: 405262 - RNA, 22 nt, Human
agaauuucuggaagauugcaag

SEQ ID NO: 405263 - RNA, 22 nt, Human
acagaaauaacuuuuuauguuu

SEQ ID NO: 405264 - RNA, 22 nt, Human
ucagccuacacuccaacagcau

SEQ ID NO: 405265 - RNA, 22 nt, Human
uuuaggcaagggcaagauuauc

SEQ ID NO: 405266 - RNA, 22 nt, Human
caguccuuagauuuuacugcca

SEQ ID NO: 405267 - RNA, 22 nt, Human
uuaggaaaggguuuucuaacag

SEQ ID NO: 405268 - RNA, 22 nt, Human
auaaagucuaccguauuaaaga

SEQ ID NO: 405269 - RNA, 22 nt, Human
aaucagaacuucucaggguggg

SEQ ID NO: 405270 - RNA, 22 nt, Human
aaggcauaggacaaaucaguga

SEQ ID NO: 405271 - RNA, 22 nt, Human
acuauaaccuguuagaauagau

SEQ ID NO: 405272 - RNA, 22 nt, Human
agucauaaagccagugggaggc

SEQ ID NO: 405273 - RNA, 22 nt, Human
uguucacaagaugucuguggcu

SEQ ID NO: 405274 - RNA, 22 nt, Human
agaaaagaggcuuucuaagcau

SEQ ID NO: 405275 - RNA, 22 nt, Human
aaauuccagaaacucaguauau

SEQ ID NO: 405276 - RNA, 23 nt, Human
uagaauucaaucuguuccacauc

SEQ ID NO: 405277 - RNA, 22 nt, Human
caagauuugccaguggccaacu

SEQ ID NO: 405278 - RNA, 22 nt, Human
cuaauuauguuguuauaaucaa

SEQ ID NO: 405279 - RNA, 22 nt, Human
ggcaauuucaugugguuuaaac

SEQ ID NO: 405280 - RNA, 22 nt, Human
uauggaaacuaauucauuuuuc

SEQ ID NO: 405281 - RNA, 22 nt, Human
aaaugaaaugagugccuggagg

SEQ ID NO: 405282 - RNA, 22 nt, Human
aaagaaggggucuacauccaau

SEQ ID NO: 405283 - RNA, 22 nt, Human
uacaguaagaugaaauagcaau

SEQ ID NO: 405284 - RNA, 22 nt, Human
agauaaaaugguucaaaggcua

SEQ ID NO: 405285 - RNA, 21 nt, Human
auacagaacauugauccaaga

SEQ ID NO: 405286 - RNA, 22 nt, Human
gaucagaaucuucauuuucagu

SEQ ID NO: 405287 - RNA, 22 nt, Human
ucauaaaaauagacucuaaagu

SEQ ID NO: 405288 - RNA, 22 nt, Human
aaaucauguuggcacaauaaaa

SEQ ID NO: 405289 - RNA, 22 nt, Human
aaucaguguguaaaguggcugc

SEQ ID NO: 405290 - RNA, 22 nt, Human
aaugggauaggucuucaggaau

SEQ ID NO: 405291 - RNA, 23 nt, Human
augguuuaugucacacuuuugau

SEQ ID NO: 405292 - RNA, 22 nt, Human
uuauccaaacuggugaaucauu

SEQ ID NO: 405293 - RNA, 22 nt, Human
uuauacuuuauacuacaucauu

SEQ ID NO: 405294 - RNA, 22 nt, Human
gaauuucacaaggugaggauaa

SEQ ID NO: 405295 - RNA, 22 nt, Human
cagaauuuagcacaauguaugg

SEQ ID NO: 405296 - RNA, 22 nt, Human
uauuuauaccaggugaucggag

SEQ ID NO: 405297 - RNA, 22 nt, Human
uuccuuaggggacagggggaua

SEQ ID NO: 405298 - RNA, 22 nt, Human
aaugcaaagcaagcagagauuu

SEQ ID NO: 405299 - RNA, 22 nt, Human
uuugaagacauauuguuacaua

SEQ ID NO: 405300 - RNA, 22 nt, Human
ugcuggcuacauuauugcuguc

SEQ ID NO: 405301 - RNA, 22 nt, Human
acaagauaaggugucagugugu

SEQ ID NO: 405302 - RNA, 21 nt, Human
aacugguucaauucaacuaga

SEQ ID NO: 405303 - RNA, 22 nt, Human
aauuccaaauguuuucaaucca

SEQ ID NO: 405304 - RNA, 22 nt, Human
gaucugaaucaauagaauaacu

SEQ ID NO: 405305 - RNA, 22 nt, Human
uucagaaacagagugagugagu

SEQ ID NO: 405306 - RNA, 22 nt, Human
aauaaaaugaacugguagaguu

SEQ ID NO: 405307 - RNA, 22 nt, Human
cuggaucaugcauugcuugucc

SEQ ID NO: 405308 - RNA, 22 nt, Human
auagaauucuuugaaauuuaug

SEQ ID NO: 405309 - RNA, 22 nt, Human
aaaucaguuggaacacaagcag

SEQ ID NO: 405310 - RNA, 22 nt, Human
gguacaauggaccauaaaagcu

SEQ ID NO: 405311 - RNA, 18 nt, Human
auuguuaauagaguacuu

SEQ ID NO: 405312 - RNA, 22 nt, Human
uucaauacaaagaaaggaauuu

SEQ ID NO: 405313 - RNA, 22 nt, Human
agauucuacucuagauccaugg

SEQ ID NO: 405314 - RNA, 22 nt, Human
aggauuuacuagcaaggauucu

SEQ ID NO: 405315 - RNA, 22 nt, Human
ucagaauugucuggggaauguu

SEQ ID NO: 405316 - RNA, 17 nt, Human
cuguuaauucauuuccc

SEQ ID NO: 405317 - RNA, 22 nt, Human
ugcugagaucugccaguagaug

SEQ ID NO: 405318 - RNA, 22 nt, Human
augguuuaaagaguaugacuuu

SEQ ID NO: 405319 - RNA, 22 nt, Human
ucagaauuagagcucuucuuga

SEQ ID NO: 405320 - RNA, 21 nt, Human
gauaaaaugggccuugguccu

SEQ ID NO: 405321 - RNA, 22 nt, Human
caauuucagguggauagguuuu

SEQ ID NO: 405322 - RNA, 22 nt, Human
uauggaaaaauguaucuuguca

SEQ ID NO: 405323 - RNA, 22 nt, Human
gugaauaaagggaguuuucaaa

SEQ ID NO: 405324 - RNA, 22 nt, Human
gauaucauaucagacaaccucu

SEQ ID NO: 405325 - RNA, 22 nt, Human
uaacacaaaagaauaugugugu

SEQ ID NO: 405326 - RNA, 23 nt, Human
cauuucaacgaauuuuccuucug

SEQ ID NO: 405327 - RNA, 22 nt, Human
ugagacaaaauugacagacaaa

SEQ ID NO: 405328 - RNA, 22 nt, Human
uagaugcuacaauuuuguacuc

SEQ ID NO: 405329 - RNA, 22 nt, Human
aacaugcuuugauaaauaaaag

SEQ ID NO: 405330 - RNA, 22 nt, Human
gaguucuaaaggcagaacauaa

SEQ ID NO: 405331 - RNA, 19 nt, Human
acuguaaggcauuuuuuuc

SEQ ID NO: 405332 - RNA, 22 nt, Human
uucugaaaauugggucauacuu

SEQ ID NO: 405333 - RNA, 22 nt, Human
gaauuucaacaguccucaaaug

SEQ ID NO: 405334 - RNA, 22 nt, Human
gaugauaacagcauuucaacug

SEQ ID NO: 405335 - RNA, 22 nt, Human
uguauacauuuaacuagauaga

SEQ ID NO: 405336 - RNA, 23 nt, Human
aaguacauauauuuagauaguga

SEQ ID NO: 405337 - RNA, 23 nt, Human
ucagagaacucgggcagaugacc

SEQ ID NO: 405338 - RNA, 22 nt, Human
gauuuacagcuauacccaaugg

SEQ ID NO: 405339 - RNA, 22 nt, Human
gauuuagagcaggaaugcaugg

SEQ ID NO: 405340 - RNA, 22 nt, Human
cuucuuaaauuggauugcuauu

SEQ ID NO: 405341 - RNA, 18 nt, Human
caagaaucucuaaagaag

SEQ ID NO: 405342 - RNA, 22 nt, Human
uagaaaucagcaggcauaugua

SEQ ID NO: 405343 - RNA, 18 nt, Human
aguccuuacgaggcuaua

SEQ ID NO: 405344 - RNA, 22 nt, Human
cuacagaagccguggucaggaa

SEQ ID NO: 405345 - RNA, 22 nt, Human
uaauuucaaauuucuuagcgug

SEQ ID NO: 405346 - RNA, 22 nt, Human
auggcauuauagcaaugguuug

SEQ ID NO: 405347 - RNA, 22 nt, Human
auuaaacugagcaaauuaacau

SEQ ID NO: 405348 - RNA, 22 nt, Human
augaacaaguauuugcaugagc

SEQ ID NO: 405349 - RNA, 22 nt, Human
aaucaaaaccuacagagguaau

SEQ ID NO: 405350 - RNA, 22 nt, Human
augguuuauugcuuuaaugaaa

SEQ ID NO: 405351 - RNA, 22 nt, Human
uacagagauuuauugcuaaggc

SEQ ID NO: 405352 - RNA, 22 nt, Human
aaaguccugacugcaggggaug

SEQ ID NO: 405353 - RNA, 22 nt, Human
guacagaaggauuucuaguagu

SEQ ID NO: 405354 - RNA, 22 nt, Human
uauacaauggcugaaucaucca

SEQ ID NO: 405355 - RNA, 22 nt, Human
uaaucugaagaaacaggacuug

SEQ ID NO: 405356 - RNA, 22 nt, Human
uuaggaaacgcugcuauugacu

SEQ ID NO: 405357 - RNA, 21 nt, Human
auagaacaccaggcauauaua

SEQ ID NO: 405358 - RNA, 22 nt, Human
ucaguuucuccaucgcuccagu

SEQ ID NO: 405359 - RNA, 22 nt, Human
ccaauacacuuuauagaagaaa

SEQ ID NO: 405360 - RNA, 22 nt, Human
gcguuaauaacauuaauaaugc

SEQ ID NO: 405361 - RNA, 22 nt, Human
acuggaucagaaucugauuuuu

SEQ ID NO: 405362 - RNA, 22 nt, Human
aguucacugcuuaagccuuuga

SEQ ID NO: 405363 - RNA, 22 nt, Human
caauuucauggauaaaagaugu

SEQ ID NO: 405364 - RNA, 22 nt, Human
auuaaagaaacccagcauguga

SEQ ID NO: 405365 - RNA, 22 nt, Human
ucaaaauuuuauuucucaagga

SEQ ID NO: 405366 - RNA, 22 nt, Human
uacacauguauuuauguguaca

SEQ ID NO: 405367 - RNA, 22 nt, Human
cauaaaauggcuuguucuuuaa

SEQ ID NO: 405368 - RNA, 22 nt, Human
caguaucugucaguaaucaggu

SEQ ID NO: 405369 - RNA, 19 nt, Human
gaaagucauagagcuuguc

SEQ ID NO: 405370 - RNA, 22 nt, Human
aaagucauugcuguuaucaaug

SEQ ID NO: 405371 - RNA, 22 nt, Human
aaaauugagagucuugugcaag

SEQ ID NO: 405372 - RNA, 20 nt, Human
uacuggauuagggcucaccc

SEQ ID NO: 405373 - RNA, 22 nt, Human
gagauuuaauuggauuaacuua

SEQ ID NO: 405374 - RNA, 22 nt, Human
uuuccaaacccagcgagcuaca

SEQ ID NO: 405375 - RNA, 22 nt, Human
agccaacuaggagauuaaggua

SEQ ID NO: 405376 - RNA, 22 nt, Human
uucuuaaucccacaaaucuuca

SEQ ID NO: 405377 - RNA, 20 nt, Human
uuacagaaaugauguuauuu

SEQ ID NO: 405378 - RNA, 22 nt, Human
agauuuacuggagucuuuggug

SEQ ID NO: 405379 - RNA, 22 nt, Human
uaaugcuuaauuuucacaagcc

SEQ ID NO: 405380 - RNA, 22 nt, Human
ccagcuauugcuguguaacagu

SEQ ID NO: 405381 - RNA, 22 nt, Human
aagacuuucaaguaugcaugca

SEQ ID NO: 405382 - RNA, 22 nt, Human
auucuuaaauuuaggucuguga

SEQ ID NO: 405383 - RNA, 22 nt, Human
auuacaagaugcauccauauuu

SEQ ID NO: 405384 - RNA, 22 nt, Human
uuuaggcagcagugaggaugaa

SEQ ID NO: 405385 - RNA, 22 nt, Human
uuuacagagagagaacuggacu

SEQ ID NO: 405386 - RNA, 22 nt, Human
auccaaaggugacacagaauac

SEQ ID NO: 405387 - RNA, 21 nt, Human
aggauuuacuauuaacugugu

SEQ ID NO: 405388 - RNA, 22 nt, Human
uaaaaguauacuuucaaaggag

SEQ ID NO: 405389 - RNA, 21 nt, Human
auacagaagguggcaaaguac

SEQ ID NO: 405390 - RNA, 23 nt, Human
uuccagaggaagaagucaugacu

SEQ ID NO: 405391 - RNA, 22 nt, Human
auuuagccucauuuuugacaua

SEQ ID NO: 405392 - RNA, 22 nt, Human
aaaucucaauuugaauuguagc

SEQ ID NO: 405393 - RNA, 22 nt, Human
gugcauuugacgaauacucacu

SEQ ID NO: 405394 - RNA, 22 nt, Human
aagccaaugagagaggccucag

SEQ ID NO: 405395 - RNA, 22 nt, Human
cuaacuuuagcuuagauuauca

SEQ ID NO: 405396 - RNA, 22 nt, Human
agagauucauguuuacuguagg

SEQ ID NO: 405397 - RNA, 22 nt, Human
aauuuauauguaauuaggcaca

SEQ ID NO: 405398 - RNA, 22 nt, Human
uagucaccucuuuaaauguccu

SEQ ID NO: 405399 - RNA, 23 nt, Human
gaaucaguggcuaacaaggaaac

SEQ ID NO: 405400 - RNA, 22 nt, Human
auuguuaauguugcacuaaggu

SEQ ID NO: 405401 - RNA, 22 nt, Human
uaugaaaauuuagcugaagcau

SEQ ID NO: 405402 - RNA, 19 nt, Human
uacuaaacaugcauauugg

SEQ ID NO: 405403 - RNA, 22 nt, Human
agucuuaacuaugcaaguacua

SEQ ID NO: 405404 - RNA, 22 nt, Human
gacaguccuugcccaguaucua

SEQ ID NO: 405405 - RNA, 22 nt, Human
aaguuacacauuuucauuguaa

SEQ ID NO: 405406 - RNA, 22 nt, Human
ugugaaagcaagucuaguucuc

SEQ ID NO: 405407 - RNA, 22 nt, Human
cacacuuugugcuaaucuauuu

SEQ ID NO: 405408 - RNA, 22 nt, Human
ucauuucucccggccaaaaacu

SEQ ID NO: 405409 - RNA, 20 nt, Human
gauuucaaagcagaguggcc

SEQ ID NO: 405410 - RNA, 23 nt, Human
caauuucauaugauucuaccuaa

SEQ ID NO: 405411 - RNA, 22 nt, Human
ucuggaucucccucauccuggg

SEQ ID NO: 405412 - RNA, 22 nt, Human
guucuaauuuggggcuccuuag

SEQ ID NO: 405413 - RNA, 22 nt, Human
cuagaaauguagauucuuagug

SEQ ID NO: 405414 - RNA, 22 nt, Human
ucaguaaaugaaugaauauaug

SEQ ID NO: 405415 - RNA, 22 nt, Human
guacagaaggagcuuuggauuc

SEQ ID NO: 405416 - RNA, 22 nt, Human
uuuccaaaguugccauaagcuu

SEQ ID NO: 405417 - RNA, 22 nt, Human
uuggaucagaugauaucuuugu

SEQ ID NO: 405418 - RNA, 22 nt, Human
aaauccuuuucuauacagcaua

SEQ ID NO: 405419 - RNA, 22 nt, Human
caauauauaaugaguacuuucc

SEQ ID NO: 405420 - RNA, 22 nt, Human
acauguauugacauuauauucu

SEQ ID NO: 405421 - RNA, 22 nt, Human
uauuaaagagagaaucaucauc

SEQ ID NO: 405422 - RNA, 22 nt, Human
auauaauuguucugaaguguuu

SEQ ID NO: 405423 - RNA, 22 nt, Human
uuaauucagucaaagaaaccau

SEQ ID NO: 405424 - RNA, 22 nt, Human
gaguccuuccagcaggcauuua

SEQ ID NO: 405425 - RNA, 22 nt, Human
acagaauuaaugaaaauuacaa

SEQ ID NO: 405426 - RNA, 22 nt, Human
uaauauguguuacugacuuuuu

SEQ ID NO: 405427 - RNA, 22 nt, Human
cagaucuguuugccagaucagc

SEQ ID NO: 405428 - RNA, 22 nt, Human
auauauaaccuggauaaggcuu

SEQ ID NO: 405429 - RNA, 22 nt, Human
cacaauacuauuuuuaggucuu

SEQ ID NO: 405430 - RNA, 20 nt, Human
uacagacaugacaauaaugg

SEQ ID NO: 405431 - RNA, 22 nt, Human
uucagaaaggauaauuggaagg

SEQ ID NO: 405432 - RNA, 22 nt, Human
caauuucacugacacccuggaa

SEQ ID NO: 405433 - RNA, 22 nt, Human
gcagggcagaccuccagccuau

SEQ ID NO: 405434 - RNA, 22 nt, Human
uacagagauacucuagaucaaa

SEQ ID NO: 405435 - RNA, 22 nt, Human
aucaguuaguuacugcuaagau

SEQ ID NO: 405436 - RNA, 20 nt, Human
auacuuguuuucaggcuuuu

SEQ ID NO: 405437 - RNA, 22 nt, Human
ccagucacucugugagagcuac

SEQ ID NO: 405438 - RNA, 22 nt, Human
acuuuagaccaucuuccacagu

SEQ ID NO: 405439 - RNA, 22 nt, Human
uucaaacaguguagaauauaug

SEQ ID NO: 405440 - RNA, 22 nt, Human
acugcagagguggggugcagag

SEQ ID NO: 405441 - RNA, 22 nt, Human
aguucacagccauguucaugug

SEQ ID NO: 405442 - RNA, 21 nt, Human
caaagccaggcaacucucucc

SEQ ID NO: 405443 - RNA, 21 nt, Human
gauuugcagaaacuagacagg

SEQ ID NO: 405444 - RNA, 22 nt, Human
ccuggaucuccucuauucauau

SEQ ID NO: 405445 - RNA, 22 nt, Human
uaucaaaguuguccugugaagu

SEQ ID NO: 405446 - RNA, 22 nt, Human
auauacaggugguauguguaaa

SEQ ID NO: 405447 - RNA, 22 nt, Human
ugaaauaauaucuggaucaauc

SEQ ID NO: 405448 - RNA, 22 nt, Human
guuaaagaguuuggcuuucuuc

SEQ ID NO: 405449 - RNA, 22 nt, Human
caguccuuccuugccccuuggg

SEQ ID NO: 405450 - RNA, 22 nt, Human
agucaccaacaugguucccagg

SEQ ID NO: 405451 - RNA, 22 nt, Human
ccagcugucagugugaaaauaa

SEQ ID NO: 405452 - RNA, 22 nt, Human
aaaaggcauggagguugauagu

SEQ ID NO: 405453 - RNA, 22 nt, Human
caagaaucaacauuauuuagug

SEQ ID NO: 405454 - RNA, 22 nt, Human
aguacaaugucugacacaguag

SEQ ID NO: 405455 - RNA, 22 nt, Human
caggccagcuuccugacauccu

SEQ ID NO: 405456 - RNA, 22 nt, Human
uuccuuagauccuucaaucacg

SEQ ID NO: 405457 - RNA, 22 nt, Human
cuuccaaacccaggguaugggc

SEQ ID NO: 405458 - RNA, 22 nt, Human
cuacagaauggagggucagaga

SEQ ID NO: 405459 - RNA, 22 nt, Human
aaucccagcuacucaggaaguu

SEQ ID NO: 405460 - RNA, 22 nt, Human
cuagaaaugcucaagagaaagu

SEQ ID NO: 405461 - RNA, 22 nt, Human
aacauguaaauaucauuguacu

SEQ ID NO: 405462 - RNA, 22 nt, Human
agaauuucaaauggaaguuuua

SEQ ID NO: 405463 - RNA, 22 nt, Human
aaauaauguuaggccuuugcuc

SEQ ID NO: 405464 - RNA, 22 nt, Human
aaugccaacuuggauauacauu

SEQ ID NO: 405465 - RNA, 22 nt, Human
augcuuaagcucaguuauauau

SEQ ID NO: 405466 - RNA, 22 nt, Human
uaaagccaauauaccuagcaua

SEQ ID NO: 405467 - RNA, 21 nt, Human
ucauucacaggguauuguaua

SEQ ID NO: 405468 - RNA, 22 nt, Human
uauauaacuacuauuuugcuca

SEQ ID NO: 405469 - RNA, 22 nt, Human
uuuauccaaggguuuuaacugu

SEQ ID NO: 405470 - RNA, 22 nt, Human
uacuucauuccuuuguaaaaug

SEQ ID NO: 405471 - RNA, 22 nt, Human
uucagaaaucgaguuucauguc

SEQ ID NO: 405472 - RNA, 22 nt, Human
auuuacugagguaaauaaacug

SEQ ID NO: 405473 - RNA, 22 nt, Human
ucuaaacagccucuuaccaacu

SEQ ID NO: 405474 - RNA, 22 nt, Human
caaugucaugauuuuccauuag

SEQ ID NO: 405475 - RNA, 22 nt, Human
auuauccagcaccaaugucaga

SEQ ID NO: 405476 - RNA, 22 nt, Human
ucuggaucccaccgccacacac

SEQ ID NO: 405477 - RNA, 18 nt, Human
caauuucauccuuaagcc

SEQ ID NO: 405478 - RNA, 22 nt, Human
gugaauaagaccuaaggaugaa

SEQ ID NO: 405479 - RNA, 22 nt, Human
uagaauucauguuacuguuagc

SEQ ID NO: 405480 - RNA, 23 nt, Human
uuccacaaugaaaauaaagcagg

SEQ ID NO: 405481 - RNA, 22 nt, Human
auagaauuauggaaagcaucuu

SEQ ID NO: 405482 - RNA, 21 nt, Human
uaaauaauaaguugcugagau

SEQ ID NO: 405483 - RNA, 22 nt, Human
gauuucaaggaguuuucacagu

SEQ ID NO: 405484 - RNA, 22 nt, Human
ggcuuaaugguucuuuuucuca

SEQ ID NO: 405485 - RNA, 22 nt, Human
acauuccaaaaacuagcagaua

SEQ ID NO: 405486 - RNA, 22 nt, Human
uaauuauagccgcuauuuugcu

SEQ ID NO: 405487 - RNA, 22 nt, Human
ucucuuaauuuuggaauagugu

SEQ ID NO: 405488 - RNA, 22 nt, Human
aaaaagguugauccagauuagg

SEQ ID NO: 405489 - RNA, 22 nt, Human
aguaaaauuaauggaucagaag

SEQ ID NO: 405490 - RNA, 22 nt, Human
caauuucauuaauagauauaga

SEQ ID NO: 405491 - RNA, 22 nt, Human
uauaagaaacaaggcaaauuuu

SEQ ID NO: 405492 - RNA, 19 nt, Human
guuaggcaggguggggagu

SEQ ID NO: 405493 - RNA, 22 nt, Human
guccaaauuuuucacauguaga

SEQ ID NO: 405494 - RNA, 22 nt, Human
cacaauuuggugcuaaagaaag

SEQ ID NO: 405495 - RNA, 22 nt, Human
uaauuuuuccacguacacuggg

SEQ ID NO: 405496 - RNA, 22 nt, Human
ucuggaucaccacuucugccuc

SEQ ID NO: 405497 - RNA, 22 nt, Human
cauguauaguuggaacuacauc

SEQ ID NO: 405498 - RNA, 22 nt, Human
auacagaaaaugaugcagaguu

SEQ ID NO: 405499 - RNA, 22 nt, Human
gcaaaauuuacacuccuucuuc

SEQ ID NO: 405500 - RNA, 22 nt, Human
acaacuuucuggguuaucugau

SEQ ID NO: 405501 - RNA, 22 nt, Human
ggcauuuaguuuucauauucug

SEQ ID NO: 405502 - RNA, 22 nt, Human
cauuuacauaacaguaacgcug

SEQ ID NO: 405503 - RNA, 22 nt, Human
augguuuuguccucuuugguuc

SEQ ID NO: 405504 - RNA, 22 nt, Human
cauagaaacuugcagcaagcac

SEQ ID NO: 405505 - RNA, 22 nt, Human
cacauuuagagguuagcauggu

SEQ ID NO: 405506 - RNA, 22 nt, Human
auacagaagccuguauuucugg

SEQ ID NO: 405507 - RNA, 22 nt, Human
uuauauuaguuagacuugcugu

SEQ ID NO: 405508 - RNA, 22 nt, Human
ugcacaaacuugugucccaggg

SEQ ID NO: 405509 - RNA, 22 nt, Human
aaagucauuggaauauuaauga

SEQ ID NO: 405510 - RNA, 22 nt, Human
aagcccagaugggagcauuuca

SEQ ID NO: 405511 - RNA, 22 nt, Human
aucagaaaguucaucauguuug

SEQ ID NO: 405512 - RNA, 22 nt, Human
ugcaggaaugagguucucaguu

SEQ ID NO: 405513 - RNA, 22 nt, Human
aaguaaauaucuguuuauagca

SEQ ID NO: 405514 - RNA, 22 nt, Human
cuuaauuuuuguaguagaugga

SEQ ID NO: 405515 - RNA, 22 nt, Human
aucagcuuuucucaucagaaau

SEQ ID NO: 405516 - RNA, 22 nt, Human
uguaacaauuucuuacuauugu

SEQ ID NO: 405517 - RNA, 22 nt, Human
uucaaagcugcagacuccuggg

SEQ ID NO: 405518 - RNA, 22 nt, Human
ucagccagugccuugaucuugc

SEQ ID NO: 405519 - RNA, 22 nt, Human
aguguuagauucuuacucaguu

SEQ ID NO: 405520 - RNA, 22 nt, Human
aaguccuuucucauggaggaau

SEQ ID NO: 405521 - RNA, 22 nt, Human
cauuucaauacaguuuguaaau

SEQ ID NO: 405522 - RNA, 22 nt, Human
uuauuauuccccaagucauuau

SEQ ID NO: 405523 - RNA, 22 nt, Human
uauaaaacagaaagcacuaccu

SEQ ID NO: 405524 - RNA, 22 nt, Human
uauccaaacauauagucucucu

SEQ ID NO: 405525 - RNA, 22 nt, Human
augcaaaauuaccauucuguuc

SEQ ID NO: 405526 - RNA, 22 nt, Human
aaucagaaaauucaguggaauu

SEQ ID NO: 405527 - RNA, 21 nt, Human
uguccuuaaugcaauguccuu

SEQ ID NO: 405528 - RNA, 22 nt, Human
uuucuaguaaucaauauaaagu

SEQ ID NO: 405529 - RNA, 22 nt, Human
acagcauugcuccaucucaaga

SEQ ID NO: 405530 - RNA, 22 nt, Human
uucaacuuuggagauuuaauaa

SEQ ID NO: 405531 - RNA, 22 nt, Human
gcuuuaaugcuucguggggcca

SEQ ID NO: 405532 - RNA, 22 nt, Human
uaauuuuaugacaguguauuuu

SEQ ID NO: 405533 - RNA, 22 nt, Human
ugcuuuaaauaugaauuagcau

SEQ ID NO: 405534 - RNA, 22 nt, Human
gaauacaaacuuaaggcuuuac

SEQ ID NO: 405535 - RNA, 22 nt, Human
uaucagaaagauauuacugggg

SEQ ID NO: 405536 - RNA, 22 nt, Human
auguucaaacuuuuuacacacc

SEQ ID NO: 405537 - RNA, 23 nt, Human
aaauaggaguaucuggaucauga

SEQ ID NO: 405538 - RNA, 22 nt, Human
uuagacaagggcuccuuaaaag

SEQ ID NO: 405539 - RNA, 22 nt, Human
cagaaaauaaaguuucuacgca

SEQ ID NO: 405540 - RNA, 22 nt, Human
aaguccuuuccaguccugugau

SEQ ID NO: 405541 - RNA, 22 nt, Human
caaaauugaugaauguaugauu

SEQ ID NO: 405542 - RNA, 22 nt, Human
uacuaaacccucgauggaucuu

SEQ ID NO: 405543 - RNA, 22 nt, Human
ugaaaagacugcaagagagcau

SEQ ID NO: 405544 - RNA, 22 nt, Human
auuauaaauauuuucuaggggu

SEQ ID NO: 405545 - RNA, 22 nt, Human
gagucaccacacggugcugacu

SEQ ID NO: 405546 - RNA, 22 nt, Human
caagaucagggugccagaaugg

SEQ ID NO: 405547 - RNA, 22 nt, Human
cacccaguugacuacaaagggg

SEQ ID NO: 405548 - RNA, 22 nt, Human
gagucaccuuggccgcuguccc

SEQ ID NO: 405549 - RNA, 22 nt, Human
caucagaaccaguggggacauu

SEQ ID NO: 405550 - RNA, 22 nt, Human
uuuaaugaauaauucaaaucug

SEQ ID NO: 405551 - RNA, 22 nt, Human
ucauacacaagagcauguaaca

SEQ ID NO: 405552 - RNA, 22 nt, Human
uuugguccugagcaaaacuaug

SEQ ID NO: 405553 - RNA, 22 nt, Human
augugaaauauuaagccgagga

SEQ ID NO: 405554 - RNA, 23 nt, Human
uacagaaggaguagucacuaaga

SEQ ID NO: 405555 - RNA, 22 nt, Human
uccuuguugcugcagucaccug

SEQ ID NO: 405556 - RNA, 22 nt, Human
uuuaggcaugcaguucuauuua

SEQ ID NO: 405557 - RNA, 22 nt, Human
caaagccauagaguagauaaga

SEQ ID NO: 405558 - RNA, 22 nt, Human
auggauuuggaugagauuacuu

SEQ ID NO: 405559 - RNA, 22 nt, Human
gggauuuaguaggauaguauac

SEQ ID NO: 405560 - RNA, 22 nt, Human
uauguuaagugggauaaucaaa

SEQ ID NO: 405561 - RNA, 22 nt, Human
uaaagcacgucuauuuaaugau

SEQ ID NO: 405562 - RNA, 22 nt, Human
aaagucauccaaauuuuuaugu

SEQ ID NO: 405563 - RNA, 22 nt, Human
uaacagaaauuuuaguuagggg

SEQ ID NO: 405564 - RNA, 22 nt, Human
ucuaaacacuaagucuugaugc

SEQ ID NO: 405565 - RNA, 22 nt, Human
ucagccaggccaccuucagcuu

SEQ ID NO: 405566 - RNA, 22 nt, Human
ucaccagucuuucuuaccauug

SEQ ID NO: 405567 - RNA, 22 nt, Human
aaaguucaugguguuauagaaa

SEQ ID NO: 405568 - RNA, 22 nt, Human
auaacagauacucucugugagg

SEQ ID NO: 405569 - RNA, 22 nt, Human
uaaaauugcggugaauauuucc

SEQ ID NO: 405570 - RNA, 22 nt, Human
uuaaggauguugugauuuauua

SEQ ID NO: 405571 - RNA, 22 nt, Human
auacagaauucacuacaguuuc

SEQ ID NO: 405572 - RNA, 22 nt, Human
cagaaaaggaagagcuauguaa

SEQ ID NO: 405573 - RNA, 22 nt, Human
auuccaaacuuaccccagagga

SEQ ID NO: 405574 - RNA, 22 nt, Human
auucaacggguagaagggucuu

SEQ ID NO: 405575 - RNA, 22 nt, Human
aagucacccuagggccuggacu

SEQ ID NO: 405576 - RNA, 22 nt, Human
guaugaaaauuguaaaguucuu

SEQ ID NO: 405577 - RNA, 22 nt, Human
acauucacgcucucaaagcuga

SEQ ID NO: 405578 - RNA, 22 nt, Human
gauggcuuugugcaccaugauu

SEQ ID NO: 405579 - RNA, 22 nt, Human
acaaugaacacacaaggaauuc

SEQ ID NO: 405580 - RNA, 22 nt, Human
uuaacacuccuaacuacagucu

SEQ ID NO: 405581 - RNA, 22 nt, Human
acuaaacugaagcaugaaaagg

SEQ ID NO: 405582 - RNA, 22 nt, Human
ucauauaaguuuaaaacuaucu

SEQ ID NO: 405583 - RNA, 22 nt, Human
ugugaaagauacuaggcagagg

SEQ ID NO: 405584 - RNA, 20 nt, Human
caauuucaucauuuccugug

SEQ ID NO: 405585 - RNA, 23 nt, Human
aucaaaggauguagagaagaagc

SEQ ID NO: 405586 - RNA, 22 nt, Human
cauuucaauacuaucugagaau

SEQ ID NO: 405587 - RNA, 22 nt, Human
aguguucauuuauucauucacu

SEQ ID NO: 405588 - RNA, 22 nt, Human
aaucagcuaaauaaacuaguca

SEQ ID NO: 405589 - RNA, 22 nt, Human
uuaauaaacaggugcagcugaa

SEQ ID NO: 405590 - RNA, 22 nt, Human
uguuuauaccugcaaccuguca

SEQ ID NO: 405591 - RNA, 22 nt, Human
uuuaaugauagcuguuucacau

SEQ ID NO: 405592 - RNA, 23 nt, Human
uuacagaaaguaugcuuuuguuu

SEQ ID NO: 405593 - RNA, 22 nt, Human
uuuaggcagaacauggacuuug

SEQ ID NO: 405594 - RNA, 21 nt, Human
cuacagaaucgagcauucugg

SEQ ID NO: 405595 - RNA, 22 nt, Human
uacaaaaaauugauacugacga

SEQ ID NO: 405596 - RNA, 22 nt, Human
caaguccuuagaugguucuuug

SEQ ID NO: 405597 - RNA, 22 nt, Human
ucauagaagcaccagaagauau

SEQ ID NO: 405598 - RNA, 22 nt, Human
ugugaauacagcaugugcuucu

SEQ ID NO: 405599 - RNA, 22 nt, Human
uaauuucagugcaagcucacgg

SEQ ID NO: 405600 - RNA, 22 nt, Human
agagugaaguuuuugaaaguga

SEQ ID NO: 405601 - RNA, 22 nt, Human
ugcuggaggauuaaacaaguca

SEQ ID NO: 405602 - RNA, 21 nt, Human
uuucagaccuaucuuugaagg

SEQ ID NO: 405603 - RNA, 22 nt, Human
aggauuuaaauccuuaaccacu

SEQ ID NO: 405604 - RNA, 22 nt, Human
guacauaaaggaggcucuuugc

SEQ ID NO: 405605 - RNA, 22 nt, Human
ucagaauugcagggagggcagg

SEQ ID NO: 405606 - RNA, 22 nt, Human
auagcuuuacagaagaguuuag

SEQ ID NO: 405607 - RNA, 22 nt, Human
ucaguuuccucaucuacaaaag

SEQ ID NO: 405608 - RNA, 22 nt, Human
acuuuuaaggggccuugauuua

SEQ ID NO: 405609 - RNA, 22 nt, Human
aaacaggcuuccauuagagcaa

SEQ ID NO: 405610 - RNA, 22 nt, Human
uuugaaguggaaaaggauuuaa

SEQ ID NO: 405611 - RNA, 22 nt, Human
auacaaugagugagugaauggg

SEQ ID NO: 405612 - RNA, 22 nt, Human
uggcuuuaaaucuguauucaua

SEQ ID NO: 405613 - RNA, 22 nt, Human
ucuggaucggguuccucagguc

SEQ ID NO: 405614 - RNA, 22 nt, Human
ucuggaucgccggcgccugggc

SEQ ID NO: 405615 - RNA, 22 nt, Human
aaucagaaccuugggucauaac

SEQ ID NO: 405616 - RNA, 22 nt, Human
acaaaguccugguguauggcca

SEQ ID NO: 405617 - RNA, 22 nt, Human
guuauaaaggugauaaugguca

SEQ ID NO: 405618 - RNA, 22 nt, Human
gauaaaauucuuauuuuacccg

SEQ ID NO: 405619 - RNA, 22 nt, Human
caaucaguaaccggaucauggu

SEQ ID NO: 405620 - RNA, 22 nt, Human
ugaaauagaaaaacaggcuucu

SEQ ID NO: 405621 - RNA, 22 nt, Human
gaauuucaagcagugcaauguu

SEQ ID NO: 405622 - RNA, 22 nt, Human
uaucugagaaagaagcaccaga

SEQ ID NO: 405623 - RNA, 22 nt, Human
cuauacaguaaccacagugauu

SEQ ID NO: 405624 - RNA, 22 nt, Human
cauacuuucuuuuucacgcaua

SEQ ID NO: 405625 - RNA, 22 nt, Human
uauauguaagcuauguaagagu

SEQ ID NO: 405626 - RNA, 22 nt, Human
guagaaauauuuaucucugaga

SEQ ID NO: 405627 - RNA, 22 nt, Human
uggcuauugagugaucucuaga

SEQ ID NO: 405628 - RNA, 22 nt, Human
ugucauaacuuagugacaaauc

SEQ ID NO: 405629 - RNA, 22 nt, Human
cuuuuaaugggagcaguauuug

SEQ ID NO: 405630 - RNA, 22 nt, Human
uggcauuucuggccauuugugu

SEQ ID NO: 405631 - RNA, 22 nt, Human
uucaacccaaguucuccauuuu

SEQ ID NO: 405632 - RNA, 22 nt, Human
gauuucaaagguucugcaugcc

SEQ ID NO: 405633 - RNA, 22 nt, Human
auauacugauagcugcacuucu

SEQ ID NO: 405634 - RNA, 22 nt, Human
ucuaaagccuuccauauaacgc

SEQ ID NO: 405635 - RNA, 22 nt, Human
caaauacuaaacauaagauuuu

SEQ ID NO: 405636 - RNA, 22 nt, Human
gauaaugaugacaaugacaacc

SEQ ID NO: 405637 - RNA, 22 nt, Human
aaaguccuuuuugccaugcaag

SEQ ID NO: 405638 - RNA, 23 nt, Human
uacuuaggguuuagaucugacug

SEQ ID NO: 405639 - RNA, 22 nt, Human
uaagaaucugcauuuuaacaag

SEQ ID NO: 405640 - RNA, 22 nt, Human
aguucacauaucuguuuuauuu

SEQ ID NO: 405641 - RNA, 22 nt, Human
uccuuaauauggaagaguucuc

SEQ ID NO: 405642 - RNA, 20 nt, Human
ucauaaagaggaaauaaaua

SEQ ID NO: 405643 - RNA, 22 nt, Human
ccaaacaaauccccauucuuag

SEQ ID NO: 405644 - RNA, 21 nt, Human
ugaucauuuguguaaaggaga

SEQ ID NO: 405645 - RNA, 22 nt, Human
aacacuuugggcauggccuucc

SEQ ID NO: 405646 - RNA, 22 nt, Human
gcuggaucaaguccuucaccca

SEQ ID NO: 405647 - RNA, 22 nt, Human
ucuauaaagggccagauaguag

SEQ ID NO: 405648 - RNA, 22 nt, Human
aacaugaaaagcccagagaggu

SEQ ID NO: 405649 - RNA, 22 nt, Human
auacugaauuagguaaagcaua

SEQ ID NO: 405650 - RNA, 22 nt, Human
ccacuucaucagugcuccauuu

SEQ ID NO: 405651 - RNA, 22 nt, Human
aaacuuuguagagaaugcuggc

SEQ ID NO: 405652 - RNA, 22 nt, Human
auugauggcggccucuccauau

SEQ ID NO: 405653 - RNA, 22 nt, Human
ucagaauuuuuguuacccuuga

SEQ ID NO: 405654 - RNA, 22 nt, Human
aguccuuacaccuggaaccuau

SEQ ID NO: 405655 - RNA, 22 nt, Human
aauauuucugcagaaugguuuu

SEQ ID NO: 405656 - RNA, 22 nt, Human
uauuucaagaacuucuauccau

SEQ ID NO: 405657 - RNA, 22 nt, Human
aucauaaaauugcaccauuucu

SEQ ID NO: 405658 - RNA, 22 nt, Human
cugcagagcuuucugaaugaag

SEQ ID NO: 405659 - RNA, 22 nt, Human
uagcagaagaacaacaugaucu

SEQ ID NO: 405660 - RNA, 21 nt, Human
uucauaaaccauucucaugca

SEQ ID NO: 405661 - RNA, 22 nt, Human
ggauucagugucuguuaauagu

SEQ ID NO: 405662 - RNA, 22 nt, Human
aaugguauuugucaagcauagu

SEQ ID NO: 405663 - RNA, 22 nt, Human
caauuucaagauucuguucuuu

SEQ ID NO: 405664 - RNA, 22 nt, Human
uugguccacugugaaauuggga

SEQ ID NO: 405665 - RNA, 22 nt, Human
auacaaauuuauagaugcauuu

SEQ ID NO: 405666 - RNA, 17 nt, Human
caauuucauagguuuug

SEQ ID NO: 405667 - RNA, 22 nt, Human
cugaauaauauuccauuaugag

SEQ ID NO: 405668 - RNA, 22 nt, Human
aaagcaguauauugguaguugu

SEQ ID NO: 405669 - RNA, 22 nt, Human
uuucagaaccgcuaaaauaaau

SEQ ID NO: 405670 - RNA, 22 nt, Human
aguccagugaacuguaaauagg

SEQ ID NO: 405671 - RNA, 22 nt, Human
gaagaauccuguccucuuuagg

SEQ ID NO: 405672 - RNA, 22 nt, Human
uccaaauacauuuacuguauuu

SEQ ID NO: 405673 - RNA, 22 nt, Human
caauuuuuguacuuauaguacu

SEQ ID NO: 405674 - RNA, 22 nt, Human
uaucagaaugcagccaugugca

SEQ ID NO: 405675 - RNA, 22 nt, Human
cuuauauuuuaggaacagacaa

SEQ ID NO: 405676 - RNA, 22 nt, Human
aaaagccaagguccucuucaga

SEQ ID NO: 405677 - RNA, 22 nt, Human
aguuaucagguguuuucaugga

SEQ ID NO: 405678 - RNA, 22 nt, Human
aaagccagguugugugcaggaa

SEQ ID NO: 405679 - RNA, 22 nt, Human
aaaguccuguuaacuguuaaca

SEQ ID NO: 405680 - RNA, 22 nt, Human
aggauuuauuauaugcccucau

SEQ ID NO: 405681 - RNA, 22 nt, Human
uuucaagaacaacauucauuca

SEQ ID NO: 405682 - RNA, 22 nt, Human
uguguaaauggcaucucucagc

SEQ ID NO: 405683 - RNA, 22 nt, Human
augcuuaacuuccuagucuaua

SEQ ID NO: 405684 - RNA, 22 nt, Human
cauagaaaagaguagguaaugu

SEQ ID NO: 405685 - RNA, 22 nt, Human
aagcauuuauagauaagaauuu

SEQ ID NO: 405686 - RNA, 22 nt, Human
aucacaaaggguuuucucugag

SEQ ID NO: 405687 - RNA, 22 nt, Human
auacaaguugugauaauguaaa

SEQ ID NO: 405688 - RNA, 22 nt, Human
ugcauaauacguuuccuauaac

SEQ ID NO: 405689 - RNA, 22 nt, Human
auuauaaagaacaugugugugg

SEQ ID NO: 405690 - RNA, 22 nt, Human
ggcauuuaucuaauauaguuua

SEQ ID NO: 405691 - RNA, 22 nt, Human
auaaagucauuaugaagaucua

SEQ ID NO: 405692 - RNA, 22 nt, Human
uuuaggcaauagauggcagugu

SEQ ID NO: 405693 - RNA, 22 nt, Human
uucacagagagaacucaaacca

SEQ ID NO: 405694 - RNA, 22 nt, Human
uuuggacaaguuacugguuucc

SEQ ID NO: 405695 - RNA, 22 nt, Human
auuuccaauuucauccaugucc

SEQ ID NO: 405696 - RNA, 22 nt, Human
ucugauaacucuggccccaggc

SEQ ID NO: 405697 - RNA, 22 nt, Human
acuauacagaagaggauaggaa

SEQ ID NO: 405698 - RNA, 22 nt, Human
cuuaaacugaaagcuacaagau

SEQ ID NO: 405699 - RNA, 22 nt, Human
cuuuacauccuguuucccguuu

SEQ ID NO: 405700 - RNA, 22 nt, Human
uuacagaaaagggguuguccuu

SEQ ID NO: 405701 - RNA, 22 nt, Human
auuacagaaugcaguuccuuau

SEQ ID NO: 405702 - RNA, 22 nt, Human
aguaaacacugucuuuauauau

SEQ ID NO: 405703 - RNA, 22 nt, Human
auuccaaagccugaauaaugga

SEQ ID NO: 405704 - RNA, 22 nt, Human
ugaucugaaggacaugggaccc

SEQ ID NO: 405705 - RNA, 22 nt, Human
uaguccuuuccggcugcuauaa

SEQ ID NO: 405706 - RNA, 21 nt, Human
ucuauucauuacaguuauuug

SEQ ID NO: 405707 - RNA, 22 nt, Human
aaagccauaagccuaauacuaa

SEQ ID NO: 405708 - RNA, 22 nt, Human
uuuaggcaaacucauugucaga

SEQ ID NO: 405709 - RNA, 22 nt, Human
gcaaacaaggacauacauccug

SEQ ID NO: 405710 - RNA, 22 nt, Human
aucacaaaggucucagagcaca

SEQ ID NO: 405711 - RNA, 22 nt, Human
gcuucacacuaaaaauguuaaa

SEQ ID NO: 405712 - RNA, 22 nt, Human
aguguuuagcaugaaguucauu

SEQ ID NO: 405713 - RNA, 22 nt, Human
cuuaaagaugucaaggcuguuu

SEQ ID NO: 405714 - RNA, 22 nt, Human
caauuucacuaauaauauuuac

SEQ ID NO: 405715 - RNA, 22 nt, Human
uggcuuuaggagcuauauaccu

SEQ ID NO: 405716 - RNA, 22 nt, Human
cuuugaauuccaguacaauaac

SEQ ID NO: 405717 - RNA, 22 nt, Human
uaauauauuucugcuaagcuca

SEQ ID NO: 405718 - RNA, 22 nt, Human
aaagccauuacaaaauuucaua

SEQ ID NO: 405719 - RNA, 22 nt, Human
ugucaccaugcgaggcuaauuu

SEQ ID NO: 405720 - RNA, 22 nt, Human
agcauuuaagcuucugcaaagc

SEQ ID NO: 405721 - RNA, 22 nt, Human
uuacagaaguuucagcguuuua

SEQ ID NO: 405722 - RNA, 22 nt, Human
aaugucuucaguguauacaugg

SEQ ID NO: 405723 - RNA, 22 nt, Human
uuuucuuaggugcuccaaguag

SEQ ID NO: 405724 - RNA, 22 nt, Human
uguccuuagaagaagugaaaga

SEQ ID NO: 405725 - RNA, 22 nt, Human
ucaccgucgggggucgcugucu

SEQ ID NO: 405726 - RNA, 22 nt, Human
uaguccuuuaauaguuaaugug

SEQ ID NO: 405727 - RNA, 22 nt, Human
uaugucaaaguuaagaaauagg

SEQ ID NO: 405728 - RNA, 22 nt, Human
agcacauaccagaaccacaggu

SEQ ID NO: 405729 - RNA, 22 nt, Human
acuauacaguauguacgugcac

SEQ ID NO: 405730 - RNA, 22 nt, Human
agaauaauacugaaaugcugaa

SEQ ID NO: 405731 - RNA, 22 nt, Human
auaaagauuuuuaggcauuucu

SEQ ID NO: 405732 - RNA, 22 nt, Human
auuucacaaaccauccugauuu

SEQ ID NO: 405733 - RNA, 22 nt, Human
aaaugccuguguaaauucuagc

SEQ ID NO: 405734 - RNA, 20 nt, Human
caccagucaugagucaauac

SEQ ID NO: 405735 - RNA, 22 nt, Human
uuuuaagaugcuaguauuucag

SEQ ID NO: 405736 - RNA, 22 nt, Human
cuggcuuucauuucaagcacgu

SEQ ID NO: 405737 - RNA, 22 nt, Human
augaaacaugcuuuguggauga

SEQ ID NO: 405738 - RNA, 22 nt, Human
aaaacuguaucuucuugggacu

SEQ ID NO: 405739 - RNA, 22 nt, Human
auagaauuugcacuaaaucugc

SEQ ID NO: 405740 - RNA, 22 nt, Human
gaaaauagcagauagaccaaug

SEQ ID NO: 405741 - RNA, 22 nt, Human
aaaauccugcugacucgagaug

SEQ ID NO: 405742 - RNA, 22 nt, Human
acauaauaggugccugaauauu

SEQ ID NO: 405743 - RNA, 22 nt, Human
uucauaaucaccaaaaacugga

SEQ ID NO: 405744 - RNA, 22 nt, Human
uggauuuaauggaugaggggca

SEQ ID NO: 405745 - RNA, 22 nt, Human
ugaaauagucuaaaaaaccaga

SEQ ID NO: 405746 - RNA, 21 nt, Human
ugaaacaaucagacagagucu

SEQ ID NO: 405747 - RNA, 22 nt, Human
uacagaauuagauuauuagaga

SEQ ID NO: 405748 - RNA, 22 nt, Human
uaucagaaaucaacacacagug

SEQ ID NO: 405749 - RNA, 22 nt, Human
caaugaaagcaacugccuauaa

SEQ ID NO: 405750 - RNA, 22 nt, Human
aaugguuuucuagaacaugaaa

SEQ ID NO: 405751 - RNA, 22 nt, Human
auacagaaguuuuccacuuauu

SEQ ID NO: 405752 - RNA, 22 nt, Human
gaagaaucaagcaguaauuugu

SEQ ID NO: 405753 - RNA, 22 nt, Human
uacugaaaagccacaaggacca

SEQ ID NO: 405754 - RNA, 22 nt, Human
agaaaucauugaauuauuugcu

SEQ ID NO: 405755 - RNA, 22 nt, Human
acacagauuuuacauguuaugc

SEQ ID NO: 405756 - RNA, 22 nt, Human
auacagaacucucaguuguaua

SEQ ID NO: 405757 - RNA, 22 nt, Human
aaaucucacuguagucaaagug

SEQ ID NO: 405758 - RNA, 22 nt, Human
gcaaaauuaaacuuagcaucau

SEQ ID NO: 405759 - RNA, 22 nt, Human
agccaacuaauuaaacaacuuu

SEQ ID NO: 405760 - RNA, 18 nt, Human
caauuucaauggucugaa

SEQ ID NO: 405761 - RNA, 22 nt, Human
caucagaacaaaucgguuaaga

SEQ ID NO: 405762 - RNA, 22 nt, Human
uuagaaaugauuucaccucuuu

SEQ ID NO: 405763 - RNA, 22 nt, Human
gaaacaacuacuauugauuucu

SEQ ID NO: 405764 - RNA, 22 nt, Human
auucucaaaacauaacuucacu

SEQ ID NO: 405765 - RNA, 22 nt, Human
uuuaggcagucauugaacaagu

SEQ ID NO: 405766 - RNA, 22 nt, Human
cauggauugaauauaaauuaga

SEQ ID NO: 405767 - RNA, 21 nt, Human
agaauaaugguaucauuugcu

SEQ ID NO: 405768 - RNA, 22 nt, Human
aauacugucuuucacagauauu

SEQ ID NO: 405769 - RNA, 22 nt, Human
caucagaaugaauguucuggag

SEQ ID NO: 405770 - RNA, 22 nt, Human
ccuggaucuuuguuguaaauau

SEQ ID NO: 405771 - RNA, 22 nt, Human
uggcuuuacaucaaauugagua

SEQ ID NO: 405772 - RNA, 22 nt, Human
uaaucuacuguuuauaugaaau

SEQ ID NO: 405773 - RNA, 22 nt, Human
gcagaauuuggggguaaccuuu

SEQ ID NO: 405774 - RNA, 22 nt, Human
augguauugcaacaacugucau

SEQ ID NO: 405775 - RNA, 22 nt, Human
uggcauuuagaaaacaacaugu

SEQ ID NO: 405776 - RNA, 22 nt, Human
aaaauugaggcucauguuaaau

SEQ ID NO: 405777 - RNA, 22 nt, Human
auuccaaagguuaaugcccauu

SEQ ID NO: 405778 - RNA, 23 nt, Human
ucuguacacaucagcaucuccca

SEQ ID NO: 405779 - RNA, 22 nt, Human
ugcuauacauguacauauuagu

SEQ ID NO: 405780 - RNA, 22 nt, Human
aaagucaucuaggagcagauuu

SEQ ID NO: 405781 - RNA, 22 nt, Human
ggaucugauuaauaagguggac

SEQ ID NO: 405782 - RNA, 22 nt, Human
agaucugaggguccaagggagg

SEQ ID NO: 405783 - RNA, 22 nt, Human
gcuuuuauugucuuuacgacga

SEQ ID NO: 405784 - RNA, 22 nt, Human
uuacagaaucuacucgugguga

SEQ ID NO: 405785 - RNA, 22 nt, Human
gaauuucaggacaacuggaagg

SEQ ID NO: 405786 - RNA, 22 nt, Human
gugcuucaaguucuuaauguuu

SEQ ID NO: 405787 - RNA, 22 nt, Human
ccauggcuuucuuucauuguaa

SEQ ID NO: 405788 - RNA, 22 nt, Human
ucuauaaaugcagauaugugug

SEQ ID NO: 405789 - RNA, 23 nt, Human
acuuuauccuauaucuuuguucu

SEQ ID NO: 405790 - RNA, 22 nt, Human
aggaucugugagugcugcagac

SEQ ID NO: 405791 - RNA, 22 nt, Human
uguacaaugccagggaacacca

SEQ ID NO: 405792 - RNA, 22 nt, Human
ucuauacacacaaagaaugcuu

SEQ ID NO: 405793 - RNA, 22 nt, Human
uuuaucuguuguacauuuaugc

SEQ ID NO: 405794 - RNA, 22 nt, Human
aauggcuucugaagcacacuuu

SEQ ID NO: 405795 - RNA, 22 nt, Human
uaaaaugcacagcaguugaaag

SEQ ID NO: 405796 - RNA, 22 nt, Human
guacagaaaguacccauagaag

SEQ ID NO: 405797 - RNA, 22 nt, Human
uaagaaguacaaaaauuuucug

SEQ ID NO: 405798 - RNA, 22 nt, Human
aauguaaacagcaagagaaggg

SEQ ID NO: 405799 - RNA, 22 nt, Human
uucugugacuccucagagauuu

SEQ ID NO: 405800 - RNA, 22 nt, Human
aaucagaacuccuaccacagag

SEQ ID NO: 405801 - RNA, 22 nt, Human
acaaaauuuuuagacaaggcuu

SEQ ID NO: 405802 - RNA, 22 nt, Human
acaugucuuuuaaagucuaaua

SEQ ID NO: 405803 - RNA, 16 nt, Human
uuuccaaagggcagcu

SEQ ID NO: 405804 - RNA, 22 nt, Human
uuuaggcacaacuacucagcua

SEQ ID NO: 405805 - RNA, 20 nt, Human
uacagaaacaggacuuuugg

SEQ ID NO: 405806 - RNA, 21 nt, Human
uucaauacuauuucaauaguc

SEQ ID NO: 405807 - RNA, 22 nt, Human
gaagugaagagauuagaaauca

SEQ ID NO: 405808 - RNA, 22 nt, Human
uuacagaaugugccauuugguc

SEQ ID NO: 405809 - RNA, 22 nt, Human
auagucacugccuuccauuugu

SEQ ID NO: 405810 - RNA, 22 nt, Human
auacuuaacuguggagucauug

SEQ ID NO: 405811 - RNA, 22 nt, Human
gauuuauaguaugugcuuucag

SEQ ID NO: 405812 - RNA, 22 nt, Human
ucagaauucuacaauagaucag

SEQ ID NO: 405813 - RNA, 22 nt, Human
aagguucuaagggaagccaugc

SEQ ID NO: 405814 - RNA, 22 nt, Human
gccccagcguggcuguguuagg

SEQ ID NO: 405815 - RNA, 22 nt, Human
uuuaacuuaaucugcuugauga

SEQ ID NO: 405816 - RNA, 22 nt, Human
uucauacuaaaguguaagaugu

SEQ ID NO: 405817 - RNA, 22 nt, Human
uguauguugggucaaaguacau

SEQ ID NO: 405818 - RNA, 22 nt, Human
uuauuaaugaguacaaguuauu

SEQ ID NO: 405819 - RNA, 21 nt, Human
auuauuauaaagaccacaggg

SEQ ID NO: 405820 - RNA, 22 nt, Human
aucagaauaauuagauuucaga

SEQ ID NO: 405821 - RNA, 22 nt, Human
cuagaaauucugauucaguagg

SEQ ID NO: 405822 - RNA, 22 nt, Human
ucauaaaguucuaagaauugua

SEQ ID NO: 405823 - RNA, 22 nt, Human
aagacuuucaaaccuauguuug

SEQ ID NO: 405824 - RNA, 23 nt, Human
auagaagauuauugcaacagucc

SEQ ID NO: 405825 - RNA, 22 nt, Human
acaguccuuguguggaacauua

SEQ ID NO: 405826 - RNA, 22 nt, Human
auggaucacagugccgugggug

SEQ ID NO: 405827 - RNA, 22 nt, Human
acaacuuuucuaucauguggaa

SEQ ID NO: 405828 - RNA, 22 nt, Human
auaucaaagcuaguggaaauuu

SEQ ID NO: 405829 - RNA, 22 nt, Human
aaaaucugcuuccuuuuacaga

SEQ ID NO: 405830 - RNA, 22 nt, Human
uuuuauguuccucuuuaugcga

SEQ ID NO: 405831 - RNA, 22 nt, Human
ugauuauauucuaacuucauaa

SEQ ID NO: 405832 - RNA, 22 nt, Human
aaauacuguagauaauagaguu

SEQ ID NO: 405833 - RNA, 22 nt, Human
ucagaaauagucuuuaaaauga

SEQ ID NO: 405834 - RNA, 22 nt, Human
uaagagaacuggauagauagga

SEQ ID NO: 405835 - RNA, 22 nt, Human
uuuauaaacaguaccacggugc

SEQ ID NO: 405836 - RNA, 22 nt, Human
aauuucaaugcacucaugguug

SEQ ID NO: 405837 - RNA, 22 nt, Human
uaaaugauuuauguaugugaaa

SEQ ID NO: 405838 - RNA, 22 nt, Human
ugugaauagugccgcaauaaac

SEQ ID NO: 405839 - RNA, 22 nt, Human
cuacagaaacacuggacaugug

SEQ ID NO: 405840 - RNA, 22 nt, Human
auuauccucagaaaacauguga

SEQ ID NO: 405841 - RNA, 22 nt, Human
aaguucuaauuuugcauucagg

SEQ ID NO: 405842 - RNA, 22 nt, Human
ggaucugagagcaagcaggacc

SEQ ID NO: 405843 - RNA, 22 nt, Human
aauuccaggcagaaaugugagu

SEQ ID NO: 405844 - RNA, 22 nt, Human
caguccuugcucugggaugaug

SEQ ID NO: 405845 - RNA, 22 nt, Human
aaagccaucuguauuaagugaa

SEQ ID NO: 405846 - RNA, 22 nt, Human
uaagaaucgauguuuauuuaga

SEQ ID NO: 405847 - RNA, 22 nt, Human
gcaggaaagguugagacuuugc

SEQ ID NO: 405848 - RNA, 22 nt, Human
uaauuuaugaugcaaagaaaag

SEQ ID NO: 405849 - RNA, 22 nt, Human
aaagucauacauggugcuuacu

SEQ ID NO: 405850 - RNA, 22 nt, Human
caauuucagucucagagaguuc

SEQ ID NO: 405851 - RNA, 22 nt, Human
aaauaucauuuauaacuuuuaa

SEQ ID NO: 405852 - RNA, 22 nt, Human
gaaugaauucagcacauggaau

SEQ ID NO: 405853 - RNA, 22 nt, Human
auacagaagaccccuccgucau

SEQ ID NO: 405854 - RNA, 22 nt, Human
ugagaaaagguugagaugauaa

SEQ ID NO: 405855 - RNA, 22 nt, Human
augguuuuucaaguauucagaa

SEQ ID NO: 405856 - RNA, 22 nt, Human
uggcuuuacacauccacugccu

SEQ ID NO: 405857 - RNA, 22 nt, Human
aguauuuagcauagugguuagu

SEQ ID NO: 405858 - RNA, 21 nt, Human
ucauuuauugagaaaugacug

SEQ ID NO: 405859 - RNA, 22 nt, Human
gccuuaauuuuuuauaaucucu

SEQ ID NO: 405860 - RNA, 22 nt, Human
aaagccaugaauguuauagagg

SEQ ID NO: 405861 - RNA, 22 nt, Human
ccuggaucagucacuguugcug

SEQ ID NO: 405862 - RNA, 22 nt, Human
caguccuuucaauggugaccuu

SEQ ID NO: 405863 - RNA, 22 nt, Human
ucauaaagcucuuccaaaugua

SEQ ID NO: 405864 - RNA, 22 nt, Human
gaagaaucugaggacagucauu

SEQ ID NO: 405865 - RNA, 22 nt, Human
caacagucugguuuauauaaua

SEQ ID NO: 405866 - RNA, 22 nt, Human
uuacagaagugaaggccuuuaa

SEQ ID NO: 405867 - RNA, 22 nt, Human
ucuuuaauuguggaagagcagc

SEQ ID NO: 405868 - RNA, 22 nt, Human
guuuauaaggcccaauauuucu

SEQ ID NO: 405869 - RNA, 22 nt, Human
caaguccaggucaauuuaaagc

SEQ ID NO: 405870 - RNA, 22 nt, Human
ugaauaauuaugggaguccuaa

SEQ ID NO: 405871 - RNA, 22 nt, Human
gaugaucaucuguaaaguuaga

SEQ ID NO: 405872 - RNA, 22 nt, Human
uggcuuaagauuuaugcuuuua

SEQ ID NO: 405873 - RNA, 22 nt, Human
auaaagcaagcauaccauuaag

SEQ ID NO: 405874 - RNA, 22 nt, Human
aagccauuuguuguccuucagg

SEQ ID NO: 405875 - RNA, 22 nt, Human
aaaucaguucacguucugaggu

SEQ ID NO: 405876 - RNA, 22 nt, Human
uaauuccaccuuuuuccaacuu

SEQ ID NO: 405877 - RNA, 22 nt, Human
uuccuuagugccucuuccgcug

SEQ ID NO: 405878 - RNA, 22 nt, Human
aagaaaucugauauuuguuuca

SEQ ID NO: 405879 - RNA, 22 nt, Human
uacaguauguucuugaauuugg

SEQ ID NO: 405880 - RNA, 22 nt, Human
uuuuaugugcuggacuggcagu

SEQ ID NO: 405881 - RNA, 22 nt, Human
uguauuaacauuaauaaaaugg

SEQ ID NO: 405882 - RNA, 22 nt, Human
uaaagccacuucauucuagucu

SEQ ID NO: 405883 - RNA, 22 nt, Human
auuucauagauuguaaaucccu

SEQ ID NO: 405884 - RNA, 22 nt, Human
uggauuaguuaagaaauguuag

SEQ ID NO: 405885 - RNA, 22 nt, Human
aaaacaguuuaggcaucacagu

SEQ ID NO: 405886 - RNA, 22 nt, Human
gcaacuuuagggccagcaagua

SEQ ID NO: 405887 - RNA, 22 nt, Human
cagaauuuaaguggauuauucu

SEQ ID NO: 405888 - RNA, 22 nt, Human
gaaagaggaaggagauguauua

SEQ ID NO: 405889 - RNA, 22 nt, Human
uuacagaaaguuucccaugccg

SEQ ID NO: 405890 - RNA, 22 nt, Human
uuucaguuagcugagacccagg

SEQ ID NO: 405891 - RNA, 20 nt, Human
uuccaacucacaucucuaca

SEQ ID NO: 405892 - RNA, 22 nt, Human
uugguacaaugugcuagguagg

SEQ ID NO: 405893 - RNA, 21 nt, Human
augugaaauaucaucagagca

SEQ ID NO: 405894 - RNA, 22 nt, Human
ugcaggaacagaacucacuccc

SEQ ID NO: 405895 - RNA, 22 nt, Human
uucagaaaugaauauugguauu

SEQ ID NO: 405896 - RNA, 22 nt, Human
uuuaaagagaaugugaaggagu

SEQ ID NO: 405897 - RNA, 22 nt, Human
gaauuucagaucagagaccauu

SEQ ID NO: 405898 - RNA, 22 nt, Human
aaaucaguuguuauauuaaaga

SEQ ID NO: 405899 - RNA, 22 nt, Human
uauggcuuuuuauucaucuuac

SEQ ID NO: 405900 - RNA, 19 nt, Human
caguccuuuccgcuuucuc

SEQ ID NO: 405901 - RNA, 17 nt, Human
uaaauacacaaggguau

SEQ ID NO: 405902 - RNA, 22 nt, Human
guuaggcaugaguguguauuaa

SEQ ID NO: 405903 - RNA, 22 nt, Human
ucaauaauggcaggauaaauuu

SEQ ID NO: 405904 - RNA, 22 nt, Human
guuucacagaugguguucauau

SEQ ID NO: 405905 - RNA, 22 nt, Human
uaaacauggcuguuucaguuau

SEQ ID NO: 405906 - RNA, 22 nt, Human
acagaauuuaaagcucuagacu

SEQ ID NO: 405907 - RNA, 22 nt, Human
ugcuuauugcuuucaagacugu

SEQ ID NO: 405908 - RNA, 22 nt, Human
aauaauuagugggacagagaac

SEQ ID NO: 405909 - RNA, 22 nt, Human
auaacaugagccagauugaaag

SEQ ID NO: 405910 - RNA, 22 nt, Human
aaaguccuguuugaaggaccug

SEQ ID NO: 405911 - RNA, 22 nt, Human
gguaugaauucacuacuuccaa

SEQ ID NO: 405912 - RNA, 22 nt, Human
gcuggauccacaaauaacuuug

SEQ ID NO: 405913 - RNA, 22 nt, Human
cuggacucugcagagaaaagua

SEQ ID NO: 405914 - RNA, 22 nt, Human
uuuauucugugcuacaugaaga

SEQ ID NO: 405915 - RNA, 22 nt, Human
gugauuuagauguugaaaguga

SEQ ID NO: 405916 - RNA, 22 nt, Human
ucagcauaucuugagcuucaug

SEQ ID NO: 405917 - RNA, 22 nt, Human
uguuccaagcugcuggauaagc

SEQ ID NO: 405918 - RNA, 22 nt, Human
uuuccaaauaaggucacauucu

SEQ ID NO: 405919 - RNA, 22 nt, Human
uggcauuuuguucaguauaugg

SEQ ID NO: 405920 - RNA, 22 nt, Human
auuucaggauagccuaguuuug

SEQ ID NO: 405921 - RNA, 22 nt, Human
ccaaaauuaagccucuuauguu

SEQ ID NO: 405922 - RNA, 22 nt, Human
uuuccaaaggcuaaacucaguu

SEQ ID NO: 405923 - RNA, 22 nt, Human
cagcccagagauguuaucuagu

SEQ ID NO: 405924 - RNA, 22 nt, Human
uaucagaagacuuacaguaucg

SEQ ID NO: 405925 - RNA, 22 nt, Human
uuaauauguugaaauuuauuag

SEQ ID NO: 405926 - RNA, 22 nt, Human
cuuccaaagcacuuuauggacc

SEQ ID NO: 405927 - RNA, 22 nt, Human
uuugaauaucacaaacuuucaa

SEQ ID NO: 405928 - RNA, 22 nt, Human
ucagaaaagagaaaaucuuaua

SEQ ID NO: 405929 - RNA, 22 nt, Human
uaagagaauguuguggcuaggu

SEQ ID NO: 405930 - RNA, 22 nt, Human
uuuccaaaaguuuguucugugc

SEQ ID NO: 405931 - RNA, 22 nt, Human
uuugaagugcaaugaggauucu

SEQ ID NO: 405932 - RNA, 22 nt, Human
uuaauucuaguuuaacacuuag

SEQ ID NO: 405933 - RNA, 22 nt, Human
uacuaaacaucuggcauuaaau

SEQ ID NO: 405934 - RNA, 22 nt, Human
uuaaaaucuaaagcaguugucu

SEQ ID NO: 405935 - RNA, 22 nt, Human
cccaaaguacaaguaaacaugu

SEQ ID NO: 405936 - RNA, 19 nt, Human
auucauuuuugccuucuaa

SEQ ID NO: 405937 - RNA, 22 nt, Human
agaauuuccuaugagagauucc

SEQ ID NO: 405938 - RNA, 22 nt, Human
auggauuugcuuauacacaugu

SEQ ID NO: 405939 - RNA, 22 nt, Human
acagaauucuaguauguggcuu

SEQ ID NO: 405940 - RNA, 22 nt, Human
aauuaaauugguuuagagagga

SEQ ID NO: 405941 - RNA, 22 nt, Human
cauggcuuuguucuguuagaug

SEQ ID NO: 405942 - RNA, 22 nt, Human
cguccuuacagagggucacagc

SEQ ID NO: 405943 - RNA, 22 nt, Human
cuggcuuucuauuuggugcuau

SEQ ID NO: 405944 - RNA, 20 nt, Human
uauaacaguguugggugugu

SEQ ID NO: 405945 - RNA, 22 nt, Human
uaaguccuagcuuugguaggaa

SEQ ID NO: 405946 - RNA, 22 nt, Human
aaguccuuauguggaggggcua

SEQ ID NO: 405947 - RNA, 22 nt, Human
aguagaauagauggauacuauu

SEQ ID NO: 405948 - RNA, 22 nt, Human
cauuuacacuucuaaccacaag

SEQ ID NO: 405949 - RNA, 22 nt, Human
aguucucauugcaugagacaga

SEQ ID NO: 405950 - RNA, 22 nt, Human
cauuucaagcauugacuucuau

SEQ ID NO: 405951 - RNA, 22 nt, Human
agaaaucaugucuuauuucuau

SEQ ID NO: 405952 - RNA, 22 nt, Human
auucaagauuaauucuauguca

SEQ ID NO: 405953 - RNA, 22 nt, Human
aaagucauuguaauauaugcua

SEQ ID NO: 405954 - RNA, 22 nt, Human
aggauuuagauuuggaggaacu

SEQ ID NO: 405955 - RNA, 22 nt, Human
uaugaaagaaucucagagcaca

SEQ ID NO: 405956 - RNA, 22 nt, Human
caucagaaucugagucucugcc

SEQ ID NO: 405957 - RNA, 19 nt, Human
guuccaaaggccagaccuu

SEQ ID NO: 405958 - RNA, 18 nt, Human
augaucuuagcaaauauu

SEQ ID NO: 405959 - RNA, 18 nt, Human
uacagauuauagauacau

SEQ ID NO: 405960 - RNA, 18 nt, Human
aagucaccccugcucccu

SEQ ID NO: 405961 - RNA, 22 nt, Human
acagguuugucugauguaauga

SEQ ID NO: 405962 - RNA, 22 nt, Human
uuuaggcagcacgggcagcccu

SEQ ID NO: 405963 - RNA, 22 nt, Human
uucagaaacaucaguggaugga

SEQ ID NO: 405964 - RNA, 22 nt, Human
uaucaagugacuaucacagaac

SEQ ID NO: 405965 - RNA, 22 nt, Human
uauacagauuaacagauuuaaa

SEQ ID NO: 405966 - RNA, 22 nt, Human
uguauaaauuuaaauuccugcu

SEQ ID NO: 405967 - RNA, 22 nt, Human
aaguccuuuauccuaaaagguc

SEQ ID NO: 405968 - RNA, 22 nt, Human
uuauagaacagccuccucuaga

SEQ ID NO: 405969 - RNA, 22 nt, Human
aagaaugagcucaaagaucuua

SEQ ID NO: 405970 - RNA, 22 nt, Human
aauuucaaacuaauaggaacca

SEQ ID NO: 405971 - RNA, 22 nt, Human
uagauauaagguccuuagaaca

SEQ ID NO: 405972 - RNA, 22 nt, Human
uuaacagagugccuggcaugua

SEQ ID NO: 405973 - RNA, 22 nt, Human
gugaauaaaacaccugccaaga

SEQ ID NO: 405974 - RNA, 22 nt, Human
uuuaauauucugcauucuccuu

SEQ ID NO: 405975 - RNA, 22 nt, Human
aauaaccuuacuuauuacaugg

SEQ ID NO: 405976 - RNA, 22 nt, Human
aaugaaaauuggacccuagaac

SEQ ID NO: 405977 - RNA, 22 nt, Human
uaaugcuuuuccuucaaauaag

SEQ ID NO: 405978 - RNA, 22 nt, Human
aaaaccugauugaauucuauuu

SEQ ID NO: 405979 - RNA, 22 nt, Human
cagauauuaggagcucaauaau

SEQ ID NO: 405980 - RNA, 22 nt, Human
caaagauuuuagaauuugcaau

SEQ ID NO: 405981 - RNA, 22 nt, Human
cuucuuaaaguugucacagcug

SEQ ID NO: 405982 - RNA, 22 nt, Human
aaguuucaugauguaauuauug

SEQ ID NO: 405983 - RNA, 22 nt, Human
aagaauucacugguagagucaa

SEQ ID NO: 405984 - RNA, 22 nt, Human
auguuucauuuagauaucaggc

SEQ ID NO: 405985 - RNA, 22 nt, Human
aauaauuacccaucuuuuugua

SEQ ID NO: 405986 - RNA, 22 nt, Human
aaugccuuuccacuggguauca

SEQ ID NO: 405987 - RNA, 22 nt, Human
aucagaaauugcuaccagugga

SEQ ID NO: 405988 - RNA, 22 nt, Human
auacagaauacuaauuccugag

SEQ ID NO: 405989 - RNA, 22 nt, Human
cuacagaaucuaccucaagcca

SEQ ID NO: 405990 - RNA, 22 nt, Human
aaagacauggaacuagagaugg

SEQ ID NO: 405991 - RNA, 22 nt, Human
ugucauaaucaguuuugcaugu

SEQ ID NO: 405992 - RNA, 22 nt, Human
aaugaaacuguauauagacugu

SEQ ID NO: 405993 - RNA, 22 nt, Human
ugugaaagagucuuauaguuuc

SEQ ID NO: 405994 - RNA, 22 nt, Human
aggcuucugcugauauuucauu

SEQ ID NO: 405995 - RNA, 22 nt, Human
uuugaagucaaagauugauucc

SEQ ID NO: 405996 - RNA, 22 nt, Human
guagaaauagugguugacagga

SEQ ID NO: 405997 - RNA, 22 nt, Human
gaaaaaggauaaauacaguguu

SEQ ID NO: 405998 - RNA, 22 nt, Human
ccaugcacaccagcaggcagac

SEQ ID NO: 405999 - RNA, 22 nt, Human
gaauuucagggucugguaggaa

SEQ ID NO: 406000 - RNA, 22 nt, Human
auuauagaggguuacaguuaau

SEQ ID NO: 406001 - RNA, 22 nt, Human
gauagaaagagugguucuuuuu

SEQ ID NO: 406002 - RNA, 19 nt, Human
uccauaaugaagauagagg

SEQ ID NO: 406003 - RNA, 22 nt, Human
aaagcuaugaggcaugcauuuc

SEQ ID NO: 406004 - RNA, 22 nt, Human
aaacggauauaacagcaaacgc

SEQ ID NO: 406005 - RNA, 22 nt, Human
gaguccuugucauaauucagug

SEQ ID NO: 406006 - RNA, 22 nt, Human
cuuaggcagacugcugaugcag

SEQ ID NO: 406007 - RNA, 21 nt, Human
gauuuauaagccuuaagccua

SEQ ID NO: 406008 - RNA, 23 nt, Human
agaucugauguuaccaagaauug

SEQ ID NO: 406009 - RNA, 20 nt, Human
aguacaauguaugauucaga

SEQ ID NO: 406010 - RNA, 21 nt, Human
auggcuuuuuuaaagcuugug

SEQ ID NO: 406011 - RNA, 22 nt, Human
aaugaacauauaaagagaucuu

SEQ ID NO: 406012 - RNA, 23 nt, Human
ucaucaaacagcugcucaagaaa

SEQ ID NO: 406013 - RNA, 22 nt, Human
ugucaccaugccagcuucugcc

SEQ ID NO: 406014 - RNA, 22 nt, Human
ugaauaaucuuggguauuaaua

SEQ ID NO: 406015 - RNA, 22 nt, Human
gcacaauaauuuuuuuaagagg

SEQ ID NO: 406016 - RNA, 22 nt, Human
uguacaaugccgagacuaacuc

SEQ ID NO: 406017 - RNA, 19 nt, Human
uggauuuauauucuuuauc

SEQ ID NO: 406018 - RNA, 22 nt, Human
uguacaauagcuauuaucucca

SEQ ID NO: 406019 - RNA, 19 nt, Human
uuucagacucaucuccagc

SEQ ID NO: 406020 - RNA, 22 nt, Human
gcagggcaaacccagguguuca

SEQ ID NO: 406021 - RNA, 22 nt, Human
caaagucauggggaugcagguc

SEQ ID NO: 406022 - RNA, 22 nt, Human
ugaaacaaugugaaguugcuga

SEQ ID NO: 406023 - RNA, 21 nt, Human
uuacagaauccaugggaaguc

SEQ ID NO: 406024 - RNA, 22 nt, Human
agaucugaccuaaccccaccac

SEQ ID NO: 406025 - RNA, 22 nt, Human
gcuagaucucucauaaauucca

SEQ ID NO: 406026 - RNA, 22 nt, Human
auacagaauuugcccuuuucau

SEQ ID NO: 406027 - RNA, 22 nt, Human
ccuggaucagagccagagaagc

SEQ ID NO: 406028 - RNA, 22 nt, Human
uagaacauaagucauucauuug

SEQ ID NO: 406029 - RNA, 22 nt, Human
uuccucuagcuucucacuaaca

SEQ ID NO: 406030 - RNA, 22 nt, Human
caggccaggguugagaagagaa

SEQ ID NO: 406031 - RNA, 22 nt, Human
aucuauacccaucaugauuuaa

SEQ ID NO: 406032 - RNA, 22 nt, Human
ugaaagguguccaauauuucuc

SEQ ID NO: 406033 - RNA, 22 nt, Human
uggauuuaguucuucacaggcc

SEQ ID NO: 406034 - RNA, 19 nt, Human
cuauacagccucugaggaa

SEQ ID NO: 406035 - RNA, 20 nt, Human
agaaaaaguguggaaauuuc

SEQ ID NO: 406036 - RNA, 22 nt, Human
auuucaacauucucaguuguag

SEQ ID NO: 406037 - RNA, 22 nt, Human
agauuuccuaugguaauuauag

SEQ ID NO: 406038 - RNA, 22 nt, Human
uguacaauguguuuguuggcuu

SEQ ID NO: 406039 - RNA, 22 nt, Human
caauuucaauacaaaauacauu

SEQ ID NO: 406040 - RNA, 21 nt, Human
caagccagaccaauagcagcc

SEQ ID NO: 406041 - RNA, 22 nt, Human
acaaaaagggagaugagguaga

SEQ ID NO: 406042 - RNA, 22 nt, Human
ugaagaaucagauuggccugcg

SEQ ID NO: 406043 - RNA, 22 nt, Human
aaugaacagauacacauaggca

SEQ ID NO: 406044 - RNA, 22 nt, Human
aaaucaguuaagaugaggccau

SEQ ID NO: 406045 - RNA, 22 nt, Human
gucacagaguuauuaauugugu

SEQ ID NO: 406046 - RNA, 22 nt, Human
aaagcagucacuccagugugau

SEQ ID NO: 406047 - RNA, 22 nt, Human
uguagaaagaauauguuucaua

SEQ ID NO: 406048 - RNA, 22 nt, Human
auucauuagccacuaacuagca

SEQ ID NO: 406049 - RNA, 22 nt, Human
cuuccaaauguaaauaaguuuc

SEQ ID NO: 406050 - RNA, 22 nt, Human
gaauuuuucuggaagcaauuau

SEQ ID NO: 406051 - RNA, 22 nt, Human
auagcuuucuuaaauauauaaa

SEQ ID NO: 406052 - RNA, 22 nt, Human
gcagaauuuucuguuuucuaga

SEQ ID NO: 406053 - RNA, 22 nt, Human
auuccaaaaggauguuagaaug

SEQ ID NO: 406054 - RNA, 22 nt, Human
aggauuuaucaggaacucucuu

SEQ ID NO: 406055 - RNA, 22 nt, Human
aaacaggcaucacucagcaaag

SEQ ID NO: 406056 - RNA, 22 nt, Human
uggcuucaaaaucuaguggucu

SEQ ID NO: 406057 - RNA, 22 nt, Human
aaaacauguccauacagaaacu

SEQ ID NO: 406058 - RNA, 22 nt, Human
aguccuuagaacacuguaucug

SEQ ID NO: 406059 - RNA, 22 nt, Human
uaauuucaaguuuagggcucua

SEQ ID NO: 406060 - RNA, 22 nt, Human
uacuagaaccucacaacaaucc

SEQ ID NO: 406061 - RNA, 18 nt, Human
ucauagaagugaaucaga

SEQ ID NO: 406062 - RNA, 22 nt, Human
caguccuugauccaauaguggg

SEQ ID NO: 406063 - RNA, 22 nt, Human
aagacagugacagucacaauug

SEQ ID NO: 406064 - RNA, 22 nt, Human
uuggagagauuaucagaccagc

SEQ ID NO: 406065 - RNA, 22 nt, Human
aagauauagauaaaacuaugca

SEQ ID NO: 406066 - RNA, 22 nt, Human
acaauuccacauggcaugcagg

SEQ ID NO: 406067 - RNA, 23 nt, Human
acaacuuuacagauacauuuugu

SEQ ID NO: 406068 - RNA, 22 nt, Human
ccaguacugucuccaauauucc

SEQ ID NO: 406069 - RNA, 22 nt, Human
ucacaucauuaagacuucuccu

SEQ ID NO: 406070 - RNA, 22 nt, Human
cuaaaauuaucaagauaauucc

SEQ ID NO: 406071 - RNA, 22 nt, Human
aaauagcagccuuuaguuaaca

SEQ ID NO: 406072 - RNA, 22 nt, Human
uuaauuacaaaacacauagguu

SEQ ID NO: 406073 - RNA, 22 nt, Human
uggcuuuagguugcauguuucu

SEQ ID NO: 406074 - RNA, 22 nt, Human
ucuuuaaucauaaccaagaugg

SEQ ID NO: 406075 - RNA, 22 nt, Human
uuuaggcauugaauuagaauag

SEQ ID NO: 406076 - RNA, 22 nt, Human
uauacagauggaaagauacaca

SEQ ID NO: 406077 - RNA, 22 nt, Human
aguguuuaaacugaagugauga

SEQ ID NO: 406078 - RNA, 22 nt, Human
auggcuuuuuagacuuugguac

SEQ ID NO: 406079 - RNA, 22 nt, Human
aauuauauuguggugugaaugu

SEQ ID NO: 406080 - RNA, 22 nt, Human
acuuuuaaaugaguuucaguug

SEQ ID NO: 406081 - RNA, 22 nt, Human
ucaguaaaguucuuucuugcug

SEQ ID NO: 406082 - RNA, 22 nt, Human
aaauucuucagguaauuuugau

SEQ ID NO: 406083 - RNA, 22 nt, Human
aaaaugcugggaaaguuggaau

SEQ ID NO: 406084 - RNA, 22 nt, Human
cauagaaaucaggugagaaucu

SEQ ID NO: 406085 - RNA, 22 nt, Human
uccuuaauucugugcaauaugu

SEQ ID NO: 406086 - RNA, 22 nt, Human
auucucaauggcuacuuucaua

SEQ ID NO: 406087 - RNA, 22 nt, Human
gcuucacaggcaaguuaagccu

SEQ ID NO: 406088 - RNA, 22 nt, Human
ugaaagguuaaaaguaguauug

SEQ ID NO: 406089 - RNA, 22 nt, Human
aauuauccuuaaugcaguaagc

SEQ ID NO: 406090 - RNA, 22 nt, Human
acugguuuuccagguuacuucu

SEQ ID NO: 406091 - RNA, 22 nt, Human
uauguaaaguagauggcaggua

SEQ ID NO: 406092 - RNA, 22 nt, Human
auccaaagauggaaagaacuuu

SEQ ID NO: 406093 - RNA, 22 nt, Human
agaagucaaguggucuaugaaa

SEQ ID NO: 406094 - RNA, 22 nt, Human
ggauuuacaaguuuaacucuca

SEQ ID NO: 406095 - RNA, 22 nt, Human
uucaaacacagacagcagcaug

SEQ ID NO: 406096 - RNA, 22 nt, Human
aaagucauggaaaaucuuggaa

SEQ ID NO: 406097 - RNA, 22 nt, Human
aauuuacaguugcugaugguac

SEQ ID NO: 406098 - RNA, 22 nt, Human
cuucuuaacuguauauacuaug

SEQ ID NO: 406099 - RNA, 22 nt, Human
auauaugcauguguacuuaugu

SEQ ID NO: 406100 - RNA, 22 nt, Human
aaucagaaagaggucauguugc

SEQ ID NO: 406101 - RNA, 22 nt, Human
gcagaauuggauaguugugaua

SEQ ID NO: 406102 - RNA, 22 nt, Human
uuaacacuugaacucuacaugu

SEQ ID NO: 406103 - RNA, 22 nt, Human
auccuuagguggugcaucaggg

SEQ ID NO: 406104 - RNA, 22 nt, Human
ugaauaaucauguccauagugu

SEQ ID NO: 406105 - RNA, 22 nt, Human
auggcuuugcucaaguuuagcc

SEQ ID NO: 406106 - RNA, 22 nt, Human
uccauuuagcuggcaaacaaug

SEQ ID NO: 406107 - RNA, 22 nt, Human
aucuauacucagaguuaauauc

SEQ ID NO: 406108 - RNA, 22 nt, Human
cuggcuuucccuggacaacagc

SEQ ID NO: 406109 - RNA, 22 nt, Human
agcauaaaggcacuagaaagag

SEQ ID NO: 406110 - RNA, 22 nt, Human
ugcuuauucuuuccacaauuca

SEQ ID NO: 406111 - RNA, 22 nt, Human
aggauuuauuccagaaaugcaa

SEQ ID NO: 406112 - RNA, 22 nt, Human
uaaagucauaagaguggauccg

SEQ ID NO: 406113 - RNA, 22 nt, Human
uaugaaauuuaaacacagauca

SEQ ID NO: 406114 - RNA, 22 nt, Human
cucuaauccuuugucccugggu

SEQ ID NO: 406115 - RNA, 22 nt, Human
augaaacacacacgcgcauacu

SEQ ID NO: 406116 - RNA, 22 nt, Human
aauauuaucaaaagcuuuuuca

SEQ ID NO: 406117 - RNA, 22 nt, Human
caauacaauuaccaguuaauca

SEQ ID NO: 406118 - RNA, 22 nt, Human
auacaugugggucuaaacauau

SEQ ID NO: 406119 - RNA, 22 nt, Human
ugcuuuaaccaucuuguuugga

SEQ ID NO: 406120 - RNA, 22 nt, Human
cuauaauuaugcucaaaaugua

SEQ ID NO: 406121 - RNA, 22 nt, Human
ccuuuaauuuacaauguuaauu

SEQ ID NO: 406122 - RNA, 22 nt, Human
aaacugauaaaauaaguacauu

SEQ ID NO: 406123 - RNA, 22 nt, Human
ugaagaaucccagggaauuugg

SEQ ID NO: 406124 - RNA, 22 nt, Human
auucuuaauugccaugcuguau

SEQ ID NO: 406125 - RNA, 22 nt, Human
auacuguaauaccuaaaugaac

SEQ ID NO: 406126 - RNA, 22 nt, Human
ugaauaauccacagucauucau

SEQ ID NO: 406127 - RNA, 22 nt, Human
ucaaaauuagugaccaaaggca

SEQ ID NO: 406128 - RNA, 22 nt, Human
aucuaaaguguuucaugaaaga

SEQ ID NO: 406129 - RNA, 22 nt, Human
gaauuucauuuguuuccuacca

SEQ ID NO: 406130 - RNA, 22 nt, Human
uggauuuauggagaccgaaagu

SEQ ID NO: 406131 - RNA, 22 nt, Human
uacaugaaccuuuaugugugau

SEQ ID NO: 406132 - RNA, 22 nt, Human
uuugaagacagaucaauauaag

SEQ ID NO: 406133 - RNA, 22 nt, Human
cugauacauaguagcaugucau

SEQ ID NO: 406134 - RNA, 22 nt, Human
cucuuaaugaccuuaauucaag

SEQ ID NO: 406135 - RNA, 22 nt, Human
ugucaccagcugcuccucagga

SEQ ID NO: 406136 - RNA, 22 nt, Human
aaugucuuuaaagugcaauaga

SEQ ID NO: 406137 - RNA, 22 nt, Human
cagauacuguaaaauuucagua

SEQ ID NO: 406138 - RNA, 22 nt, Human
aaaguguacuaugucaugaaca

SEQ ID NO: 406139 - RNA, 20 nt, Human
agaagucagcucagaaguga

SEQ ID NO: 406140 - RNA, 22 nt, Human
uagucaccagcuacaggacagc

SEQ ID NO: 406141 - RNA, 22 nt, Human
uaacagaaaggggacagaaaua

SEQ ID NO: 406142 - RNA, 22 nt, Human
uacacauguuuggcaaguaugu

SEQ ID NO: 406143 - RNA, 22 nt, Human
gagauuuagagagacuuaaaca

SEQ ID NO: 406144 - RNA, 22 nt, Human
uaacagaagaaaacauauugga

SEQ ID NO: 406145 - RNA, 22 nt, Human
ucuuaauugagaacaguguagg

SEQ ID NO: 406146 - RNA, 22 nt, Human
auuaggcagacaacguagccgg

SEQ ID NO: 406147 - RNA, 22 nt, Human
uugaagaaagucauauauaaug

SEQ ID NO: 406148 - RNA, 20 nt, Human
ugcaggaauuugcauuccuu

SEQ ID NO: 406149 - RNA, 22 nt, Human
cauucauucuguaaguaacuau

SEQ ID NO: 406150 - RNA, 22 nt, Human
acuuuaauuaaugaacuguggc

SEQ ID NO: 406151 - RNA, 22 nt, Human
augaacaagagagggaagauuc

SEQ ID NO: 406152 - RNA, 22 nt, Human
aaucagucucauuuagcaggga

SEQ ID NO: 406153 - RNA, 22 nt, Human
auggcuuucagauggugaaaga

SEQ ID NO: 406154 - RNA, 22 nt, Human
auggcuuugaaguaauguaauu

SEQ ID NO: 406155 - RNA, 22 nt, Human
aauaauauuugaagcuucaaag

SEQ ID NO: 406156 - RNA, 22 nt, Human
ugugugaaucuauugaauauau

SEQ ID NO: 406157 - RNA, 22 nt, Human
uuucaaguguccugauuaaugg

SEQ ID NO: 406158 - RNA, 22 nt, Human
aaacauguuuucugaauauuuu

SEQ ID NO: 406159 - RNA, 22 nt, Human
aguaugaacggaaggccuggga

SEQ ID NO: 406160 - RNA, 20 nt, Human
agaaucugacccagagagac

SEQ ID NO: 406161 - RNA, 22 nt, Human
gcacaauaauucuuguuuugcu

SEQ ID NO: 406162 - RNA, 22 nt, Human
uuuaggcagcuacauacuaacu

SEQ ID NO: 406163 - RNA, 22 nt, Human
uggauuagguacuaugaauaua

SEQ ID NO: 406164 - RNA, 20 nt, Human
caucagaaauccugacccac

SEQ ID NO: 406165 - RNA, 22 nt, Human
gcuggaucccugugggaguggu

SEQ ID NO: 406166 - RNA, 22 nt, Human
aaauacugggcucaaaaggguu

SEQ ID NO: 406167 - RNA, 22 nt, Human
cuacagaaaccuuuuucauaca

SEQ ID NO: 406168 - RNA, 22 nt, Human
aaaaguguucaggaagaauaau

SEQ ID NO: 406169 - RNA, 22 nt, Human
caucagaaggccagaggguagc

SEQ ID NO: 406170 - RNA, 22 nt, Human
cauuucaaguaacagauugcuu

SEQ ID NO: 406171 - RNA, 22 nt, Human
uuuaauacuauggggaugaaca

SEQ ID NO: 406172 - RNA, 22 nt, Human
guauuuaauuccauuaaguuag

SEQ ID NO: 406173 - RNA, 22 nt, Human
aaacuuugguauguagcaaaac

SEQ ID NO: 406174 - RNA, 21 nt, Human
agaagucaauugaacugaaau

SEQ ID NO: 406175 - RNA, 22 nt, Human
cuccuuagugccucugcacgag

SEQ ID NO: 406176 - RNA, 22 nt, Human
uuauccaagcagaagcugcaca

SEQ ID NO: 406177 - RNA, 21 nt, Human
cauuucaaagagcuggaaauc

SEQ ID NO: 406178 - RNA, 22 nt, Human
ugccauuuugagauguuaauga

SEQ ID NO: 406179 - RNA, 22 nt, Human
gauuuacagaucuaagggucac

SEQ ID NO: 406180 - RNA, 22 nt, Human
aggcaacuguuugauaauguug

SEQ ID NO: 406181 - RNA, 22 nt, Human
augcuuuaaacuauaaauccac

SEQ ID NO: 406182 - RNA, 22 nt, Human
gaugggauuuuuuauguguuca

SEQ ID NO: 406183 - RNA, 22 nt, Human
cuuaauuacccaaugugguagg

SEQ ID NO: 406184 - RNA, 22 nt, Human
guuuacauguacucauuauacu

SEQ ID NO: 406185 - RNA, 22 nt, Human
caucagaauguuagagaaggga

SEQ ID NO: 406186 - RNA, 22 nt, Human
caucagaacgugagcuccuugu

SEQ ID NO: 406187 - RNA, 22 nt, Human
uagaaacagcauauauuagccc

SEQ ID NO: 406188 - RNA, 22 nt, Human
aaagucauguaaugauaugauu

SEQ ID NO: 406189 - RNA, 22 nt, Human
auggcauuugaaucugucuuuu

SEQ ID NO: 406190 - RNA, 22 nt, Human
ugaauaauuccuuuuugucaag

SEQ ID NO: 406191 - RNA, 22 nt, Human
aucuaaaaggagcucuuuaucu

SEQ ID NO: 406192 - RNA, 22 nt, Human
uaucauaaguuaauuaaacagu

SEQ ID NO: 406193 - RNA, 19 nt, Human
agcaaauacaucaaaauug

SEQ ID NO: 406194 - RNA, 22 nt, Human
uauggaaagggaguuuaauuug

SEQ ID NO: 406195 - RNA, 22 nt, Human
gauuuccaggucauuaauaaag

SEQ ID NO: 406196 - RNA, 22 nt, Human
ugcuuaauacguauuugcugga

SEQ ID NO: 406197 - RNA, 22 nt, Human
aaagcauuucaugucuagaaag

SEQ ID NO: 406198 - RNA, 22 nt, Human
ugguuuaauuuccauuuccuug

SEQ ID NO: 406199 - RNA, 22 nt, Human
caaugaaauugagauccagaga

SEQ ID NO: 406200 - RNA, 18 nt, Human
auauguuaauuagguagg

SEQ ID NO: 406201 - RNA, 22 nt, Human
uucacagauuucccugcacaug

SEQ ID NO: 406202 - RNA, 22 nt, Human
agauauaauaauuuacaagugu

SEQ ID NO: 406203 - RNA, 22 nt, Human
uguccuuauaagaaaaggaaau

SEQ ID NO: 406204 - RNA, 22 nt, Human
auccauuugaaagaacagucca

SEQ ID NO: 406205 - RNA, 22 nt, Human
uaguaucuauuaguaacaagag

SEQ ID NO: 406206 - RNA, 22 nt, Human
ucaauacuuaagcuuaauucua

SEQ ID NO: 406207 - RNA, 22 nt, Human
aaguccuucccaagcauguacc

SEQ ID NO: 406208 - RNA, 21 nt, Human
gaguccuuccaauguccucag

SEQ ID NO: 406209 - RNA, 22 nt, Human
aagcauuugugaaauucagaug

SEQ ID NO: 406210 - RNA, 22 nt, Human
auuccaaaggcuggccuggagg

SEQ ID NO: 406211 - RNA, 22 nt, Human
ucaguaaaugguugcuguuauu

SEQ ID NO: 406212 - RNA, 22 nt, Human
uuacagaaguauugagagaucc

SEQ ID NO: 406213 - RNA, 22 nt, Human
augugaaaaauuucuuauuaca

SEQ ID NO: 406214 - RNA, 22 nt, Human
uaacauguuaagaaauuagaua

SEQ ID NO: 406215 - RNA, 22 nt, Human
aaaaugcuauuucauggaggag

SEQ ID NO: 406216 - RNA, 22 nt, Human
uacacaugaucauuuaguagca

SEQ ID NO: 406217 - RNA, 23 nt, Human
aguacaauaaguauaauucuuuc

SEQ ID NO: 406218 - RNA, 22 nt, Human
auuccaaacgccucgcggacuu

SEQ ID NO: 406219 - RNA, 22 nt, Human
uagaauaaguugaugauauaug

SEQ ID NO: 406220 - RNA, 22 nt, Human
uuccuuagcuccucauggccug

SEQ ID NO: 406221 - RNA, 22 nt, Human
gucaaacauagggacuuugugg

SEQ ID NO: 406222 - RNA, 22 nt, Human
uugauacuauuaagcacugggc

SEQ ID NO: 406223 - RNA, 22 nt, Human
ugcaggaaaacaccuaucaccc

SEQ ID NO: 406224 - RNA, 22 nt, Human
cugaaagguauaaauaagacuu

SEQ ID NO: 406225 - RNA, 22 nt, Human
aaagaaucacauccuucagcaa

SEQ ID NO: 406226 - RNA, 22 nt, Human
ucaaacagaggaacaauuguuu

SEQ ID NO: 406227 - RNA, 22 nt, Human
ugcaggaauagcuacagagcug

SEQ ID NO: 406228 - RNA, 22 nt, Human
uuaauucugccuuucauguaac

SEQ ID NO: 406229 - RNA, 22 nt, Human
cuggcuuucuguuauaaagaca

SEQ ID NO: 406230 - RNA, 22 nt, Human
uuuacagaauguugaauuuggg

SEQ ID NO: 406231 - RNA, 22 nt, Human
cauagcuuagggguuaaacuca

SEQ ID NO: 406232 - RNA, 22 nt, Human
aaugcuuauaccuaaugaucuu

SEQ ID NO: 406233 - RNA, 22 nt, Human
aauaauuuuagcucagaguugu

SEQ ID NO: 406234 - RNA, 22 nt, Human
auacacagcgaugagaggaggc

SEQ ID NO: 406235 - RNA, 22 nt, Human
uguauacaauucacacuuccca

SEQ ID NO: 406236 - RNA, 22 nt, Human
aagucauugguagcuugauagg

SEQ ID NO: 406237 - RNA, 22 nt, Human
caaaggcaggcccccugugcag

SEQ ID NO: 406238 - RNA, 22 nt, Human
gcagaauugauggagaacuuaa

SEQ ID NO: 406239 - RNA, 22 nt, Human
uuacagaaaauguguuuuaacu

SEQ ID NO: 406240 - RNA, 22 nt, Human
ucaaaauuaaaccaacguccag

SEQ ID NO: 406241 - RNA, 22 nt, Human
ugcagggcccucauuccugucc

SEQ ID NO: 406242 - RNA, 22 nt, Human
uguuuaauaauucuaugauagu

SEQ ID NO: 406243 - RNA, 22 nt, Human
uuucauaaggguuucuagacuu

SEQ ID NO: 406244 - RNA, 23 nt, Human
ucuauacauacugcagccucugg

SEQ ID NO: 406245 - RNA, 21 nt, Human
agucccauccgguaagcaagc

SEQ ID NO: 406246 - RNA, 22 nt, Human
uuccaaaguuaguuauuagaaa

SEQ ID NO: 406247 - RNA, 22 nt, Human
uuauuuauggcccucaccugau

SEQ ID NO: 406248 - RNA, 22 nt, Human
gaaugaaagauuugcauucuau

SEQ ID NO: 406249 - RNA, 22 nt, Human
aaucauaauucaaauaagcuua

SEQ ID NO: 406250 - RNA, 22 nt, Human
uuacauaacgguaugaaaaaug

SEQ ID NO: 406251 - RNA, 22 nt, Human
acaaagaucuugcuuuccuacu

SEQ ID NO: 406252 - RNA, 22 nt, Human
auguauaaugcuaauuagcuag

SEQ ID NO: 406253 - RNA, 22 nt, Human
ucccugggcuucuccagacuug

SEQ ID NO: 406254 - RNA, 21 nt, Human
uuuaaagaauaggaagggagg

SEQ ID NO: 406255 - RNA, 22 nt, Human
cacccagugaaggagcaagagg

SEQ ID NO: 406256 - RNA, 22 nt, Human
aaauuucaguuaccuuuacguu

SEQ ID NO: 406257 - RNA, 22 nt, Human
uguaacaaaauaccuuggauug

SEQ ID NO: 406258 - RNA, 23 nt, Human
uuaagacuggcugaacuuaguag

SEQ ID NO: 406259 - RNA, 22 nt, Human
uaagucaucacauugcagagau

SEQ ID NO: 406260 - RNA, 22 nt, Human
auuuccaggagaaaggauuuua

SEQ ID NO: 406261 - RNA, 22 nt, Human
aggcagaccaugaaucaugacc

SEQ ID NO: 406262 - RNA, 22 nt, Human
ucccaaagcuacucuucugacu

SEQ ID NO: 406263 - RNA, 17 nt, Human
uaaagccagucaaguca

SEQ ID NO: 406264 - RNA, 22 nt, Human
gacuaugugaagugugaauagg

SEQ ID NO: 406265 - RNA, 22 nt, Human
cuuaaagaguauuuaauauaau

SEQ ID NO: 406266 - RNA, 22 nt, Human
ggcaccagccaccuauuucuag

SEQ ID NO: 406267 - RNA, 22 nt, Human
uugaauaauuaauuacacucag

SEQ ID NO: 406268 - RNA, 23 nt, Human
aagaaugcuucugaagagcugcc

SEQ ID NO: 406269 - RNA, 22 nt, Human
ugucaccacauuugucaauauc

SEQ ID NO: 406270 - RNA, 22 nt, Human
auucuaacacaugcucuaagaa

SEQ ID NO: 406271 - RNA, 22 nt, Human
gaucagaauucuuguguguuuc

SEQ ID NO: 406272 - RNA, 22 nt, Human
guaaacaacacaaaucauuuga

SEQ ID NO: 406273 - RNA, 22 nt, Human
gugaauaauuuuuuaguauaag

SEQ ID NO: 406274 - RNA, 22 nt, Human
uaauuucagugggcucugggcu

SEQ ID NO: 406275 - RNA, 22 nt, Human
aaaguccagagggcacacugaa

SEQ ID NO: 406276 - RNA, 22 nt, Human
caguccuucuccauuaaggcuc

SEQ ID NO: 406277 - RNA, 19 nt, Human
cagaaauagcgaaguguaa

SEQ ID NO: 406278 - RNA, 22 nt, Human
auaaagcauacuuuguaugacu

SEQ ID NO: 406279 - RNA, 22 nt, Human
aaucagaauuuguccccugagu

SEQ ID NO: 406280 - RNA, 22 nt, Human
uguagaaauuaguaagaucaac

SEQ ID NO: 406281 - RNA, 22 nt, Human
uuccuuagcugucccuggaaau

SEQ ID NO: 406282 - RNA, 22 nt, Human
gucaaacagccuccuguucuaa

SEQ ID NO: 406283 - RNA, 22 nt, Human
uaaaguuuguagcaauugauau

SEQ ID NO: 406284 - RNA, 22 nt, Human
ugaaacaagauccacagacuug

SEQ ID NO: 406285 - RNA, 22 nt, Human
aggcuucugugagcucauacaa

SEQ ID NO: 406286 - RNA, 22 nt, Human
uuuauucuauaggcauuaagca

SEQ ID NO: 406287 - RNA, 22 nt, Human
auaaaaguaggaccaacuuaca

SEQ ID NO: 406288 - RNA, 22 nt, Human
cugaauaauuuuauaguugcug

SEQ ID NO: 406289 - RNA, 20 nt, Human
auucuacaagaauaagcaug

SEQ ID NO: 406290 - RNA, 22 nt, Human
uaggaaaacgugauuuucucac

SEQ ID NO: 406291 - RNA, 22 nt, Human
ccuggauccaugaaaaggcuac

SEQ ID NO: 406292 - RNA, 22 nt, Human
uauauuaaaugaccaguuuuaa

SEQ ID NO: 406293 - RNA, 22 nt, Human
auuccaaacucuuucccugucg

SEQ ID NO: 406294 - RNA, 22 nt, Human
ggcgcacaaugugcagguuugu

SEQ ID NO: 406295 - RNA, 22 nt, Human
cuuaauuacuguccaauaugca

SEQ ID NO: 406296 - RNA, 22 nt, Human
ucaaaauucuagggagaauggu

SEQ ID NO: 406297 - RNA, 22 nt, Human
uggcuuuacugucauucuuaug

SEQ ID NO: 406298 - RNA, 22 nt, Human
agucaccaucuguggcagccug

SEQ ID NO: 406299 - RNA, 22 nt, Human
aauuuacaggugcacucgccau

SEQ ID NO: 406300 - RNA, 22 nt, Human
aagcauuugguucugaagacuc

SEQ ID NO: 406301 - RNA, 22 nt, Human
auaugaaaagaagucaccauug

SEQ ID NO: 406302 - RNA, 22 nt, Human
augguuuacaauguuuucaguu

SEQ ID NO: 406303 - RNA, 22 nt, Human
cuggauuuaggacuaguccaag

SEQ ID NO: 406304 - RNA, 22 nt, Human
uaaagucagauaucuggguuga

SEQ ID NO: 406305 - RNA, 22 nt, Human
uugaauaaaugagcagugaauu

SEQ ID NO: 406306 - RNA, 22 nt, Human
ucuuuaauaucugccccagagc

SEQ ID NO: 406307 - RNA, 23 nt, Human
aaaguguagccagguuaagaacc

SEQ ID NO: 406308 - RNA, 22 nt, Human
ugaaugaacuaaaucauaguuc

SEQ ID NO: 406309 - RNA, 22 nt, Human
uuuacagauguggaaagugagc

SEQ ID NO: 406310 - RNA, 22 nt, Human
uucaauucuaaacuaauauucu

SEQ ID NO: 406311 - RNA, 22 nt, Human
gaucugaagagcaaugaaauau

SEQ ID NO: 406312 - RNA, 22 nt, Human
ucacaucaacauuauagcauga

SEQ ID NO: 406313 - RNA, 22 nt, Human
caaacuggcuaugggaaucuug

SEQ ID NO: 406314 - RNA, 22 nt, Human
gguacaaugguucauuuuaugu

SEQ ID NO: 406315 - RNA, 22 nt, Human
auggcuuucucuaaugugguau

SEQ ID NO: 406316 - RNA, 22 nt, Human
acuagaaauuacucagaauaaa

SEQ ID NO: 406317 - RNA, 22 nt, Human
uaucagaaaugccuuaaauugg

SEQ ID NO: 406318 - RNA, 22 nt, Human
uauacuuuccugcaacuuugau

SEQ ID NO: 406319 - RNA, 21 nt, Human
cauuuacaugacagauugguu

SEQ ID NO: 406320 - RNA, 22 nt, Human
uucuucaaaauccagcaugauu

SEQ ID NO: 406321 - RNA, 22 nt, Human
aaucagaaauucuacaucacaa

SEQ ID NO: 406322 - RNA, 22 nt, Human
uauacagaacugcacgugcacg

SEQ ID NO: 406323 - RNA, 22 nt, Human
gagucaccuugggucagcgaua

SEQ ID NO: 406324 - RNA, 21 nt, Human
agagacugucacugcaguacc

SEQ ID NO: 406325 - RNA, 22 nt, Human
aagcaauagcaacaacuuuaca

SEQ ID NO: 406326 - RNA, 22 nt, Human
augaauaaacaggugccucuuc

SEQ ID NO: 406327 - RNA, 22 nt, Human
uuagaaaugucacagaucugau

SEQ ID NO: 406328 - RNA, 22 nt, Human
agcauuuagucuuuauugcagc

SEQ ID NO: 406329 - RNA, 22 nt, Human
uucacacacagcuuccuauugu

SEQ ID NO: 406330 - RNA, 22 nt, Human
cacauacuuguguguacauaug

SEQ ID NO: 406331 - RNA, 22 nt, Human
caucagucuagauucuaguacc

SEQ ID NO: 406332 - RNA, 22 nt, Human
augccaaagcccaaguucauca

SEQ ID NO: 406333 - RNA, 22 nt, Human
cagauuuaagagauaaacagug

SEQ ID NO: 406334 - RNA, 22 nt, Human
agccauuuuccugaaauauaac

SEQ ID NO: 406335 - RNA, 22 nt, Human
uguucuagcaacacaguuuugg

SEQ ID NO: 406336 - RNA, 21 nt, Human
ccaagacucccaucuaguggu

SEQ ID NO: 406337 - RNA, 22 nt, Human
uuauccaacaugacuuaugucc

SEQ ID NO: 406338 - RNA, 22 nt, Human
aguucacagaauggccagaacu

SEQ ID NO: 406339 - RNA, 22 nt, Human
acaaagucacaauaauuaaccu

SEQ ID NO: 406340 - RNA, 22 nt, Human
aucagaaacucuuagagcaggg

SEQ ID NO: 406341 - RNA, 22 nt, Human
auggcuuaagaaugcuuuugug

SEQ ID NO: 406342 - RNA, 22 nt, Human
cuuaggcaguuuaggaaagaga

SEQ ID NO: 406343 - RNA, 22 nt, Human
auuacacuuguucaucaucacc

SEQ ID NO: 406344 - RNA, 22 nt, Human
guacaauagucccuguuuggau

SEQ ID NO: 406345 - RNA, 22 nt, Human
aaagacauuagcuuagauguca

SEQ ID NO: 406346 - RNA, 22 nt, Human
aaucuagucuccuuaagucuuu

SEQ ID NO: 406347 - RNA, 22 nt, Human
gauucaauguugcagauggaau

SEQ ID NO: 406348 - RNA, 22 nt, Human
auauaaagaaguggaaaaugag

SEQ ID NO: 406349 - RNA, 22 nt, Human
caagucauuacugaaaugucac

SEQ ID NO: 406350 - RNA, 22 nt, Human
uuucagacaggacuucauaugu

SEQ ID NO: 406351 - RNA, 22 nt, Human
aaauuucaagcaaaguagcuau

SEQ ID NO: 406352 - RNA, 22 nt, Human
aacuggauuaacuggcucaaau

SEQ ID NO: 406353 - RNA, 22 nt, Human
agucaccagguuuuagagaccu

SEQ ID NO: 406354 - RNA, 22 nt, Human
uuccauaauaggcuuaagugaa

SEQ ID NO: 406355 - RNA, 22 nt, Human
ucaagacaucacugugcauuuu

SEQ ID NO: 406356 - RNA, 22 nt, Human
ucagccagaggcuucuugguuu

SEQ ID NO: 406357 - RNA, 22 nt, Human
ugaaugaauccuaacaaagaca

SEQ ID NO: 406358 - RNA, 22 nt, Human
aaguccuucuuuauaugagagu

SEQ ID NO: 406359 - RNA, 22 nt, Human
augcuuuagugucaaguuuggg

SEQ ID NO: 406360 - RNA, 22 nt, Human
aaugcuuaauucaauacugugu

SEQ ID NO: 406361 - RNA, 22 nt, Human
aauauaaugcuguuuuaugcca

SEQ ID NO: 406362 - RNA, 22 nt, Human
uuagaaaugcacccaagaccua

SEQ ID NO: 406363 - RNA, 22 nt, Human
uaaagacaugguguaggugaac

SEQ ID NO: 406364 - RNA, 22 nt, Human
agguacaaaagaguauaugaga

SEQ ID NO: 406365 - RNA, 22 nt, Human
uaauuguagcuuuguaaucagc

SEQ ID NO: 406366 - RNA, 22 nt, Human
agauaucaccaguuuuacauac

SEQ ID NO: 406367 - RNA, 22 nt, Human
guucuaauauuuuaaaagccaa

SEQ ID NO: 406368 - RNA, 22 nt, Human
acauaauagcauuucuaauuug

SEQ ID NO: 406369 - RNA, 22 nt, Human
ucuauacugaugggauacuauu

SEQ ID NO: 406370 - RNA, 22 nt, Human
aguacaacauuagaguaucuua

SEQ ID NO: 406371 - RNA, 22 nt, Human
aaucagaaauugagggucuggu

SEQ ID NO: 406372 - RNA, 22 nt, Human
uucuuaauaccuauuuucuacc

SEQ ID NO: 406373 - RNA, 22 nt, Human
ugauuuaaaagaaacauugucu

SEQ ID NO: 406374 - RNA, 22 nt, Human
aaauacugucucugagagagcc

SEQ ID NO: 406375 - RNA, 22 nt, Human
ucacauaaauuauacaauuuca

SEQ ID NO: 406376 - RNA, 22 nt, Human
agaaaucaauaucuauauguug

SEQ ID NO: 406377 - RNA, 22 nt, Human
uuauaacaucaaucagaguuaa

SEQ ID NO: 406378 - RNA, 22 nt, Human
uuacagaagagaaagaauucag

SEQ ID NO: 406379 - RNA, 22 nt, Human
caguccagcccccugcuaaaag

SEQ ID NO: 406380 - RNA, 22 nt, Human
uuaaaacagcgugaaucuggca

SEQ ID NO: 406381 - RNA, 22 nt, Human
uaugaaaagguggccaauguag

SEQ ID NO: 406382 - RNA, 22 nt, Human
uaauagaauaguggaaacauug

SEQ ID NO: 406383 - RNA, 22 nt, Human
aaguccuugaagaaacaguucu

SEQ ID NO: 406384 - RNA, 22 nt, Human
ucaguuucacagucugugcaga

SEQ ID NO: 406385 - RNA, 22 nt, Human
aaugugaucgcuuuagaagcuu

SEQ ID NO: 406386 - RNA, 22 nt, Human
uauaaaauucucaguuuggggu

SEQ ID NO: 406387 - RNA, 22 nt, Human
ugcuuaauauugugauguaaua

SEQ ID NO: 406388 - RNA, 17 nt, Human
cuuuuaauuuacuuccc

SEQ ID NO: 406389 - RNA, 22 nt, Human
uagaauaugauuaauuuucuua

SEQ ID NO: 406390 - RNA, 22 nt, Human
agaagucaauaguuguuugaug

SEQ ID NO: 406391 - RNA, 22 nt, Human
acaaagucaaauugcagccgcc

SEQ ID NO: 406392 - RNA, 22 nt, Human
aagucaccccacacucuuggga

SEQ ID NO: 406393 - RNA, 22 nt, Human
agcaucuggcagaaagucagaa

SEQ ID NO: 406394 - RNA, 22 nt, Human
aaacaaacaauuaguugugugg

SEQ ID NO: 406395 - RNA, 22 nt, Human
uuccuuaguugacugucuuagu

SEQ ID NO: 406396 - RNA, 22 nt, Human
uuacagaagaguaacuuggcaa

SEQ ID NO: 406397 - RNA, 20 nt, Human
uguaacaaucuggauguugc

SEQ ID NO: 406398 - RNA, 22 nt, Human
aaauuauaggugccaccuugga

SEQ ID NO: 406399 - RNA, 22 nt, Human
uuccaaagugcuggaauuacau

SEQ ID NO: 406400 - RNA, 22 nt, Human
gaauauauuggugaaaauaguu

SEQ ID NO: 406401 - RNA, 22 nt, Human
auguauccuuauacacauuuau

SEQ ID NO: 406402 - RNA, 22 nt, Human
auuaggcacuagaaugucaauu

SEQ ID NO: 406403 - RNA, 22 nt, Human
uuuccaaagguggcaggaacaa

SEQ ID NO: 406404 - RNA, 22 nt, Human
aaaacaguuuuugcuaacugcu

SEQ ID NO: 406405 - RNA, 23 nt, Human
uuccuuaacuguuaagauugucu

SEQ ID NO: 406406 - RNA, 22 nt, Human
aauucacaaaaguuagauccau

SEQ ID NO: 406407 - RNA, 22 nt, Human
gguacaaugucuuacagaccca

SEQ ID NO: 406408 - RNA, 22 nt, Human
uugguacaaaaguaacuguggu

SEQ ID NO: 406409 - RNA, 22 nt, Human
auagaaauggcagcuggugcua

SEQ ID NO: 406410 - RNA, 22 nt, Human
aggauuuagcaugaaaugugaa

SEQ ID NO: 406411 - RNA, 22 nt, Human
uauacagaaagaauucaagucu

SEQ ID NO: 406412 - RNA, 22 nt, Human
aacaaacaaacauuuugucauc

SEQ ID NO: 406413 - RNA, 22 nt, Human
uuucaacguguaaucuuauuua

SEQ ID NO: 406414 - RNA, 22 nt, Human
ucugaagaacugaguaaacaug

SEQ ID NO: 406415 - RNA, 22 nt, Human
cuagaaauauuuuacagucaag

SEQ ID NO: 406416 - RNA, 22 nt, Human
auuuccaagaaagcuuuaggau

SEQ ID NO: 406417 - RNA, 22 nt, Human
ugcaggaagcaaccagguccaa

SEQ ID NO: 406418 - RNA, 22 nt, Human
uuugaagauuaugccagaguga

SEQ ID NO: 406419 - RNA, 22 nt, Human
guagaaauuccauuuacuuuga

SEQ ID NO: 406420 - RNA, 22 nt, Human
uguaaauaauuccuaggcuuuu

SEQ ID NO: 406421 - RNA, 21 nt, Human
caaguccuuugccaaagugcu

SEQ ID NO: 406422 - RNA, 22 nt, Human
gaauuacaugacccugaguaga

SEQ ID NO: 406423 - RNA, 22 nt, Human
caucagaaggaaggacgauuau

SEQ ID NO: 406424 - RNA, 21 nt, Human
aauccuuaaugaggaguuggu

SEQ ID NO: 406425 - RNA, 22 nt, Human
uaagaaacccaggaauuucuua

SEQ ID NO: 406426 - RNA, 22 nt, Human
uacauacaagauguguuuaaaa

SEQ ID NO: 406427 - RNA, 22 nt, Human
auguaaaucaagcagugcuggu

SEQ ID NO: 406428 - RNA, 19 nt, Human
aaucagaaauaucgaggcc

SEQ ID NO: 406429 - RNA, 22 nt, Human
aauuucaagucuugaagaagua

SEQ ID NO: 406430 - RNA, 22 nt, Human
aggcuucuucuuccuauuuagu

SEQ ID NO: 406431 - RNA, 22 nt, Human
cuacagaaaaucagccacaggc

SEQ ID NO: 406432 - RNA, 22 nt, Human
ucaguguauggagugcuggauu

SEQ ID NO: 406433 - RNA, 23 nt, Human
uaaagucacauauuagagugagc

SEQ ID NO: 406434 - RNA, 22 nt, Human
ugcaggaacuugguuuuacuca

SEQ ID NO: 406435 - RNA, 22 nt, Human
aagcauuuugccacuugaaguu

SEQ ID NO: 406436 - RNA, 22 nt, Human
agaucaguuagauagcuugaug

SEQ ID NO: 406437 - RNA, 22 nt, Human
auuucuuacauaacaaauuguu

SEQ ID NO: 406438 - RNA, 20 nt, Human
auaaaauaacugccacaaga

SEQ ID NO: 406439 - RNA, 21 nt, Human
ugaaagaaggugcagucugaa

SEQ ID NO: 406440 - RNA, 22 nt, Human
guuaggcaaauaacuguggagc

SEQ ID NO: 406441 - RNA, 22 nt, Human
uuuuuugucuugaagaaauggu

SEQ ID NO: 406442 - RNA, 22 nt, Human
ucagaauucagagggagugggg

SEQ ID NO: 406443 - RNA, 22 nt, Human
ucaguaaacagguuuaaguccu

SEQ ID NO: 406444 - RNA, 23 nt, Human
ugguucuaggccuauaauuauau

SEQ ID NO: 406445 - RNA, 22 nt, Human
uaaucuaccacuauugcaauau

SEQ ID NO: 406446 - RNA, 22 nt, Human
uuagaaaucugcugccaugcaa

SEQ ID NO: 406447 - RNA, 22 nt, Human
cuggcuuuaacccuacaaaccu

SEQ ID NO: 406448 - RNA, 22 nt, Human
auuauucaacacuugagaaauu

SEQ ID NO: 406449 - RNA, 22 nt, Human
caaagaagagauuuacagagcu

SEQ ID NO: 406450 - RNA, 22 nt, Human
aaagccauugaacuguacuuua

SEQ ID NO: 406451 - RNA, 22 nt, Human
augaaacagugaauuagucaag

SEQ ID NO: 406452 - RNA, 22 nt, Human
caugauaauuguuaacaaagua

SEQ ID NO: 406453 - RNA, 22 nt, Human
uucagagaagcaaaggcagauu

SEQ ID NO: 406454 - RNA, 22 nt, Human
uuaaagauucugaggcugauua

SEQ ID NO: 406455 - RNA, 22 nt, Human
caauauauaggaacaacuuagg

SEQ ID NO: 406456 - RNA, 22 nt, Human
uuugaacaggaguaucuauagu

SEQ ID NO: 406457 - RNA, 22 nt, Human
aauacaagauuuauaguuguuu

SEQ ID NO: 406458 - RNA, 22 nt, Human
auuaggcaauucugggcaucuc

SEQ ID NO: 406459 - RNA, 22 nt, Human
caaagccaggcuuucuaaugua

SEQ ID NO: 406460 - RNA, 22 nt, Human
aagcucauuaauuagaagcuaa

SEQ ID NO: 406461 - RNA, 22 nt, Human
cagaaaucauugugaugacagg

SEQ ID NO: 406462 - RNA, 22 nt, Human
caucagaauuacuuggggagcu

SEQ ID NO: 406463 - RNA, 22 nt, Human
uaucagaaggcacauggagucu

SEQ ID NO: 406464 - RNA, 22 nt, Human
caucagaaaccuugaggaaacu

SEQ ID NO: 406465 - RNA, 22 nt, Human
aaaucaguucucccuuucuuca

SEQ ID NO: 406466 - RNA, 22 nt, Human
aguaaaauuguauuggaaaaca

SEQ ID NO: 406467 - RNA, 22 nt, Human
cauuucaaggaccacccuggga

SEQ ID NO: 406468 - RNA, 22 nt, Human
uaaagacaauuucgagcuguag

SEQ ID NO: 406469 - RNA, 21 nt, Human
ucaguaaaccuaaagauugua

SEQ ID NO: 406470 - RNA, 22 nt, Human
ucagaauuuugguuugguuggu

SEQ ID NO: 406471 - RNA, 22 nt, Human
aagcccagcugaaagcauuuuu

SEQ ID NO: 406472 - RNA, 22 nt, Human
auuaggcauauaugcuuuuaau

SEQ ID NO: 406473 - RNA, 22 nt, Human
uuuaggcagaagcccugcugau

SEQ ID NO: 406474 - RNA, 22 nt, Human
uuccuuagggaaagggauaagg

SEQ ID NO: 406475 - RNA, 22 nt, Human
uuuauacauggagaauuuuugc

SEQ ID NO: 406476 - RNA, 22 nt, Human
cagcacagggacaauagcagau

SEQ ID NO: 406477 - RNA, 22 nt, Human
caagaaucuugcagcuuagacu

SEQ ID NO: 406478 - RNA, 22 nt, Human
gucauuucuguuucuucagugc

SEQ ID NO: 406479 - RNA, 21 nt, Human
uuuaguucaaguacagaacca

SEQ ID NO: 406480 - RNA, 22 nt, Human
aaacugugaagcaaguacaagg

SEQ ID NO: 406481 - RNA, 22 nt, Human
caauuucaugccauguauugcu

SEQ ID NO: 406482 - RNA, 22 nt, Human
cuuuacauaaggauaaaccugg

SEQ ID NO: 406483 - RNA, 22 nt, Human
aguacaauuauauuuagauggu

SEQ ID NO: 406484 - RNA, 22 nt, Human
aaagucaugaugaaccaccgua

SEQ ID NO: 406485 - RNA, 22 nt, Human
uuaggaaauuccaccuguauuc

SEQ ID NO: 406486 - RNA, 22 nt, Human
ugagauuuguuuuauaaaauag

SEQ ID NO: 406487 - RNA, 22 nt, Human
uguucacaucgauggauuuugc

SEQ ID NO: 406488 - RNA, 22 nt, Human
gaaagccauagcccagcuuuac

SEQ ID NO: 406489 - RNA, 19 nt, Human
uccuucagucagaucuggg

SEQ ID NO: 406490 - RNA, 22 nt, Human
aacagaauaguugauguacagu

SEQ ID NO: 406491 - RNA, 22 nt, Human
aaauacuguugaaugaaguaag

SEQ ID NO: 406492 - RNA, 22 nt, Human
gaguccuucuggcuggcaggau

SEQ ID NO: 406493 - RNA, 22 nt, Human
uauaauuaguaaauggcagauu

SEQ ID NO: 406494 - RNA, 22 nt, Human
uguguacacagauaguaauggc

SEQ ID NO: 406495 - RNA, 22 nt, Human
uagauuuaagacccugaauuug

SEQ ID NO: 406496 - RNA, 22 nt, Human
uagauauaucugucauacuggu

SEQ ID NO: 406497 - RNA, 22 nt, Human
ccaaaauuauuacauuuguagg

SEQ ID NO: 406498 - RNA, 22 nt, Human
aagucacccacaggcagcagaa

SEQ ID NO: 406499 - RNA, 22 nt, Human
caugguuuauuagagcuuauuu

SEQ ID NO: 406500 - RNA, 22 nt, Human
uaaucauggccucaaauuuuau

SEQ ID NO: 406501 - RNA, 22 nt, Human
aaagaaggaugggagaaauccu

SEQ ID NO: 406502 - RNA, 22 nt, Human
aaauauagcaauuaugccuacu

SEQ ID NO: 406503 - RNA, 20 nt, Human
aaaaacaguaaugcugaaga

SEQ ID NO: 406504 - RNA, 22 nt, Human
aagauauagauggugguauaaa

SEQ ID NO: 406505 - RNA, 22 nt, Human
ggagaaugauauauagcucagu

SEQ ID NO: 406506 - RNA, 22 nt, Human
cauaauuacugauaugcugauu

SEQ ID NO: 406507 - RNA, 22 nt, Human
auagaauagcauagaaaauuga

SEQ ID NO: 406508 - RNA, 22 nt, Human
uuuauccaccuuacccuguucc

SEQ ID NO: 406509 - RNA, 22 nt, Human
auccuuaguuaagaacaggagu

SEQ ID NO: 406510 - RNA, 22 nt, Human
agucauuuugccagucuucagg

SEQ ID NO: 406511 - RNA, 22 nt, Human
acagcauucaauaaauaauaac

SEQ ID NO: 406512 - RNA, 18 nt, Human
aaguccuuccuuugcuuu

SEQ ID NO: 406513 - RNA, 22 nt, Human
uucauuaauucauucagugacu

SEQ ID NO: 406514 - RNA, 22 nt, Human
cugaauaauguucucuuguaug

SEQ ID NO: 406515 - RNA, 23 nt, Human
ccaaagucgaagucuaguccaga

SEQ ID NO: 406516 - RNA, 22 nt, Human
gaauuucagagguaacaucauc

SEQ ID NO: 406517 - RNA, 22 nt, Human
aaugccuucaaguaucugagga

SEQ ID NO: 406518 - RNA, 22 nt, Human
uaauuucaauagcuugcauaau

SEQ ID NO: 406519 - RNA, 22 nt, Human
aaucaagucaaccaucaugugc

SEQ ID NO: 406520 - RNA, 23 nt, Human
gagauuuagcagacaaagcucuu

SEQ ID NO: 406521 - RNA, 22 nt, Human
cagaaacauguauaaaguugua

SEQ ID NO: 406522 - RNA, 22 nt, Human
aacuggauuuaggaacagagaa

SEQ ID NO: 406523 - RNA, 22 nt, Human
auacagaagaacuauagccacu

SEQ ID NO: 406524 - RNA, 22 nt, Human
uguacaauggcuauaauacccu

SEQ ID NO: 406525 - RNA, 22 nt, Human
uauggcuuuucauuccuaugug

SEQ ID NO: 406526 - RNA, 22 nt, Human
acaggauuagcaaguaaucagg

SEQ ID NO: 406527 - RNA, 22 nt, Human
uuugaagauaaauauggagaaa

SEQ ID NO: 406528 - RNA, 22 nt, Human
uuuccaaagcugaguugagcaa

SEQ ID NO: 406529 - RNA, 22 nt, Human
guuccaaaguuagaguguauug

SEQ ID NO: 406530 - RNA, 22 nt, Human
agagaugaacauaaaacaagga

SEQ ID NO: 406531 - RNA, 22 nt, Human
ucuuaauucugugucuucacua

SEQ ID NO: 406532 - RNA, 23 nt, Human
aaaugacauaugguuucugaagg

SEQ ID NO: 406533 - RNA, 22 nt, Human
aacauaauguggccaaagucac

SEQ ID NO: 406534 - RNA, 22 nt, Human
uuggaucauggaaugucugcuu

SEQ ID NO: 406535 - RNA, 22 nt, Human
augcugaauugaugcgagggag

SEQ ID NO: 406536 - RNA, 22 nt, Human
uucagaaagguuaaucuggauu

SEQ ID NO: 406537 - RNA, 22 nt, Human
uugauggcugugauuuacucag

SEQ ID NO: 406538 - RNA, 22 nt, Human
auuaggcauucaugcagcuccu

SEQ ID NO: 406539 - RNA, 22 nt, Human
uacagaaaucacaucgcuuuga

SEQ ID NO: 406540 - RNA, 20 nt, Human
aucaaaggcugauucagucc

SEQ ID NO: 406541 - RNA, 22 nt, Human
cugaauaauacagacuagcuuc

SEQ ID NO: 406542 - RNA, 22 nt, Human
ucucacuuuguugcccagacuu

SEQ ID NO: 406543 - RNA, 22 nt, Human
ugaaacuaggccaaucaaauua

SEQ ID NO: 406544 - RNA, 22 nt, Human
ucaaguuucucucagauuaugg

SEQ ID NO: 406545 - RNA, 19 nt, Human
aacuguaauuaauacccua

SEQ ID NO: 406546 - RNA, 22 nt, Human
uguuuauaccuugguauaacca

SEQ ID NO: 406547 - RNA, 22 nt, Human
uuuaaagaaauuccucaucuuu

SEQ ID NO: 406548 - RNA, 22 nt, Human
ucaguuucuaaaucuuaccaau

SEQ ID NO: 406549 - RNA, 22 nt, Human
uucuuaaucuguguggguucga

SEQ ID NO: 406550 - RNA, 22 nt, Human
auccaaacauguaccacacuaa

SEQ ID NO: 406551 - RNA, 22 nt, Human
augugaaagagguguucagugg

SEQ ID NO: 406552 - RNA, 20 nt, Human
gaguccuuaugggcugaggu

SEQ ID NO: 406553 - RNA, 22 nt, Human
ugcagguaggccugacuuccag

SEQ ID NO: 406554 - RNA, 22 nt, Human
aaguguuaaagacuugaacacu

SEQ ID NO: 406555 - RNA, 22 nt, Human
agauaaugaaugccaugacauu

SEQ ID NO: 406556 - RNA, 22 nt, Human
uaagacuucauuaguaauaugg

SEQ ID NO: 406557 - RNA, 22 nt, Human
uagaaacagauguuuuugaaga

SEQ ID NO: 406558 - RNA, 22 nt, Human
auauuauucuaguaacagugau

SEQ ID NO: 406559 - RNA, 22 nt, Human
augcuaaauggccaguaccaaa

SEQ ID NO: 406560 - RNA, 22 nt, Human
uuccuuaggcuguuugcagugc

SEQ ID NO: 406561 - RNA, 22 nt, Human
cuaugacacaggccauuauaua

SEQ ID NO: 406562 - RNA, 22 nt, Human
aaaacuuucagggauacagaaa

SEQ ID NO: 406563 - RNA, 22 nt, Human
uccaaaguaauuucacuucugu

SEQ ID NO: 406564 - RNA, 22 nt, Human
uauacaaugaguacauucuggg

SEQ ID NO: 406565 - RNA, 22 nt, Human
auagacauagccguaauuuauu

SEQ ID NO: 406566 - RNA, 22 nt, Human
uuuuauauggcacauugguugg

SEQ ID NO: 406567 - RNA, 22 nt, Human
cauuuacauuuaagguuaauau

SEQ ID NO: 406568 - RNA, 22 nt, Human
uuuaggcaaauuucagaugugc

SEQ ID NO: 406569 - RNA, 22 nt, Human
uguucacaaggugaugcuuuga

SEQ ID NO: 406570 - RNA, 22 nt, Human
uauuucaacguaugaaaagcug

SEQ ID NO: 406571 - RNA, 22 nt, Human
aaagucaugcaguugaacuuuu

SEQ ID NO: 406572 - RNA, 20 nt, Human
uuccuuaggcauuggaagaa

SEQ ID NO: 406573 - RNA, 22 nt, Human
auuaggcagugccauuguacgg

SEQ ID NO: 406574 - RNA, 22 nt, Human
uaaauacagucauuugagccau

SEQ ID NO: 406575 - RNA, 22 nt, Human
ucaaguuuaauugagauguuua

SEQ ID NO: 406576 - RNA, 22 nt, Human
uuccuuagugacuucuagcuac

SEQ ID NO: 406577 - RNA, 22 nt, Human
gcuauacacauuucuugguagu

SEQ ID NO: 406578 - RNA, 22 nt, Human
caguaaauacauaucagagaag

SEQ ID NO: 406579 - RNA, 22 nt, Human
uggcuuaauauuucauauuuaa

SEQ ID NO: 406580 - RNA, 22 nt, Human
uguacaaugcugagguuugggg

SEQ ID NO: 406581 - RNA, 23 nt, Human
guaaaauacgcagugcaguguga

SEQ ID NO: 406582 - RNA, 22 nt, Human
acacacucaauugcauaagcac

SEQ ID NO: 406583 - RNA, 22 nt, Human
uaauuucaccguugcuagaaau

SEQ ID NO: 406584 - RNA, 22 nt, Human
uucaacucuucaagaucacauc

SEQ ID NO: 406585 - RNA, 22 nt, Human
aaaauacuguggaguguugaaa

SEQ ID NO: 406586 - RNA, 22 nt, Human
guuuaauaauguugaauuacua

SEQ ID NO: 406587 - RNA, 22 nt, Human
uuguccaaaguaacacaucuag

SEQ ID NO: 406588 - RNA, 22 nt, Human
auuucaggagcaguuucagugg

SEQ ID NO: 406589 - RNA, 22 nt, Human
cuuucaacuacauacaggcgau

SEQ ID NO: 406590 - RNA, 22 nt, Human
uuaagcaacacacauuaauuau

SEQ ID NO: 406591 - RNA, 22 nt, Human
uguauacaggcauaagagauac

SEQ ID NO: 406592 - RNA, 22 nt, Human
uauuaucauuaacuguugaauu

SEQ ID NO: 406593 - RNA, 22 nt, Human
gccuuaauuuaugucuaacaua

SEQ ID NO: 406594 - RNA, 22 nt, Human
cagaauaaaagucccaaggcau

SEQ ID NO: 406595 - RNA, 22 nt, Human
aaauugaaugauuaagugguga

SEQ ID NO: 406596 - RNA, 22 nt, Human
augaaauaucuugaagaaauuc

SEQ ID NO: 406597 - RNA, 22 nt, Human
auggccuuagugaugauuaaua

SEQ ID NO: 406598 - RNA, 22 nt, Human
cauuucaaacaguuacagcugc

SEQ ID NO: 406599 - RNA, 20 nt, Human
ucuaauuaaaauugucuagu

SEQ ID NO: 406600 - RNA, 22 nt, Human
agaaaaacuaagaguggguggu

SEQ ID NO: 406601 - RNA, 22 nt, Human
caguaaaugcagauauagauac

SEQ ID NO: 406602 - RNA, 22 nt, Human
aggaaaaaagucugugauuaua

SEQ ID NO: 406603 - RNA, 22 nt, Human
augugcuucauucuacaugaca

SEQ ID NO: 406604 - RNA, 22 nt, Human
caauuuuuaaacuaugaaguug

SEQ ID NO: 406605 - RNA, 22 nt, Human
acauaauaccuaggacaguuug

SEQ ID NO: 406606 - RNA, 22 nt, Human
uaauuuacuugcaaauaacaau

SEQ ID NO: 406607 - RNA, 22 nt, Human
gauucuuacuucuaagcaagcu

SEQ ID NO: 406608 - RNA, 22 nt, Human
cagauaaaggcuuacuaguagu

SEQ ID NO: 406609 - RNA, 20 nt, Human
uauuuacaacuuagagccuc

SEQ ID NO: 406610 - RNA, 22 nt, Human
aauugcaauuuucuuaaggucu

SEQ ID NO: 406611 - RNA, 22 nt, Human
ucaauucaauugaacaguuacu

SEQ ID NO: 406612 - RNA, 22 nt, Human
acuuugaaucucagauaaccaa

SEQ ID NO: 406613 - RNA, 22 nt, Human
ggcauuuauuugucucauucuu

SEQ ID NO: 406614 - RNA, 23 nt, Human
uuuaacuuuccaauaauucauug

SEQ ID NO: 406615 - RNA, 22 nt, Human
ccuauacagccucagcugagau

SEQ ID NO: 406616 - RNA, 22 nt, Human
cagaaauaaacuucucacaucg

SEQ ID NO: 406617 - RNA, 22 nt, Human
aaauauaguaaaugcauaguuc

SEQ ID NO: 406618 - RNA, 23 nt, Human
uauuacaauuggucuuauuaaga

SEQ ID NO: 406619 - RNA, 22 nt, Human
acagaaguuggaauuagauacu

SEQ ID NO: 406620 - RNA, 22 nt, Human
gcuggaucauauggugguucua

SEQ ID NO: 406621 - RNA, 22 nt, Human
caguccuuucugaaauccuaua

SEQ ID NO: 406622 - RNA, 23 nt, Human
cagaaauaaacugguuuguagau

SEQ ID NO: 406623 - RNA, 22 nt, Human
auguguaugcaugcacuaagau

SEQ ID NO: 406624 - RNA, 22 nt, Human
aauuucaauuacuuuugcacca

SEQ ID NO: 406625 - RNA, 22 nt, Human
ucaguaaaugagcaaaaauuuc

SEQ ID NO: 406626 - RNA, 22 nt, Human
uaaacagaaugcguaagaagug

SEQ ID NO: 406627 - RNA, 22 nt, Human
uuaaagaauagugccccuauug

SEQ ID NO: 406628 - RNA, 22 nt, Human
gauuucaagcccccagagauuc

SEQ ID NO: 406629 - RNA, 22 nt, Human
uagaaacaucagcuaaccaaaa

SEQ ID NO: 406630 - RNA, 21 nt, Human
gagauuuagaaggaucaauuu

SEQ ID NO: 406631 - RNA, 22 nt, Human
uauccaaaggaacaaucacagc

SEQ ID NO: 406632 - RNA, 22 nt, Human
uucuuagaugauuaaugauggg

SEQ ID NO: 406633 - RNA, 22 nt, Human
auuauauaggacuugcccuucc

SEQ ID NO: 406634 - RNA, 22 nt, Human
aaauggauggaaagcaauuuuu

SEQ ID NO: 406635 - RNA, 22 nt, Human
acaaaauuaccuaguuauuuuc

SEQ ID NO: 406636 - RNA, 22 nt, Human
ucaaaaguggccuguaaaaucu

SEQ ID NO: 406637 - RNA, 22 nt, Human
cagauuucagcucauauauuau

SEQ ID NO: 406638 - RNA, 22 nt, Human
uuuaggcacagaguugagggac

SEQ ID NO: 406639 - RNA, 23 nt, Human
aaucuauacuuaggcugguaaua

SEQ ID NO: 406640 - RNA, 23 nt, Human
uuaaacuucagugcagaacacuc

SEQ ID NO: 406641 - RNA, 18 nt, Human
ugaaacaagaauggugca

SEQ ID NO: 406642 - RNA, 22 nt, Human
cagucaccauagaauaaaacau

SEQ ID NO: 406643 - RNA, 22 nt, Human
ugcuauacggagcaucuucagg

SEQ ID NO: 406644 - RNA, 22 nt, Human
uaugaagaaaccuauccucuag

SEQ ID NO: 406645 - RNA, 22 nt, Human
ugcuuaauaggaguugaacauu

SEQ ID NO: 406646 - RNA, 22 nt, Human
uaacaagucauuuuaaauuaug

SEQ ID NO: 406647 - RNA, 22 nt, Human
aaaucucaguguucuaagcauu

SEQ ID NO: 406648 - RNA, 16 nt, Human
ccuggauccccugugg

SEQ ID NO: 406649 - RNA, 22 nt, Human
uucaacuuuaugcauauguauu

SEQ ID NO: 406650 - RNA, 22 nt, Human
gcucuaauugaaaaauacugca

SEQ ID NO: 406651 - RNA, 22 nt, Human
uuguuaaaaauagauuuccagg

SEQ ID NO: 406652 - RNA, 22 nt, Human
caagaauccuguucuugaagau

SEQ ID NO: 406653 - RNA, 19 nt, Human
aggauuuauuaugugcuca

SEQ ID NO: 406654 - RNA, 22 nt, Human
aucagaaaaacauaauguuauu

SEQ ID NO: 406655 - RNA, 22 nt, Human
uucauacuguguuuccaaguuu

SEQ ID NO: 406656 - RNA, 22 nt, Human
cuacagaaguuucccuugcuua

SEQ ID NO: 406657 - RNA, 22 nt, Human
ugcagucuccaccuccugggug

SEQ ID NO: 406658 - RNA, 22 nt, Human
aaaaauugcugagaacggaauu

SEQ ID NO: 406659 - RNA, 22 nt, Human
cugcagagaccuaggucagguu

SEQ ID NO: 406660 - RNA, 19 nt, Human
acaagucacuuacuuagua

SEQ ID NO: 406661 - RNA, 23 nt, Human
uguaacaauucccagccuuugcc

SEQ ID NO: 406662 - RNA, 22 nt, Human
ugcaggaaaaccaacacgccuu

SEQ ID NO: 406663 - RNA, 22 nt, Human
uaaaacugaauacauacugagg

SEQ ID NO: 406664 - RNA, 22 nt, Human
cuauuauuuccucaucuauaaa

SEQ ID NO: 406665 - RNA, 22 nt, Human
auuaggcauuauggggauaagg

SEQ ID NO: 406666 - RNA, 22 nt, Human
cuuugaagauggcaaauuuaga

SEQ ID NO: 406667 - RNA, 22 nt, Human
aauacugagaucccacaaagca

SEQ ID NO: 406668 - RNA, 22 nt, Human
acagaaugggauuugaauauuu

SEQ ID NO: 406669 - RNA, 22 nt, Human
uuuaauauuucuuuccugaagc

SEQ ID NO: 406670 - RNA, 22 nt, Human
uaucaaaggcuaugugauuuuu

SEQ ID NO: 406671 - RNA, 22 nt, Human
ucaaaauuucagcacuagcccu

SEQ ID NO: 406672 - RNA, 22 nt, Human
acacaaacugcuagaaaauugg

SEQ ID NO: 406673 - RNA, 22 nt, Human
uaccaaaagcuuguuucauaca

SEQ ID NO: 406674 - RNA, 22 nt, Human
cucauacauaugccauuccugc

SEQ ID NO: 406675 - RNA, 22 nt, Human
caucauaaaauugagauaacug

SEQ ID NO: 406676 - RNA, 22 nt, Human
aaacagacugcacugccaguca

SEQ ID NO: 406677 - RNA, 22 nt, Human
aaaucagugcucauuugaaagg

SEQ ID NO: 406678 - RNA, 22 nt, Human
ucagccaguuugauucuauuug

SEQ ID NO: 406679 - RNA, 22 nt, Human
gacauaauccuccucaccuacu

SEQ ID NO: 406680 - RNA, 22 nt, Human
uuccauaauaaccugagagaaa

SEQ ID NO: 406681 - RNA, 22 nt, Human
acuuugaaggggaacauuuuaa

SEQ ID NO: 406682 - RNA, 22 nt, Human
aauguucauugauuaaaugaau

SEQ ID NO: 406683 - RNA, 22 nt, Human
agaucugaaucucauccgagga

SEQ ID NO: 406684 - RNA, 22 nt, Human
aaauagcauaaaauaggaagcu

SEQ ID NO: 406685 - RNA, 22 nt, Human
gguacaauccacuguggguuag

SEQ ID NO: 406686 - RNA, 19 nt, Human
aacuggauaauggccacau

SEQ ID NO: 406687 - RNA, 22 nt, Human
caguccuuauuccuauauuccu

SEQ ID NO: 406688 - RNA, 22 nt, Human
ggcauuuaauccaucugauuga

SEQ ID NO: 406689 - RNA, 22 nt, Human
uuacaagauuaauuauuggagu

SEQ ID NO: 406690 - RNA, 22 nt, Human
acuuugaaacuaaaauucauua

SEQ ID NO: 406691 - RNA, 22 nt, Human
ucuagacacuacuaguaaccgg

SEQ ID NO: 406692 - RNA, 22 nt, Human
cauuucaauuauuugcucuucu

SEQ ID NO: 406693 - RNA, 22 nt, Human
ccuauacaggcuucuuuacaug

SEQ ID NO: 406694 - RNA, 22 nt, Human
cauggcuuguaauaaauuuaua

SEQ ID NO: 406695 - RNA, 16 nt, Human
gcaacuuugggguuga

SEQ ID NO: 406696 - RNA, 22 nt, Human
uaagaaucaguagauauagauu

SEQ ID NO: 406697 - RNA, 22 nt, Human
aacuuuguguguuuaauauggc

SEQ ID NO: 406698 - RNA, 22 nt, Human
uuagaaaaaacgucuucuagug

SEQ ID NO: 406699 - RNA, 22 nt, Human
acagaugauuuuuaugaaaaca

SEQ ID NO: 406700 - RNA, 22 nt, Human
cauagaaaguauuauggaauuu

SEQ ID NO: 406701 - RNA, 21 nt, Human
auuuccaaauaaggucacauu

SEQ ID NO: 406702 - RNA, 21 nt, Human
ucagagaacccggcaggcaag

SEQ ID NO: 406703 - RNA, 22 nt, Human
acuuugaaagccuuggccccgg

SEQ ID NO: 406704 - RNA, 22 nt, Human
gaagugaagguuacucuagauu

SEQ ID NO: 406705 - RNA, 23 nt, Human
ucuaauacaugaaaccuagaugu

SEQ ID NO: 406706 - RNA, 20 nt, Human
aggauuuacuacuaccugcu

SEQ ID NO: 406707 - RNA, 23 nt, Human
augaaugaauaaggcaggaaagc

SEQ ID NO: 406708 - RNA, 17 nt, Human
ugcuuaauuuugacugg

SEQ ID NO: 406709 - RNA, 22 nt, Human
augcuuaaccuugguguacaau

SEQ ID NO: 406710 - RNA, 22 nt, Human
caaauacuggguaaguuaauuu

SEQ ID NO: 406711 - RNA, 22 nt, Human
aggauuuauuggugggaaguua

SEQ ID NO: 406712 - RNA, 21 nt, Human
uguguaaaguugaaauccugu

SEQ ID NO: 406713 - RNA, 22 nt, Human
aauugagugcagccagcccagu

SEQ ID NO: 406714 - RNA, 22 nt, Human
ucuuuaauucagcaugaugcgg

SEQ ID NO: 406715 - RNA, 17 nt, Human
uaaguccuaguuauuuu

SEQ ID NO: 406716 - RNA, 22 nt, Human
agauuucagaugcucggcaguu

SEQ ID NO: 406717 - RNA, 22 nt, Human
augguuuaagggagaauauuga

SEQ ID NO: 406718 - RNA, 22 nt, Human
aucuaacacuguaaacugucuu

SEQ ID NO: 406719 - RNA, 22 nt, Human
aauaacagagaaggguggcuuc

SEQ ID NO: 406720 - RNA, 22 nt, Human
ucagaauucugaccuuggguca

SEQ ID NO: 406721 - RNA, 22 nt, Human
ugagacaaccuaauuaaacacc

SEQ ID NO: 406722 - RNA, 22 nt, Human
uucacauaaugauacaaagcuu

SEQ ID NO: 406723 - RNA, 22 nt, Human
uaaagacaaacccacuaggguu

SEQ ID NO: 406724 - RNA, 22 nt, Human
uaaguccuagaugauucacaga

SEQ ID NO: 406725 - RNA, 22 nt, Human
gcuuuaaugcaauuucaccuca

SEQ ID NO: 406726 - RNA, 22 nt, Human
agagacaaugccaaugcacacg

SEQ ID NO: 406727 - RNA, 22 nt, Human
uacauagaacauguuuaauguc

SEQ ID NO: 406728 - RNA, 22 nt, Human
acaugcuuccaaauuauguugg

SEQ ID NO: 406729 - RNA, 22 nt, Human
caaacauucaaguacaagucuu

SEQ ID NO: 406730 - RNA, 22 nt, Human
ugacuucaagguucagcaccuu

SEQ ID NO: 406731 - RNA, 22 nt, Human
uucaaguuuugccuccccaucc

SEQ ID NO: 406732 - RNA, 22 nt, Human
aguaaacaguaucuuuaguguc

SEQ ID NO: 406733 - RNA, 22 nt, Human
gaaauauacaugaagucggcug

SEQ ID NO: 406734 - RNA, 22 nt, Human
agaauuccuccucugggacacu

SEQ ID NO: 406735 - RNA, 22 nt, Human
uaaguccuauuccaggucucuc

SEQ ID NO: 406736 - RNA, 22 nt, Human
augugcuuguaauguuaaaugu

SEQ ID NO: 406737 - RNA, 22 nt, Human
auuuaucucuggaaacuaagca

SEQ ID NO: 406738 - RNA, 22 nt, Human
aucuagaacuuaaagucaguca

SEQ ID NO: 406739 - RNA, 20 nt, Human
uuuaggcauuacucuuuugu

SEQ ID NO: 406740 - RNA, 22 nt, Human
acuauacaagauuagggauuug

SEQ ID NO: 406741 - RNA, 22 nt, Human
uggaauaaagugcuuugaucag

SEQ ID NO: 406742 - RNA, 22 nt, Human
cucuaacaccacagugugguuu

SEQ ID NO: 406743 - RNA, 22 nt, Human
uuaaugauaccuauguuaauuu

SEQ ID NO: 406744 - RNA, 22 nt, Human
aaugucuugagaagagaaaucu

SEQ ID NO: 406745 - RNA, 22 nt, Human
aaagucaucauuucuuuucaaa

SEQ ID NO: 406746 - RNA, 22 nt, Human
ucacagaaauaagauaguuauu

SEQ ID NO: 406747 - RNA, 22 nt, Human
uagaacuacaagcauuaaaagu

SEQ ID NO: 406748 - RNA, 20 nt, Human
guaaaauauggucuuugggu

SEQ ID NO: 406749 - RNA, 22 nt, Human
uaauacuuuugccuuguauuca

SEQ ID NO: 406750 - RNA, 22 nt, Human
cauggcuuuguucauauaauuu

SEQ ID NO: 406751 - RNA, 23 nt, Human
uaucagugugaugaggcugcugc

SEQ ID NO: 406752 - RNA, 22 nt, Human
guuaggcaauaccucuuacacc

SEQ ID NO: 406753 - RNA, 22 nt, Human
gaugaaaaucuugagaugucga

SEQ ID NO: 406754 - RNA, 22 nt, Human
aagugauuuguacaaaaugucg

SEQ ID NO: 406755 - RNA, 22 nt, Human
ucagaauaugcuaaugacauuu

SEQ ID NO: 406756 - RNA, 22 nt, Human
acaagccaauuacugugccagg

SEQ ID NO: 406757 - RNA, 22 nt, Human
acaugaaacuguugcauuagaa

SEQ ID NO: 406758 - RNA, 22 nt, Human
uaguccuugguaaaauucuaug

SEQ ID NO: 406759 - RNA, 22 nt, Human
auacaaugauaauaguacuuua

SEQ ID NO: 406760 - RNA, 22 nt, Human
agaaaugcucaggucaacuuaa

SEQ ID NO: 406761 - RNA, 22 nt, Human
ccuucaaucuuaagucagccca

SEQ ID NO: 406762 - RNA, 22 nt, Human
caugguuuugagccuauuaugc

SEQ ID NO: 406763 - RNA, 22 nt, Human
aucagaaaauacccaguguuua

SEQ ID NO: 406764 - RNA, 22 nt, Human
acaugcuuugcacuuacaucau

SEQ ID NO: 406765 - RNA, 22 nt, Human
aacuuugaggucacugaauucc

SEQ ID NO: 406766 - RNA, 22 nt, Human
uucaauucaauucuaaauauau

SEQ ID NO: 406767 - RNA, 22 nt, Human
uaauaaacugcuacgcuuaguu

SEQ ID NO: 406768 - RNA, 22 nt, Human
uuaaagucccugccuuaauucc

SEQ ID NO: 406769 - RNA, 22 nt, Human
gcauguuauguaucugcccagc

SEQ ID NO: 406770 - RNA, 21 nt, Human
aaauacagaugcaaaucuguu

SEQ ID NO: 406771 - RNA, 22 nt, Human
aaacuuuguucgucugaugugg

SEQ ID NO: 406772 - RNA, 22 nt, Human
caguccuugcuaugacccugag

SEQ ID NO: 406773 - RNA, 22 nt, Human
cuuuacagaauaagaauacugg

SEQ ID NO: 406774 - RNA, 22 nt, Human
aaagucauuuguauauacccuu

SEQ ID NO: 406775 - RNA, 22 nt, Human
gaauuucaaaagccagaacggg

SEQ ID NO: 406776 - RNA, 22 nt, Human
gaacuuuaaaacaaaguacagu

SEQ ID NO: 406777 - RNA, 22 nt, Human
uaagucauaagucaugauguua

SEQ ID NO: 406778 - RNA, 22 nt, Human
ugaaugaaugaauuaauagagu

SEQ ID NO: 406779 - RNA, 22 nt, Human
agaucacagcccccagaugcca

SEQ ID NO: 406780 - RNA, 22 nt, Human
ugaagaauaaaugguugagacu

SEQ ID NO: 406781 - RNA, 22 nt, Human
aaaggcauuuuaauucuaaaga

SEQ ID NO: 406782 - RNA, 22 nt, Human
caauuucacuaaugaugugggg

SEQ ID NO: 406783 - RNA, 22 nt, Human
gccagucugcucccacaaguuc

SEQ ID NO: 406784 - RNA, 22 nt, Human
uagcauaacagguaagagugag

SEQ ID NO: 406785 - RNA, 22 nt, Human
auggguuucccucugaaauuau

SEQ ID NO: 406786 - RNA, 22 nt, Human
ccauuucacucuuccugaagga

SEQ ID NO: 406787 - RNA, 23 nt, Human
ggccauuucauuugguucaaacu

SEQ ID NO: 406788 - RNA, 22 nt, Human
uacaggaaguaaguaaugaaau

SEQ ID NO: 406789 - RNA, 22 nt, Human
uagaaacagaaaacuguaauag

SEQ ID NO: 406790 - RNA, 22 nt, Human
caauuuuuuccaugcucuuaca

SEQ ID NO: 406791 - RNA, 22 nt, Human
uauccaaaguuucucagaaacu

SEQ ID NO: 406792 - RNA, 22 nt, Human
auuaugcugguuuacacauuuu

SEQ ID NO: 406793 - RNA, 21 nt, Human
uccagaaaagaggucauuagc

SEQ ID NO: 406794 - RNA, 22 nt, Human
aguuucaguucugucauuuaua

SEQ ID NO: 406795 - RNA, 22 nt, Human
aagaaacaaccacugcucuccu

SEQ ID NO: 406796 - RNA, 22 nt, Human
ucacagcaaaugcugcuucuca

SEQ ID NO: 406797 - RNA, 18 nt, Human
uaaauauauuucccccuu

SEQ ID NO: 406798 - RNA, 22 nt, Human
cagucaccugaagacuugacca

SEQ ID NO: 406799 - RNA, 22 nt, Human
augugcuuuauuaaguaaaaau

SEQ ID NO: 406800 - RNA, 22 nt, Human
auucacuggcagacagaacuca

SEQ ID NO: 406801 - RNA, 22 nt, Human
caaaacugucuagagagagaag

SEQ ID NO: 406802 - RNA, 22 nt, Human
ugcuuauuuauagucaauagag

SEQ ID NO: 406803 - RNA, 22 nt, Human
uguccuuauauuguggaagggg

SEQ ID NO: 406804 - RNA, 22 nt, Human
caugcuuaugauuugcuaagcc

SEQ ID NO: 406805 - RNA, 22 nt, Human
auagacauuuugcauucaagca

SEQ ID NO: 406806 - RNA, 22 nt, Human
ugcuuuaaaauggacuguuuug

SEQ ID NO: 406807 - RNA, 22 nt, Human
acaugaaaaauguuugcaguuu

SEQ ID NO: 406808 - RNA, 22 nt, Human
uuauaugaguaucauaucacuu

SEQ ID NO: 406809 - RNA, 22 nt, Human
cuggauuuuagaaggcuuccua

SEQ ID NO: 406810 - RNA, 22 nt, Human
guauacagauacuuagacgugc

SEQ ID NO: 406811 - RNA, 22 nt, Human
gguuuaauggagauauuucaga

SEQ ID NO: 406812 - RNA, 22 nt, Human
aaagccaucaguaaaaugauuu

SEQ ID NO: 406813 - RNA, 22 nt, Human
uugaauaauguguauguuguua

SEQ ID NO: 406814 - RNA, 22 nt, Human
aguaaacauuuucauauuuucu

SEQ ID NO: 406815 - RNA, 22 nt, Human
uggcuuaagcgcaacucugucu

SEQ ID NO: 406816 - RNA, 18 nt, Human
uacaggaaaaguguuaca

SEQ ID NO: 406817 - RNA, 22 nt, Human
augcuuaaugaggguauauaug

SEQ ID NO: 406818 - RNA, 22 nt, Human
uguguaaauuuauuuacauaaa

SEQ ID NO: 406819 - RNA, 22 nt, Human
uacagauauagagauuuauaga

SEQ ID NO: 406820 - RNA, 23 nt, Human
agaauuccaguuucuuaugucac

SEQ ID NO: 406821 - RNA, 22 nt, Human
ugcuuuaagacacuaaguuuga

SEQ ID NO: 406822 - RNA, 22 nt, Human
cauaagaaauuuaacagaacuu

SEQ ID NO: 406823 - RNA, 22 nt, Human
aaagacuuggcuuaugauuugc

SEQ ID NO: 406824 - RNA, 22 nt, Human
uaugucaugucuuagagaauga

SEQ ID NO: 406825 - RNA, 22 nt, Human
uacugugcaaaaaugaauauug

SEQ ID NO: 406826 - RNA, 22 nt, Human
acagugcacauccugagugauu

SEQ ID NO: 406827 - RNA, 22 nt, Human
agcugugccuugcugcacggug

SEQ ID NO: 406828 - RNA, 22 nt, Human
aaacaugagcaucucuucaagc

SEQ ID NO: 406829 - RNA, 22 nt, Human
ugcugugcaucauaguguuugg

SEQ ID NO: 406830 - RNA, 22 nt, Human
uguacaugaauaaaagaucuug

SEQ ID NO: 406831 - RNA, 22 nt, Human
auacauucaaaggaaggauaga

SEQ ID NO: 406832 - RNA, 22 nt, Human
acaccauacucauguugguucc

SEQ ID NO: 406833 - RNA, 22 nt, Human
uucuguuuuagaaauaaguagu

SEQ ID NO: 406834 - RNA, 22 nt, Human
ucauaaaacacaccagguaguu

SEQ ID NO: 406835 - RNA, 22 nt, Human
agaugcugauugaauagauuuc

SEQ ID NO: 406836 - RNA, 22 nt, Human
gcugugcagaggugagaaucca

SEQ ID NO: 406837 - RNA, 22 nt, Human
auucaaacuguguuaggcagca

SEQ ID NO: 406838 - RNA, 22 nt, Human
aacuauuuuuggagcuaacucu

SEQ ID NO: 406839 - RNA, 22 nt, Human
ugcaugaaauauuuucuguagg

SEQ ID NO: 406840 - RNA, 22 nt, Human
uacaggaagucucaguacagua

SEQ ID NO: 406841 - RNA, 22 nt, Human
auuacaugagagaauguaaaua

SEQ ID NO: 406842 - RNA, 22 nt, Human
ucaaauggguaugcuuuauaau

SEQ ID NO: 406843 - RNA, 22 nt, Human
uugagcaauuaggaaauaaaga

SEQ ID NO: 406844 - RNA, 21 nt, Human
uuagaguugccauuauaugua

SEQ ID NO: 406845 - RNA, 22 nt, Human
cagcacauaaucagugauugug

SEQ ID NO: 406846 - RNA, 22 nt, Human
auguacaucuuuauaacaagcu

SEQ ID NO: 406847 - RNA, 22 nt, Human
gcauaucagcaucaaaacacag

SEQ ID NO: 406848 - RNA, 22 nt, Human
ugagcugagaacacuugggcua

SEQ ID NO: 406849 - RNA, 22 nt, Human
aguuagagacacaugcacaugc

SEQ ID NO: 406850 - RNA, 20 nt, Human
acauuugaguaucaucuacu

SEQ ID NO: 406851 - RNA, 22 nt, Human
aaacaguuucuaaucauggaga

SEQ ID NO: 406852 - RNA, 22 nt, Human
gucaaacaaauuaacauaucca

SEQ ID NO: 406853 - RNA, 22 nt, Human
acugugcagguagaugccuggg

SEQ ID NO: 406854 - RNA, 22 nt, Human
uuguauuuccuauaaccuuucu

SEQ ID NO: 406855 - RNA, 21 nt, Human
gaacauuuggguuguuucuac

SEQ ID NO: 406856 - RNA, 22 nt, Human
cauaacauccuugcuacuuuga

SEQ ID NO: 406857 - RNA, 22 nt, Human
uuucugcagguauugcauaagu

SEQ ID NO: 406858 - RNA, 22 nt, Human
acauuugagaugccuuuuaggu

SEQ ID NO: 406859 - RNA, 22 nt, Human
acccuguugguggaucagauug

SEQ ID NO: 406860 - RNA, 22 nt, Human
uaggaaaauaucucuuauuggg

SEQ ID NO: 406861 - RNA, 22 nt, Human
aauaugcacucugauuuagcag

SEQ ID NO: 406862 - RNA, 22 nt, Human
uuugauaucuugguauacagau

SEQ ID NO: 406863 - RNA, 18 nt, Human
ucauuuguuuugcaugaa

SEQ ID NO: 406864 - RNA, 22 nt, Human
aaauggaaaaugcuguuuuggu

SEQ ID NO: 406865 - RNA, 22 nt, Human
uacagugacccuauuuccaaau

SEQ ID NO: 406866 - RNA, 22 nt, Human
aaaagaggagugguuuaugaca

SEQ ID NO: 406867 - RNA, 20 nt, Human
augcaaaucccaaaaucagg

SEQ ID NO: 406868 - RNA, 22 nt, Human
uagacauuuuaagacauauacc

SEQ ID NO: 406869 - RNA, 22 nt, Human
aacagcugucugccuaucucug

SEQ ID NO: 406870 - RNA, 22 nt, Human
uuuauaguagcaugauuuauaa

SEQ ID NO: 406871 - RNA, 22 nt, Human
aguacaugugguccuggccaga

SEQ ID NO: 406872 - RNA, 22 nt, Human
uucaucugcugguuuuuggcau

SEQ ID NO: 406873 - RNA, 22 nt, Human
uaaugguuuuuuggagacugcu

SEQ ID NO: 406874 - RNA, 22 nt, Human
uaucuguuuauuguuacuguca

SEQ ID NO: 406875 - RNA, 22 nt, Human
aagguauuuucuaauguauacu

SEQ ID NO: 406876 - RNA, 22 nt, Human
agagaugcuguggguagaggca

SEQ ID NO: 406877 - RNA, 22 nt, Human
cagugaaguucuacugaauggu

SEQ ID NO: 406878 - RNA, 22 nt, Human
ugauuacaauugucuuagauuu

SEQ ID NO: 406879 - RNA, 22 nt, Human
uuauagcagcaugauuuacaau

SEQ ID NO: 406880 - RNA, 22 nt, Human
ugcacaguuggcuacaucgugg

SEQ ID NO: 406881 - RNA, 22 nt, Human
uacaggaaguuacagacuauga

SEQ ID NO: 406882 - RNA, 22 nt, Human
uugaaacaguagcucauagacc

SEQ ID NO: 406883 - RNA, 22 nt, Human
auguacaaccugcaugacaguc

SEQ ID NO: 406884 - RNA, 18 nt, Human
cuucagugacagucuggc

SEQ ID NO: 406885 - RNA, 22 nt, Human
uaacucacuccaaaaaggcauu

SEQ ID NO: 406886 - RNA, 22 nt, Human
uuuuagugccugauuaaugggu

SEQ ID NO: 406887 - RNA, 22 nt, Human
aaaggauuaaauaaaugugcug

SEQ ID NO: 406888 - RNA, 22 nt, Human
gcugugcauggagggccguuca

SEQ ID NO: 406889 - RNA, 22 nt, Human
cauuuucagcacccaucugaaa

SEQ ID NO: 406890 - RNA, 17 nt, Human
agcugcagaugaaguug

SEQ ID NO: 406891 - RNA, 22 nt, Human
augauauacuuccuagaacagu

SEQ ID NO: 406892 - RNA, 22 nt, Human
aaacagugauguugaguguaaa

SEQ ID NO: 406893 - RNA, 22 nt, Human
acagugaaugagaauggagaaa

SEQ ID NO: 406894 - RNA, 22 nt, Human
uacaacaguucaugaaaugaaa

SEQ ID NO: 406895 - RNA, 22 nt, Human
cauuuguaauacugacuugcag

SEQ ID NO: 406896 - RNA, 22 nt, Human
uuaaauuccagccucauaauag

SEQ ID NO: 406897 - RNA, 22 nt, Human
uuauagugcauaauuaacaugg

SEQ ID NO: 406898 - RNA, 22 nt, Human
acacagugugugcagucggacg

SEQ ID NO: 406899 - RNA, 20 nt, Human
agguuuauauuuagaggugu

SEQ ID NO: 406900 - RNA, 22 nt, Human
auuugcaaugauuucagugcuu

SEQ ID NO: 406901 - RNA, 22 nt, Human
uuauuugcccauguuuagcaga

SEQ ID NO: 406902 - RNA, 22 nt, Human
aauaaaauggucaguuuucuca

SEQ ID NO: 406903 - RNA, 22 nt, Human
ucugugcaaguauuugacauuu

SEQ ID NO: 406904 - RNA, 22 nt, Human
acugugcaagucaaagaugggc

SEQ ID NO: 406905 - RNA, 22 nt, Human
auucugauaucuuauucuagcu

SEQ ID NO: 406906 - RNA, 22 nt, Human
aaaaaugucauuauggaacuga

SEQ ID NO: 406907 - RNA, 22 nt, Human
cauucugagcuaauaugcuuau

SEQ ID NO: 406908 - RNA, 22 nt, Human
cagguauucauagaauucagag

SEQ ID NO: 406909 - RNA, 22 nt, Human
acaauguaggaguaugacagua

SEQ ID NO: 406910 - RNA, 22 nt, Human
cacaggaauuagcagccuaaaa

SEQ ID NO: 406911 - RNA, 22 nt, Human
uaagacauagccaagagcaucc

SEQ ID NO: 406912 - RNA, 22 nt, Human
uuaugcaacaggugagcagaca

SEQ ID NO: 406913 - RNA, 19 nt, Human
agcuaacucacuaacuaug

SEQ ID NO: 406914 - RNA, 22 nt, Human
agaugcuggauggaaaaugauc

SEQ ID NO: 406915 - RNA, 22 nt, Human
acagcugcugcuucucacuggg

SEQ ID NO: 406916 - RNA, 22 nt, Human
agaguuauggacuuaaugcagg

SEQ ID NO: 406917 - RNA, 22 nt, Human
uaagacauuugaaaugugaucc

SEQ ID NO: 406918 - RNA, 22 nt, Human
uuacaagauaaccugaugcugu

SEQ ID NO: 406919 - RNA, 21 nt, Human
uacagugagguguuaggaugu

SEQ ID NO: 406920 - RNA, 22 nt, Human
uuacaugaauacauaaccauuc

SEQ ID NO: 406921 - RNA, 22 nt, Human
agcucaguggcucaguggguau

SEQ ID NO: 406922 - RNA, 22 nt, Human
ugagaugcugcuguaacaaaua

SEQ ID NO: 406923 - RNA, 22 nt, Human
aagacuugaccagguugaaggc

SEQ ID NO: 406924 - RNA, 19 nt, Human
agagaugcuaagagucuuu

SEQ ID NO: 406925 - RNA, 22 nt, Human
acauucuuugaguuuuguuaaa

SEQ ID NO: 406926 - RNA, 20 nt, Human
uggcugugggcaucuguuuc

SEQ ID NO: 406927 - RNA, 22 nt, Human
auaacuucaucaaauaggcaca

SEQ ID NO: 406928 - RNA, 22 nt, Human
agagaugcaggguacauggaau

SEQ ID NO: 406929 - RNA, 22 nt, Human
uacaggagagauuuaguaauca

SEQ ID NO: 406930 - RNA, 22 nt, Human
auaacagugaccucucagcacc

SEQ ID NO: 406931 - RNA, 22 nt, Human
agggaaaucuuucaacacuuca

SEQ ID NO: 406932 - RNA, 22 nt, Human
augcauaaagaaagcuaucugg

SEQ ID NO: 406933 - RNA, 22 nt, Human
agagaugccaccuuuuugcugu

SEQ ID NO: 406934 - RNA, 17 nt, Human
gagugcagacacaagca

SEQ ID NO: 406935 - RNA, 22 nt, Human
uuagagcuucccaauuaaaacg

SEQ ID NO: 406936 - RNA, 19 nt, Human
ccugugcacauguguccuu

SEQ ID NO: 406937 - RNA, 22 nt, Human
uagcuuccagaauuuaauguca

SEQ ID NO: 406938 - RNA, 22 nt, Human
uugcacaugauagaugauuucu

SEQ ID NO: 406939 - RNA, 22 nt, Human
acacacuuuaaauuaaaccucu

SEQ ID NO: 406940 - RNA, 22 nt, Human
augagcaaggcuuugugauagu

SEQ ID NO: 406941 - RNA, 22 nt, Human
uuauagcagcaugauuuauaau

SEQ ID NO: 406942 - RNA, 22 nt, Human
agacagugagaaugaguugaaa

SEQ ID NO: 406943 - RNA, 22 nt, Human
acagugaugagggaauuuugug

SEQ ID NO: 406944 - RNA, 22 nt, Human
uacaguacacagguaccaagcu

SEQ ID NO: 406945 - RNA, 18 nt, Human
ggcugugcguggaggcug

SEQ ID NO: 406946 - RNA, 22 nt, Human
uucuguuugccauauauaguag

SEQ ID NO: 406947 - RNA, 22 nt, Human
uuagagcugauaguacacuggu

SEQ ID NO: 406948 - RNA, 22 nt, Human
ggagaugccagaauugcaaauu

SEQ ID NO: 406949 - RNA, 22 nt, Human
caugauuauauuaauggcuuca

SEQ ID NO: 406950 - RNA, 22 nt, Human
ucauuacacaguucaguggaaa

SEQ ID NO: 406951 - RNA, 22 nt, Human
guaagcacaugugugugcaugg

SEQ ID NO: 406952 - RNA, 22 nt, Human
gaugcaaagauaaaacagacgc

SEQ ID NO: 406953 - RNA, 22 nt, Human
auuugucauauauaauacucuu

SEQ ID NO: 406954 - RNA, 22 nt, Human
agaugcugugaggaagcuagga

SEQ ID NO: 406955 - RNA, 23 nt, Human
aguacauucgaaaaauucuguga

SEQ ID NO: 406956 - RNA, 22 nt, Human
agcuaacaugacuagaagcuuc

SEQ ID NO: 406957 - RNA, 22 nt, Human
aaauuaguacauugcaaagucc

SEQ ID NO: 406958 - RNA, 22 nt, Human
uacagugcuugguaucuaguaa

SEQ ID NO: 406959 - RNA, 22 nt, Human
uauaugcagugugucauucaag

SEQ ID NO: 406960 - RNA, 22 nt, Human
agucacuaggcugaaaguggag

SEQ ID NO: 406961 - RNA, 22 nt, Human
gugcugaggauacagcugugaa

SEQ ID NO: 406962 - RNA, 22 nt, Human
uuuauaugaaagugaccagugg

SEQ ID NO: 406963 - RNA, 22 nt, Human
ugugagcagagccugacaugag

SEQ ID NO: 406964 - RNA, 22 nt, Human
uacaguuccaggaucauagggu

SEQ ID NO: 406965 - RNA, 22 nt, Human
auuuaaauuuucugauggagag

SEQ ID NO: 406966 - RNA, 22 nt, Human
acugugcacccuggacaguguc

SEQ ID NO: 406967 - RNA, 22 nt, Human
auuaugcauuccaaccuuauuc

SEQ ID NO: 406968 - RNA, 22 nt, Human
aaauuauuaugccccucuauaa

SEQ ID NO: 406969 - RNA, 23 nt, Human
aagguauuuauuuuaaagguaag

SEQ ID NO: 406970 - RNA, 22 nt, Human
auggagauuuuuagaauuacag

SEQ ID NO: 406971 - RNA, 22 nt, Human
agcuaagcucucagauacuaag

SEQ ID NO: 406972 - RNA, 22 nt, Human
uaugcacacauguaugcaugug

SEQ ID NO: 406973 - RNA, 22 nt, Human
aaugcacagcuaaagugguucc

SEQ ID NO: 406974 - RNA, 22 nt, Human
ucuaaaugucaguacagaauga

SEQ ID NO: 406975 - RNA, 22 nt, Human
cauuguuaccaucuuuuaccua

SEQ ID NO: 406976 - RNA, 22 nt, Human
ggaaucuuuuucauaagccuca

SEQ ID NO: 406977 - RNA, 22 nt, Human
acugugcauuccccaaccugug

SEQ ID NO: 406978 - RNA, 22 nt, Human
gagaugcugucaggcuaucugu

SEQ ID NO: 406979 - RNA, 22 nt, Human
cuggcuuucugcacagaauugg

SEQ ID NO: 406980 - RNA, 22 nt, Human
ugcugagacaacaggaaacaag

SEQ ID NO: 406981 - RNA, 22 nt, Human
uugcagcugcaguaaauguuca

SEQ ID NO: 406982 - RNA, 22 nt, Human
aguuagagcgcauauuuuauua

SEQ ID NO: 406983 - RNA, 22 nt, Human
aggucauuacaauuaucauuuu

SEQ ID NO: 406984 - RNA, 22 nt, Human
caacagugauucugcaugagga

SEQ ID NO: 406985 - RNA, 22 nt, Human
gauguaaauggucuuuggcaga

SEQ ID NO: 406986 - RNA, 22 nt, Human
agguauauugaaugcuuacuua

SEQ ID NO: 406987 - RNA, 22 nt, Human
gaacauuuggauuuguaaauuu

SEQ ID NO: 406988 - RNA, 22 nt, Human
caucuugaagguuucuuuagcu

SEQ ID NO: 406989 - RNA, 22 nt, Human
agaucauagcacaaaagugaca

SEQ ID NO: 406990 - RNA, 22 nt, Human
auagacauggucuuuugucauu

SEQ ID NO: 406991 - RNA, 22 nt, Human
auuacaguaaaugcuacaggca

SEQ ID NO: 406992 - RNA, 20 nt, Human
uuucacaucugucccuuuaa

SEQ ID NO: 406993 - RNA, 22 nt, Human
acagugauuuuaggauagaugg

SEQ ID NO: 406994 - RNA, 20 nt, Human
ugucaauagcacugaggcug

SEQ ID NO: 406995 - RNA, 22 nt, Human
aucagugcugagagacuaucaa

SEQ ID NO: 406996 - RNA, 22 nt, Human
ucacaucauuaagacuucuccu

SEQ ID NO: 406997 - RNA, 22 nt, Human
gauaacauuuugaagugcuagu

SEQ ID NO: 406998 - RNA, 22 nt, Human
uaugcacauucacacaaaaaug

SEQ ID NO: 406999 - RNA, 22 nt, Human
uugauacagcagccugugaucc

SEQ ID NO: 407000 - RNA, 19 nt, Human
uuuaagcauagaggccaga

SEQ ID NO: 407001 - RNA, 19 nt, Human
agcauuuggaauucuacac

SEQ ID NO: 407002 - RNA, 22 nt, Human
uaacugauguucccuuacugua

SEQ ID NO: 407003 - RNA, 22 nt, Human
ucugugcagaacucacagaagg

SEQ ID NO: 407004 - RNA, 22 nt, Human
auguacaaucuaucacaagaag

SEQ ID NO: 407005 - RNA, 22 nt, Human
uuugacaugaaguagcuuauaa

SEQ ID NO: 407006 - RNA, 22 nt, Human
uggagaugcacgagcaggugga

SEQ ID NO: 407007 - RNA, 22 nt, Human
augcacaucuuacagaugcaga

SEQ ID NO: 407008 - RNA, 22 nt, Human
aauaacagagucuucaagauag

SEQ ID NO: 407009 - RNA, 22 nt, Human
acugcccucccaucuauugcaa

SEQ ID NO: 407010 - RNA, 22 nt, Human
augaguaaaaccacuauuuaca

SEQ ID NO: 407011 - RNA, 22 nt, Human
auuuuaguuuuagcauccaugc

SEQ ID NO: 407012 - RNA, 22 nt, Human
cauaacauguacauauaaaugc

SEQ ID NO: 407013 - RNA, 22 nt, Human
augcuacaggaagacgucaggc

SEQ ID NO: 407014 - RNA, 22 nt, Human
auuugcauuuacauagcauaga

SEQ ID NO: 407015 - RNA, 22 nt, Human
cauguacacacaaagggacaau

SEQ ID NO: 407016 - RNA, 22 nt, Human
acuaaaugcauugguaucuauu

SEQ ID NO: 407017 - RNA, 22 nt, Human
aguaaacaggcaugauaguguu

SEQ ID NO: 407018 - RNA, 22 nt, Human
acugugcaugaaccgaaacaaa

SEQ ID NO: 407019 - RNA, 22 nt, Human
acauucauugagcaacaacaau

SEQ ID NO: 407020 - RNA, 22 nt, Human
cuacaugaacucuuaagucaca

SEQ ID NO: 407021 - RNA, 22 nt, Human
uggaaauacaagaaguauguca

SEQ ID NO: 407022 - RNA, 22 nt, Human
acacauuugcauaauaccucau

SEQ ID NO: 407023 - RNA, 22 nt, Human
ucaguaaccuuuagcacaguug

SEQ ID NO: 407024 - RNA, 22 nt, Human
uauaugcaugcccauguauaca

SEQ ID NO: 407025 - RNA, 22 nt, Human
gcugugcaggggauuugguuau

SEQ ID NO: 407026 - RNA, 22 nt, Human
agguauuaugcugcugaaugcu

SEQ ID NO: 407027 - RNA, 20 nt, Human
ucugugcauugccugcuggu

SEQ ID NO: 407028 - RNA, 22 nt, Human
augaaacacacacgcgcauacu

SEQ ID NO: 407029 - RNA, 22 nt, Human
ggaaucuuaauggcauggaguu

SEQ ID NO: 407030 - RNA, 19 nt, Human
agcacaguuuccacaugca

SEQ ID NO: 407031 - RNA, 22 nt, Human
gacaggaaacaagaaggcagga

SEQ ID NO: 407032 - RNA, 22 nt, Human
auguuuuauguuccacucaagg

SEQ ID NO: 407033 - RNA, 22 nt, Human
aaaugauugucaaaguucuguu

SEQ ID NO: 407034 - RNA, 22 nt, Human
agcugcccccagggcugugcuu

SEQ ID NO: 407035 - RNA, 22 nt, Human
uagcagcuuaaguaauuagaau

SEQ ID NO: 407036 - RNA, 22 nt, Human
gacauucuaaaaaauauggaag

SEQ ID NO: 407037 - RNA, 22 nt, Human
uuugaaauaugaggcauuauga

SEQ ID NO: 407038 - RNA, 22 nt, Human
cauguauaguuggaacuacauc

SEQ ID NO: 407039 - RNA, 22 nt, Human
acaugaaacuguugcauuagaa

SEQ ID NO: 407040 - RNA, 22 nt, Human
uuugacaaaggaaaaaugcaca

SEQ ID NO: 407041 - RNA, 22 nt, Human
augaucaagaauuuuguauucc

SEQ ID NO: 407042 - RNA, 22 nt, Human
cacaggaagagguauacaauuc

SEQ ID NO: 407043 - RNA, 22 nt, Human
auucugaucauucaagauguca

SEQ ID NO: 407044 - RNA, 22 nt, Human
agacagugacuuagugaccaga

SEQ ID NO: 407045 - RNA, 22 nt, Human
ggcugugcugagggggaagccc

SEQ ID NO: 407046 - RNA, 22 nt, Human
auuacaguaacagcuacaaugc

SEQ ID NO: 407047 - RNA, 22 nt, Human
uuauacauguguuuugagauga

SEQ ID NO: 407048 - RNA, 22 nt, Human
acuaugaauagccagauaguga

SEQ ID NO: 407049 - RNA, 22 nt, Human
acauuuugaaagggaaauuguu

SEQ ID NO: 407050 - RNA, 22 nt, Human
aguuugauaaacaccagcuagu

SEQ ID NO: 407051 - RNA, 22 nt, Human
acuaacauuuguguaugucuug

SEQ ID NO: 407052 - RNA, 22 nt, Human
ugagcacauuucacaugacagg

SEQ ID NO: 407053 - RNA, 22 nt, Human
agaugcagaaaaacuaagugau

SEQ ID NO: 407054 - RNA, 22 nt, Human
gugcugugucuaucaggaauaa

SEQ ID NO: 407055 - RNA, 22 nt, Human
agcugcagagguuugugcaaca

SEQ ID NO: 407056 - RNA, 22 nt, Human
caucauaauaacccagacacag

SEQ ID NO: 407057 - RNA, 22 nt, Human
auauacguauauuccaaagggu

SEQ ID NO: 407058 - RNA, 22 nt, Human
ugaucaguguugguucuaucua

SEQ ID NO: 407059 - RNA, 22 nt, Human
uaugcacaguuacaagaauauc

SEQ ID NO: 407060 - RNA, 22 nt, Human
uacaacauuguguugcuucaua

SEQ ID NO: 407061 - RNA, 22 nt, Human
uuauacauguuuauaagguuga

SEQ ID NO: 407062 - RNA, 21 nt, Human
auggaaauuggcaaaugcuac

SEQ ID NO: 407063 - RNA, 22 nt, Human
cuaaacauggcuuagaacacuc

SEQ ID NO: 407064 - RNA, 22 nt, Human
agacaacaccaaaugcuagugu

SEQ ID NO: 407065 - RNA, 22 nt, Human
ucugugcauuucaggaccugaa

SEQ ID NO: 407066 - RNA, 22 nt, Human
gcugagauuacgggcaugagcc

SEQ ID NO: 407067 - RNA, 22 nt, Human
aaugcaaacuccacuggagcag

SEQ ID NO: 407068 - RNA, 22 nt, Human
aaugaacacagcccucuacuuu

SEQ ID NO: 407069 - RNA, 21 nt, Human
gcugugcaggauugaaagcag

SEQ ID NO: 407070 - RNA, 22 nt, Human
uaacugaugugaacuuaccauu

SEQ ID NO: 407071 - RNA, 22 nt, Human
aaggaaauuagguuauuuugcu

SEQ ID NO: 407072 - RNA, 22 nt, Human
uuucuacuuuggaaugcacuga

SEQ ID NO: 407073 - RNA, 22 nt, Human
ugaucaaagugcuggaauuaca

SEQ ID NO: 407074 - RNA, 22 nt, Human
gacaucauaucaggaggcaugu

SEQ ID NO: 407075 - RNA, 22 nt, Human
aaggucauuguugcauguucuc

SEQ ID NO: 407076 - RNA, 19 nt, Human
cauuuagaaguacauauua

SEQ ID NO: 407077 - RNA, 22 nt, Human
auacacuaaucaugugcucagu

SEQ ID NO: 407078 - RNA, 22 nt, Human
acugugcauuucaugucuuuuc

SEQ ID NO: 407079 - RNA, 17 nt, Human
gcagugaaaagagauca

SEQ ID NO: 407080 - RNA, 22 nt, Human
ucauuuguugcuguuaccugag

SEQ ID NO: 407081 - RNA, 22 nt, Human
uguuuauaccugcaaccuguca

SEQ ID NO: 407082 - RNA, 22 nt, Human
ucacaucacccugcucuuaauu

SEQ ID NO: 407083 - RNA, 22 nt, Human
uuauaugauugagcaucuuggu

SEQ ID NO: 407084 - RNA, 22 nt, Human
augcaagacauaaauaaucuuu

SEQ ID NO: 407085 - RNA, 22 nt, Human
acaugcuaugagagauuacuuc

SEQ ID NO: 407086 - RNA, 22 nt, Human
uguuauacuauuuagagguaca

SEQ ID NO: 407087 - RNA, 22 nt, Human
ugagcacagcuuucacuagaaa

SEQ ID NO: 407088 - RNA, 22 nt, Human
ugagcugauaggcugugagccu

SEQ ID NO: 407089 - RNA, 22 nt, Human
ucauucaucugguguuaguccu

SEQ ID NO: 407090 - RNA, 22 nt, Human
uaaacagagugcuaguucacgg

SEQ ID NO: 407091 - RNA, 22 nt, Human
cauggaacuguauaaaggcacu

SEQ ID NO: 407092 - RNA, 22 nt, Human
augauauauguguugagcuugc

SEQ ID NO: 407093 - RNA, 22 nt, Human
aaauuagucgguuuaggaauuu

SEQ ID NO: 407094 - RNA, 22 nt, Human
ugucauauagauauuagacagg

SEQ ID NO: 407095 - RNA, 22 nt, Human
agcacaauagagcaguuaaaaa

SEQ ID NO: 407096 - RNA, 20 nt, Human
uauaugcagccaacacuccc

SEQ ID NO: 407097 - RNA, 22 nt, Human
uacaguucuuugaaggaucuag

SEQ ID NO: 407098 - RNA, 22 nt, Human
ugaaauaauaucuggaucaauc

SEQ ID NO: 407099 - RNA, 22 nt, Human
aaacagauaagggacaauuuca

SEQ ID NO: 407100 - RNA, 22 nt, Human
ugacauuugagagagauauaca

SEQ ID NO: 407101 - RNA, 22 nt, Human
gcacuagauacuguucaggaaa

SEQ ID NO: 407102 - RNA, 22 nt, Human
uucugucaaauuugccauaugg

SEQ ID NO: 407103 - RNA, 22 nt, Human
auacaguauaacuaauaaaccc

SEQ ID NO: 407104 - RNA, 22 nt, Human
ucauaaacacacuaguaugauu

SEQ ID NO: 407105 - RNA, 22 nt, Human
ugauuaaauuaauuaagaugag

SEQ ID NO: 407106 - RNA, 22 nt, Human
agaggauuguuacugauuagcu

SEQ ID NO: 407107 - RNA, 22 nt, Human
uguuagcagagcagcugacaga

SEQ ID NO: 407108 - RNA, 22 nt, Human
gcaaauaaaugcucacugcugu

SEQ ID NO: 407109 - RNA, 22 nt, Human
ugucaauaucaggcagaccuaa

SEQ ID NO: 407110 - RNA, 23 nt, Human
auguuuuaugucucuagcugcca

SEQ ID NO: 407111 - RNA, 22 nt, Human
augaaaacggaccagagcuauu

SEQ ID NO: 407112 - RNA, 22 nt, Human
gcacagugauaggcaguugugc

SEQ ID NO: 407113 - RNA, 22 nt, Human
uaucaugaucagcaacuaauca

SEQ ID NO: 407114 - RNA, 22 nt, Human
uucuugauguaccaacuuggga

SEQ ID NO: 407115 - RNA, 22 nt, Human
uuggauccaucucaggcauagg

SEQ ID NO: 407116 - RNA, 22 nt, Human
gcugugcauugagccugagagu

SEQ ID NO: 407117 - RNA, 22 nt, Human
gauaacauuauaaguucacugu

SEQ ID NO: 407118 - RNA, 22 nt, Human
augauugaaaaugacauugcca

SEQ ID NO: 407119 - RNA, 19 nt, Human
acuagcacccagguaaaug

SEQ ID NO: 407120 - RNA, 22 nt, Human
guacaugagcauaaacacacau

SEQ ID NO: 407121 - RNA, 22 nt, Human
auaauaacaccugaauaggaaa

SEQ ID NO: 407122 - RNA, 22 nt, Human
aaaucugaaauagugugaagua

SEQ ID NO: 407123 - RNA, 22 nt, Human
uaaacauggcuguuucaguuau

SEQ ID NO: 407124 - RNA, 23 nt, Human
uucauauguugcugaaaacagca

SEQ ID NO: 407125 - RNA, 22 nt, Human
aacauacagugagcaguggacu

SEQ ID NO: 407126 - RNA, 23 nt, Human
gcugugcacgagccacugccugu

SEQ ID NO: 407127 - RNA, 19 nt, Human
uucauucucuuauuguugu

SEQ ID NO: 407128 - RNA, 22 nt, Human
cauucugacccuaugauuuaag

SEQ ID NO: 407129 - RNA, 22 nt, Human
cucauaaaagcuuuguuuacac

SEQ ID NO: 407130 - RNA, 22 nt, Human
gaugcugagcuguauggcuggu

SEQ ID NO: 407131 - RNA, 22 nt, Human
auggaaaugauggaacauuaaa

SEQ ID NO: 407132 - RNA, 18 nt, Human
gauguaaaauaguagcuu

SEQ ID NO: 407133 - RNA, 22 nt, Human
aauaugcauguauacaugugua

SEQ ID NO: 407134 - RNA, 22 nt, Human
acuaaacacaugagauuccugc

SEQ ID NO: 407135 - RNA, 22 nt, Human
agugcagugaugaauaaugguu

SEQ ID NO: 407136 - RNA, 22 nt, Human
cuggcuuucugaacaucaguga

SEQ ID NO: 407137 - RNA, 22 nt, Human
ucuguuuaugugucuaaauaaa

SEQ ID NO: 407138 - RNA, 22 nt, Human
cucuguuuuucaauaguucuug

SEQ ID NO: 407139 - RNA, 22 nt, Human
auguaacauugaauuauauagu

SEQ ID NO: 407140 - RNA, 22 nt, Human
augcacaugaggcaagcaaaau

SEQ ID NO: 407141 - RNA, 22 nt, Human
ugucauacaacaauaaguaccg

SEQ ID NO: 407142 - RNA, 23 nt, Human
uuggaaauggggagaacagauuc

SEQ ID NO: 407143 - RNA, 22 nt, Human
cagcacaguuugcuuggcagag

SEQ ID NO: 407144 - RNA, 22 nt, Human
ugcacaguucgccuucuccaag

SEQ ID NO: 407145 - RNA, 18 nt, Human
acacaguggaugccuggu

SEQ ID NO: 407146 - RNA, 21 nt, Human
uuuaugcagauaaugcuauuu

SEQ ID NO: 407147 - RNA, 22 nt, Human
augcaaacauucgcuugucucu

SEQ ID NO: 407148 - RNA, 22 nt, Human
cauuugauccucacaacaaucu

SEQ ID NO: 407149 - RNA, 22 nt, Human
ccugugcaugccaggguacacc

SEQ ID NO: 407150 - RNA, 22 nt, Human
acagugauugggguaucugcag

SEQ ID NO: 407151 - RNA, 22 nt, Human
aauacacuauuuugugcucagu

SEQ ID NO: 407152 - RNA, 22 nt, Human
uacaucuaucuagaugcucaga

SEQ ID NO: 407153 - RNA, 22 nt, Human
uuacaacagacacauauucuaa

SEQ ID NO: 407154 - RNA, 21 nt, Human
ugcuaagugucacaugucugc

SEQ ID NO: 407155 - RNA, 22 nt, Human
ucuguuuaaugggaaugauacu

SEQ ID NO: 407156 - RNA, 22 nt, Human
gugcacaaucuucauauggcgu

SEQ ID NO: 407157 - RNA, 17 nt, Human
cagugcagauaagugag

SEQ ID NO: 407158 - RNA, 22 nt, Human
ccugugcauugaguuugcaccc

SEQ ID NO: 407159 - RNA, 22 nt, Human
acagcagcgugaaguguguuau

SEQ ID NO: 407160 - RNA, 22 nt, Human
uuaaagcaguuuguauacaugg

SEQ ID NO: 407161 - RNA, 22 nt, Human
cuugugcaaauccucgagcaca

SEQ ID NO: 407162 - RNA, 22 nt, Human
acauucuuucucuucaggaaac

SEQ ID NO: 407163 - RNA, 22 nt, Human
gguuuacucguaguggcgguuu

SEQ ID NO: 407164 - RNA, 22 nt, Human
uaaacauggauucugaucacag

SEQ ID NO: 407165 - RNA, 22 nt, Human
uugagcacaggugaacagcauc

SEQ ID NO: 407166 - RNA, 22 nt, Human
agcugugccuauucguggcaag

SEQ ID NO: 407167 - RNA, 22 nt, Human
augcagcugugggcaagaaaug

SEQ ID NO: 407168 - RNA, 22 nt, Human
ugcaaauguguagguuuacaua

SEQ ID NO: 407169 - RNA, 23 nt, Human
aacacauugcuaauuacauucaa

SEQ ID NO: 407170 - RNA, 22 nt, Human
augaugaaauuuucuaucaugu

SEQ ID NO: 407171 - RNA, 22 nt, Human
ucaauucugccucuaaauauuu

SEQ ID NO: 407172 - RNA, 22 nt, Human
agcugagagccccugcccugug

SEQ ID NO: 407173 - RNA, 22 nt, Human
acuuaaaaagaaucuuuucacg

SEQ ID NO: 407174 - RNA, 20 nt, Human
cagcacagagcuuggcucua

SEQ ID NO: 407175 - RNA, 22 nt, Human
ucaaacagcaggucuuucauag

SEQ ID NO: 407176 - RNA, 22 nt, Human
auagugcauuuuauuaucagca

SEQ ID NO: 407177 - RNA, 22 nt, Human
aauuggaagaauugauuugcuu

SEQ ID NO: 407178 - RNA, 22 nt, Human
uuauauuaguuagacuugcugu

SEQ ID NO: 407179 - RNA, 22 nt, Human
acagugacaacccaggauaaau

SEQ ID NO: 407180 - RNA, 20 nt, Human
ggcugugcccuuccguggcc

SEQ ID NO: 407181 - RNA, 22 nt, Human
accuucaaacuagauagaaguu

SEQ ID NO: 407182 - RNA, 22 nt, Human
augaugaaaugauagguuuguu

SEQ ID NO: 407183 - RNA, 22 nt, Human
acuaaaugagauacugucuuca

SEQ ID NO: 407184 - RNA, 22 nt, Human
gcugugcacuaccuauacaucc

SEQ ID NO: 407185 - RNA, 22 nt, Human
uuuaaucuauucccuaaacacc

SEQ ID NO: 407186 - RNA, 19 nt, Human
acagcacagaaauauuuca

SEQ ID NO: 407187 - RNA, 22 nt, Human
aagaugcuugagaacuguuuga

SEQ ID NO: 407188 - RNA, 22 nt, Human
auaaacaucuguuucucuucug

SEQ ID NO: 407189 - RNA, 22 nt, Human
cuaggcuagauaguauauuggu

SEQ ID NO: 407190 - RNA, 22 nt, Human
acauuugugcaacguauccaca

SEQ ID NO: 407191 - RNA, 22 nt, Human
auacaugauacuuaguacguag

SEQ ID NO: 407192 - RNA, 22 nt, Human
acacuggaggguccagggaugu

SEQ ID NO: 407193 - RNA, 22 nt, Human
uacagugcaaugugauguagau

SEQ ID NO: 407194 - RNA, 22 nt, Human
gagaugcugaaaucugagugua

SEQ ID NO: 407195 - RNA, 22 nt, Human
acacauuuucaacacugucaag

SEQ ID NO: 407196 - RNA, 22 nt, Human
ccugugcagcccuugccaguuu

SEQ ID NO: 407197 - RNA, 22 nt, Human
uuugaucagcaagauaaauaga

SEQ ID NO: 407198 - RNA, 22 nt, Human
uaugaacacuuauuggggaagg

SEQ ID NO: 407199 - RNA, 22 nt, Human
uuacauucauugaagugauuca

SEQ ID NO: 407200 - RNA, 22 nt, Human
caugaacauugcagggauguga

SEQ ID NO: 407201 - RNA, 22 nt, Human
uuugcaaugugaaauuaaagaa

SEQ ID NO: 407202 - RNA, 22 nt, Human
gauacaguauuuaaagagcaac

SEQ ID NO: 407203 - RNA, 22 nt, Human
ggagaugcuuuccaguggggau

SEQ ID NO: 407204 - RNA, 22 nt, Human
caagauaaaaucagcauuccaa

SEQ ID NO: 407205 - RNA, 22 nt, Human
ucugugcaagaccaacuuucaa

SEQ ID NO: 407206 - RNA, 22 nt, Human
aggauaacuauaggauaaugcu

SEQ ID NO: 407207 - RNA, 20 nt, Human
acauuugaagucgcauuucu

SEQ ID NO: 407208 - RNA, 22 nt, Human
agcugagagguggcaagcugua

SEQ ID NO: 407209 - RNA, 22 nt, Human
auuuugaugcuaucuaaugaau

SEQ ID NO: 407210 - RNA, 22 nt, Human
auuaaauuaaguggcuaauuua

SEQ ID NO: 407211 - RNA, 22 nt, Human
ugguuguauaaugucacuaagc

SEQ ID NO: 407212 - RNA, 22 nt, Human
guuuacaugcagaaaaucaaug

SEQ ID NO: 407213 - RNA, 22 nt, Human
augcugagauaaggcuuuaguc

SEQ ID NO: 407214 - RNA, 22 nt, Human
ucugugcaguucuugucuugac

SEQ ID NO: 407215 - RNA, 18 nt, Human
ugcugugcacagcccuau

SEQ ID NO: 407216 - RNA, 22 nt, Human
uauacugagagcaaauacauuc

SEQ ID NO: 407217 - RNA, 22 nt, Human
ugacaaagguguugccagaggg

SEQ ID NO: 407218 - RNA, 22 nt, Human
aauggaaugccucacauguauu

SEQ ID NO: 407219 - RNA, 22 nt, Human
ucacauucuagaauguuaucgu

SEQ ID NO: 407220 - RNA, 22 nt, Human
uuaugcaaggacuuauuacagu

SEQ ID NO: 407221 - RNA, 22 nt, Human
aauuugauuuucuuaaaccaua

SEQ ID NO: 407222 - RNA, 22 nt, Human
ucaauuacagugucaccuuaag

SEQ ID NO: 407223 - RNA, 22 nt, Human
aacauuugagaaaaauacucuu

SEQ ID NO: 407224 - RNA, 22 nt, Human
cugagcugggagccuggcacca

SEQ ID NO: 407225 - RNA, 22 nt, Human
uggaauuuaguuaauuccauuu

SEQ ID NO: 407226 - RNA, 22 nt, Human
uaugcacacaucgcagcaggaa

SEQ ID NO: 407227 - RNA, 22 nt, Human
gugauacagguguucuggauau

SEQ ID NO: 407228 - RNA, 22 nt, Human
acaugauuugcaugauuuguaa

SEQ ID NO: 407229 - RNA, 22 nt, Human
acauuugaggauguuaagaaug

SEQ ID NO: 407230 - RNA, 22 nt, Human
cagaauaaacagaaacguagcu

SEQ ID NO: 407231 - RNA, 17 nt, Human
aauguggaaguacaugc

SEQ ID NO: 407232 - RNA, 22 nt, Human
caccauaaaaauaagagaugcc

SEQ ID NO: 407233 - RNA, 22 nt, Human
uauuauuaugcauagcaugaaa

SEQ ID NO: 407234 - RNA, 22 nt, Human
ccugugcaauguugagguuuca

SEQ ID NO: 407235 - RNA, 22 nt, Human
uuaucacuuaugagcuuuuugc

SEQ ID NO: 407236 - RNA, 20 nt, Human
uuugucaacugcauccagca

SEQ ID NO: 407237 - RNA, 22 nt, Human
ugagagcugggaaauguuagcu

SEQ ID NO: 407238 - RNA, 22 nt, Human
ucauuuauaaggaugcaauuaa

SEQ ID NO: 407239 - RNA, 22 nt, Human
aggucauuuuugccuucuauuu

SEQ ID NO: 407240 - RNA, 22 nt, Human
uaggaaauugccaauauaugac

SEQ ID NO: 407241 - RNA, 22 nt, Human
auuacacuaaugugacaacaau

SEQ ID NO: 407242 - RNA, 22 nt, Human
cacuagaugauaaucagcugga

SEQ ID NO: 407243 - RNA, 22 nt, Human
acaguuacaucacuuacugaca

SEQ ID NO: 407244 - RNA, 19 nt, Human
agugucagaauucauugaa

SEQ ID NO: 407245 - RNA, 22 nt, Human
aucauaaaauugcaccauuucu

SEQ ID NO: 407246 - RNA, 22 nt, Human
guacaguagagccagguucagu

SEQ ID NO: 407247 - RNA, 22 nt, Human
aauggagacccuaaggaagagg

SEQ ID NO: 407248 - RNA, 22 nt, Human
augcugagguguguuuaauuua

SEQ ID NO: 407249 - RNA, 22 nt, Human
ggaaucuuugaaggauuuuaag

SEQ ID NO: 407250 - RNA, 22 nt, Human
cugaaaauguuacacaggaaga

SEQ ID NO: 407251 - RNA, 22 nt, Human
ugcaaauagccugaugaaagaa

SEQ ID NO: 407252 - RNA, 22 nt, Human
cauucauuuacuuucaacagcu

SEQ ID NO: 407253 - RNA, 22 nt, Human
ugauuaaagguggaaggcaggu

SEQ ID NO: 407254 - RNA, 22 nt, Human
ucauuuguucaucugcucuucu

SEQ ID NO: 407255 - RNA, 22 nt, Human
acauuugauggaguuaguaggu

SEQ ID NO: 407256 - RNA, 22 nt, Human
ugcugugcuggcggcagaggcc

SEQ ID NO: 407257 - RNA, 18 nt, Human
ugaugcaagagugagcua

SEQ ID NO: 407258 - RNA, 22 nt, Human
cauuugauuccuuuacucuuau

SEQ ID NO: 407259 - RNA, 22 nt, Human
acauugaugaucccacuuacag

SEQ ID NO: 407260 - RNA, 22 nt, Human
ucugugcagaaucaaggagcuu

SEQ ID NO: 407261 - RNA, 22 nt, Human
gauaaaagaggaaauuuguuca

SEQ ID NO: 407262 - RNA, 22 nt, Human
agaugcagacuugguucaggca

SEQ ID NO: 407263 - RNA, 22 nt, Human
aacauuugugaaguacuuagau

SEQ ID NO: 407264 - RNA, 22 nt, Human
aaugcucaaaauguuucaucua

SEQ ID NO: 407265 - RNA, 22 nt, Human
acaguuugguugcuacaguaaa

SEQ ID NO: 407266 - RNA, 22 nt, Human
uggagauguaaagcaaggcuua

SEQ ID NO: 407267 - RNA, 22 nt, Human
ugcagauacaguauguggaagc

SEQ ID NO: 407268 - RNA, 22 nt, Human
aaauggaagcuauuuaugauuc

SEQ ID NO: 407269 - RNA, 22 nt, Human
agcauauaggaaauguugaauc

SEQ ID NO: 407270 - RNA, 22 nt, Human
uaucuguugucuuuuacaugua

SEQ ID NO: 407271 - RNA, 22 nt, Human
aaauugauguucccaguugaaa

SEQ ID NO: 407272 - RNA, 22 nt, Human
cuggagauguccgggugcuguu

SEQ ID NO: 407273 - RNA, 22 nt, Human
uaggaaauuugaaauauguggg

SEQ ID NO: 407274 - RNA, 22 nt, Human
cauguacaugccuacuaucaau

SEQ ID NO: 407275 - RNA, 22 nt, Human
cccuauuagugaccacaucaua

SEQ ID NO: 407276 - RNA, 22 nt, Human
gaugagcugucuagcuguugga

SEQ ID NO: 407277 - RNA, 22 nt, Human
gcugugcagccaagugccucug

SEQ ID NO: 407278 - RNA, 20 nt, Human
aaacauucauguacaaguga

SEQ ID NO: 407279 - RNA, 23 nt, Human
cugcauauggagguuagcaacuc

SEQ ID NO: 407280 - RNA, 22 nt, Human
uaugauuuguagacauuugauu

SEQ ID NO: 407281 - RNA, 22 nt, Human
gcucaguguuucugguagaaaa

SEQ ID NO: 407282 - RNA, 22 nt, Human
aaaggauucucuugauuucagu

SEQ ID NO: 407283 - RNA, 22 nt, Human
auguuuaaaggagucagagacu

SEQ ID NO: 407284 - RNA, 22 nt, Human
uggagaugaauauguguaccug

SEQ ID NO: 407285 - RNA, 22 nt, Human
gaaaugaacugauuaucauugc

SEQ ID NO: 407286 - RNA, 22 nt, Human
gauaacuacacuuaagacaacc

SEQ ID NO: 407287 - RNA, 22 nt, Human
augaacaacuugaagcuccaug

SEQ ID NO: 407288 - RNA, 22 nt, Human
uagggguuaccuuuagcaucuc

SEQ ID NO: 407289 - RNA, 22 nt, Human
cagcacaucugauuauaugacu

SEQ ID NO: 407290 - RNA, 22 nt, Human
guaaacaggaauguggucaugg

SEQ ID NO: 407291 - RNA, 22 nt, Human
acagugaaaaguagcuaacaca

SEQ ID NO: 407292 - RNA, 22 nt, Human
uucucaaagaaagcugucauua

SEQ ID NO: 407293 - RNA, 22 nt, Human
uagcacauaacuuagaauaguu

SEQ ID NO: 407294 - RNA, 22 nt, Human
ugaauuaaaggaauucgaauuc

SEQ ID NO: 407295 - RNA, 22 nt, Human
uuuaaauuuagaagaaacacug

SEQ ID NO: 407296 - RNA, 22 nt, Human
uguaaagcaucucugucauaua

SEQ ID NO: 407297 - RNA, 22 nt, Human
agaugcugucacacacacuguu

SEQ ID NO: 407298 - RNA, 22 nt, Human
aaacauuugcaacucgguuugg

SEQ ID NO: 407299 - RNA, 22 nt, Human
aaacaugaauagauauuaaaca

SEQ ID NO: 407300 - RNA, 22 nt, Human
gagcacagaaggagaaauaugg

SEQ ID NO: 407301 - RNA, 22 nt, Human
caugcauauuacuagcacagca

SEQ ID NO: 407302 - RNA, 22 nt, Human
uaucacuacacuaagauacaga

SEQ ID NO: 407303 - RNA, 22 nt, Human
ugcauaacuagaguaauuacag

SEQ ID NO: 407304 - RNA, 22 nt, Human
uaaacauguugacaucuuaccu

SEQ ID NO: 407305 - RNA, 18 nt, Human
agauuuugagaaauacaa

SEQ ID NO: 407306 - RNA, 22 nt, Human
augcaaauaaagcaacuauaca

SEQ ID NO: 407307 - RNA, 20 nt, Human
uucaugggagcaaagaggcc

SEQ ID NO: 407308 - RNA, 22 nt, Human
acauuugacuguagauacuugc

SEQ ID NO: 407309 - RNA, 22 nt, Human
ggaaucuucagccaugccaaga

SEQ ID NO: 407310 - RNA, 22 nt, Human
uaugcauaguggaauuagcaaa

SEQ ID NO: 407311 - RNA, 22 nt, Human
cuugucagccaauuguggauuu

SEQ ID NO: 407312 - RNA, 22 nt, Human
aacaugauuggaaaaugcuguc

SEQ ID NO: 407313 - RNA, 22 nt, Human
caugcugugugguuagaacugu

SEQ ID NO: 407314 - RNA, 22 nt, Human
cuucauuuggagaacugugcuu

SEQ ID NO: 407315 - RNA, 22 nt, Human
ugcuacacucaaucagugcuau

SEQ ID NO: 407316 - RNA, 21 nt, Human
agaugcugaugcugcaggucc

SEQ ID NO: 407317 - RNA, 22 nt, Human
ucauaaaaugcuccugauauug

SEQ ID NO: 407318 - RNA, 22 nt, Human
acacagauuucacuggaauaga

SEQ ID NO: 407319 - RNA, 22 nt, Human
ggagaugcaauguagaaucugg

SEQ ID NO: 407320 - RNA, 22 nt, Human
uauuuguauguguguacauaua

SEQ ID NO: 407321 - RNA, 22 nt, Human
uuacacuaugaaugagaauaua

SEQ ID NO: 407322 - RNA, 22 nt, Human
uucauacaugagacuagaugca

SEQ ID NO: 407323 - RNA, 22 nt, Human
auuuguagugaagugaaaauaa

SEQ ID NO: 407324 - RNA, 22 nt, Human
ucacaucauggagaauuauggg

SEQ ID NO: 407325 - RNA, 22 nt, Human
agugcacagcgugauguauugg

SEQ ID NO: 407326 - RNA, 22 nt, Human
aagcauuuuaguaaugaacuug

SEQ ID NO: 407327 - RNA, 22 nt, Human
uuugucaaguuugcaaauacgu

SEQ ID NO: 407328 - RNA, 22 nt, Human
cauuuguaguuaaaaaugucuc

SEQ ID NO: 407329 - RNA, 23 nt, Human
caaaccuguucuccccacaugca

SEQ ID NO: 407330 - RNA, 22 nt, Human
ucugugcacaauaggcauuuuu

SEQ ID NO: 407331 - RNA, 22 nt, Human
acagugauuggcacugauucag

SEQ ID NO: 407332 - RNA, 22 nt, Human
aacauugaauuuaaaauacagu

SEQ ID NO: 407333 - RNA, 18 nt, Human
aacaggauccuccacuuc

SEQ ID NO: 407334 - RNA, 22 nt, Human
ccuguuuauugugaagaaccca

SEQ ID NO: 407335 - RNA, 22 nt, Human
aaacauuguuaugauaaauuac

SEQ ID NO: 407336 - RNA, 22 nt, Human
uuauagcagcaugauuuauagu

SEQ ID NO: 407337 - RNA, 22 nt, Human
ucugugcacuaacauuccuggu

SEQ ID NO: 407338 - RNA, 22 nt, Human
aguaaacaauguaugaggacag

SEQ ID NO: 407339 - RNA, 22 nt, Human
agcugugcuguggucaucuggg

SEQ ID NO: 407340 - RNA, 21 nt, Human
auuugcauuaaaauauuacgc

SEQ ID NO: 407341 - RNA, 21 nt, Human
gacauccaugugaguggcagu

SEQ ID NO: 407342 - RNA, 22 nt, Human
augcggugaauugacuguuucu

SEQ ID NO: 407343 - RNA, 22 nt, Human
uaugagcaagaguuugugaagg

SEQ ID NO: 407344 - RNA, 22 nt, Human
ugcacuccaggcugggugacag

SEQ ID NO: 407345 - RNA, 22 nt, Human
agaugcagaguugcuuaagcau

SEQ ID NO: 407346 - RNA, 17 nt, Human
augauuacaucuuuccu

SEQ ID NO: 407347 - RNA, 22 nt, Human
aauguggauccuuacagauacc

SEQ ID NO: 407348 - RNA, 22 nt, Human
uuucuacaguacugauuucaua

SEQ ID NO: 407349 - RNA, 22 nt, Human
uuuuauacacaugaacaugcag

SEQ ID NO: 407350 - RNA, 22 nt, Human
ucuaaauguaucacaucuggau

SEQ ID NO: 407351 - RNA, 22 nt, Human
gaugcaaacugugacauagagu

SEQ ID NO: 407352 - RNA, 22 nt, Human
uuguuuuaguagguacacugag

SEQ ID NO: 407353 - RNA, 22 nt, Human
uacuucaugaguuaauaugcag

SEQ ID NO: 407354 - RNA, 22 nt, Human
auacaguauuaccuguucagga

SEQ ID NO: 407355 - RNA, 22 nt, Human
auggaaauguuccauauauuga

SEQ ID NO: 407356 - RNA, 22 nt, Human
uuuugucagugagaacagaguu

SEQ ID NO: 407357 - RNA, 22 nt, Human
cuguuuaaugagguguaacaac

SEQ ID NO: 407358 - RNA, 22 nt, Human
cauuuguauguuccuccuuagg

SEQ ID NO: 407359 - RNA, 22 nt, Human
augaauaaaacauuuuaaucag

SEQ ID NO: 407360 - RNA, 22 nt, Human
uacagugagacuggcucaggga

SEQ ID NO: 407361 - RNA, 19 nt, Human
agugagcauggcuugacug

SEQ ID NO: 407362 - RNA, 22 nt, Human
uugaauaauuaauuacacucag

SEQ ID NO: 407363 - RNA, 22 nt, Human
caaauagacuuaagcaucugua

SEQ ID NO: 407364 - RNA, 21 nt, Human
ugucauauuucaauacaguuu

SEQ ID NO: 407365 - RNA, 22 nt, Human
uuauucuucuucucuugccagg

SEQ ID NO: 407366 - RNA, 22 nt, Human
acauuugauuccauccucuacu

SEQ ID NO: 407367 - RNA, 22 nt, Human
caacaguguugcaaucugaaaa

SEQ ID NO: 407368 - RNA, 19 nt, Human
aaaugugaugguacaauuc

SEQ ID NO: 407369 - RNA, 22 nt, Human
cugaucaugugggaggauaugu

SEQ ID NO: 407370 - RNA, 21 nt, Human
uacaagauagagguaauauau

SEQ ID NO: 407371 - RNA, 22 nt, Human
uacaggaaggagcacaucggga

SEQ ID NO: 407372 - RNA, 22 nt, Human
acauuugacucuguucauauua

SEQ ID NO: 407373 - RNA, 22 nt, Human
agcugugcacacugugaaguag

SEQ ID NO: 407374 - RNA, 22 nt, Human
aucuaaacuauaguaccuaguc

SEQ ID NO: 407375 - RNA, 22 nt, Human
uguuaaucaacaacaaacagug

SEQ ID NO: 407376 - RNA, 22 nt, Human
augcaaauuaacauauaguaga

SEQ ID NO: 407377 - RNA, 22 nt, Human
uaucagcaggccaaagcugcaa

SEQ ID NO: 407378 - RNA, 23 nt, Human
gguauucauucauuuaugcuaag

SEQ ID NO: 407379 - RNA, 22 nt, Human
aggcugugggguucugcuuuca

SEQ ID NO: 407380 - RNA, 22 nt, Human
gaacauuuauauuagauagcua

SEQ ID NO: 407381 - RNA, 20 nt, Human
caucuugaaggucuuccaca

SEQ ID NO: 407382 - RNA, 23 nt, Human
uuucucaaagaguggcagcuuca

SEQ ID NO: 407383 - RNA, 22 nt, Human
uugcauauccuccaacacaugg

SEQ ID NO: 407384 - RNA, 22 nt, Human
uggaaucuguauguauguauaa

SEQ ID NO: 407385 - RNA, 22 nt, Human
auaacacuaaauguauguaaca

SEQ ID NO: 407386 - RNA, 22 nt, Human
uuguaaauaguaguaagaugcc

SEQ ID NO: 407387 - RNA, 22 nt, Human
ggcacuaugaguuauaagugga

SEQ ID NO: 407388 - RNA, 22 nt, Human
uaagacaucauuaaacagcaau

SEQ ID NO: 407389 - RNA, 19 nt, Human
auacuaggucaugauaauc

SEQ ID NO: 407390 - RNA, 22 nt, Human
uagcugagagcucacuugagga

SEQ ID NO: 407391 - RNA, 22 nt, Human
caacuacuggugcucaggaaau

SEQ ID NO: 407392 - RNA, 22 nt, Human
gagcugaaguuuccauuuguac

SEQ ID NO: 407393 - RNA, 22 nt, Human
acaauguuucucuuuagucauu

SEQ ID NO: 407394 - RNA, 22 nt, Human
cauuugauuacuaaagauaauu

SEQ ID NO: 407395 - RNA, 22 nt, Human
ggagaugccuuguuucaggaac

SEQ ID NO: 407396 - RNA, 18 nt, Human
gauggaaaguguaugagu

SEQ ID NO: 407397 - RNA, 22 nt, Human
ugcauaaagugccauaguauua

SEQ ID NO: 407398 - RNA, 22 nt, Human
augaacaauaaaauagaucaca

SEQ ID NO: 407399 - RNA, 22 nt, Human
cagcacaggccugucuuugucu

SEQ ID NO: 407400 - RNA, 22 nt, Human
cacagugcuuuaugagagaucu

SEQ ID NO: 407401 - RNA, 22 nt, Human
uauacacugauauaaggaguaa

SEQ ID NO: 407402 - RNA, 23 nt, Human
uuuauauuccuaaugucuugagc

SEQ ID NO: 407403 - RNA, 22 nt, Human
acaguacauagaucucuacccu

SEQ ID NO: 407404 - RNA, 22 nt, Human
uuugucaaaucaaaccacauuc

SEQ ID NO: 407405 - RNA, 22 nt, Human
acauuacagcaaguuuacguua

SEQ ID NO: 407406 - RNA, 23 nt, Human
acagugaaacacgcaguaagagu

SEQ ID NO: 407407 - RNA, 22 nt, Human
auuugucacugagagaguuaga

SEQ ID NO: 407408 - RNA, 20 nt, Human
uuugacauauacaguucagg

SEQ ID NO: 407409 - RNA, 22 nt, Human
aaaggucuuaagguuaagcagg

SEQ ID NO: 407410 - RNA, 22 nt, Human
uacaucauggcuucaugcugca

SEQ ID NO: 407411 - RNA, 22 nt, Human
auauugcaauagaugcaucauu

SEQ ID NO: 407412 - RNA, 22 nt, Human
aaauuauuacaagcuaguuggc

SEQ ID NO: 407413 - RNA, 22 nt, Human
cuuaaauucuuaaugcccucau

SEQ ID NO: 407414 - RNA, 20 nt, Human
aacauuuguagucaggcaca

SEQ ID NO: 407415 - RNA, 22 nt, Human
gacaucauguucugcuaauagu

SEQ ID NO: 407416 - RNA, 22 nt, Human
acugugcaguguuguaacccga

SEQ ID NO: 407417 - RNA, 22 nt, Human
uaacauuucggugacaguggga

SEQ ID NO: 407418 - RNA, 22 nt, Human
agacauuuuagacauaaaagau

SEQ ID NO: 407419 - RNA, 22 nt, Human
uuuacugugcauuagaaucacc

SEQ ID NO: 407420 - RNA, 22 nt, Human
uuugcaaauaaauaagugcucg

SEQ ID NO: 407421 - RNA, 22 nt, Human
augaacaucggaaaugagacug

SEQ ID NO: 407422 - RNA, 21 nt, Human
aacaugauauguguauggauu

SEQ ID NO: 407423 - RNA, 21 nt, Human
agaugcagugacccacugggg

SEQ ID NO: 407424 - RNA, 22 nt, Human
acacuagcuauuaacuucacau

SEQ ID NO: 407425 - RNA, 22 nt, Human
gaaacauuguguucuacagauu

SEQ ID NO: 407426 - RNA, 22 nt, Human
ucacuacaaccgcuaccugaca

SEQ ID NO: 407427 - RNA, 19 nt, Human
acauuuagaauguacuugc

SEQ ID NO: 407428 - RNA, 22 nt, Human
auucauuuagagggauuaagca

SEQ ID NO: 407429 - RNA, 22 nt, Human
ucauucauugcaagcacacgca

SEQ ID NO: 407430 - RNA, 22 nt, Human
ugaugauaugaaagaaucuuua

SEQ ID NO: 407431 - RNA, 22 nt, Human
aguuggguuugugucaguugca

SEQ ID NO: 407432 - RNA, 22 nt, Human
ugcugagaucugccaguagaug

SEQ ID NO: 407433 - RNA, 22 nt, Human
ucauacaggcucaagcuauacg

SEQ ID NO: 407434 - RNA, 22 nt, Human
cugucaauuuauguugacaugc

SEQ ID NO: 407435 - RNA, 22 nt, Human
uauuugaugguucuaaaacagc

SEQ ID NO: 407436 - RNA, 22 nt, Human
agccuauuccaggaugagcuca

SEQ ID NO: 407437 - RNA, 22 nt, Human
uugauucaaaggggacaagugg

SEQ ID NO: 407438 - RNA, 22 nt, Human
gagcucagcaaaggucugugug

SEQ ID NO: 407439 - RNA, 21 nt, Human
acaugagacacacauauaugu

SEQ ID NO: 407440 - RNA, 20 nt, Human
agcuaacccuacuuucuuug

SEQ ID NO: 407441 - RNA, 22 nt, Human
acagugcagggugggaagaagg

SEQ ID NO: 407442 - RNA, 22 nt, Human
uaugaacauugaagaggagccc

SEQ ID NO: 407443 - RNA, 22 nt, Human
augcaagcaaucugagcuuugg

SEQ ID NO: 407444 - RNA, 22 nt, Human
uuaacauuguccuuagcagauu

SEQ ID NO: 407445 - RNA, 22 nt, Human
aagaacuuccuaauauauuuuc

SEQ ID NO: 407446 - RNA, 22 nt, Human
uagguacauuauuagaugcaug

SEQ ID NO: 407447 - RNA, 22 nt, Human
ugaauaaacuaugaggaggaau

SEQ ID NO: 407448 - RNA, 22 nt, Human
uagcagcuaugccauuuugaca

SEQ ID NO: 407449 - RNA, 22 nt, Human
auauaauuuuugguuagcucaa

SEQ ID NO: 407450 - RNA, 22 nt, Human
ggcacaauugcagcaauaaaca

SEQ ID NO: 407451 - RNA, 22 nt, Human
acagugcagggcgggaagaagg

SEQ ID NO: 407452 - RNA, 22 nt, Human
aauuacugucuccugcuggugu

SEQ ID NO: 407453 - RNA, 22 nt, Human
aauaugcaaauagguguaauga

SEQ ID NO: 407454 - RNA, 22 nt, Human
guugauacaccucaugguuacu

SEQ ID NO: 407455 - RNA, 23 nt, Human
uuuugcaauaagucacuggaaua

SEQ ID NO: 407456 - RNA, 22 nt, Human
cagugcaggaagugagaugccu

SEQ ID NO: 407457 - RNA, 22 nt, Human
acauggaucaaccuauuuucuu

SEQ ID NO: 407458 - RNA, 22 nt, Human
uacaucaugaaagcauacauca

SEQ ID NO: 407459 - RNA, 22 nt, Human
ugagaacuugugcuauugcaca

SEQ ID NO: 407460 - RNA, 22 nt, Human
agaugcugggaggcugagugca

SEQ ID NO: 407461 - RNA, 22 nt, Human
gaacauuuaugaugcaauaccu

SEQ ID NO: 407462 - RNA, 22 nt, Human
cuacaggaguaaaauaauuuca

SEQ ID NO: 407463 - RNA, 22 nt, Human
caugauaauuguuaacaaagua

SEQ ID NO: 407464 - RNA, 18 nt, Human
acauuuaggagagucaau

SEQ ID NO: 407465 - RNA, 22 nt, Human
ucauuuguggaagugauugugg

SEQ ID NO: 407466 - RNA, 22 nt, Human
cagcagcagagauacugguuuc

SEQ ID NO: 407467 - RNA, 22 nt, Human
uguugauuaguguuuagacuua

SEQ ID NO: 407468 - RNA, 21 nt, Human
uucuguuuuuuguaccagggc

SEQ ID NO: 407469 - RNA, 22 nt, Human
aguuagaguuaauuuccuaaca

SEQ ID NO: 407470 - RNA, 22 nt, Human
uuaaaaugcagauucugauuca

SEQ ID NO: 407471 - RNA, 22 nt, Human
auacacuacuaagcacagauug

SEQ ID NO: 407472 - RNA, 18 nt, Human
uacaggaagggguucucg

SEQ ID NO: 407473 - RNA, 22 nt, Human
auaccauuuccauguuacauua

SEQ ID NO: 407474 - RNA, 19 nt, Human
auacacauacguaaacuga

SEQ ID NO: 407475 - RNA, 22 nt, Human
auacaguaauuuguaacucauc

SEQ ID NO: 407476 - RNA, 22 nt, Human
uuacuguagaagagaaugauuc

SEQ ID NO: 407477 - RNA, 22 nt, Human
uuauuuaaaagugguaagauuc

SEQ ID NO: 407478 - RNA, 22 nt, Human
cuuaaauuuucaucuacaagaa

SEQ ID NO: 407479 - RNA, 22 nt, Human
gcacaguggguggucauguaca

SEQ ID NO: 407480 - RNA, 22 nt, Human
agcuggaugaauuuggaacacu

SEQ ID NO: 407481 - RNA, 20 nt, Human
gcaauauaugagugcaauaa

SEQ ID NO: 407482 - RNA, 23 nt, Human
uacauucuguauuuuuauagagu

SEQ ID NO: 407483 - RNA, 22 nt, Human
acugugcaugguauccuugaug

SEQ ID NO: 407484 - RNA, 20 nt, Human
ggagaugcagcccaggugcc

SEQ ID NO: 407485 - RNA, 22 nt, Human
auucucaauuuugccaaagggu

SEQ ID NO: 407486 - RNA, 22 nt, Human
ucacaucaacauuauagcauga

SEQ ID NO: 407487 - RNA, 22 nt, Human
uuuguaaauagcaguacucaug

SEQ ID NO: 407488 - RNA, 22 nt, Human
ugcugugcuccauugucuucac

SEQ ID NO: 407489 - RNA, 22 nt, Human
guuagagcacauacuuugcaug

SEQ ID NO: 407490 - RNA, 22 nt, Human
ugcaacaggcugugacauggaa

SEQ ID NO: 407491 - RNA, 22 nt, Human
aaacauuuuucuucaucauccu

SEQ ID NO: 407492 - RNA, 18 nt, Human
cacaggaaggggaauauc

SEQ ID NO: 407493 - RNA, 22 nt, Human
caaauagauuguucaauccuga

SEQ ID NO: 407494 - RNA, 22 nt, Human
aaaugugaguuauagcaauaga

SEQ ID NO: 407495 - RNA, 22 nt, Human
auuucgauagaccuaacaauug

SEQ ID NO: 407496 - RNA, 22 nt, Human
cauucauuagaauagauaugua

SEQ ID NO: 407497 - RNA, 22 nt, Human
augcauuugacgggauauauuu

SEQ ID NO: 407498 - RNA, 22 nt, Human
uaggaaauacuguaaguuuggg

SEQ ID NO: 407499 - RNA, 22 nt, Human
uuuauaugugaagguuugcaga

SEQ ID NO: 407500 - RNA, 22 nt, Human
acauuugucuuccuccucagug

SEQ ID NO: 407501 - RNA, 22 nt, Human
auucacuagguugcaaaacugu

SEQ ID NO: 407502 - RNA, 22 nt, Human
aacaugaaaacuaccugugauu

SEQ ID NO: 407503 - RNA, 22 nt, Human
augauauagagaguagauuaaa

SEQ ID NO: 407504 - RNA, 22 nt, Human
caauuugauuaauaccauacuu

SEQ ID NO: 407505 - RNA, 22 nt, Human
acauucuagauauguuauauuu

SEQ ID NO: 407506 - RNA, 22 nt, Human
auuuagcaaaaaaugaugaagc

SEQ ID NO: 407507 - RNA, 21 nt, Human
uucuucaugaugauuaauggc

SEQ ID NO: 407508 - RNA, 22 nt, Human
cauuuguagcuauuuacuguau

SEQ ID NO: 407509 - RNA, 22 nt, Human
aagugauuugcaugcuuaauuc

SEQ ID NO: 407510 - RNA, 23 nt, Human
uuaugcaagcuuccuggucucag

SEQ ID NO: 407511 - RNA, 22 nt, Human
acagugcagugugaugaguauu

SEQ ID NO: 407512 - RNA, 22 nt, Human
aacauuuguguuugcuaaaaau

SEQ ID NO: 407513 - RNA, 22 nt, Human
caugcauauaugcuacaugcaa

SEQ ID NO: 407514 - RNA, 22 nt, Human
ugcaauacauacuuagacccag

SEQ ID NO: 407515 - RNA, 22 nt, Human
acaauuugaggcuacucaauug

SEQ ID NO: 407516 - RNA, 22 nt, Human
auggaaauaucuuuagagcuua

SEQ ID NO: 407517 - RNA, 22 nt, Human
agcugcccaaggucacagagcu

SEQ ID NO: 407518 - RNA, 22 nt, Human
gaugcugauuuuacuguuuucu

SEQ ID NO: 407519 - RNA, 18 nt, Human
aacaguuuccagauucuc

SEQ ID NO: 407520 - RNA, 22 nt, Human
aauguuugccugacuagagugg

SEQ ID NO: 407521 - RNA, 19 nt, Human
agcugugcagacacuucgc

SEQ ID NO: 407522 - RNA, 22 nt, Human
acauuugacuacauuuauauau

SEQ ID NO: 407523 - RNA, 22 nt, Human
acauugauauuucaaauacagg

SEQ ID NO: 407524 - RNA, 22 nt, Human
ucuaauuuuggcauuuuaaccu

SEQ ID NO: 407525 - RNA, 22 nt, Human
aauuugaaacauagucaccacu

SEQ ID NO: 407526 - RNA, 22 nt, Human
auuugcaauuuuacuuugcagu

SEQ ID NO: 407527 - RNA, 22 nt, Human
ggcugugcuuuguuagguuguc

SEQ ID NO: 407528 - RNA, 22 nt, Human
caucauacuguuuacacucaaa

SEQ ID NO: 407529 - RNA, 22 nt, Human
gcucaguguucaucuguaugca

SEQ ID NO: 407530 - RNA, 22 nt, Human
uuaaauuuuagaaacagacucu

SEQ ID NO: 407531 - RNA, 22 nt, Human
agcaaguggaaucauggaaaag

SEQ ID NO: 407532 - RNA, 22 nt, Human
aaguacauuauaugagcagaau

SEQ ID NO: 407533 - RNA, 22 nt, Human
uaacauuuaaauuuuucacaua

SEQ ID NO: 407534 - RNA, 22 nt, Human
gucuucauucucauagcccugg

SEQ ID NO: 407535 - RNA, 22 nt, Human
acaguucccgucuugcacagcu

SEQ ID NO: 407536 - RNA, 22 nt, Human
ugagcagaggaggcugccaacu

SEQ ID NO: 407537 - RNA, 22 nt, Human
gauaaacaugaaguucugugua

SEQ ID NO: 407538 - RNA, 22 nt, Human
auauggaaugguaaucuacaau

SEQ ID NO: 407539 - RNA, 21 nt, Human
uuacuggcagcagaaaccuga

SEQ ID NO: 407540 - RNA, 22 nt, Human
acuuugcagggcuugauaucca

SEQ ID NO: 407541 - RNA, 22 nt, Human
aagcauuugugaaauucagaug

SEQ ID NO: 407542 - RNA, 22 nt, Human
auuaaauuagcaaacugugaaa

SEQ ID NO: 407543 - RNA, 22 nt, Human
cauaauuuuccaugguuugcua

SEQ ID NO: 407544 - RNA, 22 nt, Human
acgugauauauuuacuucccca

SEQ ID NO: 407545 - RNA, 22 nt, Human
uugauacauagcacaguuuagg

SEQ ID NO: 407546 - RNA, 22 nt, Human
augcuuuuaugucacaugguca

SEQ ID NO: 407547 - RNA, 22 nt, Human
acugugcaucuauugccauuua

SEQ ID NO: 407548 - RNA, 22 nt, Human
guuagcaccagugcucauaaca

SEQ ID NO: 407549 - RNA, 22 nt, Human
ucaauuacuaaccaaauaaugu

SEQ ID NO: 407550 - RNA, 17 nt, Human
ugugcauagaauaauga

SEQ ID NO: 407551 - RNA, 22 nt, Human
acaggaaguuuggaaagccuca

SEQ ID NO: 407552 - RNA, 22 nt, Human
aaacaguuaauugcuuucaguu

SEQ ID NO: 407553 - RNA, 22 nt, Human
ggagaugcgacucgcggggcug

SEQ ID NO: 407554 - RNA, 22 nt, Human
aagcauuugguucugaagacuc

SEQ ID NO: 407555 - RNA, 22 nt, Human
uuaaugauuuggaacccuuuaa

SEQ ID NO: 407556 - RNA, 22 nt, Human
ugucagaacucuauugaugucc

SEQ ID NO: 407557 - RNA, 22 nt, Human
gaagcuaaugagauaaaugcca

SEQ ID NO: 407558 - RNA, 22 nt, Human
uauuauuauauuggaugagacu

SEQ ID NO: 407559 - RNA, 22 nt, Human
cauaaacucucuguaccaauau

SEQ ID NO: 407560 - RNA, 22 nt, Human
uagcugagaggccaauugaacu

SEQ ID NO: 407561 - RNA, 22 nt, Human
ucaaacaggacuacauucucau

SEQ ID NO: 407562 - RNA, 22 nt, Human
ucuguuuaugcauauuuaaaac

SEQ ID NO: 407563 - RNA, 22 nt, Human
aggugauuuucuccuuacgauu

SEQ ID NO: 407564 - RNA, 20 nt, Human
uaaacaguauuuacuaggag

SEQ ID NO: 407565 - RNA, 22 nt, Human
ucugucauuucaauaugguuaa

SEQ ID NO: 407566 - RNA, 22 nt, Human
uuacuguacuagugagacuagg

SEQ ID NO: 407567 - RNA, 19 nt, Human
ucauaaaaaugguaaccca

SEQ ID NO: 407568 - RNA, 23 nt, Human
ugaaacauuuaggguagaauuuc

SEQ ID NO: 407569 - RNA, 22 nt, Human
aggauuaaaguauauuuuugag

SEQ ID NO: 407570 - RNA, 22 nt, Human
auaaagcuaagacuuacaugaa

SEQ ID NO: 407571 - RNA, 22 nt, Human
agacauuuccuagacaucaaug

SEQ ID NO: 407572 - RNA, 22 nt, Human
acaugcauacacguacauaccu

SEQ ID NO: 407573 - RNA, 20 nt, Human
uauuuguauuugggaaaguu

SEQ ID NO: 407574 - RNA, 22 nt, Human
ucugugcauuguaacaacuaaa

SEQ ID NO: 407575 - RNA, 22 nt, Human
ucauucaugaggugcuagugcu

SEQ ID NO: 407576 - RNA, 21 nt, Human
ugacauaauccauaguacaaa

SEQ ID NO: 407577 - RNA, 22 nt, Human
cauuugcaagagauaaauguuu

SEQ ID NO: 407578 - RNA, 22 nt, Human
ggaaaucaagaagcagaugagu

SEQ ID NO: 407579 - RNA, 22 nt, Human
ucugugcagucagggcucaguc

SEQ ID NO: 407580 - RNA, 22 nt, Human
uguuuauaccuugguauaacca

SEQ ID NO: 407581 - RNA, 22 nt, Human
agguuuaugauucugcacgugg

SEQ ID NO: 407582 - RNA, 22 nt, Human
uacaugcacaugaacaugugug

SEQ ID NO: 407583 - RNA, 22 nt, Human
aauggaauucuccauuagaugu

SEQ ID NO: 407584 - RNA, 22 nt, Human
cagguauuaauaaauggagagu

SEQ ID NO: 407585 - RNA, 22 nt, Human
ugcaauaaguuguguuaucacu

SEQ ID NO: 407586 - RNA, 22 nt, Human
aauuuugugugggaucaaagga

SEQ ID NO: 407587 - RNA, 22 nt, Human
auaaugcaccuuugaguauggc

SEQ ID NO: 407588 - RNA, 22 nt, Human
gaggucaucaccaauauaugcc

SEQ ID NO: 407589 - RNA, 22 nt, Human
acugugcaggggaagagagaaa

SEQ ID NO: 407590 - RNA, 22 nt, Human
uuacaugaugauuucauaaaca

SEQ ID NO: 407591 - RNA, 22 nt, Human
ggagaugcuacaguucagcucu

SEQ ID NO: 407592 - RNA, 22 nt, Human
uuuaaauucugucugccgcuua

SEQ ID NO: 407593 - RNA, 22 nt, Human
acaguacagugcagaggaagau

SEQ ID NO: 407594 - RNA, 22 nt, Human
ugaugacagcaaaaaaugcuag

SEQ ID NO: 407595 - RNA, 20 nt, Human
auuuggcaugaaguauugau

SEQ ID NO: 407596 - RNA, 22 nt, Human
uagagcuagcuucaaaaugcga

SEQ ID NO: 407597 - RNA, 22 nt, Human
gcugugcagauguagggagugg

SEQ ID NO: 407598 - RNA, 22 nt, Human
augcugagacuggagcagcugg

SEQ ID NO: 407599 - RNA, 22 nt, Human
aguguacauaguuaggaacauc

SEQ ID NO: 407600 - RNA, 22 nt, Human
auagaaauguauuuuggacuag

SEQ ID NO: 407601 - RNA, 22 nt, Human
acaagagcccuuucagauugac

SEQ ID NO: 407602 - RNA, 22 nt, Human
uaauaacaauuguaggacauga

SEQ ID NO: 407603 - RNA, 22 nt, Human
cacaggaaucagcauuaauggc

SEQ ID NO: 407604 - RNA, 22 nt, Human
ucagaacagaagaaggaacacg

SEQ ID NO: 407605 - RNA, 19 nt, Human
ugaauacagagauacagaa

SEQ ID NO: 407606 - RNA, 22 nt, Human
cugagcugguucucuugugaaa

SEQ ID NO: 407607 - RNA, 17 nt, Human
cagguauuuaggcauug

SEQ ID NO: 407608 - RNA, 22 nt, Human
uucucacaguaccuaacaugua

SEQ ID NO: 407609 - RNA, 22 nt, Human
aaauuggaugcacauuuagaaa

SEQ ID NO: 407610 - RNA, 19 nt, Human
aggauuuauuaugugcuca

SEQ ID NO: 407611 - RNA, 22 nt, Human
uugauacaugcucuagaguuga

SEQ ID NO: 407612 - RNA, 22 nt, Human
uaacaugaaacuccaaauggua

SEQ ID NO: 407613 - RNA, 22 nt, Human
uacuaggcaauuauguaaauaa

SEQ ID NO: 407614 - RNA, 22 nt, Human
guacaguaguaaaagugaauga

SEQ ID NO: 407615 - RNA, 22 nt, Human
aagguauuauuugcaaucauuu

SEQ ID NO: 407616 - RNA, 22 nt, Human
guauaugagaaccauggaggug

SEQ ID NO: 407617 - RNA, 22 nt, Human
agguuuauuaaguaaauagagc

SEQ ID NO: 407618 - RNA, 22 nt, Human
uuuacugucucagagagacaaa

SEQ ID NO: 407619 - RNA, 23 nt, Human
ggcugugcagccugcggcaaaag

SEQ ID NO: 407620 - RNA, 22 nt, Human
uucaucugcuucuugauuuugc

SEQ ID NO: 407621 - RNA, 22 nt, Human
cacauuuaagugcuuguucaga

SEQ ID NO: 407622 - RNA, 22 nt, Human
gcacacaugcaugcacaggagu

SEQ ID NO: 407623 - RNA, 22 nt, Human
cagcacagggacaauagcagau

SEQ ID NO: 407624 - RNA, 22 nt, Human
uacuuuuagccuauuugauucu

SEQ ID NO: 407625 - RNA, 22 nt, Human
gaugcauagugaagcugacaga

SEQ ID NO: 407626 - RNA, 22 nt, Human
uuaccuguaaaacugcgauaua

SEQ ID NO: 407627 - RNA, 22 nt, Human
cgcugugccuggcacccagugu

SEQ ID NO: 407628 - RNA, 22 nt, Human
uggaaucuugcgggcacauggc

SEQ ID NO: 407629 - RNA, 22 nt, Human
gaacauuugaugaugacauugg

SEQ ID NO: 407630 - RNA, 22 nt, Human
gcugagaugucguuagauaucu

SEQ ID NO: 407631 - RNA, 22 nt, Human
agugcaugaaagcauacaaggc

SEQ ID NO: 407632 - RNA, 22 nt, Human
gaugaagaggcacugacauauu

SEQ ID NO: 407633 - RNA, 22 nt, Human
uuucugcauauguauguaugga

SEQ ID NO: 407634 - RNA, 20 nt, Human
agacaaaaugacuucaugca

SEQ ID NO: 407635 - RNA, 22 nt, Human
uuuaaauuuguguuuagagggu

SEQ ID NO: 407636 - RNA, 22 nt, Human
gacaucauggagaggacaaaca

SEQ ID NO: 407637 - RNA, 22 nt, Human
auaaacuggguaucaagaggcc

SEQ ID NO: 407638 - RNA, 22 nt, Human
uuucucaaguacugcacaugaa

SEQ ID NO: 407639 - RNA, 22 nt, Human
cuacagugaagacuagcuauag

SEQ ID NO: 407640 - RNA, 22 nt, Human
ugaugaaaauaugauucugagg

SEQ ID NO: 407641 - RNA, 22 nt, Human
uacaacagaccuagaugaauga

SEQ ID NO: 407642 - RNA, 22 nt, Human
uuuguucacauuuaggacucuc

SEQ ID NO: 407643 - RNA, 22 nt, Human
acauucuucuugugaauuuacu

SEQ ID NO: 407644 - RNA, 22 nt, Human
gugaagaaggcaauacaaagaa

SEQ ID NO: 407645 - RNA, 22 nt, Human
uggaaauaugcuccauucuuuu

SEQ ID NO: 407646 - RNA, 22 nt, Human
ccugugcaggcuccauaauaga

SEQ ID NO: 407647 - RNA, 22 nt, Human
acaugaagcaagaaagaugcua

SEQ ID NO: 407648 - RNA, 22 nt, Human
auaaaauuugcuacuguuaaau

SEQ ID NO: 407649 - RNA, 22 nt, Human
uacagagacuuuauggcacaaa

SEQ ID NO: 407650 - RNA, 22 nt, Human
ugacauuucuuguugauauaaa

SEQ ID NO: 407651 - RNA, 22 nt, Human
guauucauuuauuuacucaucc

SEQ ID NO: 407652 - RNA, 21 nt, Human
acagcuaagcaacaacuacug

SEQ ID NO: 407653 - RNA, 22 nt, Human
cuaaccuaguucaacaacuguc

SEQ ID NO: 407654 - RNA, 22 nt, Human
uuuuaucaaucauuaagacauu

SEQ ID NO: 407655 - RNA, 17 nt, Human
gcacagugauauuauuu

SEQ ID NO: 407656 - RNA, 22 nt, Human
ugaagacucagaagcuaagaua

SEQ ID NO: 407657 - RNA, 22 nt, Human
cauuugaagaagaaacguacua

SEQ ID NO: 407658 - RNA, 22 nt, Human
agagaugcugcccgcagacgug

SEQ ID NO: 407659 - RNA, 22 nt, Human
ccugugcauugcaggguguuca

SEQ ID NO: 407660 - RNA, 22 nt, Human
caguuaccaucuucagugauga

SEQ ID NO: 407661 - RNA, 22 nt, Human
ugucauaugcugucauagccau

SEQ ID NO: 407662 - RNA, 22 nt, Human
acugugcacacaaaaauagauu

SEQ ID NO: 407663 - RNA, 22 nt, Human
uuuucucaggugcuuaucuaag

SEQ ID NO: 407664 - RNA, 22 nt, Human
acaacauucuuaaauacacuga

SEQ ID NO: 407665 - RNA, 22 nt, Human
cuguuaagcaacaugaguaagu

SEQ ID NO: 407666 - RNA, 22 nt, Human
augagcaauuaggaagaaaaca

SEQ ID NO: 407667 - RNA, 22 nt, Human
uugaaaguaauaacuuuguuca

SEQ ID NO: 407668 - RNA, 22 nt, Human
aggauuuaggagcuggcuaacg

SEQ ID NO: 407669 - RNA, 22 nt, Human
uuaaugcagaaaucaaacugac

SEQ ID NO: 407670 - RNA, 22 nt, Human
uuucuuauacuauauugucauc

SEQ ID NO: 407671 - RNA, 22 nt, Human
uuuguacaauuagcagaggcua

SEQ ID NO: 407672 - RNA, 22 nt, Human
cuauuacauuucuggacauuca

SEQ ID NO: 407673 - RNA, 19 nt, Human
augcaaauagauuuggaau

SEQ ID NO: 407674 - RNA, 22 nt, Human
cauucauucagcaacuguuauu

SEQ ID NO: 407675 - RNA, 22 nt, Human
uuucacauuggcuucuauuucu

SEQ ID NO: 407676 - RNA, 22 nt, Human
cauaauuugauaugcuugaugg

SEQ ID NO: 407677 - RNA, 22 nt, Human
acauuugagcaucuacuaagug

SEQ ID NO: 407678 - RNA, 22 nt, Human
uuaaaaugaauauugauuagca

SEQ ID NO: 407679 - RNA, 21 nt, Human
uaaaacuguaacuuuguccug

SEQ ID NO: 407680 - RNA, 19 nt, Human
aaauggagcuaaucuuguc

SEQ ID NO: 407681 - RNA, 22 nt, Human
aguuuauagcccagauucaugg

SEQ ID NO: 407682 - RNA, 22 nt, Human
ugcacaguuaauaugugacaga

SEQ ID NO: 407683 - RNA, 22 nt, Human
aguaacaugcuaauuugauuau

SEQ ID NO: 407684 - RNA, 22 nt, Human
uacagugcauagaggcaugaua

SEQ ID NO: 407685 - RNA, 22 nt, Human
acuaugaaaguauaauauugaa

SEQ ID NO: 407686 - RNA, 22 nt, Human
aaauggaucuguggaauacauu

SEQ ID NO: 407687 - RNA, 20 nt, Human
caguggcuucuguggaauau

SEQ ID NO: 407688 - RNA, 22 nt, Human
uacaguaccugccacguuguug

SEQ ID NO: 407689 - RNA, 22 nt, Human
cuacaguagagguugucaggga

SEQ ID NO: 407690 - RNA, 22 nt, Human
aucacaucgaggagcaaucaga

SEQ ID NO: 407691 - RNA, 22 nt, Human
agcugcccuuuaugaugcugaa

SEQ ID NO: 407692 - RNA, 22 nt, Human
ucugugcagauguagaccaguu

SEQ ID NO: 407693 - RNA, 22 nt, Human
uagagcuauacacugaguaaaa

SEQ ID NO: 407694 - RNA, 22 nt, Human
caucaugaagaugagaaagcau

SEQ ID NO: 407695 - RNA, 22 nt, Human
aaauacuguugaaugaaguaag

SEQ ID NO: 407696 - RNA, 22 nt, Human
uacaggaaagaaauuugaacuc

SEQ ID NO: 407697 - RNA, 22 nt, Human
gacaucaugucacuaacugcua

SEQ ID NO: 407698 - RNA, 22 nt, Human
uuuauauccaucuuugaaguaa

SEQ ID NO: 407699 - RNA, 23 nt, Human
agggaaauacugcaauuuuugga

SEQ ID NO: 407700 - RNA, 22 nt, Human
gaugauaacucuuuaugaugaa

SEQ ID NO: 407701 - RNA, 22 nt, Human
cagcacaguacaaggcacggau

SEQ ID NO: 407702 - RNA, 22 nt, Human
agcugugcugccaaguugcuga

SEQ ID NO: 407703 - RNA, 22 nt, Human
aaaacauugaauugcacacuau

SEQ ID NO: 407704 - RNA, 22 nt, Human
aacaugaaguuuucuauaguga

SEQ ID NO: 407705 - RNA, 22 nt, Human
agauuuauguggucacacucag

SEQ ID NO: 407706 - RNA, 22 nt, Human
cauguuaaaauauacauucuga

SEQ ID NO: 407707 - RNA, 22 nt, Human
uuaaagcauguugcuuaacagg

SEQ ID NO: 407708 - RNA, 22 nt, Human
cauuuguaucugggcugcugug

SEQ ID NO: 407709 - RNA, 22 nt, Human
uugcagcuucgagucuaucugu

SEQ ID NO: 407710 - RNA, 21 nt, Human
ugagaugcuagaaggcaggga

SEQ ID NO: 407711 - RNA, 22 nt, Human
cccaggaaugagcaggcagggg

SEQ ID NO: 407712 - RNA, 22 nt, Human
aagugauuuucuucuuaguuau

SEQ ID NO: 407713 - RNA, 22 nt, Human
ggcugugccucuggcagcacau

SEQ ID NO: 407714 - RNA, 22 nt, Human
augauuacauguguuaauauac

SEQ ID NO: 407715 - RNA, 22 nt, Human
uauagaggccaccaacaugaaa

SEQ ID NO: 407716 - RNA, 22 nt, Human
uuuauaguagcaugauuuauag

SEQ ID NO: 407717 - RNA, 22 nt, Human
uuacaguuuaguccaagccaga

SEQ ID NO: 407718 - RNA, 22 nt, Human
ucauuuguugaacuuuagugcg

SEQ ID NO: 407719 - RNA, 22 nt, Human
caugcuguccugaaaagauauu

SEQ ID NO: 407720 - RNA, 22 nt, Human
uucugaaugauagucuugaacu

SEQ ID NO: 407721 - RNA, 22 nt, Human
aauaacagauuuucaagcugug

SEQ ID NO: 407722 - RNA, 22 nt, Human
auuauuguacuuucaauaaggu

SEQ ID NO: 407723 - RNA, 22 nt, Human
ucugucauaagugcugaaguau

SEQ ID NO: 407724 - RNA, 22 nt, Human
auuaaagacagcagauggaugg

SEQ ID NO: 407725 - RNA, 22 nt, Human
ucauuugugugagugauuugac

SEQ ID NO: 407726 - RNA, 22 nt, Human
acuggacagaggaaauauggag

SEQ ID NO: 407727 - RNA, 22 nt, Human
uacaguaggauuuucagggucu

SEQ ID NO: 407728 - RNA, 22 nt, Human
ugauuaaaauuuaacuuaguua

SEQ ID NO: 407729 - RNA, 22 nt, Human
auacaguaauugcauaggcuuc

SEQ ID NO: 407730 - RNA, 22 nt, Human
ugaaacauuaggaaaucauuau

SEQ ID NO: 407731 - RNA, 18 nt, Human
uuuauauggauagagacc

SEQ ID NO: 407732 - RNA, 22 nt, Human
agagcaaagggacauggaagag

SEQ ID NO: 407733 - RNA, 22 nt, Human
uuugugcaagacaugcuaagag

SEQ ID NO: 407734 - RNA, 22 nt, Human
aaucacauuacagcauaucugu

SEQ ID NO: 407735 - RNA, 22 nt, Human
gaagcuaaugauuuauuuucug

SEQ ID NO: 407736 - RNA, 22 nt, Human
gagugaugucuguagugaagaa

SEQ ID NO: 407737 - RNA, 22 nt, Human
agugauuagaaaguacacuugg

SEQ ID NO: 407738 - RNA, 22 nt, Human
agugucagcuaauuauucauga

SEQ ID NO: 407739 - RNA, 22 nt, Human
agacauuuccugugaaccuacu

SEQ ID NO: 407740 - RNA, 22 nt, Human
guguuuuauuggugcagucaga

SEQ ID NO: 407741 - RNA, 22 nt, Human
uuaguuuucccaucuuuauggu

SEQ ID NO: 407742 - RNA, 22 nt, Human
ugcauacacaagcauacaugua

SEQ ID NO: 407743 - RNA, 22 nt, Human
aacauuugaaaaucaagaaucu

SEQ ID NO: 407744 - RNA, 20 nt, Human
aguggcaggcgaucauuacu

SEQ ID NO: 407745 - RNA, 22 nt, Human
ucuaauuuuaggcauuuguuca

SEQ ID NO: 407746 - RNA, 22 nt, Human
auaacauggaguuugucauuua

SEQ ID NO: 407747 - RNA, 22 nt, Human
gcacauaacugaccacaucuaa

SEQ ID NO: 407748 - RNA, 22 nt, Human
uacaacaguaaucaagguuuuu

SEQ ID NO: 407749 - RNA, 22 nt, Human
acacuugauaggucaaaucagu

SEQ ID NO: 407750 - RNA, 22 nt, Human
uucauacauguguacuguucca

SEQ ID NO: 407751 - RNA, 22 nt, Human
uacaggaaggcucuggaggugc

SEQ ID NO: 407752 - RNA, 22 nt, Human
gauuuaaaguagaccuuuguuu

SEQ ID NO: 407753 - RNA, 22 nt, Human
caucaaauuaugugucaaagca

SEQ ID NO: 407754 - RNA, 22 nt, Human
agcugauacauuucuuguagcc

SEQ ID NO: 407755 - RNA, 22 nt, Human
cucauaaagugagaauaugacc

SEQ ID NO: 407756 - RNA, 21 nt, Human
aaacuagaguguggcaaagcu

SEQ ID NO: 407757 - RNA, 22 nt, Human
gauuacugucuacuugggauag

SEQ ID NO: 407758 - RNA, 22 nt, Human
aguaugcaaaugucauaagcau

SEQ ID NO: 407759 - RNA, 22 nt, Human
aacauucugguucuaaaaaccu

SEQ ID NO: 407760 - RNA, 22 nt, Human
auaauaacaaugccagaugccu

SEQ ID NO: 407761 - RNA, 19 nt, Human
augaugcagagcugacuca

SEQ ID NO: 407762 - RNA, 22 nt, Human
uuacaacauaugauaggagucu

SEQ ID NO: 407763 - RNA, 22 nt, Human
aauaugcaaagcguguuaucug

SEQ ID NO: 407764 - RNA, 22 nt, Human
ggcugugcuuugcccaaagggc

SEQ ID NO: 407765 - RNA, 22 nt, Human
uaaacagaaagcagauguacuu

SEQ ID NO: 407766 - RNA, 22 nt, Human
uguacauacauagauauacaca

SEQ ID NO: 407767 - RNA, 22 nt, Human
ugcauacauaaagugcuaucau

SEQ ID NO: 407768 - RNA, 22 nt, Human
uaugcacacauuagcacagggu

SEQ ID NO: 407769 - RNA, 22 nt, Human
acaugauuaaaagauuuuaaag

SEQ ID NO: 407770 - RNA, 21 nt, Human
uuucuccaagugacugauucc

SEQ ID NO: 407771 - RNA, 22 nt, Human
cuugauauuuuaaacauacagu

SEQ ID NO: 407772 - RNA, 22 nt, Human
cauguacaaggaugcucagagu

SEQ ID NO: 407773 - RNA, 22 nt, Human
ugagaugcaggagaugggacug

SEQ ID NO: 407774 - RNA, 22 nt, Human
guagaaaaagcaguaagucuca

SEQ ID NO: 407775 - RNA, 22 nt, Human
augcaagauguauagaagacuu

SEQ ID NO: 407776 - RNA, 22 nt, Human
uuguacauucugaaucuguccu

SEQ ID NO: 407777 - RNA, 22 nt, Human
ucaggauuauuucaguggcuuu

SEQ ID NO: 407778 - RNA, 20 nt, Human
gugcugagggcugggcaaug

SEQ ID NO: 407779 - RNA, 22 nt, Human
uguacaugugucuguauaucuu

SEQ ID NO: 407780 - RNA, 22 nt, Human
uauacugaguguguuaaugaug

SEQ ID NO: 407781 - RNA, 21 nt, Human
ucauuugugaucugauuucca

SEQ ID NO: 407782 - RNA, 23 nt, Human
acuuugcauacccaaauuguuuu

SEQ ID NO: 407783 - RNA, 17 nt, Human
ggcugugccaggugaga

SEQ ID NO: 407784 - RNA, 22 nt, Human
uuguuuaauccuuguacccaug

SEQ ID NO: 407785 - RNA, 22 nt, Human
uacagcuagagggcacgugaac

SEQ ID NO: 407786 - RNA, 22 nt, Human
guaguuacccagaacacuggaa

SEQ ID NO: 407787 - RNA, 22 nt, Human
aaacaguuuuuuaagucucuag

SEQ ID NO: 407788 - RNA, 22 nt, Human
auuugcaaagucguaucuguga

SEQ ID NO: 407789 - RNA, 22 nt, Human
agaguuauauugguugagaauu

SEQ ID NO: 407790 - RNA, 23 nt, Human
aaauuauugcucuucaauugccu

SEQ ID NO: 407791 - RNA, 22 nt, Human
aguggaguugaguugauggauu

SEQ ID NO: 407792 - RNA, 22 nt, Human
agagauauauauuuguuuacca

SEQ ID NO: 407793 - RNA, 22 nt, Human
augaacaagagagggaagauuc

SEQ ID NO: 407794 - RNA, 22 nt, Human
acugugcauuugaagggaucau

SEQ ID NO: 407795 - RNA, 22 nt, Human
ucuaugaaccucugcaaugaca

SEQ ID NO: 407796 - RNA, 23 nt, Human
auaaugcaaguggugguaaucug

SEQ ID NO: 407797 - RNA, 22 nt, Human
auaugcaagcacauagaauacu

SEQ ID NO: 407798 - RNA, 22 nt, Human
agacaacaugaucagcaguccu

SEQ ID NO: 407799 - RNA, 22 nt, Human
augcagcuucaggauuaugaug

SEQ ID NO: 407800 - RNA, 22 nt, Human
uuguaaaugaccuuuucuaauu

SEQ ID NO: 407801 - RNA, 22 nt, Human
uucacuuauagggauguuauug

SEQ ID NO: 407802 - RNA, 22 nt, Human
ucugucauuuuguaucuacaug

SEQ ID NO: 407803 - RNA, 22 nt, Human
cacaucauucaauggugauauu

SEQ ID NO: 407804 - RNA, 15 nt, Human
ucugugcagcaaggg

SEQ ID NO: 407805 - RNA, 21 nt, Human
auaaacagcaugugauccaug

SEQ ID NO: 407806 - RNA, 22 nt, Human
aaagugccugacucauaguuag

SEQ ID NO: 407807 - RNA, 22 nt, Human
acauuucagauucaugaaguga

SEQ ID NO: 407808 - RNA, 22 nt, Human
aaagugccuucuauuuuaguga

SEQ ID NO: 407809 - RNA, 22 nt, Human
ggcugugcaccauccaccuccc

SEQ ID NO: 407810 - RNA, 22 nt, Human
uuacuaagagaaguaaauauuu

SEQ ID NO: 407811 - RNA, 22 nt, Human
gauaaacacaaggugauuucau

SEQ ID NO: 407812 - RNA, 22 nt, Human
aauagugcugcuguggacaugg

SEQ ID NO: 407813 - RNA, 22 nt, Human
uacaucauguaagcagaaucau

SEQ ID NO: 407814 - RNA, 22 nt, Human
uuuaagcaaguugacauagcau

SEQ ID NO: 407815 - RNA, 22 nt, Human
uguuagagcuaagauaacaucu

SEQ ID NO: 407816 - RNA, 20 nt, Human
ucagcacagcugacaagguu

SEQ ID NO: 407817 - RNA, 22 nt, Human
auuugcaauuacucaugucauu

SEQ ID NO: 407818 - RNA, 22 nt, Human
uggaaauacuugccauaaaacu

SEQ ID NO: 407819 - RNA, 22 nt, Human
augcacaucacucugaagaaaa

SEQ ID NO: 407820 - RNA, 22 nt, Human
gcugugcagucuuuggugugcc

SEQ ID NO: 407821 - RNA, 22 nt, Human
uagagcaguguuguccaucaga

SEQ ID NO: 407822 - RNA, 22 nt, Human
uguuaaacuguauugcauaagg

SEQ ID NO: 407823 - RNA, 22 nt, Human
cauuugaucuccugaauaaaca

SEQ ID NO: 407824 - RNA, 22 nt, Human
ccugugcauccgguggucauug

SEQ ID NO: 407825 - RNA, 22 nt, Human
aaacagcagcuguuuaauuugc

SEQ ID NO: 407826 - RNA, 22 nt, Human
uuauaugaacuggacuuuagga

SEQ ID NO: 407827 - RNA, 22 nt, Human
uacagugcacauuucuuaggaa

SEQ ID NO: 407828 - RNA, 22 nt, Human
ugcuuugcaaauaauagaaugu

SEQ ID NO: 407829 - RNA, 22 nt, Human
ugagaugcuaaagggcugcuca

SEQ ID NO: 407830 - RNA, 22 nt, Human
aagguauuauugucuauguacu

SEQ ID NO: 407831 - RNA, 20 nt, Human
acauuuuggcauacucucaa

SEQ ID NO: 407832 - RNA, 22 nt, Human
agagguauuagguaauucagua

SEQ ID NO: 407833 - RNA, 22 nt, Human
uugauuuuaaaauagugacacu

SEQ ID NO: 407834 - RNA, 22 nt, Human
ggcugugcccucacauggggca

SEQ ID NO: 407835 - RNA, 22 nt, Human
ugcucauugcugauuuacaugu

SEQ ID NO: 407836 - RNA, 22 nt, Human
aagauuuuuuuccacagacuca

SEQ ID NO: 407837 - RNA, 22 nt, Human
cuaguugaagaggcugucauca

SEQ ID NO: 407838 - RNA, 22 nt, Human
cuacaguaugaaaccuuuacuc

SEQ ID NO: 407839 - RNA, 22 nt, Human
augcagaaagagaauguaaugu

SEQ ID NO: 407840 - RNA, 22 nt, Human
cauuaaacaaccuugaaucaau

SEQ ID NO: 407841 - RNA, 22 nt, Human
guaaacauuuucaucugugccc

SEQ ID NO: 407842 - RNA, 22 nt, Human
uuugauauccuauacaaguaaa

SEQ ID NO: 407843 - RNA, 22 nt, Human
uaugcauagugauuuagaacag

SEQ ID NO: 407844 - RNA, 18 nt, Human
ucauuuugucugccuuug

SEQ ID NO: 407845 - RNA, 22 nt, Human
gucacuguauccagguuccagc

SEQ ID NO: 407846 - RNA, 22 nt, Human
acaguagcuaauauugcauuau

SEQ ID NO: 407847 - RNA, 22 nt, Human
acaacaguaggaaaacaugucu

SEQ ID NO: 407848 - RNA, 22 nt, Human
uagugucagggagugauaaaug

SEQ ID NO: 407849 - RNA, 23 nt, Human
ggagaugcuuaagagugguugag

SEQ ID NO: 407850 - RNA, 22 nt, Human
cauuuagagaagauuacaagga

SEQ ID NO: 407851 - RNA, 22 nt, Human
cuucauuacuugcucguagcac

SEQ ID NO: 407852 - RNA, 22 nt, Human
acagugaugagccggcugaggc

SEQ ID NO: 407853 - RNA, 22 nt, Human
cauguacauucuguagauggag

SEQ ID NO: 407854 - RNA, 22 nt, Human
cauuacaucuuugaugcaguau

SEQ ID NO: 407855 - RNA, 22 nt, Human
aacaugaugacauuguaagcuu

SEQ ID NO: 407856 - RNA, 22 nt, Human
agagugcaugacaugaucuugg

SEQ ID NO: 407857 - RNA, 22 nt, Human
ugagaucucugccuauauggau

SEQ ID NO: 407858 - RNA, 22 nt, Human
acaggauuucaccauguuggcc

SEQ ID NO: 407859 - RNA, 22 nt, Human
auuugauaguaugacagggcag

SEQ ID NO: 407860 - RNA, 21 nt, Human
gcagaauagucucugucuuca

SEQ ID NO: 407861 - RNA, 22 nt, Human
aauagugcuuuuguacauagga

SEQ ID NO: 407862 - RNA, 22 nt, Human
aauguacaaaagucagccaacu

SEQ ID NO: 407863 - RNA, 22 nt, Human
guggaaaugcccccaaauagug

SEQ ID NO: 407864 - RNA, 22 nt, Human
uggaugaaaaaugagaauuuuc

SEQ ID NO: 407865 - RNA, 22 nt, Human
aacauucuaugugcauucagaa

SEQ ID NO: 407866 - RNA, 20 nt, Human
ucugugcaccugcuacaagg

SEQ ID NO: 407867 - RNA, 22 nt, Human
auuacuaugauuugaucauuac

SEQ ID NO: 407868 - RNA, 22 nt, Human
augcaaaugcuagagaauguug

SEQ ID NO: 407869 - RNA, 22 nt, Human
guuaaauucgaugauggauaaa

SEQ ID NO: 407870 - RNA, 18 nt, Human
gcuuugcagaaauacaga

SEQ ID NO: 407871 - RNA, 22 nt, Human
aguaaacagaaagcaagaugau

SEQ ID NO: 407872 - RNA, 22 nt, Human
gacaacagugguuucagguucc

SEQ ID NO: 407873 - RNA, 22 nt, Human
gcacuauagcugcagcacagag

SEQ ID NO: 407874 - RNA, 22 nt, Human
cuguuucauagaguugugaauu

SEQ ID NO: 407875 - RNA, 22 nt, Human
cagaauaaagguacaauugagu

SEQ ID NO: 407876 - RNA, 22 nt, Human
aauguuaguaacuugaguauuu

SEQ ID NO: 407877 - RNA, 22 nt, Human
uugcagcuuagugauguuaucu

SEQ ID NO: 407878 - RNA, 22 nt, Human
gucugcauacaggacaugcaca

SEQ ID NO: 407879 - RNA, 20 nt, Human
cagguauuacuuccuuuaug

SEQ ID NO: 407880 - RNA, 22 nt, Human
uacaucauggugagcaggaggc

SEQ ID NO: 407881 - RNA, 19 nt, Human
acacauuugcacaauccac

SEQ ID NO: 407882 - RNA, 22 nt, Human
augaaacagugaauuagucaag

SEQ ID NO: 407883 - RNA, 22 nt, Human
auucuguuacuuggugaucuuc

SEQ ID NO: 407884 - RNA, 22 nt, Human
ugcagauaauacuagaacuuac

SEQ ID NO: 407885 - RNA, 20 nt, Human
ggagaugccucucaguccau

SEQ ID NO: 407886 - RNA, 22 nt, Human
gagcucagggcauugagcaaga

SEQ ID NO: 407887 - RNA, 22 nt, Human
uaugaacacacuuuggaaguga

SEQ ID NO: 407888 - RNA, 22 nt, Human
aaacaguaaguucuaguauuau

SEQ ID NO: 407889 - RNA, 22 nt, Human
uuuauauguauugacuuugaug

SEQ ID NO: 407890 - RNA, 22 nt, Human
aaggauuaguagguacaguuca

SEQ ID NO: 407891 - RNA, 22 nt, Human
gcaugcugcagggaaugcuugu

SEQ ID NO: 407892 - RNA, 22 nt, Human
cauuugcaaaccaacaagauga

SEQ ID NO: 407893 - RNA, 22 nt, Human
agagguaugguauauuggaaga

SEQ ID NO: 407894 - RNA, 22 nt, Human
ugcagcaaacaggccuucaggg

SEQ ID NO: 407895 - RNA, 22 nt, Human
ucugucaugccacaggacuugg

SEQ ID NO: 407896 - RNA, 22 nt, Human
aaacaggucugaaaauagcuac

SEQ ID NO: 407897 - RNA, 22 nt, Human
uaccuucuaggugaugguuaca

SEQ ID NO: 407898 - RNA, 22 nt, Human
aagacauuuauuugaaucaauu

SEQ ID NO: 407899 - RNA, 22 nt, Human
acauuuaaugauccuacuguga

SEQ ID NO: 407900 - RNA, 22 nt, Human
agaugcagauuuggauucagga

SEQ ID NO: 407901 - RNA, 22 nt, Human
cacagugcuguuuguaaagaga

SEQ ID NO: 407902 - RNA, 22 nt, Human
aguaaacacugucuuuauauau

SEQ ID NO: 407903 - RNA, 22 nt, Human
caauuugacaaguugcauguuu

SEQ ID NO: 407904 - RNA, 22 nt, Human
ucugugcaggaagucauuauga

SEQ ID NO: 407905 - RNA, 20 nt, Human
uauuuacaacuuagagccuc

SEQ ID NO: 407906 - RNA, 22 nt, Human
auuuaaaugcuuaagaggguuu

SEQ ID NO: 407907 - RNA, 22 nt, Human
ugaguaaagggccagauaguaa

SEQ ID NO: 407908 - RNA, 22 nt, Human
uguguacacagauaguaauggc

SEQ ID NO: 407909 - RNA, 22 nt, Human
uuuauaugguugacuaugaguu

SEQ ID NO: 407910 - RNA, 22 nt, Human
acaggauuaauaaaaaauugua

SEQ ID NO: 407911 - RNA, 22 nt, Human
acuauuagcauaucaugaaugg

SEQ ID NO: 407912 - RNA, 22 nt, Human
ugagcuuuguuguuaguauauu

SEQ ID NO: 407913 - RNA, 22 nt, Human
aauggcacuuuauaaauguuaa

SEQ ID NO: 407914 - RNA, 22 nt, Human
uguauaaaccauggacagcuuu

SEQ ID NO: 407915 - RNA, 22 nt, Human
uugcugugucauuuguuuaauc

SEQ ID NO: 407916 - RNA, 22 nt, Human
ugcagaugagggaugaaaauga

SEQ ID NO: 407917 - RNA, 22 nt, Human
uaacauugucaguucaacugcu

SEQ ID NO: 407918 - RNA, 22 nt, Human
cauuuguaucauauguaucuua

SEQ ID NO: 407919 - RNA, 22 nt, Human
aaauacuggcaagugcuaauuc

SEQ ID NO: 407920 - RNA, 22 nt, Human
auaaaaugguaaacgaagcuga

SEQ ID NO: 407921 - RNA, 22 nt, Human
agaaagagcucgggauuaacag

SEQ ID NO: 407922 - RNA, 23 nt, Human
acaugauacacaauuagcaaacc

SEQ ID NO: 407923 - RNA, 22 nt, Human
uuuguacacugucuacuaugaa

SEQ ID NO: 407924 - RNA, 22 nt, Human
uuugauacugagaaaaacaaau

SEQ ID NO: 407925 - RNA, 19 nt, Human
aacaucauggcucuuucca

SEQ ID NO: 407926 - RNA, 22 nt, Human
uucuuuuacauuaagauuucag

SEQ ID NO: 407927 - RNA, 19 nt, Human
cuuugucagaacaugcuuc

SEQ ID NO: 407928 - RNA, 22 nt, Human
acugugcaaaugacaggcacac

SEQ ID NO: 407929 - RNA, 22 nt, Human
uuaaaugugauuucauuuaugu

SEQ ID NO: 407930 - RNA, 22 nt, Human
uucaggauggcggauguugggg

SEQ ID NO: 407931 - RNA, 22 nt, Human
aaguacauguuguucaaaagcc

SEQ ID NO: 407932 - RNA, 17 nt, Human
uuacaacaauucaugag

SEQ ID NO: 407933 - RNA, 19 nt, Human
uugaaauuguuugauaugg

SEQ ID NO: 407934 - RNA, 22 nt, Human
augcugagaaacagacguguug

SEQ ID NO: 407935 - RNA, 22 nt, Human
cuggcuuuggaaacaauuuauc

SEQ ID NO: 407936 - RNA, 22 nt, Human
ggcugugcgucauccggcugca

SEQ ID NO: 407937 - RNA, 17 nt, Human
ugcaaacaaucacauau

SEQ ID NO: 407938 - RNA, 23 nt, Human
acaucagaguuaguucaaucagg

SEQ ID NO: 407939 - RNA, 22 nt, Human
caugcugugcaucuugaugacc

SEQ ID NO: 407940 - RNA, 21 nt, Human
gcugugcacauaguagaagug

SEQ ID NO: 407941 - RNA, 22 nt, Human
uggaaauagcuccaguuaagca

SEQ ID NO: 407942 - RNA, 22 nt, Human
auuuacauuuauuugagaaggu

SEQ ID NO: 407943 - RNA, 22 nt, Human
aaucuugaguaucagaccaaga

SEQ ID NO: 407944 - RNA, 22 nt, Human
aagacauugucauuuuauaauu

SEQ ID NO: 407945 - RNA, 22 nt, Human
ugaagaaaggugugggauacuc

SEQ ID NO: 407946 - RNA, 22 nt, Human
gcugugcaaaucgauuuguugg

SEQ ID NO: 407947 - RNA, 22 nt, Human
uguuaaaccuaguacagguccu

SEQ ID NO: 407948 - RNA, 22 nt, Human
agagguauuagauuugcauagg

SEQ ID NO: 407949 - RNA, 22 nt, Human
caguagcuugcuuaggcuuuua

SEQ ID NO: 407950 - RNA, 22 nt, Human
acuucauauggacagcaaacua

SEQ ID NO: 407951 - RNA, 22 nt, Human
acauuuugagaaaugacaagcu

SEQ ID NO: 407952 - RNA, 22 nt, Human
aucacaucucaccacugcaacc

SEQ ID NO: 407953 - RNA, 20 nt, Human
auacaguaggugcucaauau

SEQ ID NO: 407954 - RNA, 23 nt, Human
gggggccguccuggggauuauag

SEQ ID NO: 407955 - RNA, 19 nt, Human
ugauucaucuaacugccuc

SEQ ID NO: 407956 - RNA, 22 nt, Human
augcugagguuguuguccuauu

SEQ ID NO: 407957 - RNA, 22 nt, Human
cagcaaaguaagcugacaugua

SEQ ID NO: 407958 - RNA, 22 nt, Human
aguaaacacuaaaaugacugcg

SEQ ID NO: 407959 - RNA, 22 nt, Human
agggaaauuaaugugagcaaug

SEQ ID NO: 407960 - RNA, 22 nt, Human
cuaaacaugcaagagcuucugg

SEQ ID NO: 407961 - RNA, 22 nt, Human
aaacacguauaaugugacagag

SEQ ID NO: 407962 - RNA, 22 nt, Human
uuugauucuguaaaauaacagg

SEQ ID NO: 407963 - RNA, 22 nt, Human
uuauauacugugguaguacugu

SEQ ID NO: 407964 - RNA, 22 nt, Human
agagaugcaucucuuaaaauug

SEQ ID NO: 407965 - RNA, 22 nt, Human
gcuggagaugcuaugcagaggg

SEQ ID NO: 407966 - RNA, 22 nt, Human
uuucucaaccucaacacuauuu

SEQ ID NO: 407967 - RNA, 22 nt, Human
ugcugugcaaaggugaugugag

SEQ ID NO: 407968 - RNA, 22 nt, Human
uacuggcaauuucauauggugc

SEQ ID NO: 407969 - RNA, 22 nt, Human
guuuauauucaacggaguaucu

SEQ ID NO: 407970 - RNA, 22 nt, Human
agaggaauaugggugcacuaga

SEQ ID NO: 407971 - RNA, 22 nt, Human
auaggaaagaaaauuauguagg

SEQ ID NO: 407972 - RNA, 19 nt, Human
ugcugcuguccuugcaggg

SEQ ID NO: 407973 - RNA, 22 nt, Human
aacaucauuauguccauuaaug

SEQ ID NO: 407974 - RNA, 22 nt, Human
caugaaauguuagaauuagaca

SEQ ID NO: 407975 - RNA, 23 nt, Human
ccacuagcaccuguucaacuucu

SEQ ID NO: 407976 - RNA, 22 nt, Human
ugcagcaagaccggauaugucg

SEQ ID NO: 407977 - RNA, 18 nt, Human
auguacauuugcuaaagc

SEQ ID NO: 407978 - RNA, 22 nt, Human
uacaugaauguuucaauauugu

SEQ ID NO: 407979 - RNA, 22 nt, Human
augauuacucccauuugauaga

SEQ ID NO: 407980 - RNA, 18 nt, Human
uacaggaaaaguguuaca

SEQ ID NO: 407981 - RNA, 22 nt, Human
acagcacaggaguugaaugggc

SEQ ID NO: 407982 - RNA, 22 nt, Human
aaaacuuagcuaggcaaguuuu

SEQ ID NO: 407983 - RNA, 22 nt, Human
aaaauugagagucuugugcaag

SEQ ID NO: 407984 - RNA, 22 nt, Human
cugccuuugugaucaguucuuu

SEQ ID NO: 407985 - RNA, 22 nt, Human
cuugcuacuaugccuggcuaau

SEQ ID NO: 407986 - RNA, 22 nt, Human
aaacaugaugccuguacuaaga

SEQ ID NO: 407987 - RNA, 21 nt, Human
uguaaguuucaucugaauugg

SEQ ID NO: 407988 - RNA, 22 nt, Human
gcugugcagugggaguucggug

SEQ ID NO: 407989 - RNA, 22 nt, Human
cugcacaaugcaccaucaaguu

SEQ ID NO: 407990 - RNA, 22 nt, Human
aaacaugaugucauauaugcca

SEQ ID NO: 407991 - RNA, 22 nt, Human
aguuugauggcuuaauaguaga

SEQ ID NO: 407992 - RNA, 22 nt, Human
auacaguagggaccaugucuga

SEQ ID NO: 407993 - RNA, 22 nt, Human
uaggauuauuuguucuauuucu

SEQ ID NO: 407994 - RNA, 22 nt, Human
ggcugugcagggcagagucuca

SEQ ID NO: 407995 - RNA, 22 nt, Human
agagaugcauucagcauggaug

SEQ ID NO: 407996 - RNA, 22 nt, Human
auuaacaugcagccagacacac

SEQ ID NO: 407997 - RNA, 19 nt, Human
uuuucucagcuucuagcgg

SEQ ID NO: 407998 - RNA, 22 nt, Human
auauaauucucagguuugacua

SEQ ID NO: 407999 - RNA, 22 nt, Human
ugcauaaaauaugagaaaugua

SEQ ID NO: 408000 - RNA, 22 nt, Human
uucaggauaugugauaucugaa

SEQ ID NO: 408001 - RNA, 22 nt, Human
cagguauuuucaaggcuugugu

SEQ ID NO: 408002 - RNA, 22 nt, Human
ucuuacauauagcaugaguaca

SEQ ID NO: 408003 - RNA, 22 nt, Human
aagguauuggucuggucuuccu

SEQ ID NO: 408004 - RNA, 22 nt, Human
uguucagaacaaagguaaauga

SEQ ID NO: 408005 - RNA, 22 nt, Human
caauuacugguccacagaaauu

SEQ ID NO: 408006 - RNA, 22 nt, Human
augaacaaucuguugacuucug

SEQ ID NO: 408007 - RNA, 22 nt, Human
aagcagcauaugacagcaucca

SEQ ID NO: 408008 - RNA, 22 nt, Human
augcuuuuccaggagaaauaua

SEQ ID NO: 408009 - RNA, 22 nt, Human
auuugcauaucugauagacuaa

SEQ ID NO: 408010 - RNA, 22 nt, Human
ucacuacaaaagucucccuuuc

SEQ ID NO: 408011 - RNA, 22 nt, Human
aaugugaaaccgcacagaauaa

SEQ ID NO: 408012 - RNA, 22 nt, Human
gucuugaaauucuguuaaagga

SEQ ID NO: 408013 - RNA, 22 nt, Human
augagcagaugcuccugccucu

SEQ ID NO: 408014 - RNA, 22 nt, Human
uauaggauugguucccauuuua

SEQ ID NO: 408015 - RNA, 20 nt, Human
ucugugcaguggaggggcag

SEQ ID NO: 408016 - RNA, 22 nt, Human
ucugugcauccuuaacgccugc

SEQ ID NO: 408017 - RNA, 22 nt, Human
cagcacagcuggcucuggaagc

SEQ ID NO: 408018 - RNA, 22 nt, Human
uaugcauagguaucuauacuca

SEQ ID NO: 408019 - RNA, 22 nt, Human
gauuacaauucagguugauaag

SEQ ID NO: 408020 - RNA, 22 nt, Human
gacaucauagggugggaggaaa

SEQ ID NO: 408021 - RNA, 22 nt, Human
auucucaaaacauaacuucacu

SEQ ID NO: 408022 - RNA, 22 nt, Human
aagacauuggacaauccagagg

SEQ ID NO: 408023 - RNA, 22 nt, Human
gaagauugaaggcugggaauua

SEQ ID NO: 408024 - RNA, 22 nt, Human
uugaauucauuucucauugagu

SEQ ID NO: 408025 - RNA, 22 nt, Human
cuaacauuuauugagcacuuag

SEQ ID NO: 408026 - RNA, 22 nt, Human
aacagugaguugaugacugaau

SEQ ID NO: 408027 - RNA, 22 nt, Human
ucaaucacguguuccauguucu

SEQ ID NO: 408028 - RNA, 22 nt, Human
aaauggaagaagugcaauacug

SEQ ID NO: 408029 - RNA, 18 nt, Human
uuacacuagccuugguuc

SEQ ID NO: 408030 - RNA, 22 nt, Human
uacaguagacaggaccacaggc

SEQ ID NO: 408031 - RNA, 22 nt, Human
guauuaguuaucuacugcugug

SEQ ID NO: 408032 - RNA, 22 nt, Human
cacggucacccaucagagucca

SEQ ID NO: 408033 - RNA, 22 nt, Human
aauaugcauuauacagacugau

SEQ ID NO: 408034 - RNA, 22 nt, Human
ugcaaauccuguuuggaguaag

SEQ ID NO: 408035 - RNA, 22 nt, Human
agauuuugucucaauacuucug

SEQ ID NO: 408036 - RNA, 22 nt, Human
auuacuagauugucaagauuua

SEQ ID NO: 408037 - RNA, 22 nt, Human
uuucacauuuaggcgugaauug

SEQ ID NO: 408038 - RNA, 22 nt, Human
ucuguuuagacucaguugaaac

SEQ ID NO: 408039 - RNA, 22 nt, Human
aaagcacauaguagaaggauuu

SEQ ID NO: 408040 - RNA, 22 nt, Human
cagcagcauugcucuggauucc

SEQ ID NO: 408041 - RNA, 22 nt, Human
uacagugacagauagggauaga

SEQ ID NO: 408042 - RNA, 22 nt, Human
gauguaaaaacuccuuucgaaa

SEQ ID NO: 408043 - RNA, 22 nt, Human
uuuaucuuuaggacuuugcaga

SEQ ID NO: 408044 - RNA, 22 nt, Human
auguaaacaagguuauugucca

SEQ ID NO: 408045 - RNA, 22 nt, Human
ugauuucucuuggcaauauguu

SEQ ID NO: 408046 - RNA, 22 nt, Human
gacaacaggcagacgucagaaa

SEQ ID NO: 408047 - RNA, 22 nt, Human
uuucacaucagagguagauuag

SEQ ID NO: 408048 - RNA, 22 nt, Human
acauaugaguacuauacagugc

SEQ ID NO: 408049 - RNA, 22 nt, Human
uuagaucauuuuagcuaaaugg

SEQ ID NO: 408050 - RNA, 22 nt, Human
ucaucauaauauggaaucuugu

SEQ ID NO: 408051 - RNA, 22 nt, Human
uuugaugaguuuaauaacagcc

SEQ ID NO: 408052 - RNA, 22 nt, Human
uaucaguagauaaacggauugc

SEQ ID NO: 408053 - RNA, 22 nt, Human
aaauggaacugggcuacuaggu

SEQ ID NO: 408054 - RNA, 22 nt, Human
ugagcagaguuguuucuccuga

SEQ ID NO: 408055 - RNA, 22 nt, Human
acaucaguccaccacugcaguu

SEQ ID NO: 408056 - RNA, 22 nt, Human
ugcaaacaauuuccuauaaagu

SEQ ID NO: 408057 - RNA, 22 nt, Human
ucuugcaggcggcucagcaacc

SEQ ID NO: 408058 - RNA, 22 nt, Human
augaaacaugcuuuguggauga

SEQ ID NO: 408059 - RNA, 22 nt, Human
guuuacauuaaguauuagcauc

SEQ ID NO: 408060 - RNA, 22 nt, Human
cugagcugagccaaaucugucu

SEQ ID NO: 408061 - RNA, 22 nt, Human
auuaaacaauguaaaguucuug

SEQ ID NO: 408062 - RNA, 22 nt, Human
uuauuuacaacucuucucuucc

SEQ ID NO: 408063 - RNA, 22 nt, Human
uugugcagcuauaaagaaaugg

SEQ ID NO: 408064 - RNA, 22 nt, Human
gcaaauaauauacuuugaucuc

SEQ ID NO: 408065 - RNA, 22 nt, Human
agacauuuauguuucucuagga

SEQ ID NO: 408066 - RNA, 22 nt, Human
uguacauagaucuugaaaauua

SEQ ID NO: 408067 - RNA, 22 nt, Human
uuuaaauuauaguuaaugucug

SEQ ID NO: 408068 - RNA, 22 nt, Human
uccauguuucagcaucuacauc

SEQ ID NO: 408069 - RNA, 22 nt, Human
cucauuuauguaaugauuaagg

SEQ ID NO: 408070 - RNA, 18 nt, Human
uuaugcaaaacuguuuuc

SEQ ID NO: 408071 - RNA, 22 nt, Human
uuagagcaggaguugacagauu

SEQ ID NO: 408072 - RNA, 22 nt, Human
uaaaacagcagggcagagaagu

SEQ ID NO: 408073 - RNA, 22 nt, Human
auuuugcacacuaugcagcuuu

SEQ ID NO: 408074 - RNA, 23 nt, Human
acugauuaacaugugugauauuc

SEQ ID NO: 408075 - RNA, 19 nt, Human
aggucauugauagugcagg

SEQ ID NO: 408076 - RNA, 22 nt, Human
uuaugcaaaggggccucuuccu

SEQ ID NO: 408077 - RNA, 20 nt, Human
auacacaugcagacagaugc

SEQ ID NO: 408078 - RNA, 22 nt, Human
ucauuguuucugcuuuucauga

SEQ ID NO: 408079 - RNA, 22 nt, Human
gcugaugcaggguugagaggag

SEQ ID NO: 408080 - RNA, 22 nt, Human
aaugcaaacuucuuguuacuug

SEQ ID NO: 408081 - RNA, 22 nt, Human
ggcugugcuugguguccuugga

SEQ ID NO: 408082 - RNA, 22 nt, Human
gauacaguguguuaacgagaaa

SEQ ID NO: 408083 - RNA, 22 nt, Human
caggacaucgucaucaugggga

SEQ ID NO: 408084 - RNA, 22 nt, Human
gucaucauuuuuagcauauggg

SEQ ID NO: 408085 - RNA, 22 nt, Human
ugcauaaacagauacuucaugu

SEQ ID NO: 408086 - RNA, 22 nt, Human
aguaacauuuagcuucucacug

SEQ ID NO: 408087 - RNA, 22 nt, Human
auguuauuaaaguacagauucu

SEQ ID NO: 408088 - RNA, 22 nt, Human
uugagcaaugcugcaaagagau

SEQ ID NO: 408089 - RNA, 22 nt, Human
uggggcagggaugggaaacuau

SEQ ID NO: 408090 - RNA, 22 nt, Human
agaggauugaucaaacacugca

SEQ ID NO: 408091 - RNA, 22 nt, Human
ugaguaaauauuuaugacuaga

SEQ ID NO: 408092 - RNA, 17 nt, Human
cuuauacuuuacggaag

SEQ ID NO: 408093 - RNA, 22 nt, Human
uucaucuggucuaguuuuuagu

SEQ ID NO: 408094 - RNA, 22 nt, Human
ucugugcaccuucuaaugagua

SEQ ID NO: 408095 - RNA, 23 nt, Human
uuuguacauugaggaggcagaau

SEQ ID NO: 408096 - RNA, 22 nt, Human
ugagaugcugggaacaaggaag

SEQ ID NO: 408097 - RNA, 22 nt, Human
uuuguacauguaagauugcauc

SEQ ID NO: 408098 - RNA, 22 nt, Human
aaaacagacagccaguguagag

SEQ ID NO: 408099 - RNA, 22 nt, Human
uucaggaugaaagugugcaaca

SEQ ID NO: 408100 - RNA, 22 nt, Human
caauuacuuuugcaccaauaua

SEQ ID NO: 408101 - RNA, 22 nt, Human
auguacauuuguaguaauauca

SEQ ID NO: 408102 - RNA, 22 nt, Human
ugucauuaguuucagccauucu

SEQ ID NO: 408103 - RNA, 22 nt, Human
ccugugcauugaccacacucuc

SEQ ID NO: 408104 - RNA, 22 nt, Human
ucugugcaauaguuuguuuuac

SEQ ID NO: 408105 - RNA, 23 nt, Human
ugcugugccuuugucugccucca

SEQ ID NO: 408106 - RNA, 22 nt, Human
uacagaccaguaguucucagcg

SEQ ID NO: 408107 - RNA, 22 nt, Human
uuugaucaugaagaggauaaac

SEQ ID NO: 408108 - RNA, 22 nt, Human
acaaauggagaaacugaggccc

SEQ ID NO: 408109 - RNA, 22 nt, Human
uacagucagagugccuuucuaa

SEQ ID NO: 408110 - RNA, 22 nt, Human
augcacuacuagaugcaaaagu

SEQ ID NO: 408111 - RNA, 22 nt, Human
auacacguguguguacaugcac

SEQ ID NO: 408112 - RNA, 22 nt, Human
aaacuagaaaucagcaagauag

SEQ ID NO: 408113 - RNA, 22 nt, Human
acaauuacccuggcuugauaaa

SEQ ID NO: 408114 - RNA, 22 nt, Human
agugcucaugcacauuuauagu

SEQ ID NO: 408115 - RNA, 22 nt, Human
uuugucaaucccuugaaaaccu

SEQ ID NO: 408116 - RNA, 19 nt, Human
agaaaaacugguacugcug

SEQ ID NO: 408117 - RNA, 22 nt, Human
gcaagaaaaaggcuucaugaac

SEQ ID NO: 408118 - RNA, 22 nt, Human
aguaaacauagaauguucuucc

SEQ ID NO: 408119 - RNA, 18 nt, Human
aaacagugccuaaguguc

SEQ ID NO: 408120 - RNA, 22 nt, Human
uuucacauacaguguauaguag

SEQ ID NO: 408121 - RNA, 22 nt, Human
uuuguucaauccagacaauagc

SEQ ID NO: 408122 - RNA, 22 nt, Human
gcugugcauaaguauaauaaac

SEQ ID NO: 408123 - RNA, 22 nt, Human
cagcacaggaauaugguggaca

SEQ ID NO: 408124 - RNA, 22 nt, Human
uucagaaauucauggaguucag

SEQ ID NO: 408125 - RNA, 22 nt, Human
auauuacuuccugguauaaaau

SEQ ID NO: 408126 - RNA, 22 nt, Human
auaugaauuuggcuggaaaggu

SEQ ID NO: 408127 - RNA, 22 nt, Human
uuucucaacuguauuaugcaga

SEQ ID NO: 408128 - RNA, 22 nt, Human
ucaucuuaggugaugagacagu

SEQ ID NO: 408129 - RNA, 22 nt, Human
ggacaucuugguugcuuccaag

SEQ ID NO: 408130 - RNA, 22 nt, Human
cauuuguaguaucuguuuauau

SEQ ID NO: 408131 - RNA, 22 nt, Human
auguuuaagaaagucuuccaua

SEQ ID NO: 408132 - RNA, 22 nt, Human
aagguuuauuaaaaguugaugg

SEQ ID NO: 408133 - RNA, 22 nt, Human
cacaucauguuaauucauuaca

SEQ ID NO: 408134 - RNA, 22 nt, Human
ugauuacacaccacagugcucc

SEQ ID NO: 408135 - RNA, 22 nt, Human
aauaacaggguugauuugcaau

SEQ ID NO: 408136 - RNA, 17 nt, Human
ugaugcaaagucagcug

SEQ ID NO: 408137 - RNA, 22 nt, Human
auugagcagcuucucugccauc

SEQ ID NO: 408138 - RNA, 21 nt, Human
gcugugcaggugccccugcuc

SEQ ID NO: 408139 - RNA, 22 nt, Human
aagcauuuuucacagcaacagc

SEQ ID NO: 408140 - RNA, 22 nt, Human
aauaacagaaacuugagcauca

SEQ ID NO: 408141 - RNA, 22 nt, Human
cugagcugguggaagcaugcag

SEQ ID NO: 408142 - RNA, 22 nt, Human
ucuauguaaagccauauugaua

SEQ ID NO: 408143 - RNA, 22 nt, Human
uuucaaauagaaucuuuccaaa

SEQ ID NO: 408144 - RNA, 22 nt, Human
gcgucaauuccaucauucuucu

SEQ ID NO: 408145 - RNA, 22 nt, Human
ucauaacagcuaagucccuuuc

SEQ ID NO: 408146 - RNA, 22 nt, Human
auguaaacuuagauaagcagua

SEQ ID NO: 408147 - RNA, 22 nt, Human
acauuagaacauuaauauuggg

SEQ ID NO: 408148 - RNA, 22 nt, Human
uugcacaucuaauaaugcuaga

SEQ ID NO: 408149 - RNA, 22 nt, Human
acugauuaaaaacagacauuua

SEQ ID NO: 408150 - RNA, 22 nt, Human
acaguuugagaaccacuagccu

SEQ ID NO: 408151 - RNA, 22 nt, Human
ggagaugcuucuuguguuuauu

SEQ ID NO: 408152 - RNA, 22 nt, Human
acauuuagcuguacaaucuaug

SEQ ID NO: 408153 - RNA, 22 nt, Human
aacacaguccugcucacuuauu

SEQ ID NO: 408154 - RNA, 22 nt, Human
gauacauaaaaaugugcucuau

SEQ ID NO: 408155 - RNA, 22 nt, Human
augcagaagcagaacuuacaca

SEQ ID NO: 408156 - RNA, 22 nt, Human
ugauuuaugaccaaguuagaau

SEQ ID NO: 408157 - RNA, 22 nt, Human
ccugugcacuaucugcauuuuu

SEQ ID NO: 408158 - RNA, 22 nt, Human
acagugaaugcccaagaaaagu

SEQ ID NO: 408159 - RNA, 23 nt, Human
auguuauuauuagcagucuugcc

SEQ ID NO: 408160 - RNA, 23 nt, Human
auggaaauagcaugugucauuua

SEQ ID NO: 408161 - RNA, 20 nt, Human
ucacaggagggaaggcaggu

SEQ ID NO: 408162 - RNA, 20 nt, Human
agcauuugaaauaugacuau

SEQ ID NO: 408163 - RNA, 22 nt, Human
acugugcagcugagugcuaauu

SEQ ID NO: 408164 - RNA, 22 nt, Human
uucacuguccugcaacucuaga

SEQ ID NO: 408165 - RNA, 22 nt, Human
cauuuguacagaacagcuuuau

SEQ ID NO: 408166 - RNA, 22 nt, Human
uucauacauuuuuacuaacagc

SEQ ID NO: 408167 - RNA, 22 nt, Human
acaauucuggguauuuauauag

SEQ ID NO: 408168 - RNA, 22 nt, Human
uuuauauguuuguacaauuaag

SEQ ID NO: 408169 - RNA, 22 nt, Human
uugcaagaaauaaucgaauaga

SEQ ID NO: 408170 - RNA, 22 nt, Human
uugcagcuucuaccacuguuuc

SEQ ID NO: 408171 - RNA, 22 nt, Human
aacagugcugcauucauugagc

SEQ ID NO: 408172 - RNA, 22 nt, Human
acugugcaaugaguaauaaacu

SEQ ID NO: 408173 - RNA, 22 nt, Human
aauuacugaugccuguguucca

SEQ ID NO: 408174 - RNA, 22 nt, Human
cacaucauagagacucaaucca

SEQ ID NO: 408175 - RNA, 22 nt, Human
agcugcuugggaaccaucaauu

SEQ ID NO: 408176 - RNA, 22 nt, Human
aauacugccugugagguaacuc

SEQ ID NO: 408177 - RNA, 22 nt, Human
auucauuuagguauucacuuac

SEQ ID NO: 408178 - RNA, 20 nt, Human
uaacugaucauuuucaccag

SEQ ID NO: 408179 - RNA, 22 nt, Human
acugagcugugacaaugcuuaa

SEQ ID NO: 408180 - RNA, 22 nt, Human
auuaaauuggaucugcauaguu

SEQ ID NO: 408181 - RNA, 22 nt, Human
aagcauuucuguuuaucuaucg

SEQ ID NO: 408182 - RNA, 22 nt, Human
agugagcaguacuuacuccugc

SEQ ID NO: 408183 - RNA, 22 nt, Human
auuaaauuggacgcugggggaa

SEQ ID NO: 408184 - RNA, 22 nt, Human
aucuucaucaaguucacagugg

SEQ ID NO: 408185 - RNA, 22 nt, Human
ugauuagacaaaggaaucaugc

SEQ ID NO: 408186 - RNA, 22 nt, Human
auuauaugugggauagaauuua

SEQ ID NO: 408187 - RNA, 22 nt, Human
ugagcagacuugaugaggcagc

SEQ ID NO: 408188 - RNA, 22 nt, Human
acaaauggaagguguucucuuc

SEQ ID NO: 408189 - RNA, 22 nt, Human
agacauuuauugaacaccuagc

SEQ ID NO: 408190 - RNA, 22 nt, Human
aaacaguuuauaacaugauacu

SEQ ID NO: 408191 - RNA, 22 nt, Human
cagcacagugcagaugcugacu

SEQ ID NO: 408192 - RNA, 22 nt, Human
uugaaacauucuccuauugauu

SEQ ID NO: 408193 - RNA, 22 nt, Human
cagcacagaguauuuuauugau

SEQ ID NO: 408194 - RNA, 22 nt, Human
uucauuuaauuuguguauuaac

SEQ ID NO: 408195 - RNA, 22 nt, Human
agacauuuggaagauacacaua

SEQ ID NO: 408196 - RNA, 21 nt, Human
cccugcuuggggcagaacaac

SEQ ID NO: 408197 - RNA, 22 nt, Human
cauguauacaguagaauacuau

SEQ ID NO: 408198 - RNA, 22 nt, Human
uuaaacacacugagauuuaugu

SEQ ID NO: 408199 - RNA, 22 nt, Human
accuguuuucagaaaaugcaga

SEQ ID NO: 408200 - RNA, 22 nt, Human
ugauggaaaauaaaucuuauuc

SEQ ID NO: 408201 - RNA, 22 nt, Human
uaaauuguuuucuagaaguugu

SEQ ID NO: 408202 - RNA, 22 nt, Human
caggacacagaauaaggcaguu

SEQ ID NO: 408203 - RNA, 22 nt, Human
ucugucauuucauucauaugaa

SEQ ID NO: 408204 - RNA, 22 nt, Human
gaggucaugcaaaauugaauca

SEQ ID NO: 408205 - RNA, 22 nt, Human
gaacuguaguuaauacuacaca

SEQ ID NO: 408206 - RNA, 22 nt, Human
cuaauuguaagcuccuugaggg

SEQ ID NO: 408207 - RNA, 18 nt, Human
auaauaggagauaaaaau

SEQ ID NO: 408208 - RNA, 22 nt, Human
aacagagcugaccagugagggc

SEQ ID NO: 408209 - RNA, 22 nt, Human
cuguuuaaccagaucucauauc

SEQ ID NO: 408210 - RNA, 22 nt, Human
aaacuagagauggcagguggaa

SEQ ID NO: 408211 - RNA, 22 nt, Human
uauaugcagauuuucaucaucg

SEQ ID NO: 408212 - RNA, 22 nt, Human
augaaaacagccuccugugaua

SEQ ID NO: 408213 - RNA, 22 nt, Human
uuugagcagcagaugcacuuag

SEQ ID NO: 408214 - RNA, 20 nt, Human
ugcuauauugaagugcaguu

SEQ ID NO: 408215 - RNA, 22 nt, Human
aacuagaacgagaaagcugaac

SEQ ID NO: 408216 - RNA, 22 nt, Human
uauuuacuuuuaaauugagaac

SEQ ID NO: 408217 - RNA, 22 nt, Human
cauucucaauaguagaugagua

SEQ ID NO: 408218 - RNA, 22 nt, Human
uaagcauuaacucugcugcaag

SEQ ID NO: 408219 - RNA, 22 nt, Human
auuuggcaacauuaauugaauc

SEQ ID NO: 408220 - RNA, 22 nt, Human
ucuuuauaaaagucauuauguc

SEQ ID NO: 408221 - RNA, 22 nt, Human
aaauagauuuccuagcauugga

SEQ ID NO: 408222 - RNA, 22 nt, Human
aauguggaugauacuaguacuu

SEQ ID NO: 408223 - RNA, 22 nt, Human
aguaaacauuucagauuuauuu

SEQ ID NO: 408224 - RNA, 22 nt, Human
auuugaaccacucagaacucau

SEQ ID NO: 408225 - RNA, 22 nt, Human
auuuggucacaccaguccacau

SEQ ID NO: 408226 - RNA, 22 nt, Human
agagaugcgguuccaugguuau

SEQ ID NO: 408227 - RNA, 22 nt, Human
uggauaaauagauacacuugca

SEQ ID NO: 408228 - RNA, 22 nt, Human
ugcagugauuuguacaauuaga

SEQ ID NO: 408229 - RNA, 22 nt, Human
cauaacauuaagccucuauuuc

SEQ ID NO: 408230 - RNA, 23 nt, Human
guguucaucccagucugugcaau

SEQ ID NO: 408231 - RNA, 22 nt, Human
acauuugagucauauuugcuua

SEQ ID NO: 408232 - RNA, 22 nt, Human
aaugugaggccuugguaguuau

SEQ ID NO: 408233 - RNA, 22 nt, Human
uaaaaugguaacuuucauuugc

SEQ ID NO: 408234 - RNA, 22 nt, Human
acauuugagcauauuucuuguc

SEQ ID NO: 408235 - RNA, 22 nt, Human
ucacaucacuagcugguaauga

SEQ ID NO: 408236 - RNA, 22 nt, Human
aauuuuguucuuggaaaucagg

SEQ ID NO: 408237 - RNA, 22 nt, Human
gucaaacagccuccuguucuaa

SEQ ID NO: 408238 - RNA, 22 nt, Human
acaguggagcucagaugaaaau

SEQ ID NO: 408239 - RNA, 20 nt, Human
uacaggaaucaagacugcau

SEQ ID NO: 408240 - RNA, 22 nt, Human
aguaaacauguaauuguucauu

SEQ ID NO: 408241 - RNA, 22 nt, Human
uagcagcuggggcuauucauca

SEQ ID NO: 408242 - RNA, 22 nt, Human
auuaugcauauacauuugacua

SEQ ID NO: 408243 - RNA, 20 nt, Human
cagguauuacaucugcaccu

SEQ ID NO: 408244 - RNA, 22 nt, Human
aaacagguagcccuagccuucu

SEQ ID NO: 408245 - RNA, 21 nt, Human
caauuacuaugaaccaguuga

SEQ ID NO: 408246 - RNA, 22 nt, Human
ugaaacauuauagaauauuuau

SEQ ID NO: 408247 - RNA, 22 nt, Human
ugaugacaaacuuuccugaugc

SEQ ID NO: 408248 - RNA, 20 nt, Human
uuucugcagauguuuacaug

SEQ ID NO: 408249 - RNA, 22 nt, Human
aacaucaucaugaacaacuaau

SEQ ID NO: 408250 - RNA, 22 nt, Human
ugcaaauauuuccuuauagcca

SEQ ID NO: 408251 - RNA, 22 nt, Human
ucugugcaggauuugaggaacc

SEQ ID NO: 408252 - RNA, 22 nt, Human
uuucucaacagaguaugcccuu

SEQ ID NO: 408253 - RNA, 22 nt, Human
ugucaauaacauuuacuucuau

SEQ ID NO: 408254 - RNA, 21 nt, Human
auacauucuauuaagcauuua

SEQ ID NO: 408255 - RNA, 22 nt, Human
uuugacaugcaaagcacuuuag

SEQ ID NO: 408256 - RNA, 22 nt, Human
uugcaagagagucugaaaaaug

SEQ ID NO: 408257 - RNA, 22 nt, Human
agcugaaucucaggcauccuuu

SEQ ID NO: 408258 - RNA, 22 nt, Human
cauguacaguuuuucuguccug

SEQ ID NO: 408259 - RNA, 20 nt, Human
auuugcaucugaauaacuua

SEQ ID NO: 408260 - RNA, 22 nt, Human
agaggucucaguuauguuuaaa

SEQ ID NO: 408261 - RNA, 22 nt, Human
gcugugcagguccccacugccu

SEQ ID NO: 408262 - RNA, 22 nt, Human
cauccauagauugagagauggu

SEQ ID NO: 408263 - RNA, 18 nt, Human
uacaucuauauaguguuu

SEQ ID NO: 408264 - RNA, 22 nt, Human
aagguauuggggaauauuugac

SEQ ID NO: 408265 - RNA, 21 nt, Human
gcugugcagaggauggagugg

SEQ ID NO: 408266 - RNA, 22 nt, Human
uuuaugcagccucaguaucaga

SEQ ID NO: 408267 - RNA, 22 nt, Human
gucaaauaauuuucucaauagu

SEQ ID NO: 408268 - RNA, 22 nt, Human
ucugugcagacauggggaagcc

SEQ ID NO: 408269 - RNA, 22 nt, Human
caguaacauuucaagguagagg

SEQ ID NO: 408270 - RNA, 23 nt, Human
cagcacaguacauuuccugucuc

SEQ ID NO: 408271 - RNA, 22 nt, Human
augagcagcauugcuccucuua

SEQ ID NO: 408272 - RNA, 22 nt, Human
ugaacauugucacauuccuagc

SEQ ID NO: 408273 - RNA, 22 nt, Human
aauacaguaauuuugaugaguu

SEQ ID NO: 408274 - RNA, 22 nt, Human
uacagguaaaauuaucagaaac

SEQ ID NO: 408275 - RNA, 22 nt, Human
uuugaugaugaugauaaaguuu

SEQ ID NO: 408276 - RNA, 22 nt, Human
aaugguaucaccucacagaauu

SEQ ID NO: 408277 - RNA, 21 nt, Human
ugacauuuggauucauaguaa

SEQ ID NO: 408278 - RNA, 22 nt, Human
gcugugcagagcacaggguccc

SEQ ID NO: 408279 - RNA, 22 nt, Human
uacauguacauugggcauuaau

SEQ ID NO: 408280 - RNA, 22 nt, Human
aagaacaguugggaggugagcc

SEQ ID NO: 408281 - RNA, 22 nt, Human
auacagugaauacuuacagugu

SEQ ID NO: 408282 - RNA, 22 nt, Human
auuugaauggcuuaacacaacg

SEQ ID NO: 408283 - RNA, 22 nt, Human
agaagcugagaaugaauuaaga

SEQ ID NO: 408284 - RNA, 22 nt, Human
uucaucuguagcaucuuccaau

SEQ ID NO: 408285 - RNA, 22 nt, Human
augacaaaaugaaugcagcuag

SEQ ID NO: 408286 - RNA, 20 nt, Human
ucugugcaguuuaggaaggc

SEQ ID NO: 408287 - RNA, 22 nt, Human
auuuaucaucagaccuuuuaaa

SEQ ID NO: 408288 - RNA, 22 nt, Human
cuuugcaaaaguuaauuguuga

SEQ ID NO: 408289 - RNA, 22 nt, Human
uacagguagagucucuaguuua

SEQ ID NO: 408290 - RNA, 22 nt, Human
gggaaauagagcuggaaccuug

SEQ ID NO: 408291 - RNA, 22 nt, Human
gacauaaaccuugagauauuaa

SEQ ID NO: 408292 - RNA, 22 nt, Human
gacaucauggagaggauaaaua

SEQ ID NO: 408293 - RNA, 22 nt, Human
ugcugugcucuuuaaggugcug

SEQ ID NO: 408294 - RNA, 19 nt, Human
ugagaugccuuccagcccu

SEQ ID NO: 408295 - RNA, 22 nt, Human
uggaaauauuugcucauuaucu

SEQ ID NO: 408296 - RNA, 22 nt, Human
uagcagcugcaucauuuuacag

SEQ ID NO: 408297 - RNA, 22 nt, Human
uugauacaggcucuauuucauc

SEQ ID NO: 408298 - RNA, 22 nt, Human
auucugauaugaacacacauau

SEQ ID NO: 408299 - RNA, 22 nt, Human
uuuguucaugccuauauucuca

SEQ ID NO: 408300 - RNA, 22 nt, Human
uuuucucaagauccaaugcacu

SEQ ID NO: 408301 - RNA, 22 nt, Human
ugaggauggaaugcugugcaag

SEQ ID NO: 408302 - RNA, 22 nt, Human
augaaucaagugagaacagcau

SEQ ID NO: 408303 - RNA, 22 nt, Human
aauacagugaaagugagcaagg

SEQ ID NO: 408304 - RNA, 22 nt, Human
augacuaagugcauuuuaauug

SEQ ID NO: 408305 - RNA, 18 nt, Human
uguaaacacuuucauucu

SEQ ID NO: 408306 - RNA, 23 nt, Human
ugggaaauguagccuuggcauga

SEQ ID NO: 408307 - RNA, 22 nt, Human
aucauaaaccacuuuguaaucu

SEQ ID NO: 408308 - RNA, 22 nt, Human
uucauaugcagauuaacaaaua

SEQ ID NO: 408309 - RNA, 22 nt, Human
agagcuauaacagcacuguaca

SEQ ID NO: 408310 - RNA, 22 nt, Human
auguaaacuuuaccagcucuga

SEQ ID NO: 408311 - RNA, 22 nt, Human
cagacagagcucacaagucuuu

SEQ ID NO: 408312 - RNA, 22 nt, Human
uauacugaucacugaggucauc

SEQ ID NO: 408313 - RNA, 22 nt, Human
aaacaugaguuaaaaguaacug

SEQ ID NO: 408314 - RNA, 22 nt, Human
acaggauaguuuuuaaucuucc

SEQ ID NO: 408315 - RNA, 22 nt, Human
acauuuguauauaugcagcaua

SEQ ID NO: 408316 - RNA, 21 nt, Human
acugugcagccugaggaugug

SEQ ID NO: 408317 - RNA, 19 nt, Human
gcauaaaaugucaaugugu

SEQ ID NO: 408318 - RNA, 22 nt, Human
aaauagauugcugaggcauuac

SEQ ID NO: 408319 - RNA, 22 nt, Human
auauugaucuuggaacugauuu

SEQ ID NO: 408320 - RNA, 22 nt, Human
uagcauauggaggguaagaggg

SEQ ID NO: 408321 - RNA, 22 nt, Human
ugcagcugaaccuagagucugu

SEQ ID NO: 408322 - RNA, 22 nt, Human
aaauggaaguguauuuaguguu

SEQ ID NO: 408323 - RNA, 22 nt, Human
aacauguaaauaucauuguacu

SEQ ID NO: 408324 - RNA, 22 nt, Human
ucugugcacugugucauuaggu

SEQ ID NO: 408325 - RNA, 22 nt, Human
gcaaccauuuggaauguaaaaa

SEQ ID NO: 408326 - RNA, 22 nt, Human
uuauaacuuuggauaugacaag

SEQ ID NO: 408327 - RNA, 22 nt, Human
aucauaacuguaauucaucuac

SEQ ID NO: 408328 - RNA, 22 nt, Human
aguaaacauaauuuaccuguag

SEQ ID NO: 408329 - RNA, 22 nt, Human
aggaauuaacaauauauuuagg

SEQ ID NO: 408330 - RNA, 22 nt, Human
uaugugcaggggcaggagcuca

SEQ ID NO: 408331 - RNA, 22 nt, Human
uuauagugggcccaacauggcg

SEQ ID NO: 408332 - RNA, 22 nt, Human
auuaaauuuucacuaggcuccc

SEQ ID NO: 408333 - RNA, 22 nt, Human
aacaggaugucauuucucaugu

SEQ ID NO: 408334 - RNA, 22 nt, Human
ugucacuacaucauaaauauau

SEQ ID NO: 408335 - RNA, 22 nt, Human
agagaugcugacguuuacauuu

SEQ ID NO: 408336 - RNA, 22 nt, Human
augcaagaaacagagacgcuga

SEQ ID NO: 408337 - RNA, 22 nt, Human
auguuuuauauuuugcagcagu

SEQ ID NO: 408338 - RNA, 22 nt, Human
auuguuaugaaaauaagauguu

SEQ ID NO: 408339 - RNA, 22 nt, Human
uauuacuguuacuucacacugu

SEQ ID NO: 408340 - RNA, 22 nt, Human
augcacaggaccacacauaaug

SEQ ID NO: 408341 - RNA, 22 nt, Human
uucagugucaauuuuuaaauau

SEQ ID NO: 408342 - RNA, 22 nt, Human
aacauguugcuuuaauaauauu

SEQ ID NO: 408343 - RNA, 22 nt, Human
uuauaccugaagcaggugaugu

SEQ ID NO: 408344 - RNA, 22 nt, Human
aauaugauccuuaaccuucaug

SEQ ID NO: 408345 - RNA, 22 nt, Human
gcugugcaucuucauucuggac

SEQ ID NO: 408346 - RNA, 22 nt, Human
acugagcucugaugagauuugg

SEQ ID NO: 408347 - RNA, 22 nt, Human
auguacauaaaauguauaauga

SEQ ID NO: 408348 - RNA, 22 nt, Human
uagcugaaggcuacagcagaac

SEQ ID NO: 408349 - RNA, 22 nt, Human
auacaugacagcauagcauccu

SEQ ID NO: 408350 - RNA, 18 nt, Human
ugucauaauauaucaccu

SEQ ID NO: 408351 - RNA, 22 nt, Human
caaggauucucacuagacuaga

SEQ ID NO: 408352 - RNA, 22 nt, Human
acaucagagggcucacaugauc

SEQ ID NO: 408353 - RNA, 22 nt, Human
auacaugacucacacauucugc

SEQ ID NO: 408354 - RNA, 22 nt, Human
cgaugcuggaaugacagcugcu

SEQ ID NO: 408355 - RNA, 22 nt, Human
auucugucuuuuuauacaucua

SEQ ID NO: 408356 - RNA, 22 nt, Human
uuagaggcaugauucaguaaag

SEQ ID NO: 408357 - RNA, 22 nt, Human
uuaaauuagucaagcuucucug

SEQ ID NO: 408358 - RNA, 22 nt, Human
guaaacauuacugugcuguaua

SEQ ID NO: 408359 - RNA, 22 nt, Human
guguuuuaucagacaaaguaua

SEQ ID NO: 408360 - RNA, 22 nt, Human
ugcaaaugggugaggguuagga

SEQ ID NO: 408361 - RNA, 18 nt, Human
caucaguauccacuaggu

SEQ ID NO: 408362 - RNA, 22 nt, Human
uauguaaaggauugagaugaau

SEQ ID NO: 408363 - RNA, 19 nt, Human
ucugucauuucuucuguac

SEQ ID NO: 408364 - RNA, 20 nt, Human
ucauacacaugagcaugcag

SEQ ID NO: 408365 - RNA, 22 nt, Human
augcuguguccuagugaaagaa

SEQ ID NO: 408366 - RNA, 22 nt, Human
ugaugacaguguuacagcucca

SEQ ID NO: 408367 - RNA, 22 nt, Human
ucccuguuuuauauccuaacaa

SEQ ID NO: 408368 - RNA, 22 nt, Human
agaaaauauucauugagaggcu

SEQ ID NO: 408369 - RNA, 22 nt, Human
auucucaaagccagagucaacg

SEQ ID NO: 408370 - RNA, 22 nt, Human
uuuaguauccuaucucauuuaa

SEQ ID NO: 408371 - RNA, 22 nt, Human
uuuaugcacaauuagucuuaua

SEQ ID NO: 408372 - RNA, 22 nt, Human
uugagcaaaggaguaaaaugca

SEQ ID NO: 408373 - RNA, 22 nt, Human
uuuguacaugaaugugcaccca

SEQ ID NO: 408374 - RNA, 22 nt, Human
acugugcaggugaacuguuugc

SEQ ID NO: 408375 - RNA, 22 nt, Human
aaacaguuucauuuucaugacc

SEQ ID NO: 408376 - RNA, 22 nt, Human
gaagcuaaaccacagcuaagaa

SEQ ID NO: 408377 - RNA, 22 nt, Human
aagcugaaaaugagacucuaca

SEQ ID NO: 408378 - RNA, 20 nt, Human
gcaaauggacacucagggaa

SEQ ID NO: 408379 - RNA, 22 nt, Human
gaaacauuuguugaguacuugc

SEQ ID NO: 408380 - RNA, 22 nt, Human
guacauucagcuuagcacuucu

SEQ ID NO: 408381 - RNA, 20 nt, Human
cuaagcacuuugauaaacug

SEQ ID NO: 408382 - RNA, 22 nt, Human
ugaggaaacugaggcacagaug

SEQ ID NO: 408383 - RNA, 22 nt, Human
gauaaacuggaaccauugccuc

SEQ ID NO: 408384 - RNA, 22 nt, Human
uacaacagacaggaauaagauu

SEQ ID NO: 408385 - RNA, 22 nt, Human
aaagggcuuuauaucagugugu

SEQ ID NO: 408386 - RNA, 22 nt, Human
gacauaaaauucaauaauuugu

SEQ ID NO: 408387 - RNA, 22 nt, Human
aaugcacauaaauauggucuua

SEQ ID NO: 408388 - RNA, 22 nt, Human
acauuuauauaacucacuagga

SEQ ID NO: 408389 - RNA, 22 nt, Human
uucagaaaucgaguuucauguc

SEQ ID NO: 408390 - RNA, 22 nt, Human
auaacaugaccugugcuucaca

SEQ ID NO: 408391 - RNA, 22 nt, Human
cauaacauugagcagcauuccu

SEQ ID NO: 408392 - RNA, 22 nt, Human
ugcacaggccuugaagggagag

SEQ ID NO: 408393 - RNA, 22 nt, Human
ugauuucuucuaauuuccauca

SEQ ID NO: 408394 - RNA, 22 nt, Human
gugcauuugugcaugcacaugu

SEQ ID NO: 408395 - RNA, 22 nt, Human
ugacauuuaaucccuaaauauu

SEQ ID NO: 408396 - RNA, 22 nt, Human
aguaaacaguaucuuuaguguc

SEQ ID NO: 408397 - RNA, 22 nt, Human
augauaacaacagcagugcugg

SEQ ID NO: 408398 - RNA, 22 nt, Human
uuuuaucauuacccagcugaaa

SEQ ID NO: 408399 - RNA, 22 nt, Human
uuucuacagaagauacacugcu

SEQ ID NO: 408400 - RNA, 21 nt, Human
ugcagauaauugaaagcugac

SEQ ID NO: 408401 - RNA, 22 nt, Human
auuuuaguaccucaaguaucca

SEQ ID NO: 408402 - RNA, 19 nt, Human
uacagugaaccaggaggag

SEQ ID NO: 408403 - RNA, 22 nt, Human
uguuuuaguucugucuugcaug

SEQ ID NO: 408404 - RNA, 23 nt, Human
cagguauugauuuuucuucuagg

SEQ ID NO: 408405 - RNA, 22 nt, Human
gcauuugaaaugcaagaaagug

SEQ ID NO: 408406 - RNA, 22 nt, Human
gagcugaacaaauugcgagugg

SEQ ID NO: 408407 - RNA, 20 nt, Human
gcaaauggaucccacaagcc

SEQ ID NO: 408408 - RNA, 22 nt, Human
cagugacguaaacugcaugugc

SEQ ID NO: 408409 - RNA, 22 nt, Human
augcuguggggagugaggguag

SEQ ID NO: 408410 - RNA, 22 nt, Human
cauuugcagagggugacacucu

SEQ ID NO: 408411 - RNA, 22 nt, Human
agaacagucguggugagagaaa

SEQ ID NO: 408412 - RNA, 22 nt, Human
auacauuagcucauaugauuaa

SEQ ID NO: 408413 - RNA, 22 nt, Human
cauuguuauagcauuacacacc

SEQ ID NO: 408414 - RNA, 22 nt, Human
aaggaaauacaacauguauuca

SEQ ID NO: 408415 - RNA, 22 nt, Human
uuucuacaacacuucugaaucu

SEQ ID NO: 408416 - RNA, 20 nt, Human
uaacaggaagcauuauuuua

SEQ ID NO: 408417 - RNA, 22 nt, Human
gacauuuguaugacacuuuaaa

SEQ ID NO: 408418 - RNA, 22 nt, Human
gugauacaaauaaacauaugcu

SEQ ID NO: 408419 - RNA, 22 nt, Human
gauaauuuaagucuugggggcu

SEQ ID NO: 408420 - RNA, 22 nt, Human
uuucuucauagaccuugucuug

SEQ ID NO: 408421 - RNA, 22 nt, Human
uaguccaggacaaucuucauau

SEQ ID NO: 408422 - RNA, 22 nt, Human
aauaacaggcucaucagaugcu

SEQ ID NO: 408423 - RNA, 22 nt, Human
agaacauuugucgaucaauuug

SEQ ID NO: 408424 - RNA, 22 nt, Human
uuucuacagcuggugcaacuuu

SEQ ID NO: 408425 - RNA, 21 nt, Human
caauuacuuuugcaccgacuu

SEQ ID NO: 408426 - RNA, 22 nt, Human
ucaaccagaguuuuucuuaaua

SEQ ID NO: 408427 - RNA, 22 nt, Human
cauuuguaggaugcuucuuguu

SEQ ID NO: 408428 - RNA, 22 nt, Human
augaacaaucuggcaagaacuu

SEQ ID NO: 408429 - RNA, 22 nt, Human
aaauuggauugggagaauguga

SEQ ID NO: 408430 - RNA, 22 nt, Human
cauccauaugaggcacauuggu

SEQ ID NO: 408431 - RNA, 22 nt, Human
gguugguaacucccugugcagu

SEQ ID NO: 408432 - RNA, 22 nt, Human
caugcugugguaaaucacugaa

SEQ ID NO: 408433 - RNA, 22 nt, Human
uuauuacacugaaagaauugcg

SEQ ID NO: 408434 - RNA, 22 nt, Human
cacaggaaugaacagggaaaga

SEQ ID NO: 408435 - RNA, 22 nt, Human
aucauacagccuuuguuagugu

SEQ ID NO: 408436 - RNA, 22 nt, Human
uagagauagcaguauugauucg

SEQ ID NO: 408437 - RNA, 22 nt, Human
ugaugauugggagacauuuggg

SEQ ID NO: 408438 - RNA, 22 nt, Human
cuuaaauuggaugaguuaaguu

SEQ ID NO: 408439 - RNA, 22 nt, Human
ucuucauucucgccuuugucgu

SEQ ID NO: 408440 - RNA, 21 nt, Human
uuucaauguguucuuuguagu

SEQ ID NO: 408441 - RNA, 22 nt, Human
aacaguacuggacaaggaguca

SEQ ID NO: 408442 - RNA, 22 nt, Human
ucauuuguucucauucucuacu

SEQ ID NO: 408443 - RNA, 22 nt, Human
aagaacuguaucaagauguagu

SEQ ID NO: 408444 - RNA, 22 nt, Human
ugcacagugaccacugagcaag

SEQ ID NO: 408445 - RNA, 22 nt, Human
acuugaauuauauuucuagaga

SEQ ID NO: 408446 - RNA, 22 nt, Human
uuuguacauccuaauucugagu

SEQ ID NO: 408447 - RNA, 22 nt, Human
acauuuguuucucuagaguagg

SEQ ID NO: 408448 - RNA, 22 nt, Human
aaggaaaugugccugacacugc

SEQ ID NO: 408449 - RNA, 22 nt, Human
ucauuuguaccauuuuuuaaga

SEQ ID NO: 408450 - RNA, 22 nt, Human
ugaaaaacugaauaguugagua

SEQ ID NO: 408451 - RNA, 22 nt, Human
uacagugauuucuacugguguu

SEQ ID NO: 408452 - RNA, 22 nt, Human
ucugugcagggaccccaagagu

SEQ ID NO: 408453 - RNA, 22 nt, Human
acauucuuucgaugucugauuu

SEQ ID NO: 408454 - RNA, 22 nt, Human
auuugucauguauguaaaguug

SEQ ID NO: 408455 - RNA, 22 nt, Human
aauuacugucuguaaagggaau

SEQ ID NO: 408456 - RNA, 21 nt, Human
uuagaguagagaacaugaucc

SEQ ID NO: 408457 - RNA, 22 nt, Human
aaucuugaguguuacucucauu

SEQ ID NO: 408458 - RNA, 22 nt, Human
uagcaguauauuuuaaggaagc

SEQ ID NO: 408459 - RNA, 20 nt, Human
gaacauuuggccauacugag

SEQ ID NO: 408460 - RNA, 22 nt, Human
cagugaugaucauuguaacauc

SEQ ID NO: 408461 - RNA, 22 nt, Human
uucauucuuauuugugaucugg

SEQ ID NO: 408462 - RNA, 22 nt, Human
agcacaaugugaaaagagcucu

SEQ ID NO: 408463 - RNA, 22 nt, Human
aagguauuggcagggcugaguu

SEQ ID NO: 408464 - RNA, 22 nt, Human
uucagcacaagacuagacaggu

SEQ ID NO: 408465 - RNA, 22 nt, Human
uuuguaaaggccugaauuucag

SEQ ID NO: 408466 - RNA, 17 nt, Human
uuagagcuacauguuga

SEQ ID NO: 408467 - RNA, 22 nt, Human
uagagaugaauucugcagucuu

SEQ ID NO: 408468 - RNA, 22 nt, Human
ggcugugcgggcagccguggga

SEQ ID NO: 408469 - RNA, 22 nt, Human
gcugugcaguaguagguacagu

SEQ ID NO: 408470 - RNA, 22 nt, Human
uuacuacugcuuuacuacuggg

SEQ ID NO: 408471 - RNA, 22 nt, Human
ugauugaauucaaaugcaaucu

SEQ ID NO: 408472 - RNA, 17 nt, Human
acaguuugucauucuaa

SEQ ID NO: 408473 - RNA, 22 nt, Human
acuauuuacucaaaugagguug

SEQ ID NO: 408474 - RNA, 22 nt, Human
caauggauauuuuaugugagaa

SEQ ID NO: 408475 - RNA, 22 nt, Human
aaacauguaaguucagaucacc

SEQ ID NO: 408476 - RNA, 22 nt, Human
aagcugaagacacagcuccagu

SEQ ID NO: 408477 - RNA, 22 nt, Human
acuuggcaaguaucuauaaagu

SEQ ID NO: 408478 - RNA, 22 nt, Human
ggagaugcuauguaguuugguu

SEQ ID NO: 408479 - RNA, 22 nt, Human
acauucuuaacaguuaaaaacu

SEQ ID NO: 408480 - RNA, 19 nt, Human
ucauaaacugggcacagug

SEQ ID NO: 408481 - RNA, 22 nt, Human
acauggauaaauuuuacuuucc

SEQ ID NO: 408482 - RNA, 22 nt, Human
aaugguuucaaacacacuaagu

SEQ ID NO: 408483 - RNA, 22 nt, Human
agagaugcccuugaaaggauua

SEQ ID NO: 408484 - RNA, 22 nt, Human
aacauuuguuuggcuucaauua

SEQ ID NO: 408485 - RNA, 22 nt, Human
acagugaucaguuacugucugu

SEQ ID NO: 408486 - RNA, 22 nt, Human
ucugugcaccagaaugauauuu

SEQ ID NO: 408487 - RNA, 22 nt, Human
uaugaauucuguucauugauga

SEQ ID NO: 408488 - RNA, 22 nt, Human
aauuuuguuuaagugaucugcu

SEQ ID NO: 408489 - RNA, 22 nt, Human
uucaucuggaauuuauguuaua

SEQ ID NO: 408490 - RNA, 22 nt, Human
auacaguagacaaucucaugaa

SEQ ID NO: 408491 - RNA, 22 nt, Human
auugcagaacaugaggucuucu

SEQ ID NO: 408492 - RNA, 22 nt, Human
caguggaagcuggcugugaaga

SEQ ID NO: 408493 - RNA, 22 nt, Human
uuagaucauuuugaacuaauuu

SEQ ID NO: 408494 - RNA, 22 nt, Human
acaugcauucucuaaaagcaaa

SEQ ID NO: 408495 - RNA, 21 nt, Human
ucacuacaauguucucuuaua

SEQ ID NO: 408496 - RNA, 22 nt, Human
cuguaaauaugaagaauauaug

SEQ ID NO: 408497 - RNA, 22 nt, Human
uuuauaucuuaugucauuucaa

SEQ ID NO: 408498 - RNA, 22 nt, Human
agugucuuuagcaaguuuaguc

SEQ ID NO: 408499 - RNA, 22 nt, Human
agaugcuauacauuguaagaca

SEQ ID NO: 408500 - RNA, 22 nt, Human
agaauaaaugcuaccuaucaca

SEQ ID NO: 408501 - RNA, 22 nt, Human
caguggcugagaguggacacug

SEQ ID NO: 408502 - RNA, 21 nt, Human
uacaacagguuuuauuucgau

SEQ ID NO: 408503 - RNA, 22 nt, Human
acacagugccaaauugcaguua

SEQ ID NO: 408504 - RNA, 22 nt, Human
ugcaaauaagcuauuauggaau

SEQ ID NO: 408505 - RNA, 22 nt, Human
cauuuguauagugcuuagacca

SEQ ID NO: 408506 - RNA, 22 nt, Human
acugugcauuugucaugggguu

SEQ ID NO: 408507 - RNA, 22 nt, Human
aagcauuucagguagagauauu

SEQ ID NO: 408508 - RNA, 22 nt, Human
uuuaucugugguaaauaacauu

SEQ ID NO: 408509 - RNA, 22 nt, Human
ugagaucugugcauguuaguua

SEQ ID NO: 408510 - RNA, 22 nt, Human
guagcugauauuagcaaugagu

SEQ ID NO: 408511 - RNA, 22 nt, Human
cuacagugacagaauuaaacag

SEQ ID NO: 408512 - RNA, 22 nt, Human
auugugauuagagaauauagag

SEQ ID NO: 408513 - RNA, 22 nt, Human
cagugcagucaaggaagaacca

SEQ ID NO: 408514 - RNA, 23 nt, Human
aaaugugagggaaaaucuuucug

SEQ ID NO: 408515 - RNA, 22 nt, Human
acugugcacaauucuaaguccu

SEQ ID NO: 408516 - RNA, 22 nt, Human
aguacaugcagaacuaacagau

SEQ ID NO: 408517 - RNA, 22 nt, Human
uuuucauuguuccucgagcauu

SEQ ID NO: 408518 - RNA, 19 nt, Human
ugcauauaucuaugaaaga

SEQ ID NO: 408519 - RNA, 22 nt, Human
uuuaauguagcgugaaaugauu

SEQ ID NO: 408520 - RNA, 22 nt, Human
auuuaucaacauguaccauugg

SEQ ID NO: 408521 - RNA, 22 nt, Human
caugauuauguguuagaguuug

SEQ ID NO: 408522 - RNA, 22 nt, Human
aaauacuguuuuauuccaugau

SEQ ID NO: 408523 - RNA, 22 nt, Human
aagcugaaacauuagccuaaac

SEQ ID NO: 408524 - RNA, 22 nt, Human
acauugauugagcacccauuau

SEQ ID NO: 408525 - RNA, 22 nt, Human
ggcugugccucaaggcuacuca

SEQ ID NO: 408526 - RNA, 22 nt, Human
uuucacauaugguuguugauug

SEQ ID NO: 408527 - RNA, 22 nt, Human
acaguaccugcucucaagcaaa

SEQ ID NO: 408528 - RNA, 22 nt, Human
uagaggcauuaaugaauaaaca

SEQ ID NO: 408529 - RNA, 22 nt, Human
cauaauuugugguaguggggga

SEQ ID NO: 408530 - RNA, 22 nt, Human
uacagugaggugguuuccuuua

SEQ ID NO: 408531 - RNA, 22 nt, Human
aacauuuauugagcaccuacug

SEQ ID NO: 408532 - RNA, 22 nt, Human
accauucugguccauacuguuc

SEQ ID NO: 408533 - RNA, 22 nt, Human
guaaacaucagccacucuauuu

SEQ ID NO: 408534 - RNA, 22 nt, Human
caauagcuauguaaccugaaga

SEQ ID NO: 408535 - RNA, 22 nt, Human
agcaccauuucucuaaagcacu

SEQ ID NO: 408536 - RNA, 22 nt, Human
aggacuuagaacauuauguacu

SEQ ID NO: 408537 - RNA, 22 nt, Human
aggucauuaaaguuaaaugagg

SEQ ID NO: 408538 - RNA, 22 nt, Human
uauaugcaauuuuuuagugcaa

SEQ ID NO: 408539 - RNA, 23 nt, Human
gagguacagcaccagugaauagg

SEQ ID NO: 408540 - RNA, 22 nt, Human
uagucuuuuuaauaaauaaugc

SEQ ID NO: 408541 - RNA, 21 nt, Human
ugaggcucaucuuauguggcu

SEQ ID NO: 408542 - RNA, 21 nt, Human
uuagaagcuaaugcagcuggu

SEQ ID NO: 408543 - RNA, 23 nt, Human
ugcucccaggugacgcugcuguu

SEQ ID NO: 408544 - RNA, 22 nt, Human
cugggcacuuuggggagccuac

SEQ ID NO: 408545 - RNA, 22 nt, Human
guagcuuauuagggauaauagu

SEQ ID NO: 408546 - RNA, 21 nt, Human
uccaaaucccauucuguaguc

SEQ ID NO: 408547 - RNA, 22 nt, Human
guggccugggguuuguucugag

SEQ ID NO: 408548 - RNA, 16 nt, Human
ggagagugucugcaaa

SEQ ID NO: 408549 - RNA, 22 nt, Human
agucaggauaugccuugugggc

SEQ ID NO: 408550 - RNA, 22 nt, Human
gagcagaugugugccaggaugc

SEQ ID NO: 408551 - RNA, 22 nt, Human
ucucuggguuuuuguccuguac

SEQ ID NO: 408552 - RNA, 22 nt, Human
uccaucaccacagaggacagag

SEQ ID NO: 408553 - RNA, 22 nt, Human
gugcagauccugauugcaguuc

SEQ ID NO: 408554 - RNA, 22 nt, Human
aggccugagccccagguuuguu

SEQ ID NO: 408555 - RNA, 22 nt, Human
gcugcccugugguccagcaggu

SEQ ID NO: 408556 - RNA, 22 nt, Human
gcacggcuaauuuuuguauuuu

SEQ ID NO: 408557 - RNA, 22 nt, Human
ggagucccagcaaagccuuccc

SEQ ID NO: 408558 - RNA, 22 nt, Human
ucugggugcccuuugcucuguu

SEQ ID NO: 408559 - RNA, 22 nt, Human
ggcagcacugcagcuuguuggg

SEQ ID NO: 408560 - RNA, 22 nt, Human
ggucccaggagaauaggugcaa

SEQ ID NO: 408561 - RNA, 20 nt, Human
cucucccagcacagcuuccu

SEQ ID NO: 408562 - RNA, 22 nt, Human
acagaauuaaugaaaauuacaa

SEQ ID NO: 408563 - RNA, 22 nt, Human
ggucaugcugugaaucagugcu

SEQ ID NO: 408564 - RNA, 22 nt, Human
uauuucugucagccagauaugg

SEQ ID NO: 408565 - RNA, 22 nt, Human
ugcccaagcagaggagugauuc

SEQ ID NO: 408566 - RNA, 22 nt, Human
ggcaggugcucugugggccugg

SEQ ID NO: 408567 - RNA, 22 nt, Human
gggcaggugccagcucccuguc

SEQ ID NO: 408568 - RNA, 22 nt, Human
gaauuguagagggaacagaagc

SEQ ID NO: 408569 - RNA, 22 nt, Human
acccaggaggcagagguugcag

SEQ ID NO: 408570 - RNA, 22 nt, Human
gcagggcugcagagggcacugu

SEQ ID NO: 408571 - RNA, 22 nt, Human
auuuggcaacauuaauugaauc

SEQ ID NO: 408572 - RNA, 22 nt, Human
cccagccucuguuugcuccucu

SEQ ID NO: 408573 - RNA, 22 nt, Human
aggcagcaauugaaaucauugu

SEQ ID NO: 408574 - RNA, 22 nt, Human
gcauuguccugcuucugagugu

SEQ ID NO: 408575 - RNA, 20 nt, Human
gggguuggcuggcacaggga

SEQ ID NO: 408576 - RNA, 22 nt, Human
ugucugguggguugacaggcag

SEQ ID NO: 408577 - RNA, 22 nt, Human
uggggcagcagaccuuucuugg

SEQ ID NO: 408578 - RNA, 22 nt, Human
caagggaguuacugagggcggg

SEQ ID NO: 408579 - RNA, 22 nt, Human
ugugcccauuacacagaggcau

SEQ ID NO: 408580 - RNA, 22 nt, Human
ccagggcaugggaagaacugaa

SEQ ID NO: 408581 - RNA, 22 nt, Human
ucugcugcugagcacacuccua

SEQ ID NO: 408582 - RNA, 22 nt, Human
ugucuguacaaauuuucugugu

SEQ ID NO: 408583 - RNA, 22 nt, Human
gcucuuccauuucucuugaacu

SEQ ID NO: 408584 - RNA, 18 nt, Human
cggcagagugcuucuagc

SEQ ID NO: 408585 - RNA, 22 nt, Human
cacagggcuaaaugaaggguug

SEQ ID NO: 408586 - RNA, 22 nt, Human
ggcagcuccucaaaaaauuaaa

SEQ ID NO: 408587 - RNA, 22 nt, Human
uagaugaccuuguguuaggcaa

SEQ ID NO: 408588 - RNA, 22 nt, Human
gaaggcugucagagaggagggc

SEQ ID NO: 408589 - RNA, 22 nt, Human
aggcagcagccacaaggccuga

SEQ ID NO: 408590 - RNA, 22 nt, Human
gcaguguuaggaauaaaaauga

SEQ ID NO: 408591 - RNA, 22 nt, Human
guggaggacaaaagaagccuuu

SEQ ID NO: 408592 - RNA, 22 nt, Human
cauuaggguaauugaacacuua

SEQ ID NO: 408593 - RNA, 22 nt, Human
ugccaggggaccuagggauguc

SEQ ID NO: 408594 - RNA, 22 nt, Human
ucacugcaaggaggcuucucaa

SEQ ID NO: 408595 - RNA, 22 nt, Human
gagcugcugguugcuggugccu

SEQ ID NO: 408596 - RNA, 22 nt, Human
ucaggggagguugaaucgucuc

SEQ ID NO: 408597 - RNA, 22 nt, Human
agcagccaaccuuacauucauc

SEQ ID NO: 408598 - RNA, 22 nt, Human
auguguacaaccaagcacuaaa

SEQ ID NO: 408599 - RNA, 22 nt, Human
cucagagauauagucccugcuu

SEQ ID NO: 408600 - RNA, 20 nt, Human
uccugguggauacugcuuaa

SEQ ID NO: 408601 - RNA, 22 nt, Human
caggcaggucagugaagaagga

SEQ ID NO: 408602 - RNA, 17 nt, Human
uggagcugcguguguuc

SEQ ID NO: 408603 - RNA, 22 nt, Human
ugaaggccagcucuuuaucagc

SEQ ID NO: 408604 - RNA, 22 nt, Human
gaacagaauuaccgaagaucug

SEQ ID NO: 408605 - RNA, 22 nt, Human
cauuucuagacaaguccuggag

SEQ ID NO: 408606 - RNA, 22 nt, Human
guuauguauugggaaauccaag

SEQ ID NO: 408607 - RNA, 22 nt, Human
cugaugcuauaagccacagugg

SEQ ID NO: 408608 - RNA, 21 nt, Human
cacugcagccuugaccugggc

SEQ ID NO: 408609 - RNA, 22 nt, Human
aggccuggccugggcggcauug

SEQ ID NO: 408610 - RNA, 22 nt, Human
uccuuugguucucuaagaugcu

SEQ ID NO: 408611 - RNA, 22 nt, Human
gccucugcucucagguagccuc

SEQ ID NO: 408612 - RNA, 22 nt, Human
caugucuggguauaugcauaug

SEQ ID NO: 408613 - RNA, 22 nt, Human
ggcugucucugugacugccacc

SEQ ID NO: 408614 - RNA, 23 nt, Human
uggcagagacccagaaucuacau

SEQ ID NO: 408615 - RNA, 22 nt, Human
gugggaugguagguagguaaua

SEQ ID NO: 408616 - RNA, 22 nt, Human
caaugugugcuuacaggccagu

SEQ ID NO: 408617 - RNA, 22 nt, Human
ugagcccuaagggucaagcagg

SEQ ID NO: 408618 - RNA, 22 nt, Human
ugaaggaaugagggaguggguc

SEQ ID NO: 408619 - RNA, 22 nt, Human
agaccugcagggccaggccugc

SEQ ID NO: 408620 - RNA, 22 nt, Human
gggcuggggcucaauaauuugu

SEQ ID NO: 408621 - RNA, 22 nt, Human
gggccucucccuucucacgcau

SEQ ID NO: 408622 - RNA, 22 nt, Human
gaggcucacgacgggacgaacu

SEQ ID NO: 408623 - RNA, 22 nt, Human
gccugagcuacuagggagucug

SEQ ID NO: 408624 - RNA, 22 nt, Human
cagugagguggauggauggccu

SEQ ID NO: 408625 - RNA, 22 nt, Human
aaaugccucugcuguacacaau

SEQ ID NO: 408626 - RNA, 22 nt, Human
gcugcucuggcucugcaguguc

SEQ ID NO: 408627 - RNA, 22 nt, Human
gggccaggucggugaaugguca

SEQ ID NO: 408628 - RNA, 22 nt, Human
ucccagccugacagugcaucaa

SEQ ID NO: 408629 - RNA, 22 nt, Human
gugccaaaagcuauaauuuggu

SEQ ID NO: 408630 - RNA, 22 nt, Human
uauguacaaucagcaguucaua

SEQ ID NO: 408631 - RNA, 22 nt, Human
caugaauauacauccugauggc

SEQ ID NO: 408632 - RNA, 22 nt, Human
aaaaauagcuucucuugucccu

SEQ ID NO: 408633 - RNA, 22 nt, Human
ccagcuuuccugcgaguugauu

SEQ ID NO: 408634 - RNA, 22 nt, Human
gcagccacuuugcaaccaagag

SEQ ID NO: 408635 - RNA, 22 nt, Human
cacagaauuaagggagaaauau

SEQ ID NO: 408636 - RNA, 22 nt, Human
acuuuauuuccuauugcaucca

SEQ ID NO: 408637 - RNA, 22 nt, Human
gucccagaaacauauugcuggu

SEQ ID NO: 408638 - RNA, 22 nt, Human
ugggccacuugaaaguggaugu

SEQ ID NO: 408639 - RNA, 22 nt, Human
ugcagggccuuguugaugugcu

SEQ ID NO: 408640 - RNA, 22 nt, Human
cccagcagaccgcugugauggc

SEQ ID NO: 408641 - RNA, 22 nt, Human
aucauaaagugcuaucugauug

SEQ ID NO: 408642 - RNA, 22 nt, Human
ccaucccuucucuggccagcag

SEQ ID NO: 408643 - RNA, 22 nt, Human
cacccagcauuggcuaagagag

SEQ ID NO: 408644 - RNA, 22 nt, Human
agagagcccgggccagggcaca

SEQ ID NO: 408645 - RNA, 22 nt, Human
agauacauauagaaaacaucaa

SEQ ID NO: 408646 - RNA, 22 nt, Human
aggccugggacgggagccguga

SEQ ID NO: 408647 - RNA, 22 nt, Human
uugacagcuauuuugcuuugau

SEQ ID NO: 408648 - RNA, 22 nt, Human
uaguaucuuucuauauuuccca

SEQ ID NO: 408649 - RNA, 22 nt, Human
uggcugagaaaaaagagcuaua

SEQ ID NO: 408650 - RNA, 22 nt, Human
gcuggccuuugaggaagcugcg

SEQ ID NO: 408651 - RNA, 22 nt, Human
uacauaguuccauuuacaggaa

SEQ ID NO: 408652 - RNA, 22 nt, Human
uaggugucugcucuuauuuaac

SEQ ID NO: 408653 - RNA, 22 nt, Human
uccuuuccaugcuucuagaggc

SEQ ID NO: 408654 - RNA, 22 nt, Human
ccaggagcauuaagagaacaua

SEQ ID NO: 408655 - RNA, 22 nt, Human
accaaggaguuugguauuuuag

SEQ ID NO: 408656 - RNA, 19 nt, Human
uuuggcacucugaaguguu

SEQ ID NO: 408657 - RNA, 22 nt, Human
gccuggagaagauggaacuagc

SEQ ID NO: 408658 - RNA, 22 nt, Human
uggaggaaguggcuggccagaa

SEQ ID NO: 408659 - RNA, 22 nt, Human
aggccuggugugccggaugcag

SEQ ID NO: 408660 - RNA, 22 nt, Human
caaaugcauaguuuauaagaag

SEQ ID NO: 408661 - RNA, 22 nt, Human
ugccucagucuaaagucucuca

SEQ ID NO: 408662 - RNA, 21 nt, Human
cugaggcagcacagcuaguca

SEQ ID NO: 408663 - RNA, 22 nt, Human
accaggcuugaugauuugcuua

SEQ ID NO: 408664 - RNA, 22 nt, Human
acccaggcugcuucucaguggc

SEQ ID NO: 408665 - RNA, 22 nt, Human
agugauggugagugagaagcuc

SEQ ID NO: 408666 - RNA, 22 nt, Human
ccaguuuuuccagugcuuucug

SEQ ID NO: 408667 - RNA, 22 nt, Human
ugcagggccgcuggaggucaug

SEQ ID NO: 408668 - RNA, 20 nt, Human
uccuucaggcagggccuagu

SEQ ID NO: 408669 - RNA, 22 nt, Human
auggggugagacuaggauuaaa

SEQ ID NO: 408670 - RNA, 17 nt, Human
cugaagauaauggcaac

SEQ ID NO: 408671 - RNA, 22 nt, Human
agcaggugggcaugaaagcuga

SEQ ID NO: 408672 - RNA, 22 nt, Human
agcagccaaaugaagauuuuac

SEQ ID NO: 408673 - RNA, 22 nt, Human
uaacagaagagcaggcagcccu

SEQ ID NO: 408674 - RNA, 21 nt, Human
gugguucuagagaaacagaau

SEQ ID NO: 408675 - RNA, 22 nt, Human
agggcagcugugagccacugug

SEQ ID NO: 408676 - RNA, 22 nt, Human
guauuugauacaugaaauggug

SEQ ID NO: 408677 - RNA, 22 nt, Human
ggcuguggucauuaggagguug

SEQ ID NO: 408678 - RNA, 20 nt, Human
uuccagagaucugcauuuua

SEQ ID NO: 408679 - RNA, 22 nt, Human
ggaggcucccacgcagcucaca

SEQ ID NO: 408680 - RNA, 22 nt, Human
ucuuuuaucuguuguguaacaa

SEQ ID NO: 408681 - RNA, 22 nt, Human
gggcugagccauuugaaccuug

SEQ ID NO: 408682 - RNA, 22 nt, Human
ccuggcugcuauagcagcaugu

SEQ ID NO: 408683 - RNA, 22 nt, Human
ugccaaggguaugggcaagaua

SEQ ID NO: 408684 - RNA, 18 nt, Human
ccucacagacuuccaugu

SEQ ID NO: 408685 - RNA, 22 nt, Human
ugagaagcugcugacuuagccu

SEQ ID NO: 408686 - RNA, 22 nt, Human
gagcuuggugaugccuccuggu

SEQ ID NO: 408687 - RNA, 22 nt, Human
aaacaugagcauuucuguuuaa

SEQ ID NO: 408688 - RNA, 22 nt, Human
uuucauuuugguuaugccauaa

SEQ ID NO: 408689 - RNA, 22 nt, Human
ggcauccaguucugaucaacaa

SEQ ID NO: 408690 - RNA, 21 nt, Human
gggaaauuaggauugcucauc

SEQ ID NO: 408691 - RNA, 23 nt, Human
auacauacagucuuacugacuuu

SEQ ID NO: 408692 - RNA, 22 nt, Human
aaggcaguaaaaucuaccuugc

SEQ ID NO: 408693 - RNA, 22 nt, Human
agaccaagaaaggaugaggauc

SEQ ID NO: 408694 - RNA, 22 nt, Human
ucaguuuucucaucugugaaau

SEQ ID NO: 408695 - RNA, 22 nt, Human
cccagccuuugcuuccugguuc

SEQ ID NO: 408696 - RNA, 20 nt, Human
gccuggaggcagagauaaag

SEQ ID NO: 408697 - RNA, 22 nt, Human
cgaugguucuggcugcuuguau

SEQ ID NO: 408698 - RNA, 22 nt, Human
ggcucagguugggucacaugac

SEQ ID NO: 408699 - RNA, 22 nt, Human
ucacauuuguucuugaaucuaa

SEQ ID NO: 408700 - RNA, 22 nt, Human
gccuccugguugcuucuccaac

SEQ ID NO: 408701 - RNA, 22 nt, Human
agcugagcugcagaugacugua

SEQ ID NO: 408702 - RNA, 23 nt, Human
ccagcugugccuggcccaggagc

SEQ ID NO: 408703 - RNA, 22 nt, Human
gccgugcgugcgcaggugcugu

SEQ ID NO: 408704 - RNA, 22 nt, Human
uuagcucagaaaauuuaaacuu

SEQ ID NO: 408705 - RNA, 22 nt, Human
gccugccugcugugugcaaguu

SEQ ID NO: 408706 - RNA, 22 nt, Human
gccugcagaggugcugcuagcu

SEQ ID NO: 408707 - RNA, 22 nt, Human
gagaagucauuugaccaccuag

SEQ ID NO: 408708 - RNA, 22 nt, Human
uaugcauaugaccccaagcuug

SEQ ID NO: 408709 - RNA, 22 nt, Human
gugccugggguugagcuaugaa

SEQ ID NO: 408710 - RNA, 22 nt, Human
ucagggcaagauugguuaauaa

SEQ ID NO: 408711 - RNA, 22 nt, Human
auaaggcauauagucacuuuuu

SEQ ID NO: 408712 - RNA, 22 nt, Human
uccagcuggggacaugggcuuc

SEQ ID NO: 408713 - RNA, 22 nt, Human
uuguggaaauacagacuccaag

SEQ ID NO: 408714 - RNA, 22 nt, Human
uuacaggggacauuggggacau

SEQ ID NO: 408715 - RNA, 18 nt, Human
aaaugcuaggcuacauga

SEQ ID NO: 408716 - RNA, 22 nt, Human
cagaggcagaggucaucucugg

SEQ ID NO: 408717 - RNA, 22 nt, Human
aauucauccaugaacaauucca

SEQ ID NO: 408718 - RNA, 22 nt, Human
auggcagaauuaggauuucaag

SEQ ID NO: 408719 - RNA, 22 nt, Human
ggccugagcagacagcaugaug

SEQ ID NO: 408720 - RNA, 22 nt, Human
uuucuuguaagauguuuauuaa

SEQ ID NO: 408721 - RNA, 22 nt, Human
ugcagggauuauguagggguug

SEQ ID NO: 408722 - RNA, 17 nt, Human
ucaugcccaacuauuac

SEQ ID NO: 408723 - RNA, 23 nt, Human
agcuuugugaaagcagacauggg

SEQ ID NO: 408724 - RNA, 21 nt, Human
aaguggagaagaaaagcugga

SEQ ID NO: 408725 - RNA, 22 nt, Human
ucugccugcuaacuccugcacc

SEQ ID NO: 408726 - RNA, 22 nt, Human
agagcugauuugauuacagugc

SEQ ID NO: 408727 - RNA, 22 nt, Human
gucccugcccuccugggacuca

SEQ ID NO: 408728 - RNA, 22 nt, Human
agggcagcuagcuguagaaaga

SEQ ID NO: 408729 - RNA, 22 nt, Human
uggcaggggaggugcuugcuua

SEQ ID NO: 408730 - RNA, 22 nt, Human
uuccagcaggcagacaggagau

SEQ ID NO: 408731 - RNA, 22 nt, Human
gccuggcccagggcucuuguug

SEQ ID NO: 408732 - RNA, 22 nt, Human
aagggcucugugugccucccca

SEQ ID NO: 408733 - RNA, 22 nt, Human
ggugucccaggccagcugugug

SEQ ID NO: 408734 - RNA, 22 nt, Human
ucuacagacagagcagguggga

SEQ ID NO: 408735 - RNA, 22 nt, Human
ccagcagaagcucccgcugggu

SEQ ID NO: 408736 - RNA, 22 nt, Human
ugaagcagagaauuugacaguc

SEQ ID NO: 408737 - RNA, 22 nt, Human
agcucacaguguccuuccucaa

SEQ ID NO: 408738 - RNA, 22 nt, Human
gccucugggcucugccccuggc

SEQ ID NO: 408739 - RNA, 22 nt, Human
ugcugccaggucuugcugucca

SEQ ID NO: 408740 - RNA, 20 nt, Human
cagaccugcacccacuucga

SEQ ID NO: 408741 - RNA, 22 nt, Human
caugcacagugauaucugaaga

SEQ ID NO: 408742 - RNA, 22 nt, Human
gugccugguuuggggaauguuc

SEQ ID NO: 408743 - RNA, 20 nt, Human
acaauagauuugagcaaagu

SEQ ID NO: 408744 - RNA, 22 nt, Human
uugaccuauguuucuucaucug

SEQ ID NO: 408745 - RNA, 22 nt, Human
uauuucccagggagcaacaagc

SEQ ID NO: 408746 - RNA, 22 nt, Human
ugcccuuggguaacuugcugau

SEQ ID NO: 408747 - RNA, 22 nt, Human
uuugcauuguuucaaaagugaa

SEQ ID NO: 408748 - RNA, 22 nt, Human
ugcuuuaucugacuuggcgcug

SEQ ID NO: 408749 - RNA, 22 nt, Human
aggggcuguggaaaccaacucu

SEQ ID NO: 408750 - RNA, 22 nt, Human
cgcauacauagaaacacacaga

SEQ ID NO: 408751 - RNA, 22 nt, Human
ggagccuguggccgucacgacu

SEQ ID NO: 408752 - RNA, 22 nt, Human
cauguuaaugaauuuuugcagu

SEQ ID NO: 408753 - RNA, 22 nt, Human
acuuaaaaagaaucuuuucacg

SEQ ID NO: 408754 - RNA, 22 nt, Human
cagcugccacaccucuuucucu

SEQ ID NO: 408755 - RNA, 22 nt, Human
uuguuuucuccacugcaucuua

SEQ ID NO: 408756 - RNA, 22 nt, Human
cccugaggggaguggugaggug

SEQ ID NO: 408757 - RNA, 23 nt, Human
cauguacacacagcuguacagug

SEQ ID NO: 408758 - RNA, 22 nt, Human
acagccuggacuggcucucugc

SEQ ID NO: 408759 - RNA, 22 nt, Human
aggagccaagcagaacuaagga

SEQ ID NO: 408760 - RNA, 22 nt, Human
uuucuauugaucuaauaaacau

SEQ ID NO: 408761 - RNA, 22 nt, Human
agagggcugcugcacagugcuc

SEQ ID NO: 408762 - RNA, 22 nt, Human
auuccaaaggcuggccuggagg

SEQ ID NO: 408763 - RNA, 19 nt, Human
ggaugagggucaggcauag

SEQ ID NO: 408764 - RNA, 22 nt, Human
cugccaggccuccgcugucccc

SEQ ID NO: 408765 - RNA, 22 nt, Human
ucaggauccauagacucccaaa

SEQ ID NO: 408766 - RNA, 22 nt, Human
gauuuccuagacauggggcaga

SEQ ID NO: 408767 - RNA, 22 nt, Human
augguguagcaugugauaugac

SEQ ID NO: 408768 - RNA, 22 nt, Human
ccagagcugaugggcccagggu

SEQ ID NO: 408769 - RNA, 22 nt, Human
ccaguggacuucucccuguggu

SEQ ID NO: 408770 - RNA, 22 nt, Human
gucaccagucccagcuccugaa

SEQ ID NO: 408771 - RNA, 22 nt, Human
agcugaggaggaaugaugggua

SEQ ID NO: 408772 - RNA, 22 nt, Human
ugggccacgugacccuuacccu

SEQ ID NO: 408773 - RNA, 19 nt, Human
ucaguuuuagucaucaguu

SEQ ID NO: 408774 - RNA, 22 nt, Human
ucaaaguagggguaagccaggc

SEQ ID NO: 408775 - RNA, 22 nt, Human
auguucuaaucccugcuaugua

SEQ ID NO: 408776 - RNA, 22 nt, Human
cagacagaccugcaagggcaca

SEQ ID NO: 408777 - RNA, 22 nt, Human
agggccagccaggcccuacaaa

SEQ ID NO: 408778 - RNA, 22 nt, Human
ggcccuguccuggcugucuccg

SEQ ID NO: 408779 - RNA, 22 nt, Human
ugggggacugcacuggcgucag

SEQ ID NO: 408780 - RNA, 22 nt, Human
uccaggcuagaagucacaggcc

SEQ ID NO: 408781 - RNA, 22 nt, Human
gcugagggcauguguggcgacu

SEQ ID NO: 408782 - RNA, 22 nt, Human
gccaggaguucagaugcauguu

SEQ ID NO: 408783 - RNA, 22 nt, Human
aguccggggucuggacaccugg

SEQ ID NO: 408784 - RNA, 22 nt, Human
uauuggugggggcagagagaga

SEQ ID NO: 408785 - RNA, 22 nt, Human
guggcugggcuccgagcggcuu

SEQ ID NO: 408786 - RNA, 22 nt, Human
ucaacagaagugauagcuauua

SEQ ID NO: 408787 - RNA, 22 nt, Human
ccugagccugaguggugcaggg

SEQ ID NO: 408788 - RNA, 22 nt, Human
agauuucagguuggggcagaag

SEQ ID NO: 408789 - RNA, 21 nt, Human
aggaaaggccagcacguaggg

SEQ ID NO: 408790 - RNA, 22 nt, Human
ccagcucuggcuucuugcuggg

SEQ ID NO: 408791 - RNA, 22 nt, Human
gagccuggacaucucaggccca

SEQ ID NO: 408792 - RNA, 22 nt, Human
caaggcaggcaguucacuugag

SEQ ID NO: 408793 - RNA, 22 nt, Human
cccaggcucccaggugggacaa

SEQ ID NO: 408794 - RNA, 22 nt, Human
gcuggcuguuggagguaccugc

SEQ ID NO: 408795 - RNA, 23 nt, Human
gggggcugguugacucucugcag

SEQ ID NO: 408796 - RNA, 22 nt, Human
aauguuuuagauuacugcuggg

SEQ ID NO: 408797 - RNA, 22 nt, Human
ugcuuuauugcaucaguguggg

SEQ ID NO: 408798 - RNA, 20 nt, Human
uguggcaggaugagggcgga

SEQ ID NO: 408799 - RNA, 22 nt, Human
gcaaaggcuucuuuuauucucc

SEQ ID NO: 408800 - RNA, 22 nt, Human
ggugaagggccuuaggagacag

SEQ ID NO: 408801 - RNA, 22 nt, Human
agagccugggaauuugcauguu

SEQ ID NO: 408802 - RNA, 22 nt, Human
cuuuucaugccagcccaucaca

SEQ ID NO: 408803 - RNA, 22 nt, Human
cuucuuuccuuccuccaguggc

SEQ ID NO: 408804 - RNA, 22 nt, Human
gcagcuggaagugacacucugu

SEQ ID NO: 408805 - RNA, 22 nt, Human
ggagauuuauagcacacuucag

SEQ ID NO: 408806 - RNA, 22 nt, Human
agagccagguguagucucggag

SEQ ID NO: 408807 - RNA, 22 nt, Human
acugcagcaaagcccgugucuu

SEQ ID NO: 408808 - RNA, 22 nt, Human
ugggcaggaugcguugauucuu

SEQ ID NO: 408809 - RNA, 21 nt, Human
ccucuggcuugugcugugccc

SEQ ID NO: 408810 - RNA, 22 nt, Human
gauggggaugagaagugagcag

SEQ ID NO: 408811 - RNA, 22 nt, Human
ucuguacaaaggcuauuuggag

SEQ ID NO: 408812 - RNA, 22 nt, Human
aacaguaacgagauguccuaac

SEQ ID NO: 408813 - RNA, 22 nt, Human
uugcucugacuggagugcagug

SEQ ID NO: 408814 - RNA, 22 nt, Human
ggucccaggauugguugcgcag

SEQ ID NO: 408815 - RNA, 23 nt, Human
acucagagaccccgggaagugac

SEQ ID NO: 408816 - RNA, 22 nt, Human
acagaaauuagcagugaguuua

SEQ ID NO: 408817 - RNA, 18 nt, Human
uuccauaauguauguaac

SEQ ID NO: 408818 - RNA, 23 nt, Human
cagaggguuccauggagcauggu

SEQ ID NO: 408819 - RNA, 22 nt, Human
agcaccaucagaugcaauaucu

SEQ ID NO: 408820 - RNA, 22 nt, Human
ccaguguucauaauuuuacacu

SEQ ID NO: 408821 - RNA, 22 nt, Human
aggggcucaguuacuuuggcag

SEQ ID NO: 408822 - RNA, 22 nt, Human
uucauucccaagaguaaacaua

SEQ ID NO: 408823 - RNA, 22 nt, Human
ugcuuaaacccugaucaugugu

SEQ ID NO: 408824 - RNA, 22 nt, Human
ugcagggaaucuguggcuggac

SEQ ID NO: 408825 - RNA, 22 nt, Human
cuguccauuuucgugccuccuu

SEQ ID NO: 408826 - RNA, 22 nt, Human
caugcacaacauacucaagagg

SEQ ID NO: 408827 - RNA, 22 nt, Human
aaacuguaaacacagcaguaca

SEQ ID NO: 408828 - RNA, 19 nt, Human
acucaagucuaaugaaauc

SEQ ID NO: 408829 - RNA, 22 nt, Human
uuuauccauaucauuaaaaucu

SEQ ID NO: 408830 - RNA, 22 nt, Human
aggcucagggacggggccccuu

SEQ ID NO: 408831 - RNA, 22 nt, Human
aaggacagaaacagauugcugg

SEQ ID NO: 408832 - RNA, 22 nt, Human
ugucaugccaggaaauaguccc

SEQ ID NO: 408833 - RNA, 20 nt, Human
gcugucuggauuagaagccu

SEQ ID NO: 408834 - RNA, 20 nt, Human
agucccuuuggucagguauu

SEQ ID NO: 408835 - RNA, 22 nt, Human
ggcucugggucuguggggagcg

SEQ ID NO: 408836 - RNA, 22 nt, Human
caggaagauuagaccaagagcu

SEQ ID NO: 408837 - RNA, 22 nt, Human
uuuuuccaccguacuuccugag

SEQ ID NO: 408838 - RNA, 22 nt, Human
guauuacauuuaguaauuaggc

SEQ ID NO: 408839 - RNA, 22 nt, Human
ccaggagucaauaaaggaagcu

SEQ ID NO: 408840 - RNA, 22 nt, Human
agugccuggaccccaugacaua

SEQ ID NO: 408841 - RNA, 22 nt, Human
ugacagaacagguugggagcaa

SEQ ID NO: 408842 - RNA, 22 nt, Human
cugauuccaaagccaaagcuau

SEQ ID NO: 408843 - RNA, 22 nt, Human
ggcucaggaugagccuucucau

SEQ ID NO: 408844 - RNA, 22 nt, Human
aaguucuacagcuucgcaggca

SEQ ID NO: 408845 - RNA, 22 nt, Human
aaagccuugggauuugugauca

SEQ ID NO: 408846 - RNA, 22 nt, Human
caucuuuguaacuuccacauaa

SEQ ID NO: 408847 - RNA, 22 nt, Human
auccuucaaggggcugacagcu

SEQ ID NO: 408848 - RNA, 22 nt, Human
uccugggaagagaccugagcau

SEQ ID NO: 408849 - RNA, 22 nt, Human
gggucuggcaugcugagaugga

SEQ ID NO: 408850 - RNA, 22 nt, Human
aaacuguaggagggaaaggaag

SEQ ID NO: 408851 - RNA, 22 nt, Human
aaugccaguguguugauuccag

SEQ ID NO: 408852 - RNA, 22 nt, Human
gaggcugguaggaaaggaaaca

SEQ ID NO: 408853 - RNA, 22 nt, Human
uagaauaugauuaauuuucuua

SEQ ID NO: 408854 - RNA, 21 nt, Human
aggugccaaggagaagcaggc

SEQ ID NO: 408855 - RNA, 22 nt, Human
uagggcagccacccaggcugcu

SEQ ID NO: 408856 - RNA, 22 nt, Human
ugcucagggacaauggagaggg

SEQ ID NO: 408857 - RNA, 22 nt, Human
ccugcagggugcugccacagau

SEQ ID NO: 408858 - RNA, 22 nt, Human
cagcaaucgggugauaugcaau

SEQ ID NO: 408859 - RNA, 22 nt, Human
cagaaauucccauuucagauuc

SEQ ID NO: 408860 - RNA, 22 nt, Human
ucagggcauguauguuucuuua

SEQ ID NO: 408861 - RNA, 22 nt, Human
ccagucccagcucugccaugcu

SEQ ID NO: 408862 - RNA, 22 nt, Human
cuggcuuuuagugugaagacuu

SEQ ID NO: 408863 - RNA, 22 nt, Human
agccaagcaccacuggcacucg

SEQ ID NO: 408864 - RNA, 22 nt, Human
uccuugaaaagaaugucuccau

SEQ ID NO: 408865 - RNA, 22 nt, Human
gaggcugccccuuccucagcug

SEQ ID NO: 408866 - RNA, 22 nt, Human
aggcugucugaccccagagccc

SEQ ID NO: 408867 - RNA, 22 nt, Human
gccuucccaagacgccugaguu

SEQ ID NO: 408868 - RNA, 22 nt, Human
gugucauggaaaauugcaaugg

SEQ ID NO: 408869 - RNA, 22 nt, Human
caccagcagaagacugagggug

SEQ ID NO: 408870 - RNA, 22 nt, Human
ggugcugguucaggguggcugu

SEQ ID NO: 408871 - RNA, 22 nt, Human
auuguaaguagaaauguuaugg

SEQ ID NO: 408872 - RNA, 22 nt, Human
acuggcucagaguuccuagaga

SEQ ID NO: 408873 - RNA, 22 nt, Human
ccuuuguucacuggagagugga

SEQ ID NO: 408874 - RNA, 22 nt, Human
guggggcaugcacgcugcuccu

SEQ ID NO: 408875 - RNA, 23 nt, Human
agggcugaugccauugcagcucu

SEQ ID NO: 408876 - RNA, 22 nt, Human
gccaggcauguccucugcagaa

SEQ ID NO: 408877 - RNA, 22 nt, Human
caggcugggcagccuccccggc

SEQ ID NO: 408878 - RNA, 22 nt, Human
uccucagacuucccuuugugua

SEQ ID NO: 408879 - RNA, 22 nt, Human
acugaaggcuuucccaagguca

SEQ ID NO: 408880 - RNA, 22 nt, Human
ucccagaggaaauggcagcuga

SEQ ID NO: 408881 - RNA, 22 nt, Human
uguggcccagaugagugugcua

SEQ ID NO: 408882 - RNA, 21 nt, Human
ccuccaggagcagagcccuga

SEQ ID NO: 408883 - RNA, 22 nt, Human
ccugugucuuccccacuggugu

SEQ ID NO: 408884 - RNA, 22 nt, Human
gggggcuggacuuucccacaca

SEQ ID NO: 408885 - RNA, 22 nt, Human
ucugcuggccuuagcaggucua

SEQ ID NO: 408886 - RNA, 22 nt, Human
ugccaggcccugcgggguccca

SEQ ID NO: 408887 - RNA, 22 nt, Human
cacagaguggaggcuuggccug

SEQ ID NO: 408888 - RNA, 18 nt, Human
aaauguacuguccauggc

SEQ ID NO: 408889 - RNA, 22 nt, Human
gcucucugguuccagucaggaa

SEQ ID NO: 408890 - RNA, 22 nt, Human
ggcucuggagcacagacgucug

SEQ ID NO: 408891 - RNA, 23 nt, Human
ggaguuggauuguacuugcugcu

SEQ ID NO: 408892 - RNA, 22 nt, Human
cagcuuguuaccgagggagggu

SEQ ID NO: 408893 - RNA, 21 nt, Human
uuugaaagcccuauguuuuca

SEQ ID NO: 408894 - RNA, 22 nt, Human
gggaaauugugugagaucuuug

SEQ ID NO: 408895 - RNA, 22 nt, Human
acagguggccccgagggagugg

SEQ ID NO: 408896 - RNA, 22 nt, Human
aggcacugaagaacucuuuuug

SEQ ID NO: 408897 - RNA, 22 nt, Human
ucagggcaggcgagcagcugcu

SEQ ID NO: 408898 - RNA, 22 nt, Human
aaagauuuaagaauaauuugug

SEQ ID NO: 408899 - RNA, 22 nt, Human
uggcagaggagaauuaagauua

SEQ ID NO: 408900 - RNA, 22 nt, Human
cccuggaguagcacugggucgc

SEQ ID NO: 408901 - RNA, 22 nt, Human
uagggcucagcucuagcuccug

SEQ ID NO: 408902 - RNA, 22 nt, Human
gggcuucuagaccagcagugag

SEQ ID NO: 408903 - RNA, 22 nt, Human
cuuauaguaugauguugagaau

SEQ ID NO: 408904 - RNA, 22 nt, Human
aacaaagucguugccuagaaga

SEQ ID NO: 408905 - RNA, 19 nt, Human
ugaagcaauaccauuuuug

SEQ ID NO: 408906 - RNA, 22 nt, Human
cugcagggugacguugcccacc

SEQ ID NO: 408907 - RNA, 22 nt, Human
uuauuuauucauucugucuguc

SEQ ID NO: 408908 - RNA, 22 nt, Human
uggagcaggugccaggugugug

SEQ ID NO: 408909 - RNA, 22 nt, Human
ucaugucaguuucuucuauaaa

SEQ ID NO: 408910 - RNA, 22 nt, Human
ucugagagagggucagaugcua

SEQ ID NO: 408911 - RNA, 22 nt, Human
cacucuccagcacaccccauuu

SEQ ID NO: 408912 - RNA, 22 nt, Human
cccaggcagaauuaguguuuca

SEQ ID NO: 408913 - RNA, 22 nt, Human
uucaagauggcugcaaauacuu

SEQ ID NO: 408914 - RNA, 22 nt, Human
uggcccuguguccugcugccag

SEQ ID NO: 408915 - RNA, 21 nt, Human
ucucugguuggaguugugcca

SEQ ID NO: 408916 - RNA, 22 nt, Human
uagcauuucccaaaugcauuug

SEQ ID NO: 408917 - RNA, 22 nt, Human
ggcuuccuaauacucccuacac

SEQ ID NO: 408918 - RNA, 22 nt, Human
gagcugccaguguaugaauucu

SEQ ID NO: 408919 - RNA, 22 nt, Human
uuugacagacauuuacuacauu

SEQ ID NO: 408920 - RNA, 22 nt, Human
acugucucucuagcaguucagg

SEQ ID NO: 408921 - RNA, 22 nt, Human
caaaauuagaaaugcagcuguu

SEQ ID NO: 408922 - RNA, 22 nt, Human
ucagagagcuggugggcagagg

SEQ ID NO: 408923 - RNA, 22 nt, Human
uguggaaaauuggaacguuccu

SEQ ID NO: 408924 - RNA, 22 nt, Human
uggccaggcagguagaacggcc

SEQ ID NO: 408925 - RNA, 22 nt, Human
agaggcugggaaggguccccgg

SEQ ID NO: 408926 - RNA, 22 nt, Human
gccaggcaauguguuagaagcg

SEQ ID NO: 408927 - RNA, 22 nt, Human
uggccucucuaccaggcagccu

SEQ ID NO: 408928 - RNA, 22 nt, Human
cagcaggguuaagugacucacc

SEQ ID NO: 408929 - RNA, 22 nt, Human
ggaaacagagggcaccugagcc

SEQ ID NO: 408930 - RNA, 22 nt, Human
agaggcuguuacacucccagau

SEQ ID NO: 408931 - RNA, 21 nt, Human
uccugcagggcagcagagugg

SEQ ID NO: 408932 - RNA, 22 nt, Human
gugcauuuggugacucucaccc

SEQ ID NO: 408933 - RNA, 22 nt, Human
caguauguacucuuaucaugua

SEQ ID NO: 408934 - RNA, 22 nt, Human
cagaugagaguggccaggguuc

SEQ ID NO: 408935 - RNA, 22 nt, Human
gacaggcuuugagucccagaac

SEQ ID NO: 408936 - RNA, 21 nt, Human
cuguccaguaauuccuggcac

SEQ ID NO: 408937 - RNA, 22 nt, Human
gccuggcacucacugaagaggc

SEQ ID NO: 408938 - RNA, 22 nt, Human
aggugccagaugcacagcugaa

SEQ ID NO: 408939 - RNA, 22 nt, Human
ucauaauacaaagaguucugca

SEQ ID NO: 408940 - RNA, 22 nt, Human
ucagucucuggggcuucuguuu

SEQ ID NO: 408941 - RNA, 22 nt, Human
gagcugugagggacacauugcu

SEQ ID NO: 408942 - RNA, 22 nt, Human
aggugaguuacaggaggagguc

SEQ ID NO: 408943 - RNA, 22 nt, Human
gcagcugaauguccauugcugc

SEQ ID NO: 408944 - RNA, 22 nt, Human
agggccagcugaugagaaugag

SEQ ID NO: 408945 - RNA, 22 nt, Human
uggcagggaauacagauguuua

SEQ ID NO: 408946 - RNA, 22 nt, Human
ugccugggccuucccaccucug

SEQ ID NO: 408947 - RNA, 22 nt, Human
gugccagggggcacugaacaga

SEQ ID NO: 408948 - RNA, 22 nt, Human
gugcaggggccuccccuugcug

SEQ ID NO: 408949 - RNA, 22 nt, Human
gccucugcaauuacauugugcc

SEQ ID NO: 408950 - RNA, 22 nt, Human
gcugucuuccuugcuccaaggg

SEQ ID NO: 408951 - RNA, 22 nt, Human
cagccagguucaaguccuuaua

SEQ ID NO: 408952 - RNA, 22 nt, Human
ggaggugaggccguagggugug

SEQ ID NO: 408953 - RNA, 22 nt, Human
auuauucaacacuugagaaauu

SEQ ID NO: 408954 - RNA, 22 nt, Human
gcacagccacugagugagaacc

SEQ ID NO: 408955 - RNA, 23 nt, Human
agccagggcacugguggagauug

SEQ ID NO: 408956 - RNA, 22 nt, Human
ccugcugugaaacuggcauaug

SEQ ID NO: 408957 - RNA, 22 nt, Human
agccacagucaaccuguccaua

SEQ ID NO: 408958 - RNA, 22 nt, Human
cagucccagacauaguaaggga

SEQ ID NO: 408959 - RNA, 22 nt, Human
uaguccauuuucacacugcuga

SEQ ID NO: 408960 - RNA, 22 nt, Human
aaagcaaugggucuaagguaaa

SEQ ID NO: 408961 - RNA, 22 nt, Human
caggaggcccaaagggcgcaga

SEQ ID NO: 408962 - RNA, 22 nt, Human
gaugcaggauagcuucacccag

SEQ ID NO: 408963 - RNA, 22 nt, Human
ucauuacaguguuuauaugucu

SEQ ID NO: 408964 - RNA, 22 nt, Human
cugaggcucccucgggucugcu

SEQ ID NO: 408965 - RNA, 22 nt, Human
gcacagguugcaaaaguucaca

SEQ ID NO: 408966 - RNA, 21 nt, Human
gccugccugcgugacccucuu

SEQ ID NO: 408967 - RNA, 19 nt, Human
uggcagcauugguaccuug

SEQ ID NO: 408968 - RNA, 22 nt, Human
agaaauguauagugaauuuuuc

SEQ ID NO: 408969 - RNA, 23 nt, Human
agagcuuucuaaaauguaaaucu

SEQ ID NO: 408970 - RNA, 22 nt, Human
gcuuuauuuugugagggauuac

SEQ ID NO: 408971 - RNA, 22 nt, Human
cuguagccagaagcagaaggcc

SEQ ID NO: 408972 - RNA, 22 nt, Human
gggcagcagaggaucccuuaau

SEQ ID NO: 408973 - RNA, 22 nt, Human
agcugucucugguauuauguga

SEQ ID NO: 408974 - RNA, 22 nt, Human
ggccagggccuggggacugucc

SEQ ID NO: 408975 - RNA, 22 nt, Human
aggagagagcugagcuuugcug

SEQ ID NO: 408976 - RNA, 22 nt, Human
cacaggcuuccaguccccagcu

SEQ ID NO: 408977 - RNA, 22 nt, Human
uuccuggugguggugacagcac

SEQ ID NO: 408978 - RNA, 22 nt, Human
ucagagaacacagaggugaugu

SEQ ID NO: 408979 - RNA, 22 nt, Human
uacauggguagguuaagucaua

SEQ ID NO: 408980 - RNA, 22 nt, Human
guggccuuuccugaagaaauga

SEQ ID NO: 408981 - RNA, 22 nt, Human
gugugccaacaaaagacagugc

SEQ ID NO: 408982 - RNA, 22 nt, Human
ccugggcaggaugggcccggug

SEQ ID NO: 408983 - RNA, 22 nt, Human
agccaggggauucaucagggac

SEQ ID NO: 408984 - RNA, 22 nt, Human
gcugucugggaggccuccacuu

SEQ ID NO: 408985 - RNA, 17 nt, Human
gggcugacaguggccuc

SEQ ID NO: 408986 - RNA, 22 nt, Human
uccuucagcuacucaguuucca

SEQ ID NO: 408987 - RNA, 22 nt, Human
ccuggccugcucggcucuuaag

SEQ ID NO: 408988 - RNA, 22 nt, Human
uccugcagccacugcaggcaga

SEQ ID NO: 408989 - RNA, 22 nt, Human
gcuggccuucugcagaguucug

SEQ ID NO: 408990 - RNA, 22 nt, Human
agggaugguggagguugcaagu

SEQ ID NO: 408991 - RNA, 22 nt, Human
gcugccugcucggcuccuggga

SEQ ID NO: 408992 - RNA, 22 nt, Human
acuaaauaguuuugacagaaca

SEQ ID NO: 408993 - RNA, 22 nt, Human
uccaggcauuggagagauaaug

SEQ ID NO: 408994 - RNA, 22 nt, Human
ucagagaaaugaaguagggauu

SEQ ID NO: 408995 - RNA, 22 nt, Human
gcugguuagaaaacagagcuca

SEQ ID NO: 408996 - RNA, 20 nt, Human
accaggagauggaggcaggg

SEQ ID NO: 408997 - RNA, 22 nt, Human
cagggcccaggccacuggguug

SEQ ID NO: 408998 - RNA, 22 nt, Human
cagaagcauuccagcaaauagu

SEQ ID NO: 408999 - RNA, 22 nt, Human
agcugagagguggcaagcugua

SEQ ID NO: 409000 - RNA, 22 nt, Human
agcagaacauuuucagggcugu

SEQ ID NO: 409001 - RNA, 22 nt, Human
gcugagagaucaaggcaggauu

SEQ ID NO: 409002 - RNA, 22 nt, Human
ccuggagcgcgggucaagcugg

SEQ ID NO: 409003 - RNA, 22 nt, Human
ccuggcagcuaagugcuuugag

SEQ ID NO: 409004 - RNA, 22 nt, Human
ucucgacagccuggcacagugg

SEQ ID NO: 409005 - RNA, 22 nt, Human
ugggcuggcugaggcauucacu

SEQ ID NO: 409006 - RNA, 22 nt, Human
cagccagugguugaagaugcag

SEQ ID NO: 409007 - RNA, 22 nt, Human
caauuucugggccucacacaag

SEQ ID NO: 409008 - RNA, 22 nt, Human
augccuguaaucccagugcuuu

SEQ ID NO: 409009 - RNA, 23 nt, Human
agggcccaagccuggacagcagg

SEQ ID NO: 409010 - RNA, 23 nt, Human
acagccaguucaccucuccuugg

SEQ ID NO: 409011 - RNA, 22 nt, Human
cugccuggcauggagaagagaa

SEQ ID NO: 409012 - RNA, 21 nt, Human
aggugcagagccagggaccag

SEQ ID NO: 409013 - RNA, 22 nt, Human
ccauggccgccgcugcucagga

SEQ ID NO: 409014 - RNA, 22 nt, Human
cucuuccucucaugcggucaua

SEQ ID NO: 409015 - RNA, 22 nt, Human
uccagccaacugccuagggagc

SEQ ID NO: 409016 - RNA, 22 nt, Human
uuacaaguauuuaagaugcugu

SEQ ID NO: 409017 - RNA, 22 nt, Human
uucugugaaucuuuuuucccac

SEQ ID NO: 409018 - RNA, 22 nt, Human
ugugccaugaggcucugauaug

SEQ ID NO: 409019 - RNA, 22 nt, Human
cuggagggggaaauguucauug

SEQ ID NO: 409020 - RNA, 22 nt, Human
cuggguggcuguccagccagcc

SEQ ID NO: 409021 - RNA, 22 nt, Human
aggccagcaccagagucaagaa

SEQ ID NO: 409022 - RNA, 22 nt, Human
ugggcucuccuggaggacaaca

SEQ ID NO: 409023 - RNA, 22 nt, Human
gagaaagggaacuuacagagug

SEQ ID NO: 409024 - RNA, 22 nt, Human
gcacacaggcaguuuccagcca

SEQ ID NO: 409025 - RNA, 22 nt, Human
gggcaggucugggucagccuga

SEQ ID NO: 409026 - RNA, 22 nt, Human
aggcagcuggcagcacccaggg

SEQ ID NO: 409027 - RNA, 22 nt, Human
ccugugugcacacgaggccaug

SEQ ID NO: 409028 - RNA, 22 nt, Human
gguggccugcccugaucccugg

SEQ ID NO: 409029 - RNA, 22 nt, Human
caggcaggugcagauuccucuu

SEQ ID NO: 409030 - RNA, 22 nt, Human
agggcuccuaugccccauggac

SEQ ID NO: 409031 - RNA, 22 nt, Human
ucauuguuucugcuuuucauga

SEQ ID NO: 409032 - RNA, 19 nt, Human
ccugcagggaugagagguu

SEQ ID NO: 409033 - RNA, 22 nt, Human
agggcagagagaugaaugggau

SEQ ID NO: 409034 - RNA, 22 nt, Human
cagugcaguugguggcaggggu

SEQ ID NO: 409035 - RNA, 22 nt, Human
gagcuguccgccccugggccga

SEQ ID NO: 409036 - RNA, 22 nt, Human
caggcagaagaaguggaaggac

SEQ ID NO: 409037 - RNA, 16 nt, Human
agaggccuugaggaag

SEQ ID NO: 409038 - RNA, 22 nt, Human
ggcucuggugggaagguuagau

SEQ ID NO: 409039 - RNA, 22 nt, Human
gccuucugugcuccuggccuuu

SEQ ID NO: 409040 - RNA, 22 nt, Human
cggcagcaaaggaagccagguc

SEQ ID NO: 409041 - RNA, 22 nt, Human
auugucgcuuauuuaggugcuu

SEQ ID NO: 409042 - RNA, 22 nt, Human
gcugcaggcgccugcggucucu

SEQ ID NO: 409043 - RNA, 22 nt, Human
cuuagaaauaaugguuucaguu

SEQ ID NO: 409044 - RNA, 22 nt, Human
uagccaggucacacuguguguu

SEQ ID NO: 409045 - RNA, 22 nt, Human
caagauggguguugugaugguu

SEQ ID NO: 409046 - RNA, 22 nt, Human
gcugucucggggcuuucuccug

SEQ ID NO: 409047 - RNA, 22 nt, Human
gacucugcuacaggccgagguu

SEQ ID NO: 409048 - RNA, 22 nt, Human
cucccuggaggugagcuggcac

SEQ ID NO: 409049 - RNA, 22 nt, Human
aguuucauauuaccaugucacc

SEQ ID NO: 409050 - RNA, 22 nt, Human
gagccucguggcggccacugcg

SEQ ID NO: 409051 - RNA, 23 nt, Human
cgcccagccucagugaccugggc

SEQ ID NO: 409052 - RNA, 22 nt, Human
ugcagccaucuuucuuggagga

SEQ ID NO: 409053 - RNA, 22 nt, Human
ucucagagauguuagggaagag

SEQ ID NO: 409054 - RNA, 22 nt, Human
uuggcauuuauucuaaggucaa

SEQ ID NO: 409055 - RNA, 22 nt, Human
gaggacagugugaucugccagc

SEQ ID NO: 409056 - RNA, 22 nt, Human
gacccggcuccaggcccagcag

SEQ ID NO: 409057 - RNA, 22 nt, Human
uccugggcugugugccacucug

SEQ ID NO: 409058 - RNA, 22 nt, Human
cuucuggggauggagcccagaa

SEQ ID NO: 409059 - RNA, 22 nt, Human
ggcccacuugaaauggagcuca

SEQ ID NO: 409060 - RNA, 22 nt, Human
aguacaaaggcccuugauuacu

SEQ ID NO: 409061 - RNA, 22 nt, Human
ggguggcuccuaugggcauagc

SEQ ID NO: 409062 - RNA, 22 nt, Human
cugggcuggcgcauccgacacg

SEQ ID NO: 409063 - RNA, 22 nt, Human
agucccagugacuuggccagaa

SEQ ID NO: 409064 - RNA, 22 nt, Human
accugccuaguugguucugccc

SEQ ID NO: 409065 - RNA, 22 nt, Human
gccacagggcagaugcgcagag

SEQ ID NO: 409066 - RNA, 22 nt, Human
ugcuuuaucaaagcuauaguga

SEQ ID NO: 409067 - RNA, 22 nt, Human
agaguguuauuugcucuguauu

SEQ ID NO: 409068 - RNA, 22 nt, Human
cagagacagaaaauggaucuag

SEQ ID NO: 409069 - RNA, 22 nt, Human
uaguacuuaucucugucauugu

SEQ ID NO: 409070 - RNA, 22 nt, Human
caaagucagccagcuaguaggu

SEQ ID NO: 409071 - RNA, 22 nt, Human
aaaaaguuucaacugccaacuc

SEQ ID NO: 409072 - RNA, 20 nt, Human
uggagccacagucagguucc

SEQ ID NO: 409073 - RNA, 22 nt, Human
ucugucauugcaauaaaauuuc

SEQ ID NO: 409074 - RNA, 22 nt, Human
ggccucuggcaggcaggcccuc

SEQ ID NO: 409075 - RNA, 22 nt, Human
uagcuuuaggcacguuugaauu

SEQ ID NO: 409076 - RNA, 22 nt, Human
ugcaagaggaauucuagaagca

SEQ ID NO: 409077 - RNA, 22 nt, Human
cauuucugugacacuuccaucu

SEQ ID NO: 409078 - RNA, 22 nt, Human
aggaccugacuggcuccugcuu

SEQ ID NO: 409079 - RNA, 22 nt, Human
aggacaguccgggguccuccac

SEQ ID NO: 409080 - RNA, 22 nt, Human
gggagggaucugcuaggcaaug

SEQ ID NO: 409081 - RNA, 22 nt, Human
gagauuucuuuugaugccuguc

SEQ ID NO: 409082 - RNA, 19 nt, Human
agagaggcugugugaggga

SEQ ID NO: 409083 - RNA, 21 nt, Human
aucacauuggcuguuauuauu

SEQ ID NO: 409084 - RNA, 22 nt, Human
agauguggauccuaggguagaa

SEQ ID NO: 409085 - RNA, 22 nt, Human
uaaauguauaggcacuaaaccu

SEQ ID NO: 409086 - RNA, 20 nt, Human
cccuggccuguuucaugccc

SEQ ID NO: 409087 - RNA, 22 nt, Human
gccuggagggauagaaugcaag

SEQ ID NO: 409088 - RNA, 22 nt, Human
ccucagaguaggucucagcugu

SEQ ID NO: 409089 - RNA, 22 nt, Human
gcagaggggaagcugaggaauu

SEQ ID NO: 409090 - RNA, 22 nt, Human
uucauguguauggaacauuuuu

SEQ ID NO: 409091 - RNA, 22 nt, Human
uaacagaauuugcuaaacuccg

SEQ ID NO: 409092 - RNA, 22 nt, Human
acccucaacaaauucacucuau

SEQ ID NO: 409093 - RNA, 22 nt, Human
agcuuuaugaggagaccuuagu

SEQ ID NO: 409094 - RNA, 19 nt, Human
uguagcaguuuaaaacaac

SEQ ID NO: 409095 - RNA, 22 nt, Human
cacagcuucuccuugauaucgc

SEQ ID NO: 409096 - RNA, 22 nt, Human
gggaagggagggaccucagucu

SEQ ID NO: 409097 - RNA, 22 nt, Human
cacagcuucccaaaguggaccu

SEQ ID NO: 409098 - RNA, 22 nt, Human
acuugcauuauauuuaucacaa

SEQ ID NO: 409099 - RNA, 22 nt, Human
gguuccacgguguuuggaggca

SEQ ID NO: 409100 - RNA, 22 nt, Human
cagaggccuuucuacagugaua

SEQ ID NO: 409101 - RNA, 18 nt, Human
aagccagagaccacugcc

SEQ ID NO: 409102 - RNA, 22 nt, Human
caggcacuguguuaggcacugu

SEQ ID NO: 409103 - RNA, 22 nt, Human
acuguguguuugucuagcacag

SEQ ID NO: 409104 - RNA, 22 nt, Human
cugggcacaggggagcagaguc

SEQ ID NO: 409105 - RNA, 22 nt, Human
uagcagggguagauagagugug

SEQ ID NO: 409106 - RNA, 22 nt, Human
agggcagaaaucgauuacaccu

SEQ ID NO: 409107 - RNA, 22 nt, Human
guuucauuaccugacccaugag

SEQ ID NO: 409108 - RNA, 22 nt, Human
aucuggcucaccuggguaaaua

SEQ ID NO: 409109 - RNA, 22 nt, Human
ugaugcugagccugggacugac

SEQ ID NO: 409110 - RNA, 22 nt, Human
ggaugcaggacggcauggaugu

SEQ ID NO: 409111 - RNA, 22 nt, Human
aaauccuaaaaguuugacuuaa

SEQ ID NO: 409112 - RNA, 22 nt, Human
guuauuagaagugaaggauugu

SEQ ID NO: 409113 - RNA, 22 nt, Human
gccucugcaugcucagcaccca

SEQ ID NO: 409114 - RNA, 22 nt, Human
caguuucuuggaugccaauuuc

SEQ ID NO: 409115 - RNA, 23 nt, Human
ugggccuggccucccaguccagc

SEQ ID NO: 409116 - RNA, 22 nt, Human
gcauccagucuuggcuccugga

SEQ ID NO: 409117 - RNA, 22 nt, Human
uggccuuguguuuuagagaaag

SEQ ID NO: 409118 - RNA, 22 nt, Human
aguggcagagugcacucaggca

SEQ ID NO: 409119 - RNA, 22 nt, Human
uagcagggccaggcugggaacc

SEQ ID NO: 409120 - RNA, 22 nt, Human
ccaggcccugcuccucacacca

SEQ ID NO: 409121 - RNA, 22 nt, Human
uucagagauggaaggcagaaug

SEQ ID NO: 409122 - RNA, 22 nt, Human
gagggccaauggauuucaacug

SEQ ID NO: 409123 - RNA, 22 nt, Human
ugccaggccaaugaaggcaggg

SEQ ID NO: 409124 - RNA, 22 nt, Human
agugaaauacugucguuuuuag

SEQ ID NO: 409125 - RNA, 22 nt, Human
ucugagggcuugaggggaagua

SEQ ID NO: 409126 - RNA, 22 nt, Human
gccuaggaguacagaaugguuu

SEQ ID NO: 409127 - RNA, 22 nt, Human
cagggccuucguaaguguccgg

SEQ ID NO: 409128 - RNA, 22 nt, Human
ccucagccuuggccccaggcag

SEQ ID NO: 409129 - RNA, 22 nt, Human
agccacgucccugucaggguca

SEQ ID NO: 409130 - RNA, 20 nt, Human
agcauuugaaauaugacuau

SEQ ID NO: 409131 - RNA, 22 nt, Human
cagagccauuauggagacuugc

SEQ ID NO: 409132 - RNA, 22 nt, Human
caguggcaaugggacagagcac

SEQ ID NO: 409133 - RNA, 22 nt, Human
cacuguacagcauuaacaaggc

SEQ ID NO: 409134 - RNA, 22 nt, Human
uugaaaggguuaaagugguaaa

SEQ ID NO: 409135 - RNA, 22 nt, Human
ucccagggucaguggugaggcc

SEQ ID NO: 409136 - RNA, 22 nt, Human
agacaucagcuugugugcaggg

SEQ ID NO: 409137 - RNA, 22 nt, Human
aguggcaggcagaagcuucuca

SEQ ID NO: 409138 - RNA, 22 nt, Human
cagggcucccaaauaucucuuc

SEQ ID NO: 409139 - RNA, 22 nt, Human
cugcugugcaggugccuaugau

SEQ ID NO: 409140 - RNA, 22 nt, Human
gcaugucaugucauguaggaau

SEQ ID NO: 409141 - RNA, 22 nt, Human
ggggagaguccuuuccaguucc

SEQ ID NO: 409142 - RNA, 22 nt, Human
agugucauaugccacugcaucc

SEQ ID NO: 409143 - RNA, 23 nt, Human
cccagcagauuguaaagugucca

SEQ ID NO: 409144 - RNA, 17 nt, Human
auacaguuuauuuuaca

SEQ ID NO: 409145 - RNA, 22 nt, Human
ugaggcagucacccccuccugc

SEQ ID NO: 409146 - RNA, 22 nt, Human
gcucaggaaauaguuuaguguu

SEQ ID NO: 409147 - RNA, 22 nt, Human
uccauuuucaucucauguauaa

SEQ ID NO: 409148 - RNA, 22 nt, Human
uuuuagaaauacugauuuagug

SEQ ID NO: 409149 - RNA, 22 nt, Human
uugugcaauuuaaaaucuuccu

SEQ ID NO: 409150 - RNA, 22 nt, Human
gcucagagggaacaaggggcug

SEQ ID NO: 409151 - RNA, 17 nt, Human
auuuccucagggcugag

SEQ ID NO: 409152 - RNA, 22 nt, Human
cuacauuucccagcugccuucc

SEQ ID NO: 409153 - RNA, 22 nt, Human
uggagauggguuaauggagaga

SEQ ID NO: 409154 - RNA, 22 nt, Human
cagaauuuagcacaauguaugg

SEQ ID NO: 409155 - RNA, 22 nt, Human
caagggcucacggucugcuggg

SEQ ID NO: 409156 - RNA, 22 nt, Human
aagccagguuccauggaggagc

SEQ ID NO: 409157 - RNA, 22 nt, Human
agggguggccugccuuacuccc

SEQ ID NO: 409158 - RNA, 22 nt, Human
cucagugguugagagccugggc

SEQ ID NO: 409159 - RNA, 22 nt, Human
auuuauguaucuguguagauca

SEQ ID NO: 409160 - RNA, 21 nt, Human
gcacagggacagaucaucaca

SEQ ID NO: 409161 - RNA, 22 nt, Human
aauucuagcauugugaaaauau

SEQ ID NO: 409162 - RNA, 22 nt, Human
cucuugaagcaggggccaguuc

SEQ ID NO: 409163 - RNA, 22 nt, Human
caagagcuagacuuugucagga

SEQ ID NO: 409164 - RNA, 22 nt, Human
uggagcagagaugguggccuuc

SEQ ID NO: 409165 - RNA, 22 nt, Human
uagggacacugcucaugaguuc

SEQ ID NO: 409166 - RNA, 22 nt, Human
agaagccaccagcugaggaaga

SEQ ID NO: 409167 - RNA, 22 nt, Human
augggaugaacuugaucugcuu

SEQ ID NO: 409168 - RNA, 22 nt, Human
cuucagaacuauaaaaaguacu

SEQ ID NO: 409169 - RNA, 22 nt, Human
ccaggggcuggugcugagcugg

SEQ ID NO: 409170 - RNA, 22 nt, Human
ugaagggcaaccccaggcccag

SEQ ID NO: 409171 - RNA, 22 nt, Human
ggccagcagucacagggucaga

SEQ ID NO: 409172 - RNA, 22 nt, Human
uggcaggagguuuucuccagga

SEQ ID NO: 409173 - RNA, 22 nt, Human
uggaggcagucaaaugacugac

SEQ ID NO: 409174 - RNA, 22 nt, Human
ucaaagucacaacucucuaauu

SEQ ID NO: 409175 - RNA, 22 nt, Human
ucagagagcagaacuuuuuuac

SEQ ID NO: 409176 - RNA, 18 nt, Human
cuuguucuucucuuggcg

SEQ ID NO: 409177 - RNA, 22 nt, Human
cauggcccucuucuggagcaau

SEQ ID NO: 409178 - RNA, 23 nt, Human
ucuggcucuaugugacagcucuc

SEQ ID NO: 409179 - RNA, 21 nt, Human
gacaaagugaagcaggcagga

SEQ ID NO: 409180 - RNA, 22 nt, Human
gaggcagcggcucacagagaaa

SEQ ID NO: 409181 - RNA, 22 nt, Human
aggcucaggucucaggucuggc

SEQ ID NO: 409182 - RNA, 22 nt, Human
uccuucagggcugaccacaggc

SEQ ID NO: 409183 - RNA, 22 nt, Human
cuggccuagcucucugcuugaa

SEQ ID NO: 409184 - RNA, 22 nt, Human
uccuggauucugcccugaaggc

SEQ ID NO: 409185 - RNA, 18 nt, Human
ucagagagaauaguaauu

SEQ ID NO: 409186 - RNA, 22 nt, Human
ugaggaaguugaucucaucagu

SEQ ID NO: 409187 - RNA, 22 nt, Human
aaggcuuucagcuaacuugauu

SEQ ID NO: 409188 - RNA, 22 nt, Human
cccaggcagagagcuggugagc

SEQ ID NO: 409189 - RNA, 22 nt, Human
uuugcagcaaggagagagcauu

SEQ ID NO: 409190 - RNA, 22 nt, Human
aaacaugcauucaagaaaaucu

SEQ ID NO: 409191 - RNA, 22 nt, Human
ucaggagacuuaugucacagug

SEQ ID NO: 409192 - RNA, 22 nt, Human
ccagcuucucucugaugcagcu

SEQ ID NO: 409193 - RNA, 22 nt, Human
aucaggaugacuauaaggcugc

SEQ ID NO: 409194 - RNA, 19 nt, Human
agacagagacugaaauaga

SEQ ID NO: 409195 - RNA, 22 nt, Human
cugugcccuggccaggccucuc

SEQ ID NO: 409196 - RNA, 22 nt, Human
uuguaaauaguaguaagaugcc

SEQ ID NO: 409197 - RNA, 22 nt, Human
gcccugugcgacucuagagguu

SEQ ID NO: 409198 - RNA, 22 nt, Human
gcugugugacugagagccuggc

SEQ ID NO: 409199 - RNA, 22 nt, Human
auuuaaaugcuuaagaggguuu

SEQ ID NO: 409200 - RNA, 22 nt, Human
cugggccaucagaggggcugga

SEQ ID NO: 409201 - RNA, 22 nt, Human
gaugcacuuucuuuucaacagu

SEQ ID NO: 409202 - RNA, 22 nt, Human
uauugacagagggucagaagag

SEQ ID NO: 409203 - RNA, 22 nt, Human
agugaaauagcauuuaugaagc

SEQ ID NO: 409204 - RNA, 22 nt, Human
ucuaggagcaugaagggaaggc

SEQ ID NO: 409205 - RNA, 22 nt, Human
agacccucuccaugcccacugc

SEQ ID NO: 409206 - RNA, 22 nt, Human
cagagcuguuacuauucaugaa

SEQ ID NO: 409207 - RNA, 23 nt, Human
uggcugagcccacuaucuuggcc

SEQ ID NO: 409208 - RNA, 22 nt, Human
uucaggauggaguaccuuuuau

SEQ ID NO: 409209 - RNA, 22 nt, Human
gaaggcuggaaggcaaguagga

SEQ ID NO: 409210 - RNA, 22 nt, Human
gagagaagaaagccaugguccu

SEQ ID NO: 409211 - RNA, 22 nt, Human
cuccagugcgcaggacagcccc

SEQ ID NO: 409212 - RNA, 22 nt, Human
uguauuagaucugagaacuucu

SEQ ID NO: 409213 - RNA, 22 nt, Human
guucauuuuacuguaaauagca

SEQ ID NO: 409214 - RNA, 22 nt, Human
uauugaggaucuccugcuaauu

SEQ ID NO: 409215 - RNA, 18 nt, Human
gucaccuggaucagauua

SEQ ID NO: 409216 - RNA, 22 nt, Human
ccacugucugcaggccucagca

SEQ ID NO: 409217 - RNA, 22 nt, Human
auuuuacauaaggaagguuuaa

SEQ ID NO: 409218 - RNA, 23 nt, Human
cagaggcaucggauucaacauca

SEQ ID NO: 409219 - RNA, 22 nt, Human
gcucccagcaauugaggcagcc

SEQ ID NO: 409220 - RNA, 19 nt, Human
uggccagguacugucugcu

SEQ ID NO: 409221 - RNA, 22 nt, Human
gcaggcagaucaccugucagga

SEQ ID NO: 409222 - RNA, 22 nt, Human
aagcagcugauuucacagcuca

SEQ ID NO: 409223 - RNA, 20 nt, Human
ugaggcucagagagguugag

SEQ ID NO: 409224 - RNA, 22 nt, Human
cuugcaggcagggccuccugga

SEQ ID NO: 409225 - RNA, 21 nt, Human
aaacugaccuugccugagaca

SEQ ID NO: 409226 - RNA, 22 nt, Human
ccaaaugcuccacugacuuugg

SEQ ID NO: 409227 - RNA, 22 nt, Human
uggcucaguuucugcccagcug

SEQ ID NO: 409228 - RNA, 22 nt, Human
ccagagcuccagggcuacagaa

SEQ ID NO: 409229 - RNA, 22 nt, Human
aaggcagccgugugacugcaug

SEQ ID NO: 409230 - RNA, 22 nt, Human
gagggaccuuuacacagacauu

SEQ ID NO: 409231 - RNA, 22 nt, Human
ccuggccugugaaucugagagc

SEQ ID NO: 409232 - RNA, 22 nt, Human
gagagugaaggcuucccagcaa

SEQ ID NO: 409233 - RNA, 22 nt, Human
agucaaagcuacaggcauuuga

SEQ ID NO: 409234 - RNA, 22 nt, Human
aucaguuugauaauaaggcuug

SEQ ID NO: 409235 - RNA, 22 nt, Human
uccagaccuagggcaccccagu

SEQ ID NO: 409236 - RNA, 21 nt, Human
aagccucaagcagaagacaga

SEQ ID NO: 409237 - RNA, 22 nt, Human
augaaggauggcuggcugcccu

SEQ ID NO: 409238 - RNA, 22 nt, Human
caaagguauaaguuaauauaca

SEQ ID NO: 409239 - RNA, 22 nt, Human
caggagccagcugucccaacca

SEQ ID NO: 409240 - RNA, 22 nt, Human
cagagccaggccugcccucuuu

SEQ ID NO: 409241 - RNA, 22 nt, Human
uuuauuaugauggacaccuucg

SEQ ID NO: 409242 - RNA, 18 nt, Human
acauuucuaugcuucugg

SEQ ID NO: 409243 - RNA, 19 nt, Human
aggacucuggaggcaugag

SEQ ID NO: 409244 - RNA, 22 nt, Human
uuugagguuagcuagcagauca

SEQ ID NO: 409245 - RNA, 22 nt, Human
uaaagguaugucuuaaucaaac

SEQ ID NO: 409246 - RNA, 22 nt, Human
uccucugcuguucugguucuuu

SEQ ID NO: 409247 - RNA, 22 nt, Human
aaaaccaggcguuuccuauuau

SEQ ID NO: 409248 - RNA, 22 nt, Human
ggaaagccaggugcucuggugu

SEQ ID NO: 409249 - RNA, 22 nt, Human
gggcucugguacuuccuggcuc

SEQ ID NO: 409250 - RNA, 22 nt, Human
uugcauugggagugaggagacc

SEQ ID NO: 409251 - RNA, 21 nt, Human
guuuucaugauagagucugua

SEQ ID NO: 409252 - RNA, 22 nt, Human
cauuuguaucugggcugcugug

SEQ ID NO: 409253 - RNA, 22 nt, Human
cagugcauaaucuaaauggggg

SEQ ID NO: 409254 - RNA, 21 nt, Human
ccaggguccagcugccauggu

SEQ ID NO: 409255 - RNA, 22 nt, Human
uacacacaugcauuugccuuau

SEQ ID NO: 409256 - RNA, 20 nt, Human
aucuggcucagauccugcag

SEQ ID NO: 409257 - RNA, 22 nt, Human
aggcagcauccagaggagaaug

SEQ ID NO: 409258 - RNA, 22 nt, Human
auggagacgcaagggaccuagg

SEQ ID NO: 409259 - RNA, 22 nt, Human
ugaagcagagugaaggugaauu

SEQ ID NO: 409260 - RNA, 22 nt, Human
gccauccucugagcacuaggca

SEQ ID NO: 409261 - RNA, 22 nt, Human
guguaaggccccagguucuuua

SEQ ID NO: 409262 - RNA, 22 nt, Human
uuggcuucuggcagucuggacg

SEQ ID NO: 409263 - RNA, 22 nt, Human
uccucaggagagcuccuaugcc

SEQ ID NO: 409264 - RNA, 22 nt, Human
ugaagccaucaggaagccagca

SEQ ID NO: 409265 - RNA, 22 nt, Human
agccuccuggaguuucugggau

SEQ ID NO: 409266 - RNA, 22 nt, Human
uggcagcuccuggggccagcac

SEQ ID NO: 409267 - RNA, 22 nt, Human
ggcuuucuagaucuagcucugu

SEQ ID NO: 409268 - RNA, 22 nt, Human
accugccucuaagcagcaggug

SEQ ID NO: 409269 - RNA, 22 nt, Human
ccagguggacggcgaguacagg

SEQ ID NO: 409270 - RNA, 22 nt, Human
gaaagguugggugaauggugga

SEQ ID NO: 409271 - RNA, 22 nt, Human
gcugucuguucgagcguguguu

SEQ ID NO: 409272 - RNA, 21 nt, Human
ggcagcccgcccucuccuggc

SEQ ID NO: 409273 - RNA, 17 nt, Human
aguggcaggcagauggg

SEQ ID NO: 409274 - RNA, 22 nt, Human
aaaaaugucauuauggaacuga

SEQ ID NO: 409275 - RNA, 22 nt, Human
cgggcuccgggucuuugcaguc

SEQ ID NO: 409276 - RNA, 22 nt, Human
cuuagaaaucgaacucagguua

SEQ ID NO: 409277 - RNA, 22 nt, Human
gcagggacaucuuugucuagua

SEQ ID NO: 409278 - RNA, 22 nt, Human
acagagauguggaugagggauu

SEQ ID NO: 409279 - RNA, 20 nt, Human
ggcacuggaagcacacagga

SEQ ID NO: 409280 - RNA, 22 nt, Human
gucagugucuuaacagagauua

SEQ ID NO: 409281 - RNA, 22 nt, Human
agugcugacucugggcacagug

SEQ ID NO: 409282 - RNA, 17 nt, Human
ucuguccagggagugug

SEQ ID NO: 409283 - RNA, 22 nt, Human
ugcagcaggcacaggacggaag

SEQ ID NO: 409284 - RNA, 22 nt, Human
gcucaaggcaggcagacaugag

SEQ ID NO: 409285 - RNA, 23 nt, Human
ggggaaguggcagugagugaggc

SEQ ID NO: 409286 - RNA, 22 nt, Human
aggugaguugguaggaaguuug

SEQ ID NO: 409287 - RNA, 22 nt, Human
uaaagccacuucauucuagucu

SEQ ID NO: 409288 - RNA, 22 nt, Human
agcuuuauagaaaggaucagug

SEQ ID NO: 409289 - RNA, 22 nt, Human
ugcccugcagugagugcgucug

SEQ ID NO: 409290 - RNA, 22 nt, Human
ugucaccaguuccaggaaauaa

SEQ ID NO: 409291 - RNA, 22 nt, Human
uccugcagagacagaggccuca

SEQ ID NO: 409292 - RNA, 22 nt, Human
aaggccugggaguacugggaca

SEQ ID NO: 409293 - RNA, 19 nt, Human
ucaguggagaaaggggaag

SEQ ID NO: 409294 - RNA, 22 nt, Human
uggcucagugacauuccuccca

SEQ ID NO: 409295 - RNA, 22 nt, Human
agugauggagcuuccucugcua

SEQ ID NO: 409296 - RNA, 20 nt, Human
uggaccugucucuuuaggga

SEQ ID NO: 409297 - RNA, 22 nt, Human
ucagagcuuaucucuugcugga

SEQ ID NO: 409298 - RNA, 20 nt, Human
uguuucuuuuaaugagcggc

SEQ ID NO: 409299 - RNA, 22 nt, Human
gcccuuccaacccagagggcaa

SEQ ID NO: 409300 - RNA, 21 nt, Human
uagagaaaagaagcuguuccu

SEQ ID NO: 409301 - RNA, 22 nt, Human
cuguccucuguccucagcagga

SEQ ID NO: 409302 - RNA, 19 nt, Human
aggucauugauagugcagg

SEQ ID NO: 409303 - RNA, 22 nt, Human
uaaugugugucaucaguagagu

SEQ ID NO: 409304 - RNA, 22 nt, Human
ggcccaucucuugcucuggguu

SEQ ID NO: 409305 - RNA, 22 nt, Human
aggcagguuucccggcugucaa

SEQ ID NO: 409306 - RNA, 22 nt, Human
uugaaagugccaaguccuagug

SEQ ID NO: 409307 - RNA, 22 nt, Human
gagauuggccuggcuugccaac

SEQ ID NO: 409308 - RNA, 22 nt, Human
uggccugccugggagcagcagg

SEQ ID NO: 409309 - RNA, 22 nt, Human
ggaccugccagaacucaggcua

SEQ ID NO: 409310 - RNA, 22 nt, Human
cugagcucuaaugucagccuug

SEQ ID NO: 409311 - RNA, 22 nt, Human
uaaggaaagugccaugauuucu

SEQ ID NO: 409312 - RNA, 22 nt, Human
ugcagggccagacuggguugga

SEQ ID NO: 409313 - RNA, 22 nt, Human
ugggggucaggaugaggccuug

SEQ ID NO: 409314 - RNA, 22 nt, Human
cagcacugcugcuguacacaca

SEQ ID NO: 409315 - RNA, 21 nt, Human
uaaagaagaugaaugugauca

SEQ ID NO: 409316 - RNA, 22 nt, Human
ucauugcagaaauaaaggugaa

SEQ ID NO: 409317 - RNA, 22 nt, Human
ucuauaaauuaugcagucucag

SEQ ID NO: 409318 - RNA, 22 nt, Human
gaagcagcaaaucugcaguauc

SEQ ID NO: 409319 - RNA, 22 nt, Human
cuacauuaaauuggcuuacuua

SEQ ID NO: 409320 - RNA, 18 nt, Human
cucucuggucuggauccc

SEQ ID NO: 409321 - RNA, 22 nt, Human
cagggagaggcaucauagggaa

SEQ ID NO: 409322 - RNA, 22 nt, Human
augcacagacccaaaggccauc

SEQ ID NO: 409323 - RNA, 22 nt, Human
gugauugcccagcaccauuguu

SEQ ID NO: 409324 - RNA, 22 nt, Human
aaaugcacaaaguaaguguaau

SEQ ID NO: 409325 - RNA, 22 nt, Human
cagggcuggauccuccagacuc

SEQ ID NO: 409326 - RNA, 22 nt, Human
gcuguucucuguaacaugcauu

SEQ ID NO: 409327 - RNA, 22 nt, Human
ccugucugcggaggaguggaag

SEQ ID NO: 409328 - RNA, 22 nt, Human
ccugccugaaggucagccaccc

SEQ ID NO: 409329 - RNA, 20 nt, Human
ucagugauuaucucugagug

SEQ ID NO: 409330 - RNA, 22 nt, Human
gauuuauugucccuguccugcu

SEQ ID NO: 409331 - RNA, 22 nt, Human
acaaaguuauucuuucagagga

SEQ ID NO: 409332 - RNA, 22 nt, Human
ggccugccucacagucagcacc

SEQ ID NO: 409333 - RNA, 22 nt, Human
acguuuucuagagaauaugcag

SEQ ID NO: 409334 - RNA, 22 nt, Human
aggggagaguuaaugugaaugu

SEQ ID NO: 409335 - RNA, 22 nt, Human
cccagggaagggcuaccugagg

SEQ ID NO: 409336 - RNA, 20 nt, Human
aggagaugauccagagucag

SEQ ID NO: 409337 - RNA, 22 nt, Human
uggcugccuuucaccucaucuc

SEQ ID NO: 409338 - RNA, 22 nt, Human
ucagaggguggcugggagcauc

SEQ ID NO: 409339 - RNA, 22 nt, Human
ucacaugcucaccuaagccaca

SEQ ID NO: 409340 - RNA, 22 nt, Human
uagggcucagaguccaguuucu

SEQ ID NO: 409341 - RNA, 22 nt, Human
gcucugcugaagccccuugcau

SEQ ID NO: 409342 - RNA, 22 nt, Human
guguccuuuuaugugacugguu

SEQ ID NO: 409343 - RNA, 21 nt, Human
uauuugcugccaucuuugagg

SEQ ID NO: 409344 - RNA, 22 nt, Human
acagguggagugguuagcaggc

SEQ ID NO: 409345 - RNA, 22 nt, Human
gccugagaaggacacagcaggu

SEQ ID NO: 409346 - RNA, 22 nt, Human
agagccaggacugugucucacu

SEQ ID NO: 409347 - RNA, 22 nt, Human
aggcugaggcgggaggaucacu

SEQ ID NO: 409348 - RNA, 22 nt, Human
auuguggcuagacagucacaau

SEQ ID NO: 409349 - RNA, 22 nt, Human
ccuggcuccugccucugcaggg

SEQ ID NO: 409350 - RNA, 22 nt, Human
gggcagguggcaaagccagagg

SEQ ID NO: 409351 - RNA, 22 nt, Human
ccagaggaggggggucuuucug

SEQ ID NO: 409352 - RNA, 22 nt, Human
uacacacagaggccaugggauu

SEQ ID NO: 409353 - RNA, 22 nt, Human
ugcugucugauucagggugauu

SEQ ID NO: 409354 - RNA, 22 nt, Human
aggccagggucccacacucgca

SEQ ID NO: 409355 - RNA, 23 nt, Human
cauggcagcaagagcucauggcc

SEQ ID NO: 409356 - RNA, 22 nt, Human
agggcuccaggggaccaucagu

SEQ ID NO: 409357 - RNA, 22 nt, Human
ccagagccucuuaugaagaucg

SEQ ID NO: 409358 - RNA, 22 nt, Human
uugcaaaagccgaggcacucca

SEQ ID NO: 409359 - RNA, 22 nt, Human
auccacccugugguggcuuucu

SEQ ID NO: 409360 - RNA, 22 nt, Human
gaacccaguccaggugcagccu

SEQ ID NO: 409361 - RNA, 22 nt, Human
gcuuuguguagaaggaggaugg

SEQ ID NO: 409362 - RNA, 19 nt, Human
uccuuugaauaucaguuga

SEQ ID NO: 409363 - RNA, 22 nt, Human
ugugcccaucccucuggagugu

SEQ ID NO: 409364 - RNA, 22 nt, Human
uggcagcaauuugugauguuga

SEQ ID NO: 409365 - RNA, 22 nt, Human
uaaguucagaguucucauuugu

SEQ ID NO: 409366 - RNA, 22 nt, Human
ggcuggaaguccaagaucaagg

SEQ ID NO: 409367 - RNA, 22 nt, Human
gacccagcuaaccaggugggga

SEQ ID NO: 409368 - RNA, 22 nt, Human
uccaggagguuuggaggaagca

SEQ ID NO: 409369 - RNA, 21 nt, Human
gcaaggcuuuuguguuuccca

SEQ ID NO: 409370 - RNA, 22 nt, Human
acagauuuuauuauucagguau

SEQ ID NO: 409371 - RNA, 22 nt, Human
gagugucugaauuagagcacaa

SEQ ID NO: 409372 - RNA, 20 nt, Human
augccucuaauuuugcaaac

SEQ ID NO: 409373 - RNA, 22 nt, Human
ugcagggcccucauuccugucc

SEQ ID NO: 409374 - RNA, 22 nt, Human
agaagccauguuuaguaggaug

SEQ ID NO: 409375 - RNA, 22 nt, Human
gauuucaaagguucugcaugcc

SEQ ID NO: 409376 - RNA, 22 nt, Human
uucauuccuucccuaagcaacu

SEQ ID NO: 409377 - RNA, 22 nt, Human
cugagagguaagcagcgcagug

SEQ ID NO: 409378 - RNA, 22 nt, Human
uugcugaaguuaaugcuugcaa

SEQ ID NO: 409379 - RNA, 22 nt, Human
caggauccuggcugcauggacg

SEQ ID NO: 409380 - RNA, 21 nt, Human
ucagaguguguuacagcaagc

SEQ ID NO: 409381 - RNA, 20 nt, Human
uugauaggcagcuugucagg

SEQ ID NO: 409382 - RNA, 22 nt, Human
uucugugcccauuuuaaaaugg

SEQ ID NO: 409383 - RNA, 22 nt, Human
ccagccaggcuggcuguggagg

SEQ ID NO: 409384 - RNA, 22 nt, Human
ccagggucucugcugccugaga

SEQ ID NO: 409385 - RNA, 22 nt, Human
cugggcugcaucaaagaggcau

SEQ ID NO: 409386 - RNA, 22 nt, Human
guguguccucaguaguggcaug

SEQ ID NO: 409387 - RNA, 22 nt, Human
augcaguggcagcuccuggugu

SEQ ID NO: 409388 - RNA, 22 nt, Human
uggaagcagugauucuugucug

SEQ ID NO: 409389 - RNA, 22 nt, Human
gaguccaguuagugaggcuggg

SEQ ID NO: 409390 - RNA, 22 nt, Human
cuggagccuucaccaggggaaa

SEQ ID NO: 409391 - RNA, 23 nt, Human
cuacaagagcaagcauggacaag

SEQ ID NO: 409392 - RNA, 22 nt, Human
ucccagagcccaaguuggagag

SEQ ID NO: 409393 - RNA, 22 nt, Human
uccuugaagcuuguaucuaaua

SEQ ID NO: 409394 - RNA, 22 nt, Human
gugggcuucuguuagggaggcu

SEQ ID NO: 409395 - RNA, 22 nt, Human
uuugcaaauauguguuucuauu

SEQ ID NO: 409396 - RNA, 22 nt, Human
aaaagguagauucuccuucuau

SEQ ID NO: 409397 - RNA, 22 nt, Human
guaggcagucucucaggugauc

SEQ ID NO: 409398 - RNA, 22 nt, Human
ccucuggggugagugggccacu

SEQ ID NO: 409399 - RNA, 22 nt, Human
caguguccucagccagcagcua

SEQ ID NO: 409400 - RNA, 22 nt, Human
cagaaauggagcccaggaaucu

SEQ ID NO: 409401 - RNA, 22 nt, Human
ggcagccauggacacuggcuag

SEQ ID NO: 409402 - RNA, 22 nt, Human
aucucagggcuggagcccugga

SEQ ID NO: 409403 - RNA, 22 nt, Human
uuaugcaacaggugagcagaca

SEQ ID NO: 409404 - RNA, 22 nt, Human
cucacugcccugaaguuggguu

SEQ ID NO: 409405 - RNA, 22 nt, Human
ugcagggaaagggcacugggcu

SEQ ID NO: 409406 - RNA, 22 nt, Human
agccugguuuaagcauuuuaua

SEQ ID NO: 409407 - RNA, 22 nt, Human
ccaggagcaccaggccugugcc

SEQ ID NO: 409408 - RNA, 18 nt, Human
uccagagguguuggagcc

SEQ ID NO: 409409 - RNA, 22 nt, Human
agccuggauccuaggcucagcu

SEQ ID NO: 409410 - RNA, 22 nt, Human
uggcugagaccaucagggugua

SEQ ID NO: 409411 - RNA, 22 nt, Human
gggcaggaugcaguuucagaga

SEQ ID NO: 409412 - RNA, 17 nt, Human
ugaagaugcauggcagc

SEQ ID NO: 409413 - RNA, 18 nt, Human
gguggccuugacuucucu

SEQ ID NO: 409414 - RNA, 22 nt, Human
ugguggccaauucacagggcuc

SEQ ID NO: 409415 - RNA, 22 nt, Human
ggagcuguucaggacugcuuca

SEQ ID NO: 409416 - RNA, 22 nt, Human
acagcuugcaauggcuuucaac

SEQ ID NO: 409417 - RNA, 22 nt, Human
cagcugagaccagaaugcaggu

SEQ ID NO: 409418 - RNA, 22 nt, Human
ccaagggcucugacuugccugc

SEQ ID NO: 409419 - RNA, 22 nt, Human
gaucauuuugaugcccuuuuag

SEQ ID NO: 409420 - RNA, 17 nt, Human
cuggagccaagagggcc

SEQ ID NO: 409421 - RNA, 22 nt, Human
ucaggggcccuucccucagcag

SEQ ID NO: 409422 - RNA, 22 nt, Human
aaugcugcaagaggugaaaaga

SEQ ID NO: 409423 - RNA, 22 nt, Human
caaagucccagcugcuuagaga

SEQ ID NO: 409424 - RNA, 22 nt, Human
gucacaggccuggaugaggggc

SEQ ID NO: 409425 - RNA, 22 nt, Human
uuagaaaggagcuuauuucuuu

SEQ ID NO: 409426 - RNA, 19 nt, Human
acuuucuccaggaccuguu

SEQ ID NO: 409427 - RNA, 22 nt, Human
aagagcuggauggaaucuggga

SEQ ID NO: 409428 - RNA, 22 nt, Human
ggucccaggcugcgggcuggug

SEQ ID NO: 409429 - RNA, 22 nt, Human
uuuagggaagaagcccauggcc

SEQ ID NO: 409430 - RNA, 22 nt, Human
acauuucucauaggagagccac

SEQ ID NO: 409431 - RNA, 22 nt, Human
gccagucugcucccacaaguuc

SEQ ID NO: 409432 - RNA, 22 nt, Human
gaagaacaagcagugcuuuccu

SEQ ID NO: 409433 - RNA, 22 nt, Human
cagcugcaugucuguggugguc

SEQ ID NO: 409434 - RNA, 22 nt, Human
gcagcuggcucagagagguggg

SEQ ID NO: 409435 - RNA, 22 nt, Human
ugaguccaauaggggccuggaa

SEQ ID NO: 409436 - RNA, 22 nt, Human
ggagauagacuuggugagccac

SEQ ID NO: 409437 - RNA, 22 nt, Human
cagcugaacauguagagcaucu

SEQ ID NO: 409438 - RNA, 22 nt, Human
uggagaagauuggucaccauuc

SEQ ID NO: 409439 - RNA, 22 nt, Human
uuauguacucugcaauguuuga

SEQ ID NO: 409440 - RNA, 22 nt, Human
ccuggcaguuuugcccaggauu

SEQ ID NO: 409441 - RNA, 22 nt, Human
ugggcugcccaagguggccaug

SEQ ID NO: 409442 - RNA, 23 nt, Human
gaggccacauuccccugcuugag

SEQ ID NO: 409443 - RNA, 22 nt, Human
ggguggaguagaaagaugaauu

SEQ ID NO: 409444 - RNA, 22 nt, Human
uccaggcaucuguauuuuuuaa

SEQ ID NO: 409445 - RNA, 22 nt, Human
aaugagcuagaccugcuuccuc

SEQ ID NO: 409446 - RNA, 22 nt, Human
agugaaaacacuaguucuugcc

SEQ ID NO: 409447 - RNA, 22 nt, Human
uggcucaggcuugaaaauagau

SEQ ID NO: 409448 - RNA, 22 nt, Human
aggugucugggcuuuggaguca

SEQ ID NO: 409449 - RNA, 22 nt, Human
ccuguacacaauuccgaggaua

SEQ ID NO: 409450 - RNA, 22 nt, Human
ugggguggauagaaagugaugu

SEQ ID NO: 409451 - RNA, 22 nt, Human
gagccugggacugggggucaug

SEQ ID NO: 409452 - RNA, 22 nt, Human
aggggcugccuggcuuggcacu

SEQ ID NO: 409453 - RNA, 22 nt, Human
gacuacucaaacuuucucuaua

SEQ ID NO: 409454 - RNA, 23 nt, Human
ucuguacacaucagcaucuccca

SEQ ID NO: 409455 - RNA, 22 nt, Human
ucgugucagaucagagguuccu

SEQ ID NO: 409456 - RNA, 22 nt, Human
gcuggagccuucugcucuguug

SEQ ID NO: 409457 - RNA, 22 nt, Human
gagggcaggggucuugcacggu

SEQ ID NO: 409458 - RNA, 22 nt, Human
gugcugcagagucucgugccgc

SEQ ID NO: 409459 - RNA, 22 nt, Human
uugaagagugccuuccagacau

SEQ ID NO: 409460 - RNA, 21 nt, Human
uuugaaagcuacaucuauagc

SEQ ID NO: 409461 - RNA, 22 nt, Human
acaggggcuccgaaggugaggg

SEQ ID NO: 409462 - RNA, 21 nt, Human
ucuggagcccuaagcugagaa

SEQ ID NO: 409463 - RNA, 19 nt, Human
uugcauuguaguuggacug

SEQ ID NO: 409464 - RNA, 22 nt, Human
aucgagggugaguacagcggac

SEQ ID NO: 409465 - RNA, 22 nt, Human
ugcauuguuugauaggugaauu

SEQ ID NO: 409466 - RNA, 22 nt, Human
agucugucuaauauuauucagg

SEQ ID NO: 409467 - RNA, 22 nt, Human
ugcugccagggcucugcccaca

SEQ ID NO: 409468 - RNA, 22 nt, Human
aaaaucugguaauuugaaugug

SEQ ID NO: 409469 - RNA, 22 nt, Human
cccaggcugaguuagagguguc

SEQ ID NO: 409470 - RNA, 22 nt, Human
cccagggcuuuucucacuagac

SEQ ID NO: 409471 - RNA, 22 nt, Human
ccagcugucugguuccagagcc

SEQ ID NO: 409472 - RNA, 22 nt, Human
ggcccagccggcgagucucgcg

SEQ ID NO: 409473 - RNA, 22 nt, Human
ucuccccaaaggacucacucuc

SEQ ID NO: 409474 - RNA, 22 nt, Human
ccagggcaaaugagaucauagc

SEQ ID NO: 409475 - RNA, 22 nt, Human
uccauuggucucugugcccagg

SEQ ID NO: 409476 - RNA, 22 nt, Human
ucagggcauccauugccuguug

SEQ ID NO: 409477 - RNA, 22 nt, Human
ucuccuccuuuuuucaacauag

SEQ ID NO: 409478 - RNA, 21 nt, Human
uuucaauguguucuuuguagu

SEQ ID NO: 409479 - RNA, 22 nt, Human
cuagggcacuaggacucaugug

SEQ ID NO: 409480 - RNA, 22 nt, Human
gcugucugcaagccaggaaaug

SEQ ID NO: 409481 - RNA, 22 nt, Human
aaaugcacaauaaaguaaaggc

SEQ ID NO: 409482 - RNA, 22 nt, Human
cucugagcagaggccguggcua

SEQ ID NO: 409483 - RNA, 22 nt, Human
agcagcuggggccugugacgau

SEQ ID NO: 409484 - RNA, 22 nt, Human
ggguccagcuacaucagggugg

SEQ ID NO: 409485 - RNA, 18 nt, Human
ucaagacaucaugaaaua

SEQ ID NO: 409486 - RNA, 22 nt, Human
uggcucaggagggaucuuugcu

SEQ ID NO: 409487 - RNA, 20 nt, Human
cccagagccauagccagaca

SEQ ID NO: 409488 - RNA, 22 nt, Human
uguggccuccccacuucugggg

SEQ ID NO: 409489 - RNA, 22 nt, Human
acuuagaacaggcagaauucca

SEQ ID NO: 409490 - RNA, 18 nt, Human
gguggcaggucagaugcc

SEQ ID NO: 409491 - RNA, 22 nt, Human
uaaauguguguagccaucugug

SEQ ID NO: 409492 - RNA, 18 nt, Human
gagguccugcucuagccc

SEQ ID NO: 409493 - RNA, 22 nt, Human
caguguuucugaguuccagcuc

SEQ ID NO: 409494 - RNA, 22 nt, Human
ucugccuucgcugcucccugaa

SEQ ID NO: 409495 - RNA, 22 nt, Human
ugucccaguuuugcagguuaga

SEQ ID NO: 409496 - RNA, 22 nt, Human
gggagagagagcucauguugaa

SEQ ID NO: 409497 - RNA, 22 nt, Human
acaugauuuuuaaagagauaau

SEQ ID NO: 409498 - RNA, 22 nt, Human
gaaacaaucaucaugugauuug

SEQ ID NO: 409499 - RNA, 22 nt, Human
aagaaauuaaugugccauuacu

SEQ ID NO: 409500 - RNA, 22 nt, Human
gcaucuuucuguccauucagca

SEQ ID NO: 409501 - RNA, 22 nt, Human
aggaagccuggcauuaaaaagc

SEQ ID NO: 409502 - RNA, 22 nt, Human
ucagccacuacccaccuuaaca

SEQ ID NO: 409503 - RNA, 22 nt, Human
ucuccuuugaaaguuaggacug

SEQ ID NO: 409504 - RNA, 22 nt, Human
cagagguaccagcagccucugg

SEQ ID NO: 409505 - RNA, 22 nt, Human
uuccgcuggggccgccuggcgg

SEQ ID NO: 409506 - RNA, 20 nt, Human
ugaagcagccuugauucugu

SEQ ID NO: 409507 - RNA, 22 nt, Human
aaaaaugaauucuucaguggca

SEQ ID NO: 409508 - RNA, 22 nt, Human
acaaagucugaaaccugaggca

SEQ ID NO: 409509 - RNA, 22 nt, Human
uuuuauuaguggcuagaugggg

SEQ ID NO: 409510 - RNA, 22 nt, Human
cugagcugguucucuugugaaa

SEQ ID NO: 409511 - RNA, 21 nt, Human
cucuggagucaagagcuucca

SEQ ID NO: 409512 - RNA, 17 nt, Human
ggugagaccucccacuc

SEQ ID NO: 409513 - RNA, 20 nt, Human
ccagacagcaccugccuggu

SEQ ID NO: 409514 - RNA, 21 nt, Human
cauugucgacauuuuccccuc

SEQ ID NO: 409515 - RNA, 22 nt, Human
aucaggaaauacuuauuuauaa

SEQ ID NO: 409516 - RNA, 22 nt, Human
ggacuggccggcgcugaggccc

SEQ ID NO: 409517 - RNA, 22 nt, Human
agcugcaguaaagcucuccagg

SEQ ID NO: 409518 - RNA, 22 nt, Human
ggaagggcaaaagagaugaacu

SEQ ID NO: 409519 - RNA, 22 nt, Human
uggaggcaucagagugcuuggc

SEQ ID NO: 409520 - RNA, 22 nt, Human
uaaggcauucucaugcugugaa

SEQ ID NO: 409521 - RNA, 22 nt, Human
ugaaggcccuaucuccauauac

SEQ ID NO: 409522 - RNA, 22 nt, Human
ggcuggagauaugucuggaaca

SEQ ID NO: 409523 - RNA, 21 nt, Human
gaaaggucuuaacuuacagag

SEQ ID NO: 409524 - RNA, 22 nt, Human
gccugcagggugaugggcugcc

SEQ ID NO: 409525 - RNA, 22 nt, Human
augaggcaguacacacaaagcc

SEQ ID NO: 409526 - RNA, 20 nt, Human
ccagcauguacacaugugga

SEQ ID NO: 409527 - RNA, 22 nt, Human
caaaggcugccacuguggcugu

SEQ ID NO: 409528 - RNA, 22 nt, Human
gggaguggauuauguggaccca

SEQ ID NO: 409529 - RNA, 22 nt, Human
aagacuuucucccaaauccuca

SEQ ID NO: 409530 - RNA, 22 nt, Human
ccauuaaaauggaauguaguga

SEQ ID NO: 409531 - RNA, 22 nt, Human
uaaggccaaggggccauagucu

SEQ ID NO: 409532 - RNA, 22 nt, Human
uguauuuaagcuuuaccuaaaa

SEQ ID NO: 409533 - RNA, 22 nt, Human
ggcagaguggagugcggccucc

SEQ ID NO: 409534 - RNA, 22 nt, Human
gccaugccugugucuccaggcc

SEQ ID NO: 409535 - RNA, 19 nt, Human
ucugaggguccagaugcau

SEQ ID NO: 409536 - RNA, 23 nt, Human
cacaccaggagccgucugggcca

SEQ ID NO: 409537 - RNA, 22 nt, Human
gagguuagaggucagugcaguc

SEQ ID NO: 409538 - RNA, 19 nt, Human
aggcagcacccaguccuug

SEQ ID NO: 409539 - RNA, 20 nt, Human
ucacaucuggcagcugauga

SEQ ID NO: 409540 - RNA, 22 nt, Human
ucucccacagccgugcuucaag

SEQ ID NO: 409541 - RNA, 22 nt, Human
acacaggggaaaguggagcuga

SEQ ID NO: 409542 - RNA, 22 nt, Human
acauuucuuuucaucucuauau

SEQ ID NO: 409543 - RNA, 22 nt, Human
acugaaaaugaauuagaaacag

SEQ ID NO: 409544 - RNA, 22 nt, Human
uccuggaguauuucuguggugu

SEQ ID NO: 409545 - RNA, 22 nt, Human
uauguacauaacaugaaaugca

SEQ ID NO: 409546 - RNA, 22 nt, Human
uuaaacagguuuuugaauggcc

SEQ ID NO: 409547 - RNA, 22 nt, Human
ugucccauggacacaacuucuu

SEQ ID NO: 409548 - RNA, 22 nt, Human
gguucaguuuacauuaaaaucu

SEQ ID NO: 409549 - RNA, 21 nt, Human
cuugaaagguagagucuacag

SEQ ID NO: 409550 - RNA, 22 nt, Human
gucaggaugacaagugcuuuca

SEQ ID NO: 409551 - RNA, 22 nt, Human
ggagaagggacagacucagcuu

SEQ ID NO: 409552 - RNA, 22 nt, Human
aaaugguaagacaacacauuau

SEQ ID NO: 409553 - RNA, 22 nt, Human
gcagaggaucaggcucuggaaa

SEQ ID NO: 409554 - RNA, 22 nt, Human
guggccugaugccagcccugug

SEQ ID NO: 409555 - RNA, 22 nt, Human
ccucccacuucuugcugagguc

SEQ ID NO: 409556 - RNA, 22 nt, Human
ucaguguagcagacuuguagcc

SEQ ID NO: 409557 - RNA, 22 nt, Human
gugcaggguagcgacggcagga

SEQ ID NO: 409558 - RNA, 22 nt, Human
uaacagaaauaguaggugaggg

SEQ ID NO: 409559 - RNA, 22 nt, Human
gaaaauguuagcuucauaguca

SEQ ID NO: 409560 - RNA, 22 nt, Human
agggcgaggagacggaggcaca

SEQ ID NO: 409561 - RNA, 22 nt, Human
agccaggccuuuucucaagguu

SEQ ID NO: 409562 - RNA, 22 nt, Human
caugggcaguuggcagggcuca

SEQ ID NO: 409563 - RNA, 22 nt, Human
auaugcauuuaccuggcauaua

SEQ ID NO: 409564 - RNA, 22 nt, Human
uuuuccuaguaggccuauuaga

SEQ ID NO: 409565 - RNA, 22 nt, Human
cugugagcuggguggccaggac

SEQ ID NO: 409566 - RNA, 22 nt, Human
gaggccagaaugagcugaaugc

SEQ ID NO: 409567 - RNA, 20 nt, Human
uaacagaaguagaagugggu

SEQ ID NO: 409568 - RNA, 22 nt, Human
agggccugcucuaucacucuca

SEQ ID NO: 409569 - RNA, 22 nt, Human
ucugggcuugguuagggcuguu

SEQ ID NO: 409570 - RNA, 22 nt, Human
acacaugcauaagccuucccuu

SEQ ID NO: 409571 - RNA, 22 nt, Human
uuugaguugcuuauuuaauagg

SEQ ID NO: 409572 - RNA, 22 nt, Human
gcaggggaguggcaggcccgga

SEQ ID NO: 409573 - RNA, 22 nt, Human
gggcucagacaucccuccugga

SEQ ID NO: 409574 - RNA, 22 nt, Human
uggcugcuagccagagcuucag

SEQ ID NO: 409575 - RNA, 22 nt, Human
caggauggucuucauuuggcuc

SEQ ID NO: 409576 - RNA, 22 nt, Human
agaaaucaugacuaagagcagu

SEQ ID NO: 409577 - RNA, 22 nt, Human
gcaggugggggucggugcaucu

SEQ ID NO: 409578 - RNA, 22 nt, Human
gugauuucaaauauagagugag

SEQ ID NO: 409579 - RNA, 22 nt, Human
agcugcugcgccucacccuggc

SEQ ID NO: 409580 - RNA, 22 nt, Human
ucucagagaaaugugucaccau

SEQ ID NO: 409581 - RNA, 22 nt, Human
uuccucaguuagugccugaggc

SEQ ID NO: 409582 - RNA, 22 nt, Human
aagaacauuuuguagaaugaca

SEQ ID NO: 409583 - RNA, 22 nt, Human
acacaaacagucuauagcacca

SEQ ID NO: 409584 - RNA, 22 nt, Human
aguuuuaugcaguguucugaua

SEQ ID NO: 409585 - RNA, 22 nt, Human
aaguucaagaucaagguuccag

SEQ ID NO: 409586 - RNA, 22 nt, Human
uggccuggccacauccagcagg

SEQ ID NO: 409587 - RNA, 22 nt, Human
aauuaacagagggcuuauuacu

SEQ ID NO: 409588 - RNA, 22 nt, Human
gcaccaggcuuagagccccagg

SEQ ID NO: 409589 - RNA, 22 nt, Human
ccagcucugcagggccuggggu

SEQ ID NO: 409590 - RNA, 21 nt, Human
aucucacagcccagagaagcc

SEQ ID NO: 409591 - RNA, 22 nt, Human
guuuuccuucucagccauugcc

SEQ ID NO: 409592 - RNA, 22 nt, Human
agaauaguggcaaugacugcac

SEQ ID NO: 409593 - RNA, 22 nt, Human
gcugccuguccugaggaguccg

SEQ ID NO: 409594 - RNA, 22 nt, Human
aagacuguacauuuuccagucu

SEQ ID NO: 409595 - RNA, 22 nt, Human
ugguaauuaauuugauagguuc

SEQ ID NO: 409596 - RNA, 22 nt, Human
uggcucaggaucuaagcagaau

SEQ ID NO: 409597 - RNA, 22 nt, Human
cugaggcucaagggcagguggg

SEQ ID NO: 409598 - RNA, 22 nt, Human
aggagucauaaaugugaacaaa

SEQ ID NO: 409599 - RNA, 22 nt, Human
auauuucaugggguuccauacu

SEQ ID NO: 409600 - RNA, 22 nt, Human
agacagcugcucgcagagcuau

SEQ ID NO: 409601 - RNA, 22 nt, Human
uuucaucucucuaaaagacagu

SEQ ID NO: 409602 - RNA, 22 nt, Human
ggcagagacuggguuggcagag

SEQ ID NO: 409603 - RNA, 22 nt, Human
uuucaugugcaauuagcaauau

SEQ ID NO: 409604 - RNA, 22 nt, Human
aaggcacuuuucuaaagaccuu

SEQ ID NO: 409605 - RNA, 22 nt, Human
ccugggcaucucaugcaccugc

SEQ ID NO: 409606 - RNA, 19 nt, Human
uagagcugcuuccuggcag

SEQ ID NO: 409607 - RNA, 22 nt, Human
cuggcucuaucuccaaggcugg

SEQ ID NO: 409608 - RNA, 22 nt, Human
accaggcaugauguggagcaca

SEQ ID NO: 409609 - RNA, 22 nt, Human
acacugcagaugaaagcauaag

SEQ ID NO: 409610 - RNA, 22 nt, Human
ggcuucagugagcugagcucac

SEQ ID NO: 409611 - RNA, 22 nt, Human
guuuagaauucuaacuuuaagg

SEQ ID NO: 409612 - RNA, 22 nt, Human
ugucuuuagaaagaagcagaca

SEQ ID NO: 409613 - RNA, 22 nt, Human
uucaaugauuuuuagggaucau

SEQ ID NO: 409614 - RNA, 19 nt, Human
cagaggcaccagguauaga

SEQ ID NO: 409615 - RNA, 20 nt, Human
ucccaaggaugccugggugu

SEQ ID NO: 409616 - RNA, 22 nt, Human
aacauaaauuugaaguggcaaa

SEQ ID NO: 409617 - RNA, 22 nt, Human
guuuucuuugaaugcuucuaga

SEQ ID NO: 409618 - RNA, 22 nt, Human
ucugucucuuuguucugugagu

SEQ ID NO: 409619 - RNA, 22 nt, Human
gaacaauagugguaacaaagcc

SEQ ID NO: 409620 - RNA, 22 nt, Human
gagcuggugugugcccgagcac

SEQ ID NO: 409621 - RNA, 20 nt, Human
gacauucauaguuauuacca

SEQ ID NO: 409622 - RNA, 22 nt, Human
guuccaggcaagugggauagga

SEQ ID NO: 409623 - RNA, 22 nt, Human
acauugaucagccucccaugca

SEQ ID NO: 409624 - RNA, 22 nt, Human
gcuuccugucccucagccauga

SEQ ID NO: 409625 - RNA, 22 nt, Human
aucacgucaugguuugaucugg

SEQ ID NO: 409626 - RNA, 20 nt, Human
gcugccagugccugaugcuu

SEQ ID NO: 409627 - RNA, 22 nt, Human
ggcuguccuuggccaaggcacu

SEQ ID NO: 409628 - RNA, 22 nt, Human
ucacaucucccuggaggacaca

SEQ ID NO: 409629 - RNA, 22 nt, Human
agcuccugcacccagccuugag

SEQ ID NO: 409630 - RNA, 22 nt, Human
uccuauugguagacauuucugu

SEQ ID NO: 409631 - RNA, 22 nt, Human
cuauuauuuccucaucuauaaa

SEQ ID NO: 409632 - RNA, 22 nt, Human
uuuucauuagaaugacugagaa

SEQ ID NO: 409633 - RNA, 22 nt, Human
uaccugcagcgggaauccauua

SEQ ID NO: 409634 - RNA, 22 nt, Human
gcagccacacuguuacagaaug

SEQ ID NO: 409635 - RNA, 22 nt, Human
cacagugcaugaugggcagaag

SEQ ID NO: 409636 - RNA, 20 nt, Human
uccaagggcagcagaaucag

SEQ ID NO: 409637 - RNA, 22 nt, Human
ugaucagucccaugaucuucca

SEQ ID NO: 409638 - RNA, 22 nt, Human
ucagaacagaagaaggaacacg

SEQ ID NO: 409639 - RNA, 22 nt, Human
cagaauaugacaagauuuuccu

SEQ ID NO: 409640 - RNA, 21 nt, Human
uuuauguacuucauagaguag

SEQ ID NO: 409641 - RNA, 22 nt, Human
uagggcucacugagaugaauau

SEQ ID NO: 409642 - RNA, 22 nt, Human
ggcucaccauuuucacucucug

SEQ ID NO: 409643 - RNA, 22 nt, Human
acaaaggugagcagaagacaca

SEQ ID NO: 409644 - RNA, 22 nt, Human
uccagcagcccgaaggcccauc

SEQ ID NO: 409645 - RNA, 22 nt, Human
guggcccaggcuuggcgcuggc

SEQ ID NO: 409646 - RNA, 22 nt, Human
uuaauuuauguccaaaccagau

SEQ ID NO: 409647 - RNA, 22 nt, Human
augcuuuuccaggagaaauaua

SEQ ID NO: 409648 - RNA, 22 nt, Human
gcaggaugggagcuucacucug

SEQ ID NO: 409649 - RNA, 20 nt, Human
aaagucuguuuaucucugga

SEQ ID NO: 409650 - RNA, 22 nt, Human
ucccacugugccuguuguaauc

SEQ ID NO: 409651 - RNA, 22 nt, Human
ccacacugaaccucagugucuu

SEQ ID NO: 409652 - RNA, 22 nt, Human
ucacugucugaaagaaauggcc

SEQ ID NO: 409653 - RNA, 22 nt, Human
ugggcaggugcuauuuuccaug

SEQ ID NO: 409654 - RNA, 22 nt, Human
agaagaaaugaggccguucugc

SEQ ID NO: 409655 - RNA, 22 nt, Human
acauuuuuuagagucccacauu

SEQ ID NO: 409656 - RNA, 22 nt, Human
uuuuuccuuagggguuacucac

SEQ ID NO: 409657 - RNA, 22 nt, Human
auaugcauaugucaaaacuuau

SEQ ID NO: 409658 - RNA, 22 nt, Human
cuccagugagugagcaggcgac

SEQ ID NO: 409659 - RNA, 17 nt, Human
ucaggcugugccuggua

SEQ ID NO: 409660 - RNA, 22 nt, Human
uugaauaguuuuggauagcaua

SEQ ID NO: 409661 - RNA, 22 nt, Human
ccugggaggcggagguugcagg

SEQ ID NO: 409662 - RNA, 22 nt, Human
cacaguggauugggugaugccc

SEQ ID NO: 409663 - RNA, 22 nt, Human
cagagggcucggcggccgcucc

SEQ ID NO: 409664 - RNA, 23 nt, Human
agucucagcuggaaacauguguc

SEQ ID NO: 409665 - RNA, 22 nt, Human
caagagcuggagaggcagucua

SEQ ID NO: 409666 - RNA, 22 nt, Human
ccagagccucgcccggagccuc

SEQ ID NO: 409667 - RNA, 21 nt, Human
uggcucaguugcugggcacag

SEQ ID NO: 409668 - RNA, 22 nt, Human
gcagaggcaaucagguaugugg

SEQ ID NO: 409669 - RNA, 22 nt, Human
cagagacauuaagugccaugau

SEQ ID NO: 409670 - RNA, 22 nt, Human
aagggcagcugacagaugcuua

SEQ ID NO: 409671 - RNA, 22 nt, Human
cagaguggcacucugcuggaug

SEQ ID NO: 409672 - RNA, 22 nt, Human
ugguggcuucugaggauggcga

SEQ ID NO: 409673 - RNA, 22 nt, Human
aaggagucugggccauucagag

SEQ ID NO: 409674 - RNA, 22 nt, Human
cugcuuugauuagaagaguaca

SEQ ID NO: 409675 - RNA, 22 nt, Human
agggaggcaggaaaguugucug

SEQ ID NO: 409676 - RNA, 22 nt, Human
gacagggcaagacucugucuaa

SEQ ID NO: 409677 - RNA, 22 nt, Human
ucugugacuugcgggaggagaa

SEQ ID NO: 409678 - RNA, 22 nt, Human
ccucucuguaagggucccuccc

SEQ ID NO: 409679 - RNA, 22 nt, Human
ucugcucuaguugcuuccugcc

SEQ ID NO: 409680 - RNA, 22 nt, Human
aaguguuaaaagauuaaaugcu

SEQ ID NO: 409681 - RNA, 22 nt, Human
ugauuuccugugcgcccuuagg

SEQ ID NO: 409682 - RNA, 22 nt, Human
agaauaaaucaaauguccugag

SEQ ID NO: 409683 - RNA, 22 nt, Human
cugcagccuccugggguacaug

SEQ ID NO: 409684 - RNA, 22 nt, Human
ccuggagcaggagcugcagagg

SEQ ID NO: 409685 - RNA, 22 nt, Human
cacugccuggaaggagagacau

SEQ ID NO: 409686 - RNA, 22 nt, Human
cacaaaauaucaagcacuuuua

SEQ ID NO: 409687 - RNA, 20 nt, Human
uacagaaacaggacuuuugg

SEQ ID NO: 409688 - RNA, 22 nt, Human
gcagcagaggcccuacucuuug

SEQ ID NO: 409689 - RNA, 22 nt, Human
ccaggcugcuuagccuuaucuu

SEQ ID NO: 409690 - RNA, 23 nt, Human
uggcuccaugaaaauuacgagga

SEQ ID NO: 409691 - RNA, 22 nt, Human
gauucuuacuucuaagcaagcu

SEQ ID NO: 409692 - RNA, 23 nt, Human
uggacgccgacuuuggaggcgcu

SEQ ID NO: 409693 - RNA, 22 nt, Human
ucagaggaaaggucagauggcu

SEQ ID NO: 409694 - RNA, 22 nt, Human
aggcaguuguagagagggcucu

SEQ ID NO: 409695 - RNA, 22 nt, Human
auucauuuagguauucacuuac

SEQ ID NO: 409696 - RNA, 23 nt, Human
gcugucugucaucucugcgggag

SEQ ID NO: 409697 - RNA, 22 nt, Human
ucucagagauuuuguuucccuu

SEQ ID NO: 409698 - RNA, 22 nt, Human
acuguggcucaucaggcuggug

SEQ ID NO: 409699 - RNA, 22 nt, Human
uacaaaguuugagaaugcuuuc

SEQ ID NO: 409700 - RNA, 22 nt, Human
uucuaguucccucuggaaugua

SEQ ID NO: 409701 - RNA, 22 nt, Human
gccuggugugcgccgcgcagcu

SEQ ID NO: 409702 - RNA, 22 nt, Human
ggagccagaggcugcugcugug

SEQ ID NO: 409703 - RNA, 22 nt, Human
ucucaggggauucacuggcacc

SEQ ID NO: 409704 - RNA, 22 nt, Human
uguacaauagcuauuaucucca

SEQ ID NO: 409705 - RNA, 22 nt, Human
ggagugggcagcacugcccugu

SEQ ID NO: 409706 - RNA, 22 nt, Human
gggagaagaaugugucaauugu

SEQ ID NO: 409707 - RNA, 22 nt, Human
cucaggaucgcuugcccuaggg

SEQ ID NO: 409708 - RNA, 19 nt, Human
ccugugacuaucuuuguaa

SEQ ID NO: 409709 - RNA, 22 nt, Human
aagagcugcaucuaagccauga

SEQ ID NO: 409710 - RNA, 22 nt, Human
ggaagccaugagggacaguucu

SEQ ID NO: 409711 - RNA, 22 nt, Human
ugcagggcaucuuugaagugug

SEQ ID NO: 409712 - RNA, 22 nt, Human
aggccuccugcagggaugagug

SEQ ID NO: 409713 - RNA, 22 nt, Human
ggggcucaguucggacagccug

SEQ ID NO: 409714 - RNA, 22 nt, Human
agccacagucugaugccugaga

SEQ ID NO: 409715 - RNA, 22 nt, Human
cccagcaucuccaggcauggcc

SEQ ID NO: 409716 - RNA, 22 nt, Human
acacaguauuacaauaggugcu

SEQ ID NO: 409717 - RNA, 22 nt, Human
cauggccugccuccuccuggug

SEQ ID NO: 409718 - RNA, 22 nt, Human
ugucucaguacacuccgauguu

SEQ ID NO: 409719 - RNA, 22 nt, Human
uauuucuugagacucgucuucc

SEQ ID NO: 409720 - RNA, 22 nt, Human
cagaggaaaugggaaggagaua

SEQ ID NO: 409721 - RNA, 21 nt, Human
cagugagguccccagccuagg

SEQ ID NO: 409722 - RNA, 18 nt, Human
uguuuauuuuucucuuac

SEQ ID NO: 409723 - RNA, 22 nt, Human
cuguauuugaaagaaaagauuu

SEQ ID NO: 409724 - RNA, 22 nt, Human
caggccuggagugcaauggcac

SEQ ID NO: 409725 - RNA, 22 nt, Human
gccagagguaucaaagauagua

SEQ ID NO: 409726 - RNA, 22 nt, Human
aucuuccuucacuuucucccac

SEQ ID NO: 409727 - RNA, 18 nt, Human
cccagcccaccauuucuc

SEQ ID NO: 409728 - RNA, 22 nt, Human
cagcugugcugauugcucagua

SEQ ID NO: 409729 - RNA, 22 nt, Human
ccucugaguccucccugguugc

SEQ ID NO: 409730 - RNA, 22 nt, Human
cagagcugggcauggugaaagg

SEQ ID NO: 409731 - RNA, 22 nt, Human
gaggagggagcuggaagcucuu

SEQ ID NO: 409732 - RNA, 22 nt, Human
agcuggggguuggauaagggua

SEQ ID NO: 409733 - RNA, 22 nt, Human
cuccugagcucugaggaagcuu

SEQ ID NO: 409734 - RNA, 22 nt, Human
gagccagguuugaaucucaguc

SEQ ID NO: 409735 - RNA, 22 nt, Human
uccaggcacgaggcccugugca

SEQ ID NO: 409736 - RNA, 22 nt, Human
aaggcugagacagcacaggucc

SEQ ID NO: 409737 - RNA, 22 nt, Human
cagaggcagaauggagauuugg

SEQ ID NO: 409738 - RNA, 21 nt, Human
ucucugggcccuccugugggg

SEQ ID NO: 409739 - RNA, 22 nt, Human
acagggucauuuuaugaucugu

SEQ ID NO: 409740 - RNA, 22 nt, Human
caguacuucuuggaaacuggau

SEQ ID NO: 409741 - RNA, 22 nt, Human
agggucagagaucggccaugug

SEQ ID NO: 409742 - RNA, 22 nt, Human
uugcaucuaccauaucaaagau

SEQ ID NO: 409743 - RNA, 22 nt, Human
ucucagagaugucaagagucua

SEQ ID NO: 409744 - RNA, 22 nt, Human
cauacauugcucauucaguauc

SEQ ID NO: 409745 - RNA, 22 nt, Human
aagccagggauuccugagggag

SEQ ID NO: 409746 - RNA, 22 nt, Human
auguccuuugcuucucuggucc

SEQ ID NO: 409747 - RNA, 22 nt, Human
uccagcuuugagauuuuaugga

SEQ ID NO: 409748 - RNA, 16 nt, Human
gggagggaguuggugg

SEQ ID NO: 409749 - RNA, 22 nt, Human
ccugggagguggagguugcagc

SEQ ID NO: 409750 - RNA, 22 nt, Human
aguguccccuacagaggcauuc

SEQ ID NO: 409751 - RNA, 22 nt, Human
gcaguggcaccgcuggcucugg

SEQ ID NO: 409752 - RNA, 21 nt, Human
ugcagcugacacugguaugcc

SEQ ID NO: 409753 - RNA, 22 nt, Human
agagaagagcaaugauaaauuu

SEQ ID NO: 409754 - RNA, 22 nt, Human
uacagaaaucacaucgcuuuga

SEQ ID NO: 409755 - RNA, 21 nt, Human
uggccaaaaccauauuauuaa

SEQ ID NO: 409756 - RNA, 19 nt, Human
cuggaaugauagagaccuc

SEQ ID NO: 409757 - RNA, 22 nt, Human
ccacccuuggguucggaggccg

SEQ ID NO: 409758 - RNA, 22 nt, Human
caccagcuacagacuacugugu

SEQ ID NO: 409759 - RNA, 22 nt, Human
gcucugagauugagccuuuggu

SEQ ID NO: 409760 - RNA, 22 nt, Human
gacuguguccaugugcuggauu

SEQ ID NO: 409761 - RNA, 17 nt, Human
agccccucagcgucacc

SEQ ID NO: 409762 - RNA, 22 nt, Human
uuucuccaauguaucagcacac

SEQ ID NO: 409763 - RNA, 22 nt, Human
guuggccugaauggucaagagg

SEQ ID NO: 409764 - RNA, 22 nt, Human
uuauuauuuuguguacagcaaa

SEQ ID NO: 409765 - RNA, 22 nt, Human
augcaguguuuggaagcuuaag

SEQ ID NO: 409766 - RNA, 22 nt, Human
auaugauuccacuauuguaugg

SEQ ID NO: 409767 - RNA, 22 nt, Human
augcacgccccacacuggugug

SEQ ID NO: 409768 - RNA, 22 nt, Human
ugaggcaggagaaucacaugaa

SEQ ID NO: 409769 - RNA, 22 nt, Human
cuuauuuuaagucaguuugggu

SEQ ID NO: 409770 - RNA, 22 nt, Human
gcgagggcacgcgguugaaggc

SEQ ID NO: 409771 - RNA, 22 nt, Human
aaggcacuacgcugcuggggcg

SEQ ID NO: 409772 - RNA, 22 nt, Human
ggggcagccuccaggaaagcug

SEQ ID NO: 409773 - RNA, 22 nt, Human
ugggagaugguucugagacuuu

SEQ ID NO: 409774 - RNA, 22 nt, Human
agccagacauggcuccugcucc

SEQ ID NO: 409775 - RNA, 22 nt, Human
gcagagcaguacucucuugacu

SEQ ID NO: 409776 - RNA, 22 nt, Human
gccuggcaggccugggccagca

SEQ ID NO: 409777 - RNA, 22 nt, Human
uaguuaggaaaguccagggagc

SEQ ID NO: 409778 - RNA, 22 nt, Human
uagaaaauagggccuguggagc

SEQ ID NO: 409779 - RNA, 22 nt, Human
uggccaggggaguuccccucca

SEQ ID NO: 409780 - RNA, 22 nt, Human
cagagugaaauaggggaucaag

SEQ ID NO: 409781 - RNA, 22 nt, Human
gagacugcauagauggccacaa

SEQ ID NO: 409782 - RNA, 22 nt, Human
guggcacagugggagagcccca

SEQ ID NO: 409783 - RNA, 22 nt, Human
caggcagagugagguggucuaa

SEQ ID NO: 409784 - RNA, 22 nt, Human
agggcuggcaagggauugaaau

SEQ ID NO: 409785 - RNA, 22 nt, Human
agggccagagucuguguagaua

SEQ ID NO: 409786 - RNA, 22 nt, Human
ggcagcaguaggagcuaaucuu

SEQ ID NO: 409787 - RNA, 22 nt, Human
aaaauggucucagcuggcacca

SEQ ID NO: 409788 - RNA, 22 nt, Human
uguugauuaguguuuagacuua

SEQ ID NO: 409789 - RNA, 22 nt, Human
gccaggugcuaucccugcgcug

SEQ ID NO: 409790 - RNA, 22 nt, Human
agaccaagacuauaaugagagg

SEQ ID NO: 409791 - RNA, 22 nt, Human
cuggagagaaaugacaaagcua

SEQ ID NO: 409792 - RNA, 17 nt, Human
gcuuccucaugcaguuc

SEQ ID NO: 409793 - RNA, 22 nt, Human
caggaaggcccaccuguccugu

SEQ ID NO: 409794 - RNA, 22 nt, Human
gcaggagcaaacugcagugugg

SEQ ID NO: 409795 - RNA, 22 nt, Human
cccuggaggagcuuagagcuug

SEQ ID NO: 409796 - RNA, 22 nt, Human
ucacuggggccuuuggucagga

SEQ ID NO: 409797 - RNA, 21 nt, Human
cugcucuggggaccggcugug

SEQ ID NO: 409798 - RNA, 22 nt, Human
uucagagaagcaaaggcagauu

SEQ ID NO: 409799 - RNA, 22 nt, Human
ggcaugggagugagcaaccuua

SEQ ID NO: 409800 - RNA, 22 nt, Human
cuggcagcgcagcaugaagucg

SEQ ID NO: 409801 - RNA, 22 nt, Human
gguuucaaauuaaagucuuaag

SEQ ID NO: 409802 - RNA, 22 nt, Human
aaauucuaugucaauguuuauu

SEQ ID NO: 409803 - RNA, 22 nt, Human
ggagccuggccuggcucugugu

SEQ ID NO: 409804 - RNA, 22 nt, Human
uuugaaaggagcuuuauccaga

SEQ ID NO: 409805 - RNA, 22 nt, Human
uuuugagauggagucuugcucu

SEQ ID NO: 409806 - RNA, 22 nt, Human
ugcuauaagaauuauauuacuc

SEQ ID NO: 409807 - RNA, 22 nt, Human
accucugccaagaugugcuccc

SEQ ID NO: 409808 - RNA, 22 nt, Human
aagugauuucugccugcauguu

SEQ ID NO: 409809 - RNA, 19 nt, Human
ggcucucuuaaagcuguuu

SEQ ID NO: 409810 - RNA, 22 nt, Human
uuacauuuugggguaaggauaa

SEQ ID NO: 409811 - RNA, 22 nt, Human
ucaguuuuuaaaugauauaauu

SEQ ID NO: 409812 - RNA, 23 nt, Human
agaccugcaucugauaggcccug

SEQ ID NO: 409813 - RNA, 22 nt, Human
ugauacagucagcucacaauug

SEQ ID NO: 409814 - RNA, 22 nt, Human
ugaugguugauuauaaaucagu

SEQ ID NO: 409815 - RNA, 22 nt, Human
ucccuggacagccuugccuggg

SEQ ID NO: 409816 - RNA, 17 nt, Human
gcugagugcagggaguc

SEQ ID NO: 409817 - RNA, 22 nt, Human
ccacagggcacaagggagguug

SEQ ID NO: 409818 - RNA, 22 nt, Human
ucugucuuagcaucuuugcuca

SEQ ID NO: 409819 - RNA, 22 nt, Human
ugucuuuucuacuguaagcaua

SEQ ID NO: 409820 - RNA, 22 nt, Human
uaaauguguuagucaugguuuu

SEQ ID NO: 409821 - RNA, 22 nt, Human
ucaggccacuucacaggugauu

SEQ ID NO: 409822 - RNA, 22 nt, Human
acuguucauuuggauuucucug

SEQ ID NO: 409823 - RNA, 22 nt, Human
aggugccaauuuucagugaaca

SEQ ID NO: 409824 - RNA, 22 nt, Human
ggaagagccuggggugucaggc

SEQ ID NO: 409825 - RNA, 20 nt, Human
cccuccagcaaccaggacuu

SEQ ID NO: 409826 - RNA, 22 nt, Human
cuagaaaaauacuuuauuguga

SEQ ID NO: 409827 - RNA, 22 nt, Human
ugggcugaaaugcuguggacua

SEQ ID NO: 409828 - RNA, 22 nt, Human
ccaggagcuggagggugcagug

SEQ ID NO: 409829 - RNA, 22 nt, Human
aggaccuguagggccugcaucc

SEQ ID NO: 409830 - RNA, 17 nt, Human
uauguaguacuuauaaa

SEQ ID NO: 409831 - RNA, 22 nt, Human
cagggcacaguuauggaggugg

SEQ ID NO: 409832 - RNA, 22 nt, Human
acucccacuccagaguagaagc

SEQ ID NO: 409833 - RNA, 22 nt, Human
gugugcagcagagacaggacuc

SEQ ID NO: 409834 - RNA, 22 nt, Human
uggacaggugagugacucaggg

SEQ ID NO: 409835 - RNA, 22 nt, Human
caggagugcagguggugaggca

SEQ ID NO: 409836 - RNA, 23 nt, Human
uccagggauuaaugaagucaguc

SEQ ID NO: 409837 - RNA, 22 nt, Human
aaaccaucagauaauucauacu

SEQ ID NO: 409838 - RNA, 22 nt, Human
cacaguggcagguguggguugu

SEQ ID NO: 409839 - RNA, 22 nt, Human
ggaggggcagccauggaacucc

SEQ ID NO: 409840 - RNA, 22 nt, Human
aacugcauucagaaagcucacu

SEQ ID NO: 409841 - RNA, 22 nt, Human
ggagaugccagaauugcaaauu

SEQ ID NO: 409842 - RNA, 22 nt, Human
aaaguuugagugauuugacaca

SEQ ID NO: 409843 - RNA, 22 nt, Human
aaagucuuuauuuuguaucuuu

SEQ ID NO: 409844 - RNA, 22 nt, Human
uauuucuguaugcauaaaagga

SEQ ID NO: 409845 - RNA, 22 nt, Human
cuggcaggcggcagagcccagg

SEQ ID NO: 409846 - RNA, 22 nt, Human
acagaggucauggagaguucuc

SEQ ID NO: 409847 - RNA, 22 nt, Human
ugcccauguuucucuguauccc

SEQ ID NO: 409848 - RNA, 20 nt, Human
cuuuggcaaugagaacaggg

SEQ ID NO: 409849 - RNA, 22 nt, Human
ucaggcagagggagaagccaag

SEQ ID NO: 409850 - RNA, 22 nt, Human
ucugagaguacgggcugcgcgc

SEQ ID NO: 409851 - RNA, 22 nt, Human
cugcugggucuaugcaagugga

SEQ ID NO: 409852 - RNA, 22 nt, Human
ugucugucugcaagccagaaag

SEQ ID NO: 409853 - RNA, 22 nt, Human
agggaucaaaaaauguacaugc

SEQ ID NO: 409854 - RNA, 22 nt, Human
cuuauguaugcuacuuuguggu

SEQ ID NO: 409855 - RNA, 22 nt, Human
uccagccaagggagguuacuag

SEQ ID NO: 409856 - RNA, 19 nt, Human
uggcuuccaucucucucau

SEQ ID NO: 409857 - RNA, 22 nt, Human
cagcacacagugacucgcaccu

SEQ ID NO: 409858 - RNA, 21 nt, Human
agcagccauggaugguaugua

SEQ ID NO: 409859 - RNA, 22 nt, Human
gagccuccuccuggugugccga

SEQ ID NO: 409860 - RNA, 22 nt, Human
cagggccauaucuugugcacca

SEQ ID NO: 409861 - RNA, 22 nt, Human
cuacauuuguucuauagcuuuu

SEQ ID NO: 409862 - RNA, 22 nt, Human
guugggaaggcaagaaguagaa

SEQ ID NO: 409863 - RNA, 22 nt, Human
aggacaguguggaagagggugc

SEQ ID NO: 409864 - RNA, 22 nt, Human
ugaagccauaggacagaggaua

SEQ ID NO: 409865 - RNA, 22 nt, Human
ugggcugcccugaugguccuca

SEQ ID NO: 409866 - RNA, 21 nt, Human
caguguggugaccagggucuc

SEQ ID NO: 409867 - RNA, 22 nt, Human
cuguggagcuuguggcaguggg

SEQ ID NO: 409868 - RNA, 22 nt, Human
aggcaggagcaagcccuacaag

SEQ ID NO: 409869 - RNA, 22 nt, Human
ccugggcauaaaucacuccaag

SEQ ID NO: 409870 - RNA, 22 nt, Human
agguggcucugacagcucuggu

SEQ ID NO: 409871 - RNA, 22 nt, Human
ugacauuuaucaaagaaauggu

SEQ ID NO: 409872 - RNA, 22 nt, Human
caggacaguauaggcuuuagga

SEQ ID NO: 409873 - RNA, 22 nt, Human
uguguuuugaacucaucuacug

SEQ ID NO: 409874 - RNA, 22 nt, Human
ccaguggaaauguggucaggau

SEQ ID NO: 409875 - RNA, 22 nt, Human
aagauuauggcagauaacaauu

SEQ ID NO: 409876 - RNA, 22 nt, Human
cagcagagacgguaagcagaac

SEQ ID NO: 409877 - RNA, 22 nt, Human
acauuugucuucuuucagauua

SEQ ID NO: 409878 - RNA, 22 nt, Human
cugcuuugaaaauaaacuuguc

SEQ ID NO: 409879 - RNA, 22 nt, Human
ugucuuccucuuggcuugagcu

SEQ ID NO: 409880 - RNA, 22 nt, Human
uggccagguugggcuuugcagc

SEQ ID NO: 409881 - RNA, 22 nt, Human
ucuggcucaggagcuguguuca

SEQ ID NO: 409882 - RNA, 22 nt, Human
gccucugcgccucagccgaccu

SEQ ID NO: 409883 - RNA, 22 nt, Human
gcugucucauacaaggcccugc

SEQ ID NO: 409884 - RNA, 17 nt, Human
uuccaguuuaguauugu

SEQ ID NO: 409885 - RNA, 22 nt, Human
uagucccauuuugagguauuug

SEQ ID NO: 409886 - RNA, 22 nt, Human
gcucugcucuugacuuaccagg

SEQ ID NO: 409887 - RNA, 22 nt, Human
guaaaucccauccuuucucugg

SEQ ID NO: 409888 - RNA, 18 nt, Human
gcucugcccaggcugccc

SEQ ID NO: 409889 - RNA, 22 nt, Human
acaggcagagaacucagccaga

SEQ ID NO: 409890 - RNA, 22 nt, Human
gggcagaggcucuggcccaucc

SEQ ID NO: 409891 - RNA, 22 nt, Human
auguguauacuugugcuuacuc

SEQ ID NO: 409892 - RNA, 22 nt, Human
gccagguggcugagugacugag

SEQ ID NO: 409893 - RNA, 22 nt, Human
acagagguguuccagaccuagg

SEQ ID NO: 409894 - RNA, 22 nt, Human
uguuucuucucacacaaacuca

SEQ ID NO: 409895 - RNA, 22 nt, Human
ccagggcaauuauuuggagggu

SEQ ID NO: 409896 - RNA, 22 nt, Human
gagccagcugagcugcacuguc

SEQ ID NO: 409897 - RNA, 21 nt, Human
gagcauggcuuacaucagcag

SEQ ID NO: 409898 - RNA, 22 nt, Human
ucaccaggcuccuguuaagaug

SEQ ID NO: 409899 - RNA, 22 nt, Human
gcucccagaaccaaggcugggg

SEQ ID NO: 409900 - RNA, 22 nt, Human
agauuuagacugccuuaaucau

SEQ ID NO: 409901 - RNA, 22 nt, Human
cucauggauauaagaacuguuu

SEQ ID NO: 409902 - RNA, 22 nt, Human
cuggcuuccaugcuguaguggc

SEQ ID NO: 409903 - RNA, 22 nt, Human
cagaggcucagauggcccuggc

SEQ ID NO: 409904 - RNA, 22 nt, Human
gcuguucugcgucccaggcugg

SEQ ID NO: 409905 - RNA, 19 nt, Human
cagaacagaggucauggcc

SEQ ID NO: 409906 - RNA, 17 nt, Human
ucauuuguugugacuag

SEQ ID NO: 409907 - RNA, 22 nt, Human
cccuggagggcagacagaugcc

SEQ ID NO: 409908 - RNA, 22 nt, Human
ucucaggaagauuagggcuaag

SEQ ID NO: 409909 - RNA, 22 nt, Human
aaucuguuuaguucugcguaug

SEQ ID NO: 409910 - RNA, 22 nt, Human
agcuguccuggcucaggcugug

SEQ ID NO: 409911 - RNA, 22 nt, Human
ucugucauguuuccauuacaug

SEQ ID NO: 409912 - RNA, 21 nt, Human
agagcugggacuugccugaga

SEQ ID NO: 409913 - RNA, 22 nt, Human
gagaagcagguuuagcagacaa

SEQ ID NO: 409914 - RNA, 22 nt, Human
cauucauuuacuuucaacagcu

SEQ ID NO: 409915 - RNA, 19 nt, Human
ggcugcugguuacagaggc

SEQ ID NO: 409916 - RNA, 22 nt, Human
auccucaguguuucugacaucu

SEQ ID NO: 409917 - RNA, 22 nt, Human
ccuccagguguuacauaugacu

SEQ ID NO: 409918 - RNA, 22 nt, Human
uuagaaaugauuucaccucuuu

SEQ ID NO: 409919 - RNA, 22 nt, Human
uggaaagagguagaggaucugg

SEQ ID NO: 409920 - RNA, 22 nt, Human
agcugccagcaucccggaaggg

SEQ ID NO: 409921 - RNA, 22 nt, Human
ccuguacagugaaugaauguga

SEQ ID NO: 409922 - RNA, 22 nt, Human
uguauuuucugaagauaaucaa

SEQ ID NO: 409923 - RNA, 22 nt, Human
caucacuguccucagcauucca

SEQ ID NO: 409924 - RNA, 22 nt, Human
uuucagaugcaauuaauuuuca

SEQ ID NO: 409925 - RNA, 22 nt, Human
cugcccugucuuuuucugauga

SEQ ID NO: 409926 - RNA, 22 nt, Human
ucccuggaacagagagacaacg

SEQ ID NO: 409927 - RNA, 22 nt, Human
ucuuccaguguagacaucugcc

SEQ ID NO: 409928 - RNA, 18 nt, Human
gugugcaguugcaggggu

SEQ ID NO: 409929 - RNA, 22 nt, Human
ggucccaguccucucccugcua

SEQ ID NO: 409930 - RNA, 22 nt, Human
ugcagagguuuccaggcaaguu

SEQ ID NO: 409931 - RNA, 22 nt, Human
aaguccaguuucauuugagguc

SEQ ID NO: 409932 - RNA, 22 nt, Human
ccucucauagucuguauccuuu

SEQ ID NO: 409933 - RNA, 22 nt, Human
uguagcucuccagccagcaagg

SEQ ID NO: 409934 - RNA, 22 nt, Human
cugugucccaguaccuugggua

SEQ ID NO: 409935 - RNA, 22 nt, Human
uccuggagcuuccuucauggua

SEQ ID NO: 409936 - RNA, 21 nt, Human
aagggagauaggaaucaggcc

SEQ ID NO: 409937 - RNA, 22 nt, Human
aucuuuaggaaccuaaccuauu

SEQ ID NO: 409938 - RNA, 21 nt, Human
ucaggcaggcgcagagggaag

SEQ ID NO: 409939 - RNA, 22 nt, Human
uggcccgaccucugcucaugca

SEQ ID NO: 409940 - RNA, 22 nt, Human
cagggccaugaggcacaggguc

SEQ ID NO: 409941 - RNA, 22 nt, Human
aaaugcagcagcuaauugaaaa

SEQ ID NO: 409942 - RNA, 22 nt, Human
caguuuuugccauuaagaguaa

SEQ ID NO: 409943 - RNA, 22 nt, Human
agugaagaggaaguggggcaca

SEQ ID NO: 409944 - RNA, 22 nt, Human
aggcacugauucuguuuuccau

SEQ ID NO: 409945 - RNA, 22 nt, Human
uggaggcaguuuaagucugaga

SEQ ID NO: 409946 - RNA, 22 nt, Human
ucucccaguccucugugcuuac

SEQ ID NO: 409947 - RNA, 22 nt, Human
uuccaguucccaugaggauuaa

SEQ ID NO: 409948 - RNA, 22 nt, Human
uguuuaaucuauaaaauggaga

SEQ ID NO: 409949 - RNA, 22 nt, Human
acugcuuuuagaaaucuauaga

SEQ ID NO: 409950 - RNA, 22 nt, Human
aaaugcagguucuugagccaag

SEQ ID NO: 409951 - RNA, 22 nt, Human
aggcuucagguuugcuuugcag

SEQ ID NO: 409952 - RNA, 22 nt, Human
uccuucagauuccugcuucugg

SEQ ID NO: 409953 - RNA, 22 nt, Human
caccugggcuaaacuaugcagg

SEQ ID NO: 409954 - RNA, 22 nt, Human
gcccagcagcugguggagaagg

SEQ ID NO: 409955 - RNA, 22 nt, Human
aaacuucagugaaugacuuaug

SEQ ID NO: 409956 - RNA, 22 nt, Human
gagaaacuuggaguuauucugg

SEQ ID NO: 409957 - RNA, 22 nt, Human
ugaggcaggaugcuugcacagg

SEQ ID NO: 409958 - RNA, 21 nt, Human
agaugcugugcuccaggagca

SEQ ID NO: 409959 - RNA, 21 nt, Human
cccuugccugcacuccucggc

SEQ ID NO: 409960 - RNA, 22 nt, Human
acuguccauucacucauauuca

SEQ ID NO: 409961 - RNA, 22 nt, Human
cucuggccugcuuccucaggua

SEQ ID NO: 409962 - RNA, 22 nt, Human
uuauuagguuauucucuguacu

SEQ ID NO: 409963 - RNA, 22 nt, Human
gaagccccaaacccucgccauc

SEQ ID NO: 409964 - RNA, 19 nt, Human
agacaaguuuccagaagcc

SEQ ID NO: 409965 - RNA, 22 nt, Human
acagccaggaauucuggagaag

SEQ ID NO: 409966 - RNA, 19 nt, Human
gcaggcacagcccugggug

SEQ ID NO: 409967 - RNA, 22 nt, Human
cuuggccucuucucaggguggg

SEQ ID NO: 409968 - RNA, 22 nt, Human
gccuccccugcaauuguccuug

SEQ ID NO: 409969 - RNA, 22 nt, Human
agaggccagggacacugcucaa

SEQ ID NO: 409970 - RNA, 22 nt, Human
cugccaggacugacgucuucag

SEQ ID NO: 409971 - RNA, 22 nt, Human
gccugcaguucugugcuaggca

SEQ ID NO: 409972 - RNA, 22 nt, Human
ucccagagguugagucacuuau

SEQ ID NO: 409973 - RNA, 22 nt, Human
gucagcaggguccccuugagug

SEQ ID NO: 409974 - RNA, 22 nt, Human
cauucugcauuuggaaggggca

SEQ ID NO: 409975 - RNA, 22 nt, Human
gaaccucagugaaacuggaggu

SEQ ID NO: 409976 - RNA, 21 nt, Human
ucugggcccaugcugccucac

SEQ ID NO: 409977 - RNA, 22 nt, Human
ggucaggggcugcucuacagag

SEQ ID NO: 409978 - RNA, 22 nt, Human
caucacagggggcuagaagucu

SEQ ID NO: 409979 - RNA, 21 nt, Human
ggacuuacauagguaaggggu

SEQ ID NO: 409980 - RNA, 17 nt, Human
ggagagugggaauggcc

SEQ ID NO: 409981 - RNA, 22 nt, Human
ccucucaucauuaucgcuuugu

SEQ ID NO: 409982 - RNA, 22 nt, Human
uuccagaaaucuuucagcucaa

SEQ ID NO: 409983 - RNA, 18 nt, Human
gguggcucagucaugggg

SEQ ID NO: 409984 - RNA, 22 nt, Human
gcagggcucugcuguaguccua

SEQ ID NO: 409985 - RNA, 22 nt, Human
gccugcagaacugugaggcaau

SEQ ID NO: 409986 - RNA, 22 nt, Human
cagagcugcucaugguggccag

SEQ ID NO: 409987 - RNA, 20 nt, Human
ucugaggcugagcucuacuu

SEQ ID NO: 409988 - RNA, 22 nt, Human
aucuucaaagcacaucguuugu

SEQ ID NO: 409989 - RNA, 22 nt, Human
cagagguagaaggcaugcagug

SEQ ID NO: 409990 - RNA, 22 nt, Human
cucuggagcaccgggcuaucca

SEQ ID NO: 409991 - RNA, 22 nt, Human
uuacaacauauuuagcuugauu

SEQ ID NO: 409992 - RNA, 22 nt, Human
ucucaguguggugcuuaggaua

SEQ ID NO: 409993 - RNA, 22 nt, Human
gcagggccagguacaagaagca

SEQ ID NO: 409994 - RNA, 22 nt, Human
accaggaggccuggagcacaaa

SEQ ID NO: 409995 - RNA, 22 nt, Human
aucuggcugcugugcuuaagcu

SEQ ID NO: 409996 - RNA, 22 nt, Human
aagggcuguaagccaaguaaag

SEQ ID NO: 409997 - RNA, 22 nt, Human
cagggcagugaagaacacacgu

SEQ ID NO: 409998 - RNA, 22 nt, Human
agaggcucugccgccucaggua

SEQ ID NO: 409999 - RNA, 22 nt, Human
gcagguggagcaguagucuggu

SEQ ID NO: 410000 - RNA, 23 nt, Human
ggcuggcccggggcugcuccuga

SEQ ID NO: 410001 - RNA, 22 nt, Human
agccuggaggccaggagacagu

SEQ ID NO: 410002 - RNA, 21 nt, Human
aauuagggugccucuuauaau

SEQ ID NO: 410003 - RNA, 22 nt, Human
agcugacugaugaagaggccuu

SEQ ID NO: 410004 - RNA, 22 nt, Human
ucagcaaugagaacuggcauuu

SEQ ID NO: 410005 - RNA, 22 nt, Human
auuuguaauuucuuaucugugu

SEQ ID NO: 410006 - RNA, 22 nt, Human
cacagggcagaggguccguggc

SEQ ID NO: 410007 - RNA, 22 nt, Human
cugcugcugcuaucuacccagg

SEQ ID NO: 410008 - RNA, 22 nt, Human
cacuuggaggcccccugugccc

SEQ ID NO: 410009 - RNA, 22 nt, Human
guuucaaaagucaggcuauucu

SEQ ID NO: 410010 - RNA, 22 nt, Human
aaagaaggaccuggaggaggau

SEQ ID NO: 410011 - RNA, 22 nt, Human
cagagcugcgcuuuuuccuggu

SEQ ID NO: 410012 - RNA, 22 nt, Human
gcugaagcugcagcaggaggaa

SEQ ID NO: 410013 - RNA, 22 nt, Human
gacagcagacagaacuaccugc

SEQ ID NO: 410014 - RNA, 22 nt, Human
cucagaauuuagggcucugagg

SEQ ID NO: 410015 - RNA, 22 nt, Human
uggggccuggucagagcugcac

SEQ ID NO: 410016 - RNA, 22 nt, Human
cucagaguccccacaucugggu

SEQ ID NO: 410017 - RNA, 22 nt, Human
aagguacaccaaaguucaaguu

SEQ ID NO: 410018 - RNA, 22 nt, Human
aauuuagauugauaaacaugga

SEQ ID NO: 410019 - RNA, 22 nt, Human
ucauugcaggcauuccccugcc

SEQ ID NO: 410020 - RNA, 22 nt, Human
ccccagccagcaggaccucuga

SEQ ID NO: 410021 - RNA, 22 nt, Human
ugggcaggauaauaucucaugu

SEQ ID NO: 410022 - RNA, 22 nt, Human
uggaggaaguggacaguugugu

SEQ ID NO: 410023 - RNA, 22 nt, Human
cuguucaugcugauucuguaug

SEQ ID NO: 410024 - RNA, 22 nt, Human
aagauuucugcuuuuggaggca

SEQ ID NO: 410025 - RNA, 22 nt, Human
uuccucuccucacaugagucac

SEQ ID NO: 410026 - RNA, 22 nt, Human
uccugccuuagagcaaggaaaa

SEQ ID NO: 410027 - RNA, 22 nt, Human
uacaagaaauuucugcauauau

SEQ ID NO: 410028 - RNA, 19 nt, Human
ggcauccacgaaugcagag

SEQ ID NO: 410029 - RNA, 22 nt, Human
aauguuaaaaccuucagugcuu

SEQ ID NO: 410030 - RNA, 22 nt, Human
gcaguggaagccucuuuaagca

SEQ ID NO: 410031 - RNA, 22 nt, Human
ggagggugcauuuuacccugug

SEQ ID NO: 410032 - RNA, 22 nt, Human
agcaggaaagaaaaaucugugu

SEQ ID NO: 410033 - RNA, 22 nt, Human
gcacccagagggcagggucucc

SEQ ID NO: 410034 - RNA, 22 nt, Human
uggaguucauccaugacagcuu

SEQ ID NO: 410035 - RNA, 22 nt, Human
ccagggcauguaacuaauggug

SEQ ID NO: 410036 - RNA, 22 nt, Human
aggcagagcuaggaagaauugu

SEQ ID NO: 410037 - RNA, 22 nt, Human
auauuauucuaguaacagugau

SEQ ID NO: 410038 - RNA, 22 nt, Human
uuugucaucccuuuugaaacug

SEQ ID NO: 410039 - RNA, 22 nt, Human
aggcucagauucacauuugguu

SEQ ID NO: 410040 - RNA, 22 nt, Human
gaguuauuggguggaaagguag

SEQ ID NO: 410041 - RNA, 22 nt, Human
ugaggccaggaucccaggcucu

SEQ ID NO: 410042 - RNA, 22 nt, Human
gugucacaagagcccaggaaac

SEQ ID NO: 410043 - RNA, 17 nt, Human
cagucgaggaggaccug

SEQ ID NO: 410044 - RNA, 22 nt, Human
ucugggggcgaccagggacugc

SEQ ID NO: 410045 - RNA, 22 nt, Human
acagaaggcggggacaaggcgg

SEQ ID NO: 410046 - RNA, 22 nt, Human
ugccucugugggccuuccuggc

SEQ ID NO: 410047 - RNA, 22 nt, Human
cugcagggaugugaggcccguu

SEQ ID NO: 410048 - RNA, 22 nt, Human
uccucagggaagaugagccuca

SEQ ID NO: 410049 - RNA, 22 nt, Human
caggugggccaugaaaaaugac

SEQ ID NO: 410050 - RNA, 22 nt, Human
ucauacauaacuuguacaguga

SEQ ID NO: 410051 - RNA, 22 nt, Human
uucaaucauuuuuacauagucc

SEQ ID NO: 410052 - RNA, 22 nt, Human
ucccagagucagagguggggcc

SEQ ID NO: 410053 - RNA, 22 nt, Human
gcccacacaccagcucaggagg

SEQ ID NO: 410054 - RNA, 22 nt, Human
aggugccagcucucaggcagga

SEQ ID NO: 410055 - RNA, 22 nt, Human
cucccaagcugugcugaacugu

SEQ ID NO: 410056 - RNA, 22 nt, Human
ggcgcuggccacgguggcucug

SEQ ID NO: 410057 - RNA, 22 nt, Human
uggcuuccuggacagaugcggu

SEQ ID NO: 410058 - RNA, 22 nt, Human
acuguacauauggauucuaaga

SEQ ID NO: 410059 - RNA, 22 nt, Human
ugucacagggauaccauggggc

SEQ ID NO: 410060 - RNA, 22 nt, Human
ucuagaaaaaaacugcugugga

SEQ ID NO: 410061 - RNA, 22 nt, Human
acauacauaugacaacuuuccu

SEQ ID NO: 410062 - RNA, 22 nt, Human
uggcucaguuaggucagaaaca

SEQ ID NO: 410063 - RNA, 22 nt, Human
gcagugacagggcugcugccuu

SEQ ID NO: 410064 - RNA, 22 nt, Human
uauuaucauugguaauaugguc

SEQ ID NO: 410065 - RNA, 22 nt, Human
gauggguggucucagacuugcc

SEQ ID NO: 410066 - RNA, 22 nt, Human
cauugucacccaaagcucauag

SEQ ID NO: 410067 - RNA, 22 nt, Human
augcuguguggucaaguuaauu

SEQ ID NO: 410068 - RNA, 22 nt, Human
ugggagcaccuugagggcagaa

SEQ ID NO: 410069 - RNA, 22 nt, Human
gcucagggaacuuuuugcaggc

SEQ ID NO: 410070 - RNA, 22 nt, Human
cucaggaugaaagucaugguga

SEQ ID NO: 410071 - RNA, 20 nt, Human
ucauccaggacaggaguggc

SEQ ID NO: 410072 - RNA, 21 nt, Human
uucaaaguuugccuaaagauu

SEQ ID NO: 410073 - RNA, 22 nt, Human
cuggggcucucuggaaugcuug

SEQ ID NO: 410074 - RNA, 22 nt, Human
cuccagcuucccucagcugugg

SEQ ID NO: 410075 - RNA, 21 nt, Human
gacaggcaaggagucacuuag

SEQ ID NO: 410076 - RNA, 23 nt, Human
caguacuuaguguagcguuaauu

SEQ ID NO: 410077 - RNA, 22 nt, Human
aagcuggagaguuaggugaaua

SEQ ID NO: 410078 - RNA, 19 nt, Human
uguguaaagucugugguca

SEQ ID NO: 410079 - RNA, 20 nt, Human
ugccaggcugcacgccugcc

SEQ ID NO: 410080 - RNA, 22 nt, Human
gagauauguuagaaagcuauug

SEQ ID NO: 410081 - RNA, 22 nt, Human
uaauuucacugauaugaaguca

SEQ ID NO: 410082 - RNA, 22 nt, Human
cugcccuguggcucugagucau

SEQ ID NO: 410083 - RNA, 22 nt, Human
auacuaagcucauuacauuuug

SEQ ID NO: 410084 - RNA, 22 nt, Human
gccuucagcccugacuggccag

SEQ ID NO: 410085 - RNA, 22 nt, Human
cauugcucaggcccagcaggaa

SEQ ID NO: 410086 - RNA, 22 nt, Human
augcucugggcaggagcccugg

SEQ ID NO: 410087 - RNA, 22 nt, Human
uaaaucccuacaucuguguuuu

SEQ ID NO: 410088 - RNA, 20 nt, Human
uccugcagucgcuagcgccc

SEQ ID NO: 410089 - RNA, 22 nt, Human
gcucuggguagccacugccugg

SEQ ID NO: 410090 - RNA, 22 nt, Human
uccuugaauauaauaacaguag

SEQ ID NO: 410091 - RNA, 22 nt, Human
ugaggcaggacuugcauaaagu

SEQ ID NO: 410092 - RNA, 22 nt, Human
gaaaccagcuagaggcagaggg

SEQ ID NO: 410093 - RNA, 22 nt, Human
guauacauagaugaugaacaag

SEQ ID NO: 410094 - RNA, 22 nt, Human
uuugucuugaggcuggggaagu

SEQ ID NO: 410095 - RNA, 22 nt, Human
gagcugaaauaugaagccaauu

SEQ ID NO: 410096 - RNA, 22 nt, Human
agugcaauagcaaagaacaaca

SEQ ID NO: 410097 - RNA, 22 nt, Human
ucagaagcaggagugugcacaa

SEQ ID NO: 410098 - RNA, 22 nt, Human
gggcagcucuggcugugggaag

SEQ ID NO: 410099 - RNA, 22 nt, Human
ccagugggugcugggcucugcc

SEQ ID NO: 410100 - RNA, 23 nt, Human
aaucuggcugauguuuuuucucu

SEQ ID NO: 410101 - RNA, 22 nt, Human
cagagccccucagcucucuccc

SEQ ID NO: 410102 - RNA, 22 nt, Human
uggccuggcugcccugucugga

SEQ ID NO: 410103 - RNA, 23 nt, Human
acagagguccaaacaguauaagc

SEQ ID NO: 410104 - RNA, 22 nt, Human
uuucauugucaauaaacuguau

SEQ ID NO: 410105 - RNA, 22 nt, Human
uauuuugagguauuuuugagcu

SEQ ID NO: 410106 - RNA, 22 nt, Human
ugucucugugagaucugacgau

SEQ ID NO: 410107 - RNA, 19 nt, Human
agacucugugugagacuuu

SEQ ID NO: 410108 - RNA, 22 nt, Human
ugggagcugggguuggacgucu

SEQ ID NO: 410109 - RNA, 20 nt, Human
ggccuuggccucuuugcagc

SEQ ID NO: 410110 - RNA, 22 nt, Human
ggcucugcccagguggacagca

SEQ ID NO: 410111 - RNA, 23 nt, Human
ugcuguccaacagacuggccaug

SEQ ID NO: 410112 - RNA, 22 nt, Human
auaugccauuagcuagaaauaa

SEQ ID NO: 410113 - RNA, 22 nt, Human
cagagccacugucugccaggca

SEQ ID NO: 410114 - RNA, 22 nt, Human
ggggauggugggaaggcaaucu

SEQ ID NO: 410115 - RNA, 22 nt, Human
gaagcagcuggugagauggagc

SEQ ID NO: 410116 - RNA, 22 nt, Human
ccugggcucuauccugacccag

SEQ ID NO: 410117 - RNA, 22 nt, Human
ccuggagcacagcccaguccca

SEQ ID NO: 410118 - RNA, 22 nt, Human
ucaucuucuauuaauagggaga

SEQ ID NO: 410119 - RNA, 22 nt, Human
ccugcagggaaucgaggcagaa

SEQ ID NO: 410120 - RNA, 22 nt, Human
gcagagcugucuaagucacuuc

SEQ ID NO: 410121 - RNA, 20 nt, Human
cuuugccuauucucugccug

SEQ ID NO: 410122 - RNA, 22 nt, Human
auacauguucguguacauguuc

SEQ ID NO: 410123 - RNA, 22 nt, Human
auguagcagaagauguuuuccu

SEQ ID NO: 410124 - RNA, 22 nt, Human
cauucauuagaauagauaugua

SEQ ID NO: 410125 - RNA, 22 nt, Human
caucauuucacuuagaugaagu

SEQ ID NO: 410126 - RNA, 22 nt, Human
gccaccagggggugcaaggucc

SEQ ID NO: 410127 - RNA, 22 nt, Human
caacaguguugcaaucugaaaa

SEQ ID NO: 410128 - RNA, 22 nt, Human
cuggcagguuuggugucuggug

SEQ ID NO: 410129 - RNA, 21 nt, Human
ucuuuccugcccaguugcccu

SEQ ID NO: 410130 - RNA, 22 nt, Human
ugccaggcccagcagggcggcc

SEQ ID NO: 410131 - RNA, 22 nt, Human
uacaguaucuucuggcaagcau

SEQ ID NO: 410132 - RNA, 22 nt, Human
aucagcaagacuaggggaauac

SEQ ID NO: 410133 - RNA, 22 nt, Human
agaccgagaaguucuccaggcc

SEQ ID NO: 410134 - RNA, 22 nt, Human
cugaggcucugggugucacugu

SEQ ID NO: 410135 - RNA, 22 nt, Human
agcuugaguuuuggaugaagug

SEQ ID NO: 410136 - RNA, 22 nt, Human
gcagcuuuguaaaguaugaagc

SEQ ID NO: 410137 - RNA, 22 nt, Human
aaaauuuugcccuauccuucau

SEQ ID NO: 410138 - RNA, 22 nt, Human
aaagagcuucauuuccauuuau

SEQ ID NO: 410139 - RNA, 21 nt, Human
acagugugcuucucucccucc

SEQ ID NO: 410140 - RNA, 22 nt, Human
agacaggcagaggcugcagagg

SEQ ID NO: 410141 - RNA, 22 nt, Human
uggaagggggaagacagcucug

SEQ ID NO: 410142 - RNA, 22 nt, Human
ggcucuggcaaggggaggcuac

SEQ ID NO: 410143 - RNA, 22 nt, Human
aggccucagugaucaucaucag

SEQ ID NO: 410144 - RNA, 22 nt, Human
gaggccugguuugcaugagaau

SEQ ID NO: 410145 - RNA, 22 nt, Human
cagggacccgcacagguagcau

SEQ ID NO: 410146 - RNA, 17 nt, Human
aagauuucauuagcuga

SEQ ID NO: 410147 - RNA, 22 nt, Human
aggccuggugaaugaaguaucu

SEQ ID NO: 410148 - RNA, 22 nt, Human
caguauuuucaggauuuggaag

SEQ ID NO: 410149 - RNA, 23 nt, Human
aguacauucgaaaaauucuguga

SEQ ID NO: 410150 - RNA, 22 nt, Human
aagauucuacaguagguacauu

SEQ ID NO: 410151 - RNA, 22 nt, Human
ggucagguuuuuaggagugacc

SEQ ID NO: 410152 - RNA, 22 nt, Human
aggcagugugggccaagcuucc

SEQ ID NO: 410153 - RNA, 22 nt, Human
cuggggugugcucagagcaggg

SEQ ID NO: 410154 - RNA, 22 nt, Human
ugcugcauuuaucuucucaaac

SEQ ID NO: 410155 - RNA, 22 nt, Human
ugagaauuacaaaugagucaca

SEQ ID NO: 410156 - RNA, 22 nt, Human
gagcccaggcagagguugcagu

SEQ ID NO: 410157 - RNA, 22 nt, Human
aggcucugguuggcaaguaaag

SEQ ID NO: 410158 - RNA, 21 nt, Human
guggcccugguguggcugcac

SEQ ID NO: 410159 - RNA, 22 nt, Human
cacaugggcguaauguccaugg

SEQ ID NO: 410160 - RNA, 22 nt, Human
ucauuguuauguuuugcugucu

SEQ ID NO: 410161 - RNA, 22 nt, Human
uucaggagaaaguucaguacuu

SEQ ID NO: 410162 - RNA, 22 nt, Human
uggacaggaucugagacugaga

SEQ ID NO: 410163 - RNA, 22 nt, Human
acagaggaaggcugagcugccc

SEQ ID NO: 410164 - RNA, 22 nt, Human
agcugagcacauucaaacaggu

SEQ ID NO: 410165 - RNA, 22 nt, Human
agggaggucuuugaggggcuua

SEQ ID NO: 410166 - RNA, 22 nt, Human
gccuggcuccuaagagcacaac

SEQ ID NO: 410167 - RNA, 20 nt, Human
uccaggagaacugggagccg

SEQ ID NO: 410168 - RNA, 22 nt, Human
cagggccugccugguuccugga

SEQ ID NO: 410169 - RNA, 22 nt, Human
agcagcugcagggagggucugc

SEQ ID NO: 410170 - RNA, 22 nt, Human
aacaggcaaacugugggauccc

SEQ ID NO: 410171 - RNA, 22 nt, Human
ugaaggaaugaguauacuguuu

SEQ ID NO: 410172 - RNA, 22 nt, Human
agugaguggacccugcaaggaa

SEQ ID NO: 410173 - RNA, 22 nt, Human
auuguacuuuuauuacauguag

SEQ ID NO: 410174 - RNA, 22 nt, Human
acugaaggucucagcaaggaug

SEQ ID NO: 410175 - RNA, 22 nt, Human
ggcugcugggaauaugccagcu

SEQ ID NO: 410176 - RNA, 17 nt, Human
ucaggcugggugcagug

SEQ ID NO: 410177 - RNA, 22 nt, Human
cauugcacuccacccuaggcaa

SEQ ID NO: 410178 - RNA, 22 nt, Human
aggcacugagaggcuguguugc

SEQ ID NO: 410179 - RNA, 22 nt, Human
agcagggcugcggccccaccac

SEQ ID NO: 410180 - RNA, 18 nt, Human
aagaggaggagcagguug

SEQ ID NO: 410181 - RNA, 22 nt, Human
gcuucccacagcuggacugggg

SEQ ID NO: 410182 - RNA, 19 nt, Human
acagggcagcaauaggaua

SEQ ID NO: 410183 - RNA, 22 nt, Human
aacaggagaguaaauauaugau

SEQ ID NO: 410184 - RNA, 22 nt, Human
gugcauguuaaugguguacaaa

SEQ ID NO: 410185 - RNA, 22 nt, Human
aggugcuuggcucgugcacaca

SEQ ID NO: 410186 - RNA, 22 nt, Human
ugcuccuuccucauccugugca

SEQ ID NO: 410187 - RNA, 22 nt, Human
caugcacuuaccugaaauucaa

SEQ ID NO: 410188 - RNA, 22 nt, Human
uuguuuuggaagaacuuacucu

SEQ ID NO: 410189 - RNA, 22 nt, Human
ugucccagggaaggcccagcac

SEQ ID NO: 410190 - RNA, 22 nt, Human
uggcucugagacacaggcucuc

SEQ ID NO: 410191 - RNA, 22 nt, Human
guauuagguuggugcaaaauug

SEQ ID NO: 410192 - RNA, 22 nt, Human
ugccugggggacuaaggccaaa

SEQ ID NO: 410193 - RNA, 20 nt, Human
ucucaggccccaguuuucuu

SEQ ID NO: 410194 - RNA, 22 nt, Human
uguuuuaaucucccauugcucu

SEQ ID NO: 410195 - RNA, 21 nt, Human
cugcucugacagugaggccag

SEQ ID NO: 410196 - RNA, 22 nt, Human
uggagccuguguuucugcccag

SEQ ID NO: 410197 - RNA, 22 nt, Human
uggcugagggcacuaugaagcc

SEQ ID NO: 410198 - RNA, 22 nt, Human
uagcccagagucccaauuccag

SEQ ID NO: 410199 - RNA, 22 nt, Human
gcucagaaaagugaggcucagu

SEQ ID NO: 410200 - RNA, 22 nt, Human
cagagcugugauaaauagauau

SEQ ID NO: 410201 - RNA, 22 nt, Human
uaaguucaaugaacucaguucu

SEQ ID NO: 410202 - RNA, 19 nt, Human
cagcucaguuugauucucu

SEQ ID NO: 410203 - RNA, 22 nt, Human
guuauguaucuugauugggugg

SEQ ID NO: 410204 - RNA, 22 nt, Human
ccuggcagcauugguagagauu

SEQ ID NO: 410205 - RNA, 22 nt, Human
uucaaugagcccggggccauag

SEQ ID NO: 410206 - RNA, 22 nt, Human
aggucaaggccaaaagaguggu

SEQ ID NO: 410207 - RNA, 22 nt, Human
uggccugggcaugaagcaucgu

SEQ ID NO: 410208 - RNA, 22 nt, Human
ucaucaaagucaaagaaugacu

SEQ ID NO: 410209 - RNA, 22 nt, Human
gaggcagugucgguggcaggau

SEQ ID NO: 410210 - RNA, 22 nt, Human
gcuggccuccugcuagauggaa

SEQ ID NO: 410211 - RNA, 22 nt, Human
gcugccacauuuucaggacuaa

SEQ ID NO: 410212 - RNA, 22 nt, Human
ucugaggcuucagacuguacug

SEQ ID NO: 410213 - RNA, 22 nt, Human
acugaguguaggacuuugaguu

SEQ ID NO: 410214 - RNA, 22 nt, Human
ucucagaggucuucagccucug

SEQ ID NO: 410215 - RNA, 22 nt, Human
aggggcuggcuuaucugagagu

SEQ ID NO: 410216 - RNA, 22 nt, Human
acaaaggcaggauugacuuagu

SEQ ID NO: 410217 - RNA, 22 nt, Human
ccugcagcuccggauuucuggg

SEQ ID NO: 410218 - RNA, 22 nt, Human
caggaugggugucggccagcac

SEQ ID NO: 410219 - RNA, 22 nt, Human
uguacacugcaggaugcauugc

SEQ ID NO: 410220 - RNA, 22 nt, Human
guccucugggagccuugagccu

SEQ ID NO: 410221 - RNA, 22 nt, Human
cugugcuggagaugggccagag

SEQ ID NO: 410222 - RNA, 22 nt, Human
aggagaaggaggccccucacac

SEQ ID NO: 410223 - RNA, 22 nt, Human
aggucaaguuuagauagaguua

SEQ ID NO: 410224 - RNA, 21 nt, Human
agggaaagaaaaugagcuaau

SEQ ID NO: 410225 - RNA, 22 nt, Human
ucauccagccucaucaggagcu

SEQ ID NO: 410226 - RNA, 22 nt, Human
ccuggcaggccccuccuggauu

SEQ ID NO: 410227 - RNA, 19 nt, Human
ccucccacggauuccuucc

SEQ ID NO: 410228 - RNA, 22 nt, Human
cugggcugucccaaccccaucc

SEQ ID NO: 410229 - RNA, 22 nt, Human
aggcacaggaaugucauccagu

SEQ ID NO: 410230 - RNA, 22 nt, Human
ugagaagcagcuuacagguguc

SEQ ID NO: 410231 - RNA, 21 nt, Human
acagauuuuauaucucugcug

SEQ ID NO: 410232 - RNA, 22 nt, Human
uuauuucauguaaaauuuaugu

SEQ ID NO: 410233 - RNA, 22 nt, Human
ugaauaugugacuuugauuuca

SEQ ID NO: 410234 - RNA, 22 nt, Human
ucuggcucauacaagccugcaa

SEQ ID NO: 410235 - RNA, 18 nt, Human
ccucaggggaccuggcag

SEQ ID NO: 410236 - RNA, 22 nt, Human
agaggccaggcugcagagggau

SEQ ID NO: 410237 - RNA, 22 nt, Human
cccugcagaccaaugccauaga

SEQ ID NO: 410238 - RNA, 22 nt, Human
ugaggaagccaaacagcuacac

SEQ ID NO: 410239 - RNA, 22 nt, Human
ggagccugggcauuaguaauuu

SEQ ID NO: 410240 - RNA, 22 nt, Human
aauuucuccaagaaugcuuaga

SEQ ID NO: 410241 - RNA, 22 nt, Human
uuuauccagaaucaggauuuuu

SEQ ID NO: 410242 - RNA, 22 nt, Human
acagggccucagcugauucugg

SEQ ID NO: 410243 - RNA, 22 nt, Human
ugaaacaaaaguauguagcuug

SEQ ID NO: 410244 - RNA, 22 nt, Human
ugccugcucuuaccacucuccc

SEQ ID NO: 410245 - RNA, 18 nt, Human
gcagcugcaguuguagcu

SEQ ID NO: 410246 - RNA, 22 nt, Human
acagcuguggccacuugcaucc

SEQ ID NO: 410247 - RNA, 22 nt, Human
ugcaggaauagcuacagagcug

SEQ ID NO: 410248 - RNA, 20 nt, Human
ucucugagcuucucuugggg

SEQ ID NO: 410249 - RNA, 22 nt, Human
ccacagccauuccagggaggcu

SEQ ID NO: 410250 - RNA, 22 nt, Human
ggcugagccaugggcacugcag

SEQ ID NO: 410251 - RNA, 22 nt, Human
agcugcccuucucuugcccuug

SEQ ID NO: 410252 - RNA, 22 nt, Human
agggaaagguagugaggucaca

SEQ ID NO: 410253 - RNA, 22 nt, Human
aaagggagcauggcugcaggga

SEQ ID NO: 410254 - RNA, 22 nt, Human
gagucugagucuaauggcccca

SEQ ID NO: 410255 - RNA, 22 nt, Human
acucucucacagcuuggcugau

SEQ ID NO: 410256 - RNA, 20 nt, Human
ucauuacagugcuaagaugu

SEQ ID NO: 410257 - RNA, 22 nt, Human
ugcuuuauggauuuguguccug

SEQ ID NO: 410258 - RNA, 22 nt, Human
aucaggaucacugggagucuug

SEQ ID NO: 410259 - RNA, 22 nt, Human
auagaacagaaacagaugcaca

SEQ ID NO: 410260 - RNA, 23 nt, Human
cagggcugguagggaagagcgug

SEQ ID NO: 410261 - RNA, 22 nt, Human
gaaggccauugcguccugggau

SEQ ID NO: 410262 - RNA, 22 nt, Human
agugauuugggugucagaaagu

SEQ ID NO: 410263 - RNA, 22 nt, Human
auaaauggcuuucauuccuagg

SEQ ID NO: 410264 - RNA, 22 nt, Human
gccuggcaggccucaugagggg

SEQ ID NO: 410265 - RNA, 22 nt, Human
acuucuggugucauacugcauu

SEQ ID NO: 410266 - RNA, 20 nt, Human
aaaaacaguaaugcugaaga

SEQ ID NO: 410267 - RNA, 22 nt, Human
ccagguggaggugugagguccu

SEQ ID NO: 410268 - RNA, 22 nt, Human
gacaggcuuccuaagugccaga

SEQ ID NO: 410269 - RNA, 22 nt, Human
ucuauuuuauacucaaaucuuc

SEQ ID NO: 410270 - RNA, 22 nt, Human
ggcugcagaaguacuuccggau

SEQ ID NO: 410271 - RNA, 22 nt, Human
ucacagacauggugagguaaca

SEQ ID NO: 410272 - RNA, 22 nt, Human
ccagaagaggacacagugugga

SEQ ID NO: 410273 - RNA, 22 nt, Human
cucaggaggugguagaggcccu

SEQ ID NO: 410274 - RNA, 22 nt, Human
uaacagcuggcguuauaggaau

SEQ ID NO: 410275 - RNA, 22 nt, Human
cuggcucagacagcugugcagu

SEQ ID NO: 410276 - RNA, 22 nt, Human
ggcacugacacuagcauggcac

SEQ ID NO: 410277 - RNA, 22 nt, Human
ugcugccagccaggccauggag

SEQ ID NO: 410278 - RNA, 22 nt, Human
gagagcugcaagguagggcggg

SEQ ID NO: 410279 - RNA, 19 nt, Human
ccagcagacacagcugccc

SEQ ID NO: 410280 - RNA, 22 nt, Human
agagccugcuguguaagucaca

SEQ ID NO: 410281 - RNA, 22 nt, Human
uuugaaagaaaccagugaguga

SEQ ID NO: 410282 - RNA, 22 nt, Human
aaguucaaguguaaucuuuauu

SEQ ID NO: 410283 - RNA, 22 nt, Human
agaugcugugaggaagcuagga

SEQ ID NO: 410284 - RNA, 22 nt, Human
cagcuccugcagcugcugccgu

SEQ ID NO: 410285 - RNA, 22 nt, Human
gcagggccuuagcagcggcugc

SEQ ID NO: 410286 - RNA, 22 nt, Human
uguccuuuaugaaaugguguuu

SEQ ID NO: 410287 - RNA, 22 nt, Human
gugaggcagagaugccaaaacu

SEQ ID NO: 410288 - RNA, 22 nt, Human
acauuucugucuuagggacugu

SEQ ID NO: 410289 - RNA, 22 nt, Human
agcuguguagggaaucagagaa

SEQ ID NO: 410290 - RNA, 22 nt, Human
augggcagacagggagcucacg

SEQ ID NO: 410291 - RNA, 22 nt, Human
ucucaggccccugaguuucucu

SEQ ID NO: 410292 - RNA, 22 nt, Human
uuugaaagacagaauauuuuug

SEQ ID NO: 410293 - RNA, 22 nt, Human
ucagaagccggaagugcuccuc

SEQ ID NO: 410294 - RNA, 22 nt, Human
aucaguuuaacugucaagagcc

SEQ ID NO: 410295 - RNA, 21 nt, Human
gugguuauuuucauuagcauc

SEQ ID NO: 410296 - RNA, 22 nt, Human
gcagggcuauuggaaggagaug

SEQ ID NO: 410297 - RNA, 22 nt, Human
aagcagaauuucccacuaguug

SEQ ID NO: 410298 - RNA, 21 nt, Human
agcagaggggacauguuugau

SEQ ID NO: 410299 - RNA, 22 nt, Human
agacucugugcuccuugcuuuc

SEQ ID NO: 410300 - RNA, 18 nt, Human
ggccugaggauuucagca

SEQ ID NO: 410301 - RNA, 22 nt, Human
auacaaguugugauaauguaaa

SEQ ID NO: 410302 - RNA, 22 nt, Human
cagcugccaugacauguccugc

SEQ ID NO: 410303 - RNA, 22 nt, Human
uccagcuggggcaguggcuggg

SEQ ID NO: 410304 - RNA, 22 nt, Human
aaagcagcagcacguggaagag

SEQ ID NO: 410305 - RNA, 22 nt, Human
gagcucuguguagccugagggu

SEQ ID NO: 410306 - RNA, 22 nt, Human
cuggcucagugccuucagaagu

SEQ ID NO: 410307 - RNA, 22 nt, Human
cagggccacacggaagggaaca

SEQ ID NO: 410308 - RNA, 22 nt, Human
gcugucaguuuuacccacagac

SEQ ID NO: 410309 - RNA, 22 nt, Human
uagcagcugugaguaaaagcca

SEQ ID NO: 410310 - RNA, 22 nt, Human
ccucucccacguggcagaggcu

SEQ ID NO: 410311 - RNA, 22 nt, Human
ggugccaggcucccagcucagg

SEQ ID NO: 410312 - RNA, 22 nt, Human
ccucuuccacugggccccaucc

SEQ ID NO: 410313 - RNA, 22 nt, Human
ucugcaucauuuuucagagccg

SEQ ID NO: 410314 - RNA, 22 nt, Human
gagagugagauccuccugggga

SEQ ID NO: 410315 - RNA, 22 nt, Human
guuccauaucacagcagacgaa

SEQ ID NO: 410316 - RNA, 22 nt, Human
ucucaggaucuaauacauggua

SEQ ID NO: 410317 - RNA, 22 nt, Human
cugagagaaucaugcugcaggu

SEQ ID NO: 410318 - RNA, 22 nt, Human
ucaagagauugaauaauaacug

SEQ ID NO: 410319 - RNA, 22 nt, Human
gcucugggauuaccagccuuag

SEQ ID NO: 410320 - RNA, 19 nt, Human
aggccugggguuuugcacu

SEQ ID NO: 410321 - RNA, 22 nt, Human
cugagagucagcuucuccuccu

SEQ ID NO: 410322 - RNA, 22 nt, Human
ucagagaggauuuuaauaagug

SEQ ID NO: 410323 - RNA, 22 nt, Human
acuguccauaauauuggugaac

SEQ ID NO: 410324 - RNA, 22 nt, Human
agauggaguuaguaccagaguc

SEQ ID NO: 410325 - RNA, 22 nt, Human
uucuggaguauuccuggcaccu

SEQ ID NO: 410326 - RNA, 23 nt, Human
acagcugcaccuggccgccuggc

SEQ ID NO: 410327 - RNA, 22 nt, Human
uggcugcugagaaggcagcugu

SEQ ID NO: 410328 - RNA, 22 nt, Human
ccagcuuuauagcuucaaagga

SEQ ID NO: 410329 - RNA, 21 nt, Human
ucagaguggaagacaguuuga

SEQ ID NO: 410330 - RNA, 22 nt, Human
aaaauccugcugacucgagaug

SEQ ID NO: 410331 - RNA, 22 nt, Human
ucacugcucucuaagcaucgcc

SEQ ID NO: 410332 - RNA, 22 nt, Human
uggcagagugcggcauccccug

SEQ ID NO: 410333 - RNA, 22 nt, Human
agccaggcuacuccuugcugac

SEQ ID NO: 410334 - RNA, 18 nt, Human
uccugccugugccccagg

SEQ ID NO: 410335 - RNA, 22 nt, Human
uguccucagauaugucuacucu

SEQ ID NO: 410336 - RNA, 22 nt, Human
cacaggagguuaggaagugguc

SEQ ID NO: 410337 - RNA, 22 nt, Human
agacuucuuugugagcauuuuc

SEQ ID NO: 410338 - RNA, 22 nt, Human
cucugggcacauuuuccaggac

SEQ ID NO: 410339 - RNA, 22 nt, Human
uauguacaucguugaauucaaa

SEQ ID NO: 410340 - RNA, 22 nt, Human
gccucugcacuguggcacacca

SEQ ID NO: 410341 - RNA, 22 nt, Human
ccuccagcgcgauccacuccgg

SEQ ID NO: 410342 - RNA, 23 nt, Human
agaauuguaaauagaauauaccu

SEQ ID NO: 410343 - RNA, 22 nt, Human
ggaugcuggggaccaaucucug

SEQ ID NO: 410344 - RNA, 22 nt, Human
cccuggaggcggagcuugcagu

SEQ ID NO: 410345 - RNA, 22 nt, Human
cuguccuccggccaccuacagu

SEQ ID NO: 410346 - RNA, 22 nt, Human
gcccagcacagcuggaagaguc

SEQ ID NO: 410347 - RNA, 22 nt, Human
auuuccaccggcucaggaaguu

SEQ ID NO: 410348 - RNA, 22 nt, Human
uacuuuggauccuuacaauagc

SEQ ID NO: 410349 - RNA, 22 nt, Human
acucucagaggguggcagcaau

SEQ ID NO: 410350 - RNA, 22 nt, Human
agaagccacaggccucgucugg

SEQ ID NO: 410351 - RNA, 22 nt, Human
uuccagcuaacucacaucccuu

SEQ ID NO: 410352 - RNA, 17 nt, Human
cgagggcuugcuggcuc

SEQ ID NO: 410353 - RNA, 22 nt, Human
uucucucauucaaauuaaagug

SEQ ID NO: 410354 - RNA, 22 nt, Human
agaagcuugaaggagcagugac

SEQ ID NO: 410355 - RNA, 22 nt, Human
ucuuugcaucccuuccauaguu

SEQ ID NO: 410356 - RNA, 22 nt, Human
gugguaauuuaauccuacacug

SEQ ID NO: 410357 - RNA, 22 nt, Human
uggcagagacaaggccgggccu

SEQ ID NO: 410358 - RNA, 22 nt, Human
caggucccgccccgggcugacc

SEQ ID NO: 410359 - RNA, 22 nt, Human
ucauuucuaucuaugcagcuuc

SEQ ID NO: 410360 - RNA, 22 nt, Human
uuguuacacauaauaacauuuu

SEQ ID NO: 410361 - RNA, 22 nt, Human
agcagggcuggauuuggcaaga

SEQ ID NO: 410362 - RNA, 22 nt, Human
acacauaagccuaaucaucucc

SEQ ID NO: 410363 - RNA, 22 nt, Human
aggucauuccagccauuccccu

SEQ ID NO: 410364 - RNA, 22 nt, Human
cagaguacugggagaacagaag

SEQ ID NO: 410365 - RNA, 22 nt, Human
agcugccacauggugucacugu

SEQ ID NO: 410366 - RNA, 22 nt, Human
cacuuagucucaccaguucagu

SEQ ID NO: 410367 - RNA, 22 nt, Human
cuggagcucuccagagccccgu

SEQ ID NO: 410368 - RNA, 22 nt, Human
agaauuagguaaguucaucuga

SEQ ID NO: 410369 - RNA, 22 nt, Human
agcagaacugaugagacuugag

SEQ ID NO: 410370 - RNA, 22 nt, Human
gugccugggcaugagcuuguug

SEQ ID NO: 410371 - RNA, 22 nt, Human
ugcagggaauccagucuagggu

SEQ ID NO: 410372 - RNA, 22 nt, Human
uuguaaaugaccuuuucuaauu

SEQ ID NO: 410373 - RNA, 22 nt, Human
ugcagaagacacaagguaacgu

SEQ ID NO: 410374 - RNA, 22 nt, Human
aaggcccuggcaggaagcagga

SEQ ID NO: 410375 - RNA, 18 nt, Human
ugugguggagcugccuuc

SEQ ID NO: 410376 - RNA, 22 nt, Human
ccuucagaccuagacaggaauc

SEQ ID NO: 410377 - RNA, 22 nt, Human
aggggccugguuggccucuguu

SEQ ID NO: 410378 - RNA, 22 nt, Human
gcugcucucagagcucaugcug

SEQ ID NO: 410379 - RNA, 22 nt, Human
cagcuauuuucucauuaaggau

SEQ ID NO: 410380 - RNA, 22 nt, Human
aguauuuccuggcuuaucugcu

SEQ ID NO: 410381 - RNA, 22 nt, Human
uagcagaaccagcagucaauuu

SEQ ID NO: 410382 - RNA, 22 nt, Human
gcuguacaguuuacuagguggg

SEQ ID NO: 410383 - RNA, 20 nt, Human
gaggaaaagcugccaggccu

SEQ ID NO: 410384 - RNA, 22 nt, Human
uaugcacgucuauuuaugaaga

SEQ ID NO: 410385 - RNA, 22 nt, Human
aacugcauuugcauaaguccau

SEQ ID NO: 410386 - RNA, 22 nt, Human
gaguaagagcuggcuuuggugu

SEQ ID NO: 410387 - RNA, 22 nt, Human
acccagagccagggucaggagc

SEQ ID NO: 410388 - RNA, 22 nt, Human
ugcugucccccgugucugggcu

SEQ ID NO: 410389 - RNA, 22 nt, Human
ugcguugcgcuccugcagcagg

SEQ ID NO: 410390 - RNA, 22 nt, Human
caguacuuguccucagguguua

SEQ ID NO: 410391 - RNA, 22 nt, Human
cgcagcagccccgugguaggug

SEQ ID NO: 410392 - RNA, 22 nt, Human
uuaagucauuucugauuauaga

SEQ ID NO: 410393 - RNA, 22 nt, Human
gcugccuuuuaaagccucgcuu

SEQ ID NO: 410394 - RNA, 22 nt, Human
ucagggacagggugcugcugcg

SEQ ID NO: 410395 - RNA, 22 nt, Human
ugaugggacugccagcugcuga

SEQ ID NO: 410396 - RNA, 22 nt, Human
agacagagauacuauguuguca

SEQ ID NO: 410397 - RNA, 21 nt, Human
uccucugcagugagguggccu

SEQ ID NO: 410398 - RNA, 22 nt, Human
cugcccagaaucacucacucga

SEQ ID NO: 410399 - RNA, 23 nt, Human
acaugggagggacauggaggcug

SEQ ID NO: 410400 - RNA, 23 nt, Human
agugcugaauugaaagcuccagg

SEQ ID NO: 410401 - RNA, 22 nt, Human
uuuccucugcugccauugcccc

SEQ ID NO: 410402 - RNA, 20 nt, Human
uugcagcagugaggugaagg

SEQ ID NO: 410403 - RNA, 22 nt, Human
uuaaacauuuauggaggcagca

SEQ ID NO: 410404 - RNA, 22 nt, Human
gggugggguguaucggauccua

SEQ ID NO: 410405 - RNA, 22 nt, Human
ugagccuggccugcagagacca

SEQ ID NO: 410406 - RNA, 22 nt, Human
ggagcagccgcgucucagggca

SEQ ID NO: 410407 - RNA, 17 nt, Human
guccugggaggagagag

SEQ ID NO: 410408 - RNA, 22 nt, Human
ugcauuauaacugaauguuguu

SEQ ID NO: 410409 - RNA, 22 nt, Human
aaagucaaugauuucuccugga

SEQ ID NO: 410410 - RNA, 22 nt, Human
uggucaacaggcagggaugaaa

SEQ ID NO: 410411 - RNA, 22 nt, Human
cacugaaggcuaggauuagaug

SEQ ID NO: 410412 - RNA, 22 nt, Human
uggggcuggcacagucucuauu

SEQ ID NO: 410413 - RNA, 18 nt, Human
aucucccauuggccaagg

SEQ ID NO: 410414 - RNA, 22 nt, Human
auucaaguucuucugucuuugc

SEQ ID NO: 410415 - RNA, 22 nt, Human
cacuggggugggccugguagag

SEQ ID NO: 410416 - RNA, 22 nt, Human
gcuggcaccugcaccaagcagg

SEQ ID NO: 410417 - RNA, 22 nt, Human
cugccugcaugcugccauagcu

SEQ ID NO: 410418 - RNA, 22 nt, Human
ugaagcagcaaaugaugggaga

SEQ ID NO: 410419 - RNA, 19 nt, Human
gagaggccugugcuugaag

SEQ ID NO: 410420 - RNA, 22 nt, Human
ggccuuggugcucuguguugca

SEQ ID NO: 410421 - RNA, 22 nt, Human
caguugcuacaguucaagugug

SEQ ID NO: 410422 - RNA, 22 nt, Human
gccuggcacauugcaguggauu

SEQ ID NO: 410423 - RNA, 22 nt, Human
cugaaggaagcagaagcgaggu

SEQ ID NO: 410424 - RNA, 19 nt, Human
ugagacagggauucaggug

SEQ ID NO: 410425 - RNA, 22 nt, Human
uagcagcucacagccucccauu

SEQ ID NO: 410426 - RNA, 22 nt, Human
gcagggcaguaagagcuagagu

SEQ ID NO: 410427 - RNA, 22 nt, Human
ugucagcagcugguuugcuguu

SEQ ID NO: 410428 - RNA, 22 nt, Human
gaaaucugaacaacagcuguca

SEQ ID NO: 410429 - RNA, 22 nt, Human
aacaugaaaguugcuaagugca

SEQ ID NO: 410430 - RNA, 22 nt, Human
ccaggauggggagcagauagaa

SEQ ID NO: 410431 - RNA, 22 nt, Human
uggcagagaauaaaucuugacu

SEQ ID NO: 410432 - RNA, 22 nt, Human
gaggcucagagaagucauggua

SEQ ID NO: 410433 - RNA, 22 nt, Human
uagaggugacacugagaccaua

SEQ ID NO: 410434 - RNA, 22 nt, Human
guuacaaaggacugggggccac

SEQ ID NO: 410435 - RNA, 22 nt, Human
uuucuguuaggcaucauuuuaa

SEQ ID NO: 410436 - RNA, 22 nt, Human
cacacaggagagugcuggaggu

SEQ ID NO: 410437 - RNA, 22 nt, Human
ucaggaugguguggaggaaaua

SEQ ID NO: 410438 - RNA, 22 nt, Human
ggcugcugguggaaugguaggc

SEQ ID NO: 410439 - RNA, 19 nt, Human
ccugugugggguagagauc

SEQ ID NO: 410440 - RNA, 22 nt, Human
guuugcauuucuugaacuauau

SEQ ID NO: 410441 - RNA, 22 nt, Human
gccccugggagcagagccacca

SEQ ID NO: 410442 - RNA, 22 nt, Human
ucaucacuguaucauugauaga

SEQ ID NO: 410443 - RNA, 22 nt, Human
agucccagugagaugagccacg

SEQ ID NO: 410444 - RNA, 22 nt, Human
aggugcagaaaaaaguccuuua

SEQ ID NO: 410445 - RNA, 22 nt, Human
uuccucaugggguuccuucaga

SEQ ID NO: 410446 - RNA, 22 nt, Human
ugggaccaagucauuucuuuag

SEQ ID NO: 410447 - RNA, 22 nt, Human
cacagcauaaugaaauauacuu

SEQ ID NO: 410448 - RNA, 22 nt, Human
ggcagcaguccauggcccaagg

SEQ ID NO: 410449 - RNA, 18 nt, Human
cccagccucuccuuucua

SEQ ID NO: 410450 - RNA, 22 nt, Human
gcagcugccccgacugugaguc

SEQ ID NO: 410451 - RNA, 22 nt, Human
aagaugauguuguguuuucacu

SEQ ID NO: 410452 - RNA, 22 nt, Human
cuguauuuucaugccuacguac

SEQ ID NO: 410453 - RNA, 22 nt, Human
ugaaaguuacaggaaaacagau

SEQ ID NO: 410454 - RNA, 22 nt, Human
ggcaggcaggagcgugcuuggg

SEQ ID NO: 410455 - RNA, 22 nt, Human
cugaaggagguagagugacaua

SEQ ID NO: 410456 - RNA, 22 nt, Human
cagaguguggcaucuuccaacu

SEQ ID NO: 410457 - RNA, 22 nt, Human
aaggaagggaaauagugauguc

SEQ ID NO: 410458 - RNA, 22 nt, Human
ccucuucugagugagacucccu

SEQ ID NO: 410459 - RNA, 22 nt, Human
cacaggaaugaacagggaaaga

SEQ ID NO: 410460 - RNA, 22 nt, Human
ggcucccacccauagggcgagu

SEQ ID NO: 410461 - RNA, 22 nt, Human
uuaacagagaacauagaaguag

SEQ ID NO: 410462 - RNA, 22 nt, Human
cauuucuauggcaaugggaaaa

SEQ ID NO: 410463 - RNA, 22 nt, Human
agcugccaaguuggaguagcaa

SEQ ID NO: 410464 - RNA, 22 nt, Human
ggccaccuuccaguugccugca

SEQ ID NO: 410465 - RNA, 22 nt, Human
uuucauaaugucacagucaaaa

SEQ ID NO: 410466 - RNA, 22 nt, Human
uagagcauuuagaggggcagga

SEQ ID NO: 410467 - RNA, 22 nt, Human
ugucccagguccuagaugacca

SEQ ID NO: 410468 - RNA, 22 nt, Human
uugaucagguugcuguggugua

SEQ ID NO: 410469 - RNA, 22 nt, Human
gugcucuccuggcugcccugac

SEQ ID NO: 410470 - RNA, 22 nt, Human
cccuggagggacagcugcucua

SEQ ID NO: 410471 - RNA, 22 nt, Human
ccugggugaaaucucuccugca

SEQ ID NO: 410472 - RNA, 21 nt, Human
aaggcagaagcauggaaugag

SEQ ID NO: 410473 - RNA, 22 nt, Human
acugaaggguaaugugggagcc

SEQ ID NO: 410474 - RNA, 22 nt, Human
uuacaaagaguguucuuuucca

SEQ ID NO: 410475 - RNA, 22 nt, Human
cagcagcccacgcgugcugucc

SEQ ID NO: 410476 - RNA, 22 nt, Human
cugcuuugaggggcucuguaua

SEQ ID NO: 410477 - RNA, 22 nt, Human
uuuguuaaauauuuauugagug

SEQ ID NO: 410478 - RNA, 22 nt, Human
ccuggaugauccaugucaugga

SEQ ID NO: 410479 - RNA, 22 nt, Human
ggaaagagcuaaaagggugaga

SEQ ID NO: 410480 - RNA, 22 nt, Human
ucagcuuugcaaguuagaaaau

SEQ ID NO: 410481 - RNA, 22 nt, Human
agcagcucugagaggccagcac

SEQ ID NO: 410482 - RNA, 22 nt, Human
gggcucuggauggagccugcag

SEQ ID NO: 410483 - RNA, 22 nt, Human
agaccagcugccucccagggcc

SEQ ID NO: 410484 - RNA, 22 nt, Human
uucacauuaucaggauuguuuc

SEQ ID NO: 410485 - RNA, 22 nt, Human
auccuucagcugcccuguuacc

SEQ ID NO: 410486 - RNA, 22 nt, Human
aaaguguugauaugugacaucc

SEQ ID NO: 410487 - RNA, 22 nt, Human
caguguggugagauuccaggug

SEQ ID NO: 410488 - RNA, 20 nt, Human
aaaguguaagcauauaauua

SEQ ID NO: 410489 - RNA, 19 nt, Human
agauggggaagagugugag

SEQ ID NO: 410490 - RNA, 22 nt, Human
guaaaguucuauuugaauuuag

SEQ ID NO: 410491 - RNA, 22 nt, Human
ugaaagaacuagcaucuucaag

SEQ ID NO: 410492 - RNA, 22 nt, Human
gacaggguacgggcuaggcaca

SEQ ID NO: 410493 - RNA, 22 nt, Human
caacagaagguguacuacugaa

SEQ ID NO: 410494 - RNA, 22 nt, Human
cuguuuaucccuuuggucagca

SEQ ID NO: 410495 - RNA, 22 nt, Human
acaaagaucuugcuuuccuacu

SEQ ID NO: 410496 - RNA, 22 nt, Human
ugacagaaugugacucucagau

SEQ ID NO: 410497 - RNA, 22 nt, Human
uggaggaaucagggcuuaggcu

SEQ ID NO: 410498 - RNA, 22 nt, Human
ccuguacuagggucucauugcc

SEQ ID NO: 410499 - RNA, 20 nt, Human
cugggcagguguuugaucuc

SEQ ID NO: 410500 - RNA, 22 nt, Human
gguggcaggcccugagcauccc

SEQ ID NO: 410501 - RNA, 20 nt, Human
caggccucugggggcccugg

SEQ ID NO: 410502 - RNA, 22 nt, Human
guuugcauuuauuagucuucug

SEQ ID NO: 410503 - RNA, 22 nt, Human
agucccagccuguaggauuggg

SEQ ID NO: 410504 - RNA, 20 nt, Human
gggaguggugguagccugug

SEQ ID NO: 410505 - RNA, 22 nt, Human
uaaggcaccuguccaggcuggg

SEQ ID NO: 410506 - RNA, 19 nt, Human
ggagccuggagcacgugcc

SEQ ID NO: 410507 - RNA, 17 nt, Human
ccucacagggaccagac

SEQ ID NO: 410508 - RNA, 22 nt, Human
gggcacagagggucuugaagaa

SEQ ID NO: 410509 - RNA, 22 nt, Human
ccugagacaugaaccaggcucc

SEQ ID NO: 410510 - RNA, 22 nt, Human
cugcuuuguggaaucacacugg

SEQ ID NO: 410511 - RNA, 22 nt, Human
gcauuuaaauuugaacuucaga

SEQ ID NO: 410512 - RNA, 22 nt, Human
acagaaagaagguguauuugag

SEQ ID NO: 410513 - RNA, 22 nt, Human
gcagagacuccacugucuugug

SEQ ID NO: 410514 - RNA, 22 nt, Human
agcaggaaggcuuuggggguuc

SEQ ID NO: 410515 - RNA, 22 nt, Human
agaggaggcagcuuaacucagu

SEQ ID NO: 410516 - RNA, 22 nt, Human
uguguacagcaggauuucucaa

SEQ ID NO: 410517 - RNA, 22 nt, Human
cugaaggauuagagagcacuua

SEQ ID NO: 410518 - RNA, 22 nt, Human
gcacccagcccagggcgugaug

SEQ ID NO: 410519 - RNA, 22 nt, Human
cagggcccauggcucagguagg

SEQ ID NO: 410520 - RNA, 22 nt, Human
cucccaggggaacuaucaagua

SEQ ID NO: 410521 - RNA, 22 nt, Human
ucugggcucuuaguguacccuc

SEQ ID NO: 410522 - RNA, 22 nt, Human
agagccugcagcugugaagaaa

SEQ ID NO: 410523 - RNA, 22 nt, Human
aaaucaguuguuauauuaaaga

SEQ ID NO: 410524 - RNA, 21 nt, Human
cagggcacacagaggauggua

SEQ ID NO: 410525 - RNA, 20 nt, Human
uguugauuggugucaucuca

SEQ ID NO: 410526 - RNA, 22 nt, Human
ugggcugaguguggaacuaguu

SEQ ID NO: 410527 - RNA, 22 nt, Human
cuuuggcaugguccucacuaua

SEQ ID NO: 410528 - RNA, 18 nt, Human
uagggcucuagggaguga

SEQ ID NO: 410529 - RNA, 22 nt, Human
uaaauguggagacucaggaguc

SEQ ID NO: 410530 - RNA, 22 nt, Human
ggccugaggccaccagcagccc

SEQ ID NO: 410531 - RNA, 22 nt, Human
aaauauguauggaguucaugaa

SEQ ID NO: 410532 - RNA, 22 nt, Human
uguauuuucuucuggaagcuua

SEQ ID NO: 410533 - RNA, 22 nt, Human
cugggcuggagugcaauggcgc

SEQ ID NO: 410534 - RNA, 22 nt, Human
aaggcugugucagaagcucccu

SEQ ID NO: 410535 - RNA, 22 nt, Human
cagaguaaggagcugucaaacg

SEQ ID NO: 410536 - RNA, 22 nt, Human
uccaucagauucccuccugaga

SEQ ID NO: 410537 - RNA, 22 nt, Human
uggagcaggcaucuuucucucu

SEQ ID NO: 410538 - RNA, 23 nt, Human
uggccuggagagaaaagaugagu

SEQ ID NO: 410539 - RNA, 22 nt, Human
gugcagugacccuggagagcug

SEQ ID NO: 410540 - RNA, 22 nt, Human
caacauauaauauuugaguucu

SEQ ID NO: 410541 - RNA, 22 nt, Human
agggcagcuggaagguggcuuc

SEQ ID NO: 410542 - RNA, 21 nt, Human
agaaaaaccagcauguuuuca

SEQ ID NO: 410543 - RNA, 22 nt, Human
uggcccugaggacccagugugg

SEQ ID NO: 410544 - RNA, 22 nt, Human
gaggacagcuuagggcuuccug

SEQ ID NO: 410545 - RNA, 22 nt, Human
uucacaggugacuggggauaac

SEQ ID NO: 410546 - RNA, 22 nt, Human
agcugggaugauaaccucaguc

SEQ ID NO: 410547 - RNA, 22 nt, Human
gucacacuagggccaaguggag

SEQ ID NO: 410548 - RNA, 22 nt, Human
gggagccagcagggcauggagc

SEQ ID NO: 410549 - RNA, 22 nt, Human
uauguguuugacacccugcaag

SEQ ID NO: 410550 - RNA, 22 nt, Human
aggcacugacaauucuggacug

SEQ ID NO: 410551 - RNA, 22 nt, Human
uggccugguccuugucaaggca

SEQ ID NO: 410552 - RNA, 21 nt, Human
uggaaagauucaaagaccagg

SEQ ID NO: 410553 - RNA, 22 nt, Human
uaucugcaucugcauguguauu

SEQ ID NO: 410554 - RNA, 22 nt, Human
gggaccugcgccacucacuguc

SEQ ID NO: 410555 - RNA, 22 nt, Human
uuuuucaucugauugauaacuc

SEQ ID NO: 410556 - RNA, 22 nt, Human
aaugcacacauuugguacugaa

SEQ ID NO: 410557 - RNA, 22 nt, Human
uccauuuuagagaugaagaaac

SEQ ID NO: 410558 - RNA, 22 nt, Human
caguggcuguuucuggaaggca

SEQ ID NO: 410559 - RNA, 22 nt, Human
ccaggagccugggccaggcugg

SEQ ID NO: 410560 - RNA, 22 nt, Human
cacugcagaucagaggcugaga

SEQ ID NO: 410561 - RNA, 22 nt, Human
cccucccaggaguggccagaga

SEQ ID NO: 410562 - RNA, 22 nt, Human
augacagaggagugcaggugau

SEQ ID NO: 410563 - RNA, 17 nt, Human
aauagcugcucagagag

SEQ ID NO: 410564 - RNA, 22 nt, Human
uguguacuugaaagggcagguc

SEQ ID NO: 410565 - RNA, 22 nt, Human
agcugguucagaaauuagaugg

SEQ ID NO: 410566 - RNA, 22 nt, Human
accaggcaaaaccacaggagca

SEQ ID NO: 410567 - RNA, 21 nt, Human
gagacagacuuucguccccug

SEQ ID NO: 410568 - RNA, 22 nt, Human
ugaagacagaccaaggagaaug

SEQ ID NO: 410569 - RNA, 21 nt, Human
aggcagaaagagcccaggcug

SEQ ID NO: 410570 - RNA, 22 nt, Human
ggggcggggcucugagaagcau

SEQ ID NO: 410571 - RNA, 22 nt, Human
ugauugacuuuagaauagcacu

SEQ ID NO: 410572 - RNA, 23 nt, Human
ggccuguguuuugucugaaguac

SEQ ID NO: 410573 - RNA, 22 nt, Human
uccugggccuguacuccauccg

SEQ ID NO: 410574 - RNA, 22 nt, Human
auuuucaugacuaccuuaaaua

SEQ ID NO: 410575 - RNA, 22 nt, Human
cccaggccagaacuugguugcu

SEQ ID NO: 410576 - RNA, 18 nt, Human
cuuuaugugcagagcuuu

SEQ ID NO: 410577 - RNA, 19 nt, Human
gcgaggaagucacuguggc

SEQ ID NO: 410578 - RNA, 22 nt, Human
guuauguaugagggaaugauua

SEQ ID NO: 410579 - RNA, 22 nt, Human
cugcaggggccucgagcacagg

SEQ ID NO: 410580 - RNA, 22 nt, Human
aggcacuggucuaccccuuagu

SEQ ID NO: 410581 - RNA, 22 nt, Human
uacaaagucccauugccaugga

SEQ ID NO: 410582 - RNA, 22 nt, Human
ugugacaugugucaucuuuucu

SEQ ID NO: 410583 - RNA, 22 nt, Human
agggcagaggcggacacggaag

SEQ ID NO: 410584 - RNA, 22 nt, Human
gcuggccauagaagccaaagag

SEQ ID NO: 410585 - RNA, 22 nt, Human
gcagguguggaguggggugagc

SEQ ID NO: 410586 - RNA, 18 nt, Human
ugcuuuaugcuuauauaa

SEQ ID NO: 410587 - RNA, 22 nt, Human
cuuagaaauuguuacucauuca

SEQ ID NO: 410588 - RNA, 22 nt, Human
gucugagaaucuugcauaucau

SEQ ID NO: 410589 - RNA, 22 nt, Human
uugcagcugcaguaaauguuca

SEQ ID NO: 410590 - RNA, 22 nt, Human
agcucucaagauaagaaagaac

SEQ ID NO: 410591 - RNA, 22 nt, Human
aagcacuuagaagagugccugc

SEQ ID NO: 410592 - RNA, 22 nt, Human
uauuaggguaaauuugacaugc

SEQ ID NO: 410593 - RNA, 22 nt, Human
cccaggacucuucacugcagcc

SEQ ID NO: 410594 - RNA, 22 nt, Human
uggcucagcagguuagaaacua

SEQ ID NO: 410595 - RNA, 23 nt, Human
uugcauguagcccaugaguaacu

SEQ ID NO: 410596 - RNA, 22 nt, Human
ucauccaguaugacuggugucu

SEQ ID NO: 410597 - RNA, 20 nt, Human
ggcagagcuaugucuguugc

SEQ ID NO: 410598 - RNA, 21 nt, Human
uaaaacuguaacuuuguccug

SEQ ID NO: 410599 - RNA, 22 nt, Human
agugcagagaccuggucaggca

SEQ ID NO: 410600 - RNA, 22 nt, Human
cccuuccuugugacuggugggg

SEQ ID NO: 410601 - RNA, 22 nt, Human
uccagggaugguaaugagcagu

SEQ ID NO: 410602 - RNA, 22 nt, Human
ccuccaaguuugacucaggaca

SEQ ID NO: 410603 - RNA, 20 nt, Human
uccugagauuuaagggguuc

SEQ ID NO: 410604 - RNA, 22 nt, Human
aaaucuguaagcaauugcucag

SEQ ID NO: 410605 - RNA, 22 nt, Human
cagaccucaguccucaguagga

SEQ ID NO: 410606 - RNA, 22 nt, Human
ugaggcaggagguugagaacug

SEQ ID NO: 410607 - RNA, 22 nt, Human
aguugaaauuagaguccuggcu

SEQ ID NO: 410608 - RNA, 21 nt, Human
ggcagaaguagcauggacggg

SEQ ID NO: 410609 - RNA, 23 nt, Human
ccuucagaagaaguaacaggggc

SEQ ID NO: 410610 - RNA, 22 nt, Human
cccaggcaggagugugguggcu

SEQ ID NO: 410611 - RNA, 22 nt, Human
gcagggacaacugugcaccuga

SEQ ID NO: 410612 - RNA, 22 nt, Human
uggcuggggagccccgacuccc

SEQ ID NO: 410613 - RNA, 22 nt, Human
gaccugccugagcugccucugc

SEQ ID NO: 410614 - RNA, 20 nt, Human
accuugaacccgccagccau

SEQ ID NO: 410615 - RNA, 22 nt, Human
caguauuuguucccuaucaaug

SEQ ID NO: 410616 - RNA, 22 nt, Human
aggccuccuggcuccaggccuu

SEQ ID NO: 410617 - RNA, 22 nt, Human
acuuccuggcugggugaccugg

SEQ ID NO: 410618 - RNA, 19 nt, Human
ucaaugcaugaaaucagcc

SEQ ID NO: 410619 - RNA, 22 nt, Human
uaaaguucuggugagagguaag

SEQ ID NO: 410620 - RNA, 22 nt, Human
uagccucucuccuccacaaccu

SEQ ID NO: 410621 - RNA, 22 nt, Human
auggaagguccuacagagcgca

SEQ ID NO: 410622 - RNA, 22 nt, Human
gggcagcugcagggauggugac

SEQ ID NO: 410623 - RNA, 22 nt, Human
gguuugcacgauauuuccaugg

SEQ ID NO: 410624 - RNA, 22 nt, Human
agcuuccucaccucagaggucu

SEQ ID NO: 410625 - RNA, 22 nt, Human
ugaagaugucagcagggguggu

SEQ ID NO: 410626 - RNA, 22 nt, Human
ggaggagacaguaaaaagcacg

SEQ ID NO: 410627 - RNA, 22 nt, Human
ccagggugggguccaggaacca

SEQ ID NO: 410628 - RNA, 22 nt, Human
ucacugcagagaccucuaguca

SEQ ID NO: 410629 - RNA, 22 nt, Human
aauaauuuuagcucagaguugu

SEQ ID NO: 410630 - RNA, 22 nt, Human
ccuuuggguucaaucucggucu

SEQ ID NO: 410631 - RNA, 22 nt, Human
auuuccuagccucucuugcagu

SEQ ID NO: 410632 - RNA, 22 nt, Human
ccugucucuguuaccacauuug

SEQ ID NO: 410633 - RNA, 22 nt, Human
cagggcaggacagauacauuac

SEQ ID NO: 410634 - RNA, 20 nt, Human
uccuggccucccuggggcuc

SEQ ID NO: 410635 - RNA, 22 nt, Human
caaggcaggaagccugucuuau

SEQ ID NO: 410636 - RNA, 22 nt, Human
cugaaggauguguggugggagu

SEQ ID NO: 410637 - RNA, 22 nt, Human
aggggcuggaguucgagguuac

SEQ ID NO: 410638 - RNA, 22 nt, Human
ucccaaggauaagagagucuga

SEQ ID NO: 410639 - RNA, 22 nt, Human
cccagcuugcaaauggguugcu

SEQ ID NO: 410640 - RNA, 22 nt, Human
ucugcagcuugcacaggcaggc

SEQ ID NO: 410641 - RNA, 22 nt, Human
acagggccagccugggaccugg

SEQ ID NO: 410642 - RNA, 22 nt, Human
gggaaggacauucugggcucag

SEQ ID NO: 410643 - RNA, 22 nt, Human
acuuccugggcaugcagagucc

SEQ ID NO: 410644 - RNA, 22 nt, Human
ucccagggcacucacccucccu

SEQ ID NO: 410645 - RNA, 21 nt, Human
acauuuucuguuuuaggaagu

SEQ ID NO: 410646 - RNA, 22 nt, Human
uguuccaucaguuuuugguuga

SEQ ID NO: 410647 - RNA, 22 nt, Human
ggcaggagcucuccaguuugcc

SEQ ID NO: 410648 - RNA, 22 nt, Human
ucucuggggauggaccugggag

SEQ ID NO: 410649 - RNA, 22 nt, Human
ugaaggaagaauaggcaguguu

SEQ ID NO: 410650 - RNA, 22 nt, Human
cucccuggcuuuguccugaggc

SEQ ID NO: 410651 - RNA, 22 nt, Human
uccuggguccauggcagccgaa

SEQ ID NO: 410652 - RNA, 22 nt, Human
agagcccuuucuccaggcaccu

SEQ ID NO: 410653 - RNA, 22 nt, Human
gcaaugauauugaagugaugaa

SEQ ID NO: 410654 - RNA, 20 nt, Human
uugcauuggaugugcaggug

SEQ ID NO: 410655 - RNA, 22 nt, Human
ggcugcaggcagaggcugucug

SEQ ID NO: 410656 - RNA, 22 nt, Human
ugcucuucggggccacugcuug

SEQ ID NO: 410657 - RNA, 22 nt, Human
aucugaaagcuaggaguucuca

SEQ ID NO: 410658 - RNA, 22 nt, Human
gcucccugcacucugcagcccu

SEQ ID NO: 410659 - RNA, 19 nt, Human
agugguagaugagcaggag

SEQ ID NO: 410660 - RNA, 22 nt, Human
gccugggagggcagcagugugg

SEQ ID NO: 410661 - RNA, 22 nt, Human
ccacaaguuucagcacccagag

SEQ ID NO: 410662 - RNA, 22 nt, Human
ucuuuacaucacaauuguaugg

SEQ ID NO: 410663 - RNA, 22 nt, Human
aggccugcagcaggagcaaacc

SEQ ID NO: 410664 - RNA, 20 nt, Human
ugcuuccuggccacugcggg

SEQ ID NO: 410665 - RNA, 22 nt, Human
caagaugggcaccccagcaccu

SEQ ID NO: 410666 - RNA, 22 nt, Human
agcaggugagcacagccaggcu

SEQ ID NO: 410667 - RNA, 22 nt, Human
ccugccaggagcuggugcugca

SEQ ID NO: 410668 - RNA, 22 nt, Human
cugugacagagcuugagugaga

SEQ ID NO: 410669 - RNA, 22 nt, Human
agagccagcaagugaauaguga

SEQ ID NO: 410670 - RNA, 22 nt, Human
gcagggacgccagggacagcaa

SEQ ID NO: 410671 - RNA, 22 nt, Human
uaaggccaaguucauauacaac

SEQ ID NO: 410672 - RNA, 22 nt, Human
ggacccugggcuugcuccuggg

SEQ ID NO: 410673 - RNA, 22 nt, Human
ucucaggaauagaguggcagca

SEQ ID NO: 410674 - RNA, 22 nt, Human
gagagucuaggaaccucauaua

SEQ ID NO: 410675 - RNA, 22 nt, Human
cccuguacagucucuguggcac

SEQ ID NO: 410676 - RNA, 22 nt, Human
uuucuaaaugguggcugcauug

SEQ ID NO: 410677 - RNA, 22 nt, Human
ucucugaguaagugacaguuca

SEQ ID NO: 410678 - RNA, 22 nt, Human
uguuucagucccuguguucaau

SEQ ID NO: 410679 - RNA, 22 nt, Human
aacaugaaaaccuccacagcaa

SEQ ID NO: 410680 - RNA, 22 nt, Human
agccucucuguuagucacuggg

SEQ ID NO: 410681 - RNA, 22 nt, Human
cagggacagccuugggguggcg

SEQ ID NO: 410682 - RNA, 22 nt, Human
gcagcugagcgugaggaagagu

SEQ ID NO: 410683 - RNA, 22 nt, Human
ugcagaagaaugagcuuggagu

SEQ ID NO: 410684 - RNA, 22 nt, Human
aaagauuuaugaaguucaauua

SEQ ID NO: 410685 - RNA, 22 nt, Human
acaaugcaccagcaucuucacc

SEQ ID NO: 410686 - RNA, 22 nt, Human
accugagcaugccaggagagug

SEQ ID NO: 410687 - RNA, 22 nt, Human
cccucuggcucuucucaggccg

SEQ ID NO: 410688 - RNA, 22 nt, Human
cuggcucaggaaaguugcugcu

SEQ ID NO: 410689 - RNA, 22 nt, Human
cucugagagagcuggugagcac

SEQ ID NO: 410690 - RNA, 22 nt, Human
caggucagaggcgcagccccca

SEQ ID NO: 410691 - RNA, 22 nt, Human
caggcauggugagaacucagcc

SEQ ID NO: 410692 - RNA, 22 nt, Human
cacagcuuguuuagugacucac

SEQ ID NO: 410693 - RNA, 22 nt, Human
uuaaaguucauuaaaugagcca

SEQ ID NO: 410694 - RNA, 22 nt, Human
aggucauugaaguuauuuucuu

SEQ ID NO: 410695 - RNA, 22 nt, Human
ccaaagucuggagcagcagagc

SEQ ID NO: 410696 - RNA, 22 nt, Human
aggagugcaaauaguccagaga

SEQ ID NO: 410697 - RNA, 22 nt, Human
ccugcagaaaggguccccagga

SEQ ID NO: 410698 - RNA, 22 nt, Human
cauguacaguuuuucuguccug

SEQ ID NO: 410699 - RNA, 22 nt, Human
caaauaucuuuggcaaagagaa

SEQ ID NO: 410700 - RNA, 19 nt, Human
gguguccuagagauaagag

SEQ ID NO: 410701 - RNA, 22 nt, Human
cagcccugccauggagccuccu

SEQ ID NO: 410702 - RNA, 22 nt, Human
agggccagaugaagccacaagc

SEQ ID NO: 410703 - RNA, 22 nt, Human
ugaaggagcugauguaaggggu

SEQ ID NO: 410704 - RNA, 20 nt, Human
agggucaguagcacagagcu

SEQ ID NO: 410705 - RNA, 22 nt, Human
ugcucagacaagcugaacagua

SEQ ID NO: 410706 - RNA, 22 nt, Human
acccagggaccccgcugacgcc

SEQ ID NO: 410707 - RNA, 22 nt, Human
aaugaacaucaaaugccuacca

SEQ ID NO: 410708 - RNA, 22 nt, Human
caugugucaaaugauguagcug

SEQ ID NO: 410709 - RNA, 19 nt, Human
uuugaaaggauuguuauuu

SEQ ID NO: 410710 - RNA, 22 nt, Human
guuuuguugcugcagagcucaa

SEQ ID NO: 410711 - RNA, 22 nt, Human
gcucugagagugggugauucug

SEQ ID NO: 410712 - RNA, 22 nt, Human
ggucauugucagagccuguacu

SEQ ID NO: 410713 - RNA, 22 nt, Human
agcaugaaagcauaggacaguc

SEQ ID NO: 410714 - RNA, 22 nt, Human
cugagaggcggagcuugcagug

SEQ ID NO: 410715 - RNA, 22 nt, Human
uuguccuuaccucaaucuggaa

SEQ ID NO: 410716 - RNA, 22 nt, Human
aagaauguggguggauaugaug

SEQ ID NO: 410717 - RNA, 22 nt, Human
agggccuggaacugugggcagg

SEQ ID NO: 410718 - RNA, 22 nt, Human
cagagagcaugggaggcccgag

SEQ ID NO: 410719 - RNA, 22 nt, Human
ucacuucacacccacuaucaug

SEQ ID NO: 410720 - RNA, 22 nt, Human
augucacagcucccauuccucc

SEQ ID NO: 410721 - RNA, 22 nt, Human
cuucaguuuaucccaucaucca

SEQ ID NO: 410722 - RNA, 22 nt, Human
gagcuggcaggaggcuccccga

SEQ ID NO: 410723 - RNA, 22 nt, Human
gcaggggaguggaugauggauu

SEQ ID NO: 410724 - RNA, 22 nt, Human
cuggcuggccggaggcaucccu

SEQ ID NO: 410725 - RNA, 22 nt, Human
ugggacagugugccuugcuccu

SEQ ID NO: 410726 - RNA, 22 nt, Human
cagugcagaacacauggaaaau

SEQ ID NO: 410727 - RNA, 22 nt, Human
ggccuucacgugaccuggcgug

SEQ ID NO: 410728 - RNA, 22 nt, Human
gcuuagucaauuauaaauaggc

SEQ ID NO: 410729 - RNA, 22 nt, Human
auuucucaguuccuacuguuua

SEQ ID NO: 410730 - RNA, 22 nt, Human
caggguggaagcuguagagugg

SEQ ID NO: 410731 - RNA, 22 nt, Human
cagcaucccucaggggccucug

SEQ ID NO: 410732 - RNA, 22 nt, Human
cugggcugagccugggcugugu

SEQ ID NO: 410733 - RNA, 22 nt, Human
agaggcugucccuugcuauucc

SEQ ID NO: 410734 - RNA, 22 nt, Human
gccugcaggcuguaguuuguga

SEQ ID NO: 410735 - RNA, 22 nt, Human
uuucauugcagagucugugugc

SEQ ID NO: 410736 - RNA, 22 nt, Human
cuggagccggaccagggacggu

SEQ ID NO: 410737 - RNA, 22 nt, Human
gccuggaggggacagucucugg

SEQ ID NO: 410738 - RNA, 22 nt, Human
uuuguaaauagcaguacucaug

SEQ ID NO: 410739 - RNA, 21 nt, Human
ccagcugucuguccuuaggca

SEQ ID NO: 410740 - RNA, 22 nt, Human
agcagggcaaagucaggcuaac

SEQ ID NO: 410741 - RNA, 22 nt, Human
caguggagagacuuuuacucuu

SEQ ID NO: 410742 - RNA, 22 nt, Human
gacacagagauaggccuguguu

SEQ ID NO: 410743 - RNA, 22 nt, Human
gaaggaaaacagaucugccuga

SEQ ID NO: 410744 - RNA, 22 nt, Human
gagaaaauagcauguguaguau

SEQ ID NO: 410745 - RNA, 20 nt, Human
aagcaauauagugcaaaugu

SEQ ID NO: 410746 - RNA, 22 nt, Human
cacucugcagcugaagggcugg

SEQ ID NO: 410747 - RNA, 17 nt, Human
gcugcagcgguaggcag

SEQ ID NO: 410748 - RNA, 21 nt, Human
acagaacuguauagugauaaa

SEQ ID NO: 410749 - RNA, 22 nt, Human
uugucuuaaauggauggacaau

SEQ ID NO: 410750 - RNA, 22 nt, Human
caggguggcccuguggucucau

SEQ ID NO: 410751 - RNA, 17 nt, Human
gcaguggagggguaguu

SEQ ID NO: 410752 - RNA, 22 nt, Human
agcugcucucacuggacgccug

SEQ ID NO: 410753 - RNA, 22 nt, Human
aaguuguauauaccgcuuuaag

SEQ ID NO: 410754 - RNA, 20 nt, Human
cugccaugauugauagagug

SEQ ID NO: 410755 - RNA, 22 nt, Human
agggcugacagugaggagucaa

SEQ ID NO: 410756 - RNA, 21 nt, Human
uagggcaggcauuggaagaga

SEQ ID NO: 410757 - RNA, 22 nt, Human
cagaggcugggaccucaggcau

SEQ ID NO: 410758 - RNA, 22 nt, Human
ccugcuucagggaugauggcac

SEQ ID NO: 410759 - RNA, 22 nt, Human
ucuuuccucugagcuccuguag

SEQ ID NO: 410760 - RNA, 21 nt, Human
aggcagcaggauccagggaca

SEQ ID NO: 410761 - RNA, 22 nt, Human
aagccaggcugcacuugcuggg

SEQ ID NO: 410762 - RNA, 22 nt, Human
aagaaugucguugguauuuuaa

SEQ ID NO: 410763 - RNA, 22 nt, Human
agcagcugagaugguaagauuc

SEQ ID NO: 410764 - RNA, 22 nt, Human
acccuggguucccgcagcacca

SEQ ID NO: 410765 - RNA, 21 nt, Human
ugggaccuagcuuugcacagg

SEQ ID NO: 410766 - RNA, 22 nt, Human
uuuagggacaagggucuggggu

SEQ ID NO: 410767 - RNA, 22 nt, Human
aagaugcaugcugaagcuggcu

SEQ ID NO: 410768 - RNA, 22 nt, Human
ucagaggauugccucagcgagc

SEQ ID NO: 410769 - RNA, 22 nt, Human
ugcugcuccugccuggcuccca

SEQ ID NO: 410770 - RNA, 22 nt, Human
accaucuuaguggccagcucuc

SEQ ID NO: 410771 - RNA, 22 nt, Human
ucuggcucggauuugucuagca

SEQ ID NO: 410772 - RNA, 22 nt, Human
gaacuguauaggagcaguguuu

SEQ ID NO: 410773 - RNA, 22 nt, Human
ccuuccaggagucucugcaggu

SEQ ID NO: 410774 - RNA, 22 nt, Human
acagcagagugugagauagcca

SEQ ID NO: 410775 - RNA, 22 nt, Human
cauggacucugguuuggggagc

SEQ ID NO: 410776 - RNA, 22 nt, Human
gccuggaggaauguagcugagg

SEQ ID NO: 410777 - RNA, 22 nt, Human
cagggccaccguguuugcugcu

SEQ ID NO: 410778 - RNA, 22 nt, Human
aaagauuugaaauuaggcauca

SEQ ID NO: 410779 - RNA, 22 nt, Human
ggggauggauuccgggucccug

SEQ ID NO: 410780 - RNA, 22 nt, Human
cuggccugugggcugucuccgg

SEQ ID NO: 410781 - RNA, 22 nt, Human
cugagcugggacucaguagcaa

SEQ ID NO: 410782 - RNA, 22 nt, Human
uucucauucugacucaguguag

SEQ ID NO: 410783 - RNA, 22 nt, Human
agugcuguccaguuucacaggu

SEQ ID NO: 410784 - RNA, 22 nt, Human
uguaugcagggcuuguaugcag

SEQ ID NO: 410785 - RNA, 22 nt, Human
cuuucaaugugccugccuuggg

SEQ ID NO: 410786 - RNA, 22 nt, Human
ggcuucccagcagagggcgcac

SEQ ID NO: 410787 - RNA, 22 nt, Human
aaguccagaacuccugugauag

SEQ ID NO: 410788 - RNA, 22 nt, Human
cuuaacagagagaaguguugcu

SEQ ID NO: 410789 - RNA, 23 nt, Human
uccugagaugagacagugcugcc

SEQ ID NO: 410790 - RNA, 22 nt, Human
gcaguggauggccagcaggggc

SEQ ID NO: 410791 - RNA, 22 nt, Human
uuagaucuuaggcaaauguguu

SEQ ID NO: 410792 - RNA, 22 nt, Human
cgggcagcggcguggccauggu

SEQ ID NO: 410793 - RNA, 19 nt, Human
cuggaaugagaacaugccc

SEQ ID NO: 410794 - RNA, 22 nt, Human
ggcacugagcgggcucugagcg

SEQ ID NO: 410795 - RNA, 22 nt, Human
ucugccagaaguucugagagua

SEQ ID NO: 410796 - RNA, 22 nt, Human
ccuggagguggagguugcagug

SEQ ID NO: 410797 - RNA, 22 nt, Human
gauaccagacagggagggagaa

SEQ ID NO: 410798 - RNA, 23 nt, Human
ccaggcaguagcuauugaaguga

SEQ ID NO: 410799 - RNA, 22 nt, Human
gagacacacacaggagguggca

SEQ ID NO: 410800 - RNA, 22 nt, Human
gccuggaggggccaggguggua

SEQ ID NO: 410801 - RNA, 22 nt, Human
cuguggcugcagccuugguccu

SEQ ID NO: 410802 - RNA, 22 nt, Human
gaguggggucugggcaucaguc

SEQ ID NO: 410803 - RNA, 23 nt, Human
agccucuuuucuccugcccugca

SEQ ID NO: 410804 - RNA, 22 nt, Human
aaaugucuuugaguauuucugc

SEQ ID NO: 410805 - RNA, 22 nt, Human
gcucagagaaucagcagacacc

SEQ ID NO: 410806 - RNA, 22 nt, Human
uuuuccuucugauacuccauuu

SEQ ID NO: 410807 - RNA, 22 nt, Human
gugcauauaugcacauaugugu

SEQ ID NO: 410808 - RNA, 22 nt, Human
aggcugaggcagguggaucacc

SEQ ID NO: 410809 - RNA, 22 nt, Human
uguaugcagcaaaacaauuagu

SEQ ID NO: 410810 - RNA, 22 nt, Human
cucaguuucuucauauuguagg

SEQ ID NO: 410811 - RNA, 22 nt, Human
cuuacaaaggagaggagauagg

SEQ ID NO: 410812 - RNA, 23 nt, Human
agggguggucaguacccgcagug

SEQ ID NO: 410813 - RNA, 22 nt, Human
cucuuuccaggguaccccaggu

SEQ ID NO: 410814 - RNA, 22 nt, Human
cacagggcaccaguuggccauc

SEQ ID NO: 410815 - RNA, 20 nt, Human
auguccagugacuggaccau

SEQ ID NO: 410816 - RNA, 22 nt, Human
auuucagcccaguaugagcccc

SEQ ID NO: 410817 - RNA, 22 nt, Human
uauucacauucucaggccuggu

SEQ ID NO: 410818 - RNA, 23 nt, Human
agcccagcagagaaccuaggucc

SEQ ID NO: 410819 - RNA, 23 nt, Human
agaagcagcuucuggaguaucgg

SEQ ID NO: 410820 - RNA, 22 nt, Human
ucucuucuuguguuuuccugcc

SEQ ID NO: 410821 - RNA, 22 nt, Human
caucugccuaaguggcccuguu

SEQ ID NO: 410822 - RNA, 22 nt, Human
ugacagcauaacacuggucuug

SEQ ID NO: 410823 - RNA, 22 nt, Human
agggacacugaugagaaauucu

SEQ ID NO: 410824 - RNA, 22 nt, Human
ccugagagcauuccacacugaa

SEQ ID NO: 410825 - RNA, 22 nt, Human
ucacugaagacugggcucuaaa

SEQ ID NO: 410826 - RNA, 23 nt, Human
uggaccugaaccagugccucugu

SEQ ID NO: 410827 - RNA, 22 nt, Human
gaaggccauuagagccugugcc

SEQ ID NO: 410828 - RNA, 22 nt, Human
ucagagaguccuggucauuugc

SEQ ID NO: 410829 - RNA, 22 nt, Human
gagggcucacugagaaagcagu

SEQ ID NO: 410830 - RNA, 22 nt, Human
aacaaucaaguuucuaaaugac

SEQ ID NO: 410831 - RNA, 22 nt, Human
aaggccagaguacuagaggcug

SEQ ID NO: 410832 - RNA, 18 nt, Human
cccagugcucacugccuc

SEQ ID NO: 410833 - RNA, 23 nt, Human
gagugcagaauagacaugcagug

SEQ ID NO: 410834 - RNA, 22 nt, Human
uaaggcacgcauaagagggggc

SEQ ID NO: 410835 - RNA, 23 nt, Human
ggccucagcgcacagaaacugcu

SEQ ID NO: 410836 - RNA, 22 nt, Human
gcucugggcugcccucuggaca

SEQ ID NO: 410837 - RNA, 22 nt, Human
ccugcagguugcagaggcggaa

SEQ ID NO: 410838 - RNA, 22 nt, Human
ucuggcucuguguccccaccca

SEQ ID NO: 410839 - RNA, 22 nt, Human
ggcagugaaugaaacagaggcu

SEQ ID NO: 410840 - RNA, 22 nt, Human
gcugucccgcugacuuccagcu

SEQ ID NO: 410841 - RNA, 22 nt, Human
aaguuauuuccucgugacugaa

SEQ ID NO: 410842 - RNA, 22 nt, Human
gccaccagguuagauccagccu

SEQ ID NO: 410843 - RNA, 20 nt, Human
ucagaggcugccagcugggg

SEQ ID NO: 410844 - RNA, 22 nt, Human
agagugaagguugacacuucac

SEQ ID NO: 410845 - RNA, 22 nt, Human
ugucauguguucuuaaauacau

SEQ ID NO: 410846 - RNA, 22 nt, Human
gcugccucccccauggcuggaa

SEQ ID NO: 410847 - RNA, 22 nt, Human
uacaaacucuuuauauuucaua

SEQ ID NO: 410848 - RNA, 22 nt, Human
gcagcuuuuuggaugucaguua

SEQ ID NO: 410849 - RNA, 22 nt, Human
agaauucuguucuucgggugug

SEQ ID NO: 410850 - RNA, 22 nt, Human
cauguuaaaauauacauucuga

SEQ ID NO: 410851 - RNA, 22 nt, Human
agggcagaaguacagacacuua

SEQ ID NO: 410852 - RNA, 17 nt, Human
gcuuuggaaggguagac

SEQ ID NO: 410853 - RNA, 22 nt, Human
cuuucacaguccugacugagcg

SEQ ID NO: 410854 - RNA, 22 nt, Human
ccucaguguuaggauaagagaa

SEQ ID NO: 410855 - RNA, 22 nt, Human
aaaaaucuaugacugcuucucc

SEQ ID NO: 410856 - RNA, 22 nt, Human
gagggcucugucuggaagggaa

SEQ ID NO: 410857 - RNA, 22 nt, Human
uggagaauucuauguugagggg

SEQ ID NO: 410858 - RNA, 22 nt, Human
agccuggagguaaugaggaaac

SEQ ID NO: 410859 - RNA, 22 nt, Human
gccaggcaugggcuucugggcg

SEQ ID NO: 410860 - RNA, 22 nt, Human
ccagcuggugacauccccaacc

SEQ ID NO: 410861 - RNA, 22 nt, Human
uggcugcaguucacaggagcaa

SEQ ID NO: 410862 - RNA, 22 nt, Human
cagagagcuuagugugcugcau

SEQ ID NO: 410863 - RNA, 22 nt, Human
ccugucugagccagggugggca

SEQ ID NO: 410864 - RNA, 22 nt, Human
ccucugcucccuggugucugag

SEQ ID NO: 410865 - RNA, 22 nt, Human
uauauguaagcuauguaagagu

SEQ ID NO: 410866 - RNA, 22 nt, Human
gggaccuggcaccuuugcucug

SEQ ID NO: 410867 - RNA, 22 nt, Human
aaggcagucugguuucaaagca

SEQ ID NO: 410868 - RNA, 22 nt, Human
ugauuaacugucuauuaaucau

SEQ ID NO: 410869 - RNA, 22 nt, Human
ccugggaguggcacucacagca

SEQ ID NO: 410870 - RNA, 22 nt, Human
caggcacugugcaagggucucg

SEQ ID NO: 410871 - RNA, 22 nt, Human
cuggagugaggucugggagccu

SEQ ID NO: 410872 - RNA, 22 nt, Human
gccugcagugagugcagaaggu

SEQ ID NO: 410873 - RNA, 22 nt, Human
guacaaaguggaccugauagua

SEQ ID NO: 410874 - RNA, 22 nt, Human
cagggccuuauccugccauuga

SEQ ID NO: 410875 - RNA, 22 nt, Human
cuccagggaggucugcaggacu

SEQ ID NO: 410876 - RNA, 20 nt, Human
acuggagccaucucagccua

SEQ ID NO: 410877 - RNA, 22 nt, Human
uacuuuuuagcacagugugugc

SEQ ID NO: 410878 - RNA, 22 nt, Human
ccaggcaucacgggcauguggc

SEQ ID NO: 410879 - RNA, 20 nt, Human
ucucagcauaagaacccuuc

SEQ ID NO: 410880 - RNA, 18 nt, Human
ugaggcagucagugaugg

SEQ ID NO: 410881 - RNA, 22 nt, Human
cuuccuggccauugccauggca

SEQ ID NO: 410882 - RNA, 22 nt, Human
caggggaagaugccaagggaga

SEQ ID NO: 410883 - RNA, 22 nt, Human
gcagaggaggacccaggaauua

SEQ ID NO: 410884 - RNA, 22 nt, Human
ccucacaguuuggcuaacugug

SEQ ID NO: 410885 - RNA, 22 nt, Human
accugccucagugcagcuggau

SEQ ID NO: 410886 - RNA, 22 nt, Human
guuagaaagugucugcuugggu

SEQ ID NO: 410887 - RNA, 22 nt, Human
auguuauuuuggaaaauacaaa

SEQ ID NO: 410888 - RNA, 22 nt, Human
guggcauuaggccaggugcaua

SEQ ID NO: 410889 - RNA, 22 nt, Human
uuucacaaugcaauccuacuuc

SEQ ID NO: 410890 - RNA, 22 nt, Human
acaguggagcucagaugaaaau

SEQ ID NO: 410891 - RNA, 22 nt, Human
ucucaagcuuguugguauguuu

SEQ ID NO: 410892 - RNA, 22 nt, Human
ucagcugagcuccagcucauag

SEQ ID NO: 410893 - RNA, 23 nt, Human
ugccucugccucccuagucugca

SEQ ID NO: 410894 - RNA, 22 nt, Human
aggacuuagaacauuauguacu

SEQ ID NO: 410895 - RNA, 22 nt, Human
uucuuccucagcagggcugccu

SEQ ID NO: 410896 - RNA, 22 nt, Human
ucuuuccacauucucuguuuag

SEQ ID NO: 410897 - RNA, 20 nt, Human
gcuuccuucccagcccccac

SEQ ID NO: 410898 - RNA, 22 nt, Human
ucaggcugcccguucagggcuc

SEQ ID NO: 410899 - RNA, 22 nt, Human
auaauuuaauuuucacaguggu

SEQ ID NO: 410900 - RNA, 22 nt, Human
uuguuaaaaugcauauucuggu

SEQ ID NO: 410901 - RNA, 22 nt, Human
aggguauguuuuuaucuacugu

SEQ ID NO: 410902 - RNA, 20 nt, Human
aggagcugaauuagaggguu

SEQ ID NO: 410903 - RNA, 22 nt, Human
ggcccucccugagccagguggg

SEQ ID NO: 410904 - RNA, 22 nt, Human
caaggccaugagcagcgagugu

SEQ ID NO: 410905 - RNA, 22 nt, Human
ccugcagguaaggcuaacugcc

SEQ ID NO: 410906 - RNA, 22 nt, Human
gugaaggacuagcauggagggc

SEQ ID NO: 410907 - RNA, 22 nt, Human
ugucagaggcucagggucucag

SEQ ID NO: 410908 - RNA, 22 nt, Human
augcacaagaggcuagaaaaga

SEQ ID NO: 410909 - RNA, 21 nt, Human
ccccugggagcccugucagua

SEQ ID NO: 410910 - RNA, 22 nt, Human
aggagcugggcugcugcuggga

SEQ ID NO: 410911 - RNA, 22 nt, Human
uuccucagacccucauugugag

SEQ ID NO: 410912 - RNA, 22 nt, Human
ugccagccagguucugaggcua

SEQ ID NO: 410913 - RNA, 22 nt, Human
cuuucauucuuagauauuagug

SEQ ID NO: 410914 - RNA, 22 nt, Human
uuagaaaauuugcuucuuugga

SEQ ID NO: 410915 - RNA, 22 nt, Human
cagcccugagagaaccaucuau

SEQ ID NO: 410916 - RNA, 22 nt, Human
cccagcauggagugaggacuca

SEQ ID NO: 410917 - RNA, 22 nt, Human
aaagaaaccuaucagccacaug

SEQ ID NO: 410918 - RNA, 22 nt, Human
cucagggcuggaaagccaggaa

SEQ ID NO: 410919 - RNA, 22 nt, Human
ugcugguggagaaaguggaggu

SEQ ID NO: 410920 - RNA, 22 nt, Human
ccacuguuuuucaguuaacuuu

SEQ ID NO: 410921 - RNA, 22 nt, Human
cagccaggccuggugaccaaag

SEQ ID NO: 410922 - RNA, 22 nt, Human
ugcaguggcgccaucucagcuc

SEQ ID NO: 410923 - RNA, 22 nt, Human
ugaaggaaagagggaacauccc

SEQ ID NO: 410924 - RNA, 22 nt, Human
ucagcuuuuuacaugugaaaua

SEQ ID NO: 410925 - RNA, 22 nt, Human
aggcuuguggauuggagcgagu

SEQ ID NO: 410926 - RNA, 22 nt, Human
cagugaggaguccagggcagag

SEQ ID NO: 410927 - RNA, 21 nt, Human
gguugguguguccaguggcca

SEQ ID NO: 410928 - RNA, 22 nt, Human
acaacacagcaaaaccccaucu

SEQ ID NO: 410929 - RNA, 19 nt, Human
agggaaggauucugucauu

SEQ ID NO: 410930 - RNA, 22 nt, Human
gcucuggacuggggccugagaa

SEQ ID NO: 410931 - RNA, 22 nt, Human
cucuuaaagcuuccaguuucaa

SEQ ID NO: 410932 - RNA, 22 nt, Human
ucugccuuuucacugccacuaa

SEQ ID NO: 410933 - RNA, 22 nt, Human
uaaggccaccguuauagaacca

SEQ ID NO: 410934 - RNA, 22 nt, Human
aucuggcucuuccuggaguucc

SEQ ID NO: 410935 - RNA, 21 nt, Human
guggcucugccaggacugaaa

SEQ ID NO: 410936 - RNA, 22 nt, Human
cuggccuggucuggccucucca

SEQ ID NO: 410937 - RNA, 22 nt, Human
uguuugugcugccuggugggca

SEQ ID NO: 410938 - RNA, 22 nt, Human
aggcacugaagugguaaaugua

SEQ ID NO: 410939 - RNA, 22 nt, Human
agcagaaccugcagaccugucu

SEQ ID NO: 410940 - RNA, 22 nt, Human
uuccugagggacuuuugagauu

SEQ ID NO: 410941 - RNA, 22 nt, Human
acccagcuguuucccgugucau

SEQ ID NO: 410942 - RNA, 22 nt, Human
agggcucccgugaggugacugc

SEQ ID NO: 410943 - RNA, 22 nt, Human
aggucauuggggacuaucuccg

SEQ ID NO: 410944 - RNA, 22 nt, Human
agggccaggaacaccugaaggg

SEQ ID NO: 410945 - RNA, 22 nt, Human
cccagaggugcuucagaggugc

SEQ ID NO: 410946 - RNA, 22 nt, Human
ucccaggcaaaggcagcucauu

SEQ ID NO: 410947 - RNA, 22 nt, Human
caugaagcuugaagcaguccac

SEQ ID NO: 410948 - RNA, 22 nt, Human
ucccagauucuucugugugggc

SEQ ID NO: 410949 - RNA, 19 nt, Human
agugaaauggaguauucaa

SEQ ID NO: 410950 - RNA, 22 nt, Human
ucaccuuagcuagaggaagaga

SEQ ID NO: 410951 - RNA, 22 nt, Human
cuggccugagcacagcggcugc

SEQ ID NO: 410952 - RNA, 22 nt, Human
ccaaagugcugggguuacaggc

SEQ ID NO: 410953 - RNA, 22 nt, Human
uugaccauaccuccaggcaguu

SEQ ID NO: 410954 - RNA, 19 nt, Human
aaaaggaauauucuuuggg

SEQ ID NO: 410955 - RNA, 19 nt, Human
uguuggugcggauguggag

SEQ ID NO: 410956 - RNA, 22 nt, Human
aggcuggggaauugaauuugcu

SEQ ID NO: 410957 - RNA, 22 nt, Human
gcuggcagggacagcugcgugu

SEQ ID NO: 410958 - RNA, 22 nt, Human
ugggaaugugagcauucauuca

SEQ ID NO: 410959 - RNA, 22 nt, Human
agaauccugaugaaaaggagag

SEQ ID NO: 410960 - RNA, 22 nt, Human
ucacacgugagguucuauccug

SEQ ID NO: 410961 - RNA, 22 nt, Human
cccagcuucugagggggccuug

SEQ ID NO: 410962 - RNA, 23 nt, Human
gccagccuugcucuccugcagcc

SEQ ID NO: 410963 - RNA, 22 nt, Human
ucacaggaaccaucagagaaau

SEQ ID NO: 410964 - RNA, 22 nt, Human
uggaaggcaugggaacuguucu

SEQ ID NO: 410965 - RNA, 22 nt, Human
gagcuggugaucagcuggagga

SEQ ID NO: 410966 - RNA, 20 nt, Human
cccucugcacauggcugugg

SEQ ID NO: 410967 - RNA, 22 nt, Human
gggcucugggaugcucuuagag

SEQ ID NO: 410968 - RNA, 22 nt, Human
aaguguguauuguuuaugcugc

SEQ ID NO: 410969 - RNA, 22 nt, Human
ucaaaugcugccuuugugugcc

SEQ ID NO: 410970 - RNA, 22 nt, Human
agccagccgggggaccacagug

SEQ ID NO: 410971 - RNA, 22 nt, Human
auuaaaagcuucccaagaguua

SEQ ID NO: 410972 - RNA, 22 nt, Human
agagaugucgccuugcccaggg

SEQ ID NO: 410973 - RNA, 22 nt, Human
augaggcucucaggggagcugu

SEQ ID NO: 410974 - RNA, 21 nt, Human
aggcacuguuugugguuuggg

SEQ ID NO: 410975 - RNA, 22 nt, Human
ggcugggcaggucugcacaggg

SEQ ID NO: 410976 - RNA, 22 nt, Human
auaguuguguggggauucuggu

SEQ ID NO: 410977 - RNA, 22 nt, Human
uccuucagaaaaccucagucuu

SEQ ID NO: 410978 - RNA, 22 nt, Human
cuggcucauccagguguugcuc

SEQ ID NO: 410979 - RNA, 23 nt, Human
ugggaccuguuugcccacagaug

SEQ ID NO: 410980 - RNA, 22 nt, Human
uagggcaggugaagaaaagcua

SEQ ID NO: 410981 - RNA, 22 nt, Human
cucccaggguagggagagacua

SEQ ID NO: 410982 - RNA, 22 nt, Human
ugggcacaggggaauggaugaa

SEQ ID NO: 410983 - RNA, 22 nt, Human
uaaggccaauuaacaaccaggg

SEQ ID NO: 410984 - RNA, 22 nt, Human
ccugggagagucuguggucucc

SEQ ID NO: 410985 - RNA, 22 nt, Human
cagcauggugccagugagucca

SEQ ID NO: 410986 - RNA, 22 nt, Human
acagcugggugcugcucagagc

SEQ ID NO: 410987 - RNA, 22 nt, Human
cacugcagcaccaugcagggcu

SEQ ID NO: 410988 - RNA, 22 nt, Human
gcaaggaccuuugagcgugcca

SEQ ID NO: 410989 - RNA, 22 nt, Human
uacagaagcugagacacugaga

SEQ ID NO: 410990 - RNA, 22 nt, Human
ugaggccugggcacauaaccuc

SEQ ID NO: 410991 - RNA, 22 nt, Human
aggccuagaggaauggccaggg

SEQ ID NO: 410992 - RNA, 22 nt, Human
acacaaugugcaggacaccugu

SEQ ID NO: 410993 - RNA, 22 nt, Human
uugauacaggcucuauuucauc

SEQ ID NO: 410994 - RNA, 22 nt, Human
caggugccucaggaugagacaa

SEQ ID NO: 410995 - RNA, 22 nt, Human
ccuguacaagagccaucuggau

SEQ ID NO: 410996 - RNA, 22 nt, Human
gccugucaauuuuguguacaau

SEQ ID NO: 410997 - RNA, 22 nt, Human
auguguccacaggugugagaga

SEQ ID NO: 410998 - RNA, 22 nt, Human
gcagccacucucauuccacgug

SEQ ID NO: 410999 - RNA, 22 nt, Human
cagcugccacuugcucucggcu

SEQ ID NO: 411000 - RNA, 22 nt, Human
agcuggaggauaacucacuucu

SEQ ID NO: 411001 - RNA, 22 nt, Human
gacccaggguauccagagcugc

SEQ ID NO: 411002 - RNA, 22 nt, Human
gcaggagcagucaggggcagcu

SEQ ID NO: 411003 - RNA, 22 nt, Human
caggcagggagcuggaaaggau

SEQ ID NO: 411004 - RNA, 22 nt, Human
ccagcccuccuccaucagagga

SEQ ID NO: 411005 - RNA, 22 nt, Human
auacauguuguaccauauguuu

SEQ ID NO: 411006 - RNA, 22 nt, Human
ugcucuguaaggucagaaaagg

SEQ ID NO: 411007 - RNA, 22 nt, Human
cccagcuugucugauucagccu

SEQ ID NO: 411008 - RNA, 20 nt, Human
ucacuaguaaccaucugcuu

SEQ ID NO: 411009 - RNA, 22 nt, Human
uucucuucuguucagugcccaa

SEQ ID NO: 411010 - RNA, 22 nt, Human
aacacaaagaagcugcaggauc

SEQ ID NO: 411011 - RNA, 22 nt, Human
uuuguucacugagcaaugauua

SEQ ID NO: 411012 - RNA, 22 nt, Human
acacagccaggguaguaaggcu

SEQ ID NO: 411013 - RNA, 20 nt, Human
gaguuccccauuucuccugg

SEQ ID NO: 411014 - RNA, 22 nt, Human
cugcuucugggaugauggagua

SEQ ID NO: 411015 - RNA, 22 nt, Human
caggcugaucagggcugggaug

SEQ ID NO: 411016 - RNA, 22 nt, Human
ugccaggcugaacagggucuua

SEQ ID NO: 411017 - RNA, 20 nt, Human
ucugucucugagcuagacuu

SEQ ID NO: 411018 - RNA, 22 nt, Human
aggcucugaucagguggcugug

SEQ ID NO: 411019 - RNA, 22 nt, Human
aaauccuaauaaugcacuagug

SEQ ID NO: 411020 - RNA, 22 nt, Human
cagagguauugcaaaagccuag

SEQ ID NO: 411021 - RNA, 22 nt, Human
cuggggcccaucgagggcugag

SEQ ID NO: 411022 - RNA, 22 nt, Human
ggcugcaggcaggguauccacu

SEQ ID NO: 411023 - RNA, 17 nt, Human
uuauuuuuugggcugag

SEQ ID NO: 411024 - RNA, 22 nt, Human
ugugcagcuaguccuggacuug

SEQ ID NO: 411025 - RNA, 22 nt, Human
aaguauauuuuuugaagcauau

SEQ ID NO: 411026 - RNA, 22 nt, Human
auuacaguaacagcuacaaugc

SEQ ID NO: 411027 - RNA, 22 nt, Human
auggggcuguucucugcccugc

SEQ ID NO: 411028 - RNA, 22 nt, Human
uccuuuuugguccaaggugacc

SEQ ID NO: 411029 - RNA, 22 nt, Human
uuauuaggaaaaggucagaugu

SEQ ID NO: 411030 - RNA, 20 nt, Human
gccuggaggcaaugggaaga

SEQ ID NO: 411031 - RNA, 22 nt, Human
cauggcagaaaccugagcugcu

SEQ ID NO: 411032 - RNA, 22 nt, Human
aggcacagagaaugcccuccau

SEQ ID NO: 411033 - RNA, 20 nt, Human
uuucagugguuugugccuag

SEQ ID NO: 411034 - RNA, 22 nt, Human
uccagaccauggauggcugcaa

SEQ ID NO: 411035 - RNA, 22 nt, Human
gugccaggcccagggagcgggg

SEQ ID NO: 411036 - RNA, 19 nt, Human
ggucacagggguuacaagg

SEQ ID NO: 411037 - RNA, 23 nt, Human
aguguuccaguugguugagagug

SEQ ID NO: 411038 - RNA, 22 nt, Human
acagaguaucuaucaggaguau

SEQ ID NO: 411039 - RNA, 22 nt, Human
ucacuguauuugcugaugcaua

SEQ ID NO: 411040 - RNA, 22 nt, Human
cuguuuuugugcugugucuccc

SEQ ID NO: 411041 - RNA, 22 nt, Human
cuauuaaacacuacugugcacu

SEQ ID NO: 411042 - RNA, 22 nt, Human
cuggcagcuuccuuugcaucug

SEQ ID NO: 411043 - RNA, 22 nt, Human
gcuucucuggccugcagggcau

SEQ ID NO: 411044 - RNA, 22 nt, Human
guuagggagucagguggcucuu

SEQ ID NO: 411045 - RNA, 22 nt, Human
cagagcugagucuucaagguug

SEQ ID NO: 411046 - RNA, 22 nt, Human
gccagcaguccugcugugugcc

SEQ ID NO: 411047 - RNA, 22 nt, Human
aauuuuauuagaaggcaagggg

SEQ ID NO: 411048 - RNA, 22 nt, Human
aagcagcacaguaauauuggug

SEQ ID NO: 411049 - RNA, 22 nt, Human
aguguuugucccguuagaaaug

SEQ ID NO: 411050 - RNA, 22 nt, Human
uucuguuuugcacagacuugaa

SEQ ID NO: 411051 - RNA, 22 nt, Human
ucaaaguuuuugagaauuacau

SEQ ID NO: 411052 - RNA, 22 nt, Human
accugcaggcacaggugugcgc

SEQ ID NO: 411053 - RNA, 22 nt, Human
ggccucugccucaucugggcac

SEQ ID NO: 411054 - RNA, 22 nt, Human
acucaagauagggaaaguacaa

SEQ ID NO: 411055 - RNA, 22 nt, Human
gaagcccaggcuuccuuggcuu

SEQ ID NO: 411056 - RNA, 22 nt, Human
cagcugccuguauuguccucau

SEQ ID NO: 411057 - RNA, 22 nt, Human
uuuugauaucaugaugaacaga

SEQ ID NO: 411058 - RNA, 22 nt, Human
cugcugcugagagcucagccug

SEQ ID NO: 411059 - RNA, 22 nt, Human
cagcugccccgcuggcugacca

SEQ ID NO: 411060 - RNA, 22 nt, Human
acagagcucccagccaucuccu

SEQ ID NO: 411061 - RNA, 22 nt, Human
guccucagagugggcagguccu

SEQ ID NO: 411062 - RNA, 22 nt, Human
cuggcagcagcuucuggaucga

SEQ ID NO: 411063 - RNA, 22 nt, Human
cauugacaucaggcuuggccaa

SEQ ID NO: 411064 - RNA, 22 nt, Human
cuggcucacuagcccugcccug

SEQ ID NO: 411065 - RNA, 22 nt, Human
caguagcaggcaggugcuuuug

SEQ ID NO: 411066 - RNA, 22 nt, Human
cacaguccagacuccuggaguu

SEQ ID NO: 411067 - RNA, 22 nt, Human
cccucaggagaugucagcugga

SEQ ID NO: 411068 - RNA, 23 nt, Human
uucaaagcuuaagcucuuuccac

SEQ ID NO: 411069 - RNA, 22 nt, Human
aggcagagcugauguucuguga

SEQ ID NO: 411070 - RNA, 22 nt, Human
caaagccauagaguagauaaga

SEQ ID NO: 411071 - RNA, 22 nt, Human
uuggaaggcccugccuagcagg

SEQ ID NO: 411072 - RNA, 22 nt, Human
ggggcuggcucacuaagagacu

SEQ ID NO: 411073 - RNA, 22 nt, Human
cuuguggcccauggcuuccugc

SEQ ID NO: 411074 - RNA, 22 nt, Human
ccaggagccacucaggcccaca

SEQ ID NO: 411075 - RNA, 22 nt, Human
gggaccugccaaggccacccag

SEQ ID NO: 411076 - RNA, 22 nt, Human
aauuucaauuacuuuugcacca

SEQ ID NO: 411077 - RNA, 22 nt, Human
agccuccaucccaugcacaaag

SEQ ID NO: 411078 - RNA, 22 nt, Human
gagacugcauuguccaaggguu

SEQ ID NO: 411079 - RNA, 22 nt, Human
uggcucagccuggcccuuucau

SEQ ID NO: 411080 - RNA, 22 nt, Human
uuuccuucaucaucugagagcu

SEQ ID NO: 411081 - RNA, 22 nt, Human
ccucuggguaucuguggaagua

SEQ ID NO: 411082 - RNA, 22 nt, Human
ccacacagucaguuuccaagaa

SEQ ID NO: 411083 - RNA, 22 nt, Human
auaagguaugaaaaguaaaugg

SEQ ID NO: 411084 - RNA, 22 nt, Human
agggcagcauugccuuucucca

SEQ ID NO: 411085 - RNA, 22 nt, Human
uuauuuacaacucuucucuucc

SEQ ID NO: 411086 - RNA, 18 nt, Human
acccucuggcuucugagc

SEQ ID NO: 411087 - RNA, 22 nt, Human
ugcaggcugggaagagggacaa

SEQ ID NO: 411088 - RNA, 22 nt, Human
cauuagaagaacaguuauauua

SEQ ID NO: 411089 - RNA, 19 nt, Human
aguguguacugaaagcacu

SEQ ID NO: 411090 - RNA, 22 nt, Human
gggcagugguccaggcuacagc

SEQ ID NO: 411091 - RNA, 22 nt, Human
ucauugcacuccagccugggca

SEQ ID NO: 411092 - RNA, 22 nt, Human
ccugccaggacauugcuugaag

SEQ ID NO: 411093 - RNA, 22 nt, Human
aacaaacaaacauuuugucauc

SEQ ID NO: 411094 - RNA, 22 nt, Human
ucaaacuguuuacagugagaua

SEQ ID NO: 411095 - RNA, 22 nt, Human
gagcagcugagcuggaaugaga

SEQ ID NO: 411096 - RNA, 22 nt, Human
cauaauuucuguaucagcacca

SEQ ID NO: 411097 - RNA, 22 nt, Human
cauugacaguucuuuaaguugc

SEQ ID NO: 411098 - RNA, 20 nt, Human
uccucagaagacauuugggg

SEQ ID NO: 411099 - RNA, 22 nt, Human
ugugaccucaucuuaacuggaa

SEQ ID NO: 411100 - RNA, 20 nt, Human
gaaauucucguauuaguuua

SEQ ID NO: 411101 - RNA, 22 nt, Human
ggaggaccccagcagcucccca

SEQ ID NO: 411102 - RNA, 22 nt, Human
uuucacauuuaggcgugaauug

SEQ ID NO: 411103 - RNA, 22 nt, Human
ggucucagcaguugcuuugacu

SEQ ID NO: 411104 - RNA, 22 nt, Human
ucauuuauaaggaugcaauuaa

SEQ ID NO: 411105 - RNA, 22 nt, Human
uagaaacugauagucuugugcu

SEQ ID NO: 411106 - RNA, 22 nt, Human
uuagaaauacaagugagguuga

SEQ ID NO: 411107 - RNA, 22 nt, Human
gccugcagacguguuuuccuca

SEQ ID NO: 411108 - RNA, 22 nt, Human
gacauaauaaucugaccuagau

SEQ ID NO: 411109 - RNA, 22 nt, Human
aggcccugaagucggccccuca

SEQ ID NO: 411110 - RNA, 19 nt, Human
uccucaggggcucacagac

SEQ ID NO: 411111 - RNA, 22 nt, Human
agccagggacgcugcaggcuac

SEQ ID NO: 411112 - RNA, 23 nt, Human
ccucccaccuauuucacuuucuu

SEQ ID NO: 411113 - RNA, 22 nt, Human
agagcuuauaucuuggccaucc

SEQ ID NO: 411114 - RNA, 19 nt, Human
caaggguugggucugucau

SEQ ID NO: 411115 - RNA, 22 nt, Human
ccagagcugcauccagcagguu

SEQ ID NO: 411116 - RNA, 22 nt, Human
agcagcuguggaaaaguaacua

SEQ ID NO: 411117 - RNA, 22 nt, Human
ccagcuccuucugucuguggag

SEQ ID NO: 411118 - RNA, 22 nt, Human
uaaaugcagauuccugagccua

SEQ ID NO: 411119 - RNA, 22 nt, Human
uggccuggaaaaaugcagaugg

SEQ ID NO: 411120 - RNA, 22 nt, Human
auuuugaaaagcauuugaguaa

SEQ ID NO: 411121 - RNA, 22 nt, Human
cagaagaauggugucugagcuc

SEQ ID NO: 411122 - RNA, 21 nt, Human
aauuacagauggaauuacaga

SEQ ID NO: 411123 - RNA, 22 nt, Human
caggacugauguuccuccagcc

SEQ ID NO: 411124 - RNA, 22 nt, Human
ucacauuuucuacuacuguacg

SEQ ID NO: 411125 - RNA, 22 nt, Human
aaaggugacugcagcagcuauu

SEQ ID NO: 411126 - RNA, 19 nt, Human
ccagagagcuagguacaga

SEQ ID NO: 411127 - RNA, 22 nt, Human
caagauggaguccgggaaugug

SEQ ID NO: 411128 - RNA, 22 nt, Human
cucacugugccuuuucccaaac

SEQ ID NO: 411129 - RNA, 22 nt, Human
uuggcuuccaggaucucagcag

SEQ ID NO: 411130 - RNA, 22 nt, Human
agccugcaggaugggcagcacc

SEQ ID NO: 411131 - RNA, 22 nt, Human
aaauaauugaguuggucaauau

SEQ ID NO: 411132 - RNA, 22 nt, Human
ccugucugcaugaucccugcca

SEQ ID NO: 411133 - RNA, 22 nt, Human
cagggcugucuccaaaggcccc

SEQ ID NO: 411134 - RNA, 22 nt, Human
uuguugucauuguagaggauuu

SEQ ID NO: 411135 - RNA, 21 nt, Human
acacugugucauaaugcuuaa

SEQ ID NO: 411136 - RNA, 22 nt, Human
gaggaaccaaaucagcuugcac

SEQ ID NO: 411137 - RNA, 22 nt, Human
ggcacugaaccaggacacaagc

SEQ ID NO: 411138 - RNA, 22 nt, Human
aaaugcacagaggccagagagg

SEQ ID NO: 411139 - RNA, 22 nt, Human
cugagggcccugaagcuuggca

SEQ ID NO: 411140 - RNA, 22 nt, Human
caguccaggccuggaggagcca

SEQ ID NO: 411141 - RNA, 22 nt, Human
uucacagggccacuggcaggag

SEQ ID NO: 411142 - RNA, 22 nt, Human
cuguggcauugugaggacugca

SEQ ID NO: 411143 - RNA, 22 nt, Human
cuuuauguucaguacaaugcuu

SEQ ID NO: 411144 - RNA, 22 nt, Human
gggcugugagaguggggcugcu

SEQ ID NO: 411145 - RNA, 18 nt, Human
ucagcuuuugaaaaccaa

SEQ ID NO: 411146 - RNA, 22 nt, Human
cuggagugauacucagaaugug

SEQ ID NO: 411147 - RNA, 22 nt, Human
auggcagggcagccucucagag

SEQ ID NO: 411148 - RNA, 22 nt, Human
uggcucaguggcagccgcagcu

SEQ ID NO: 411149 - RNA, 22 nt, Human
ggugcagcugcagccugggagc

SEQ ID NO: 411150 - RNA, 22 nt, Human
ggccucuggucaagacaagcau

SEQ ID NO: 411151 - RNA, 22 nt, Human
ucaucacucauuggacaacaga

SEQ ID NO: 411152 - RNA, 18 nt, Human
gcuuuauuucuuggggaa

SEQ ID NO: 411153 - RNA, 22 nt, Human
uccaguggagugugggggugaa

SEQ ID NO: 411154 - RNA, 22 nt, Human
uuuacacaaaagauagcacacc

SEQ ID NO: 411155 - RNA, 22 nt, Human
gagcagcuccagccgcaugacu

SEQ ID NO: 411156 - RNA, 22 nt, Human
uauuuccaagcugaauccaaug

SEQ ID NO: 411157 - RNA, 22 nt, Human
aaaagaggagugguuuaugaca

SEQ ID NO: 411158 - RNA, 22 nt, Human
gaggccaggguaccaucaacau

SEQ ID NO: 411159 - RNA, 22 nt, Human
uuuuccucaggaaugcuaagcu

SEQ ID NO: 411160 - RNA, 22 nt, Human
uuccuguaguugugcaauguac

SEQ ID NO: 411161 - RNA, 22 nt, Human
aguaaugucccuuaaauguggu

SEQ ID NO: 411162 - RNA, 22 nt, Human
aagccaguguuuuugagaguug

SEQ ID NO: 411163 - RNA, 22 nt, Human
agggccugggauguccuccuag

SEQ ID NO: 411164 - RNA, 22 nt, Human
ccaaaggccaagcucagguaaa

SEQ ID NO: 411165 - RNA, 22 nt, Human
ucaauucugguccucaggaacu

SEQ ID NO: 411166 - RNA, 22 nt, Human
uacugugaauacaaaauaaauu

SEQ ID NO: 411167 - RNA, 22 nt, Human
aaauuguugaucuacaguaagg

SEQ ID NO: 411168 - RNA, 22 nt, Human
aaaaacugcaauuacuuuuguc

SEQ ID NO: 411169 - RNA, 22 nt, Human
gccugguguccagaggcgagug

SEQ ID NO: 411170 - RNA, 22 nt, Human
aaagcaaucagauucagauguc

SEQ ID NO: 411171 - RNA, 22 nt, Human
cagauggccagaggcagcugca

SEQ ID NO: 411172 - RNA, 22 nt, Human
ccuucugcuggucaucccagug

SEQ ID NO: 411173 - RNA, 22 nt, Human
ugaaaucuccucuuuauauauc

SEQ ID NO: 411174 - RNA, 18 nt, Human
ggcagcaagaagggaggg

SEQ ID NO: 411175 - RNA, 22 nt, Human
ugcaggugccucuugagcuugu

SEQ ID NO: 411176 - RNA, 22 nt, Human
uagcauuucacugaucuucacu

SEQ ID NO: 411177 - RNA, 22 nt, Human
auguccuucuccucuuaccugc

SEQ ID NO: 411178 - RNA, 22 nt, Human
caggguagacaguaggugucug

SEQ ID NO: 411179 - RNA, 22 nt, Human
acacaggagauauguaauggcu

SEQ ID NO: 411180 - RNA, 22 nt, Human
gagcucagcccaaagagcagug

SEQ ID NO: 411181 - RNA, 22 nt, Human
gaagcccauuuguacagcacau

SEQ ID NO: 411182 - RNA, 22 nt, Human
cagacagaaggcuccuugaggu

SEQ ID NO: 411183 - RNA, 23 nt, Human
uucauuugucuacuucacuuguu

SEQ ID NO: 411184 - RNA, 22 nt, Human
ccaagggaaaccgagaggcugg

SEQ ID NO: 411185 - RNA, 22 nt, Human
gcuguggcuguacagagaccau

SEQ ID NO: 411186 - RNA, 22 nt, Human
cuuguccuuuacuugagacuca

SEQ ID NO: 411187 - RNA, 22 nt, Human
gacagagugcagggcuagaaga

SEQ ID NO: 411188 - RNA, 22 nt, Human
ugugaaggagaugaagggagug

SEQ ID NO: 411189 - RNA, 22 nt, Human
cauuugaugacucaacucauaa

SEQ ID NO: 411190 - RNA, 22 nt, Human
cagggcagccaggccccguggg

SEQ ID NO: 411191 - RNA, 22 nt, Human
cuccauugaacauccucucaga

SEQ ID NO: 411192 - RNA, 22 nt, Human
caaggagaguaauugaaugaga

SEQ ID NO: 411193 - RNA, 22 nt, Human
gcacugaaugccaaaguguagg

SEQ ID NO: 411194 - RNA, 20 nt, Human
aggcugaguucuaugcacuu

SEQ ID NO: 411195 - RNA, 22 nt, Human
ucugccuugagguccucagcuc

SEQ ID NO: 411196 - RNA, 18 nt, Human
augggaggggccaagaga

SEQ ID NO: 411197 - RNA, 22 nt, Human
aauagcuuuggucaccaucugg

SEQ ID NO: 411198 - RNA, 22 nt, Human
augaaacaugagaaauggagag

SEQ ID NO: 411199 - RNA, 22 nt, Human
agggccugacacccuugccagc

SEQ ID NO: 411200 - RNA, 22 nt, Human
acuguacaaccucugccccugu

SEQ ID NO: 411201 - RNA, 22 nt, Human
agggacacaugugauuauuuau

SEQ ID NO: 411202 - RNA, 22 nt, Human
uucauauaaauggaaucagaau

SEQ ID NO: 411203 - RNA, 21 nt, Human
gcccagcaaggugagaaggcc

SEQ ID NO: 411204 - RNA, 22 nt, Human
cauuuguaguuaaaaaugucuc

SEQ ID NO: 411205 - RNA, 22 nt, Human
uugugguuaaccgcacauuuuu

SEQ ID NO: 411206 - RNA, 22 nt, Human
caggaaugacugcagauggggc

SEQ ID NO: 411207 - RNA, 22 nt, Human
caaggccaguuucuccuaguca

SEQ ID NO: 411208 - RNA, 22 nt, Human
gcauaauauacaugcuugaucc

SEQ ID NO: 411209 - RNA, 22 nt, Human
gcagugugaccgagcuugcuuc

SEQ ID NO: 411210 - RNA, 22 nt, Human
aagggcugagcacagugagcca

SEQ ID NO: 411211 - RNA, 22 nt, Human
aucaggaucacagaaacuuuua

SEQ ID NO: 411212 - RNA, 22 nt, Human
gcuuccuucuaccacaucaugc

SEQ ID NO: 411213 - RNA, 23 nt, Human
ucugucacuuucugcuguggagu

SEQ ID NO: 411214 - RNA, 22 nt, Human
uuucaguggguuuauuucaugu

SEQ ID NO: 411215 - RNA, 22 nt, Human
gacuuucucuccucccaggugu

SEQ ID NO: 411216 - RNA, 22 nt, Human
gggcuucucccuaaggacucug

SEQ ID NO: 411217 - RNA, 22 nt, Human
gcagggugugucucauacaguu

SEQ ID NO: 411218 - RNA, 22 nt, Human
ucaguuuucucauuuaugagau

SEQ ID NO: 411219 - RNA, 21 nt, Human
ugagagccuccaaccggcuac

SEQ ID NO: 411220 - RNA, 22 nt, Human
agaaaagggcaggagggauaca

SEQ ID NO: 411221 - RNA, 22 nt, Human
agccagcaggugagugcagccu

SEQ ID NO: 411222 - RNA, 22 nt, Human
ugggaccugaagcagguuggca

SEQ ID NO: 411223 - RNA, 22 nt, Human
aaaguguugggauuacaggugu

SEQ ID NO: 411224 - RNA, 22 nt, Human
aagggaggaggauuuauuguac

SEQ ID NO: 411225 - RNA, 23 nt, Human
agucagagagugugagacaacug

SEQ ID NO: 411226 - RNA, 22 nt, Human
gccugcagccagggaguucucu

SEQ ID NO: 411227 - RNA, 22 nt, Human
ccuggccacucagguguggggc

SEQ ID NO: 411228 - RNA, 22 nt, Human
uugcauguuauuuaaucuguau

SEQ ID NO: 411229 - RNA, 22 nt, Human
gguagcacauugcauuaggaga

SEQ ID NO: 411230 - RNA, 22 nt, Human
ucagaacaauugggaaccauua

SEQ ID NO: 411231 - RNA, 22 nt, Human
ugccaggcauauggccucuuug

SEQ ID NO: 411232 - RNA, 22 nt, Human
aagagcuguaugccauaugauu

SEQ ID NO: 411233 - RNA, 22 nt, Human
gcaaggcuuugugaauuuuaaa

SEQ ID NO: 411234 - RNA, 22 nt, Human
caagcugguaucagcuagagcg

SEQ ID NO: 411235 - RNA, 22 nt, Human
ucucacugauuugagaccaagg

SEQ ID NO: 411236 - RNA, 22 nt, Human
acagcuguauccccagagcuca

SEQ ID NO: 411237 - RNA, 22 nt, Human
ggcucuggucagugaggggccu

SEQ ID NO: 411238 - RNA, 22 nt, Human
ccugcagacacuuguccagcaa

SEQ ID NO: 411239 - RNA, 22 nt, Human
uccuugaaugaauguucucucc

SEQ ID NO: 411240 - RNA, 22 nt, Human
ucuucuuccuccacagggccca

SEQ ID NO: 411241 - RNA, 22 nt, Human
uggcagagcccagaacugagca

SEQ ID NO: 411242 - RNA, 22 nt, Human
aggaguggaauuacuggguucu

SEQ ID NO: 411243 - RNA, 22 nt, Human
gugggcagugguuugcgcgguc

SEQ ID NO: 411244 - RNA, 22 nt, Human
guggggggacguuggucacuuu

SEQ ID NO: 411245 - RNA, 22 nt, Human
augaauacgcggucauacacau

SEQ ID NO: 411246 - RNA, 22 nt, Human
uaugaguacaaggacucugucu

SEQ ID NO: 411247 - RNA, 22 nt, Human
gcagggcagagggagaaucucu

SEQ ID NO: 411248 - RNA, 22 nt, Human
augauuucuauauaaacuuaaa

SEQ ID NO: 411249 - RNA, 22 nt, Human
cucuggaauguuuacaugcccu

SEQ ID NO: 411250 - RNA, 22 nt, Human
aagcuuuaaggaauuuuaugga

SEQ ID NO: 411251 - RNA, 22 nt, Human
ccaucuccacugucccugucaa

SEQ ID NO: 411252 - RNA, 22 nt, Human
ugauuuccucuacuagcaauua

SEQ ID NO: 411253 - RNA, 21 nt, Human
uuuauuuauauaggacacaug

SEQ ID NO: 411254 - RNA, 18 nt, Human
uggcaggaaaugcacuuu

SEQ ID NO: 411255 - RNA, 22 nt, Human
cauggcagugauucagccuuug

SEQ ID NO: 411256 - RNA, 22 nt, Human
gaggagaaauuauccuuggugu

SEQ ID NO: 411257 - RNA, 21 nt, Human
gagugcaggucugaugccauc

SEQ ID NO: 411258 - RNA, 23 nt, Human
auguuauuauuagcagucuugcc

SEQ ID NO: 411259 - RNA, 22 nt, Human
caaagguaguauauauauuguu

SEQ ID NO: 411260 - RNA, 22 nt, Human
agaaaucauucccaaacccaua

SEQ ID NO: 411261 - RNA, 22 nt, Human
aaauuucuguuguuuugagcca

SEQ ID NO: 411262 - RNA, 22 nt, Human
uggcucugcugaaccuagugca

SEQ ID NO: 411263 - RNA, 20 nt, Human
ugcuugucaugcacucaggc

SEQ ID NO: 411264 - RNA, 22 nt, Human
uugcauaaagauuuuauugcau

SEQ ID NO: 411265 - RNA, 21 nt, Human
ccugagggugguugugaagau

SEQ ID NO: 411266 - RNA, 22 nt, Human
uccugcaggcuugaguccucag

SEQ ID NO: 411267 - RNA, 23 nt, Human
cuggcucauccugguugcagugg

SEQ ID NO: 411268 - RNA, 22 nt, Human
ccagggcagcagaauuggggca

SEQ ID NO: 411269 - RNA, 22 nt, Human
aggcuccuaucgcuuucagcaa

SEQ ID NO: 411270 - RNA, 23 nt, Human
uacauuguggauggaguccuggg

SEQ ID NO: 411271 - RNA, 22 nt, Human
uuuucuuauggugaagcacaaa

SEQ ID NO: 411272 - RNA, 22 nt, Human
ccagagucuaugaguccucauu

SEQ ID NO: 411273 - RNA, 22 nt, Human
gaggcagcagaacauggaagag

SEQ ID NO: 411274 - RNA, 22 nt, Human
ucugaggccccugggcaggaug

SEQ ID NO: 411275 - RNA, 22 nt, Human
cuaaaauuaccuaccaguuuag

SEQ ID NO: 411276 - RNA, 22 nt, Human
uaggaaaagcacaggauguucu

SEQ ID NO: 411277 - RNA, 22 nt, Human
ugaaaguugcacauaagagaau

SEQ ID NO: 411278 - RNA, 22 nt, Human
uccucacagucaacacuuugag

SEQ ID NO: 411279 - RNA, 22 nt, Human
gcacugaacuuuaaucauuucu

SEQ ID NO: 411280 - RNA, 22 nt, Human
ggcucuggugcccuggcuccca

SEQ ID NO: 411281 - RNA, 22 nt, Human
cucccuggaggcccagaccugg

SEQ ID NO: 411282 - RNA, 22 nt, Human
caggcugagcucuggccugggc

SEQ ID NO: 411283 - RNA, 22 nt, Human
aaugccucuuggaagaagacuu

SEQ ID NO: 411284 - RNA, 21 nt, Human
ugccagggauuuacagagccu

SEQ ID NO: 411285 - RNA, 22 nt, Human
ccucccacauugaggacaugcu

SEQ ID NO: 411286 - RNA, 22 nt, Human
ggcacugagcugccuuggggca

SEQ ID NO: 411287 - RNA, 22 nt, Human
ugggcagggagcuggaaccaca

SEQ ID NO: 411288 - RNA, 22 nt, Human
gugagggcagcuuggucagugu

SEQ ID NO: 411289 - RNA, 22 nt, Human
aacagcaauagcacuauucauu

SEQ ID NO: 411290 - RNA, 22 nt, Human
cucugagcccgcugcagcccca

SEQ ID NO: 411291 - RNA, 22 nt, Human
auacagaagaacuauagccacu

SEQ ID NO: 411292 - RNA, 22 nt, Human
cucaggagacaguguccacaug

SEQ ID NO: 411293 - RNA, 22 nt, Human
ccagaggaaaaauaucucccua

SEQ ID NO: 411294 - RNA, 22 nt, Human
aguccagggcucucugugggau

SEQ ID NO: 411295 - RNA, 22 nt, Human
ucaggaggccaccaggaccugu

SEQ ID NO: 411296 - RNA, 22 nt, Human
gccagcuggagugagagugggc

SEQ ID NO: 411297 - RNA, 22 nt, Human
ccagcucuuggugcacuuacau

SEQ ID NO: 411298 - RNA, 22 nt, Human
gccuguuggugacuuucuguug

SEQ ID NO: 411299 - RNA, 22 nt, Human
guuuccauggcucuguuaaugg

SEQ ID NO: 411300 - RNA, 22 nt, Human
ugaggaugacgauggcaauggc

SEQ ID NO: 411301 - RNA, 22 nt, Human
ugaagaauguugcagugagcau

SEQ ID NO: 411302 - RNA, 22 nt, Human
aguuacaaccaugacacaagca

SEQ ID NO: 411303 - RNA, 22 nt, Human
cagggugcgccacucagaugua

SEQ ID NO: 411304 - RNA, 22 nt, Human
uggcucagccauucguguugcc

SEQ ID NO: 411305 - RNA, 22 nt, Human
guggcuucuggcugggccucag

SEQ ID NO: 411306 - RNA, 22 nt, Human
caggaagagaacauggaggcug

SEQ ID NO: 411307 - RNA, 22 nt, Human
uuguggcucgugagauguuagg

SEQ ID NO: 411308 - RNA, 19 nt, Human
aggcugcaagguggugggc

SEQ ID NO: 411309 - RNA, 22 nt, Human
ggcuuuaugcacagcagauggu

SEQ ID NO: 411310 - RNA, 22 nt, Human
cccuggaggucagaggccuggg

SEQ ID NO: 411311 - RNA, 22 nt, Human
gaggaaugucagcacaggccuc

SEQ ID NO: 411312 - RNA, 22 nt, Human
guguccagagaaacucacagcu

SEQ ID NO: 411313 - RNA, 22 nt, Human
gccuggagagcacugugcgcuu

SEQ ID NO: 411314 - RNA, 22 nt, Human
cccagcaggucggugcugccug

SEQ ID NO: 411315 - RNA, 22 nt, Human
aagccagggucaggggccuccu

SEQ ID NO: 411316 - RNA, 20 nt, Human
uccugggguaagccaugguc

SEQ ID NO: 411317 - RNA, 22 nt, Human
ccaaagugcugagauuacaggu

SEQ ID NO: 411318 - RNA, 22 nt, Human
uggcagaggaaaaagucacugg

SEQ ID NO: 411319 - RNA, 22 nt, Human
cggagcugccugccaagccugc

SEQ ID NO: 411320 - RNA, 22 nt, Human
aggcuucagaaagaguaauugg

SEQ ID NO: 411321 - RNA, 22 nt, Human
gucccauaaguagugcaacuug

SEQ ID NO: 411322 - RNA, 22 nt, Human
auuguacaugcagugagucauc

SEQ ID NO: 411323 - RNA, 22 nt, Human
cuuaauuuuuguaguagaugga

SEQ ID NO: 411324 - RNA, 22 nt, Human
guagggacaugccauuaucuca

SEQ ID NO: 411325 - RNA, 22 nt, Human
cacauggaagagauacagugag

SEQ ID NO: 411326 - RNA, 22 nt, Human
ucagaagcugguguccuuugaa

SEQ ID NO: 411327 - RNA, 22 nt, Human
ggagccaguuuagaccucaguu

SEQ ID NO: 411328 - RNA, 18 nt, Human
acagggagggcgcugggg

SEQ ID NO: 411329 - RNA, 22 nt, Human
uguaacaguaagccugugagcu

SEQ ID NO: 411330 - RNA, 22 nt, Human
gcaggagcccuggcauguucuu

SEQ ID NO: 411331 - RNA, 22 nt, Human
gccaaaucuggauuuagcaaga

SEQ ID NO: 411332 - RNA, 22 nt, Human
ccagcuccugggucuuagucag

SEQ ID NO: 411333 - RNA, 22 nt, Human
gccauuuucugucuuguuuauu

SEQ ID NO: 411334 - RNA, 22 nt, Human
gcugucuggaggcucugaggga

SEQ ID NO: 411335 - RNA, 22 nt, Human
uuagugucuucuucauccucug

SEQ ID NO: 411336 - RNA, 22 nt, Human
acugcuuuucagagucugccug

SEQ ID NO: 411337 - RNA, 22 nt, Human
caagcuggcugggagaggcacg

SEQ ID NO: 411338 - RNA, 22 nt, Human
auguggaggaaaugaguguaca

SEQ ID NO: 411339 - RNA, 22 nt, Human
aaucuuucccuauuaaaugugg

SEQ ID NO: 411340 - RNA, 22 nt, Human
aggccagguggucaugcuugcu

SEQ ID NO: 411341 - RNA, 22 nt, Human
gaaggccauuuuuagguagaau

SEQ ID NO: 411342 - RNA, 22 nt, Human
ugaaugaugcaguauaaugaua

SEQ ID NO: 411343 - RNA, 22 nt, Human
aaggucauuguugcauguucuc

SEQ ID NO: 411344 - RNA, 22 nt, Human
gucccaggcuuauguggagcuu

SEQ ID NO: 411345 - RNA, 22 nt, Human
uuccucuccucccaccagguga

SEQ ID NO: 411346 - RNA, 22 nt, Human
uaccacuacauuugcuaauggc

SEQ ID NO: 411347 - RNA, 22 nt, Human
ccuggcugugcauugccggccc

SEQ ID NO: 411348 - RNA, 22 nt, Human
cccugcagcuuuugcauaguca

SEQ ID NO: 411349 - RNA, 22 nt, Human
aggcccagggcugcucucugaa

SEQ ID NO: 411350 - RNA, 20 nt, Human
cgcccaggagggcccaugug

SEQ ID NO: 411351 - RNA, 22 nt, Human
uuucagugcuucuguuuaccgg

SEQ ID NO: 411352 - RNA, 22 nt, Human
aaggccaucuacuuacggaauu

SEQ ID NO: 411353 - RNA, 18 nt, Human
cagaaguccuucaaggcc

SEQ ID NO: 411354 - RNA, 22 nt, Human
cuggcagcucugagucccuucu

SEQ ID NO: 411355 - RNA, 22 nt, Human
auggcccaggccuccuguggcu

SEQ ID NO: 411356 - RNA, 22 nt, Human
gcagggaagacccggagcagcg

SEQ ID NO: 411357 - RNA, 21 nt, Human
uugcaccaugauaaauucaga

SEQ ID NO: 411358 - RNA, 22 nt, Human
guagaagugaugucauguuaua

SEQ ID NO: 411359 - RNA, 22 nt, Human
ugaggcucaagaaagauuuguu

SEQ ID NO: 411360 - RNA, 22 nt, Human
cugucuccuccacugcauggga

SEQ ID NO: 411361 - RNA, 22 nt, Human
ugaggccucauuuagggagagg

SEQ ID NO: 411362 - RNA, 22 nt, Human
cucaggaugucggugacuauug

SEQ ID NO: 411363 - RNA, 22 nt, Human
uauuucuggcuuugagggugau

SEQ ID NO: 411364 - RNA, 23 nt, Human
cuggcucuguagguggcauccuu

SEQ ID NO: 411365 - RNA, 22 nt, Human
gcagugaaaaagugcacccugu

SEQ ID NO: 411366 - RNA, 22 nt, Human
caucagcaggcaacacucuugg

SEQ ID NO: 411367 - RNA, 23 nt, Human
ucccuggaggcagguccagggcc

SEQ ID NO: 411368 - RNA, 22 nt, Human
gaaggucaccuccccucucugg

SEQ ID NO: 411369 - RNA, 22 nt, Human
gggcccuggacguggcggcaga

SEQ ID NO: 411370 - RNA, 22 nt, Human
acuuugaaacuaaaauucauua

SEQ ID NO: 411371 - RNA, 22 nt, Human
cugggccuagcaacagaggagu

SEQ ID NO: 411372 - RNA, 22 nt, Human
ugaaggccagggauuugcagcc

SEQ ID NO: 411373 - RNA, 22 nt, Human
accaaggaagagauucucaguu

SEQ ID NO: 411374 - RNA, 22 nt, Human
uucacaaaaaugcugaacaguu

SEQ ID NO: 411375 - RNA, 18 nt, Human
caugggugacagguggau

SEQ ID NO: 411376 - RNA, 21 nt, Human
gcugcaucaaucuacccaggg

SEQ ID NO: 411377 - RNA, 22 nt, Human
auuauaaaccuuugaggguggg

SEQ ID NO: 411378 - RNA, 22 nt, Human
uucacagacuuuccauagauug

SEQ ID NO: 411379 - RNA, 22 nt, Human
gaaaugcauggaucuuggcaga

SEQ ID NO: 411380 - RNA, 22 nt, Human
cagucucucagcuuucagcugu

SEQ ID NO: 411381 - RNA, 22 nt, Human
agcagagucugugugcacuuua

SEQ ID NO: 411382 - RNA, 22 nt, Human
aaugcacauguuguaauaaaua

SEQ ID NO: 411383 - RNA, 22 nt, Human
uccucagaugcucuuggacgcc

SEQ ID NO: 411384 - RNA, 22 nt, Human
cugguuuagcuguaagguuccc

SEQ ID NO: 411385 - RNA, 23 nt, Human
cagggcugggcuugguguuaggc

SEQ ID NO: 411386 - RNA, 22 nt, Human
uguaggaguccaaucaggagac

SEQ ID NO: 411387 - RNA, 22 nt, Human
uggcucagauaauucaaggggc

SEQ ID NO: 411388 - RNA, 22 nt, Human
acagccuggccugaguuaaggc

SEQ ID NO: 411389 - RNA, 22 nt, Human
cucagaaucugccaaguucagg

SEQ ID NO: 411390 - RNA, 22 nt, Human
cacugaaggaaggacuacugca

SEQ ID NO: 411391 - RNA, 22 nt, Human
ggaggaccugcuggcccugcaa

SEQ ID NO: 411392 - RNA, 22 nt, Human
ugcagcuguuacggacccuguc

SEQ ID NO: 411393 - RNA, 18 nt, Human
agcagagcccaugcauuc

SEQ ID NO: 411394 - RNA, 22 nt, Human
uagauuucucauucauagauug

SEQ ID NO: 411395 - RNA, 22 nt, Human
agaggcuccuagccacuggcuu

SEQ ID NO: 411396 - RNA, 22 nt, Human
uccagagcagguggucagaagg

SEQ ID NO: 411397 - RNA, 22 nt, Human
caggccugugaguugaggcccc

SEQ ID NO: 411398 - RNA, 22 nt, Human
ggcuuucuaugaacucaaaggc

SEQ ID NO: 411399 - RNA, 22 nt, Human
acugaaauacugcucuuggauu

SEQ ID NO: 411400 - RNA, 22 nt, Human
auuacacauagacauucguuca

SEQ ID NO: 411401 - RNA, 22 nt, Human
aggagaguucacacuggucaga

SEQ ID NO: 411402 - RNA, 22 nt, Human
ugccugugucacagugauguuu

SEQ ID NO: 411403 - RNA, 22 nt, Human
ugggagcccaagggagcugccg

SEQ ID NO: 411404 - RNA, 22 nt, Human
caaggcugcugcgggucgcacc

SEQ ID NO: 411405 - RNA, 20 nt, Human
uucuuucaucuacacguugu

SEQ ID NO: 411406 - RNA, 21 nt, Human
auucagaaagggaauaaacuc

SEQ ID NO: 411407 - RNA, 22 nt, Human
ugcugccuccaacuccugggcu

SEQ ID NO: 411408 - RNA, 22 nt, Human
gagcuuuaagggauaaaaugau

SEQ ID NO: 411409 - RNA, 22 nt, Human
auggacagugugaagcagauag

SEQ ID NO: 411410 - RNA, 17 nt, Human
gcugagaggcagcacag

SEQ ID NO: 411411 - RNA, 21 nt, Human
ggcagugaugugaagugcauc

SEQ ID NO: 411412 - RNA, 22 nt, Human
gcuaggagauugagcucugaag

SEQ ID NO: 411413 - RNA, 22 nt, Human
cagggagggacaauugucaccu

SEQ ID NO: 411414 - RNA, 22 nt, Human
ugaugcuucacgcugaauaugc

SEQ ID NO: 411415 - RNA, 22 nt, Human
caggcagagucagauuagacuu

SEQ ID NO: 411416 - RNA, 22 nt, Human
cugugcaagacuuacuuuaaua

SEQ ID NO: 411417 - RNA, 22 nt, Human
uuucugaagggcagcagacucu

SEQ ID NO: 411418 - RNA, 22 nt, Human
cccugccuucuuggccuuuaaa

SEQ ID NO: 411419 - RNA, 22 nt, Human
ucccagagugagccaggggcag

SEQ ID NO: 411420 - RNA, 22 nt, Human
cugcucugcaaggcacagugau

SEQ ID NO: 411421 - RNA, 22 nt, Human
gcagccacccucaaggcugaau

SEQ ID NO: 411422 - RNA, 22 nt, Human
gguggccuccagggcauaggug

SEQ ID NO: 411423 - RNA, 21 nt, Human
cacucaggguaugugccaggc

SEQ ID NO: 411424 - RNA, 22 nt, Human
aagggcuccaagagguagcugg

SEQ ID NO: 411425 - RNA, 19 nt, Human
agggccugcagcucaagcu

SEQ ID NO: 411426 - RNA, 22 nt, Human
aucuacagcugucugcacagua

SEQ ID NO: 411427 - RNA, 22 nt, Human
aaaggccaugguuggaguguuu

SEQ ID NO: 411428 - RNA, 23 nt, Human
ugucacauuuaguuggcauuguu

SEQ ID NO: 411429 - RNA, 22 nt, Human
ggcuucucgugccgaagcaaga

SEQ ID NO: 411430 - RNA, 22 nt, Human
cagcacuggggggauucggagc

SEQ ID NO: 411431 - RNA, 22 nt, Human
ucuuccucuagaucugaggccc

SEQ ID NO: 411432 - RNA, 22 nt, Human
ccuggaguuuuuugguugacuc

SEQ ID NO: 411433 - RNA, 22 nt, Human
auuucacucauucauguuacuu

SEQ ID NO: 411434 - RNA, 22 nt, Human
cgagaguggacagggcgcagcu

SEQ ID NO: 411435 - RNA, 22 nt, Human
ugggcuccaauuuguccuuuca

SEQ ID NO: 411436 - RNA, 22 nt, Human
aaguuuaacuugaauucuuucu

SEQ ID NO: 411437 - RNA, 22 nt, Human
ugucucaggcccaagccaguaa

SEQ ID NO: 411438 - RNA, 20 nt, Human
cagggcucugggccuggccu

SEQ ID NO: 411439 - RNA, 20 nt, Human
acaggagaucugaggaaagg

SEQ ID NO: 411440 - RNA, 22 nt, Human
uggaaagaaaaacaggccauga

SEQ ID NO: 411441 - RNA, 22 nt, Human
ccuuggaggacugcugcuucuu

SEQ ID NO: 411442 - RNA, 20 nt, Human
agcaggaaugaugcuuucau

SEQ ID NO: 411443 - RNA, 22 nt, Human
aaacuucauggauaauauaaag

SEQ ID NO: 411444 - RNA, 22 nt, Human
agauacauuaguaguuacuugu

SEQ ID NO: 411445 - RNA, 22 nt, Human
augaggcauucacagaaggcac

SEQ ID NO: 411446 - RNA, 22 nt, Human
acacuguaaauugagugcguga

SEQ ID NO: 411447 - RNA, 22 nt, Human
cacacuagucuauccauuagcu

SEQ ID NO: 411448 - RNA, 22 nt, Human
uuugcauuuguucaaguauuga

SEQ ID NO: 411449 - RNA, 22 nt, Human
acuguacacauucgucaagacu

SEQ ID NO: 411450 - RNA, 22 nt, Human
aaaucaaaagacauguguuuua

SEQ ID NO: 411451 - RNA, 22 nt, Human
uaaggaaaguacauguuuugac

SEQ ID NO: 411452 - RNA, 22 nt, Human
ucuggagcuggagggcaaggca

SEQ ID NO: 411453 - RNA, 22 nt, Human
auguagcaucuauccugauaaa

SEQ ID NO: 411454 - RNA, 22 nt, Human
ucuggagcuuguuucagauggu

SEQ ID NO: 411455 - RNA, 22 nt, Human
ugcuuccagcucucuguaaggu

SEQ ID NO: 411456 - RNA, 22 nt, Human
aagcugccuugcugaggagaaa

SEQ ID NO: 411457 - RNA, 22 nt, Human
aggcuucacgaugggugaggug

SEQ ID NO: 411458 - RNA, 22 nt, Human
uguguauuaccauuuuacagcu

SEQ ID NO: 411459 - RNA, 22 nt, Human
ucuguaucacccguucccagaa

SEQ ID NO: 411460 - RNA, 22 nt, Human
ucccaaggugcucggcaacagg

SEQ ID NO: 411461 - RNA, 22 nt, Human
uguacaaagaguauagcuuuga

SEQ ID NO: 411462 - RNA, 23 nt, Human
gccucugcagccuaguuaguguc

SEQ ID NO: 411463 - RNA, 22 nt, Human
accauuuuggguauuuucagag

SEQ ID NO: 411464 - RNA, 22 nt, Human
gagggcugcuggaaaaaugcag

SEQ ID NO: 411465 - RNA, 19 nt, Human
aggugaugugacucuagaa

SEQ ID NO: 411466 - RNA, 22 nt, Human
agguggggccaaaugcuacagu

SEQ ID NO: 411467 - RNA, 23 nt, Human
ggccuccuggucuaggcuagacu

SEQ ID NO: 411468 - RNA, 22 nt, Human
gggcugaggcuaccacuggucu

SEQ ID NO: 411469 - RNA, 22 nt, Human
gccuucagcggccgcucgcugc

SEQ ID NO: 411470 - RNA, 22 nt, Human
gaagcccagggcguggccgggc

SEQ ID NO: 411471 - RNA, 22 nt, Human
cugagcugaaacuugagaggcu

SEQ ID NO: 411472 - RNA, 20 nt, Human
gacaggagaguuagguaggu

SEQ ID NO: 411473 - RNA, 22 nt, Human
uggggugccgacagggagggca

SEQ ID NO: 411474 - RNA, 22 nt, Human
ccugcccuagagaugacacaau

SEQ ID NO: 411475 - RNA, 22 nt, Human
gaaaagcuaggccaguucagcu

SEQ ID NO: 411476 - RNA, 22 nt, Human
agaacuguccuuggaggagagu

SEQ ID NO: 411477 - RNA, 22 nt, Human
cuggcucaauaaauauuagcug

SEQ ID NO: 411478 - RNA, 21 nt, Human
guagggacagagaguugguga

SEQ ID NO: 411479 - RNA, 22 nt, Human
aguggcaggcggagauguagga

SEQ ID NO: 411480 - RNA, 22 nt, Human
auuccaaagcacaucagaacua

SEQ ID NO: 411481 - RNA, 22 nt, Human
caggaaugaggucguaaguguc

SEQ ID NO: 411482 - RNA, 22 nt, Human
aggcucccaagcacugacccca

SEQ ID NO: 411483 - RNA, 20 nt, Human
cuuagaaauuuuuacccugg

SEQ ID NO: 411484 - RNA, 22 nt, Human
uacaaagucagaauaacaggug

SEQ ID NO: 411485 - RNA, 22 nt, Human
ggugaggggagagugaaagaaa

SEQ ID NO: 411486 - RNA, 22 nt, Human
uaacagaagaaaacauauugga

SEQ ID NO: 411487 - RNA, 22 nt, Human
ugcccaggauugugaggucagg

SEQ ID NO: 411488 - RNA, 22 nt, Human
uccagggagagccgcugcucca

SEQ ID NO: 411489 - RNA, 23 nt, Human
gcugucaguuguuuuugucucua

SEQ ID NO: 411490 - RNA, 22 nt, Human
ucagugaucuaaggguauggcc

SEQ ID NO: 411491 - RNA, 22 nt, Human
aggcuccuuguucaucauccau

SEQ ID NO: 411492 - RNA, 22 nt, Human
ccaggcauccauugcuuccucu

SEQ ID NO: 411493 - RNA, 22 nt, Human
ccagccucacuggcaucaccua

SEQ ID NO: 411494 - RNA, 22 nt, Human
ggaggccaaagugugggcggcu

SEQ ID NO: 411495 - RNA, 22 nt, Human
acauuuaaugauccuacuguga

SEQ ID NO: 411496 - RNA, 22 nt, Human
aggugucuucagggugagacag

SEQ ID NO: 411497 - RNA, 21 nt, Human
acagucuccccagaucucucc

SEQ ID NO: 411498 - RNA, 22 nt, Human
agguacaguagacagacaguua

SEQ ID NO: 411499 - RNA, 22 nt, Human
caggauggucagaugcauuguc

SEQ ID NO: 411500 - RNA, 22 nt, Human
aucugccucuucuucauugcga

SEQ ID NO: 411501 - RNA, 22 nt, Human
gcacacagccagcugagggcua

SEQ ID NO: 411502 - RNA, 22 nt, Human
cuggagccagccagggcccucu

SEQ ID NO: 411503 - RNA, 22 nt, Human
ucacaugcuacugagccagacc

SEQ ID NO: 411504 - RNA, 22 nt, Human
cuguguggccucaagccagccu

SEQ ID NO: 411505 - RNA, 22 nt, Human
uggacagguuugggugccuguu

SEQ ID NO: 411506 - RNA, 22 nt, Human
uuucugcugugcuuucuugcgu

SEQ ID NO: 411507 - RNA, 22 nt, Human
gugggacucuucuuuggcagug

SEQ ID NO: 411508 - RNA, 22 nt, Human
caggccuggggcuggcuuccag

SEQ ID NO: 411509 - RNA, 22 nt, Human
cagccucuuuccacaucaggca

SEQ ID NO: 411510 - RNA, 23 nt, Human
gcucagagguuuuucucuggaug

SEQ ID NO: 411511 - RNA, 22 nt, Human
agggggugcuacuuccagaguu

SEQ ID NO: 411512 - RNA, 22 nt, Human
acaguguucacuuaacaaugga

SEQ ID NO: 411513 - RNA, 22 nt, Human
ucaguuuugaaaacauugaaug

SEQ ID NO: 411514 - RNA, 22 nt, Human
gcugggaggaauuuggggaaua

SEQ ID NO: 411515 - RNA, 22 nt, Human
ccagcuccgggaguugcugcug

SEQ ID NO: 411516 - RNA, 22 nt, Human
gggaggcuggcucuggccacag

SEQ ID NO: 411517 - RNA, 22 nt, Human
gcugggagccguaccugucacg

SEQ ID NO: 411518 - RNA, 22 nt, Human
agugaaaugauaguguaaauac

SEQ ID NO: 411519 - RNA, 22 nt, Human
agcagccaauuggaggaugaag

SEQ ID NO: 411520 - RNA, 22 nt, Human
agagugaaaagcuagagcagua

SEQ ID NO: 411521 - RNA, 22 nt, Human
gcucaggaccgaggggugggaa

SEQ ID NO: 411522 - RNA, 22 nt, Human
agugcacaccuuaguacaaagu

SEQ ID NO: 411523 - RNA, 22 nt, Human
cagaguguugaccauaagccca

SEQ ID NO: 411524 - RNA, 22 nt, Human
aggaaacuccccuacaucucaa

SEQ ID NO: 411525 - RNA, 22 nt, Human
gggaggaaagagaaguggucca

SEQ ID NO: 411526 - RNA, 22 nt, Human
uaugaagacaaugauagcauga

SEQ ID NO: 411527 - RNA, 19 nt, Human
gucacauuugucucccagg

SEQ ID NO: 411528 - RNA, 22 nt, Human
aacagacaacuccuguggcuca

SEQ ID NO: 411529 - RNA, 22 nt, Human
cccaggucugccagccuguggg

SEQ ID NO: 411530 - RNA, 22 nt, Human
ggccucucuccuuggcuugcag

SEQ ID NO: 411531 - RNA, 22 nt, Human
accaggcagcacuuuccuugca

SEQ ID NO: 411532 - RNA, 19 nt, Human
gagguggguccccgcagcc

SEQ ID NO: 411533 - RNA, 22 nt, Human
aaagauuucacaucccaagccu

SEQ ID NO: 411534 - RNA, 22 nt, Human
cuggcuggucaucagcaguacg

SEQ ID NO: 411535 - RNA, 22 nt, Human
ccugcaggcugcaggccaguuc

SEQ ID NO: 411536 - RNA, 22 nt, Human
gugugcagaagacacaagacau

SEQ ID NO: 411537 - RNA, 22 nt, Human
uaggaaaagucuagauugauga

SEQ ID NO: 411538 - RNA, 22 nt, Human
cagcuucuggcguggagccuga

SEQ ID NO: 411539 - RNA, 22 nt, Human
aguacuuugcacuuugcucaga

SEQ ID NO: 411540 - RNA, 22 nt, Human
ucagaacauuuaaaaagugguu

SEQ ID NO: 411541 - RNA, 22 nt, Human
ucagggcacauucugcaguggc

SEQ ID NO: 411542 - RNA, 21 nt, Human
gccacguuucagucuucucag

SEQ ID NO: 411543 - RNA, 22 nt, Human
aaguugaagcaugaaccaaggu

SEQ ID NO: 411544 - RNA, 22 nt, Human
auucuucugccuacuuucaucc

SEQ ID NO: 411545 - RNA, 19 nt, Human
acccagagcccuuugcagg

SEQ ID NO: 411546 - RNA, 22 nt, Human
uuaucauugucgcagucuaauu

SEQ ID NO: 411547 - RNA, 20 nt, Human
cuggguggcaagcaaggggg

SEQ ID NO: 411548 - RNA, 22 nt, Human
cccagacauaacagcagagagg

SEQ ID NO: 411549 - RNA, 22 nt, Human
ccucacugcuauguguuugcuc

SEQ ID NO: 411550 - RNA, 22 nt, Human
gccugccuuuuggaggcacauu

SEQ ID NO: 411551 - RNA, 20 nt, Human
cauuaugguugggcacagug

SEQ ID NO: 411552 - RNA, 22 nt, Human
aaaaucaguacacuuuauuuug

SEQ ID NO: 411553 - RNA, 22 nt, Human
agauuucccucuuguauuugca

SEQ ID NO: 411554 - RNA, 22 nt, Human
aggacucaucccugcuugucag

SEQ ID NO: 411555 - RNA, 22 nt, Human
agcuuuguggcuuugcaagacu

SEQ ID NO: 411556 - RNA, 22 nt, Human
uauucacauguacauaugcuca

SEQ ID NO: 411557 - RNA, 23 nt, Human
ucugucaccuauggcugcucuuc

SEQ ID NO: 411558 - RNA, 22 nt, Human
uucaauucuaaacuaauauucu

SEQ ID NO: 411559 - RNA, 22 nt, Human
ucuguaaucaagauauuugaga

SEQ ID NO: 411560 - RNA, 22 nt, Human
ggcagagcuuguuccuucuguu

SEQ ID NO: 411561 - RNA, 23 nt, Human
ccugcucaggcgugugcccugcu

SEQ ID NO: 411562 - RNA, 18 nt, Human
gcagcugacacuggaguu

SEQ ID NO: 411563 - RNA, 22 nt, Human
ggcugcuggaagacugaacaag

SEQ ID NO: 411564 - RNA, 22 nt, Human
aaugagcugcugcuguuccacc

SEQ ID NO: 411565 - RNA, 22 nt, Human
uugaaagaggcaaaguuugauc

SEQ ID NO: 411566 - RNA, 22 nt, Human
ccugggcaacauagggagaccc

SEQ ID NO: 411567 - RNA, 22 nt, Human
cagagcggccacuagagggcgc

SEQ ID NO: 411568 - RNA, 22 nt, Human
cugcuuccaugcaauggcaguc

SEQ ID NO: 411569 - RNA, 22 nt, Human
aucagaagaaauggaugugacu

SEQ ID NO: 411570 - RNA, 22 nt, Human
cagagcagaaaccugggugauu

SEQ ID NO: 411571 - RNA, 22 nt, Human
gccugcagcugcuuccacacac

SEQ ID NO: 411572 - RNA, 22 nt, Human
gcagggcacacaagaaugauaa

SEQ ID NO: 411573 - RNA, 22 nt, Human
gcuccaggagagggaagcagau

SEQ ID NO: 411574 - RNA, 22 nt, Human
gccuggcuccuaaggacuggcu

SEQ ID NO: 411575 - RNA, 22 nt, Human
gaagccacaacuuuuucuuagc

SEQ ID NO: 411576 - RNA, 18 nt, Human
ggacaucaucaggugcuu

SEQ ID NO: 411577 - RNA, 22 nt, Human
uaaggccagccagcaaaucugu

SEQ ID NO: 411578 - RNA, 22 nt, Human
cuggcagggugggcuuugcuuu

SEQ ID NO: 411579 - RNA, 22 nt, Human
uaugcacaguuacaagaauauc

SEQ ID NO: 411580 - RNA, 22 nt, Human
aagaagaugguuaacuuucagu

SEQ ID NO: 411581 - RNA, 22 nt, Human
cacacaugagucuccccauugg

SEQ ID NO: 411582 - RNA, 19 nt, Human
caggaaugagguaauggcu

SEQ ID NO: 411583 - RNA, 22 nt, Human
ugacagggcuagaggcaaugca

SEQ ID NO: 411584 - RNA, 22 nt, Human
aggagcugacuuguaaagcauu

SEQ ID NO: 411585 - RNA, 22 nt, Human
gagcucccuggagguucagaua

SEQ ID NO: 411586 - RNA, 22 nt, Human
ugaggcagggagaguggauaug

SEQ ID NO: 411587 - RNA, 22 nt, Human
ggugaaggaggaagcugaugga

SEQ ID NO: 411588 - RNA, 22 nt, Human
auugaaagcauggauuuggauu

SEQ ID NO: 411589 - RNA, 22 nt, Human
uagcaggguaaauguagaugga

SEQ ID NO: 411590 - RNA, 17 nt, Human
acaggccugcuugcacu

SEQ ID NO: 411591 - RNA, 22 nt, Human
ucaagagagugcugcuuggggu

SEQ ID NO: 411592 - RNA, 22 nt, Human
gcugagaggcacuaucuccgga

SEQ ID NO: 411593 - RNA, 22 nt, Human
agagugucugguagcugcucug

SEQ ID NO: 411594 - RNA, 22 nt, Human
gcacagcaauuucuauaagcuc

SEQ ID NO: 411595 - RNA, 22 nt, Human
uguggccuugcagccuggaggu

SEQ ID NO: 411596 - RNA, 23 nt, Human
agagccugaaagacuucuggcac

SEQ ID NO: 411597 - RNA, 22 nt, Human
uaguggaguagaaaccaaagaa

SEQ ID NO: 411598 - RNA, 22 nt, Human
acucugugugaguagagccugu

SEQ ID NO: 411599 - RNA, 22 nt, Human
ccaggcagcaaauuuucugaau

SEQ ID NO: 411600 - RNA, 22 nt, Human
cugagaaaggaccucaaacagg

SEQ ID NO: 411601 - RNA, 22 nt, Human
ccauuuguucgcccagcuccaa

SEQ ID NO: 411602 - RNA, 22 nt, Human
uggcucaguuccaucaucugga

SEQ ID NO: 411603 - RNA, 17 nt, Human
agggacagcaguuuagg

SEQ ID NO: 411604 - RNA, 23 nt, Human
caggcaggaugaggacuacacuc

SEQ ID NO: 411605 - RNA, 22 nt, Human
caggcagaugcugacaagaguu

SEQ ID NO: 411606 - RNA, 22 nt, Human
cagugguauuugagagaaugga

SEQ ID NO: 411607 - RNA, 22 nt, Human
cucagaguccauaguuuacagu

SEQ ID NO: 411608 - RNA, 22 nt, Human
augggaggaaggaggcccuuga

SEQ ID NO: 411609 - RNA, 22 nt, Human
ccucuggcaacuucacagccca

SEQ ID NO: 411610 - RNA, 22 nt, Human
cucuggagcauuucaccuacau

SEQ ID NO: 411611 - RNA, 21 nt, Human
gcagcagaggcuugacagaca

SEQ ID NO: 411612 - RNA, 22 nt, Human
ugaaggcccagccacagaaugg

SEQ ID NO: 411613 - RNA, 22 nt, Human
cagggcucuuccggagcaggga

SEQ ID NO: 411614 - RNA, 17 nt, Human
gcuggcugacccaugcc

SEQ ID NO: 411615 - RNA, 22 nt, Human
uggcacugccuggcagggcccc

SEQ ID NO: 411616 - RNA, 22 nt, Human
cugccagguuggcgcucgcucu

SEQ ID NO: 411617 - RNA, 22 nt, Human
uuuauacuccacucugcaagcg

SEQ ID NO: 411618 - RNA, 22 nt, Human
ucaaguguaguggugucagguc

SEQ ID NO: 411619 - RNA, 17 nt, Human
ugcugccaagucccaac

SEQ ID NO: 411620 - RNA, 17 nt, Human
agagagagcaugccacc

SEQ ID NO: 411621 - RNA, 22 nt, Human
ggugccagccuagugcaguggu

SEQ ID NO: 411622 - RNA, 22 nt, Human
aggagagucuugagucacuggu

SEQ ID NO: 411623 - RNA, 22 nt, Human
uacuuuagaaggaaauaaguuc

SEQ ID NO: 411624 - RNA, 22 nt, Human
ucucugggaaugggccugggua

SEQ ID NO: 411625 - RNA, 22 nt, Human
aggccuggcaugagaccugaga

SEQ ID NO: 411626 - RNA, 22 nt, Human
aagagcauggaauggagaucca

SEQ ID NO: 411627 - RNA, 22 nt, Human
aggucaccauggcaugcuccac

SEQ ID NO: 411628 - RNA, 22 nt, Human
cagaagcagugagagaugugca

SEQ ID NO: 411629 - RNA, 22 nt, Human
ucagcaguggcucucaugcagu

SEQ ID NO: 411630 - RNA, 22 nt, Human
cuggaaggcucugcugccuguc

SEQ ID NO: 411631 - RNA, 22 nt, Human
ucaggcaggcagagggcaaaug

SEQ ID NO: 411632 - RNA, 22 nt, Human
auucuguauuucuaauaagauc

SEQ ID NO: 411633 - RNA, 22 nt, Human
ucauucagguugggcaaguguc

SEQ ID NO: 411634 - RNA, 22 nt, Human
uacaaagccugguagauaucug

SEQ ID NO: 411635 - RNA, 22 nt, Human
gaaagaagcuuuagauggcuau

SEQ ID NO: 411636 - RNA, 21 nt, Human
acaugcauagagagauuucug

SEQ ID NO: 411637 - RNA, 23 nt, Human
ucacagggcacuggcugggguug

SEQ ID NO: 411638 - RNA, 22 nt, Human
acccaggguagaaccucagagc

SEQ ID NO: 411639 - RNA, 22 nt, Human
agggagaaaauuggaugcacaa

SEQ ID NO: 411640 - RNA, 22 nt, Human
auggccuggccagagcucugcu

SEQ ID NO: 411641 - RNA, 22 nt, Human
gggcagggguagcauuccaagu

SEQ ID NO: 411642 - RNA, 22 nt, Human
uggcgugcccuccagacuuggc

SEQ ID NO: 411643 - RNA, 22 nt, Human
gggcugcugcugccagcgacac

SEQ ID NO: 411644 - RNA, 22 nt, Human
agcugucuuucugccuccugau

SEQ ID NO: 411645 - RNA, 22 nt, Human
cagcaauauacacagucuaugg

SEQ ID NO: 411646 - RNA, 21 nt, Human
ggacaccagucacacuggauu

SEQ ID NO: 411647 - RNA, 22 nt, Human
guacuuccguggacuaauuguu

SEQ ID NO: 411648 - RNA, 22 nt, Human
ccacagagagugucagccuuug

SEQ ID NO: 411649 - RNA, 22 nt, Human
cugcagagcaaguaacauccuc

SEQ ID NO: 411650 - RNA, 22 nt, Human
ucuucagagugaaagucuguga

SEQ ID NO: 411651 - RNA, 22 nt, Human
caggcagccaggggaccugucc

SEQ ID NO: 411652 - RNA, 21 nt, Human
uucuuuccccagaggacuaaa

SEQ ID NO: 411653 - RNA, 22 nt, Human
cccagcagccagaaugaggagc

SEQ ID NO: 411654 - RNA, 22 nt, Human
uguaugugcuugagaagguggg

SEQ ID NO: 411655 - RNA, 22 nt, Human
caguucaggccggcugacucag

SEQ ID NO: 411656 - RNA, 22 nt, Human
uggcagcuguguccagguagaa

SEQ ID NO: 411657 - RNA, 22 nt, Human
uuuguuaauucuuauguuagag

SEQ ID NO: 411658 - RNA, 22 nt, Human
gagccugaugaaacaggcagac

SEQ ID NO: 411659 - RNA, 22 nt, Human
uccaggagguagugcuuaauuu

SEQ ID NO: 411660 - RNA, 20 nt, Human
aauguauuguuuuguuucag

SEQ ID NO: 411661 - RNA, 23 nt, Human
cacugcagcguggucuggcagga

SEQ ID NO: 411662 - RNA, 22 nt, Human
cccuucucuuucacucacuauu

SEQ ID NO: 411663 - RNA, 21 nt, Human
agaugaggauacugaggccua

SEQ ID NO: 411664 - RNA, 22 nt, Human
acaguuugcccugacauucucc

SEQ ID NO: 411665 - RNA, 21 nt, Human
aaauuucugcaagccucaacu

SEQ ID NO: 411666 - RNA, 22 nt, Human
cagccuccugggacacucaccg

SEQ ID NO: 411667 - RNA, 22 nt, Human
gcagcugagagaagaacagggc

SEQ ID NO: 411668 - RNA, 22 nt, Human
caguuaaaggcccaauaucugg

SEQ ID NO: 411669 - RNA, 22 nt, Human
agggggcaggagagaccugcug

SEQ ID NO: 411670 - RNA, 22 nt, Human
cacucaggcugugucaggagga

SEQ ID NO: 411671 - RNA, 22 nt, Human
ugcuucuggaaacaguggcugu

SEQ ID NO: 411672 - RNA, 22 nt, Human
ccugccugcuuucugcuuugca

SEQ ID NO: 411673 - RNA, 22 nt, Human
ucugagcuacgaugccugucac

SEQ ID NO: 411674 - RNA, 22 nt, Human
gcauuccuacaggcugcuauga

SEQ ID NO: 411675 - RNA, 19 nt, Human
ucucuggggacacuuucac

SEQ ID NO: 411676 - RNA, 17 nt, Human
acaagcaguggccaugg

SEQ ID NO: 411677 - RNA, 22 nt, Human
cuggcagcauggagccugugcu

SEQ ID NO: 411678 - RNA, 22 nt, Human
caggcugaggcaguaggguuug

SEQ ID NO: 411679 - RNA, 22 nt, Human
auaguauuuaauaguuagcuca

SEQ ID NO: 411680 - RNA, 22 nt, Human
acuguguggaaauuugugaggg

SEQ ID NO: 411681 - RNA, 22 nt, Human
auucuggauuaucaguccacca

SEQ ID NO: 411682 - RNA, 22 nt, Human
gagcagcugguaggugaaccca

SEQ ID NO: 411683 - RNA, 22 nt, Human
ccuggcaguggugaagaagagg

SEQ ID NO: 411684 - RNA, 22 nt, Human
agucccagacuccaguuuucug

SEQ ID NO: 411685 - RNA, 22 nt, Human
gcagagcagugcuugcccagcg

SEQ ID NO: 411686 - RNA, 18 nt, Human
gacccagcagaugggcuu

SEQ ID NO: 411687 - RNA, 22 nt, Human
cagucucuaaaucaaucugaau

SEQ ID NO: 411688 - RNA, 22 nt, Human
gccuccugaaaggaagagcucc

SEQ ID NO: 411689 - RNA, 22 nt, Human
cuccaggccauggcugcggagg

SEQ ID NO: 411690 - RNA, 22 nt, Human
gugggcagacagugcuuugcag

SEQ ID NO: 411691 - RNA, 22 nt, Human
ccugagggaaggaugcuaccca

SEQ ID NO: 411692 - RNA, 22 nt, Human
ucaggugguccuaagugccauc

SEQ ID NO: 411693 - RNA, 22 nt, Human
ggccagagaauaugccuuacgu

SEQ ID NO: 411694 - RNA, 22 nt, Human
gggcuggagccagcuguggcug

SEQ ID NO: 411695 - RNA, 22 nt, Human
gcaggcaggagcccaacugccu

SEQ ID NO: 411696 - RNA, 22 nt, Human
gacacagcacuguacaaggaau

SEQ ID NO: 411697 - RNA, 22 nt, Human
aaauagcacagcagcugaggcu

SEQ ID NO: 411698 - RNA, 22 nt, Human
uccacagaauguaagauccaca

SEQ ID NO: 411699 - RNA, 22 nt, Human
acccagcuggaugcauggaggc

SEQ ID NO: 411700 - RNA, 22 nt, Human
gggcugaccaaugccuugcuuu

SEQ ID NO: 411701 - RNA, 22 nt, Human
uggcuuccgccgcgggccucgg

SEQ ID NO: 411702 - RNA, 20 nt, Human
ugaaggccagcagcauaggg

SEQ ID NO: 411703 - RNA, 22 nt, Human
ugggccugacucaccugccucc

SEQ ID NO: 411704 - RNA, 22 nt, Human
ugauuuccuggcuuuggaguuc

SEQ ID NO: 411705 - RNA, 22 nt, Human
ucucugguuauuaacuaacucc

SEQ ID NO: 411706 - RNA, 22 nt, Human
cuuauguauaauguuccacaua

SEQ ID NO: 411707 - RNA, 22 nt, Human
uggcugagcugcagcguggcuu

SEQ ID NO: 411708 - RNA, 22 nt, Human
ccuggugcuuaccagagcuuuu

SEQ ID NO: 411709 - RNA, 22 nt, Human
uguguacaagaguguuuacugu

SEQ ID NO: 411710 - RNA, 22 nt, Human
gguguccaucaggcugugcuuc

SEQ ID NO: 411711 - RNA, 22 nt, Human
guccucugggcagcugccccac

SEQ ID NO: 411712 - RNA, 22 nt, Human
accucaggauguggacacagaa

SEQ ID NO: 411713 - RNA, 22 nt, Human
ggcacagggaggcccuggugug

SEQ ID NO: 411714 - RNA, 22 nt, Human
cagucacuggaauagcugagga

SEQ ID NO: 411715 - RNA, 22 nt, Human
ucaggcugaaucauccuagcuu

SEQ ID NO: 411716 - RNA, 22 nt, Human
aauuuagaauucgcuagcuaau

SEQ ID NO: 411717 - RNA, 22 nt, Human
ggcuggcuggcugguagacaag

SEQ ID NO: 411718 - RNA, 22 nt, Human
uucuuucccagaagauauguuu

SEQ ID NO: 411719 - RNA, 18 nt, Human
uaaaugcauguuaauaac

SEQ ID NO: 411720 - RNA, 22 nt, Human
gaguccaguaguuaggacagag

SEQ ID NO: 411721 - RNA, 22 nt, Human
aggagucaggaccaaauggaaa

SEQ ID NO: 411722 - RNA, 21 nt, Human
ugggagagggcucagcuaccc

SEQ ID NO: 411723 - RNA, 22 nt, Human
acaaagucacaauaauuaaccu

SEQ ID NO: 411724 - RNA, 22 nt, Human
cagagccagcccacuguucccg

SEQ ID NO: 411725 - RNA, 22 nt, Human
auaauacaugguugaucuuuuc

SEQ ID NO: 411726 - RNA, 22 nt, Human
ucccaggauguuggcggcaggu

SEQ ID NO: 411727 - RNA, 22 nt, Human
cuccaggggccagaagccuggc

SEQ ID NO: 411728 - RNA, 22 nt, Human
gaggccuggaauuccagccugg

SEQ ID NO: 411729 - RNA, 22 nt, Human
aggcaccuugagagcaggagcu

SEQ ID NO: 411730 - RNA, 22 nt, Human
gaggcaguuugccaugccagga

SEQ ID NO: 411731 - RNA, 22 nt, Human
agcaugcacaugacuggcuuaa

SEQ ID NO: 411732 - RNA, 22 nt, Human
augcuauacucaaagaaauuca

SEQ ID NO: 411733 - RNA, 19 nt, Human
agacucugccacucuucuc

SEQ ID NO: 411734 - RNA, 22 nt, Human
gccacccugagcugggccaggg

SEQ ID NO: 411735 - RNA, 22 nt, Human
ccagggaggguccuguggcuuc

SEQ ID NO: 411736 - RNA, 19 nt, Human
ugcagccacgugagagacu

SEQ ID NO: 411737 - RNA, 22 nt, Human
cuuauguauauuuggaacguac

SEQ ID NO: 411738 - RNA, 22 nt, Human
gcugagcugggacaguccuggg

SEQ ID NO: 411739 - RNA, 22 nt, Human
acugggccuugccauggcagcc

SEQ ID NO: 411740 - RNA, 22 nt, Human
gcauccagagguagccacugug

SEQ ID NO: 411741 - RNA, 22 nt, Human
uaagcugugggagauuggcaua

SEQ ID NO: 411742 - RNA, 22 nt, Human
agugaguggguuacagauggga

SEQ ID NO: 411743 - RNA, 22 nt, Human
ugaggccugcuuggaauugaau

SEQ ID NO: 411744 - RNA, 22 nt, Human
agugcaaaauucagaagcaauu

SEQ ID NO: 411745 - RNA, 23 nt, Human
ucugagagaacaaugccuccuau

SEQ ID NO: 411746 - RNA, 18 nt, Human
cagaugagaugcaaucuc

SEQ ID NO: 411747 - RNA, 23 nt, Human
cccuggagcuagucugagcagag

SEQ ID NO: 411748 - RNA, 20 nt, Human
agcccuguuuccuggagaga

SEQ ID NO: 411749 - RNA, 22 nt, Human
gacccuggaguuaguccugugu

SEQ ID NO: 411750 - RNA, 22 nt, Human
caauuucuuguuaauucucagg

SEQ ID NO: 411751 - RNA, 22 nt, Human
uguagaaagaauauguuucaua

SEQ ID NO: 411752 - RNA, 22 nt, Human
cagugccucuuaagugucaccc

SEQ ID NO: 411753 - RNA, 22 nt, Human
ugcagugugaccuguagcgagc

SEQ ID NO: 411754 - RNA, 22 nt, Human
ugccucugugugcaggugagca

SEQ ID NO: 411755 - RNA, 22 nt, Human
aggcagaugguaacugugauau

SEQ ID NO: 411756 - RNA, 22 nt, Human
uaguaacagauuuauacagucu

SEQ ID NO: 411757 - RNA, 22 nt, Human
auguuuaaaggguugagaaaua

SEQ ID NO: 411758 - RNA, 20 nt, Human
accucugcaucaauccuuug

SEQ ID NO: 411759 - RNA, 22 nt, Human
gcuguggcuugcagcuggggcu

SEQ ID NO: 411760 - RNA, 22 nt, Human
uucuguguggguagcuccuguu

SEQ ID NO: 411761 - RNA, 22 nt, Human
ggggaaggauugaguugaccca

SEQ ID NO: 411762 - RNA, 18 nt, Human
gucauugcaacauacugu

SEQ ID NO: 411763 - RNA, 22 nt, Human
ccagggcauccucacaucgcag

SEQ ID NO: 411764 - RNA, 22 nt, Human
cugccucucagccugaccgcca

SEQ ID NO: 411765 - RNA, 22 nt, Human
cagaaguaagauuacugugagu

SEQ ID NO: 411766 - RNA, 22 nt, Human
caccagcuuugcccacugccca

SEQ ID NO: 411767 - RNA, 22 nt, Human
caggaguggugugagggacucc

SEQ ID NO: 411768 - RNA, 22 nt, Human
ugccugucucugacugccauua

SEQ ID NO: 411769 - RNA, 22 nt, Human
uugaaagggauauaucuuucug

SEQ ID NO: 411770 - RNA, 22 nt, Human
ggcaccuggagguuuacuggau

SEQ ID NO: 411771 - RNA, 22 nt, Human
agggccaguaccaggugggugg

SEQ ID NO: 411772 - RNA, 22 nt, Human
uagcugucagcaaucaaguggu

SEQ ID NO: 411773 - RNA, 22 nt, Human
acaguuucuccauuuacaccuu

SEQ ID NO: 411774 - RNA, 22 nt, Human
uguguuuuacaaauucucuuaa

SEQ ID NO: 411775 - RNA, 22 nt, Human
gaggccuggguuggaggugcau

SEQ ID NO: 411776 - RNA, 22 nt, Human
ugccaaggagcuggaucagggc

SEQ ID NO: 411777 - RNA, 22 nt, Human
caggccugggcuucggggcuga

SEQ ID NO: 411778 - RNA, 22 nt, Human
cacuuggaggaaggccuauuca

SEQ ID NO: 411779 - RNA, 23 nt, Human
uggcucugagagguucagaugcu

SEQ ID NO: 411780 - RNA, 22 nt, Human
caguguggcugagacagaggcu

SEQ ID NO: 411781 - RNA, 22 nt, Human
gucaaguuaagauaaggucaug

SEQ ID NO: 411782 - RNA, 22 nt, Human
ugcacagagagaugagacacgu

SEQ ID NO: 411783 - RNA, 22 nt, Human
uuuuugcaccaaccuaauagaa

SEQ ID NO: 411784 - RNA, 22 nt, Human
guggcucucgccagccugcggg

SEQ ID NO: 411785 - RNA, 22 nt, Human
uucuuacagcccuauuacuaaa

SEQ ID NO: 411786 - RNA, 22 nt, Human
uacauguuauuucacuauuggu

SEQ ID NO: 411787 - RNA, 19 nt, Human
gcuuuuuguugucaaaggu

SEQ ID NO: 411788 - RNA, 22 nt, Human
uguuuauaccuugguauaacca

SEQ ID NO: 411789 - RNA, 22 nt, Human
ucauuuguggaagugauugugg

SEQ ID NO: 411790 - RNA, 22 nt, Human
gagguucacaggcuaucacagu

SEQ ID NO: 411791 - RNA, 19 nt, Human
uggggcuguguuuugaccc

SEQ ID NO: 411792 - RNA, 22 nt, Human
cagccuucugaaugaacguacu

SEQ ID NO: 411793 - RNA, 22 nt, Human
guggccuggaugagcuucgaca

SEQ ID NO: 411794 - RNA, 22 nt, Human
ccagucccaucucugucgcuua

SEQ ID NO: 411795 - RNA, 22 nt, Human
cacaccagagguuaccugcaaa

SEQ ID NO: 411796 - RNA, 22 nt, Human
aaugcacagcuaaagugguucc

SEQ ID NO: 411797 - RNA, 22 nt, Human
agggucugacugaauggaaaag

SEQ ID NO: 411798 - RNA, 22 nt, Human
cugucauuuaagacauucugga

SEQ ID NO: 411799 - RNA, 22 nt, Human
aauguguauacuggcaauuaag

SEQ ID NO: 411800 - RNA, 22 nt, Human
ucucacugcaaauauuauguau

SEQ ID NO: 411801 - RNA, 22 nt, Human
gaggccugcagcguggucccug

SEQ ID NO: 411802 - RNA, 20 nt, Human
ccuccaggcacacccaugug

SEQ ID NO: 411803 - RNA, 22 nt, Human
ugccaggcuuuggucaaaggcu

SEQ ID NO: 411804 - RNA, 21 nt, Human
gcagccacugccuucaacaau

SEQ ID NO: 411805 - RNA, 22 nt, Human
ccuuagagaguacugggcugcc

SEQ ID NO: 411806 - RNA, 22 nt, Human
aucuggcuuuuacugaauugcu

SEQ ID NO: 411807 - RNA, 22 nt, Human
ggcugaaacagauuucaagaca

SEQ ID NO: 411808 - RNA, 22 nt, Human
cucucuggcuuggcacggagau

SEQ ID NO: 411809 - RNA, 22 nt, Human
ggagcugugcagugacuacaga

SEQ ID NO: 411810 - RNA, 22 nt, Human
gaggcugaauggccagaagcca

SEQ ID NO: 411811 - RNA, 22 nt, Human
uggcaggaaaguaacagagcac

SEQ ID NO: 411812 - RNA, 22 nt, Human
ucugccugaaauucacauguaa

SEQ ID NO: 411813 - RNA, 22 nt, Human
cugaggcugaagagggccuacg

SEQ ID NO: 411814 - RNA, 22 nt, Human
gcuguacauuuguguacacuug

SEQ ID NO: 411815 - RNA, 22 nt, Human
cugcagccucaaccuccugagc

SEQ ID NO: 411816 - RNA, 22 nt, Human
agcugguaugaacaggauagga

SEQ ID NO: 411817 - RNA, 22 nt, Human
guuaauuugcagcuuucgagcu

SEQ ID NO: 411818 - RNA, 23 nt, Human
cuggaagugcuuuuauagcuuug

SEQ ID NO: 411819 - RNA, 22 nt, Human
ugcugccauggucgcugguguc

SEQ ID NO: 411820 - RNA, 22 nt, Human
auuauguaacugugguucagca

SEQ ID NO: 411821 - RNA, 19 nt, Human
agaggcagucuccaacagg

SEQ ID NO: 411822 - RNA, 22 nt, Human
gugcucacugugagacguccug

SEQ ID NO: 411823 - RNA, 22 nt, Human
aggacaggauugagcugaacug

SEQ ID NO: 411824 - RNA, 22 nt, Human
uuugaaaguguuuacuugggaa

SEQ ID NO: 411825 - RNA, 22 nt, Human
ugagcuuacgugggaacagacu

SEQ ID NO: 411826 - RNA, 22 nt, Human
cggcagagcccugagucagccu

SEQ ID NO: 411827 - RNA, 22 nt, Human
uauuugaaaguguacaaaaacu

SEQ ID NO: 411828 - RNA, 22 nt, Human
ugaagcaguuacuggguguuaa

SEQ ID NO: 411829 - RNA, 22 nt, Human
acacacacaagcagguugugga

SEQ ID NO: 411830 - RNA, 22 nt, Human
ccagcuuucauaucaugaggua

SEQ ID NO: 411831 - RNA, 22 nt, Human
cagugcagucaaggaagaacca

SEQ ID NO: 411832 - RNA, 22 nt, Human
ggggaugguagaccggugacgu

SEQ ID NO: 411833 - RNA, 22 nt, Human
caggccagugugcuucccaggc

SEQ ID NO: 411834 - RNA, 22 nt, Human
gaggaggaggaaguggaaccca

SEQ ID NO: 411835 - RNA, 22 nt, Human
gcagggcugggugggagacaga

SEQ ID NO: 411836 - RNA, 22 nt, Human
guggcccucugauagggucagg

SEQ ID NO: 411837 - RNA, 22 nt, Human
gucccagaggacagggucacau

SEQ ID NO: 411838 - RNA, 22 nt, Human
cugggcacaaguggcccuggau

SEQ ID NO: 411839 - RNA, 22 nt, Human
uccuucagcucucuauuuagau

SEQ ID NO: 411840 - RNA, 22 nt, Human
uuugacaguaauaaagcacaag

SEQ ID NO: 411841 - RNA, 22 nt, Human
ccagggcuggguuugucggugu

SEQ ID NO: 411842 - RNA, 22 nt, Human
gggauggggucaacauguaccu

SEQ ID NO: 411843 - RNA, 19 nt, Human
ugagcaugcgagcugagaa

SEQ ID NO: 411844 - RNA, 22 nt, Human
ggguacaaagauuucauaagau

SEQ ID NO: 411845 - RNA, 22 nt, Human
agaucacaguggcaacucccuu

SEQ ID NO: 411846 - RNA, 22 nt, Human
auguuacagaaagcaaagauga

SEQ ID NO: 411847 - RNA, 22 nt, Human
ugggcugccagcucuccagaug

SEQ ID NO: 411848 - RNA, 22 nt, Human
guguaaggugaaaucaacaaau

SEQ ID NO: 411849 - RNA, 22 nt, Human
aaaguuucaauagaggaagugg

SEQ ID NO: 411850 - RNA, 22 nt, Human
uccugagauaaaucucauguga

SEQ ID NO: 411851 - RNA, 22 nt, Human
aggcagcagagguugaggaaag

SEQ ID NO: 411852 - RNA, 22 nt, Human
acagagcaugcucaguguguga

SEQ ID NO: 411853 - RNA, 22 nt, Human
gguggccucgguggugcacagg

SEQ ID NO: 411854 - RNA, 22 nt, Human
cccaggcugauguucagcgggu

SEQ ID NO: 411855 - RNA, 22 nt, Human
cagggccagccauccugcuggg

SEQ ID NO: 411856 - RNA, 23 nt, Human
cagcuuucagggcuuuagggaag

SEQ ID NO: 411857 - RNA, 22 nt, Human
ugugccuggcauucugggcuuc

SEQ ID NO: 411858 - RNA, 22 nt, Human
uggcucucaggccugcugcguu

SEQ ID NO: 411859 - RNA, 23 nt, Human
cugcagccgcguggggacgugga

SEQ ID NO: 411860 - RNA, 22 nt, Human
gccuggagggucccucucugga

SEQ ID NO: 411861 - RNA, 22 nt, Human
aggagcugcuuaaaugguuggu

SEQ ID NO: 411862 - RNA, 22 nt, Human
aggaagccaugguggacgucua

SEQ ID NO: 411863 - RNA, 22 nt, Human
cugagauggaguuuugcucuug

SEQ ID NO: 411864 - RNA, 22 nt, Human
cuccucugucuaccacgagggu

SEQ ID NO: 411865 - RNA, 22 nt, Human
caaaggcuuugcuaugaugcau

SEQ ID NO: 411866 - RNA, 22 nt, Human
gccaggcuggcaaaaggaaacc

SEQ ID NO: 411867 - RNA, 19 nt, Human
ccagagcccgccagauggg

SEQ ID NO: 411868 - RNA, 22 nt, Human
cccuggaguccuggcaguugau

SEQ ID NO: 411869 - RNA, 22 nt, Human
caaaguccuagaacagugcuug

SEQ ID NO: 411870 - RNA, 22 nt, Human
auccaaaucaugucagaagaac

SEQ ID NO: 411871 - RNA, 22 nt, Human
uuaaugcuugucuagaucuucu

SEQ ID NO: 411872 - RNA, 22 nt, Human
cugagggcaugaacauuccaua

SEQ ID NO: 411873 - RNA, 22 nt, Human
ugucacauugaauaugauuuau

SEQ ID NO: 411874 - RNA, 22 nt, Human
gggaaccagccgcuuccgccuc

SEQ ID NO: 411875 - RNA, 22 nt, Human
accagagcagacuacuggaggu

SEQ ID NO: 411876 - RNA, 22 nt, Human
caggaaagggaugggcugccac

SEQ ID NO: 411877 - RNA, 22 nt, Human
uggcagggccugcucaucaucc

SEQ ID NO: 411878 - RNA, 22 nt, Human
aaaggccaagcaugagguggac

SEQ ID NO: 411879 - RNA, 22 nt, Human
ggugugccuggggcuuagcugc

SEQ ID NO: 411880 - RNA, 22 nt, Human
gggcugagagcuggaaucugag

SEQ ID NO: 411881 - RNA, 22 nt, Human
caggauagaaaggccauggagu

SEQ ID NO: 411882 - RNA, 19 nt, Human
cuccucagucccagagguc

SEQ ID NO: 411883 - RNA, 22 nt, Human
ccuagaugggauggcggccggg

SEQ ID NO: 411884 - RNA, 22 nt, Human
gccuguguggaugcgccggugc

SEQ ID NO: 411885 - RNA, 21 nt, Human
uaaaugugagcagggcugggc

SEQ ID NO: 411886 - RNA, 22 nt, Human
cugcccugucugcagccuggcu

SEQ ID NO: 411887 - RNA, 22 nt, Human
uaaucacaucaggguaaauggg

SEQ ID NO: 411888 - RNA, 22 nt, Human
aagugacaccucuucccuuucc

SEQ ID NO: 411889 - RNA, 22 nt, Human
gcagagugagccgaggcugcuc

SEQ ID NO: 411890 - RNA, 22 nt, Human
ucaguauccacaaaugcucaaa

SEQ ID NO: 411891 - RNA, 21 nt, Human
ccuucucuugcuucagcuuca

SEQ ID NO: 411892 - RNA, 22 nt, Human
uggaaagaauuccuaugguuca

SEQ ID NO: 411893 - RNA, 22 nt, Human
ccucugagagaaggccuucagc

SEQ ID NO: 411894 - RNA, 22 nt, Human
uugcugaagugaagguauguuu

SEQ ID NO: 411895 - RNA, 21 nt, Human
cagcuucuucugugaccuggu

SEQ ID NO: 411896 - RNA, 22 nt, Human
ccagugcaggugagcaccaggu

SEQ ID NO: 411897 - RNA, 22 nt, Human
uggcaggguuggccaccuuacc

SEQ ID NO: 411898 - RNA, 20 nt, Human
aggaaaaauggaaacuggag

SEQ ID NO: 411899 - RNA, 22 nt, Human
ugaaaucuuuaguuucuguccc

SEQ ID NO: 411900 - RNA, 22 nt, Human
ggcagcugugaagugccucaca

SEQ ID NO: 411901 - RNA, 22 nt, Human
cugaaggagaaggccacuguuc

SEQ ID NO: 411902 - RNA, 22 nt, Human
cuccagggagcuguggagguuu

SEQ ID NO: 411903 - RNA, 22 nt, Human
ccaguggccaugcacgagcagc

SEQ ID NO: 411904 - RNA, 22 nt, Human
ccucugggugggaggccgggcg

SEQ ID NO: 411905 - RNA, 22 nt, Human
ucaggagcuugguagugugauu

SEQ ID NO: 411906 - RNA, 22 nt, Human
agagggcauuaacucugucuug

SEQ ID NO: 411907 - RNA, 20 nt, Human
uggggccuguuucugugguu

SEQ ID NO: 411908 - RNA, 22 nt, Human
aggcagcauuugaauccagguc

SEQ ID NO: 411909 - RNA, 22 nt, Human
ccuguguguaggccaggggagu

SEQ ID NO: 411910 - RNA, 22 nt, Human
gggugaagcuccugcaggggcc

SEQ ID NO: 411911 - RNA, 22 nt, Human
uagggcagauucgguggaguuu

SEQ ID NO: 411912 - RNA, 22 nt, Human
uguauagaguuggaagaugacu

SEQ ID NO: 411913 - RNA, 22 nt, Human
cugaaaauguuacacaggaaga

SEQ ID NO: 411914 - RNA, 22 nt, Human
gccaagagaaugugagagaaau

SEQ ID NO: 411915 - RNA, 22 nt, Human
aguguuccuugcuuucccagag

SEQ ID NO: 411916 - RNA, 22 nt, Human
aagggcuccacuugaaucacac

SEQ ID NO: 411917 - RNA, 22 nt, Human
uccagccuaauguucuucccac

SEQ ID NO: 411918 - RNA, 22 nt, Human
auucuccacacauccagaccuu

SEQ ID NO: 411919 - RNA, 23 nt, Human
uggcccugugcaugcugcuuccc

SEQ ID NO: 411920 - RNA, 22 nt, Human
ugaagcagcuucuuucugucaa

SEQ ID NO: 411921 - RNA, 22 nt, Human
uauuuguauuucaugcaguaaa

SEQ ID NO: 411922 - RNA, 22 nt, Human
cuggcagcgugagcagcaucca

SEQ ID NO: 411923 - RNA, 22 nt, Human
cuggcccagucucagaguguca

SEQ ID NO: 411924 - RNA, 22 nt, Human
uugauacagcagccugugaucc

SEQ ID NO: 411925 - RNA, 22 nt, Human
agggcugacaguaaaaguauga

SEQ ID NO: 411926 - RNA, 22 nt, Human
uggaggagggcuggugucugua

SEQ ID NO: 411927 - RNA, 22 nt, Human
uuuccucuucuucccaugucau

SEQ ID NO: 411928 - RNA, 22 nt, Human
cuggcagcugcccgagaugccc

SEQ ID NO: 411929 - RNA, 23 nt, Human
gccaggcuccggucuguggccac

SEQ ID NO: 411930 - RNA, 22 nt, Human
aggaggaggcuggaguacaccc

SEQ ID NO: 411931 - RNA, 22 nt, Human
auuuaaauuuucugauggagag

SEQ ID NO: 411932 - RNA, 22 nt, Human
ugggcagauuaaugcaguggcu

SEQ ID NO: 411933 - RNA, 22 nt, Human
uauguacaguccuuaacuuaaa

SEQ ID NO: 411934 - RNA, 22 nt, Human
ugucucugccagcuagcagaau

SEQ ID NO: 411935 - RNA, 23 nt, Human
aaguucaagucacagccugucuu

SEQ ID NO: 411936 - RNA, 19 nt, Human
ugugaaagcuaguguucuu

SEQ ID NO: 411937 - RNA, 22 nt, Human
gagaggccauggcugugcagug

SEQ ID NO: 411938 - RNA, 22 nt, Human
ugcgcaggagcucugccaggag

SEQ ID NO: 411939 - RNA, 22 nt, Human
uccuucagggggccgccugcac

SEQ ID NO: 411940 - RNA, 22 nt, Human
caggcuugggagcagagccacu

SEQ ID NO: 411941 - RNA, 22 nt, Human
aggcagcagugauaagauagga

SEQ ID NO: 411942 - RNA, 22 nt, Human
agccuggaagaaccugaagucu

SEQ ID NO: 411943 - RNA, 22 nt, Human
acaaaggcagagaauucaacau

SEQ ID NO: 411944 - RNA, 22 nt, Human
uuuaauuuguauuucuagaggg

SEQ ID NO: 411945 - RNA, 22 nt, Human
agaagccaaaugccagugaccu

SEQ ID NO: 411946 - RNA, 22 nt, Human
caguggggaggccaggauagaa

SEQ ID NO: 411947 - RNA, 19 nt, Human
gccugcagaaaaggcaggg

SEQ ID NO: 411948 - RNA, 22 nt, Human
gcagccagguuugaggaccacu

SEQ ID NO: 411949 - RNA, 22 nt, Human
aggggcugggacagagccaagc

SEQ ID NO: 411950 - RNA, 18 nt, Human
auggucucauacugggag

SEQ ID NO: 411951 - RNA, 22 nt, Human
accaucagucacauguagagaa

SEQ ID NO: 411952 - RNA, 22 nt, Human
aauagguagccagauauauaaa

SEQ ID NO: 411953 - RNA, 22 nt, Human
cuuaauuuaagccuagaaugca

SEQ ID NO: 411954 - RNA, 22 nt, Human
agagcaucuaacacauaagccu

SEQ ID NO: 411955 - RNA, 22 nt, Human
aggcagccagauggcagccugc

SEQ ID NO: 411956 - RNA, 22 nt, Human
uccucuggcucuuucccuagga

SEQ ID NO: 411957 - RNA, 22 nt, Human
ugcuuuauuaagagagaaauuu

SEQ ID NO: 411958 - RNA, 22 nt, Human
agggcugacaguggcguggcgu

SEQ ID NO: 411959 - RNA, 22 nt, Human
agggcugcaccggggcuucgcg

SEQ ID NO: 411960 - RNA, 19 nt, Human
uggcuccugccugccuucu

SEQ ID NO: 411961 - RNA, 22 nt, Human
cauucacagagggggaagcauc

SEQ ID NO: 411962 - RNA, 20 nt, Human
uggagcugugguaaggagca

SEQ ID NO: 411963 - RNA, 21 nt, Human
uuuguucaggggcaaaguuaa

SEQ ID NO: 411964 - RNA, 22 nt, Human
agcagggcuccugaaagccgcg

SEQ ID NO: 411965 - RNA, 22 nt, Human
ggugccaggcuguagucagggu

SEQ ID NO: 411966 - RNA, 22 nt, Human
gcucugugggugaguagaaucu

SEQ ID NO: 411967 - RNA, 22 nt, Human
ggccucugguucguggugaccu

SEQ ID NO: 411968 - RNA, 22 nt, Human
agacagcaugauacaugaugcu

SEQ ID NO: 411969 - RNA, 22 nt, Human
cucugaccauucccuugauuuu

SEQ ID NO: 411970 - RNA, 22 nt, Human
uggcuggcccugggagugcaga

SEQ ID NO: 411971 - RNA, 21 nt, Human
acaggcuuuagaaaaugacuc

SEQ ID NO: 411972 - RNA, 22 nt, Human
acaaagugcacaagaugagaac

SEQ ID NO: 411973 - RNA, 22 nt, Human
aaacucuuccuuucuuuaaagu

SEQ ID NO: 411974 - RNA, 22 nt, Human
ccaggacccugcaaacccuguu

SEQ ID NO: 411975 - RNA, 22 nt, Human
cagggcuggguuaaaagcaggg

SEQ ID NO: 411976 - RNA, 22 nt, Human
ugccugaugcaggaguaucaga

SEQ ID NO: 411977 - RNA, 22 nt, Human
gucuccugagccuugacugcaa

SEQ ID NO: 411978 - RNA, 22 nt, Human
gagcuguccuaccaggaguccu

SEQ ID NO: 411979 - RNA, 22 nt, Human
ucauuuguucaucugcucuucu

SEQ ID NO: 411980 - RNA, 22 nt, Human
ggcugcuuuaucggcugcugaa

SEQ ID NO: 411981 - RNA, 22 nt, Human
cagcuuuaccaauauuuggaaa

SEQ ID NO: 411982 - RNA, 22 nt, Human
agacaucaaugaucagagguag

SEQ ID NO: 411983 - RNA, 22 nt, Human
ucugagagucucugaggcagau

SEQ ID NO: 411984 - RNA, 22 nt, Human
aggacagaccuaggacuggagc

SEQ ID NO: 411985 - RNA, 22 nt, Human
aggcaggccccugagaauagac

SEQ ID NO: 411986 - RNA, 22 nt, Human
gggaagccaugcucagagguac

SEQ ID NO: 411987 - RNA, 22 nt, Human
aguacuucagaggcugcccagg

SEQ ID NO: 411988 - RNA, 22 nt, Human
cugcagaggccucgccuccucu

SEQ ID NO: 411989 - RNA, 22 nt, Human
aggcacugaaggaagcuugcgc

SEQ ID NO: 411990 - RNA, 22 nt, Human
aucagagacaaaaccagcacuu

SEQ ID NO: 411991 - RNA, 22 nt, Human
uuaacagacauauauauuugua

SEQ ID NO: 411992 - RNA, 22 nt, Human
uaggcagauguuaacaggaaaa

SEQ ID NO: 411993 - RNA, 17 nt, Human
uccaggcauaucuccua

SEQ ID NO: 411994 - RNA, 22 nt, Human
acagcuuuaguguggguggugc

SEQ ID NO: 411995 - RNA, 22 nt, Human
auauguguauuugguuagccua

SEQ ID NO: 411996 - RNA, 22 nt, Human
ggcugaaggaugaaagcugcag

SEQ ID NO: 411997 - RNA, 22 nt, Human
aggcagugagugugacuucaca

SEQ ID NO: 411998 - RNA, 22 nt, Human
ucaggaucaggggccuuuccuu

SEQ ID NO: 411999 - RNA, 22 nt, Human
agcccugggaggccagcuugua

SEQ ID NO: 412000 - RNA, 22 nt, Human
ugagaggccccagcucuuggcc

SEQ ID NO: 412001 - RNA, 22 nt, Human
gaggcagcgggucaggaccgug

SEQ ID NO: 412002 - RNA, 20 nt, Human
aacagggggcugcagagggc

SEQ ID NO: 412003 - RNA, 22 nt, Human
ugucccuggaacuauggcucca

SEQ ID NO: 412004 - RNA, 22 nt, Human
cuucauuaaccaaaaugcaaua

SEQ ID NO: 412005 - RNA, 22 nt, Human
caaggccaaagggccacuguca

SEQ ID NO: 412006 - RNA, 22 nt, Human
uaggccauucuuggagcuuacu

SEQ ID NO: 412007 - RNA, 22 nt, Human
aggagucagauaugggaaaguu

SEQ ID NO: 412008 - RNA, 22 nt, Human
ggcucugcugguaagaugccuc

SEQ ID NO: 412009 - RNA, 22 nt, Human
aaaagggacuacucucagcucc

SEQ ID NO: 412010 - RNA, 22 nt, Human
ggcgaggccgggacaggcugga

SEQ ID NO: 412011 - RNA, 22 nt, Human
cuguuuaucuaggaguugcagg

SEQ ID NO: 412012 - RNA, 22 nt, Human
aaauggaucuguggaauacauu

SEQ ID NO: 412013 - RNA, 19 nt, Human
gccucugcuggggacaggc

SEQ ID NO: 412014 - RNA, 22 nt, Human
uuccauauguauauagcuguua

SEQ ID NO: 412015 - RNA, 22 nt, Human
agagccagcauuugacacuggc

SEQ ID NO: 412016 - RNA, 22 nt, Human
cccuccccacaaagcuucacac

SEQ ID NO: 412017 - RNA, 22 nt, Human
uggcagaggcucugugauguug

SEQ ID NO: 412018 - RNA, 22 nt, Human
gccagagccacuuuugggugau

SEQ ID NO: 412019 - RNA, 20 nt, Human
aggcucagauacccagggaa

SEQ ID NO: 412020 - RNA, 22 nt, Human
cuuguacaggaauccaugguau

SEQ ID NO: 412021 - RNA, 17 nt, Human
agccgggcauggaccag

SEQ ID NO: 412022 - RNA, 22 nt, Human
cuggcccuucucuugcuuccug

SEQ ID NO: 412023 - RNA, 22 nt, Human
uggcauuuccucagugcucaga

SEQ ID NO: 412024 - RNA, 22 nt, Human
cacagcagagggagccauugaa

SEQ ID NO: 412025 - RNA, 22 nt, Human
cagggcagaaggcacucuacuc

SEQ ID NO: 412026 - RNA, 22 nt, Human
ugucucagauacgccaucaagg

SEQ ID NO: 412027 - RNA, 22 nt, Human
ggcagggagagcaugcugauaa

SEQ ID NO: 412028 - RNA, 22 nt, Human
acacaucagaaauaugaaugag

SEQ ID NO: 412029 - RNA, 22 nt, Human
ugcagugguugagagcccagac

SEQ ID NO: 412030 - RNA, 22 nt, Human
gagaaggcuggucuuaagucga

SEQ ID NO: 412031 - RNA, 20 nt, Human
ggcagccaaucagcgugccg

SEQ ID NO: 412032 - RNA, 22 nt, Human
ugauuuccuaggucuggagaag

SEQ ID NO: 412033 - RNA, 19 nt, Human
ucugcuggcagaauucccu

SEQ ID NO: 412034 - RNA, 22 nt, Human
aaguguagauuauggagugucu

SEQ ID NO: 412035 - RNA, 22 nt, Human
auuuacagaugaugcuauuuga

SEQ ID NO: 412036 - RNA, 22 nt, Human
agaagccauaguaucucagggu

SEQ ID NO: 412037 - RNA, 22 nt, Human
gacagggaggagcagagcuucu

SEQ ID NO: 412038 - RNA, 22 nt, Human
augcagguugggcaaguguggg

SEQ ID NO: 412039 - RNA, 22 nt, Human
acagaccaaaaaaggauauugg

SEQ ID NO: 412040 - RNA, 22 nt, Human
gcagcguggggacaggagcuca

SEQ ID NO: 412041 - RNA, 22 nt, Human
uuucucaaggugucauguauuu

SEQ ID NO: 412042 - RNA, 22 nt, Human
aggaugaauaacugaaauggug

SEQ ID NO: 412043 - RNA, 22 nt, Human
gaacagaagaggcuggugccac

SEQ ID NO: 412044 - RNA, 22 nt, Human
aggcacugcagauuacaggcgc

SEQ ID NO: 412045 - RNA, 21 nt, Human
gaaggagaaagcaagugcugc

SEQ ID NO: 412046 - RNA, 22 nt, Human
agaguccauaugugggaggagu

SEQ ID NO: 412047 - RNA, 22 nt, Human
uugggguguuggauggagcaag

SEQ ID NO: 412048 - RNA, 22 nt, Human
gucacuguauccagguuccagc

SEQ ID NO: 412049 - RNA, 22 nt, Human
uggugaagucagcggagcccgg

SEQ ID NO: 412050 - RNA, 22 nt, Human
gccagggggucagcaggcacuu

SEQ ID NO: 412051 - RNA, 22 nt, Human
aggcugggaaauguagucuucc

SEQ ID NO: 412052 - RNA, 21 nt, Human
acagcaagccuuccuuucagg

SEQ ID NO: 412053 - RNA, 22 nt, Human
agcugccagggacugggcaugg

SEQ ID NO: 412054 - RNA, 22 nt, Human
aaagcagguugcaauuacagug

SEQ ID NO: 412055 - RNA, 22 nt, Human
acauuucuaguuguucaucucc

SEQ ID NO: 412056 - RNA, 19 nt, Human
ugaaggagggggauggcca

SEQ ID NO: 412057 - RNA, 19 nt, Human
aggguccagggagcggcuc

SEQ ID NO: 412058 - RNA, 22 nt, Human
aaucaguuaaauauugaguaca

SEQ ID NO: 412059 - RNA, 22 nt, Human
gcugcccucccagggcaagcuu

SEQ ID NO: 412060 - RNA, 22 nt, Human
uguccucaaggagcuucagucu

SEQ ID NO: 412061 - RNA, 22 nt, Human
caaggccagagccagcgauaag

SEQ ID NO: 412062 - RNA, 22 nt, Human
agagccugugauugucaucacc

SEQ ID NO: 412063 - RNA, 22 nt, Human
ugagcccagagaucugagcuau

SEQ ID NO: 412064 - RNA, 17 nt, Human
agaugcuggccacaugu

SEQ ID NO: 412065 - RNA, 22 nt, Human
acuuucuauucccacagagaua

SEQ ID NO: 412066 - RNA, 20 nt, Human
gaaaugugaccucuucugug

SEQ ID NO: 412067 - RNA, 22 nt, Human
ggcugcagggcagcuggugugg

SEQ ID NO: 412068 - RNA, 22 nt, Human
uccagggcuggguuggcucagc

SEQ ID NO: 412069 - RNA, 19 nt, Human
cucagagaggggcagugcc

SEQ ID NO: 412070 - RNA, 19 nt, Human
gcagcugugggaagagcca

SEQ ID NO: 412071 - RNA, 22 nt, Human
ggcuucugagugcucugcuguu

SEQ ID NO: 412072 - RNA, 22 nt, Human
gcagggcagaccuccagccuau

SEQ ID NO: 412073 - RNA, 20 nt, Human
agugcaagaaagcacagcug

SEQ ID NO: 412074 - RNA, 22 nt, Human
gcugucacaucaaggcacuaaa

SEQ ID NO: 412075 - RNA, 22 nt, Human
gugggagcuuuggcaucaggcu

SEQ ID NO: 412076 - RNA, 22 nt, Human
ccagagagaaaauggagggcca

SEQ ID NO: 412077 - RNA, 22 nt, Human
agguggagacccagagaaggcg

SEQ ID NO: 412078 - RNA, 22 nt, Human
ucaccaggauugggcuguaggc

SEQ ID NO: 412079 - RNA, 22 nt, Human
ggagccaggggaccuucacaga

SEQ ID NO: 412080 - RNA, 22 nt, Human
uguggugagaaacugguagauu

SEQ ID NO: 412081 - RNA, 22 nt, Human
cccagcuccagagccagaaaca

SEQ ID NO: 412082 - RNA, 22 nt, Human
ucagaggagaaguugggaaaau

SEQ ID NO: 412083 - RNA, 22 nt, Human
cugagcugcucccgcugcagcg

SEQ ID NO: 412084 - RNA, 22 nt, Human
cagaggaggcgguauacacugc

SEQ ID NO: 412085 - RNA, 22 nt, Human
ucuuugcaaauguuauuaucuu

SEQ ID NO: 412086 - RNA, 20 nt, Human
uuucacaucugucccuuuaa

SEQ ID NO: 412087 - RNA, 22 nt, Human
cacugaaggacaguaggaaggg

SEQ ID NO: 412088 - RNA, 22 nt, Human
uggagaaggccggccaggagug

SEQ ID NO: 412089 - RNA, 18 nt, Human
gcaggugccacugcuguu

SEQ ID NO: 412090 - RNA, 20 nt, Human
cauauauaccuagaagugga

SEQ ID NO: 412091 - RNA, 22 nt, Human
gcugggcagccccuacagagag

SEQ ID NO: 412092 - RNA, 22 nt, Human
cccccaaggccaggcugagacc

SEQ ID NO: 412093 - RNA, 22 nt, Human
uaggcuggaacuuaggcagagg

SEQ ID NO: 412094 - RNA, 22 nt, Human
agaagaaaugugaaggccacug

SEQ ID NO: 412095 - RNA, 18 nt, Human
uuaagagcugaaagggga

SEQ ID NO: 412096 - RNA, 22 nt, Human
agaggcaacauggggaacagau

SEQ ID NO: 412097 - RNA, 22 nt, Human
cauauaaauacaacauguguua

SEQ ID NO: 412098 - RNA, 22 nt, Human
gcaguccaaaguggcucucacc

SEQ ID NO: 412099 - RNA, 22 nt, Human
uaugcacauuaucuaauccauu

SEQ ID NO: 412100 - RNA, 22 nt, Human
cagcugugaauugucuuaucua

SEQ ID NO: 412101 - RNA, 22 nt, Human
gccaggcauuuauugauugaau

SEQ ID NO: 412102 - RNA, 22 nt, Human
ugauuuccaaaaggcuucuaag

SEQ ID NO: 412103 - RNA, 20 nt, Human
uauuuacaacuuagagccuc

SEQ ID NO: 412104 - RNA, 23 nt, Human
aggagccaggaaccagcuucccc

SEQ ID NO: 412105 - RNA, 22 nt, Human
uucucuuaucuggcauuauugg

SEQ ID NO: 412106 - RNA, 23 nt, Human
gccuggccaccccagggcugcuu

SEQ ID NO: 412107 - RNA, 22 nt, Human
cagggguggcugcagcagaggu

SEQ ID NO: 412108 - RNA, 22 nt, Human
cagggugccucccgcucgccgg

SEQ ID NO: 412109 - RNA, 22 nt, Human
gaggcucagagggagcaugguc

SEQ ID NO: 412110 - RNA, 22 nt, Human
ccaccagcagugugcaaggauu

SEQ ID NO: 412111 - RNA, 22 nt, Human
cugcaggcugagcgccugccgg

SEQ ID NO: 412112 - RNA, 22 nt, Human
caggcugcagaggccuuucaug

SEQ ID NO: 412113 - RNA, 22 nt, Human
agugaccaacaaugcugagaag

SEQ ID NO: 412114 - RNA, 22 nt, Human
gggcagguggcagggucucugg

SEQ ID NO: 412115 - RNA, 22 nt, Human
agucucagcaagcauggcuagu

SEQ ID NO: 412116 - RNA, 22 nt, Human
aaggaguuuggguagucauaca

SEQ ID NO: 412117 - RNA, 22 nt, Human
gaggcccaggucaagcagccac

SEQ ID NO: 412118 - RNA, 22 nt, Human
accaaaaauuguggggcugaau

SEQ ID NO: 412119 - RNA, 22 nt, Human
uguagaaauuaguaagaucaac

SEQ ID NO: 412120 - RNA, 22 nt, Human
uaucuuuauuaugucuaucugc

SEQ ID NO: 412121 - RNA, 22 nt, Human
acccagcucuuugauggucuug

SEQ ID NO: 412122 - RNA, 22 nt, Human
caguccuguguuaaacaagagc

SEQ ID NO: 412123 - RNA, 22 nt, Human
gcacaugguaggcauuugaugu

SEQ ID NO: 412124 - RNA, 22 nt, Human
ccugccugcaaaaugggacaag

SEQ ID NO: 412125 - RNA, 22 nt, Human
aagaauuauugcaauacuagau

SEQ ID NO: 412126 - RNA, 22 nt, Human
cugggguggaggagcuccccug

SEQ ID NO: 412127 - RNA, 22 nt, Human
ccugagguggcugcagcacugc

SEQ ID NO: 412128 - RNA, 21 nt, Human
ccuuuacaauuuugcauuccu

SEQ ID NO: 412129 - RNA, 22 nt, Human
uguggcagcuggagguggagaa

SEQ ID NO: 412130 - RNA, 22 nt, Human
aaguccuuggagaauagaaagg

SEQ ID NO: 412131 - RNA, 22 nt, Human
gcucccagcauugcugcugaau

SEQ ID NO: 412132 - RNA, 22 nt, Human
gaagagcuuaguuguccuagaa

SEQ ID NO: 412133 - RNA, 22 nt, Human
ugccuuggugcuucuucaugug

SEQ ID NO: 412134 - RNA, 22 nt, Human
gccucccuguagaggccagccu

SEQ ID NO: 412135 - RNA, 22 nt, Human
cagucccuaguggagcucacag

SEQ ID NO: 412136 - RNA, 22 nt, Human
agcucccagagcucgagaguaa

SEQ ID NO: 412137 - RNA, 22 nt, Human
cggcuggggcuguccccaugac

SEQ ID NO: 412138 - RNA, 20 nt, Human
aggcucaggguguuuaggaa

SEQ ID NO: 412139 - RNA, 22 nt, Human
ugggcagcagcaaagccagacu

SEQ ID NO: 412140 - RNA, 22 nt, Human
acaggggaauuuacugucauua

SEQ ID NO: 412141 - RNA, 22 nt, Human
gcuguggaaaugccuaacauga

SEQ ID NO: 412142 - RNA, 22 nt, Human
uuagcuaaacuguaacuagaau

SEQ ID NO: 412143 - RNA, 22 nt, Human
uggcagggugccaguugcgagu

SEQ ID NO: 412144 - RNA, 22 nt, Human
acacacagguaaaggagccugg

SEQ ID NO: 412145 - RNA, 22 nt, Human
auguaagguucagaguauguga

SEQ ID NO: 412146 - RNA, 22 nt, Human
gaguguucccacaccccaguug

SEQ ID NO: 412147 - RNA, 22 nt, Human
cugcagaggucuugcugauggu

SEQ ID NO: 412148 - RNA, 22 nt, Human
cuucuggaggacacuggcccca

SEQ ID NO: 412149 - RNA, 22 nt, Human
acucugggccccagguggagcu

SEQ ID NO: 412150 - RNA, 22 nt, Human
gagauggggucagcugggacau

SEQ ID NO: 412151 - RNA, 22 nt, Human
uguccucaggaccuggcacagu

SEQ ID NO: 412152 - RNA, 22 nt, Human
cugagccagggccacacaugga

SEQ ID NO: 412153 - RNA, 22 nt, Human
gggucuccauguuaacaucacu

SEQ ID NO: 412154 - RNA, 23 nt, Human
ugugaagguggguccaagggcug

SEQ ID NO: 412155 - RNA, 22 nt, Human
gggaggagugaagauucaccug

SEQ ID NO: 412156 - RNA, 22 nt, Human
cacugcuuaguugguaaaugug

SEQ ID NO: 412157 - RNA, 22 nt, Human
auggggugaccaugagcauuua

SEQ ID NO: 412158 - RNA, 22 nt, Human
uuuauuagugcuuguaucacug

SEQ ID NO: 412159 - RNA, 20 nt, Human
ggagagcagggaagacagua

SEQ ID NO: 412160 - RNA, 22 nt, Human
ccaaggcuucccagagaugcuc

SEQ ID NO: 412161 - RNA, 18 nt, Human
uguuccaaggaaggaauc

SEQ ID NO: 412162 - RNA, 22 nt, Human
ugccugccaugcagaaagcuga

SEQ ID NO: 412163 - RNA, 22 nt, Human
ugauuuccccagucuugcugcu

SEQ ID NO: 412164 - RNA, 22 nt, Human
aggcucagcaucugauucauau

SEQ ID NO: 412165 - RNA, 22 nt, Human
uugaaggacaucuuguuucuag

SEQ ID NO: 412166 - RNA, 23 nt, Human
aggcugcagaagaauagggucau

SEQ ID NO: 412167 - RNA, 22 nt, Human
cucuccagccacagaagcugcu

SEQ ID NO: 412168 - RNA, 22 nt, Human
uggcaguguauagguggcuccu

SEQ ID NO: 412169 - RNA, 22 nt, Human
aggcucuguuauucuagagggc

SEQ ID NO: 412170 - RNA, 22 nt, Human
ggcuggcucagggcuugagaga

SEQ ID NO: 412171 - RNA, 22 nt, Human
agggaagagcuugcaagaaacc

SEQ ID NO: 412172 - RNA, 22 nt, Human
ucaaaauuuuauuucucaagga

SEQ ID NO: 412173 - RNA, 22 nt, Human
ugcugggcuugaaagcugcuaa

SEQ ID NO: 412174 - RNA, 22 nt, Human
cugggccuggcguuccaggcug

SEQ ID NO: 412175 - RNA, 22 nt, Human
gcagcuuuaaaggaggcucuga

SEQ ID NO: 412176 - RNA, 22 nt, Human
uaacacugauuuguucucaggg

SEQ ID NO: 412177 - RNA, 22 nt, Human
caggcuugcugcuagagcacuu

SEQ ID NO: 412178 - RNA, 22 nt, Human
agauuucaauggauauugcaag

SEQ ID NO: 412179 - RNA, 22 nt, Human
uccugcagccuugggcuggagc

SEQ ID NO: 412180 - RNA, 22 nt, Human
cugucucugucuuaacucccag

SEQ ID NO: 412181 - RNA, 22 nt, Human
uggagacugugcuaagggaguu

SEQ ID NO: 412182 - RNA, 22 nt, Human
uuuaguagaaugauacagggca

SEQ ID NO: 412183 - RNA, 22 nt, Human
caggagacaauggcuguggggc

SEQ ID NO: 412184 - RNA, 22 nt, Human
guggcugcagcccagcggcacg

SEQ ID NO: 412185 - RNA, 22 nt, Human
ucaaugaugcugaagguagcgu

SEQ ID NO: 412186 - RNA, 22 nt, Human
ugggagagugcucaaugugcaa

SEQ ID NO: 412187 - RNA, 22 nt, Human
auucagaaauagaaaauuugau

SEQ ID NO: 412188 - RNA, 23 nt, Human
cagaagcaccuguugacugcugc

SEQ ID NO: 412189 - RNA, 22 nt, Human
cucaggaggccauucucaaggu

SEQ ID NO: 412190 - RNA, 19 nt, Human
ucuuucauuucuagcucug

SEQ ID NO: 412191 - RNA, 22 nt, Human
gcacugaaauuauaugcauuug

SEQ ID NO: 412192 - RNA, 22 nt, Human
ggcuuuauguuuuucauguggu

SEQ ID NO: 412193 - RNA, 22 nt, Human
uccuucaguucaauuaguccgu

SEQ ID NO: 412194 - RNA, 22 nt, Human
gcaggagccaggccgagcuggu

SEQ ID NO: 412195 - RNA, 22 nt, Human
gcucugucaacagcuagcugug

SEQ ID NO: 412196 - RNA, 22 nt, Human
aagaggaagucuccauggagag

SEQ ID NO: 412197 - RNA, 22 nt, Human
auguccaggaucuauccccaga

SEQ ID NO: 412198 - RNA, 22 nt, Human
uagcuuuccuuguugccugugc

SEQ ID NO: 412199 - RNA, 22 nt, Human
gguggggcccuggcacugguau

SEQ ID NO: 412200 - RNA, 22 nt, Human
uccagucaucucccuucacauu

SEQ ID NO: 412201 - RNA, 22 nt, Human
ugcagggaagcaaggguggcuc

SEQ ID NO: 412202 - RNA, 22 nt, Human
uaccuuggguugaguucauucu

SEQ ID NO: 412203 - RNA, 22 nt, Human
uccagcuugccuggucuuuugg

SEQ ID NO: 412204 - RNA, 22 nt, Human
gaaaauguuuccuguuauuugc

SEQ ID NO: 412205 - RNA, 22 nt, Human
augaacacauguacacauuucu

SEQ ID NO: 412206 - RNA, 22 nt, Human
ugaaaaaccucaguccgcuuua

SEQ ID NO: 412207 - RNA, 22 nt, Human
ugcagggaggccccgcagcccu

SEQ ID NO: 412208 - RNA, 22 nt, Human
uacauaauaaggggcauggugu

SEQ ID NO: 412209 - RNA, 22 nt, Human
agcugaaggcuagaacagcugg

SEQ ID NO: 412210 - RNA, 22 nt, Human
aucuggguucaccaugcuccug

SEQ ID NO: 412211 - RNA, 22 nt, Human
agauuuagugguggaauuuugg

SEQ ID NO: 412212 - RNA, 19 nt, Human
cccagcuugaccaccugcu

SEQ ID NO: 412213 - RNA, 20 nt, Human
caggaggcaaggucaagguc

SEQ ID NO: 412214 - RNA, 22 nt, Human
agucaauucuuuucaacucaag

SEQ ID NO: 412215 - RNA, 22 nt, Human
uccuugaauccuagcauccuau

SEQ ID NO: 412216 - RNA, 22 nt, Human
uucucuucaucucaguaaaugu

SEQ ID NO: 412217 - RNA, 22 nt, Human
uagaucugauacaauucaucug

SEQ ID NO: 412218 - RNA, 22 nt, Human
ucuggcucauaggaaggccauu

SEQ ID NO: 412219 - RNA, 22 nt, Human
uguuauugagguuacuuauaag

SEQ ID NO: 412220 - RNA, 22 nt, Human
acuggagcccguggaggcgcag

SEQ ID NO: 412221 - RNA, 22 nt, Human
ucacagaauagcacuguaagcg

SEQ ID NO: 412222 - RNA, 22 nt, Human
cuguccucaacccauccuucuc

SEQ ID NO: 412223 - RNA, 22 nt, Human
ccaggccucccuuuuccagcca

SEQ ID NO: 412224 - RNA, 22 nt, Human
cucaccacagagccuguccagc

SEQ ID NO: 412225 - RNA, 22 nt, Human
uagagcugaguugacuccauuu

SEQ ID NO: 412226 - RNA, 22 nt, Human
gcagagccugacgggauuuuuc

SEQ ID NO: 412227 - RNA, 22 nt, Human
guauuugauagauuucaaagga

SEQ ID NO: 412228 - RNA, 22 nt, Human
uuuucauuguuacuaugagcua

SEQ ID NO: 412229 - RNA, 22 nt, Human
uccauggguagcccugguugag

SEQ ID NO: 412230 - RNA, 22 nt, Human
gaaugcacacgugugugcaugc

SEQ ID NO: 412231 - RNA, 22 nt, Human
agcuuccuacaaccaucucaga

SEQ ID NO: 412232 - RNA, 22 nt, Human
ccagcugguguuccuuaggacc

SEQ ID NO: 412233 - RNA, 22 nt, Human
cuauuucugccuaaugaccugu

SEQ ID NO: 412234 - RNA, 22 nt, Human
uaaaucucacuggguauauugg

SEQ ID NO: 412235 - RNA, 22 nt, Human
cuuucaaaacgcucuguaugca

SEQ ID NO: 412236 - RNA, 22 nt, Human
uuuccucuccaccaggaggucu

SEQ ID NO: 412237 - RNA, 19 nt, Human
cagagcugcuggccucguc

SEQ ID NO: 412238 - RNA, 23 nt, Human
gcagacagagcagacuaagacaa

SEQ ID NO: 412239 - RNA, 22 nt, Human
aagggcucccugccugaggugg

SEQ ID NO: 412240 - RNA, 19 nt, Human
ccaggccaucccaguuccc

SEQ ID NO: 412241 - RNA, 21 nt, Human
cucuugugucagagccagagg

SEQ ID NO: 412242 - RNA, 22 nt, Human
aaaguuugaaugauauauuagu

SEQ ID NO: 412243 - RNA, 22 nt, Human
agccugguguggggcugcagag

SEQ ID NO: 412244 - RNA, 20 nt, Human
uaagaacaagacuaggaagc

SEQ ID NO: 412245 - RNA, 22 nt, Human
aggggcagccucacaauccucu

SEQ ID NO: 412246 - RNA, 22 nt, Human
cuggaguguaaagagcauagaa

SEQ ID NO: 412247 - RNA, 22 nt, Human
aacaaccaaaaagaugaaugua

SEQ ID NO: 412248 - RNA, 21 nt, Human
agcagcugcaguuucuaucug

SEQ ID NO: 412249 - RNA, 22 nt, Human
caggguacagaguuuucuaaac

SEQ ID NO: 412250 - RNA, 21 nt, Human
gauugaaaccauggcagugag

SEQ ID NO: 412251 - RNA, 22 nt, Human
aggugcuagguguguaguggag

SEQ ID NO: 412252 - RNA, 22 nt, Human
acagccagggcauugucgccga

SEQ ID NO: 412253 - RNA, 22 nt, Human
uaaguuuucuggaauaacuugg

SEQ ID NO: 412254 - RNA, 22 nt, Human
gggcaugguggugcacaccugu

SEQ ID NO: 412255 - RNA, 22 nt, Human
uccugggcccaggcugccaggg

SEQ ID NO: 412256 - RNA, 22 nt, Human
ugcuggaggggccugaccagga

SEQ ID NO: 412257 - RNA, 22 nt, Human
ggaggcuccacugcucuuccug

SEQ ID NO: 412258 - RNA, 22 nt, Human
gaaggccaguuuugagauaggu

SEQ ID NO: 412259 - RNA, 22 nt, Human
gaaggcugcugggaaguguggu

SEQ ID NO: 412260 - RNA, 22 nt, Human
ugcagccauuuucugccaaugc

SEQ ID NO: 412261 - RNA, 22 nt, Human
gagccaggcaccuucuguguug

SEQ ID NO: 412262 - RNA, 22 nt, Human
aagcaucucuauguggagagug

SEQ ID NO: 412263 - RNA, 22 nt, Human
ccagcagcuguggcuuugccuc

SEQ ID NO: 412264 - RNA, 22 nt, Human
uuaggaaaaucaugagagauga

SEQ ID NO: 412265 - RNA, 22 nt, Human
gcacccagaggucagcagugcu

SEQ ID NO: 412266 - RNA, 22 nt, Human
gcaggggcuacucugagcuucc

SEQ ID NO: 412267 - RNA, 22 nt, Human
aggcuccaugcaaaggcuguuu

SEQ ID NO: 412268 - RNA, 20 nt, Human
uuuuauauguaggguauaug

SEQ ID NO: 412269 - RNA, 22 nt, Human
uaacagaaauagaaaugagagu

SEQ ID NO: 412270 - RNA, 22 nt, Human
agucucuuuaaucacagugucu

SEQ ID NO: 412271 - RNA, 22 nt, Human
aaaagagguuaaccaggugugu

SEQ ID NO: 412272 - RNA, 20 nt, Human
uaugaagauaugugaacagc

SEQ ID NO: 412273 - RNA, 22 nt, Human
agcugggaggugggcagugaga

SEQ ID NO: 412274 - RNA, 22 nt, Human
ccagcuuuccaggguugacugg

SEQ ID NO: 412275 - RNA, 23 nt, Human
gacacaggagcacccagcugagc

SEQ ID NO: 412276 - RNA, 22 nt, Human
acugagcugcuugaagugaacu

SEQ ID NO: 412277 - RNA, 22 nt, Human
ugcugucuuccaggauggugaa

SEQ ID NO: 412278 - RNA, 21 nt, Human
cuggacugaggagacagucgc

SEQ ID NO: 412279 - RNA, 22 nt, Human
aggaaaugcugaugcuccugga

SEQ ID NO: 412280 - RNA, 22 nt, Human
uguagaaagcucuucugaaauc

SEQ ID NO: 412281 - RNA, 17 nt, Human
cuggagccuccaacucc

SEQ ID NO: 412282 - RNA, 22 nt, Human
caaaggcaguuacugaaugaag

SEQ ID NO: 412283 - RNA, 22 nt, Human
cuggaagguucuuugugugccu

SEQ ID NO: 412284 - RNA, 22 nt, Human
gcaguguuuacauauuagaaac

SEQ ID NO: 412285 - RNA, 22 nt, Human
ugcacacaaguuggagaaugaa

SEQ ID NO: 412286 - RNA, 16 nt, Human
uguuagcugugcauua

SEQ ID NO: 412287 - RNA, 22 nt, Human
aguggcaguuugggagcuacag

SEQ ID NO: 412288 - RNA, 22 nt, Human
aggaccuguaccucagcaucua

SEQ ID NO: 412289 - RNA, 21 nt, Human
ccugggccaaauucccuggac

SEQ ID NO: 412290 - RNA, 22 nt, Human
cugugccuggggggcagagcug

SEQ ID NO: 412291 - RNA, 21 nt, Human
agggucaggaaccaggguacc

SEQ ID NO: 412292 - RNA, 22 nt, Human
uccuggcccggccgggccugcu

SEQ ID NO: 412293 - RNA, 22 nt, Human
gaugcugagagguggagggaac

SEQ ID NO: 412294 - RNA, 22 nt, Human
cugagcauggccgguccauggu

SEQ ID NO: 412295 - RNA, 22 nt, Human
cugcugagcccuggcacaggug

SEQ ID NO: 412296 - RNA, 22 nt, Human
auccugugcaaugacugcaucu

SEQ ID NO: 412297 - RNA, 22 nt, Human
aggcccaguuauccuacuuguu

SEQ ID NO: 412298 - RNA, 22 nt, Human
cagggcagcuuccuuuguuagg

SEQ ID NO: 412299 - RNA, 19 nt, Human
gaucuuugccaauuuaagc

SEQ ID NO: 412300 - RNA, 22 nt, Human
agggucaggagacacuggcaac

SEQ ID NO: 412301 - RNA, 22 nt, Human
gcagacaauuuauuagcagauu

SEQ ID NO: 412302 - RNA, 22 nt, Human
aaauuuaagaagugugugcgug

SEQ ID NO: 412303 - RNA, 22 nt, Human
gaguggggcccacugcugggug

SEQ ID NO: 412304 - RNA, 23 nt, Human
cccagaccuugugcugcccuugg

SEQ ID NO: 412305 - RNA, 22 nt, Human
agaaaucucaguaucucaggga

SEQ ID NO: 412306 - RNA, 22 nt, Human
ccagugcccagucucccugguc

SEQ ID NO: 412307 - RNA, 22 nt, Human
uggcagccacaucucguggauu

SEQ ID NO: 412308 - RNA, 22 nt, Human
cugagucucccggcaguggagg

SEQ ID NO: 412309 - RNA, 22 nt, Human
aaggugucggcagagccgcuuc

SEQ ID NO: 412310 - RNA, 22 nt, Human
ugagcagagucgcuccagagug

SEQ ID NO: 412311 - RNA, 22 nt, Human
aauuagggaaaacauuugcuuu

SEQ ID NO: 412312 - RNA, 22 nt, Human
gccucugcggagcuguacauca

SEQ ID NO: 412313 - RNA, 22 nt, Human
aaagacuagcauuuauauguac

SEQ ID NO: 412314 - RNA, 22 nt, Human
guaucuuucccaccaaucacaa

SEQ ID NO: 412315 - RNA, 22 nt, Human
gcagagcauguccucaggacag

SEQ ID NO: 412316 - RNA, 22 nt, Human
gaacauuuaugaugcaauaccu

SEQ ID NO: 412317 - RNA, 22 nt, Human
ucuacuguagugaugcugcagu

SEQ ID NO: 412318 - RNA, 22 nt, Human
ugaagacacauacaagggaaug

SEQ ID NO: 412319 - RNA, 22 nt, Human
gcugccacuuggucaugucaug

SEQ ID NO: 412320 - RNA, 22 nt, Human
aagcugccagauucagucugcu

SEQ ID NO: 412321 - RNA, 22 nt, Human
aaacagacugaagaguugaagc

SEQ ID NO: 412322 - RNA, 22 nt, Human
gaauacaaauaauaccaaggug

SEQ ID NO: 412323 - RNA, 22 nt, Human
cucagagaagucuuugcuaaac

SEQ ID NO: 412324 - RNA, 22 nt, Human
ugcagggaaugcuugcagcaug

SEQ ID NO: 412325 - RNA, 22 nt, Human
ugugccaggcacuugcccaggc

SEQ ID NO: 412326 - RNA, 22 nt, Human
ugcagauucaaaugaaaugcaa

SEQ ID NO: 412327 - RNA, 22 nt, Human
ugaaaucuucacuaagucucuu

SEQ ID NO: 412328 - RNA, 23 nt, Human
accaugaugggagugcaaauaag

SEQ ID NO: 412329 - RNA, 22 nt, Human
aaagaacuuauccuagaauuug

SEQ ID NO: 412330 - RNA, 22 nt, Human
uacccagcccaugccuaccuca

SEQ ID NO: 412331 - RNA, 22 nt, Human
caguaugagaguugaaucaagg

SEQ ID NO: 412332 - RNA, 18 nt, Human
gcugcugguggagggagc

SEQ ID NO: 412333 - RNA, 22 nt, Human
cuuacauugugugcaugagggg

SEQ ID NO: 412334 - RNA, 22 nt, Human
uucaggauggcggauguugggg

SEQ ID NO: 412335 - RNA, 22 nt, Human
uggcuccuaucaaggagugggu

SEQ ID NO: 412336 - RNA, 20 nt, Human
aagggagaauaaugauugua

SEQ ID NO: 412337 - RNA, 22 nt, Human
caugggcucuucuggacugcac

SEQ ID NO: 412338 - RNA, 22 nt, Human
cagugggaagggcagaggcuuu

SEQ ID NO: 412339 - RNA, 22 nt, Human
cuggcucauuuuagcaucaggu

SEQ ID NO: 412340 - RNA, 22 nt, Human
cucccagagaccaagcugagaa

SEQ ID NO: 412341 - RNA, 22 nt, Human
uucuuuggggaauauucugguu

SEQ ID NO: 412342 - RNA, 22 nt, Human
gaagagcugcaguuuccugggc

SEQ ID NO: 412343 - RNA, 22 nt, Human
ggagccugugcccaagcccaga

SEQ ID NO: 412344 - RNA, 22 nt, Human
caguacuuuucuggcuuucuac

SEQ ID NO: 412345 - RNA, 22 nt, Human
uggccucaagucugagggccuu

SEQ ID NO: 412346 - RNA, 22 nt, Human
cggcagagacggcgcuuugaac

SEQ ID NO: 412347 - RNA, 22 nt, Human
ucucaggaagugauauugagac

SEQ ID NO: 412348 - RNA, 22 nt, Human
uccugcagucugcacucugccu

SEQ ID NO: 412349 - RNA, 22 nt, Human
ggccaggcuggucucagacuuc

SEQ ID NO: 412350 - RNA, 22 nt, Human
ucagaggaaagggaacauaguc

SEQ ID NO: 412351 - RNA, 22 nt, Human
uugaaaggaauacagaggccua

SEQ ID NO: 412352 - RNA, 22 nt, Human
uguacaguauauuucaaagcca

SEQ ID NO: 412353 - RNA, 22 nt, Human
gcugucccaugguugcaagaug

SEQ ID NO: 412354 - RNA, 22 nt, Human
cuggggggagcugcguccagca

SEQ ID NO: 412355 - RNA, 22 nt, Human
gccagcagcccagaaggacuuu

SEQ ID NO: 412356 - RNA, 18 nt, Human
ucagagguacagaaaagu

SEQ ID NO: 412357 - RNA, 22 nt, Human
gggcaugguggcaggcaccugu

SEQ ID NO: 412358 - RNA, 22 nt, Human
aagauguaucaguuaagucuuc

SEQ ID NO: 412359 - RNA, 22 nt, Human
uccucaggcugccuggaagacu

SEQ ID NO: 412360 - RNA, 22 nt, Human
caggccucagagaguggcgggg

SEQ ID NO: 412361 - RNA, 19 nt, Human
uaaggccaaaaguaagugu

SEQ ID NO: 412362 - RNA, 22 nt, Human
caaaugcaaaauauaacccugu

SEQ ID NO: 412363 - RNA, 22 nt, Human
ucucauugguauauacaugugu

SEQ ID NO: 412364 - RNA, 22 nt, Human
gagaugaauguaaacaaaggca

SEQ ID NO: 412365 - RNA, 22 nt, Human
ugaggcaggagaauggcgggaa

SEQ ID NO: 412366 - RNA, 22 nt, Human
cacaggagaacccacagauucu

SEQ ID NO: 412367 - RNA, 22 nt, Human
caaagaugcugauguuggauca

SEQ ID NO: 412368 - RNA, 22 nt, Human
ggcagcaggcgacuucccuauu

SEQ ID NO: 412369 - RNA, 22 nt, Human
cagcccugagaaggaggaucuc

SEQ ID NO: 412370 - RNA, 22 nt, Human
ugagcuucaaaauaugugaauc

SEQ ID NO: 412371 - RNA, 22 nt, Human
aagaaucauccugcaagagucu

SEQ ID NO: 412372 - RNA, 22 nt, Human
agccuguggaucccugcacugg

SEQ ID NO: 412373 - RNA, 22 nt, Human
gaggccagaagucugagaucag

SEQ ID NO: 412374 - RNA, 21 nt, Human
agcuggugucagagcucuggg

SEQ ID NO: 412375 - RNA, 19 nt, Human
ugggaguggggaagguccu

SEQ ID NO: 412376 - RNA, 22 nt, Human
agcuguggcagcagccguggca

SEQ ID NO: 412377 - RNA, 22 nt, Human
ccgggcgggggcucucgucacc

SEQ ID NO: 412378 - RNA, 22 nt, Human
aagaggcagcccgcugaggcug

SEQ ID NO: 412379 - RNA, 22 nt, Human
uggcuaggcuccaagagcugga

SEQ ID NO: 412380 - RNA, 22 nt, Human
uuucagauggagguuuaggaca

SEQ ID NO: 412381 - RNA, 22 nt, Human
gaagcucucaaacucuccccuu

SEQ ID NO: 412382 - RNA, 19 nt, Human
cagaaauagcgaaguguaa

SEQ ID NO: 412383 - RNA, 21 nt, Human
ugggcacugagggugcugcuc

SEQ ID NO: 412384 - RNA, 22 nt, Human
cugggcaguuuauucaguucug

SEQ ID NO: 412385 - RNA, 22 nt, Human
ccagcuuuagguugccugccag

SEQ ID NO: 412386 - RNA, 23 nt, Human
ggucccaguggagaggccucacc

SEQ ID NO: 412387 - RNA, 22 nt, Human
cauuuacauuuaagguuaauau

SEQ ID NO: 412388 - RNA, 22 nt, Human
gggcugggauugcuugcuguga

SEQ ID NO: 412389 - RNA, 22 nt, Human
cucacugacgaggaagcugaga

SEQ ID NO: 412390 - RNA, 22 nt, Human
uugauuaaacaggcauauucaa

SEQ ID NO: 412391 - RNA, 22 nt, Human
gcugucacaagcaucuggggca

SEQ ID NO: 412392 - RNA, 22 nt, Human
ccagccuucugagcugccugga

SEQ ID NO: 412393 - RNA, 22 nt, Human
acaggcugccuaccaaguauca

SEQ ID NO: 412394 - RNA, 22 nt, Human
guaaaugugcuucuuuuaacuu

SEQ ID NO: 412395 - RNA, 17 nt, Human
ugccagccugucccagg

SEQ ID NO: 412396 - RNA, 22 nt, Human
aucagcaagcaugguuaggugu

SEQ ID NO: 412397 - RNA, 17 nt, Human
agguggcugcugcgccu

SEQ ID NO: 412398 - RNA, 22 nt, Human
cagcuguguagaugcaggguca

SEQ ID NO: 412399 - RNA, 22 nt, Human
ugcuuaaacauacuauuuauau

SEQ ID NO: 412400 - RNA, 22 nt, Human
uccugggguccugacugcuucc

SEQ ID NO: 412401 - RNA, 22 nt, Human
uaaacauggauucugaucacag

SEQ ID NO: 412402 - RNA, 22 nt, Human
gacagcauggugucuguucagg

SEQ ID NO: 412403 - RNA, 23 nt, Human
auggagcugguacuagcuaccuc

SEQ ID NO: 412404 - RNA, 23 nt, Human
aggcagagccaaggucaaaaccc

SEQ ID NO: 412405 - RNA, 22 nt, Human
gccaggcagcagcgaggauggu

SEQ ID NO: 412406 - RNA, 22 nt, Human
acagcagcgucaacuuaaaauu

SEQ ID NO: 412407 - RNA, 22 nt, Human
gagagugauucccucccauaga

SEQ ID NO: 412408 - RNA, 22 nt, Human
cauuuguaggaugcuucuuguu

SEQ ID NO: 412409 - RNA, 22 nt, Human
ggugaagggugucauggcauuu

SEQ ID NO: 412410 - RNA, 22 nt, Human
uaggcagggauuaggguugauu

SEQ ID NO: 412411 - RNA, 22 nt, Human
caaaggagguaaugggugugag

SEQ ID NO: 412412 - RNA, 23 nt, Human
gugcucugcggucugcuagucug

SEQ ID NO: 412413 - RNA, 22 nt, Human
uauugaugcuuggauugggcca

SEQ ID NO: 412414 - RNA, 22 nt, Human
ugcacccucaucagucaaaugg

SEQ ID NO: 412415 - RNA, 19 nt, Human
cucuggccucuggaugcug

SEQ ID NO: 412416 - RNA, 22 nt, Human
ucugagagccucuagccuaagu

SEQ ID NO: 412417 - RNA, 21 nt, Human
ccauaauuuuguuucagaagu

SEQ ID NO: 412418 - RNA, 20 nt, Human
gccuguccugagugucaugg

SEQ ID NO: 412419 - RNA, 22 nt, Human
gacaucauagggugggaggaaa

SEQ ID NO: 412420 - RNA, 22 nt, Human
ccagggucuuggagaggagugc

SEQ ID NO: 412421 - RNA, 22 nt, Human
gcugggagcaaagccaugcaua

SEQ ID NO: 412422 - RNA, 22 nt, Human
aaaaauaggucaaccguguaug

SEQ ID NO: 412423 - RNA, 18 nt, Human
agucuucugauccauuuu

SEQ ID NO: 412424 - RNA, 22 nt, Human
acacaggggcucggcugggugc

SEQ ID NO: 412425 - RNA, 22 nt, Human
uuguccuuggaugaagcuggga

SEQ ID NO: 412426 - RNA, 22 nt, Human
aucaaaaugcuccagugauggu

SEQ ID NO: 412427 - RNA, 22 nt, Human
uaaacaagcugucugauauucu

SEQ ID NO: 412428 - RNA, 23 nt, Human
auuugagaaaguauuuuuaagac

SEQ ID NO: 412429 - RNA, 22 nt, Human
ggcagaggugaaguucacaagg

SEQ ID NO: 412430 - RNA, 20 nt, Human
guggccucucacauucugag

SEQ ID NO: 412431 - RNA, 22 nt, Human
gggcuguaggagcuggaauggg

SEQ ID NO: 412432 - RNA, 22 nt, Human
aagggcucacccaacucacuuc

SEQ ID NO: 412433 - RNA, 22 nt, Human
gaggcucacugggcaaagacuc

SEQ ID NO: 412434 - RNA, 22 nt, Human
agcccggcuuccccgguugcua

SEQ ID NO: 412435 - RNA, 22 nt, Human
uaaucacagaaacagacuguuu

SEQ ID NO: 412436 - RNA, 22 nt, Human
agccauccucccaccucagccu

SEQ ID NO: 412437 - RNA, 22 nt, Human
gauggcaggcaggugaguagag

SEQ ID NO: 412438 - RNA, 17 nt, Human
gcugccaccuuuggagc

SEQ ID NO: 412439 - RNA, 22 nt, Human
ucaggagggugacaggcccugg

SEQ ID NO: 412440 - RNA, 22 nt, Human
aggcccaguccucugccgucug

SEQ ID NO: 412441 - RNA, 22 nt, Human
uauagaaguaagcauugugaug

SEQ ID NO: 412442 - RNA, 22 nt, Human
ugagccagccuugcagcugugc

SEQ ID NO: 412443 - RNA, 22 nt, Human
ccucccacauccuagcucugcu

SEQ ID NO: 412444 - RNA, 22 nt, Human
gcacuaaaccaacauguaauaa

SEQ ID NO: 412445 - RNA, 23 nt, Human
aacaccaaggcucagagagauaa

SEQ ID NO: 412446 - RNA, 22 nt, Human
augaguaaaaccacuauuuaca

SEQ ID NO: 412447 - RNA, 22 nt, Human
ucuucaaauccuacagugucug

SEQ ID NO: 412448 - RNA, 22 nt, Human
caggcagagaggagcauuuaau

SEQ ID NO: 412449 - RNA, 22 nt, Human
aaaucacuaaguuauagugugg

SEQ ID NO: 412450 - RNA, 22 nt, Human
uaacagaaaggcucaggugcuc

SEQ ID NO: 412451 - RNA, 21 nt, Human
ccaaaggcuauguaucuucug

SEQ ID NO: 412452 - RNA, 22 nt, Human
aagccaggccauucucugguuc

SEQ ID NO: 412453 - RNA, 22 nt, Human
uccagggaucuuuagagucuuu

SEQ ID NO: 412454 - RNA, 22 nt, Human
uugcagagccaugaggcuggcu

SEQ ID NO: 412455 - RNA, 22 nt, Human
ccuguacaucugcucucauugc

SEQ ID NO: 412456 - RNA, 22 nt, Human
uggcugaguuucaugcaucaug

SEQ ID NO: 412457 - RNA, 22 nt, Human
cacugcaguuccccagugcgca

SEQ ID NO: 412458 - RNA, 22 nt, Human
aagauacugaugauguaggcua

SEQ ID NO: 412459 - RNA, 22 nt, Human
ucaaaugcuguauuguaguaau

SEQ ID NO: 412460 - RNA, 22 nt, Human
cugcugcauuacucuucucaag

SEQ ID NO: 412461 - RNA, 22 nt, Human
guguuuuaucagacaaaguaua

SEQ ID NO: 412462 - RNA, 22 nt, Human
gugaggcagcaggagccucugu

SEQ ID NO: 412463 - RNA, 22 nt, Human
gaugaggcucaugcacccugcg

SEQ ID NO: 412464 - RNA, 22 nt, Human
uuuuuccuuggaugugucucuc

SEQ ID NO: 412465 - RNA, 22 nt, Human
gggcuccaccuagggacacugg

SEQ ID NO: 412466 - RNA, 22 nt, Human
cacucaggguacaauggagggc

SEQ ID NO: 412467 - RNA, 22 nt, Human
uauuucuuguucccuccaaguu

SEQ ID NO: 412468 - RNA, 22 nt, Human
gaggggaagacuucuggacagu

SEQ ID NO: 412469 - RNA, 22 nt, Human
ccagcccugccucucagggccc

SEQ ID NO: 412470 - RNA, 22 nt, Human
ccccagcucagugcagggacau

SEQ ID NO: 412471 - RNA, 22 nt, Human
gccagcucccaagugagccccu

SEQ ID NO: 412472 - RNA, 22 nt, Human
ccugugugcugaugacgacaga

SEQ ID NO: 412473 - RNA, 22 nt, Human
uccagggacagcgcuggagcua

SEQ ID NO: 412474 - RNA, 22 nt, Human
cagugcauagauccugaggccu

SEQ ID NO: 412475 - RNA, 22 nt, Human
ugggcagaggacagggaagauc

SEQ ID NO: 412476 - RNA, 22 nt, Human
cacaggcucuucucacuugauu

SEQ ID NO: 412477 - RNA, 22 nt, Human
gucaggaugagggaugaggagu

SEQ ID NO: 412478 - RNA, 22 nt, Human
ucagaggauuggacuuuuaugu

SEQ ID NO: 412479 - RNA, 22 nt, Human
acugccaggauggcacuagagg

SEQ ID NO: 412480 - RNA, 22 nt, Human
cugcaguguucuggaaugcauu

SEQ ID NO: 412481 - RNA, 22 nt, Human
gccugcagcaugcuaggucuug

SEQ ID NO: 412482 - RNA, 22 nt, Human
ggcucugcagugacuugagggg

SEQ ID NO: 412483 - RNA, 22 nt, Human
ucagaguggugguuuugccuuc

SEQ ID NO: 412484 - RNA, 22 nt, Human
aaggccaugcacauccuaggca

SEQ ID NO: 412485 - RNA, 22 nt, Human
caggggcuguuugccucaggcc

SEQ ID NO: 412486 - RNA, 22 nt, Human
cagagcugagaauguugaugcu

SEQ ID NO: 412487 - RNA, 22 nt, Human
aaaguguacuaugucaugaaca

SEQ ID NO: 412488 - RNA, 22 nt, Human
aagaguuuucuauaaucuuggc

SEQ ID NO: 412489 - RNA, 21 nt, Human
aacaaagggaugcucaucuuu

SEQ ID NO: 412490 - RNA, 22 nt, Human
gcuggagccaagcugcucuugg

SEQ ID NO: 412491 - RNA, 22 nt, Human
ggaaaaggccauuguuucucug

SEQ ID NO: 412492 - RNA, 22 nt, Human
gccaccucuuugucucugccgc

SEQ ID NO: 412493 - RNA, 22 nt, Human
agagcagugcugaagaguaggg

SEQ ID NO: 412494 - RNA, 22 nt, Human
ugcucuguaacaaauugacaug

SEQ ID NO: 412495 - RNA, 22 nt, Human
gccccucccagucaggagcacu

SEQ ID NO: 412496 - RNA, 22 nt, Human
uagcagggucucaggagucagg

SEQ ID NO: 412497 - RNA, 21 nt, Human
ugcagccauucagcccuaugc

SEQ ID NO: 412498 - RNA, 21 nt, Human
ugcauaaagaaauacaaauac

SEQ ID NO: 412499 - RNA, 22 nt, Human
ccugagugaauucccucacugu

SEQ ID NO: 412500 - RNA, 22 nt, Human
uuaugacaggaaaaucacagaa

SEQ ID NO: 412501 - RNA, 22 nt, Human
cuacacaguucugccuaauggc

SEQ ID NO: 412502 - RNA, 22 nt, Human
uguuccuaaauaugaauggaga

SEQ ID NO: 412503 - RNA, 22 nt, Human
uuagccauuuuauacaagugua

SEQ ID NO: 412504 - RNA, 22 nt, Human
ggucagccuuggauuugguagc

SEQ ID NO: 412505 - RNA, 22 nt, Human
gcuccacuugcagcuaggcuug

SEQ ID NO: 412506 - RNA, 22 nt, Human
auaucacaguaguuguuuaguu

SEQ ID NO: 412507 - RNA, 22 nt, Human
uugcagagugguugugaggauu

SEQ ID NO: 412508 - RNA, 22 nt, Human
acauucaugucccacuucuagc

SEQ ID NO: 412509 - RNA, 22 nt, Human
ucccagggcagcuguccagaag

SEQ ID NO: 412510 - RNA, 22 nt, Human
cccucagcuucucccugcagcu

SEQ ID NO: 412511 - RNA, 22 nt, Human
uugacaaaaaccucauuucacc

SEQ ID NO: 412512 - RNA, 22 nt, Human
cugcugugcaacauugcaccua

SEQ ID NO: 412513 - RNA, 22 nt, Human
agaggagcugggaggcccucgu

SEQ ID NO: 412514 - RNA, 22 nt, Human
cucuggagguggagguugcagu

SEQ ID NO: 412515 - RNA, 22 nt, Human
aucaaaguggaaguuuacuagg

SEQ ID NO: 412516 - RNA, 20 nt, Human
cugccuggaggccucuaccu

SEQ ID NO: 412517 - RNA, 22 nt, Human
ccagcuuuugcacuggacuggg

SEQ ID NO: 412518 - RNA, 22 nt, Human
aggagucauugagagggguccu

SEQ ID NO: 412519 - RNA, 22 nt, Human
aggcacuguacuagguacaggg

SEQ ID NO: 412520 - RNA, 22 nt, Human
agccugagccccauccagcuga

SEQ ID NO: 412521 - RNA, 22 nt, Human
caggaaugacccaacaguuuca

SEQ ID NO: 412522 - RNA, 22 nt, Human
caugaauauuuaguauuuacuu

SEQ ID NO: 412523 - RNA, 22 nt, Human
acucaguacaucuggaguuggc

SEQ ID NO: 412524 - RNA, 22 nt, Human
aggaagugaaagggaaggaguu

SEQ ID NO: 412525 - RNA, 22 nt, Human
ccaggaggcggaagguacagug

SEQ ID NO: 412526 - RNA, 22 nt, Human
uuacuuuguucucaagauaugu

SEQ ID NO: 412527 - RNA, 20 nt, Human
uccuggccuucucgggcagu

SEQ ID NO: 412528 - RNA, 22 nt, Human
agagugauggguugugcugacc

SEQ ID NO: 412529 - RNA, 22 nt, Human
auucucugugcagauuuaagac

SEQ ID NO: 412530 - RNA, 22 nt, Human
cuggcugccacuucagggucuu

SEQ ID NO: 412531 - RNA, 22 nt, Human
cucuggagcgcugcuucccgcg

SEQ ID NO: 412532 - RNA, 22 nt, Human
acagcuuugggcaaugcuauga

SEQ ID NO: 412533 - RNA, 22 nt, Human
ugggcaagucacuucugucuuu

SEQ ID NO: 412534 - RNA, 22 nt, Human
gagggcucuaccaaguaacucu

SEQ ID NO: 412535 - RNA, 21 nt, Human
uaagaacauuaucuucuuccu

SEQ ID NO: 412536 - RNA, 22 nt, Human
gcucacagccggcuggcagggg

SEQ ID NO: 412537 - RNA, 20 nt, Human
agugucugggccucaggccc

SEQ ID NO: 412538 - RNA, 22 nt, Human
agggcugaguggugcagucaaa

SEQ ID NO: 412539 - RNA, 22 nt, Human
aagggcugggucugguuaaccc

SEQ ID NO: 412540 - RNA, 22 nt, Human
ggggcagcucccgagggcagga

SEQ ID NO: 412541 - RNA, 22 nt, Human
ugguggacaccgcagccaugaa

SEQ ID NO: 412542 - RNA, 20 nt, Human
uggagcuccagcguccaugu

SEQ ID NO: 412543 - RNA, 22 nt, Human
ugugaaagauacuaggcagagg

SEQ ID NO: 412544 - RNA, 22 nt, Human
agggaguuagaaauccaggaua

SEQ ID NO: 412545 - RNA, 22 nt, Human
caaggaaaacagaugaucaaca

SEQ ID NO: 412546 - RNA, 22 nt, Human
uggcugggggugcuauagcugc

SEQ ID NO: 412547 - RNA, 22 nt, Human
gcuuccuagaucugugguacuc

SEQ ID NO: 412548 - RNA, 22 nt, Human
ugccacccagccaggaguggga

SEQ ID NO: 412549 - RNA, 22 nt, Human
ggagugggaacaaugacauggu

SEQ ID NO: 412550 - RNA, 22 nt, Human
cugggagaugacucagagcagg

SEQ ID NO: 412551 - RNA, 19 nt, Human
ugguggcaaugucagcuaa

SEQ ID NO: 412552 - RNA, 22 nt, Human
gugccaggugcuaagcugugcu

SEQ ID NO: 412553 - RNA, 20 nt, Human
agagaauucccuuuggagau

SEQ ID NO: 412554 - RNA, 22 nt, Human
agucagugaaggcauugcucaa

SEQ ID NO: 412555 - RNA, 22 nt, Human
cucucaggcuugggucguggca

SEQ ID NO: 412556 - RNA, 22 nt, Human
gaggagaaagcagugauuugug

SEQ ID NO: 412557 - RNA, 20 nt, Human
caucagugccugacaggucc

SEQ ID NO: 412558 - RNA, 22 nt, Human
acaggccacaguggagucucug

SEQ ID NO: 412559 - RNA, 22 nt, Human
aggccuggccuuuauguucaag

SEQ ID NO: 412560 - RNA, 22 nt, Human
acuuugaaggggaacauuuuaa

SEQ ID NO: 412561 - RNA, 22 nt, Human
caaaagauacuugcaucuaacu

SEQ ID NO: 412562 - RNA, 22 nt, Human
aacaguaaaaaucauuuaguug

SEQ ID NO: 412563 - RNA, 22 nt, Human
gcugguccacucccuggaggcu

SEQ ID NO: 412564 - RNA, 22 nt, Human
uuugcauugcagugguuuacag

SEQ ID NO: 412565 - RNA, 22 nt, Human
agcugcccuuaauaggcauuca

SEQ ID NO: 412566 - RNA, 22 nt, Human
gcuccucucccagagcugcagg

SEQ ID NO: 412567 - RNA, 22 nt, Human
cgugagcaaaauggacacuccc

SEQ ID NO: 412568 - RNA, 22 nt, Human
gucccacaccuugaggggucuu

SEQ ID NO: 412569 - RNA, 22 nt, Human
gggcucugggauucagagcaag

SEQ ID NO: 412570 - RNA, 22 nt, Human
uggcauuuuguucaguauaugg

SEQ ID NO: 412571 - RNA, 22 nt, Human
agcagguguagggcucuuugua

SEQ ID NO: 412572 - RNA, 22 nt, Human
uccugagaugagacagugcugc

SEQ ID NO: 412573 - RNA, 22 nt, Human
gcugugcagauguagggagugg

SEQ ID NO: 412574 - RNA, 22 nt, Human
acagaccaaguuuccagcaggu

SEQ ID NO: 412575 - RNA, 22 nt, Human
acaggccucaagacacccaggu

SEQ ID NO: 412576 - RNA, 18 nt, Human
uggagccauugccaccau

SEQ ID NO: 412577 - RNA, 22 nt, Human
uugaaaggccuguuuauccagc

SEQ ID NO: 412578 - RNA, 22 nt, Human
uggcugagaaaaugguuuuagg

SEQ ID NO: 412579 - RNA, 19 nt, Human
ucaaaggcuuuuaggagac

SEQ ID NO: 412580 - RNA, 22 nt, Human
guggcagggugcucaucaugca

SEQ ID NO: 412581 - RNA, 22 nt, Human
caggccugacccugagcuucac

SEQ ID NO: 412582 - RNA, 22 nt, Human
accgaaggaaacuggaaccguu

SEQ ID NO: 412583 - RNA, 22 nt, Human
ugucuagggagcugcucaggcu

SEQ ID NO: 412584 - RNA, 22 nt, Human
cagagagagugggguguggauu

SEQ ID NO: 412585 - RNA, 22 nt, Human
ucucugaagauauuuauuauua

SEQ ID NO: 412586 - RNA, 22 nt, Human
agccaggcucaaggccugcucc

SEQ ID NO: 412587 - RNA, 22 nt, Human
uaagacaugguugaucuagugu

SEQ ID NO: 412588 - RNA, 22 nt, Human
cagggcuccaugcagggacucc

SEQ ID NO: 412589 - RNA, 22 nt, Human
agagccuggacuuuucugagcc

SEQ ID NO: 412590 - RNA, 22 nt, Human
cugcagagcauaaaucugaaua

SEQ ID NO: 412591 - RNA, 22 nt, Human
auggauaagucaaagaguaucc

SEQ ID NO: 412592 - RNA, 22 nt, Human
ccugccuggcuuccagaagaga

SEQ ID NO: 412593 - RNA, 22 nt, Human
caggcagcguccugcuuccugu

SEQ ID NO: 412594 - RNA, 22 nt, Human
uacaggcaugaaugaaaucugu

SEQ ID NO: 412595 - RNA, 17 nt, Human
agcacuaaaaugcuucc

SEQ ID NO: 412596 - RNA, 22 nt, Human
gguuucaacuucaaccucucca

SEQ ID NO: 412597 - RNA, 22 nt, Human
uaaaucaguuucucuuauuggu

SEQ ID NO: 412598 - RNA, 22 nt, Human
cucagagaggcaguggaaguca

SEQ ID NO: 412599 - RNA, 22 nt, Human
uuggauccaucucaggcauagg

SEQ ID NO: 412600 - RNA, 19 nt, Human
gggcuucugggaucaagag

SEQ ID NO: 412601 - RNA, 20 nt, Human
uccagcugucuuucagagac

SEQ ID NO: 412602 - RNA, 22 nt, Human
cugagagcagggacuugagcca

SEQ ID NO: 412603 - RNA, 22 nt, Human
ccugucaguugcugucagggau

SEQ ID NO: 412604 - RNA, 22 nt, Human
uggccuuggcagugagaagagu

SEQ ID NO: 412605 - RNA, 22 nt, Human
uccauuuuguagguaugcuaca

SEQ ID NO: 412606 - RNA, 19 nt, Human
caguggagauuggaggagg

SEQ ID NO: 412607 - RNA, 22 nt, Human
uugaacauuaacuucagucuau

SEQ ID NO: 412608 - RNA, 22 nt, Human
ucucagggcgcagugaggcagu

SEQ ID NO: 412609 - RNA, 22 nt, Human
gcccagaaguugaggcugcagu

SEQ ID NO: 412610 - RNA, 22 nt, Human
uggcucucagcucccagcagcc

SEQ ID NO: 412611 - RNA, 22 nt, Human
uggccugggugcugcugacauc

SEQ ID NO: 412612 - RNA, 22 nt, Human
augggaggaugcucgggugcuc

SEQ ID NO: 412613 - RNA, 23 nt, Human
agcuucauugaccuccgcagggg

SEQ ID NO: 412614 - RNA, 22 nt, Human
acccugggcuuggccugcucag

SEQ ID NO: 412615 - RNA, 22 nt, Human
ugggccuggcccuguggaggag

SEQ ID NO: 412616 - RNA, 22 nt, Human
uggcagaguggaccauacucaa

SEQ ID NO: 412617 - RNA, 22 nt, Human
gcuguccucugaucucuggagg

SEQ ID NO: 412618 - RNA, 22 nt, Human
agggcugcugcuccgggcccag

SEQ ID NO: 412619 - RNA, 20 nt, Human
cuuccacacaagaagcacag

SEQ ID NO: 412620 - RNA, 22 nt, Human
gagagcugauagaugagcuacu

SEQ ID NO: 412621 - RNA, 22 nt, Human
ucagaguguggugagaugugca

SEQ ID NO: 412622 - RNA, 22 nt, Human
gugggugauguacuggaggcca

SEQ ID NO: 412623 - RNA, 22 nt, Human
gcauggcagugaggauggugcu

SEQ ID NO: 412624 - RNA, 22 nt, Human
cagcccuggaacagcugacuca

SEQ ID NO: 412625 - RNA, 22 nt, Human
auuucucagcacuuccuaucuc

SEQ ID NO: 412626 - RNA, 22 nt, Human
gugcucuggcuggucucccggu

SEQ ID NO: 412627 - RNA, 22 nt, Human
ccaggcuggagugcaauggugc

SEQ ID NO: 412628 - RNA, 22 nt, Human
agugcacagcgugauguauugg

SEQ ID NO: 412629 - RNA, 22 nt, Human
uuuauguaguuacggacuauca

SEQ ID NO: 412630 - RNA, 22 nt, Human
cuuauauuugucaacuuuacaa

SEQ ID NO: 412631 - RNA, 22 nt, Human
aggccucaggaagguaaagaag

SEQ ID NO: 412632 - RNA, 18 nt, Human
guuaauuuugaaguucau

SEQ ID NO: 412633 - RNA, 22 nt, Human
aggccugaaggaagaugagcug

SEQ ID NO: 412634 - RNA, 22 nt, Human
auuugcagagcucugaauuuug

SEQ ID NO: 412635 - RNA, 22 nt, Human
auacaugucaucauauguuugu

SEQ ID NO: 412636 - RNA, 22 nt, Human
cugcccugccuggccagugugg

SEQ ID NO: 412637 - RNA, 22 nt, Human
uggagcugauacagcuggcuuu

SEQ ID NO: 412638 - RNA, 22 nt, Human
ggaggccagggacccagucagc

SEQ ID NO: 412639 - RNA, 22 nt, Human
ggucagggggaucugugaggua

SEQ ID NO: 412640 - RNA, 22 nt, Human
ugaauaaacuaugaggaggaau

SEQ ID NO: 412641 - RNA, 22 nt, Human
cccagcccaucucaaaggucua

SEQ ID NO: 412642 - RNA, 21 nt, Human
gggcuggacaugguggcucau

SEQ ID NO: 412643 - RNA, 22 nt, Human
cccugcagugugaccucaccua

SEQ ID NO: 412644 - RNA, 22 nt, Human
acuguacaacugcugagcagaa

SEQ ID NO: 412645 - RNA, 22 nt, Human
cagggcugguuugucgaagaaa

SEQ ID NO: 412646 - RNA, 22 nt, Human
uggcuucuuagaccaguggccu

SEQ ID NO: 412647 - RNA, 22 nt, Human
ucugcaggacugaggccuguuu

SEQ ID NO: 412648 - RNA, 22 nt, Human
agcuggcauacuuugcuaggaa

SEQ ID NO: 412649 - RNA, 22 nt, Human
caguccugagccaaucaugaug

SEQ ID NO: 412650 - RNA, 22 nt, Human
aggcucaguuugguuuccauug

SEQ ID NO: 412651 - RNA, 22 nt, Human
uuuucauuuacauuagggaaga

SEQ ID NO: 412652 - RNA, 22 nt, Human
aaauccuaagcagaggaauuua

SEQ ID NO: 412653 - RNA, 22 nt, Human
cagcugugggccugacguggca

SEQ ID NO: 412654 - RNA, 19 nt, Human
gcauuucucuuuacagcca

SEQ ID NO: 412655 - RNA, 22 nt, Human
agcaggaguuugaugcuuuuau

SEQ ID NO: 412656 - RNA, 22 nt, Human
acagccagaggagccaggcugg

SEQ ID NO: 412657 - RNA, 22 nt, Human
gggugcaggcagcccaggcagg

SEQ ID NO: 412658 - RNA, 18 nt, Human
uccgaggcaccauaaaaa

SEQ ID NO: 412659 - RNA, 22 nt, Human
augaaauaucuugaagaaauuc

SEQ ID NO: 412660 - RNA, 22 nt, Human
aucaguuuguauaugaaacacu

SEQ ID NO: 412661 - RNA, 22 nt, Human
uguuacaauauuaucaacugag

SEQ ID NO: 412662 - RNA, 22 nt, Human
uacccaggggcugagcagaggu

SEQ ID NO: 412663 - RNA, 22 nt, Human
aaagaauuuguacacccuacua

SEQ ID NO: 412664 - RNA, 19 nt, Human
uggcaucuguaaaauggug

SEQ ID NO: 412665 - RNA, 22 nt, Human
auacaaagcuuucugucuggua

SEQ ID NO: 412666 - RNA, 21 nt, Human
uagcacuucgcuguaauuggg

SEQ ID NO: 412667 - RNA, 22 nt, Human
ccaggcugccgaggaaagaaag

SEQ ID NO: 412668 - RNA, 22 nt, Human
acccaggagguggaggcugcag

SEQ ID NO: 412669 - RNA, 22 nt, Human
ggggccagguccagcuuccaaa

SEQ ID NO: 412670 - RNA, 20 nt, Human
ugcuccaucuaaagugauua

SEQ ID NO: 412671 - RNA, 22 nt, Human
auugaaagguuuugagcagaua

SEQ ID NO: 412672 - RNA, 22 nt, Human
uguuucaggaccuaucuuuuag

SEQ ID NO: 412673 - RNA, 22 nt, Human
ugcccagcacugugccagucac

SEQ ID NO: 412674 - RNA, 22 nt, Human
aagccacugagauuucacugca

SEQ ID NO: 412675 - RNA, 22 nt, Human
gccugguggacacugggcauca

SEQ ID NO: 412676 - RNA, 22 nt, Human
cccuggagcaucucugcugucu

SEQ ID NO: 412677 - RNA, 21 nt, Human
ucuuguccuugcucucccacu

SEQ ID NO: 412678 - RNA, 22 nt, Human
ccuggcagaauauuaaagugca

SEQ ID NO: 412679 - RNA, 22 nt, Human
ccugaagagcacucuagaguug

SEQ ID NO: 412680 - RNA, 22 nt, Human
gguuccaccuggcgagggguau

SEQ ID NO: 412681 - RNA, 22 nt, Human
acauuucuuucuauucaguagc

SEQ ID NO: 412682 - RNA, 22 nt, Human
ucagcugccuuucccaugcuag

SEQ ID NO: 412683 - RNA, 22 nt, Human
guuacaaagcacuucaagugaa

SEQ ID NO: 412684 - RNA, 22 nt, Human
agccaggaagaaggucacacca

SEQ ID NO: 412685 - RNA, 22 nt, Human
gcagaggagaugaagauacuuu

SEQ ID NO: 412686 - RNA, 22 nt, Human
agggaggaucugcuccuugucu

SEQ ID NO: 412687 - RNA, 22 nt, Human
gaugcacuugccccuccucaga

SEQ ID NO: 412688 - RNA, 20 nt, Human
uggcccuguuuucuccaggc

SEQ ID NO: 412689 - RNA, 22 nt, Human
caggaaaaaugccaggagucag

SEQ ID NO: 412690 - RNA, 18 nt, Human
cagggcuguggggucacu

SEQ ID NO: 412691 - RNA, 22 nt, Human
aggcagcagacuguuaaucaga

SEQ ID NO: 412692 - RNA, 22 nt, Human
agagccugucaauuguaaagag

SEQ ID NO: 412693 - RNA, 22 nt, Human
gccacccccaaguagguggucu

SEQ ID NO: 412694 - RNA, 17 nt, Human
aaucuguuuacagucag

SEQ ID NO: 412695 - RNA, 22 nt, Human
cucuggaguucucaugaggaac

SEQ ID NO: 412696 - RNA, 22 nt, Human
uuucacaugguacugccuguuu

SEQ ID NO: 412697 - RNA, 22 nt, Human
aggaccuguguuuuccuugaau

SEQ ID NO: 412698 - RNA, 22 nt, Human
aagcagcagaccugauuuugaa

SEQ ID NO: 412699 - RNA, 22 nt, Human
caggugucaaaauacuaagugg

SEQ ID NO: 412700 - RNA, 22 nt, Human
cagggugccaaagaacaaauau

SEQ ID NO: 412701 - RNA, 22 nt, Human
ggcagaccucuccagccccaca

SEQ ID NO: 412702 - RNA, 22 nt, Human
cagagcagagugauuguucugg

SEQ ID NO: 412703 - RNA, 22 nt, Human
agcugagcauuugauccaccuc

SEQ ID NO: 412704 - RNA, 22 nt, Human
aggaggaggugggacacaguga

SEQ ID NO: 412705 - RNA, 22 nt, Human
gaagagcuaaaggcacaggcuu

SEQ ID NO: 412706 - RNA, 21 nt, Human
cccagggaagccgcagucacc

SEQ ID NO: 412707 - RNA, 22 nt, Human
uucaggaugcagagguuguagu

SEQ ID NO: 412708 - RNA, 22 nt, Human
uuguuacagcagugauuucaga

SEQ ID NO: 412709 - RNA, 22 nt, Human
guuuuccacuggauuguuugga

SEQ ID NO: 412710 - RNA, 19 nt, Human
guggccucggagcgcgcgg

SEQ ID NO: 412711 - RNA, 22 nt, Human
gauccucuuuuccuaggaaggu

SEQ ID NO: 412712 - RNA, 22 nt, Human
uccuucagcuuauuucuuagga

SEQ ID NO: 412713 - RNA, 18 nt, Human
cugagggcagccccuggg

SEQ ID NO: 412714 - RNA, 22 nt, Human
uuaauuuuaaccuguuuguguc

SEQ ID NO: 412715 - RNA, 19 nt, Human
agggccaggauucuggaac

SEQ ID NO: 412716 - RNA, 22 nt, Human
ucaaaguuuguggcaauuuauu

SEQ ID NO: 412717 - RNA, 22 nt, Human
uucacagauguauuggaacucc

SEQ ID NO: 412718 - RNA, 22 nt, Human
uggagaagcuguagguggacuc

SEQ ID NO: 412719 - RNA, 22 nt, Human
ccuccugggccuugcucuguga

SEQ ID NO: 412720 - RNA, 22 nt, Human
uuuauguacauauccacaagga

SEQ ID NO: 412721 - RNA, 22 nt, Human
aggcacugugcagucccaagca

SEQ ID NO: 412722 - RNA, 22 nt, Human
uuuuaucaaucauuaagacauu

SEQ ID NO: 412723 - RNA, 22 nt, Human
gaggcugcggggaggagccugc

SEQ ID NO: 412724 - RNA, 22 nt, Human
cugcagugaaaucaggaagcaa

SEQ ID NO: 412725 - RNA, 22 nt, Human
gggcaugagaggcaggcaagug

SEQ ID NO: 412726 - RNA, 18 nt, Human
gcccugguggagcuggug

SEQ ID NO: 412727 - RNA, 22 nt, Human
agggcugagacuaaggccagau

SEQ ID NO: 412728 - RNA, 22 nt, Human
uggcugagaaguucugguggga

SEQ ID NO: 412729 - RNA, 22 nt, Human
ucagguguuagaagaaauuuca

SEQ ID NO: 412730 - RNA, 22 nt, Human
cuuuauuccuacaagauuuucu

SEQ ID NO: 412731 - RNA, 22 nt, Human
guaugcaucgacucaagucuga

SEQ ID NO: 412732 - RNA, 22 nt, Human
uugaaaguccuucuugaguuac

SEQ ID NO: 412733 - RNA, 22 nt, Human
ucuauuugcugguugcuucugu

SEQ ID NO: 412734 - RNA, 22 nt, Human
ucuuagaaaugaaguucuuucu

SEQ ID NO: 412735 - RNA, 22 nt, Human
ugagggcugcuuccagagcuag

SEQ ID NO: 412736 - RNA, 22 nt, Human
ggccagaggccauccuccugcu

SEQ ID NO: 412737 - RNA, 22 nt, Human
uuuaucacagaauaagaaguca

SEQ ID NO: 412738 - RNA, 22 nt, Human
agggucagggagugaguauuua

SEQ ID NO: 412739 - RNA, 21 nt, Human
aacuuuagaaagacugggaag

SEQ ID NO: 412740 - RNA, 22 nt, Human
gaggcucaguuauuuuagccug

SEQ ID NO: 412741 - RNA, 22 nt, Human
uaccuuuugcuuauuaugacac

SEQ ID NO: 412742 - RNA, 22 nt, Human
ucaggaaagaagaugcucagug

SEQ ID NO: 412743 - RNA, 22 nt, Human
caagauggagaagcagcaaggg

SEQ ID NO: 412744 - RNA, 22 nt, Human
gcaggcucuucuuucugcccag

SEQ ID NO: 412745 - RNA, 22 nt, Human
gcuguccugggaacaggcacua

SEQ ID NO: 412746 - RNA, 22 nt, Human
auaaaaguuuccaaucaugccu

SEQ ID NO: 412747 - RNA, 22 nt, Human
auuguaucuugucauuaugcau

SEQ ID NO: 412748 - RNA, 22 nt, Human
cugaggcugggcugaggguaua

SEQ ID NO: 412749 - RNA, 22 nt, Human
agcugucagugcugugccugua

SEQ ID NO: 412750 - RNA, 22 nt, Human
uggcccugugugcaggcugcac

SEQ ID NO: 412751 - RNA, 22 nt, Human
cuggccuggcaggggaccucua

SEQ ID NO: 412752 - RNA, 22 nt, Human
uauuucugggaguucagaaauu

SEQ ID NO: 412753 - RNA, 23 nt, Human
gccugggacugguagugugaccu

SEQ ID NO: 412754 - RNA, 22 nt, Human
guuauugcaguauagaggucua

SEQ ID NO: 412755 - RNA, 22 nt, Human
cagcuggaucccugcagaacuu

SEQ ID NO: 412756 - RNA, 21 nt, Human
ggugggcacaggagagcagag

SEQ ID NO: 412757 - RNA, 22 nt, Human
aguccagugucaaggugccauu

SEQ ID NO: 412758 - RNA, 20 nt, Human
gcucccagccugcagucccc

SEQ ID NO: 412759 - RNA, 22 nt, Human
aagcgccacgagaagcuggacc

SEQ ID NO: 412760 - RNA, 22 nt, Human
cagagugaaaacugagcucaaa

SEQ ID NO: 412761 - RNA, 21 nt, Human
agccugcaauguagguaccgg

SEQ ID NO: 412762 - RNA, 22 nt, Human
acuuugugcccaacagaaagaa

SEQ ID NO: 412763 - RNA, 22 nt, Human
guuaaauucgaugauggauaaa

SEQ ID NO: 412764 - RNA, 22 nt, Human
aaucagaaaauucaguggaauu

SEQ ID NO: 412765 - RNA, 22 nt, Human
gaaggccugugguagugagacg

SEQ ID NO: 412766 - RNA, 22 nt, Human
acuaaagaagccaaaguuuucu

SEQ ID NO: 412767 - RNA, 22 nt, Human
agugcccuggcccagcuggacc

SEQ ID NO: 412768 - RNA, 22 nt, Human
gugcagcugugugagagcucca

SEQ ID NO: 412769 - RNA, 22 nt, Human
ucugccugccagucugguccuc

SEQ ID NO: 412770 - RNA, 22 nt, Human
ggcucagguuaccagucccucc

SEQ ID NO: 412771 - RNA, 22 nt, Human
ugggcagagucauacaggagac

SEQ ID NO: 412772 - RNA, 22 nt, Human
acagagaugcaaguguguauuu

SEQ ID NO: 412773 - RNA, 22 nt, Human
cugaggcaguuuaauuuuugaa

SEQ ID NO: 412774 - RNA, 22 nt, Human
ugacccugcuucuuggugcagg

SEQ ID NO: 412775 - RNA, 23 nt, Human
ccugucugugcuggguggacaca

SEQ ID NO: 412776 - RNA, 22 nt, Human
agggcuggaggguacuaguuua

SEQ ID NO: 412777 - RNA, 22 nt, Human
agagcuguucagcagccagguu

SEQ ID NO: 412778 - RNA, 20 nt, Human
ggucccugcccucugucauc

SEQ ID NO: 412779 - RNA, 22 nt, Human
aaguucaagcucugccuaaaau

SEQ ID NO: 412780 - RNA, 22 nt, Human
gcguggugcugcccugcacaca

SEQ ID NO: 412781 - RNA, 22 nt, Human
aggagucagauuguuugaaugu

SEQ ID NO: 412782 - RNA, 22 nt, Human
agaacagcagcacgucaagcug

SEQ ID NO: 412783 - RNA, 22 nt, Human
gggcaggaggcuaauucugcau

SEQ ID NO: 412784 - RNA, 21 nt, Human
auuuccaaggguaccuaagau

SEQ ID NO: 412785 - RNA, 22 nt, Human
uaaacaucugucauguguuuau

SEQ ID NO: 412786 - RNA, 22 nt, Human
uccuugaauggacauuacacug

SEQ ID NO: 412787 - RNA, 22 nt, Human
uuugaaaauuagacacaggcua

SEQ ID NO: 412788 - RNA, 22 nt, Human
ggaaccaggaguuacacgaguu

SEQ ID NO: 412789 - RNA, 23 nt, Human
uccagcagccaagaaggguagaa

SEQ ID NO: 412790 - RNA, 22 nt, Human
agaccauagggaccucagguug

SEQ ID NO: 412791 - RNA, 22 nt, Human
ccugccuguacuagagacccag

SEQ ID NO: 412792 - RNA, 22 nt, Human
gagccuggauugucaccgacuu

SEQ ID NO: 412793 - RNA, 22 nt, Human
uauaguacauggaaucuucaua

SEQ ID NO: 412794 - RNA, 22 nt, Human
uucagagagaccaaguggcgug

SEQ ID NO: 412795 - RNA, 22 nt, Human
ucuacugcacuggugucucauc

SEQ ID NO: 412796 - RNA, 19 nt, Human
ggcccaaguacugagugcc

SEQ ID NO: 412797 - RNA, 22 nt, Human
uccuucagccaugggcucucca

SEQ ID NO: 412798 - RNA, 22 nt, Human
uaccugcaaaguuccuuuugcc

SEQ ID NO: 412799 - RNA, 22 nt, Human
uggcugccuagucccucagccu

SEQ ID NO: 412800 - RNA, 19 nt, Human
gggaccugacuaauuggca

SEQ ID NO: 412801 - RNA, 22 nt, Human
agcuggccuuagugagcaccug

SEQ ID NO: 412802 - RNA, 22 nt, Human
uuuaucuuuggaucuucagaaa

SEQ ID NO: 412803 - RNA, 22 nt, Human
auucaaguggcugcuauguuaa

SEQ ID NO: 412804 - RNA, 22 nt, Human
cugaggccagcugcagagcucu

SEQ ID NO: 412805 - RNA, 22 nt, Human
gguccccguggaggcuggagcg

SEQ ID NO: 412806 - RNA, 17 nt, Human
agcugagcuggccaggg

SEQ ID NO: 412807 - RNA, 22 nt, Human
ugccaggccacguagcuucaag

SEQ ID NO: 412808 - RNA, 22 nt, Human
gcuuuccuggcccugucccugc

SEQ ID NO: 412809 - RNA, 22 nt, Human
uggcugagagcaauugacucug

SEQ ID NO: 412810 - RNA, 22 nt, Human
uaggagaggugaauggcacacu

SEQ ID NO: 412811 - RNA, 18 nt, Human
cauaauuuucuuucuuua

SEQ ID NO: 412812 - RNA, 22 nt, Human
ugccuggcaagaggggcuggcu

SEQ ID NO: 412813 - RNA, 19 nt, Human
caaguucuggagauuaggg

SEQ ID NO: 412814 - RNA, 22 nt, Human
uucaggaugacaccauguccag

SEQ ID NO: 412815 - RNA, 22 nt, Human
cccagggacagaugggcagcua

SEQ ID NO: 412816 - RNA, 21 nt, Human
agcucagccgggcacaguggc

SEQ ID NO: 412817 - RNA, 22 nt, Human
caguuucugggcguucacaggu

SEQ ID NO: 412818 - RNA, 22 nt, Human
gaggucaggcuugcagcagggu

SEQ ID NO: 412819 - RNA, 22 nt, Human
ucccugggccuccugcuaugca

SEQ ID NO: 412820 - RNA, 22 nt, Human
ucagaggacgcacuaggguugu

SEQ ID NO: 412821 - RNA, 22 nt, Human
ugaagguggcauaggagagaug

SEQ ID NO: 412822 - RNA, 22 nt, Human
ugaagcaggcauugacugauga

SEQ ID NO: 412823 - RNA, 22 nt, Human
cucacugugaccucagcagaca

SEQ ID NO: 412824 - RNA, 22 nt, Human
uccaggcauuccagccauucca

SEQ ID NO: 412825 - RNA, 22 nt, Human
ucucucagcuuugagaccugcu

SEQ ID NO: 412826 - RNA, 22 nt, Human
uuugaaagaauuuauguacuuu

SEQ ID NO: 412827 - RNA, 22 nt, Human
uuuauuauguacaggcacuaua

SEQ ID NO: 412828 - RNA, 22 nt, Human
uucuugauuucaugcaguuaag

SEQ ID NO: 412829 - RNA, 22 nt, Human
acuuuggaucugauguaaucag

SEQ ID NO: 412830 - RNA, 22 nt, Human
cacaggaggaggccagagcgua

SEQ ID NO: 412831 - RNA, 22 nt, Human
gggcacagcugcuacccagugc

SEQ ID NO: 412832 - RNA, 22 nt, Human
acaugcauucucuaaaagcaaa

SEQ ID NO: 412833 - RNA, 22 nt, Human
uauauagaaaagcagauguugg

SEQ ID NO: 412834 - RNA, 22 nt, Human
auccaaagauggaaagaacuuu

SEQ ID NO: 412835 - RNA, 22 nt, Human
agagaagacuuacagccacagu

SEQ ID NO: 412836 - RNA, 22 nt, Human
gcuguacaggguuauccuuucc

SEQ ID NO: 412837 - RNA, 22 nt, Human
aacauuucagcaaauaagaaca

SEQ ID NO: 412838 - RNA, 22 nt, Human
acacuaauuaagcugcuuuacu

SEQ ID NO: 412839 - RNA, 22 nt, Human
acagggccaggugagaggugcu

SEQ ID NO: 412840 - RNA, 22 nt, Human
uuuuccucuguuauuaguguga

SEQ ID NO: 412841 - RNA, 22 nt, Human
ugcagaagcagagccgguggcc

SEQ ID NO: 412842 - RNA, 22 nt, Human
acucaggaaaaauguagugaua

SEQ ID NO: 412843 - RNA, 22 nt, Human
gcucaggaucccaggggugugc

SEQ ID NO: 412844 - RNA, 22 nt, Human
cuuagggaaucuuagagcugga

SEQ ID NO: 412845 - RNA, 22 nt, Human
uggcagagaugaagaguuguuu

SEQ ID NO: 412846 - RNA, 22 nt, Human
gcugagagugagcacuggauau

SEQ ID NO: 412847 - RNA, 22 nt, Human
uggcugggugcuauccaguacu

SEQ ID NO: 412848 - RNA, 22 nt, Human
agaaaauauucauugagaggcu

SEQ ID NO: 412849 - RNA, 22 nt, Human
gccucaggacuggcauacucau

SEQ ID NO: 412850 - RNA, 22 nt, Human
cuucccugauaagagccucaga

SEQ ID NO: 412851 - RNA, 21 nt, Human
ugauccuuucccccauguugc

SEQ ID NO: 412852 - RNA, 22 nt, Human
aagcugcagacccccugucuca

SEQ ID NO: 412853 - RNA, 22 nt, Human
ggcaguggguuccccaaggcac

SEQ ID NO: 412854 - RNA, 22 nt, Human
acaccagggccuagccagggcg

SEQ ID NO: 412855 - RNA, 22 nt, Human
ccaagaugaucuuuacaguguu

SEQ ID NO: 412856 - RNA, 22 nt, Human
caauuucucuuuauaucucaca

SEQ ID NO: 412857 - RNA, 22 nt, Human
gacuuuggcaucuagacauugu

SEQ ID NO: 412858 - RNA, 19 nt, Human
uggcagaggcaguuuguac

SEQ ID NO: 412859 - RNA, 19 nt, Human
uccuucagucagaucuggg

SEQ ID NO: 412860 - RNA, 22 nt, Human
cauccagggcagccauggccug

SEQ ID NO: 412861 - RNA, 22 nt, Human
aucaggaagccagucuaaugga

SEQ ID NO: 412862 - RNA, 22 nt, Human
agcuggugcucaggggcaugga

SEQ ID NO: 412863 - RNA, 21 nt, Human
aagccagcccacagugguuug

SEQ ID NO: 412864 - RNA, 22 nt, Human
uaucuacaggugucagguaaga

SEQ ID NO: 412865 - RNA, 22 nt, Human
aagaacuuccuaauauauuuuc

SEQ ID NO: 412866 - RNA, 22 nt, Human
caaaguccauaguuuacaauag

SEQ ID NO: 412867 - RNA, 22 nt, Human
gccuguccuggaugcucugcaa

SEQ ID NO: 412868 - RNA, 22 nt, Human
ggaagccaggcugggggaucug

SEQ ID NO: 412869 - RNA, 22 nt, Human
cugaggagagaucacguggugu

SEQ ID NO: 412870 - RNA, 22 nt, Human
agaauuguugggguaauaaaag

SEQ ID NO: 412871 - RNA, 22 nt, Human
ccucagggaaugggaggcuggg

SEQ ID NO: 412872 - RNA, 22 nt, Human
gucugucucucuccagagugca

SEQ ID NO: 412873 - RNA, 22 nt, Human
cuuggcagcuuuuggaggagcc

SEQ ID NO: 412874 - RNA, 22 nt, Human
ucucccaggcugcccuguggac

SEQ ID NO: 412875 - RNA, 22 nt, Human
uucaggaucacuaaacccucca

SEQ ID NO: 412876 - RNA, 22 nt, Human
ugaggccugucauugucuuguu

SEQ ID NO: 412877 - RNA, 19 nt, Human
ggcagacacaguugacaug

SEQ ID NO: 412878 - RNA, 22 nt, Human
aaagcucacaguaauacaaggc

SEQ ID NO: 412879 - RNA, 22 nt, Human
ccugggcuggaguacagcagug

SEQ ID NO: 412880 - RNA, 22 nt, Human
ggucucagcuggaguccuuggu

SEQ ID NO: 412881 - RNA, 22 nt, Human
ugucucaguucccuucucugga

SEQ ID NO: 412882 - RNA, 22 nt, Human
ggcagugagcuggagggaagga

SEQ ID NO: 412883 - RNA, 22 nt, Human
uaccuugggguuuuguugcucu

SEQ ID NO: 412884 - RNA, 22 nt, Human
gcaggggaguccacucuaugca

SEQ ID NO: 412885 - RNA, 22 nt, Human
gaaugcuaagcaugugggaguu

SEQ ID NO: 412886 - RNA, 18 nt, Human
ggcuguggacaagauuag

SEQ ID NO: 412887 - RNA, 18 nt, Human
aaagaaggauuggagagc

SEQ ID NO: 412888 - RNA, 22 nt, Human
ggggccagcacugugccuuugu

SEQ ID NO: 412889 - RNA, 22 nt, Human
aaggcugaguaaaacagagaac

SEQ ID NO: 412890 - RNA, 22 nt, Human
agaaugcaagauaaacuuuauu

SEQ ID NO: 412891 - RNA, 22 nt, Human
aggcaggucacaugcuuggcga

SEQ ID NO: 412892 - RNA, 22 nt, Human
aaaggucaagcuggacucaggu

SEQ ID NO: 412893 - RNA, 22 nt, Human
cagagcagacguugagauuaag

SEQ ID NO: 412894 - RNA, 22 nt, Human
cagacuugacggcagcugcuuu

SEQ ID NO: 412895 - RNA, 22 nt, Human
ccagagcccgggaccuggacuu

SEQ ID NO: 412896 - RNA, 22 nt, Human
agcagggcuugccgcuuguccu

SEQ ID NO: 412897 - RNA, 22 nt, Human
gagcugccaagauuacaaucag

SEQ ID NO: 412898 - RNA, 22 nt, Human
uccugaggaaaguucaugaaug

SEQ ID NO: 412899 - RNA, 20 nt, Human
uccagcugggaacagcugau

SEQ ID NO: 412900 - RNA, 22 nt, Human
ugucccagucaaggcugucauc

SEQ ID NO: 412901 - RNA, 22 nt, Human
aucagagaaguuucacuggcau

SEQ ID NO: 412902 - RNA, 22 nt, Human
cugucugucaccaaaacagacu

SEQ ID NO: 412903 - RNA, 21 nt, Human
ucccagggccaggugccauca

SEQ ID NO: 412904 - RNA, 22 nt, Human
uguauuuugugaggaucacucu

SEQ ID NO: 412905 - RNA, 22 nt, Human
gcugugugcucacguaguggaa

SEQ ID NO: 412906 - RNA, 22 nt, Human
gggugggguucaggaaucuuca

SEQ ID NO: 412907 - RNA, 22 nt, Human
ucagcuuuuuggauugcccaag

SEQ ID NO: 412908 - RNA, 22 nt, Human
aaugagacacgugaagcagaug

SEQ ID NO: 412909 - RNA, 22 nt, Human
agauaacuuuuggguauucaug

SEQ ID NO: 412910 - RNA, 22 nt, Human
gaguggggcguggauccagcgu

SEQ ID NO: 412911 - RNA, 18 nt, Human
gaggauggaaggagaugc

SEQ ID NO: 412912 - RNA, 22 nt, Human
gccagcucagaugcaggaagga

SEQ ID NO: 412913 - RNA, 22 nt, Human
cagucacauugcccugcauuua

SEQ ID NO: 412914 - RNA, 22 nt, Human
uaaggccaggcuguggucggca

SEQ ID NO: 412915 - RNA, 22 nt, Human
gcuggaccaggugugcacaggc

SEQ ID NO: 412916 - RNA, 22 nt, Human
aacccuggggcagcugcuaggg

SEQ ID NO: 412917 - RNA, 22 nt, Human
aggcacugacucaagggagcca

SEQ ID NO: 412918 - RNA, 22 nt, Human
aagauggagcacgagcagaagc

SEQ ID NO: 412919 - RNA, 22 nt, Human
agggccugggucuguacuccuc

SEQ ID NO: 412920 - RNA, 22 nt, Human
agucuucucauuucacaugcuu

SEQ ID NO: 412921 - RNA, 22 nt, Human
agccuucacugggaccuuggau

SEQ ID NO: 412922 - RNA, 22 nt, Human
aaaugcacagagccuuagagau

SEQ ID NO: 412923 - RNA, 22 nt, Human
uugggcaaaguguuucuggagc

SEQ ID NO: 412924 - RNA, 22 nt, Human
cacucacuuauuucuaacagaa

SEQ ID NO: 412925 - RNA, 22 nt, Human
uuugaaagagcugauacaugaa

SEQ ID NO: 412926 - RNA, 22 nt, Human
aaaguuacuaucacaaugaaau

SEQ ID NO: 412927 - RNA, 22 nt, Human
ccaggcaggcuagaauguaaau

SEQ ID NO: 412928 - RNA, 17 nt, Human
uccagagcacagagcuc

SEQ ID NO: 412929 - RNA, 22 nt, Human
cagcaauaagccagguuagaca

SEQ ID NO: 412930 - RNA, 22 nt, Human
aguggcaggaaaguggaagaga

SEQ ID NO: 412931 - RNA, 22 nt, Human
gagcaggcuugcagagaagggg

SEQ ID NO: 412932 - RNA, 22 nt, Human
uggcucagucauggaugaguaa

SEQ ID NO: 412933 - RNA, 22 nt, Human
ugccugcugcuaagcucuuugu

SEQ ID NO: 412934 - RNA, 22 nt, Human
uaaguuuuaagcaaucugauaa

SEQ ID NO: 412935 - RNA, 22 nt, Human
aaguguuuauuuauaacgaucu

SEQ ID NO: 412936 - RNA, 22 nt, Human
acucugccaucccaggugcugu

SEQ ID NO: 412937 - RNA, 15 nt, Human
aggcacugugggacc

SEQ ID NO: 412938 - RNA, 22 nt, Human
cagcuugugcaaagguccuggg

SEQ ID NO: 412939 - RNA, 22 nt, Human
cauguuuuguguacagaauauu

SEQ ID NO: 412940 - RNA, 22 nt, Human
cugcucuggggaagccagaugu

SEQ ID NO: 412941 - RNA, 22 nt, Human
cuggcaggcagacuucugcaag

SEQ ID NO: 412942 - RNA, 22 nt, Human
gagugcaggccugagcaccauc

SEQ ID NO: 412943 - RNA, 22 nt, Human
acaaaguuugugguauuccaag

SEQ ID NO: 412944 - RNA, 22 nt, Human
aggagguggccugagcgugccc

SEQ ID NO: 412945 - RNA, 22 nt, Human
cugugaauuaaguauuguuauc

SEQ ID NO: 412946 - RNA, 22 nt, Human
auaaaaguaggaccaacuuaca

SEQ ID NO: 412947 - RNA, 22 nt, Human
cagcagcaacaacggaagccuu

SEQ ID NO: 412948 - RNA, 22 nt, Human
gcaguggauccaaugguaucuu

SEQ ID NO: 412949 - RNA, 22 nt, Human
ucuggcucuccagugcucuuag

SEQ ID NO: 412950 - RNA, 22 nt, Human
ccaggacuuauuacaguauaac

SEQ ID NO: 412951 - RNA, 22 nt, Human
uuugcauuacuugacuuuaguu

SEQ ID NO: 412952 - RNA, 22 nt, Human
agcagcaugaugacagagucuc

SEQ ID NO: 412953 - RNA, 20 nt, Human
agaggcuuccuugggaggag

SEQ ID NO: 412954 - RNA, 22 nt, Human
uuaaacagagucugaaauguaa

SEQ ID NO: 412955 - RNA, 22 nt, Human
ucagguggcuucggggaguggc

SEQ ID NO: 412956 - RNA, 22 nt, Human
ugguccagacauuucugaggua

SEQ ID NO: 412957 - RNA, 22 nt, Human
ccacaggcugcugcaggucccg

SEQ ID NO: 412958 - RNA, 22 nt, Human
accuggcaugaagcaugccuua

SEQ ID NO: 412959 - RNA, 22 nt, Human
ucuuugucugaacagggacauu

SEQ ID NO: 412960 - RNA, 22 nt, Human
auugaaaauauaauucuaggag

SEQ ID NO: 412961 - RNA, 22 nt, Human
auacaaauuuauagaugcauuu

SEQ ID NO: 412962 - RNA, 19 nt, Human
agucucaguguacagaggc

SEQ ID NO: 412963 - RNA, 22 nt, Human
acagugucugacacauuguagc

SEQ ID NO: 412964 - RNA, 22 nt, Human
ugggccuggguuccuccugggc

SEQ ID NO: 412965 - RNA, 19 nt, Human
ugcagaagacacaguggug

SEQ ID NO: 412966 - RNA, 22 nt, Human
aaugauugcaaacauugagaac

SEQ ID NO: 412967 - RNA, 22 nt, Human
gguccagggaacuuugaaggau

SEQ ID NO: 412968 - RNA, 22 nt, Human
augaggcaggagugcaguggca

SEQ ID NO: 412969 - RNA, 22 nt, Human
aaacaguauuaucaauauauuu

SEQ ID NO: 412970 - RNA, 22 nt, Human
uccugccucaggcucuggagua

SEQ ID NO: 412971 - RNA, 22 nt, Human
cuggagguaauguuauuuuugu

SEQ ID NO: 412972 - RNA, 22 nt, Human
gcuggccaggugcuuugguucu

SEQ ID NO: 412973 - RNA, 22 nt, Human
acagaauucucucugcagaggc

SEQ ID NO: 412974 - RNA, 22 nt, Human
gccugagccgccugagcggcgg

SEQ ID NO: 412975 - RNA, 22 nt, Human
cauguuaauaugcauugaguac

SEQ ID NO: 412976 - RNA, 22 nt, Human
gugucccaaagauuagaaauca

SEQ ID NO: 412977 - RNA, 22 nt, Human
aguggcagagaccccagccagc

SEQ ID NO: 412978 - RNA, 22 nt, Human
caggugcucccagagaagugcu

SEQ ID NO: 412979 - RNA, 22 nt, Human
uuucuuaggcucuaaaaugacu

SEQ ID NO: 412980 - RNA, 22 nt, Human
gagcaggcucugccuguguguc

SEQ ID NO: 412981 - RNA, 17 nt, Human
ucucuuucccuuucugc

SEQ ID NO: 412982 - RNA, 22 nt, Human
aagggugggcaccgccagguca

SEQ ID NO: 412983 - RNA, 22 nt, Human
cccuggagucagguuggccugg

SEQ ID NO: 412984 - RNA, 21 nt, Human
agcagcugggcaacauggagg

SEQ ID NO: 412985 - RNA, 22 nt, Human
cagcugaagaaagagugguuag

SEQ ID NO: 412986 - RNA, 22 nt, Human
ucucagaggcccgacguucucc

SEQ ID NO: 412987 - RNA, 22 nt, Human
ucucagagaacaguuggugcuu

SEQ ID NO: 412988 - RNA, 22 nt, Human
cuggugguucaggagaauggcu

SEQ ID NO: 412989 - RNA, 22 nt, Human
uuaugcuaguauaguccuuaga

SEQ ID NO: 412990 - RNA, 22 nt, Human
gcaggaagaggcucgaagcccc

SEQ ID NO: 412991 - RNA, 22 nt, Human
caggaacagcaccaggagcuag

SEQ ID NO: 412992 - RNA, 22 nt, Human
uccaggaggaggaaggcugcca

SEQ ID NO: 412993 - RNA, 22 nt, Human
cauagcaacagcaucaagucaa

SEQ ID NO: 412994 - RNA, 22 nt, Human
ugaggcagcaauugauuauuca

SEQ ID NO: 412995 - RNA, 22 nt, Human
aggugcugccccgagaaggaug

SEQ ID NO: 412996 - RNA, 20 nt, Human
agauggugaaggccagggag

SEQ ID NO: 412997 - RNA, 21 nt, Human
acccuggguucuccauacccu

SEQ ID NO: 412998 - RNA, 22 nt, Human
ggcuucucucuucacauggcuu

SEQ ID NO: 412999 - RNA, 22 nt, Human
aaacaacuucugcacuaugggu

SEQ ID NO: 413000 - RNA, 22 nt, Human
cuauuacaauucugcaaggagu

SEQ ID NO: 413001 - RNA, 20 nt, Human
ugacucugcaaccgucucuc

SEQ ID NO: 413002 - RNA, 22 nt, Human
aguggagaagaggauggucucc

SEQ ID NO: 413003 - RNA, 22 nt, Human
gguuucaaugagaagugcuugu

SEQ ID NO: 413004 - RNA, 22 nt, Human
ccaccaggacagcccugagggg

SEQ ID NO: 413005 - RNA, 22 nt, Human
acagagcuuaggaugacuccca

SEQ ID NO: 413006 - RNA, 17 nt, Human
gcauccaguaacaugcc

SEQ ID NO: 413007 - RNA, 22 nt, Human
cuugaaagucacaugcagcccu

SEQ ID NO: 413008 - RNA, 22 nt, Human
cuuccucaugugcaaugcaagc

SEQ ID NO: 413009 - RNA, 22 nt, Human
cuccuuccugccccagugauaa

SEQ ID NO: 413010 - RNA, 22 nt, Human
gccuugcuuugcuucuggacag

SEQ ID NO: 413011 - RNA, 22 nt, Human
ugaauaaucuuggguauuaaua

SEQ ID NO: 413012 - RNA, 22 nt, Human
ccugugcccucagccuggcucu

SEQ ID NO: 413013 - RNA, 22 nt, Human
gcuuccuaaaugcacagggcag

SEQ ID NO: 413014 - RNA, 22 nt, Human
ugagagugguucagcucagaag

SEQ ID NO: 413015 - RNA, 22 nt, Human
gcagcugaagcugcaguuccag

SEQ ID NO: 413016 - RNA, 20 nt, Human
cuaucuccuggcgugccuuc

SEQ ID NO: 413017 - RNA, 22 nt, Human
gccugggaacucugaucuccug

SEQ ID NO: 413018 - RNA, 22 nt, Human
agggcaugcuggaggagagaca

SEQ ID NO: 413019 - RNA, 22 nt, Human
guggcucuaggugagcauggag

SEQ ID NO: 413020 - RNA, 22 nt, Human
cagggccacccucugcugggug

SEQ ID NO: 413021 - RNA, 22 nt, Human
ugccagggugucaggagagcua

SEQ ID NO: 413022 - RNA, 22 nt, Human
cauacuuugggauaagagugga

SEQ ID NO: 413023 - RNA, 22 nt, Human
auugaaaaaugacuauugcuua

SEQ ID NO: 413024 - RNA, 22 nt, Human
cacaggcagccuuguagaagaa

SEQ ID NO: 413025 - RNA, 22 nt, Human
cuggagugaagcuuauuuuuca

SEQ ID NO: 413026 - RNA, 22 nt, Human
uuccucagccaaggcugggauc

SEQ ID NO: 413027 - RNA, 22 nt, Human
gucaugccuggcuucuuagaca

SEQ ID NO: 413028 - RNA, 22 nt, Human
cagcccagcacuaaguagauuu

SEQ ID NO: 413029 - RNA, 17 nt, Human
gggcagggacuccuggg

SEQ ID NO: 413030 - RNA, 22 nt, Human
acagaaauugggcaaauggaag

SEQ ID NO: 413031 - RNA, 22 nt, Human
auaaacugaagggaacacugag

SEQ ID NO: 413032 - RNA, 22 nt, Human
uaucaacauuaauauuuucugg

SEQ ID NO: 413033 - RNA, 22 nt, Human
agccucucugaugugacagcua

SEQ ID NO: 413034 - RNA, 22 nt, Human
aagauuuaccacuuuauucaag

SEQ ID NO: 413035 - RNA, 19 nt, Human
ccuggcccugcugcgcggg

SEQ ID NO: 413036 - RNA, 22 nt, Human
ugaaagguguccaauauuucuc

SEQ ID NO: 413037 - RNA, 22 nt, Human
acugcuuuagaccuagagcucu

SEQ ID NO: 413038 - RNA, 22 nt, Human
aaggacuccaauucuuucaucu

SEQ ID NO: 413039 - RNA, 22 nt, Human
ggugcucaagagggcauccucu

SEQ ID NO: 413040 - RNA, 22 nt, Human
gcagcugcuguggcaucaagcu

SEQ ID NO: 413041 - RNA, 22 nt, Human
uggcaggauuugcccggaagga

SEQ ID NO: 413042 - RNA, 21 nt, Human
gcagagccugagguucuugag

SEQ ID NO: 413043 - RNA, 23 nt, Human
uccuuccuuugagaggcuccauc

SEQ ID NO: 413044 - RNA, 22 nt, Human
ugagagugaaaugucacauguc

SEQ ID NO: 413045 - RNA, 23 nt, Human
ccugaagggucaggguccucagc

SEQ ID NO: 413046 - RNA, 22 nt, Human
aggggagccccugguccuggug

SEQ ID NO: 413047 - RNA, 22 nt, Human
cagugcugggcagaggagagcg

SEQ ID NO: 413048 - RNA, 22 nt, Human
uaccaaauguaaucauucuaau

SEQ ID NO: 413049 - RNA, 22 nt, Human
ucucaggagccacagcgggagu

SEQ ID NO: 413050 - RNA, 22 nt, Human
guggcagagguuccucagugug

SEQ ID NO: 413051 - RNA, 22 nt, Human
ucuguaucuaauuuuacaguag

SEQ ID NO: 413052 - RNA, 22 nt, Human
ggcugccaggagaagcucagug

SEQ ID NO: 413053 - RNA, 22 nt, Human
cucagagcccaggguacacccg

SEQ ID NO: 413054 - RNA, 22 nt, Human
gugccuuccccgguggucuguu

SEQ ID NO: 413055 - RNA, 22 nt, Human
uggggcuggcuauugucucccu

SEQ ID NO: 413056 - RNA, 20 nt, Human
cagaaggucuaagcuuuaga

SEQ ID NO: 413057 - RNA, 22 nt, Human
ugaggcuguucuaccagggcca

SEQ ID NO: 413058 - RNA, 22 nt, Human
ucugccuguugcuagaauguca

SEQ ID NO: 413059 - RNA, 22 nt, Human
ccagggcaggagaaagacucac

SEQ ID NO: 413060 - RNA, 22 nt, Human
gaggcugcuuugaugacaggag

SEQ ID NO: 413061 - RNA, 22 nt, Human
accaugaugggaagcucagggc

SEQ ID NO: 413062 - RNA, 22 nt, Human
uaaauucuacaacuucaaagau

SEQ ID NO: 413063 - RNA, 22 nt, Human
agucacaguuccuacccaguaa

SEQ ID NO: 413064 - RNA, 22 nt, Human
gaguggagcaaaagagguagau

SEQ ID NO: 413065 - RNA, 22 nt, Human
uccuugaauugugccacuuacc

SEQ ID NO: 413066 - RNA, 22 nt, Human
auuugucuagugguauucacgu

SEQ ID NO: 413067 - RNA, 22 nt, Human
acuuucauuuguaauaaacuuc

SEQ ID NO: 413068 - RNA, 22 nt, Human
cacaggcuugucagcaugaggc

SEQ ID NO: 413069 - RNA, 22 nt, Human
cagcagggcccccgggugcgcc

SEQ ID NO: 413070 - RNA, 22 nt, Human
cuggcucuucagugcuugguuc

SEQ ID NO: 413071 - RNA, 22 nt, Human
ugccucagaguugucccuacca

SEQ ID NO: 413072 - RNA, 22 nt, Human
gggacuggaguagaggccggug

SEQ ID NO: 413073 - RNA, 20 nt, Human
acagaauaugcugguugugg

SEQ ID NO: 413074 - RNA, 22 nt, Human
ugccagucucacccuggguccu

SEQ ID NO: 413075 - RNA, 22 nt, Human
cacagccugcugcacucaagaa

SEQ ID NO: 413076 - RNA, 22 nt, Human
caugggcaccuuaaaaugaggc

SEQ ID NO: 413077 - RNA, 22 nt, Human
ugugcccauuccacuugaguac

SEQ ID NO: 413078 - RNA, 22 nt, Human
ugagcuuacuucuguacacaga

SEQ ID NO: 413079 - RNA, 22 nt, Human
gcugucacucuccggccuuccc

SEQ ID NO: 413080 - RNA, 22 nt, Human
ucaagagaagugcuccacagua

SEQ ID NO: 413081 - RNA, 22 nt, Human
uccugcaggggcugaggaacca

SEQ ID NO: 413082 - RNA, 23 nt, Human
ggcagagagcauggcuggggccc

SEQ ID NO: 413083 - RNA, 22 nt, Human
uguacaguaggaacuuguuauu

SEQ ID NO: 413084 - RNA, 22 nt, Human
ucucuucuagcuucuugugguu

SEQ ID NO: 413085 - RNA, 22 nt, Human
agggcccaggacagcaucaggg

SEQ ID NO: 413086 - RNA, 22 nt, Human
ucuucacaugaccuucaugucu

SEQ ID NO: 413087 - RNA, 22 nt, Human
gggcugagccacagcuuuuguu

SEQ ID NO: 413088 - RNA, 22 nt, Human
ggcugccuggaccuccucuuuc

SEQ ID NO: 413089 - RNA, 22 nt, Human
uaaggccagcaugaaugcagca

SEQ ID NO: 413090 - RNA, 22 nt, Human
cagccccucacagagcuguccu

SEQ ID NO: 413091 - RNA, 22 nt, Human
ucucagugagcuuuucuauguu

SEQ ID NO: 413092 - RNA, 22 nt, Human
aggcuguccucucuugcucagu

SEQ ID NO: 413093 - RNA, 22 nt, Human
agggacagucuacuguucacug

SEQ ID NO: 413094 - RNA, 22 nt, Human
uaagaacagauaaaguuucccc

SEQ ID NO: 413095 - RNA, 22 nt, Human
gggcagugguuacacagcugag

SEQ ID NO: 413096 - RNA, 22 nt, Human
gacaagacugguuuauuuaagg

SEQ ID NO: 413097 - RNA, 22 nt, Human
aaacacuagcaggaagcacuga

SEQ ID NO: 413098 - RNA, 22 nt, Human
acucuugucucaacuuuuguau

SEQ ID NO: 413099 - RNA, 20 nt, Human
gaggcucugggcauggcgcc

SEQ ID NO: 413100 - RNA, 22 nt, Human
agggcugccugcucugcauuga

SEQ ID NO: 413101 - RNA, 22 nt, Human
aaggcagaaauucaacuacugg

SEQ ID NO: 413102 - RNA, 22 nt, Human
cguguggucccggcaaggcaag

SEQ ID NO: 413103 - RNA, 23 nt, Human
uggcucagcuaguuuuccauuuc

SEQ ID NO: 413104 - RNA, 22 nt, Human
agcucauggugcuaucucaggg

SEQ ID NO: 413105 - RNA, 22 nt, Human
ucuggcuccacucugugcaugc

SEQ ID NO: 413106 - RNA, 22 nt, Human
gucccaggugggcuccaccucu

SEQ ID NO: 413107 - RNA, 22 nt, Human
uuccuguauucuaaagggaaag

SEQ ID NO: 413108 - RNA, 22 nt, Human
caggggcucuaaugcaugauca

SEQ ID NO: 413109 - RNA, 22 nt, Human
agggccagggaagcuguauuuu

SEQ ID NO: 413110 - RNA, 23 nt, Human
cuggcuccgaagacuccaggauc

SEQ ID NO: 413111 - RNA, 22 nt, Human
cagguggggcgcccucaggcag

SEQ ID NO: 413112 - RNA, 22 nt, Human
ggcaggcaguguggugugaaac

SEQ ID NO: 413113 - RNA, 21 nt, Human
ugucagaaauaagcaugugau

SEQ ID NO: 413114 - RNA, 22 nt, Human
uggugcuguggaggggcagaag

SEQ ID NO: 413115 - RNA, 22 nt, Human
gaacuguaguuaauacuacaca

SEQ ID NO: 413116 - RNA, 22 nt, Human
ucauguuauugacucauaauau

SEQ ID NO: 413117 - RNA, 22 nt, Human
cuguaaaacacuguaguaucug

SEQ ID NO: 413118 - RNA, 22 nt, Human
uuuuuccuaagcaguggagcug

SEQ ID NO: 413119 - RNA, 22 nt, Human
gccugccuuuguaugacccuga

SEQ ID NO: 413120 - RNA, 22 nt, Human
uuagggaaggcugcugucagcu

SEQ ID NO: 413121 - RNA, 22 nt, Human
ugaggggagaagcagcagccug

SEQ ID NO: 413122 - RNA, 22 nt, Human
ggccucugguucacagggagga

SEQ ID NO: 413123 - RNA, 22 nt, Human
gagggcugauaaaugcgcaugg

SEQ ID NO: 413124 - RNA, 17 nt, Human
agcugccagggagugug

SEQ ID NO: 413125 - RNA, 22 nt, Human
ucucagagcucacaccuccugg

SEQ ID NO: 413126 - RNA, 22 nt, Human
cagcucuguaaauuccuucauc

SEQ ID NO: 413127 - RNA, 22 nt, Human
ucagugcagaauagugaugcau

SEQ ID NO: 413128 - RNA, 22 nt, Human
gcagagugggagcccagggcug

SEQ ID NO: 413129 - RNA, 22 nt, Human
cuggccuggggccucagcugcu

SEQ ID NO: 413130 - RNA, 22 nt, Human
uucccaggcugugcuaccagag

SEQ ID NO: 413131 - RNA, 22 nt, Human
uggccacccagcugacgccuuc

SEQ ID NO: 413132 - RNA, 22 nt, Human
gggcaggagagaacagucaugg

SEQ ID NO: 413133 - RNA, 22 nt, Human
uggagggcaucuguggucaggc

SEQ ID NO: 413134 - RNA, 22 nt, Human
cuauuauuagauaaucuacuug

SEQ ID NO: 413135 - RNA, 22 nt, Human
guccucuggaagaugaguucuu

SEQ ID NO: 413136 - RNA, 22 nt, Human
guuauuuucauuggcucagacu

SEQ ID NO: 413137 - RNA, 22 nt, Human
cuucagggugacgcaggcugca

SEQ ID NO: 413138 - RNA, 22 nt, Human
gagguggccucaagcagucuuc

SEQ ID NO: 413139 - RNA, 22 nt, Human
gcccauggacacccaagugcca

SEQ ID NO: 413140 - RNA, 22 nt, Human
cuggagccggcgagccccagcc

SEQ ID NO: 413141 - RNA, 22 nt, Human
gaggcucauugcauugugcauu

SEQ ID NO: 413142 - RNA, 22 nt, Human
augugcauuaaaugucaauguu

SEQ ID NO: 413143 - RNA, 22 nt, Human
agagcauccaucggccaggacc

SEQ ID NO: 413144 - RNA, 22 nt, Human
auguguaaaaagugcuuaauau

SEQ ID NO: 413145 - RNA, 22 nt, Human
acaucuguuugagaaaaagaag

SEQ ID NO: 413146 - RNA, 22 nt, Human
uuccacuuaguggaagggcaug

SEQ ID NO: 413147 - RNA, 22 nt, Human
ucccagaggucucugcugguuc

SEQ ID NO: 413148 - RNA, 22 nt, Human
ggguuggggcccagcagucugc

SEQ ID NO: 413149 - RNA, 22 nt, Human
aaaaguaauugcaauuuuguag

SEQ ID NO: 413150 - RNA, 22 nt, Human
gaccauuuguugaaaagauuau

SEQ ID NO: 413151 - RNA, 22 nt, Human
caggcuggagugaguguagugg

SEQ ID NO: 413152 - RNA, 22 nt, Human
ucucagggccccaaaggcuagu

SEQ ID NO: 413153 - RNA, 22 nt, Human
uaauccaaaacugaaucugugg

SEQ ID NO: 413154 - RNA, 22 nt, Human
cagguggcuucucccuaggcca

SEQ ID NO: 413155 - RNA, 22 nt, Human
gaggaggcuggcgccgccugcc

SEQ ID NO: 413156 - RNA, 22 nt, Human
uuaugcuaaaugaaucaaguca

SEQ ID NO: 413157 - RNA, 22 nt, Human
cugcacagagcagggcagacac

SEQ ID NO: 413158 - RNA, 22 nt, Human
aggagcagaacuguuguggagg

SEQ ID NO: 413159 - RNA, 22 nt, Human
uacauguaagacaugagacucu

SEQ ID NO: 413160 - RNA, 22 nt, Human
gcccugucccuuggcuucuagg

SEQ ID NO: 413161 - RNA, 22 nt, Human
gcugauuauuacaugucugugg

SEQ ID NO: 413162 - RNA, 22 nt, Human
caggcacuucugcugcuugucu

SEQ ID NO: 413163 - RNA, 22 nt, Human
cagucucagaggugggaguggg

SEQ ID NO: 413164 - RNA, 22 nt, Human
uucaaugagcccaagaacguga

SEQ ID NO: 413165 - RNA, 22 nt, Human
aaguucuacuguggguaaaaug

SEQ ID NO: 413166 - RNA, 22 nt, Human
gcagcaggcuuuucauaccuug

SEQ ID NO: 413167 - RNA, 22 nt, Human
uccuggaggggacagcaugggc

SEQ ID NO: 413168 - RNA, 22 nt, Human
caggggcuuuuccucuauaagg

SEQ ID NO: 413169 - RNA, 22 nt, Human
caaagguauucucauuuuggaa

SEQ ID NO: 413170 - RNA, 22 nt, Human
agaugagggguagaaaggacuu

SEQ ID NO: 413171 - RNA, 22 nt, Human
cuccagggcagcauggcagugg

SEQ ID NO: 413172 - RNA, 22 nt, Human
cagcagguauguuuguucagca

SEQ ID NO: 413173 - RNA, 21 nt, Human
aagcuucccugcucuccaggg

SEQ ID NO: 413174 - RNA, 22 nt, Human
ugcuucugggcaaaugugugug

SEQ ID NO: 413175 - RNA, 22 nt, Human
ucagaguguuuuacuaaacaag

SEQ ID NO: 413176 - RNA, 22 nt, Human
guugaaagaugucuugguuccc

SEQ ID NO: 413177 - RNA, 22 nt, Human
cuuuggaagugaccacaauccu

SEQ ID NO: 413178 - RNA, 22 nt, Human
agagccugaggccaggaaaaug

SEQ ID NO: 413179 - RNA, 21 nt, Human
ucacacacguuuccaagggca

SEQ ID NO: 413180 - RNA, 22 nt, Human
auacuguuucucuucuacauga

SEQ ID NO: 413181 - RNA, 22 nt, Human
gaggaaaauauucagggagguu

SEQ ID NO: 413182 - RNA, 22 nt, Human
uugggugcugucauggggcacg

SEQ ID NO: 413183 - RNA, 22 nt, Human
cuuaaauuuucaucuacaagaa

SEQ ID NO: 413184 - RNA, 22 nt, Human
uuuguucauuuugagcucauca

SEQ ID NO: 413185 - RNA, 22 nt, Human
ggcuccacccugcuuccagaag

SEQ ID NO: 413186 - RNA, 22 nt, Human
uagcagagcagggaucagagcc

SEQ ID NO: 413187 - RNA, 22 nt, Human
aggucauuguuaagucaccaua

SEQ ID NO: 413188 - RNA, 22 nt, Human
auaaggcagugacuucaucuau

SEQ ID NO: 413189 - RNA, 21 nt, Human
ucacaucuauguuaagcaaac

SEQ ID NO: 413190 - RNA, 22 nt, Human
gaggcaggguguugauuacaga

SEQ ID NO: 413191 - RNA, 23 nt, Human
ugggggugcacgggccacaucuu

SEQ ID NO: 413192 - RNA, 22 nt, Human
aagggcucuguugccauuucag

SEQ ID NO: 413193 - RNA, 22 nt, Human
ucucccuggagcccugaagcau

SEQ ID NO: 413194 - RNA, 17 nt, Human
aggcuggcucacaggga

SEQ ID NO: 413195 - RNA, 22 nt, Human
gucaccagcaccaaugccacau

SEQ ID NO: 413196 - RNA, 22 nt, Human
cagaaggcuuuguggaguagac

SEQ ID NO: 413197 - RNA, 22 nt, Human
cagcagcuucuguugaucagaa

SEQ ID NO: 413198 - RNA, 22 nt, Human
ugucuuuagagucacaaaacca

SEQ ID NO: 413199 - RNA, 22 nt, Human
uuuaucuuuaggacuuugcaga

SEQ ID NO: 413200 - RNA, 22 nt, Human
cagagggagcccuccaggagca

SEQ ID NO: 413201 - RNA, 22 nt, Human
aagggcugccagggggugccag

SEQ ID NO: 413202 - RNA, 22 nt, Human
auaguggugagcugcauuuaug

SEQ ID NO: 413203 - RNA, 22 nt, Human
uagcagggaagaugaucagaau

SEQ ID NO: 413204 - RNA, 22 nt, Human
uggaggcaacugaagauguagu

SEQ ID NO: 413205 - RNA, 22 nt, Human
uggccugucuuguugugcuaga

SEQ ID NO: 413206 - RNA, 19 nt, Human
cagaguccuugaccagucc

SEQ ID NO: 413207 - RNA, 22 nt, Human
gacagaggcaagaccagaagcc

SEQ ID NO: 413208 - RNA, 22 nt, Human
gaggcucugugaugugccaggc

SEQ ID NO: 413209 - RNA, 22 nt, Human
aggcacuguggaagacaugguu

SEQ ID NO: 413210 - RNA, 22 nt, Human
gcacagggccuggcacauaaga

SEQ ID NO: 413211 - RNA, 22 nt, Human
aagaggaaaugauugacuauau

SEQ ID NO: 413212 - RNA, 22 nt, Human
gcagagaaaguuuuguccucag

SEQ ID NO: 413213 - RNA, 22 nt, Human
aaggagagguuguccguguugu

SEQ ID NO: 413214 - RNA, 22 nt, Human
uguguuccuucgucuucccuuc

SEQ ID NO: 413215 - RNA, 20 nt, Human
aguaggggaaugcaagagca

SEQ ID NO: 413216 - RNA, 22 nt, Human
agguuacagugauuauagguuu

SEQ ID NO: 413217 - RNA, 22 nt, Human
gucccuaguggaaagacaugau

SEQ ID NO: 413218 - RNA, 19 nt, Human
ugagaaggcaguggggagc

SEQ ID NO: 413219 - RNA, 19 nt, Human
uagcugccuguuaccucca

SEQ ID NO: 413220 - RNA, 22 nt, Human
gccuguuggguaacagaguuca

SEQ ID NO: 413221 - RNA, 18 nt, Human
gcugccugcauuccucac

SEQ ID NO: 413222 - RNA, 22 nt, Human
aacaucuuuuuguuugcugaaa

SEQ ID NO: 413223 - RNA, 22 nt, Human
ucagcugaguucuagagcacuc

SEQ ID NO: 413224 - RNA, 22 nt, Human
uaaaaguggauaagcuguagga

SEQ ID NO: 413225 - RNA, 22 nt, Human
uccuugaaugaagagaggugac

SEQ ID NO: 413226 - RNA, 22 nt, Human
agcugccauccgaggugucaga

SEQ ID NO: 413227 - RNA, 22 nt, Human
aguguggcugcguagggcucuc

SEQ ID NO: 413228 - RNA, 22 nt, Human
acaggcagguaauuuacauauu

SEQ ID NO: 413229 - RNA, 21 nt, Human
aggccucuucauggccaugau

SEQ ID NO: 413230 - RNA, 22 nt, Human
cccaggaguuugaguucagcau

SEQ ID NO: 413231 - RNA, 22 nt, Human
cagcuggcagaaccugcaucca

SEQ ID NO: 413232 - RNA, 22 nt, Human
uugaaaggugacauuguuagag

SEQ ID NO: 413233 - RNA, 22 nt, Human
ccuguccuccaagagcacaucu

SEQ ID NO: 413234 - RNA, 22 nt, Human
uugaaaaaauugguagaggaug

SEQ ID NO: 413235 - RNA, 22 nt, Human
ucaaaauuucagcacuagcccu

SEQ ID NO: 413236 - RNA, 22 nt, Human
ucuccuggucaccucagaaguc

SEQ ID NO: 413237 - RNA, 22 nt, Human
uccacauucucuguuacagaua

SEQ ID NO: 413238 - RNA, 22 nt, Human
gcucaggauuucauccaugugu

SEQ ID NO: 413239 - RNA, 22 nt, Human
uauuuuagguaauauccauugu

SEQ ID NO: 413240 - RNA, 22 nt, Human
uucugucuucccacugaggagc

SEQ ID NO: 413241 - RNA, 22 nt, Human
ugagaagcugcuugugcuguau

SEQ ID NO: 413242 - RNA, 22 nt, Human
agccucugcuuaugcaaaggua

SEQ ID NO: 413243 - RNA, 22 nt, Human
uccugggcuguggccccgggca

SEQ ID NO: 413244 - RNA, 22 nt, Human
ugaagccuuguguggccucucu

SEQ ID NO: 413245 - RNA, 18 nt, Human
aguggucuguuauaucau

SEQ ID NO: 413246 - RNA, 22 nt, Human
agauggggcugaaaguuccaau

SEQ ID NO: 413247 - RNA, 22 nt, Human
uggcagggccuaccccaauauc

SEQ ID NO: 413248 - RNA, 22 nt, Human
aaggccagacaggaccacaucu

SEQ ID NO: 413249 - RNA, 22 nt, Human
gcucagagcacucagacucagc

SEQ ID NO: 413250 - RNA, 22 nt, Human
cagguacacucccuugugcuga

SEQ ID NO: 413251 - RNA, 22 nt, Human
uaggaaaaauacagaauuauau

SEQ ID NO: 413252 - RNA, 22 nt, Human
acagagcauauaaagugcuuug

SEQ ID NO: 413253 - RNA, 22 nt, Human
ccagccacugggccacugccag

SEQ ID NO: 413254 - RNA, 22 nt, Human
aagaaacugaaaguggcuucau

SEQ ID NO: 413255 - RNA, 22 nt, Human
uuuaaaauuuagaccucuccac

SEQ ID NO: 413256 - RNA, 22 nt, Human
augggcaguuaggaggccagga

SEQ ID NO: 413257 - RNA, 22 nt, Human
ugcccaggaucuggcgaugcuc

SEQ ID NO: 413258 - RNA, 22 nt, Human
aguuuucuguucuacaauuuga

SEQ ID NO: 413259 - RNA, 22 nt, Human
uccaagaagucaucuaaacugu

SEQ ID NO: 413260 - RNA, 22 nt, Human
uaugcauagguaucuauacuca

SEQ ID NO: 413261 - RNA, 22 nt, Human
cccugcagagagugcuuuugug

SEQ ID NO: 413262 - RNA, 19 nt, Human
ucaaaugccaaugucacag

SEQ ID NO: 413263 - RNA, 22 nt, Human
uccauauuaacuaaaacuagaa

SEQ ID NO: 413264 - RNA, 22 nt, Human
gaagagcugcucagaacaugau

SEQ ID NO: 413265 - RNA, 22 nt, Human
ggcugccuucccugagccccgg

SEQ ID NO: 413266 - RNA, 22 nt, Human
cagagacuggagugcaguggcg

SEQ ID NO: 413267 - RNA, 22 nt, Human
cacaagagagugcgcguugcaa

SEQ ID NO: 413268 - RNA, 19 nt, Human
ugcagcucagggcaggggc

SEQ ID NO: 413269 - RNA, 22 nt, Human
ugggcucugugccagguuggug

SEQ ID NO: 413270 - RNA, 22 nt, Human
aucuggcuugacuuugcgacuu

SEQ ID NO: 413271 - RNA, 22 nt, Human
aggcugcagugcagguaggauu

SEQ ID NO: 413272 - RNA, 22 nt, Human
agagcagauggagcuggaagag

SEQ ID NO: 413273 - RNA, 22 nt, Human
cccuucccuucugggagaucca

SEQ ID NO: 413274 - RNA, 20 nt, Human
uauuugaaauggccaagugu

SEQ ID NO: 413275 - RNA, 18 nt, Human
aguaguggguuuagcuuc

SEQ ID NO: 413276 - RNA, 22 nt, Human
gugaagagcuguugcagagauu

SEQ ID NO: 413277 - RNA, 22 nt, Human
auucagcaaugagcuuggauuu

SEQ ID NO: 413278 - RNA, 20 nt, Human
uguauauuuucugguguaaa

SEQ ID NO: 413279 - RNA, 22 nt, Human
agcuuuaugcuuccuacaagcu

SEQ ID NO: 413280 - RNA, 22 nt, Human
ucaaggagcccacagucuaaug

SEQ ID NO: 413281 - RNA, 22 nt, Human
cagagccaugguaugggcuugu

SEQ ID NO: 413282 - RNA, 22 nt, Human
acugucaccaucagagcgggaa

SEQ ID NO: 413283 - RNA, 22 nt, Human
ccucaugguacuuacuguagcu

SEQ ID NO: 413284 - RNA, 22 nt, Human
gguugccggggcaggacuggaa

SEQ ID NO: 413285 - RNA, 20 nt, Human
accccagccccucuaucuga

SEQ ID NO: 413286 - RNA, 22 nt, Human
uggcccugcuuaugucucucuu

SEQ ID NO: 413287 - RNA, 22 nt, Human
gcuguacauucuguggguuugg

SEQ ID NO: 413288 - RNA, 22 nt, Human
ucuguggauuuuaguguucaug

SEQ ID NO: 413289 - RNA, 22 nt, Human
cuggccugaggccgccuucaga

SEQ ID NO: 413290 - RNA, 22 nt, Human
cuuccucugcggcgccgggcgc

SEQ ID NO: 413291 - RNA, 22 nt, Human
uaguggagaaguggagucugug

SEQ ID NO: 413292 - RNA, 22 nt, Human
gugggaugcaguggugaguggc

SEQ ID NO: 413293 - RNA, 22 nt, Human
cagccuguagaauacaguaaau

SEQ ID NO: 413294 - RNA, 22 nt, Human
ucugggagguaaccaugcugau

SEQ ID NO: 413295 - RNA, 22 nt, Human
aggcuggcuggcaggggacaca

SEQ ID NO: 413296 - RNA, 22 nt, Human
gccuccuggauuuuagugccau

SEQ ID NO: 413297 - RNA, 22 nt, Human
gggcagguguugucaaucuaau

SEQ ID NO: 413298 - RNA, 22 nt, Human
agggcugcugaggaagccuugc

SEQ ID NO: 413299 - RNA, 21 nt, Human
ggugucaguuuuggucauuag

SEQ ID NO: 413300 - RNA, 22 nt, Human
aucuuaaucgaguccaugaaaa

SEQ ID NO: 413301 - RNA, 22 nt, Human
gcaugguggccuuaggguagcc

SEQ ID NO: 413302 - RNA, 21 nt, Human
uaucuacuggugucuuucaga

SEQ ID NO: 413303 - RNA, 22 nt, Human
ggccucacccaucggugccuuu

SEQ ID NO: 413304 - RNA, 22 nt, Human
gacagccaugcacuucugcugu

SEQ ID NO: 413305 - RNA, 22 nt, Human
ugagccuguccugugcauguga

SEQ ID NO: 413306 - RNA, 22 nt, Human
agccacaccuguccugccagcu

SEQ ID NO: 413307 - RNA, 22 nt, Human
aucaggauucaccccagagcug

SEQ ID NO: 413308 - RNA, 23 nt, Human
uccucccaaauuucagccucauu

SEQ ID NO: 413309 - RNA, 22 nt, Human
cucuuaguuuaucuuugacaaa

SEQ ID NO: 413310 - RNA, 21 nt, Human
cagagcugaaggguguagugu

SEQ ID NO: 413311 - RNA, 22 nt, Human
ugcuuuauucaggguuuacccc

SEQ ID NO: 413312 - RNA, 21 nt, Human
ugcucaugcaaugcaugucca

SEQ ID NO: 413313 - RNA, 22 nt, Human
uggcucugggcaccguguccac

SEQ ID NO: 413314 - RNA, 22 nt, Human
gagucacauuaauuuaauuuua

SEQ ID NO: 413315 - RNA, 22 nt, Human
gcuugcuggugccugcaggcuc

SEQ ID NO: 413316 - RNA, 22 nt, Human
cuuugcauacaauuuuuagaaa

SEQ ID NO: 413317 - RNA, 22 nt, Human
auuucugauaaacguaagcugc

SEQ ID NO: 413318 - RNA, 22 nt, Human
aaauuaguacauugcaaagucc

SEQ ID NO: 413319 - RNA, 22 nt, Human
gugcugucguggaacugggcug

SEQ ID NO: 413320 - RNA, 22 nt, Human
cuauugaauuaacuauuaaagu

SEQ ID NO: 413321 - RNA, 22 nt, Human
uacugccuggagcauuggugcu

SEQ ID NO: 413322 - RNA, 22 nt, Human
gucucccacuuucuggccucuu

SEQ ID NO: 413323 - RNA, 22 nt, Human
aaaugcagauuuugaugcagca

SEQ ID NO: 413324 - RNA, 22 nt, Human
cagagcugacccaaggauugaa

SEQ ID NO: 413325 - RNA, 22 nt, Human
aaaugcaggaaauuaugcuuuu

SEQ ID NO: 413326 - RNA, 22 nt, Human
ucagaggaucaugucccuacuc

SEQ ID NO: 413327 - RNA, 19 nt, Human
ggcugucucggcccagcca

SEQ ID NO: 413328 - RNA, 22 nt, Human
uacaagagguauauagaaacag

SEQ ID NO: 413329 - RNA, 22 nt, Human
cagaacauucacucauaugugg

SEQ ID NO: 413330 - RNA, 22 nt, Human
gcaugcugcaccagagccucuc

SEQ ID NO: 413331 - RNA, 22 nt, Human
ucagagugugagacauauugga

SEQ ID NO: 413332 - RNA, 22 nt, Human
ucaaaggcauugccaauaagua

SEQ ID NO: 413333 - RNA, 22 nt, Human
gcugcucuccauggccgugagu

SEQ ID NO: 413334 - RNA, 22 nt, Human
gcagggcagcuuagucccuguc

SEQ ID NO: 413335 - RNA, 22 nt, Human
gcagagccugugucugagcaaa

SEQ ID NO: 413336 - RNA, 22 nt, Human
gcugcccuaauaucacauguua

SEQ ID NO: 413337 - RNA, 22 nt, Human
acaggacauguaccaggugguc

SEQ ID NO: 413338 - RNA, 22 nt, Human
gggagagguuacccgagcaacu

SEQ ID NO: 413339 - RNA, 22 nt, Human
ccauaaucuggcuuugagagag

SEQ ID NO: 413340 - RNA, 22 nt, Human
acagcuggcaggggggcaugaa

SEQ ID NO: 413341 - RNA, 22 nt, Human
gucucaguaagaaaggcuccug

SEQ ID NO: 413342 - RNA, 22 nt, Human
aaaggucagacuuaggcugggc

SEQ ID NO: 413343 - RNA, 22 nt, Human
cuguuuauaaauagaggggagu

SEQ ID NO: 413344 - RNA, 22 nt, Human
gaggagagaagcuaacggugcu

SEQ ID NO: 413345 - RNA, 22 nt, Human
gucccacugggcaacuagaaaa

SEQ ID NO: 413346 - RNA, 20 nt, Human
cugaacacagaauaagcaca

SEQ ID NO: 413347 - RNA, 22 nt, Human
gaguuauucuagguccuuugua

SEQ ID NO: 413348 - RNA, 22 nt, Human
ggcuucuccagguacugagcau

SEQ ID NO: 413349 - RNA, 22 nt, Human
uccccagccgugaaggagagga

SEQ ID NO: 413350 - RNA, 22 nt, Human
acagccuguuugaucuggugcu

SEQ ID NO: 413351 - RNA, 23 nt, Human
ugucccagagggagggauaggcu

SEQ ID NO: 413352 - RNA, 21 nt, Human
gaacauuuggguuguuucuac

SEQ ID NO: 413353 - RNA, 22 nt, Human
ugccaggaggaggugggacaga

SEQ ID NO: 413354 - RNA, 22 nt, Human
gggagcuguaagggacagguag

SEQ ID NO: 413355 - RNA, 20 nt, Human
gcauccagacacccagcugc

SEQ ID NO: 413356 - RNA, 22 nt, Human
aggcacugugcuucuuauaugu

SEQ ID NO: 413357 - RNA, 22 nt, Human
cugccuggaaugccagcuucuc

SEQ ID NO: 413358 - RNA, 22 nt, Human
aucugccuggcuccaggugagc

SEQ ID NO: 413359 - RNA, 22 nt, Human
ugaagcagaggggucuugagcu

SEQ ID NO: 413360 - RNA, 22 nt, Human
cugcuucuccaaaguaggacuu

SEQ ID NO: 413361 - RNA, 22 nt, Human
gcucccuccaugaggcagaccg

SEQ ID NO: 413362 - RNA, 22 nt, Human
cugggugguuuugaugugaauu

SEQ ID NO: 413363 - RNA, 22 nt, Human
cgaggcaggcaggcggaggaua

SEQ ID NO: 413364 - RNA, 22 nt, Human
auugacaaggaaacuauaccag

SEQ ID NO: 413365 - RNA, 22 nt, Human
ggaagggcaauaaaaucucagg

SEQ ID NO: 413366 - RNA, 22 nt, Human
acaagaauguagauuaguuaag

SEQ ID NO: 413367 - RNA, 21 nt, Human
ggcagccugacccccagagag

SEQ ID NO: 413368 - RNA, 22 nt, Human
ccucagagguuuucauucugua

SEQ ID NO: 413369 - RNA, 22 nt, Human
cuggagcuggcuuccuuccacu

SEQ ID NO: 413370 - RNA, 22 nt, Human
ucccacugugaauccaaggccu

SEQ ID NO: 413371 - RNA, 22 nt, Human
ugaaggaaaugacggcagaaga

SEQ ID NO: 413372 - RNA, 22 nt, Human
aucuacagugcacaggacagcc

SEQ ID NO: 413373 - RNA, 22 nt, Human
aaggagagagcuuugcuggaac

SEQ ID NO: 413374 - RNA, 22 nt, Human
cauuaucucuucuauaugcuag

SEQ ID NO: 413375 - RNA, 22 nt, Human
gggcagguguuuccaaggugag

SEQ ID NO: 413376 - RNA, 22 nt, Human
aaguucaagucugcaucuuuuu

SEQ ID NO: 413377 - RNA, 19 nt, Human
ugcuuccucaccaucuccc

SEQ ID NO: 413378 - RNA, 22 nt, Human
gaggcacauauauacagagccc

SEQ ID NO: 413379 - RNA, 22 nt, Human
uaaagguaguuuuaaaggugcu

SEQ ID NO: 413380 - RNA, 22 nt, Human
aguggcaguagaugagcugguu

SEQ ID NO: 413381 - RNA, 22 nt, Human
aggagugagcuuuggggucaga

SEQ ID NO: 413382 - RNA, 20 nt, Human
uuggucagugguucaguuug

SEQ ID NO: 413383 - RNA, 20 nt, Human
ccucaagcagacugacagcu

SEQ ID NO: 413384 - RNA, 22 nt, Human
gggcagcucucacagcagccaa

SEQ ID NO: 413385 - RNA, 22 nt, Human
ccaggagucuggaugagguguc

SEQ ID NO: 413386 - RNA, 19 nt, Human
ucagaggauuuggcuauga

SEQ ID NO: 413387 - RNA, 22 nt, Human
cuuauguaaacuacagauaaua

SEQ ID NO: 413388 - RNA, 22 nt, Human
cuuucucugugugguaaagggc

SEQ ID NO: 413389 - RNA, 22 nt, Human
gagggugguggcuuaaggugcu

SEQ ID NO: 413390 - RNA, 22 nt, Human
acauuucucuuagaguuggacu

SEQ ID NO: 413391 - RNA, 22 nt, Human
uggcugggccgggccuugugcc

SEQ ID NO: 413392 - RNA, 22 nt, Human
ggucucugacuuagagauggau

SEQ ID NO: 413393 - RNA, 22 nt, Human
ugaggccugaagccuggagccu

SEQ ID NO: 413394 - RNA, 22 nt, Human
aguaacuaugcuugagaaucag

SEQ ID NO: 413395 - RNA, 22 nt, Human
cuggcaggaaguuagaugguaa

SEQ ID NO: 413396 - RNA, 22 nt, Human
caggugcugcguggcggagcug

SEQ ID NO: 413397 - RNA, 22 nt, Human
ucuggcuccuggcuccacugcc

SEQ ID NO: 413398 - RNA, 22 nt, Human
ggagagaauuccauggacaugu

SEQ ID NO: 413399 - RNA, 23 nt, Human
ucagggacaugaugugucauauc

SEQ ID NO: 413400 - RNA, 22 nt, Human
ugcuuuauuuauaaaauagcaa

SEQ ID NO: 413401 - RNA, 22 nt, Human
uagagcuagcuucaaaaugcga

SEQ ID NO: 413402 - RNA, 22 nt, Human
auaaacacuucuagggcacaca

SEQ ID NO: 413403 - RNA, 22 nt, Human
cuggcuggcaaguagaacacaa

SEQ ID NO: 413404 - RNA, 19 nt, Human
auacacauacguaaacuga

SEQ ID NO: 413405 - RNA, 22 nt, Human
ggugaguugggguucacagguc

SEQ ID NO: 413406 - RNA, 19 nt, Human
ugggccugcaucugggucu

SEQ ID NO: 413407 - RNA, 22 nt, Human
cuccugguucagagagcugaga

SEQ ID NO: 413408 - RNA, 22 nt, Human
ggcugcagaggcgaucugaggu

SEQ ID NO: 413409 - RNA, 22 nt, Human
acauuucuuccuaauuaucccu

SEQ ID NO: 413410 - RNA, 20 nt, Human
agcugaggcaccugagguua

SEQ ID NO: 413411 - RNA, 22 nt, Human
cauuucuguacauguuuuggug

SEQ ID NO: 413412 - RNA, 22 nt, Human
gcuggcucagggacuagaguuu

SEQ ID NO: 413413 - RNA, 22 nt, Human
uugcugaaaacaguggguauug

SEQ ID NO: 413414 - RNA, 22 nt, Human
aaagucauguaaugauaugauu

SEQ ID NO: 413415 - RNA, 22 nt, Human
gcacagggagacagccguggcc

SEQ ID NO: 413416 - RNA, 18 nt, Human
uauauuucacacauauuc

SEQ ID NO: 413417 - RNA, 22 nt, Human
gaugauuuuaugucuugucauu

SEQ ID NO: 413418 - RNA, 22 nt, Human
cagagggcucuuggcugccugc

SEQ ID NO: 413419 - RNA, 22 nt, Human
caguagacacauuaauauggaa

SEQ ID NO: 413420 - RNA, 22 nt, Human
uccugaggcacaauccuagaau

SEQ ID NO: 413421 - RNA, 22 nt, Human
accugagggcccaaacuuggua

SEQ ID NO: 413422 - RNA, 22 nt, Human
cuauuuuaacuugauuaccucu

SEQ ID NO: 413423 - RNA, 20 nt, Human
gccugcagguuggaugggau

SEQ ID NO: 413424 - RNA, 22 nt, Human
gggaccugaggagggguuucag

SEQ ID NO: 413425 - RNA, 22 nt, Human
ccuggccucagccuagggcuga

SEQ ID NO: 413426 - RNA, 22 nt, Human
uaaaggcucguauuguugugug

SEQ ID NO: 413427 - RNA, 19 nt, Human
ggcagaagguguaggggga

SEQ ID NO: 413428 - RNA, 22 nt, Human
cagccaggcccccgagucguug

SEQ ID NO: 413429 - RNA, 22 nt, Human
agggccugggguagcuuacugc

SEQ ID NO: 413430 - RNA, 22 nt, Human
guggccuggcgagcuggcgcgg

SEQ ID NO: 413431 - RNA, 22 nt, Human
cugggguggugcaggccucaug

SEQ ID NO: 413432 - RNA, 22 nt, Human
aucaggaugaagcuguagcgaa

SEQ ID NO: 413433 - RNA, 21 nt, Human
gcucuuggaaggggcucagcu

SEQ ID NO: 413434 - RNA, 22 nt, Human
agaugcagaaaaacuaagugau

SEQ ID NO: 413435 - RNA, 22 nt, Human
uguugauuugugggcugcaaaa

SEQ ID NO: 413436 - RNA, 22 nt, Human
uuuaauuuuccucuuccuggag

SEQ ID NO: 413437 - RNA, 22 nt, Human
uaaaggcuuuuacaggagugca

SEQ ID NO: 413438 - RNA, 23 nt, Human
gugagcagcccacuaggaaugcc

SEQ ID NO: 413439 - RNA, 22 nt, Human
cuugaaagcuuugcgucuucua

SEQ ID NO: 413440 - RNA, 22 nt, Human
aggcugagccacggggcuggcu

SEQ ID NO: 413441 - RNA, 22 nt, Human
gcagcguggggcugagucagcu

SEQ ID NO: 413442 - RNA, 22 nt, Human
ugagcuuccucccugcauccau

SEQ ID NO: 413443 - RNA, 22 nt, Human
ccaggguggggcaggcccacug

SEQ ID NO: 413444 - RNA, 22 nt, Human
ucaagucuggagaucuggaacu

SEQ ID NO: 413445 - RNA, 22 nt, Human
gcugcuucucugauggagucca

SEQ ID NO: 413446 - RNA, 22 nt, Human
auugaauagaugcauuauacua

SEQ ID NO: 413447 - RNA, 22 nt, Human
ugcagcucugaacagucaugaa

SEQ ID NO: 413448 - RNA, 22 nt, Human
aguuaaagucugaaauagagaa

SEQ ID NO: 413449 - RNA, 18 nt, Human
gggcucacacaggucauc

SEQ ID NO: 413450 - RNA, 22 nt, Human
agcaggugaauuccuggaugug

SEQ ID NO: 413451 - RNA, 22 nt, Human
auugacaauguauuuguaucug

SEQ ID NO: 413452 - RNA, 22 nt, Human
gacagcagggacauguaggaag

SEQ ID NO: 413453 - RNA, 22 nt, Human
aguaacaagugccaacguuaga

SEQ ID NO: 413454 - RNA, 22 nt, Human
ugcagaaggaggaggaaaucca

SEQ ID NO: 413455 - RNA, 23 nt, Human
auauuagggagauuagcccucua

SEQ ID NO: 413456 - RNA, 22 nt, Human
cacagaaucugugacuccaaga

SEQ ID NO: 413457 - RNA, 22 nt, Human
uaaaucuccuguuuuucaucua

SEQ ID NO: 413458 - RNA, 22 nt, Human
caguguguggauccucccagga

SEQ ID NO: 413459 - RNA, 22 nt, Human
ccuggagccccucuggccagcc

SEQ ID NO: 413460 - RNA, 22 nt, Human
ccaggcucugagccucacucuu

SEQ ID NO: 413461 - RNA, 22 nt, Human
gcccaggcuagcguagagugca

SEQ ID NO: 413462 - RNA, 21 nt, Human
cagcaaaucauugggcagacu

SEQ ID NO: 413463 - RNA, 22 nt, Human
gcaggagagucugugccagguu

SEQ ID NO: 413464 - RNA, 18 nt, Human
ucagagagcagcuuuauu

SEQ ID NO: 413465 - RNA, 22 nt, Human
gcucaagggaugggagugggug

SEQ ID NO: 413466 - RNA, 22 nt, Human
aagccagguguugugguaagag

SEQ ID NO: 413467 - RNA, 22 nt, Human
gggagccacaguuuauagugau

SEQ ID NO: 413468 - RNA, 22 nt, Human
auacaucuugucagauucaugu

SEQ ID NO: 413469 - RNA, 22 nt, Human
cuggcagcguguuuaugaacau

SEQ ID NO: 413470 - RNA, 22 nt, Human
cucuccuggggagcacacacac

SEQ ID NO: 413471 - RNA, 22 nt, Human
cugcuggagguuggagcaugca

SEQ ID NO: 413472 - RNA, 21 nt, Human
uccauuguuuucccaggguuu

SEQ ID NO: 413473 - RNA, 22 nt, Human
aaauguucuacuuugauaauua

SEQ ID NO: 413474 - RNA, 22 nt, Human
auaguaacuggcauguuuauga

SEQ ID NO: 413475 - RNA, 22 nt, Human
gaagaaggugccagaggcuuac

SEQ ID NO: 413476 - RNA, 22 nt, Human
ugcagaagaccuuccagggcug

SEQ ID NO: 413477 - RNA, 22 nt, Human
uuugagaaaugggcucugugcu

SEQ ID NO: 413478 - RNA, 22 nt, Human
auggaguucugccagcgcugcu

SEQ ID NO: 413479 - RNA, 22 nt, Human
accagagcgcucaagccuuccc

SEQ ID NO: 413480 - RNA, 22 nt, Human
gugaccaucagagaauaacaaa

SEQ ID NO: 413481 - RNA, 22 nt, Human
agccagaguugaaugugagucu

SEQ ID NO: 413482 - RNA, 22 nt, Human
ucucuuucuauugcaccaugcu

SEQ ID NO: 413483 - RNA, 22 nt, Human
uuucuaguccucaugcaucauu

SEQ ID NO: 413484 - RNA, 22 nt, Human
ccuggaaggugaugguacagca

SEQ ID NO: 413485 - RNA, 22 nt, Human
augcagaaggagccaugcuugc

SEQ ID NO: 413486 - RNA, 22 nt, Human
augcagagacagauguggcaug

SEQ ID NO: 413487 - RNA, 22 nt, Human
gcugcuuccuuuccugcugacc

SEQ ID NO: 413488 - RNA, 22 nt, Human
acauuucugcaucucagagcua

SEQ ID NO: 413489 - RNA, 22 nt, Human
ggaucauuaacacauccaucac

SEQ ID NO: 413490 - RNA, 22 nt, Human
ggaggaugccaagcugugcaca

SEQ ID NO: 413491 - RNA, 22 nt, Human
aucaguuucugugaagaacaca

SEQ ID NO: 413492 - RNA, 17 nt, Human
ugguggcuggagucagg

SEQ ID NO: 413493 - RNA, 22 nt, Human
guccucuggugaaagcauuccc

SEQ ID NO: 413494 - RNA, 22 nt, Human
ugcacacaguucucaggaaaga

SEQ ID NO: 413495 - RNA, 22 nt, Human
aggggaaggccagccuguagag

SEQ ID NO: 413496 - RNA, 22 nt, Human
aggauccugcgcuuugggggag

SEQ ID NO: 413497 - RNA, 22 nt, Human
ugucaccaugccagcuucugcc

SEQ ID NO: 413498 - RNA, 22 nt, Human
ggcugcagcggauuggggauug

SEQ ID NO: 413499 - RNA, 22 nt, Human
ucucucagaggaagaggcagug

SEQ ID NO: 413500 - RNA, 22 nt, Human
auggauaauggugauaguugca

SEQ ID NO: 413501 - RNA, 22 nt, Human
uacagaauguguaucauuacca

SEQ ID NO: 413502 - RNA, 22 nt, Human
uaccucaugcuguacagcacgu

SEQ ID NO: 413503 - RNA, 22 nt, Human
acaaaggcauagugaauguuuu

SEQ ID NO: 413504 - RNA, 23 nt, Human
ugaagugaaauuucacaagggac

SEQ ID NO: 413505 - RNA, 22 nt, Human
aaauacagaguugcuuaaaagc

SEQ ID NO: 413506 - RNA, 22 nt, Human
uacauagcaaggaaaugacaga

SEQ ID NO: 413507 - RNA, 22 nt, Human
gugcuuccccaagccacagccu

SEQ ID NO: 413508 - RNA, 22 nt, Human
cucaggaguaguucagcagcug

SEQ ID NO: 413509 - RNA, 22 nt, Human
gcuugggauaugcugauguaaa

SEQ ID NO: 413510 - RNA, 22 nt, Human
aaauuauuacaagcuaguuggc

SEQ ID NO: 413511 - RNA, 23 nt, Human
uucaagauacgguuuccaggcug

SEQ ID NO: 413512 - RNA, 20 nt, Human
gggagucuggaugaaagaug

SEQ ID NO: 413513 - RNA, 22 nt, Human
uggcagcugaggggaggcuuug

SEQ ID NO: 413514 - RNA, 22 nt, Human
ugcaggcuggaggagggacuaa

SEQ ID NO: 413515 - RNA, 22 nt, Human
agggcagcaaugcagcugcugc

SEQ ID NO: 413516 - RNA, 22 nt, Human
ggaccagagaagugagcaccug

SEQ ID NO: 413517 - RNA, 22 nt, Human
gcagugaacauaacacagaagg

SEQ ID NO: 413518 - RNA, 20 nt, Human
uguucacaguaguugcugcu

SEQ ID NO: 413519 - RNA, 22 nt, Human
ugccuggcaacuguggugggcu

SEQ ID NO: 413520 - RNA, 22 nt, Human
agggcagccucucagccuaggu

SEQ ID NO: 413521 - RNA, 22 nt, Human
aauuucaaugcacucaugguug

SEQ ID NO: 413522 - RNA, 22 nt, Human
caagugucuauaucagugcuug

SEQ ID NO: 413523 - RNA, 22 nt, Human
ugugggaggaauuagaauggga

SEQ ID NO: 413524 - RNA, 22 nt, Human
uugaaagaagaagcugcgaugu

SEQ ID NO: 413525 - RNA, 22 nt, Human
cuguacucaagguaaaccagga

SEQ ID NO: 413526 - RNA, 22 nt, Human
cuagcaucagaugagaagcugu

SEQ ID NO: 413527 - RNA, 22 nt, Human
ccugggcauucuuugaguucuc

SEQ ID NO: 413528 - RNA, 22 nt, Human
cugcccugaccugccucagagu

SEQ ID NO: 413529 - RNA, 22 nt, Human
ggcucaggagaggggcuaaaag

SEQ ID NO: 413530 - RNA, 22 nt, Human
uggcccugcagaacuagccugg

SEQ ID NO: 413531 - RNA, 22 nt, Human
gggcuggcaucgguugcugaga

SEQ ID NO: 413532 - RNA, 22 nt, Human
aggcaggcuagucgcuugagcc

SEQ ID NO: 413533 - RNA, 22 nt, Human
gaggaagaagggauuagaacuc

SEQ ID NO: 413534 - RNA, 22 nt, Human
ugggccugaaggagcugcgccc

SEQ ID NO: 413535 - RNA, 22 nt, Human
gaguuauuucagaaggaaagau

SEQ ID NO: 413536 - RNA, 22 nt, Human
ggcuuuauuaacucauccguaa

SEQ ID NO: 413537 - RNA, 22 nt, Human
gccagcccagcuccaggggaaa

SEQ ID NO: 413538 - RNA, 22 nt, Human
uucaugugaucacagauuguaa

SEQ ID NO: 413539 - RNA, 22 nt, Human
uuccucagagggcgcuggggaa

SEQ ID NO: 413540 - RNA, 22 nt, Human
gaaguucaggugggaauugagc

SEQ ID NO: 413541 - RNA, 22 nt, Human
aaauugugcucacacugauauu

SEQ ID NO: 413542 - RNA, 22 nt, Human
cuggccaacuugcuuguuggca

SEQ ID NO: 413543 - RNA, 22 nt, Human
cugggaugucuauagaacacuu

SEQ ID NO: 413544 - RNA, 22 nt, Human
aaauugcaaaaguacuuuuagg

SEQ ID NO: 413545 - RNA, 22 nt, Human
uccugcagguggaugauucucu

SEQ ID NO: 413546 - RNA, 22 nt, Human
gccagagcugagugagguucuu

SEQ ID NO: 413547 - RNA, 22 nt, Human
ugcacacacaugaaguagcaug

SEQ ID NO: 413548 - RNA, 20 nt, Human
acuuuggggucuuucucaga

SEQ ID NO: 413549 - RNA, 22 nt, Human
aggcugggaaauguauuccagc

SEQ ID NO: 413550 - RNA, 21 nt, Human
ucucuggaauuagaccauguu

SEQ ID NO: 413551 - RNA, 22 nt, Human
uagaaaucagcaggcauaugua

SEQ ID NO: 413552 - RNA, 22 nt, Human
ugggcagccaucccagccucuc

SEQ ID NO: 413553 - RNA, 22 nt, Human
aaauuucuugaggcucucuagc

SEQ ID NO: 413554 - RNA, 22 nt, Human
ucagagucucccccaguuuggg

SEQ ID NO: 413555 - RNA, 22 nt, Human
uugacaagaaucguugccuugg

SEQ ID NO: 413556 - RNA, 22 nt, Human
aucuuuaguagaggaauauauu

SEQ ID NO: 413557 - RNA, 22 nt, Human
ugaagcaggaucguuugcuuca

SEQ ID NO: 413558 - RNA, 22 nt, Human
gaggggcugggguugacuccaa

SEQ ID NO: 413559 - RNA, 22 nt, Human
gcuggccugcugggcaccaccg

SEQ ID NO: 413560 - RNA, 22 nt, Human
gggaugucacugugccuggcac

SEQ ID NO: 413561 - RNA, 22 nt, Human
ggucccagaauugguuagcaca

SEQ ID NO: 413562 - RNA, 19 nt, Human
agaggccucagcagcuggc

SEQ ID NO: 413563 - RNA, 22 nt, Human
uggcucagcugucacagccugg

SEQ ID NO: 413564 - RNA, 22 nt, Human
auacuuacuuuucuucagacua

SEQ ID NO: 413565 - RNA, 22 nt, Human
aggucauuacaauuaucauuuu

SEQ ID NO: 413566 - RNA, 22 nt, Human
uccuuuggagcuugacugguag

SEQ ID NO: 413567 - RNA, 22 nt, Human
cuguuauuuagaacauggaauc

SEQ ID NO: 413568 - RNA, 23 nt, Human
caguggagacucaugcuuccuua

SEQ ID NO: 413569 - RNA, 22 nt, Human
gagggcugcaaugagacagaga

SEQ ID NO: 413570 - RNA, 22 nt, Human
cuggagaggccccaagauauuu

SEQ ID NO: 413571 - RNA, 19 nt, Human
cuuauuagagugagagcuu

SEQ ID NO: 413572 - RNA, 22 nt, Human
uccaggcaagggaggagcaugg

SEQ ID NO: 413573 - RNA, 22 nt, Human
cuucuuaaugacagauuaaaau

SEQ ID NO: 413574 - RNA, 22 nt, Human
aaguggaggccgaguucacgca

SEQ ID NO: 413575 - RNA, 22 nt, Human
ugggaggagcccucugggaagg

SEQ ID NO: 413576 - RNA, 22 nt, Human
cacagaauaaauugguaucaga

SEQ ID NO: 413577 - RNA, 22 nt, Human
agcagccacagucugggacagg

SEQ ID NO: 413578 - RNA, 22 nt, Human
cugaggcagagggcagaccaga

SEQ ID NO: 413579 - RNA, 22 nt, Human
uggcagaaguucacuaguagcu

SEQ ID NO: 413580 - RNA, 22 nt, Human
ccagggcacuuaggcccagccc

SEQ ID NO: 413581 - RNA, 22 nt, Human
agccugugugcuuuggacaggg

SEQ ID NO: 413582 - RNA, 22 nt, Human
cuuucucaaugccggaaggcac

SEQ ID NO: 413583 - RNA, 22 nt, Human
cugggaggcggagguuguagug

SEQ ID NO: 413584 - RNA, 22 nt, Human
gccuggaguucagccaaguccc

SEQ ID NO: 413585 - RNA, 22 nt, Human
guuacaaacucaggugccaaaa

SEQ ID NO: 413586 - RNA, 22 nt, Human
uuagaaagaacuuuagauauca

SEQ ID NO: 413587 - RNA, 22 nt, Human
uggguaggccaggaagcagugu

SEQ ID NO: 413588 - RNA, 17 nt, Human
agccugcugaucucaca

SEQ ID NO: 413589 - RNA, 22 nt, Human
ucuggccuacuggaguccauga

SEQ ID NO: 413590 - RNA, 22 nt, Human
cccaggcacacugaagugacau

SEQ ID NO: 413591 - RNA, 22 nt, Human
uuguuaaaaauagauuuccagg

SEQ ID NO: 413592 - RNA, 22 nt, Human
accaugggucagccaccucagc

SEQ ID NO: 413593 - RNA, 23 nt, Human
uuacuuuugcaccaaccuaauau

SEQ ID NO: 413594 - RNA, 18 nt, Human
cguuuuuccgggauugca

SEQ ID NO: 413595 - RNA, 22 nt, Human
acagcagcauaaacugacuaag

SEQ ID NO: 413596 - RNA, 22 nt, Human
auguaucaauuaucugucugca

SEQ ID NO: 413597 - RNA, 22 nt, Human
agccaggacguugcucagcucc

SEQ ID NO: 413598 - RNA, 22 nt, Human
aggcugugcaauuaggguaaga

SEQ ID NO: 413599 - RNA, 22 nt, Human
uccuucaaagcuccuagugagc

SEQ ID NO: 413600 - RNA, 22 nt, Human
ugggcagaauugugguaguuaa

SEQ ID NO: 413601 - RNA, 22 nt, Human
gcuggcugaggucuagcucuuu

SEQ ID NO: 413602 - RNA, 22 nt, Human
gucucagggacugcuucugggg

SEQ ID NO: 413603 - RNA, 22 nt, Human
agcucccagucuccucuccaug

SEQ ID NO: 413604 - RNA, 22 nt, Human
guauuuuacugcucaaagcucu

SEQ ID NO: 413605 - RNA, 22 nt, Human
gacauaaaccuugagauauuaa

SEQ ID NO: 413606 - RNA, 22 nt, Human
uccugagaaggcacagcuugca

SEQ ID NO: 413607 - RNA, 22 nt, Human
cagaauggcuuuuauggcucag

SEQ ID NO: 413608 - RNA, 17 nt, Human
agcagcuggcacaggag

SEQ ID NO: 413609 - RNA, 22 nt, Human
gcagcuuggauuucuguaguuu

SEQ ID NO: 413610 - RNA, 22 nt, Human
uagagaaaagcagggaucagga

SEQ ID NO: 413611 - RNA, 22 nt, Human
acagcagcacuauugacauuuu

SEQ ID NO: 413612 - RNA, 22 nt, Human
ucuggcucaggucagacaggga

SEQ ID NO: 413613 - RNA, 21 nt, Human
gccaccccuggcacaggugcu

SEQ ID NO: 413614 - RNA, 22 nt, Human
gaggcaguggucugaugcaagg

SEQ ID NO: 413615 - RNA, 23 nt, Human
uugaaggagaaagcuuucuuggu

SEQ ID NO: 413616 - RNA, 22 nt, Human
aguuucuaccgguacauucagg

SEQ ID NO: 413617 - RNA, 22 nt, Human
cugaggccggagcacugaagag

SEQ ID NO: 413618 - RNA, 22 nt, Human
ugcagcuucuccaucuccuugu

SEQ ID NO: 413619 - RNA, 22 nt, Human
uguauuuuuaggaaugcgcuau

SEQ ID NO: 413620 - RNA, 22 nt, Human
aagcagccacuggccaguuaua

SEQ ID NO: 413621 - RNA, 22 nt, Human
aaaacuguaucuucuugggacu

SEQ ID NO: 413622 - RNA, 22 nt, Human
gccagguggcugagcagcugca

SEQ ID NO: 413623 - RNA, 22 nt, Human
aaguguuuggggaucauuuuaa

SEQ ID NO: 413624 - RNA, 22 nt, Human
ggagcugcucagagccaguccc

SEQ ID NO: 413625 - RNA, 22 nt, Human
gacuucaaaggucaaacaucgc

SEQ ID NO: 413626 - RNA, 22 nt, Human
aaaguuuccugcuaagugcuau

SEQ ID NO: 413627 - RNA, 22 nt, Human
agacccugcaccucucgugggc

SEQ ID NO: 413628 - RNA, 22 nt, Human
agcagcaacuuauuuuucuuau

SEQ ID NO: 413629 - RNA, 22 nt, Human
gaaggccaagaggcuccaagau

SEQ ID NO: 413630 - RNA, 22 nt, Human
ugccagggcugcuacuggcuga

SEQ ID NO: 413631 - RNA, 22 nt, Human
augaggcagguggaggcugcca

SEQ ID NO: 413632 - RNA, 22 nt, Human
gguuucaacucagcuaguaagg

SEQ ID NO: 413633 - RNA, 22 nt, Human
cugcagggaacugaggcccaga

SEQ ID NO: 413634 - RNA, 22 nt, Human
cagcaguggcugcaggcagcug

SEQ ID NO: 413635 - RNA, 22 nt, Human
uacuuccuguuuccaugucugu

SEQ ID NO: 413636 - RNA, 22 nt, Human
ugccugagugauguggcagcca

SEQ ID NO: 413637 - RNA, 22 nt, Human
gcacccagaauaaggacaggac

SEQ ID NO: 413638 - RNA, 22 nt, Human
gcuggccucuggagaagggcuu

SEQ ID NO: 413639 - RNA, 22 nt, Human
ucagcugaaguggagaagcaga

SEQ ID NO: 413640 - RNA, 22 nt, Human
acaguaccugcucucaagcaaa

SEQ ID NO: 413641 - RNA, 22 nt, Human
caguagcagggauuauuuuagg

SEQ ID NO: 413642 - RNA, 22 nt, Human
ggcacugggcaccggcugaggg

SEQ ID NO: 413643 - RNA, 22 nt, Human
auuguggugucaguuauaggca

SEQ ID NO: 413644 - RNA, 22 nt, Human
ccacagagacaggguccuugcu

SEQ ID NO: 413645 - RNA, 22 nt, Human
aguuuauguagaauuggcaaua

SEQ ID NO: 413646 - RNA, 22 nt, Human
agagugguacuucuuuuucuuc

SEQ ID NO: 413647 - RNA, 22 nt, Human
ccuggcaggcuggggacagugc

SEQ ID NO: 413648 - RNA, 22 nt, Human
augcucuggaguacgugaaauu

SEQ ID NO: 413649 - RNA, 22 nt, Human
gaacaguaucaguagugccagu

SEQ ID NO: 413650 - RNA, 22 nt, Human
aucuacaggcugaggugggagg

SEQ ID NO: 413651 - RNA, 22 nt, Human
guacuucccugggaggcaagca

SEQ ID NO: 413652 - RNA, 22 nt, Human
guccugggaaggaagccaggga

SEQ ID NO: 413653 - RNA, 22 nt, Human
auuaagacugcccauguuuuua

SEQ ID NO: 413654 - RNA, 22 nt, Human
aggcugaggcagguggaucauu

SEQ ID NO: 413655 - RNA, 22 nt, Human
cccugcagagaccacugaccuu

SEQ ID NO: 413656 - RNA, 22 nt, Human
cuaguccacuguccugccucca

SEQ ID NO: 413657 - RNA, 22 nt, Human
aagagcugauuaagucaugagg

SEQ ID NO: 413658 - RNA, 22 nt, Human
uggaagugcucuucugaccaac

SEQ ID NO: 413659 - RNA, 22 nt, Human
cagccaucccagccugugguuc

SEQ ID NO: 413660 - RNA, 21 nt, Human
gcucccugcucagcuccuggg

SEQ ID NO: 413661 - RNA, 22 nt, Human
cagcaugcaaguccagaugugg

SEQ ID NO: 413662 - RNA, 22 nt, Human
cagagggcacaugguuuccuca

SEQ ID NO: 413663 - RNA, 22 nt, Human
acaguaaugauucugagucucu

SEQ ID NO: 413664 - RNA, 22 nt, Human
auucacaaagaagggaaguaca

SEQ ID NO: 413665 - RNA, 22 nt, Human
cugcugugcuuguggccacccg

SEQ ID NO: 413666 - RNA, 22 nt, Human
gccugccacgcaugcagaguca

SEQ ID NO: 413667 - RNA, 22 nt, Human
cuuguacauagagaagaagccu

SEQ ID NO: 413668 - RNA, 22 nt, Human
uguccucacaggaaugaacuuu

SEQ ID NO: 413669 - RNA, 22 nt, Human
gguuugcauucugaaaggcuca

SEQ ID NO: 413670 - RNA, 22 nt, Human
uggagccaggagccugggaguc

SEQ ID NO: 413671 - RNA, 22 nt, Human
gagcacagcuggagguagcauu

SEQ ID NO: 413672 - RNA, 22 nt, Human
agucucagcuacuugggaggcu

SEQ ID NO: 413673 - RNA, 22 nt, Human
aaggcacugcuuugcugcgccc

SEQ ID NO: 413674 - RNA, 22 nt, Human
gggaccuggacaugugugugcu

SEQ ID NO: 413675 - RNA, 22 nt, Human
uaaauuaugucacaugacucug

SEQ ID NO: 413676 - RNA, 22 nt, Human
cuuauuagaaagaaaagacaug

SEQ ID NO: 413677 - RNA, 22 nt, Human
ccagcuuuuccucucauugcuu

SEQ ID NO: 413678 - RNA, 22 nt, Human
ugaguccauugauggauaguga

SEQ ID NO: 413679 - RNA, 22 nt, Human
acaugauuggacuccuuccccu

SEQ ID NO: 413680 - RNA, 22 nt, Human
aaggagaaaugguagaugugca

SEQ ID NO: 413681 - RNA, 22 nt, Human
guaacagaggguuugcagauau

SEQ ID NO: 413682 - RNA, 22 nt, Human
gucugcugcagagcauggcuuu

SEQ ID NO: 413683 - RNA, 22 nt, Human
gugcccugaguggguaggagag

SEQ ID NO: 413684 - RNA, 22 nt, Human
ucagagagccucaggcacugcc

SEQ ID NO: 413685 - RNA, 23 nt, Human
uuugcaaauuggacacaaccaca

SEQ ID NO: 413686 - RNA, 20 nt, Human
ucagagagagggugccacuu

SEQ ID NO: 413687 - RNA, 22 nt, Human
aauguguagcauuuaaugcagu

SEQ ID NO: 413688 - RNA, 22 nt, Human
acaugauauuaaugucuuauuu

SEQ ID NO: 413689 - RNA, 22 nt, Human
gccugcagccucagagaauuuu

SEQ ID NO: 413690 - RNA, 22 nt, Human
uacaguucacaguaucauaaau

SEQ ID NO: 413691 - RNA, 22 nt, Human
acaggcagcgucauugcugcuc

SEQ ID NO: 413692 - RNA, 22 nt, Human
caaaauguucuggcaccuuuaa

SEQ ID NO: 413693 - RNA, 22 nt, Human
cgcugccaggauccccugccgg

SEQ ID NO: 413694 - RNA, 22 nt, Human
aaaugcacugaacacauguugu

SEQ ID NO: 413695 - RNA, 22 nt, Human
ucuggcaggcaaucggcucugg

SEQ ID NO: 413696 - RNA, 22 nt, Human
aaaggucaaaaucgugacauug

SEQ ID NO: 413697 - RNA, 22 nt, Human
ggugacugguuuaucuggcagu

SEQ ID NO: 413698 - RNA, 22 nt, Human
cuuugcaauagaggcacacaug

SEQ ID NO: 413699 - RNA, 22 nt, Human
ucucucagaggccaggguccug

SEQ ID NO: 413700 - RNA, 22 nt, Human
ccagagaggccuuggcaagaca

SEQ ID NO: 413701 - RNA, 22 nt, Human
uaguggagaguuguuuugugca

SEQ ID NO: 413702 - RNA, 22 nt, Human
ucaguuuucaauuucaucagag

SEQ ID NO: 413703 - RNA, 22 nt, Human
ucugucaccauucagcuugaau

SEQ ID NO: 413704 - RNA, 22 nt, Human
cuguacaucccgagagccagua

SEQ ID NO: 413705 - RNA, 22 nt, Human
gugugcagggcugccugugccg

SEQ ID NO: 413706 - RNA, 20 nt, Human
ugccagggccagcagaggcu

SEQ ID NO: 413707 - RNA, 22 nt, Human
ggguccagcgacagcaggcuca

SEQ ID NO: 413708 - RNA, 22 nt, Human
uggcagcagccauggaaggccc

SEQ ID NO: 413709 - RNA, 23 nt, Human
ccuggcagcaaacgaggagguua

SEQ ID NO: 413710 - RNA, 22 nt, Human
ucaaaugcaggucuggucuugg

SEQ ID NO: 413711 - RNA, 22 nt, Human
caucaucaaaacaaauggaguc

SEQ ID NO: 413712 - RNA, 22 nt, Human
acaaaaagcuccauuacugucc

SEQ ID NO: 413713 - RNA, 22 nt, Human
ggcagggguccugguguugacu

SEQ ID NO: 413714 - RNA, 22 nt, Human
ggcagggcccugauuccugggg

SEQ ID NO: 413715 - RNA, 22 nt, Human
uuggcagggccaggcucucucu

SEQ ID NO: 413716 - RNA, 22 nt, Human
agggcuccaaggaaguguagcu

SEQ ID NO: 413717 - RNA, 22 nt, Human
agaauaaacugcuuuagggcag

SEQ ID NO: 413718 - RNA, 22 nt, Human
cagggcccagucccugcuguca

SEQ ID NO: 413719 - RNA, 22 nt, Human
gcagcaggcacggucucgacau

SEQ ID NO: 413720 - RNA, 22 nt, Human
agucucugccagcuuguccucu

SEQ ID NO: 413721 - RNA, 22 nt, Human
gccccagccaaggugacacgaa

SEQ ID NO: 413722 - RNA, 22 nt, Human
aggcccugcccagugccacaag

SEQ ID NO: 413723 - RNA, 22 nt, Human
agauaauuugaguaaauuaauu

SEQ ID NO: 413724 - RNA, 22 nt, Human
gagauguacaauguguauuaau

SEQ ID NO: 413725 - RNA, 23 nt, Human
ccuggaguacuaaggggauggaa

SEQ ID NO: 413726 - RNA, 22 nt, Human
gccucugcggggcccgagcccg

SEQ ID NO: 413727 - RNA, 22 nt, Human
gcugugcacuaccuauacaucc

SEQ ID NO: 413728 - RNA, 22 nt, Human
uguuaggguccugugcaggggc

SEQ ID NO: 413729 - RNA, 22 nt, Human
aggaaaaagaguugcugccuuc

SEQ ID NO: 413730 - RNA, 22 nt, Human
uuuuucugccauucaaagagga

SEQ ID NO: 413731 - RNA, 22 nt, Human
uaacagaaauuuuaguuagggg

SEQ ID NO: 413732 - RNA, 22 nt, Human
uuugaaagccuggcuuuucucu

SEQ ID NO: 413733 - RNA, 22 nt, Human
uucuaccauugggaaaacagcc

SEQ ID NO: 413734 - RNA, 22 nt, Human
agagcugggugaagugccauca

SEQ ID NO: 413735 - RNA, 22 nt, Human
gagaagcaauuuccaacugugc

SEQ ID NO: 413736 - RNA, 22 nt, Human
gccuggccugaacuaggaggug

SEQ ID NO: 413737 - RNA, 22 nt, Human
aaguuacaggagaaagagauca

SEQ ID NO: 413738 - RNA, 22 nt, Human
guccaagagucaagaagggggc

SEQ ID NO: 413739 - RNA, 22 nt, Human
ggcuucccuuuccgagaggaga

SEQ ID NO: 413740 - RNA, 22 nt, Human
gcagcuuuguggagaggcccau

SEQ ID NO: 413741 - RNA, 22 nt, Human
cuuggucauuucuuguccuguu

SEQ ID NO: 413742 - RNA, 22 nt, Human
uucauugugauucuuggcuagc

SEQ ID NO: 413743 - RNA, 22 nt, Human
ugggcagggaucucuuuugcaa

SEQ ID NO: 413744 - RNA, 22 nt, Human
cuggacagaaagggcugcugug

SEQ ID NO: 413745 - RNA, 22 nt, Human
cacauaaucaccaaguccuuuc

SEQ ID NO: 413746 - RNA, 22 nt, Human
acaugauuaaaagauuuuaaag

SEQ ID NO: 413747 - RNA, 22 nt, Human
uggccucuuaggacauccucua

SEQ ID NO: 413748 - RNA, 19 nt, Human
ugcucaggccaaggagccc

SEQ ID NO: 413749 - RNA, 21 nt, Human
guauugcagaguuaugugcuc

SEQ ID NO: 413750 - RNA, 22 nt, Human
aaaguuagaaugauaucaacga

SEQ ID NO: 413751 - RNA, 22 nt, Human
agaggaggccaggcccacaccu

SEQ ID NO: 413752 - RNA, 17 nt, Human
gacaggcucagugacga

SEQ ID NO: 413753 - RNA, 22 nt, Human
augcugugucaggaauuugaua

SEQ ID NO: 413754 - RNA, 22 nt, Human
ggcuagaauaauugacuucauu

SEQ ID NO: 413755 - RNA, 22 nt, Human
ggcuguggacacugagcucaga

SEQ ID NO: 413756 - RNA, 22 nt, Human
gcucccagcuggagccucaaca

SEQ ID NO: 413757 - RNA, 22 nt, Human
auguacaaaaugccacugaauu

SEQ ID NO: 413758 - RNA, 22 nt, Human
cccagccucuggguucugccgg

SEQ ID NO: 413759 - RNA, 22 nt, Human
gaggggaaagugugaggcugcg

SEQ ID NO: 413760 - RNA, 22 nt, Human
ggauaagaaaauuguaauaacu

SEQ ID NO: 413761 - RNA, 22 nt, Human
gggagggacacaaagaguuccc

SEQ ID NO: 413762 - RNA, 22 nt, Human
ggggcagaaguagugccccuga

SEQ ID NO: 413763 - RNA, 22 nt, Human
uuugcauuucucguaaggaaac

SEQ ID NO: 413764 - RNA, 22 nt, Human
aaggcaguuugggccaccaucu

SEQ ID NO: 413765 - RNA, 22 nt, Human
cucugcugcccaggccugcuag

SEQ ID NO: 413766 - RNA, 22 nt, Human
gacaggaggcagagcucaggug

SEQ ID NO: 413767 - RNA, 23 nt, Human
uccuucagagccucccuccaagc

SEQ ID NO: 413768 - RNA, 22 nt, Human
agauuucagaugcucggcaguu

SEQ ID NO: 413769 - RNA, 22 nt, Human
ccagccuggagggcaguggugg

SEQ ID NO: 413770 - RNA, 22 nt, Human
cagaccaucuugaagcaaacug

SEQ ID NO: 413771 - RNA, 22 nt, Human
gcuccucuucucccacugaaug

SEQ ID NO: 413772 - RNA, 22 nt, Human
acacuguguggucucucucgga

SEQ ID NO: 413773 - RNA, 22 nt, Human
aucacauuguuagcauagacug

SEQ ID NO: 413774 - RNA, 22 nt, Human
cagccagggucaggcagcuucu

SEQ ID NO: 413775 - RNA, 22 nt, Human
agagauucauguuuacuguagg

SEQ ID NO: 413776 - RNA, 22 nt, Human
agcccagcaaagggagguucag

SEQ ID NO: 413777 - RNA, 22 nt, Human
aggagccccucuucaguccugg

SEQ ID NO: 413778 - RNA, 22 nt, Human
ugacacagauuagagacauacc

SEQ ID NO: 413779 - RNA, 22 nt, Human
ccagagcccagcacacggugcu

SEQ ID NO: 413780 - RNA, 22 nt, Human
aggaaccagagguugagcaacu

SEQ ID NO: 413781 - RNA, 22 nt, Human
gccuaggaguggggauggcggu

SEQ ID NO: 413782 - RNA, 22 nt, Human
gaguccagacaccauaccugau

SEQ ID NO: 413783 - RNA, 22 nt, Human
ucucagaguuuacggggcugaa

SEQ ID NO: 413784 - RNA, 22 nt, Human
agggagccagaguugggagcuc

SEQ ID NO: 413785 - RNA, 22 nt, Human
cacucugcgcugggcgccagcg

SEQ ID NO: 413786 - RNA, 22 nt, Human
auggcaggcccagguguucauu

SEQ ID NO: 413787 - RNA, 22 nt, Human
ucuggcucucaacaaauauuua

SEQ ID NO: 413788 - RNA, 22 nt, Human
uuucucugaggcuggccucccu

SEQ ID NO: 413789 - RNA, 22 nt, Human
auuucucacucacaguccaugu

SEQ ID NO: 413790 - RNA, 22 nt, Human
gggauuugugggauggccagug

SEQ ID NO: 413791 - RNA, 22 nt, Human
ggccuggcauggggacuaaggg

SEQ ID NO: 413792 - RNA, 22 nt, Human
agcuggcuccagaaggagucgu

SEQ ID NO: 413793 - RNA, 17 nt, Human
uuagcaaaauagcacuu

SEQ ID NO: 413794 - RNA, 22 nt, Human
uggcaggaaaaacauuggagau

SEQ ID NO: 413795 - RNA, 22 nt, Human
cugccuuggaaaaugugguaau

SEQ ID NO: 413796 - RNA, 22 nt, Human
ucaaaugcggucauggcuuuua

SEQ ID NO: 413797 - RNA, 22 nt, Human
ggcagcaugagccuggugaauu

SEQ ID NO: 413798 - RNA, 22 nt, Human
ccaggguggaggcuggauggag

SEQ ID NO: 413799 - RNA, 22 nt, Human
aaaaacugguaacuauucccca

SEQ ID NO: 413800 - RNA, 22 nt, Human
guaaaguucuacuagaaucaac

SEQ ID NO: 413801 - RNA, 22 nt, Human
ggggcccagcaccccuccucgc

SEQ ID NO: 413802 - RNA, 22 nt, Human
ucuucucaguuucucuaggaug

SEQ ID NO: 413803 - RNA, 22 nt, Human
gccuggcaggccuguuggggcu

SEQ ID NO: 413804 - RNA, 22 nt, Human
acaguaauauugaugcucguca

SEQ ID NO: 413805 - RNA, 22 nt, Human
aagccagauagaagaacucauu

SEQ ID NO: 413806 - RNA, 21 nt, Human
uggcacugcuuagcagguucc

SEQ ID NO: 413807 - RNA, 22 nt, Human
ugccuaggaaaccucaugcuuc

SEQ ID NO: 413808 - RNA, 22 nt, Human
ucagcagauggguuguguuggc

SEQ ID NO: 413809 - RNA, 22 nt, Human
agggcugaagggaggugcucau

SEQ ID NO: 413810 - RNA, 22 nt, Human
ucccagccggugccuggguccc

SEQ ID NO: 413811 - RNA, 22 nt, Human
ccuguggcugccacuuggguga

SEQ ID NO: 413812 - RNA, 22 nt, Human
ucaaguauaucuagucauuagg

SEQ ID NO: 413813 - RNA, 22 nt, Human
ucucccacgguacaggauaaac

SEQ ID NO: 413814 - RNA, 22 nt, Human
ugccugaggagucagggcaggu

SEQ ID NO: 413815 - RNA, 22 nt, Human
augggaggaagagaagaugucu

SEQ ID NO: 413816 - RNA, 22 nt, Human
ucacacagguuugcaaugauuu

SEQ ID NO: 413817 - RNA, 22 nt, Human
acaaaauuguguuaaacuuuau

SEQ ID NO: 413818 - RNA, 23 nt, Human
aguuccagaaaaaugcucaagca

SEQ ID NO: 413819 - RNA, 22 nt, Human
gaguucaguaguuauagucuag

SEQ ID NO: 413820 - RNA, 22 nt, Human
agccuguccagaggacagggcu

SEQ ID NO: 413821 - RNA, 22 nt, Human
uugagggucuggaucugcugcu

SEQ ID NO: 413822 - RNA, 22 nt, Human
cagaggcuguguaggcagacug

SEQ ID NO: 413823 - RNA, 22 nt, Human
uggagaugcacgagcaggugga

SEQ ID NO: 413824 - RNA, 22 nt, Human
uguucccaagauaagauuauga

SEQ ID NO: 413825 - RNA, 22 nt, Human
augcugcacaagccacauguag

SEQ ID NO: 413826 - RNA, 22 nt, Human
uugcagaggcaaaaaugaacuc

SEQ ID NO: 413827 - RNA, 22 nt, Human
ugcugccacauuuaaagagggg

SEQ ID NO: 413828 - RNA, 22 nt, Human
acauuugaggauguuaagaaug

SEQ ID NO: 413829 - RNA, 21 nt, Human
ugggaccuauuucaacuggau

SEQ ID NO: 413830 - RNA, 22 nt, Human
gcucugggugaacuuggagcaa

SEQ ID NO: 413831 - RNA, 19 nt, Human
ucagggcaguccggucccc

SEQ ID NO: 413832 - RNA, 19 nt, Human
gguagaagggaaguguuuu

SEQ ID NO: 413833 - RNA, 22 nt, Human
agaggcuggauugagcauagac

SEQ ID NO: 413834 - RNA, 22 nt, Human
gcucaggaaacagcagggcuug

SEQ ID NO: 413835 - RNA, 22 nt, Human
ucagcuuucucagaggccuaac

SEQ ID NO: 413836 - RNA, 22 nt, Human
accugcaguggccacuccuaau

SEQ ID NO: 413837 - RNA, 16 nt, Human
gagaagagcccggcag

SEQ ID NO: 413838 - RNA, 19 nt, Human
uuuacucuccaaggugagu

SEQ ID NO: 413839 - RNA, 22 nt, Human
gagguacaugaggauacacagg

SEQ ID NO: 413840 - RNA, 22 nt, Human
aagcuggaacaucuugaggaag

SEQ ID NO: 413841 - RNA, 22 nt, Human
agcugguuagcaaucuaaguga

SEQ ID NO: 413842 - RNA, 22 nt, Human
agacaaagaaaccguagaagca

SEQ ID NO: 413843 - RNA, 22 nt, Human
ugucccagcagcuggguucucu

SEQ ID NO: 413844 - RNA, 19 nt, Human
uaguggagugacaaguucu

SEQ ID NO: 413845 - RNA, 22 nt, Human
uucaggauccccaccgcguuua

SEQ ID NO: 413846 - RNA, 22 nt, Human
agggcaguguggugggacugac

SEQ ID NO: 413847 - RNA, 22 nt, Human
agaacugguggugaucaguuau

SEQ ID NO: 413848 - RNA, 22 nt, Human
ggcucaggaccugggauugcca

SEQ ID NO: 413849 - RNA, 22 nt, Human
aaagccagcaaggugaguuuca

SEQ ID NO: 413850 - RNA, 23 nt, Human
uccuccuuuugcuugugcuuccc

SEQ ID NO: 413851 - RNA, 22 nt, Human
aauggcugggaguguauuuugg

SEQ ID NO: 413852 - RNA, 22 nt, Human
agccauugaauuuagugccuuu

SEQ ID NO: 413853 - RNA, 22 nt, Human
ugucacauaauuuaucuguagg

SEQ ID NO: 413854 - RNA, 22 nt, Human
aauuaugauuggucuaaaccag

SEQ ID NO: 413855 - RNA, 22 nt, Human
gggcuggcgggaaaggcaauuc

SEQ ID NO: 413856 - RNA, 19 nt, Human
cucugccucuggcuguggc

SEQ ID NO: 413857 - RNA, 22 nt, Human
gcuguccagagcaugggagcaa

SEQ ID NO: 413858 - RNA, 22 nt, Human
acacugugcagauucccuguga

SEQ ID NO: 413859 - RNA, 21 nt, Human
guccucagcugaugggagcug

SEQ ID NO: 413860 - RNA, 22 nt, Human
auggacaggaacucccuuggca

SEQ ID NO: 413861 - RNA, 20 nt, Human
acccagcucugugcccuggg

SEQ ID NO: 413862 - RNA, 22 nt, Human
gcucccagggaccgcagggcag

SEQ ID NO: 413863 - RNA, 22 nt, Human
ugggagcacccugaggagcuuc

SEQ ID NO: 413864 - RNA, 22 nt, Human
guaucacuuuugagagugagaa

SEQ ID NO: 413865 - RNA, 22 nt, Human
cuucucucccuggcacucagac

SEQ ID NO: 413866 - RNA, 22 nt, Human
cacccagcuuuugcauccuccg

SEQ ID NO: 413867 - RNA, 22 nt, Human
ugcugcacaauuggaaaguauc

SEQ ID NO: 413868 - RNA, 22 nt, Human
uaggccagcccuuaguccuguc

SEQ ID NO: 413869 - RNA, 22 nt, Human
ugagcauggugggugcagagca

SEQ ID NO: 413870 - RNA, 22 nt, Human
gugagcaggauaggggcucccu

SEQ ID NO: 413871 - RNA, 22 nt, Human
ccagcugcugugaggaccacag

SEQ ID NO: 413872 - RNA, 22 nt, Human
uuuagggaauagaagaucugaa

SEQ ID NO: 413873 - RNA, 21 nt, Human
aucuggaagaacugguaagug

SEQ ID NO: 413874 - RNA, 22 nt, Human
ccagagcagauguggccuuggu

SEQ ID NO: 413875 - RNA, 22 nt, Human
agaaacugaauuauuucugagg

SEQ ID NO: 413876 - RNA, 22 nt, Human
cuuacaaauacacuuaggagag

SEQ ID NO: 413877 - RNA, 22 nt, Human
uugcauugaaugcacauuuuua

SEQ ID NO: 413878 - RNA, 22 nt, Human
cugugucucuccuuacaagacu

SEQ ID NO: 413879 - RNA, 22 nt, Human
cacagggcuucucauggggugc

SEQ ID NO: 413880 - RNA, 22 nt, Human
uuacuuugaugaucaaugagcg

SEQ ID NO: 413881 - RNA, 22 nt, Human
cugggaggugaacagaaaaacu

SEQ ID NO: 413882 - RNA, 21 nt, Human
gcugcugccccuagugaggcc

SEQ ID NO: 413883 - RNA, 22 nt, Human
ucucccagugucuggcagucag

SEQ ID NO: 413884 - RNA, 22 nt, Human
ggcuggaaaagacaaagcuauu

SEQ ID NO: 413885 - RNA, 22 nt, Human
acauuucucauucuccccuaac

SEQ ID NO: 413886 - RNA, 22 nt, Human
uacauguauugauuucucuucu

SEQ ID NO: 413887 - RNA, 22 nt, Human
uauaacaguuuaggugguguca

SEQ ID NO: 413888 - RNA, 22 nt, Human
aaggcaguagguguuucaaacu

SEQ ID NO: 413889 - RNA, 22 nt, Human
uagcuuuaccauagaagaguau

SEQ ID NO: 413890 - RNA, 22 nt, Human
cguuggagacacuugaggacuu

SEQ ID NO: 413891 - RNA, 22 nt, Human
ccaggguguagggauuccagau

SEQ ID NO: 413892 - RNA, 22 nt, Human
aucagcugaaaaacaggcagca

SEQ ID NO: 413893 - RNA, 22 nt, Human
ggagaagccacacauugggugu

SEQ ID NO: 413894 - RNA, 19 nt, Human
uccauaagcuuguguucau

SEQ ID NO: 413895 - RNA, 22 nt, Human
ggcagcuggguuggccagaaac

SEQ ID NO: 413896 - RNA, 21 nt, Human
ccugugugucugacugggcua

SEQ ID NO: 413897 - RNA, 22 nt, Human
ccacugaaggucaacauagagc

SEQ ID NO: 413898 - RNA, 22 nt, Human
uccugucugcucacagagcugg

SEQ ID NO: 413899 - RNA, 22 nt, Human
uuggcugagagaggaaaagggc

SEQ ID NO: 413900 - RNA, 22 nt, Human
agcaggguuuggggauuggcac

SEQ ID NO: 413901 - RNA, 22 nt, Human
gaggcucaccuagggagcacug

SEQ ID NO: 413902 - RNA, 22 nt, Human
ugccuguccugaggaugagggu

SEQ ID NO: 413903 - RNA, 18 nt, Human
agccuggaggguugaagu

SEQ ID NO: 413904 - RNA, 22 nt, Human
agcacccucagccuuauccaga

SEQ ID NO: 413905 - RNA, 22 nt, Human
gggcuugcugauuugggcagga

SEQ ID NO: 413906 - RNA, 22 nt, Human
ugacaugcuuguuuuccuugaa

SEQ ID NO: 413907 - RNA, 18 nt, Human
aggaagcaggaggaaggc

SEQ ID NO: 413908 - RNA, 22 nt, Human
caguacuugggggguucuaagu

SEQ ID NO: 413909 - RNA, 22 nt, Human
gccaggcuggccagcaccuucu

SEQ ID NO: 413910 - RNA, 22 nt, Human
ucccacugcuuugcucugcuca

SEQ ID NO: 413911 - RNA, 22 nt, Human
ucacuuagauggggaucaucac

SEQ ID NO: 413912 - RNA, 22 nt, Human
caggaggaacaagagguucugg

SEQ ID NO: 413913 - RNA, 22 nt, Human
agucccagcuacucaagaggcu

SEQ ID NO: 413914 - RNA, 22 nt, Human
gguggcuggaggagcugaugga

SEQ ID NO: 413915 - RNA, 22 nt, Human
gcucccugacucaguuccugag

SEQ ID NO: 413916 - RNA, 22 nt, Human
gcaggcuggucugaccaucccu

SEQ ID NO: 413917 - RNA, 22 nt, Human
auggaaaggcuguggaaacuua

SEQ ID NO: 413918 - RNA, 22 nt, Human
uaaggucauggugaauaauaag

SEQ ID NO: 413919 - RNA, 21 nt, Human
gcagacugcccugcugucccc

SEQ ID NO: 413920 - RNA, 22 nt, Human
aaggaaccauuugugugcaugg

SEQ ID NO: 413921 - RNA, 20 nt, Human
ccugggguacacuggcaugu

SEQ ID NO: 413922 - RNA, 22 nt, Human
gcauggaauucccuuaugggcc

SEQ ID NO: 413923 - RNA, 22 nt, Human
ccagcucucagcgggagacuca

SEQ ID NO: 413924 - RNA, 22 nt, Human
gagcagcuguccccaaagcuuc

SEQ ID NO: 413925 - RNA, 22 nt, Human
agccagagagccccagguucua

SEQ ID NO: 413926 - RNA, 21 nt, Human
aaggccugcuuacugcuaguu

SEQ ID NO: 413927 - RNA, 22 nt, Human
ugggccuguugccugaguccau

SEQ ID NO: 413928 - RNA, 22 nt, Human
ucaaaggcgguccaggaauaaa

SEQ ID NO: 413929 - RNA, 22 nt, Human
ggccugaggcaauagucagaca

SEQ ID NO: 413930 - RNA, 22 nt, Human
ggcagugguuagaaacaugagc

SEQ ID NO: 413931 - RNA, 22 nt, Human
agcugccaccucugccuuuggg

SEQ ID NO: 413932 - RNA, 22 nt, Human
ggcaggguggcccuccagugag

SEQ ID NO: 413933 - RNA, 22 nt, Human
cagcagcugauggggaagugau

SEQ ID NO: 413934 - RNA, 22 nt, Human
uguuacuuaucucacgugaugc

SEQ ID NO: 413935 - RNA, 22 nt, Human
ucagaccauccugcuguuagug

SEQ ID NO: 413936 - RNA, 22 nt, Human
gguggagcuguggacaggaagg

SEQ ID NO: 413937 - RNA, 22 nt, Human
gucucagaguccuacuuauucc

SEQ ID NO: 413938 - RNA, 22 nt, Human
ggaaaguggugguggaaagagg

SEQ ID NO: 413939 - RNA, 22 nt, Human
acagagguguguguaggacagu

SEQ ID NO: 413940 - RNA, 22 nt, Human
caaaacugucuagagagagaag

SEQ ID NO: 413941 - RNA, 22 nt, Human
agcaucuggugagggccuaguu

SEQ ID NO: 413942 - RNA, 22 nt, Human
acucugcuuauugcugcaggca

SEQ ID NO: 413943 - RNA, 22 nt, Human
acauuucuucccuuuagcagaa

SEQ ID NO: 413944 - RNA, 22 nt, Human
aaucuggcucagaagaagauga

SEQ ID NO: 413945 - RNA, 22 nt, Human
gcuggccugcgagggcaggcug

SEQ ID NO: 413946 - RNA, 20 nt, Human
ggcagcucacuacuuucugu

SEQ ID NO: 413947 - RNA, 22 nt, Human
caccaggcugaaccagagggga

SEQ ID NO: 413948 - RNA, 22 nt, Human
cacagggccuggggcagcugcu

SEQ ID NO: 413949 - RNA, 22 nt, Human
gacauaaaauucaauaauuugu

SEQ ID NO: 413950 - RNA, 22 nt, Human
cucugggcuuguugaccugcac

SEQ ID NO: 413951 - RNA, 20 nt, Human
uuugagaccagucugcccaa

SEQ ID NO: 413952 - RNA, 22 nt, Human
cucagggacguuagaggacagg

SEQ ID NO: 413953 - RNA, 22 nt, Human
aauuauauuguggugugaaugu

SEQ ID NO: 413954 - RNA, 22 nt, Human
cacaggagugcugcuauuguug

SEQ ID NO: 413955 - RNA, 22 nt, Human
cugagcccaggcgggagcugag

SEQ ID NO: 413956 - RNA, 22 nt, Human
ggcucugcuggauugaggccag

SEQ ID NO: 413957 - RNA, 22 nt, Human
uccuccuucgggacugcuugac

SEQ ID NO: 413958 - RNA, 22 nt, Human
ucucagaguuccucuggagucc

SEQ ID NO: 413959 - RNA, 23 nt, Human
ugaaggccuggaggacgcguugu

SEQ ID NO: 413960 - RNA, 22 nt, Human
uucaagauccagcacaacagug

SEQ ID NO: 413961 - RNA, 22 nt, Human
agcagggccaacaguaaacacc

SEQ ID NO: 413962 - RNA, 22 nt, Human
uaacagaagaugaaacuucuuu

SEQ ID NO: 413963 - RNA, 22 nt, Human
cuucuccucugaguccugggag

SEQ ID NO: 413964 - RNA, 21 nt, Human
aggaaguggccagauugggaa

SEQ ID NO: 413965 - RNA, 22 nt, Human
cagguggcaugacugccuacaa

SEQ ID NO: 413966 - RNA, 22 nt, Human
aagagguaaccauagcaaccac

SEQ ID NO: 413967 - RNA, 22 nt, Human
acagacauuuucuguauugccu

SEQ ID NO: 413968 - RNA, 21 nt, Human
uggcugccuacaugcugcagg

SEQ ID NO: 413969 - RNA, 22 nt, Human
ucugucuuugagaucucagccu

SEQ ID NO: 413970 - RNA, 22 nt, Human
aaacaugagcaucucuucaagc

SEQ ID NO: 413971 - RNA, 22 nt, Human
aguggcagacacaaugugggca

SEQ ID NO: 413972 - RNA, 23 nt, Human
ucuggcuccauccuuggggaucc

SEQ ID NO: 413973 - RNA, 22 nt, Human
aauuuggcagugucuugaagua

SEQ ID NO: 413974 - RNA, 22 nt, Human
aagcaguguucccagcuggccc

SEQ ID NO: 413975 - RNA, 22 nt, Human
ccuucugcucccuggccagggc

SEQ ID NO: 413976 - RNA, 22 nt, Human
ugcauuguuuagaacucuuugg

SEQ ID NO: 413977 - RNA, 22 nt, Human
caguuuauagcucuagcagcuu

SEQ ID NO: 413978 - RNA, 22 nt, Human
auugcaccuuggguuuugaaag

SEQ ID NO: 413979 - RNA, 22 nt, Human
ggagaccagaaggaagcuucga

SEQ ID NO: 413980 - RNA, 22 nt, Human
agggccuggcgcguggccgccg

SEQ ID NO: 413981 - RNA, 22 nt, Human
gcagcaugagcuauacaaagua

SEQ ID NO: 413982 - RNA, 22 nt, Human
uggacucaaguccaaguucacg

SEQ ID NO: 413983 - RNA, 22 nt, Human
caggggcuguggcacauggugu

SEQ ID NO: 413984 - RNA, 20 nt, Human
ccuaggcaugcugagucucc

SEQ ID NO: 413985 - RNA, 22 nt, Human
cuguaugaggaucagacuggac

SEQ ID NO: 413986 - RNA, 22 nt, Human
aaacaguagaaguguauuuuau

SEQ ID NO: 413987 - RNA, 22 nt, Human
uguggccuccuguuccugggua

SEQ ID NO: 413988 - RNA, 22 nt, Human
gggcugagcuguucugaguuua

SEQ ID NO: 413989 - RNA, 19 nt, Human
gcugcuggcucuggcugga

SEQ ID NO: 413990 - RNA, 22 nt, Human
agcagccagagaaugaugcagu

SEQ ID NO: 413991 - RNA, 22 nt, Human
ccugagggaggguauaggcugu

SEQ ID NO: 413992 - RNA, 22 nt, Human
ucuucuuccucauuuauacaua

SEQ ID NO: 413993 - RNA, 22 nt, Human
uggaccugggguggccuccucu

SEQ ID NO: 413994 - RNA, 22 nt, Human
accugagaaugggggcaugugu

SEQ ID NO: 413995 - RNA, 22 nt, Human
cccuuucccuucuggcucaggg

SEQ ID NO: 413996 - RNA, 22 nt, Human
gggcguggauggucagugcagg

SEQ ID NO: 413997 - RNA, 19 nt, Human
aggagaaguagcagaaauu

SEQ ID NO: 413998 - RNA, 22 nt, Human
ugcucuggaguggcuugugcac

SEQ ID NO: 413999 - RNA, 22 nt, Human
cccaggcacagauuaucccaau

SEQ ID NO: 414000 - RNA, 22 nt, Human
uuuucucaggugcuuaucuaag

SEQ ID NO: 414001 - RNA, 16 nt, Human
ccaccugcagcucuca

SEQ ID NO: 414002 - RNA, 21 nt, Human
ugcucacagaugugcucagug

SEQ ID NO: 414003 - RNA, 22 nt, Human
gcaggggcuaaggacacagaga

SEQ ID NO: 414004 - RNA, 22 nt, Human
agaggcccucucucuccugaug

SEQ ID NO: 414005 - RNA, 23 nt, Human
cugucuccugggcuagguggaau

SEQ ID NO: 414006 - RNA, 22 nt, Human
cacagcugccauggcugcacuu

SEQ ID NO: 414007 - RNA, 22 nt, Human
uagcaggguccaaugugaggca

SEQ ID NO: 414008 - RNA, 22 nt, Human
ccugccugcggcccgcggggag

SEQ ID NO: 414009 - RNA, 22 nt, Human
ccucagggacuccaugcugcag

SEQ ID NO: 414010 - RNA, 19 nt, Human
gcucugugaugcugagggg

SEQ ID NO: 414011 - RNA, 22 nt, Human
cccagcucaagcagagagcuaa

SEQ ID NO: 414012 - RNA, 23 nt, Human
agucaguguaaguuuggaaugca

SEQ ID NO: 414013 - RNA, 22 nt, Human
guacauuucucuuguucuuauu

SEQ ID NO: 414014 - RNA, 22 nt, Human
uuuucuuacugucugugauccu

SEQ ID NO: 414015 - RNA, 17 nt, Human
ggcaccagacggagagu

SEQ ID NO: 414016 - RNA, 22 nt, Human
cugaggcaugaaugugggcuuu

SEQ ID NO: 414017 - RNA, 22 nt, Human
aucucagucagguugaauuugg

SEQ ID NO: 414018 - RNA, 22 nt, Human
uccucuggauauaagccucacc

SEQ ID NO: 414019 - RNA, 22 nt, Human
uuccugaugcacacagucauuu

SEQ ID NO: 414020 - RNA, 22 nt, Human
agcucccugagaugccacagca

SEQ ID NO: 414021 - RNA, 22 nt, Human
ggagggcugccagguggagcgg

SEQ ID NO: 414022 - RNA, 22 nt, Human
ugaaaucuuagccauucugccu

SEQ ID NO: 414023 - RNA, 22 nt, Human
uauucauaguaaacaaaagugg

SEQ ID NO: 414024 - RNA, 22 nt, Human
gggauggcuuuguggcugacuc

SEQ ID NO: 414025 - RNA, 22 nt, Human
gccagaaacauacacaucacuu

SEQ ID NO: 414026 - RNA, 22 nt, Human
ccagguguaggacaccaaggga

SEQ ID NO: 414027 - RNA, 22 nt, Human
ccagccuccauguagauagcug

SEQ ID NO: 414028 - RNA, 22 nt, Human
agcagggcccacuaggggagau

SEQ ID NO: 414029 - RNA, 22 nt, Human
ugggcaggagagaagcuaaaga

SEQ ID NO: 414030 - RNA, 22 nt, Human
cccaggcagccugcagggaagg

SEQ ID NO: 414031 - RNA, 22 nt, Human
aucuggaagccagauacucagu

SEQ ID NO: 414032 - RNA, 22 nt, Human
cagcuugaaauauuaggagaug

SEQ ID NO: 414033 - RNA, 22 nt, Human
gaaauucaggacaaagacucuu

SEQ ID NO: 414034 - RNA, 22 nt, Human
gcaguguuguuaaaagauuaga

SEQ ID NO: 414035 - RNA, 22 nt, Human
uuugaacaagagcuucacauua

SEQ ID NO: 414036 - RNA, 22 nt, Human
auuuuaucugcuuacuuucagg

SEQ ID NO: 414037 - RNA, 22 nt, Human
cuccugggcucaagugauccuc

SEQ ID NO: 414038 - RNA, 22 nt, Human
gccugcagauauauaggauggu

SEQ ID NO: 414039 - RNA, 22 nt, Human
caccuggcuggaagugcuccgg

SEQ ID NO: 414040 - RNA, 22 nt, Human
ucugucugacaggguaugaacu

SEQ ID NO: 414041 - RNA, 22 nt, Human
agggccaccagagcagggcagu

SEQ ID NO: 414042 - RNA, 22 nt, Human
uggccuggugcucaggcaguag

SEQ ID NO: 414043 - RNA, 22 nt, Human
aggccuuaccauagcuguagca

SEQ ID NO: 414044 - RNA, 22 nt, Human
ucuuccucucuaauugaucaga

SEQ ID NO: 414045 - RNA, 22 nt, Human
ccauuguaguaucuguuuuagu

SEQ ID NO: 414046 - RNA, 22 nt, Human
uaggccagaggagcagcuuugg

SEQ ID NO: 414047 - RNA, 22 nt, Human
agcagacaacccagaugaccca

SEQ ID NO: 414048 - RNA, 22 nt, Human
acugucugcccugagaugccag

SEQ ID NO: 414049 - RNA, 22 nt, Human
aagggcaggugggcauuucugg

SEQ ID NO: 414050 - RNA, 22 nt, Human
gggcugugggacccggcacuuu

SEQ ID NO: 414051 - RNA, 22 nt, Human
cagagagaggccacugcuauua

SEQ ID NO: 414052 - RNA, 22 nt, Human
gccaggcaguucaaguacacca

SEQ ID NO: 414053 - RNA, 21 nt, Human
agagccugagaucuuccagca

SEQ ID NO: 414054 - RNA, 22 nt, Human
aaggguggauuucugagcucua

SEQ ID NO: 414055 - RNA, 22 nt, Human
agccuggccugggcaggcacau

SEQ ID NO: 414056 - RNA, 22 nt, Human
ggaggaggggugacugaaugcu

SEQ ID NO: 414057 - RNA, 23 nt, Human
cuuuucauugccuuagcgcagag

SEQ ID NO: 414058 - RNA, 22 nt, Human
caagaaaugggauuugacugcc

SEQ ID NO: 414059 - RNA, 22 nt, Human
uguauguguauguacauaugca

SEQ ID NO: 414060 - RNA, 22 nt, Human
auguuaaaugguuuauuauuaa

SEQ ID NO: 414061 - RNA, 22 nt, Human
aggcaguuucugggacagcaua

SEQ ID NO: 414062 - RNA, 22 nt, Human
accugagccuagggagguugag

SEQ ID NO: 414063 - RNA, 22 nt, Human
gagcugcagcggcugacgcaac

SEQ ID NO: 414064 - RNA, 22 nt, Human
cacauuugaaggaauuagcauu

SEQ ID NO: 414065 - RNA, 22 nt, Human
cagcaauaagguaagcuucucc

SEQ ID NO: 414066 - RNA, 21 nt, Human
cccaggucguggucuucccag

SEQ ID NO: 414067 - RNA, 22 nt, Human
gggcuccagcccgggaccaggu

SEQ ID NO: 414068 - RNA, 22 nt, Human
cagccagggagggcaaaugaga

SEQ ID NO: 414069 - RNA, 22 nt, Human
gccuggagacagcagaggcggc

SEQ ID NO: 414070 - RNA, 18 nt, Human
ucugggcuucccgaggcu

SEQ ID NO: 414071 - RNA, 22 nt, Human
ucccagccuuucuuuucugcug

SEQ ID NO: 414072 - RNA, 22 nt, Human
ugcuggagaucauuaauguuca

SEQ ID NO: 414073 - RNA, 22 nt, Human
acaaaaauuagcugggcauggu

SEQ ID NO: 414074 - RNA, 20 nt, Human
caggcaguuugugguuaggg

SEQ ID NO: 414075 - RNA, 21 nt, Human
ccagaggccucucuuggccac

SEQ ID NO: 414076 - RNA, 22 nt, Human
uuuauccauucaccaguugaac

SEQ ID NO: 414077 - RNA, 22 nt, Human
ucccagaguauuagcaauugcu

SEQ ID NO: 414078 - RNA, 22 nt, Human
cuggcucaugugaugagggcaa

SEQ ID NO: 414079 - RNA, 22 nt, Human
cuggggcugcgguggaggagcc

SEQ ID NO: 414080 - RNA, 22 nt, Human
guacaugucaaaaaaugcauaa

SEQ ID NO: 414081 - RNA, 22 nt, Human
cauuuguaauacugacuugcag

SEQ ID NO: 414082 - RNA, 22 nt, Human
agggagaacaguugcagcagac

SEQ ID NO: 414083 - RNA, 22 nt, Human
gagugcaguaucuucugugucc

SEQ ID NO: 414084 - RNA, 22 nt, Human
acugauacaucuguggaagugg

SEQ ID NO: 414085 - RNA, 22 nt, Human
ugaggcaggaaguuauauaaug

SEQ ID NO: 414086 - RNA, 22 nt, Human
ggaagccaggccaaugagaaca

SEQ ID NO: 414087 - RNA, 22 nt, Human
agaagccaauccuugucucucu

SEQ ID NO: 414088 - RNA, 22 nt, Human
cagagcugcacauucuaugaug

SEQ ID NO: 414089 - RNA, 22 nt, Human
ugcauguuaagaaaauauugag

SEQ ID NO: 414090 - RNA, 22 nt, Human
agccagcugccuuucacaucug

SEQ ID NO: 414091 - RNA, 22 nt, Human
gugagcagaacagguggcuucu

SEQ ID NO: 414092 - RNA, 22 nt, Human
aggcucagggacucccucccuc

SEQ ID NO: 414093 - RNA, 22 nt, Human
ugggcuccguugccuggggcag

SEQ ID NO: 414094 - RNA, 22 nt, Human
gccucucucuacccaguaugau

SEQ ID NO: 414095 - RNA, 22 nt, Human
gcagugggagcuuaggcagugc

SEQ ID NO: 414096 - RNA, 22 nt, Human
uguacacaauucuuaacauaca

SEQ ID NO: 414097 - RNA, 22 nt, Human
gcugagagcaaagcaugucuag

SEQ ID NO: 414098 - RNA, 22 nt, Human
aauaauguugacgauagucuua

SEQ ID NO: 414099 - RNA, 20 nt, Human
ccagcugagccaaggggaga

SEQ ID NO: 414100 - RNA, 22 nt, Human
ccaggugucuguggccagcccu

SEQ ID NO: 414101 - RNA, 22 nt, Human
ccaaggaggccccaggucagcu

SEQ ID NO: 414102 - RNA, 22 nt, Human
gaggaaacauuguagaagcagu

SEQ ID NO: 414103 - RNA, 22 nt, Human
cucccugguguccccuccagga

SEQ ID NO: 414104 - RNA, 22 nt, Human
gccagggaaacugcagaccagc

SEQ ID NO: 414105 - RNA, 22 nt, Human
agccucugacugucagcaaggu

SEQ ID NO: 414106 - RNA, 22 nt, Human
cugaggcugcccagggccaggu

SEQ ID NO: 414107 - RNA, 22 nt, Human
ucccagagucuucuccuguaau

SEQ ID NO: 414108 - RNA, 22 nt, Human
ccucugccugcacaucauccug

SEQ ID NO: 414109 - RNA, 22 nt, Human
ugguaaagaaggcuagaucuga

SEQ ID NO: 414110 - RNA, 22 nt, Human
ugcauaaacuucucugguguga

SEQ ID NO: 414111 - RNA, 22 nt, Human
ucuuuggauaucgcuagaccgu

SEQ ID NO: 414112 - RNA, 22 nt, Human
cucuggaguuagugaucugggc

SEQ ID NO: 414113 - RNA, 22 nt, Human
cucuggaggccuaaggaagugg

SEQ ID NO: 414114 - RNA, 22 nt, Human
gcagggacaucuucagaucacu

SEQ ID NO: 414115 - RNA, 22 nt, Human
uuagggacagcucuguagguga

SEQ ID NO: 414116 - RNA, 23 nt, Human
ggguccagagacaggcaugggug

SEQ ID NO: 414117 - RNA, 22 nt, Human
gcagggacaaggcagguguucu

SEQ ID NO: 414118 - RNA, 22 nt, Human
agguggccggugccagccgggc

SEQ ID NO: 414119 - RNA, 22 nt, Human
ggcucugcccagaugaagagga

SEQ ID NO: 414120 - RNA, 22 nt, Human
ucucagaguuuuuuuccaggac

SEQ ID NO: 414121 - RNA, 22 nt, Human
cauggcaggugcagauucugug

SEQ ID NO: 414122 - RNA, 22 nt, Human
aaaugcuguaacugauauucug

SEQ ID NO: 414123 - RNA, 22 nt, Human
gagagcugucagcguagcaccg

SEQ ID NO: 414124 - RNA, 21 nt, Human
ccuggcagaagccugauaugc

SEQ ID NO: 414125 - RNA, 22 nt, Human
gaggcucacuuucauccucuuc

SEQ ID NO: 414126 - RNA, 22 nt, Human
cagcuuugugcaaugcagucuc

SEQ ID NO: 414127 - RNA, 22 nt, Human
ugcaguggaaagacucagacuu

SEQ ID NO: 414128 - RNA, 22 nt, Human
agagccccugguggagugagaa

SEQ ID NO: 414129 - RNA, 22 nt, Human
ucagggcagguuaacuugggug

SEQ ID NO: 414130 - RNA, 22 nt, Human
ggguaauuggggccuugcagug

SEQ ID NO: 414131 - RNA, 22 nt, Human
aaauguguuuagaugguuuauu

SEQ ID NO: 414132 - RNA, 22 nt, Human
ggccgggcaggucucagccagc

SEQ ID NO: 414133 - RNA, 22 nt, Human
agagcuggccagggaucacucu

SEQ ID NO: 414134 - RNA, 22 nt, Human
gcagggccagugcagagaggaa

SEQ ID NO: 414135 - RNA, 22 nt, Human
ccaggcucaggugcgagagaca

SEQ ID NO: 414136 - RNA, 22 nt, Human
gaaauucugugucccagagugc

SEQ ID NO: 414137 - RNA, 22 nt, Human
aaaauccucuaauucuagaaua

SEQ ID NO: 414138 - RNA, 22 nt, Human
cugaagcaaaugaaacagcucu

SEQ ID NO: 414139 - RNA, 22 nt, Human
aguuauauaacuaucuagaugc

SEQ ID NO: 414140 - RNA, 19 nt, Human
uggcauugguccagauaaa

SEQ ID NO: 414141 - RNA, 22 nt, Human
agcucccagaguccucugccca

SEQ ID NO: 414142 - RNA, 23 nt, Human
uggcucagggucucuuaugaagu

SEQ ID NO: 414143 - RNA, 22 nt, Human
agaaaugacacacaugagacau

SEQ ID NO: 414144 - RNA, 22 nt, Human
ugggccacacacagaagaauca

SEQ ID NO: 414145 - RNA, 22 nt, Human
auguuucaaauauauagaguug

SEQ ID NO: 414146 - RNA, 18 nt, Human
gcuccuggaccaggucac

SEQ ID NO: 414147 - RNA, 22 nt, Human
guauuuauaggggaaugagagu

SEQ ID NO: 414148 - RNA, 22 nt, Human
caggauggucucgaucuccuga

SEQ ID NO: 414149 - RNA, 22 nt, Human
uaaaugcaaugugcuuuaccag

SEQ ID NO: 414150 - RNA, 22 nt, Human
accucugcaguagggcugugcc

SEQ ID NO: 414151 - RNA, 22 nt, Human
aauguguagggugccuguuuuu

SEQ ID NO: 414152 - RNA, 22 nt, Human
aaguaaaagcuuuaccaugcgc

SEQ ID NO: 414153 - RNA, 22 nt, Human
gccagagcagaauagaguggcc

SEQ ID NO: 414154 - RNA, 22 nt, Human
ucaaauguucccuguacuggcc

SEQ ID NO: 414155 - RNA, 22 nt, Human
acaaguggguccuacauaaagc

SEQ ID NO: 414156 - RNA, 22 nt, Human
ccuuggcccuagccucaggcaa

SEQ ID NO: 414157 - RNA, 22 nt, Human
aaauguauccuacuuccugagu

SEQ ID NO: 414158 - RNA, 22 nt, Human
aaagagcucacaguccacugga

SEQ ID NO: 414159 - RNA, 22 nt, Human
ugcagaagaaaacagcugugug

SEQ ID NO: 414160 - RNA, 22 nt, Human
ugcagcugguuuagaacuagau

SEQ ID NO: 414161 - RNA, 22 nt, Human
ccccaccagcacccucucuauc

SEQ ID NO: 414162 - RNA, 22 nt, Human
cgcagaagagguugucuagucc

SEQ ID NO: 414163 - RNA, 22 nt, Human
auaaggcaucucucaguuagca

SEQ ID NO: 414164 - RNA, 22 nt, Human
gcagagugauggaaugugggug

SEQ ID NO: 414165 - RNA, 22 nt, Human
gcugccuucaguucugauucau

SEQ ID NO: 414166 - RNA, 22 nt, Human
ugacagggugauuaugagagcu

SEQ ID NO: 414167 - RNA, 19 nt, Human
gcugugccucucuccugcu

SEQ ID NO: 414168 - RNA, 22 nt, Human
ccaaaauuaagccucuuauguu

SEQ ID NO: 414169 - RNA, 22 nt, Human
ugcugucaguuggcaggaugag

SEQ ID NO: 414170 - RNA, 22 nt, Human
cccaggagguagagguugcagu

SEQ ID NO: 414171 - RNA, 22 nt, Human
aucaggaucaugcuggguggga

SEQ ID NO: 414172 - RNA, 22 nt, Human
ugggaguggggcauagaaggua

SEQ ID NO: 414173 - RNA, 22 nt, Human
auuaaauuaaguggcuaauuua

SEQ ID NO: 414174 - RNA, 22 nt, Human
ucagagugguagccuauuuucu

SEQ ID NO: 414175 - RNA, 22 nt, Human
cuggccacuggagguggcaccc

SEQ ID NO: 414176 - RNA, 22 nt, Human
gaggaagaauugguuauuggag

SEQ ID NO: 414177 - RNA, 22 nt, Human
aggccugaggaccagauaaaug

SEQ ID NO: 414178 - RNA, 22 nt, Human
ucaggggacagccagcuggagg

SEQ ID NO: 414179 - RNA, 22 nt, Human
ugcagggauuguuggcauccau

SEQ ID NO: 414180 - RNA, 21 nt, Human
acagcagacaggcuuaggacc

SEQ ID NO: 414181 - RNA, 22 nt, Human
cagcuuuaguaacccacugcuc

SEQ ID NO: 414182 - RNA, 22 nt, Human
agagacaggauaucugcucaug

SEQ ID NO: 414183 - RNA, 22 nt, Human
uggagcaagcuggagagaacau

SEQ ID NO: 414184 - RNA, 22 nt, Human
ccagcccugaacccugcugcau

SEQ ID NO: 414185 - RNA, 22 nt, Human
aggagagagaacacuugggucc

SEQ ID NO: 414186 - RNA, 20 nt, Human
ccaggcacugucccaugcag

SEQ ID NO: 414187 - RNA, 23 nt, Human
ggcagcucucaucugaugacuga

SEQ ID NO: 414188 - RNA, 22 nt, Human
uccagggaccucccugagagcu

SEQ ID NO: 414189 - RNA, 22 nt, Human
gaagaggaugacaggagccggu

SEQ ID NO: 414190 - RNA, 22 nt, Human
ucaggcugguggucagauggcu

SEQ ID NO: 414191 - RNA, 22 nt, Human
gccaccuggacagcugugcccu

SEQ ID NO: 414192 - RNA, 22 nt, Human
ucuucagagacucugagccccu

SEQ ID NO: 414193 - RNA, 22 nt, Human
acaguaaaucaacagaauaucu

SEQ ID NO: 414194 - RNA, 22 nt, Human
uacagaaaaacuggcauugaag

SEQ ID NO: 414195 - RNA, 22 nt, Human
guccuggcuuaguucgcuguaa

SEQ ID NO: 414196 - RNA, 22 nt, Human
gaauguaauagucaguagaaca

SEQ ID NO: 414197 - RNA, 22 nt, Human
aauaacaggcucaucagaugcu

SEQ ID NO: 414198 - RNA, 22 nt, Human
agauacaaaagauaagauuuag

SEQ ID NO: 414199 - RNA, 22 nt, Human
uuugcauuuccagaguagcaga

SEQ ID NO: 414200 - RNA, 22 nt, Human
aucaguuuggugcuuucaguga

SEQ ID NO: 414201 - RNA, 22 nt, Human
cagggcagggauguugcggcag

SEQ ID NO: 414202 - RNA, 22 nt, Human
gggccagagcuuggcagcuggg

SEQ ID NO: 414203 - RNA, 22 nt, Human
guggcgcagaggguggcagaga

SEQ ID NO: 414204 - RNA, 22 nt, Human
aaaaguuaccucuguaauauaa

SEQ ID NO: 414205 - RNA, 21 nt, Human
cagaggcaggcucugugugug

SEQ ID NO: 414206 - RNA, 22 nt, Human
gugcauuggugcgccacuucac

SEQ ID NO: 414207 - RNA, 22 nt, Human
agacuucucaguuuuauuagua

SEQ ID NO: 414208 - RNA, 22 nt, Human
uccauuuuucaugacuccucaa

SEQ ID NO: 414209 - RNA, 22 nt, Human
uuauuuauuguguaccuacugu

SEQ ID NO: 414210 - RNA, 20 nt, Human
agagccuugaggaagaugau

SEQ ID NO: 414211 - RNA, 22 nt, Human
ccaggagcaggagcuggacaga

SEQ ID NO: 414212 - RNA, 22 nt, Human
cccuggagggauuucucaauca

SEQ ID NO: 414213 - RNA, 22 nt, Human
aaggccugggaggccucucuuc

SEQ ID NO: 414214 - RNA, 22 nt, Human
gagcagggagacaacucuggug

SEQ ID NO: 414215 - RNA, 23 nt, Human
cagugcagggcaacucagacucc

SEQ ID NO: 414216 - RNA, 22 nt, Human
agccuggagaggcgccauacac

SEQ ID NO: 414217 - RNA, 22 nt, Human
aaauacagauuccagggucuua

SEQ ID NO: 414218 - RNA, 22 nt, Human
gagagggcugccuggugugagg

SEQ ID NO: 414219 - RNA, 22 nt, Human
cugucuguuuuaccuucuccag

SEQ ID NO: 414220 - RNA, 22 nt, Human
gaggcagcagggcugguuccuu

SEQ ID NO: 414221 - RNA, 22 nt, Human
uauguguaggaggaggacaggg

SEQ ID NO: 414222 - RNA, 22 nt, Human
uggcucagauuuuuguaggcuu

SEQ ID NO: 414223 - RNA, 22 nt, Human
uuugcauuguaauauuuaguuc

SEQ ID NO: 414224 - RNA, 22 nt, Human
ucuguacaacaaagggaugaga

SEQ ID NO: 414225 - RNA, 22 nt, Human
cuggcucccguuguccuugaag

SEQ ID NO: 414226 - RNA, 22 nt, Human
cgcugccaggucaccaggggua

SEQ ID NO: 414227 - RNA, 22 nt, Human
uggcuuucucccccagcuucuc

SEQ ID NO: 414228 - RNA, 22 nt, Human
gccagggcugugcagguuuguu

SEQ ID NO: 414229 - RNA, 22 nt, Human
ccaggugguucaggucaccaua

SEQ ID NO: 414230 - RNA, 22 nt, Human
ucccagccacagguguagcccu

SEQ ID NO: 414231 - RNA, 23 nt, Human
ucuccagugucucuucauugagu

SEQ ID NO: 414232 - RNA, 22 nt, Human
ggcuuuaugcagggauagaaau

SEQ ID NO: 414233 - RNA, 22 nt, Human
aaguucuaauuuugcauucagg

SEQ ID NO: 414234 - RNA, 22 nt, Human
uuggccuuguuaaggaggcccu

SEQ ID NO: 414235 - RNA, 22 nt, Human
aucaggaugacaacugcugggu

SEQ ID NO: 414236 - RNA, 22 nt, Human
agagaauuacagaagaauguca

SEQ ID NO: 414237 - RNA, 19 nt, Human
uguggccaugguucagcug

SEQ ID NO: 414238 - RNA, 22 nt, Human
caggaagagguaucaccgagca

SEQ ID NO: 414239 - RNA, 22 nt, Human
cuggcagguccagcuggacuca

SEQ ID NO: 414240 - RNA, 22 nt, Human
cagugagggaagaucucagcac

SEQ ID NO: 414241 - RNA, 22 nt, Human
cugccagcucgccacaaugaca

SEQ ID NO: 414242 - RNA, 22 nt, Human
auuucacucuuaauugcuuccu

SEQ ID NO: 414243 - RNA, 19 nt, Human
cugggagguguucagagaa

SEQ ID NO: 414244 - RNA, 22 nt, Human
cugucaguaggcucccaucauu

SEQ ID NO: 414245 - RNA, 22 nt, Human
ugggcuggcccaccacaccucg

SEQ ID NO: 414246 - RNA, 22 nt, Human
gccuggcaggggccugggagug

SEQ ID NO: 414247 - RNA, 22 nt, Human
ugcagggcuccuggcuccaauc

SEQ ID NO: 414248 - RNA, 22 nt, Human
uaguaaaaguuuaguugaaagu

SEQ ID NO: 414249 - RNA, 18 nt, Human
ucuggcucaggacugaac

SEQ ID NO: 414250 - RNA, 22 nt, Human
gucccuggggaaucagcuggag

SEQ ID NO: 414251 - RNA, 18 nt, Human
gggaagaggaucuggccc

SEQ ID NO: 414252 - RNA, 22 nt, Human
ucauugcaagcucauuuaucug

SEQ ID NO: 414253 - RNA, 22 nt, Human
ggagacagugguagggccuaag

SEQ ID NO: 414254 - RNA, 22 nt, Human
guggcugcagagggcacagcau

SEQ ID NO: 414255 - RNA, 22 nt, Human
ggagcuggucagccuugagcau

SEQ ID NO: 414256 - RNA, 22 nt, Human
cgccuggaaccucuaggaccag

SEQ ID NO: 414257 - RNA, 22 nt, Human
uggcagugggaagcuggaaguc

SEQ ID NO: 414258 - RNA, 22 nt, Human
aaaugguguuucuaaugcuaga

SEQ ID NO: 414259 - RNA, 22 nt, Human
gacaagacaugugaugacauca

SEQ ID NO: 414260 - RNA, 22 nt, Human
uuucucaaguucagauauuuga

SEQ ID NO: 414261 - RNA, 22 nt, Human
ucauccaguaccauggaaggca

SEQ ID NO: 414262 - RNA, 21 nt, Human
auauuucucauaagguuaugg

SEQ ID NO: 414263 - RNA, 22 nt, Human
acucagaggcagcugcucaccc

SEQ ID NO: 414264 - RNA, 20 nt, Human
gcugcucuccacggucugca

SEQ ID NO: 414265 - RNA, 23 nt, Human
gcucugagggcuuaucccuccca

SEQ ID NO: 414266 - RNA, 22 nt, Human
ccuggccucuccgaguaaccug

SEQ ID NO: 414267 - RNA, 22 nt, Human
gucucaguuuuccaaacuguca

SEQ ID NO: 414268 - RNA, 22 nt, Human
gaaucauuuagcucugcaugga

SEQ ID NO: 414269 - RNA, 22 nt, Human
ggcagcagggcugucucccuac

SEQ ID NO: 414270 - RNA, 18 nt, Human
gagacacaagggccugga

SEQ ID NO: 414271 - RNA, 23 nt, Human
acaguuauagcugugaauaacau

SEQ ID NO: 414272 - RNA, 22 nt, Human
agcugccagaugacagugcuau

SEQ ID NO: 414273 - RNA, 22 nt, Human
guggcauucucggcaccaucug

SEQ ID NO: 414274 - RNA, 22 nt, Human
cagggccaggcugauggccugg

SEQ ID NO: 414275 - RNA, 22 nt, Human
uggccugaggcucggcaugggu

SEQ ID NO: 414276 - RNA, 22 nt, Human
cauuuucucaaugaacccucuu

SEQ ID NO: 414277 - RNA, 22 nt, Human
uggcccugacagguccugggca

SEQ ID NO: 414278 - RNA, 22 nt, Human
gggagcugagggaccucugugg

SEQ ID NO: 414279 - RNA, 22 nt, Human
uucuacaugguugcucagaggg

SEQ ID NO: 414280 - RNA, 22 nt, Human
agcugccacagagccuggccag

SEQ ID NO: 414281 - RNA, 22 nt, Human
aggaaaaauaaggcagcagggc

SEQ ID NO: 414282 - RNA, 22 nt, Human
cugccagcagaggccagcgcug

SEQ ID NO: 414283 - RNA, 22 nt, Human
caagagagaugcagcucacuca

SEQ ID NO: 414284 - RNA, 22 nt, Human
ggccuugguaaagggaugcaug

SEQ ID NO: 414285 - RNA, 22 nt, Human
uucacauuucauaccacagcuu

SEQ ID NO: 414286 - RNA, 22 nt, Human
uguccugggaaugggaugcagu

SEQ ID NO: 414287 - RNA, 22 nt, Human
caugcacaaagguaagaugcgu

SEQ ID NO: 414288 - RNA, 22 nt, Human
cgacccuacagacagugcugag

SEQ ID NO: 414289 - RNA, 22 nt, Human
gcccaggauucuuucuuccuua

SEQ ID NO: 414290 - RNA, 22 nt, Human
agcuuuaccugccuuggggcac

SEQ ID NO: 414291 - RNA, 22 nt, Human
uugcaccaaaugaguuaaaauu

SEQ ID NO: 414292 - RNA, 22 nt, Human
aaagaacaauguggaaucuccu

SEQ ID NO: 414293 - RNA, 22 nt, Human
ugggggagauugugcaucucua

SEQ ID NO: 414294 - RNA, 22 nt, Human
uauuucaucuggaacaagguaa

SEQ ID NO: 414295 - RNA, 22 nt, Human
ugcucugugguccaagauggcu

SEQ ID NO: 414296 - RNA, 22 nt, Human
gcagaaggucuggcacuucagg

SEQ ID NO: 414297 - RNA, 22 nt, Human
aaggaccuauauugucagagga

SEQ ID NO: 414298 - RNA, 22 nt, Human
aagaugcagcuuccacuuuugc

SEQ ID NO: 414299 - RNA, 22 nt, Human
auaaacaguaaaugugagcagu

SEQ ID NO: 414300 - RNA, 22 nt, Human
uacaaagucaccagcuucuugc

SEQ ID NO: 414301 - RNA, 22 nt, Human
gugucccagcagcacauuggcu

SEQ ID NO: 414302 - RNA, 22 nt, Human
gaggcuggaggucaaagaugaa

SEQ ID NO: 414303 - RNA, 22 nt, Human
gcuaucuucauggaaauacagg

SEQ ID NO: 414304 - RNA, 22 nt, Human
aggcaauccccugaggauacuu

SEQ ID NO: 414305 - RNA, 22 nt, Human
aucuaggauuugaaugcacagu

SEQ ID NO: 414306 - RNA, 22 nt, Human
acuuugcagggcuugauaucca

SEQ ID NO: 414307 - RNA, 22 nt, Human
aaauggauggaauugacauuua

SEQ ID NO: 414308 - RNA, 22 nt, Human
cugagccauaagggaggcuggg

SEQ ID NO: 414309 - RNA, 22 nt, Human
agcaggggcaggguuuugugcu

SEQ ID NO: 414310 - RNA, 22 nt, Human
gagguacagaguguuccaaugu

SEQ ID NO: 414311 - RNA, 22 nt, Human
ucaggcugcuguacugugaaug

SEQ ID NO: 414312 - RNA, 22 nt, Human
ggcucuggugaggguaggagau

SEQ ID NO: 414313 - RNA, 22 nt, Human
uguacauacauagauauacaca

SEQ ID NO: 414314 - RNA, 19 nt, Human
ugagugggccccugcagac

SEQ ID NO: 414315 - RNA, 22 nt, Human
caguccuggggaccaggcugag

SEQ ID NO: 414316 - RNA, 22 nt, Human
gcucugcuggagggaaagagaa

SEQ ID NO: 414317 - RNA, 22 nt, Human
gugugcaggccacaggccaggg

SEQ ID NO: 414318 - RNA, 22 nt, Human
uucacagacauugcagacugaa

SEQ ID NO: 414319 - RNA, 22 nt, Human
cuggccagaguuggagggugug

SEQ ID NO: 414320 - RNA, 22 nt, Human
uggcacugggaugcuacuguua

SEQ ID NO: 414321 - RNA, 22 nt, Human
aaaaucugcuuccuuuuacaga

SEQ ID NO: 414322 - RNA, 19 nt, Human
cucugccucccuccugggu

SEQ ID NO: 414323 - RNA, 22 nt, Human
ccaggaguuugaggcugcagug

SEQ ID NO: 414324 - RNA, 22 nt, Human
uccaggcuggacaugaggcggg

SEQ ID NO: 414325 - RNA, 22 nt, Human
uuuccauauucugcgucugcca

SEQ ID NO: 414326 - RNA, 22 nt, Human
aauguguagauguugcauuccu

SEQ ID NO: 414327 - RNA, 18 nt, Human
ccugcagcccaggaggcc

SEQ ID NO: 414328 - RNA, 22 nt, Human
uccugggagagugggacuguau

SEQ ID NO: 414329 - RNA, 23 nt, Human
uuacaguaggaguuggaaaacca

SEQ ID NO: 414330 - RNA, 22 nt, Human
gaggcagcugaaggagugacag

SEQ ID NO: 414331 - RNA, 22 nt, Human
uuugcauugccucugacuuaug

SEQ ID NO: 414332 - RNA, 22 nt, Human
cugccuggaccggcagcccucc

SEQ ID NO: 414333 - RNA, 22 nt, Human
uauuuugucuucugcucaucac

SEQ ID NO: 414334 - RNA, 22 nt, Human
uggcucagucuggguugacuga

SEQ ID NO: 414335 - RNA, 22 nt, Human
aggcaguguauugcuagcggcu

SEQ ID NO: 414336 - RNA, 22 nt, Human
acacaccaugauuuauuuaccc

SEQ ID NO: 414337 - RNA, 22 nt, Human
acauuucucagguaagucauuu

SEQ ID NO: 414338 - RNA, 23 nt, Human
uuugaaaguaucaacucgccuga

SEQ ID NO: 414339 - RNA, 18 nt, Human
cauuaugugguuauagaa

SEQ ID NO: 414340 - RNA, 22 nt, Human
gucuuuauuugagauugucauu

SEQ ID NO: 414341 - RNA, 22 nt, Human
cuuagaaaugcagauucucagg

SEQ ID NO: 414342 - RNA, 23 nt, Human
acuuuauugaccccaggucaguu

SEQ ID NO: 414343 - RNA, 22 nt, Human
gugcauuugugcaugcacaugu

SEQ ID NO: 414344 - RNA, 22 nt, Human
gagccaccuucaacucaggaau

SEQ ID NO: 414345 - RNA, 22 nt, Human
ucuggcuccacuuucuucauuu

SEQ ID NO: 414346 - RNA, 22 nt, Human
uuugcauugcauuaaguauucu

SEQ ID NO: 414347 - RNA, 22 nt, Human
gagauuggauuuaauggccaaa

SEQ ID NO: 414348 - RNA, 22 nt, Human
caggccuggcccccggcacacc

SEQ ID NO: 414349 - RNA, 22 nt, Human
gacagguggggaaacuaaggua

SEQ ID NO: 414350 - RNA, 17 nt, Human
acagagcacaucaagau

SEQ ID NO: 414351 - RNA, 22 nt, Human
gaggccuggcucugcccuccug

SEQ ID NO: 414352 - RNA, 22 nt, Human
acagguccuuauaagagcacuc

SEQ ID NO: 414353 - RNA, 22 nt, Human
agccuggaggaggaguugagca

SEQ ID NO: 414354 - RNA, 22 nt, Human
auacaaagacaaaucucaaucu

SEQ ID NO: 414355 - RNA, 22 nt, Human
gccuggaggguugagguuuugu

SEQ ID NO: 414356 - RNA, 22 nt, Human
cccuguccuggaugggagcacu

SEQ ID NO: 414357 - RNA, 22 nt, Human
uggcagagacuccuccugggag

SEQ ID NO: 414358 - RNA, 17 nt, Human
cugaggcccagggccca

SEQ ID NO: 414359 - RNA, 22 nt, Human
gcaggcugaugacuggaguugg

SEQ ID NO: 414360 - RNA, 22 nt, Human
gagcagaacaggccggguggga

SEQ ID NO: 414361 - RNA, 22 nt, Human
cagggcuccccgcaccgcagcc

SEQ ID NO: 414362 - RNA, 22 nt, Human
gacagaguuguugauguaugcu

SEQ ID NO: 414363 - RNA, 22 nt, Human
cagcugagaaauggggaaaggg

SEQ ID NO: 414364 - RNA, 22 nt, Human
cuuuauguccuugaagaguugu

SEQ ID NO: 414365 - RNA, 22 nt, Human
cuagucacucagcacugacaaa

SEQ ID NO: 414366 - RNA, 22 nt, Human
acauagcuuaaaugagaagaua

SEQ ID NO: 414367 - RNA, 22 nt, Human
uucaaauuaccacauuugcuua

SEQ ID NO: 414368 - RNA, 22 nt, Human
acagagccacuuuggugccuac

SEQ ID NO: 414369 - RNA, 22 nt, Human
gggucaggcucagcagggcagc

SEQ ID NO: 414370 - RNA, 22 nt, Human
aguccaaggagagacagcauuu

SEQ ID NO: 414371 - RNA, 22 nt, Human
uacauucuggaaaggcacagac

SEQ ID NO: 414372 - RNA, 22 nt, Human
ucuuucaaugagcauucuuucc

SEQ ID NO: 414373 - RNA, 22 nt, Human
ccuggcugcauuuugcuggaug

SEQ ID NO: 414374 - RNA, 22 nt, Human
aggcugaggcuggcagcuccag

SEQ ID NO: 414375 - RNA, 22 nt, Human
accagacacugugaagacaggc

SEQ ID NO: 414376 - RNA, 22 nt, Human
aaggagucucagcugggccuga

SEQ ID NO: 414377 - RNA, 22 nt, Human
cucagagaaaaggagcaagggu

SEQ ID NO: 414378 - RNA, 21 nt, Human
augacagaugcugcagaucgu

SEQ ID NO: 414379 - RNA, 22 nt, Human
gcugcugcgcuugucuacuguu

SEQ ID NO: 414380 - RNA, 22 nt, Human
auucaguuucauggcacagcua

SEQ ID NO: 414381 - RNA, 22 nt, Human
agagccugcuaccucauuccag

SEQ ID NO: 414382 - RNA, 19 nt, Human
gccacuccugaugcugccc

SEQ ID NO: 414383 - RNA, 22 nt, Human
cucagagaaccuaagcggagga

SEQ ID NO: 414384 - RNA, 19 nt, Human
aaggcagaaguuggauaug

SEQ ID NO: 414385 - RNA, 22 nt, Human
ugccaggcucagccccuaucuu

SEQ ID NO: 414386 - RNA, 22 nt, Human
caggccucuccuuagucuggca

SEQ ID NO: 414387 - RNA, 22 nt, Human
ggaggccacgguuuagcaccga

SEQ ID NO: 414388 - RNA, 22 nt, Human
ugcagcauuauucacaguagcc

SEQ ID NO: 414389 - RNA, 20 nt, Human
cugcugugugugccucagcc

SEQ ID NO: 414390 - RNA, 22 nt, Human
cagucccaggguugguucagcu

SEQ ID NO: 414391 - RNA, 22 nt, Human
aguuuuucugggaggcacugcu

SEQ ID NO: 414392 - RNA, 22 nt, Human
gaggccugcuuuggcacucugg

SEQ ID NO: 414393 - RNA, 22 nt, Human
gaggcugguucugaaguacugu

SEQ ID NO: 414394 - RNA, 21 nt, Human
cugugcuucuuccuaagccag

SEQ ID NO: 414395 - RNA, 22 nt, Human
agauaugacuagaagcucauuu

SEQ ID NO: 414396 - RNA, 22 nt, Human
agcugccugggcuuguacaccu

SEQ ID NO: 414397 - RNA, 22 nt, Human
uaaacaugugagugugcauaua

SEQ ID NO: 414398 - RNA, 22 nt, Human
ucucagaguuugaaucuggagu

SEQ ID NO: 414399 - RNA, 22 nt, Human
ucccaagugucuuggaccaggg

SEQ ID NO: 414400 - RNA, 22 nt, Human
guucaaagcuccugguacagua

SEQ ID NO: 414401 - RNA, 22 nt, Human
cccauuuaaacacaagcuuuca

SEQ ID NO: 414402 - RNA, 22 nt, Human
gagcugagccuggguggaccgc

SEQ ID NO: 414403 - RNA, 22 nt, Human
cagucccagaagagccugggag

SEQ ID NO: 414404 - RNA, 22 nt, Human
ggcuucaccaggugcaugcaug

SEQ ID NO: 414405 - RNA, 22 nt, Human
uccuucaggccucauucucaua

SEQ ID NO: 414406 - RNA, 22 nt, Human
agcccagaggcugggcgugcau

SEQ ID NO: 414407 - RNA, 22 nt, Human
aagcugccagcugagcugaggc

SEQ ID NO: 414408 - RNA, 22 nt, Human
uaugcacacauguaugcaugug

SEQ ID NO: 414409 - RNA, 17 nt, Human
ucuuuccugccaugcuc

SEQ ID NO: 414410 - RNA, 22 nt, Human
ucaggcugccuaucagacugug

SEQ ID NO: 414411 - RNA, 22 nt, Human
uccauuuacuauucucauaucg

SEQ ID NO: 414412 - RNA, 22 nt, Human
ggccauggaccccgagcugacc

SEQ ID NO: 414413 - RNA, 22 nt, Human
accaggggugucaacagcauuu

SEQ ID NO: 414414 - RNA, 22 nt, Human
acacugaauguuuaagaacuug

SEQ ID NO: 414415 - RNA, 22 nt, Human
cagguccugcagggagaguaaa

SEQ ID NO: 414416 - RNA, 22 nt, Human
gaccagagaaaggcacuggaag

SEQ ID NO: 414417 - RNA, 22 nt, Human
gcucugcucuaacauuccugac

SEQ ID NO: 414418 - RNA, 22 nt, Human
agauuucccacuccauguauug

SEQ ID NO: 414419 - RNA, 22 nt, Human
cggcugaggaucuccaggccug

SEQ ID NO: 414420 - RNA, 22 nt, Human
aguuccagcugugaccagaaaa

SEQ ID NO: 414421 - RNA, 22 nt, Human
ccagcugggauuaagggaaaau

SEQ ID NO: 414422 - RNA, 22 nt, Human
gaacaguaaauuuaugcagcac

SEQ ID NO: 414423 - RNA, 23 nt, Human
uucuuucaagaaguucacagugc

SEQ ID NO: 414424 - RNA, 22 nt, Human
uccagucucuacucugagauaa

SEQ ID NO: 414425 - RNA, 22 nt, Human
uggaaagacauucagccgcugg

SEQ ID NO: 414426 - RNA, 21 nt, Human
agaauucuuaaguauucuaau

SEQ ID NO: 414427 - RNA, 22 nt, Human
ugaggcaguauucuccauucca

SEQ ID NO: 414428 - RNA, 22 nt, Human
ugugugacccccagugaagccu

SEQ ID NO: 414429 - RNA, 22 nt, Human
cuccuucccuucaaguguuccu

SEQ ID NO: 414430 - RNA, 22 nt, Human
aguguuccugcucucaggaagc

SEQ ID NO: 414431 - RNA, 22 nt, Human
gaggagagagggacugucugca

SEQ ID NO: 414432 - RNA, 22 nt, Human
aagaacagguucuagaaccauu

SEQ ID NO: 414433 - RNA, 22 nt, Human
uucuaguugagggagacaaaua

SEQ ID NO: 414434 - RNA, 22 nt, Human
aguacagaccugucucuuccug

SEQ ID NO: 414435 - RNA, 22 nt, Human
ccaggccauucccagaguugcu

SEQ ID NO: 414436 - RNA, 21 nt, Human
acagaguaguugaaacagaga

SEQ ID NO: 414437 - RNA, 22 nt, Human
acugcaggagacacagcugcug

SEQ ID NO: 414438 - RNA, 22 nt, Human
uuuauugacccaaagcgagagu

SEQ ID NO: 414439 - RNA, 22 nt, Human
cagcuggcauaccugggcccgg

SEQ ID NO: 414440 - RNA, 22 nt, Human
gagccugaauuugaccugcuua

SEQ ID NO: 414441 - RNA, 22 nt, Human
ugagaaccaugaaaagcuguca

SEQ ID NO: 414442 - RNA, 19 nt, Human
ggugugaagugaggaguua

SEQ ID NO: 414443 - RNA, 22 nt, Human
ucugaaaugcaggcaauuugcu

SEQ ID NO: 414444 - RNA, 22 nt, Human
cagagccugccaccuuucuccc

SEQ ID NO: 414445 - RNA, 22 nt, Human
cucuggacagcaggugcugugg

SEQ ID NO: 414446 - RNA, 22 nt, Human
auguuacaauucaaaaugcugc

SEQ ID NO: 414447 - RNA, 22 nt, Human
uggcucuggugcgggcuccugc

SEQ ID NO: 414448 - RNA, 22 nt, Human
agcucugacauugauucucagc

SEQ ID NO: 414449 - RNA, 22 nt, Human
ucugugaacaucacauugacag

SEQ ID NO: 414450 - RNA, 22 nt, Human
gccugcagccccucugcaguag

SEQ ID NO: 414451 - RNA, 22 nt, Human
cuggugccauucuguggccuag

SEQ ID NO: 414452 - RNA, 22 nt, Human
cugacccauauaagaguggagg

SEQ ID NO: 414453 - RNA, 22 nt, Human
agacaggcuuugcuguauauca

SEQ ID NO: 414454 - RNA, 20 nt, Human
aggcucagcugagcucuugg

SEQ ID NO: 414455 - RNA, 22 nt, Human
ugagcccagucugucugacaug

SEQ ID NO: 414456 - RNA, 22 nt, Human
cugcucuguucccccaucaucu

SEQ ID NO: 414457 - RNA, 22 nt, Human
cagaggcacagcuucuuuuaau

SEQ ID NO: 414458 - RNA, 22 nt, Human
ucaaggugcugugcugugcuag

SEQ ID NO: 414459 - RNA, 22 nt, Human
aguggcagcugucaugcccuag

SEQ ID NO: 414460 - RNA, 22 nt, Human
accucugccacuuucuaacucu

SEQ ID NO: 414461 - RNA, 22 nt, Human
ugcauuguugaugaguugaaua

SEQ ID NO: 414462 - RNA, 22 nt, Human
gcucagccgaacuucagagcag

SEQ ID NO: 414463 - RNA, 22 nt, Human
uuuguuuagaaagagauuggug

SEQ ID NO: 414464 - RNA, 22 nt, Human
gaggguccccaugcagagcuca

SEQ ID NO: 414465 - RNA, 20 nt, Human
ugcucaggauggagaggugu

SEQ ID NO: 414466 - RNA, 22 nt, Human
agggaagugaaugacagauauc

SEQ ID NO: 414467 - RNA, 22 nt, Human
gaggggcuggguagggcaaccc

SEQ ID NO: 414468 - RNA, 22 nt, Human
agaaagcuuaugaaugggcaag

SEQ ID NO: 414469 - RNA, 19 nt, Human
cccaaggcccugggcaggc

SEQ ID NO: 414470 - RNA, 22 nt, Human
cuggaugcuuccucucugcuag

SEQ ID NO: 414471 - RNA, 22 nt, Human
agcagagcccuuccauggccuu

SEQ ID NO: 414472 - RNA, 22 nt, Human
ugcagggccuugggucuuucuu

SEQ ID NO: 414473 - RNA, 22 nt, Human
gaaaccucuuagccucucuuug

SEQ ID NO: 414474 - RNA, 22 nt, Human
agaaaucacaggaggcagaagg

SEQ ID NO: 414475 - RNA, 22 nt, Human
ucccaggccauaaaacucagag

SEQ ID NO: 414476 - RNA, 22 nt, Human
uguuuauugagugccuacuaua

SEQ ID NO: 414477 - RNA, 22 nt, Human
ggcagugacuguucagacgucc

SEQ ID NO: 414478 - RNA, 22 nt, Human
ccuuccuggcuguccgccugau

SEQ ID NO: 414479 - RNA, 22 nt, Human
ccagcugagaaguguaaaguga

SEQ ID NO: 414480 - RNA, 22 nt, Human
ccugggaagagcugacaggagg

SEQ ID NO: 414481 - RNA, 20 nt, Human
agcccaggccugugugaguc

SEQ ID NO: 414482 - RNA, 22 nt, Human
caagagcucaccggagagcauu

SEQ ID NO: 414483 - RNA, 22 nt, Human
ggcagcagcaagguuggagcug

SEQ ID NO: 414484 - RNA, 22 nt, Human
uggggcuggggaucuugagccu

SEQ ID NO: 414485 - RNA, 22 nt, Human
guuuuccauggaggucugaccu

SEQ ID NO: 414486 - RNA, 22 nt, Human
ggcagcagggucuagauugaug

SEQ ID NO: 414487 - RNA, 22 nt, Human
gcuccagguauuugcccuuuua

SEQ ID NO: 414488 - RNA, 22 nt, Human
ggccccuggcaccaggcugauu

SEQ ID NO: 414489 - RNA, 22 nt, Human
agggaggagaauggacuccuuc

SEQ ID NO: 414490 - RNA, 22 nt, Human
auacaagacucagcacagacgg

SEQ ID NO: 414491 - RNA, 22 nt, Human
uuguucaugguuguaaguuuga

SEQ ID NO: 414492 - RNA, 21 nt, Human
agguggggcugcaccucugcu

SEQ ID NO: 414493 - RNA, 22 nt, Human
uuaacagauguuuauggagcau

SEQ ID NO: 414494 - RNA, 22 nt, Human
uucucuggaacugaaacaagau

SEQ ID NO: 414495 - RNA, 23 nt, Human
aggcuuccuaucuuagagcuggg

SEQ ID NO: 414496 - RNA, 21 nt, Human
uuacuuuugcaccaaccuaau

SEQ ID NO: 414497 - RNA, 16 nt, Human
aggcagagauuuaccc

SEQ ID NO: 414498 - RNA, 22 nt, Human
gagguggguguaucacagguca

SEQ ID NO: 414499 - RNA, 22 nt, Human
ucagaaauagucuuuaaaauga

SEQ ID NO: 414500 - RNA, 22 nt, Human
uggcucagcauucacuggucuu

SEQ ID NO: 414501 - RNA, 17 nt, Human
ucagcaaagacaaagga

SEQ ID NO: 414502 - RNA, 22 nt, Human
uggcagguuuccuccucauagu

SEQ ID NO: 414503 - RNA, 22 nt, Human
uccucuggggucagggcacuac

SEQ ID NO: 414504 - RNA, 22 nt, Human
uuuaaaaucagaugggaguugg

SEQ ID NO: 414505 - RNA, 22 nt, Human
gggcuacauugugagagaaguu

SEQ ID NO: 414506 - RNA, 22 nt, Human
ucucagagcuucaguuauuuuc

SEQ ID NO: 414507 - RNA, 22 nt, Human
guccucugaaguugugcaaugc

SEQ ID NO: 414508 - RNA, 22 nt, Human
agggcuggcaucucuaaugcug

SEQ ID NO: 414509 - RNA, 22 nt, Human
gaggugggaugugugugcuacu

SEQ ID NO: 414510 - RNA, 22 nt, Human
gcaggaguuaggcgucguggau

SEQ ID NO: 414511 - RNA, 22 nt, Human
aaauauaauuucugccucaaua

SEQ ID NO: 414512 - RNA, 22 nt, Human
aaagacugggacugcagcaggc

SEQ ID NO: 414513 - RNA, 22 nt, Human
acagcaggauuuggcgauguug

SEQ ID NO: 414514 - RNA, 22 nt, Human
caaggccugccucuggcagaaa

SEQ ID NO: 414515 - RNA, 22 nt, Human
ucuuuccuaggugauaugcaau

SEQ ID NO: 414516 - RNA, 22 nt, Human
cagccagcuggcacugugagua

SEQ ID NO: 414517 - RNA, 22 nt, Human
aggggccuggacauggacgcgc

SEQ ID NO: 414518 - RNA, 21 nt, Human
ugcaugcuauguuuuuauuuc

SEQ ID NO: 414519 - RNA, 22 nt, Human
ucacacacauggauaguauuuu

SEQ ID NO: 414520 - RNA, 22 nt, Human
gagcuuugcuggaagccugggg

SEQ ID NO: 414521 - RNA, 22 nt, Human
cccuccagagcuugaccugcug

SEQ ID NO: 414522 - RNA, 18 nt, Human
uccucucuuuccccaggg

SEQ ID NO: 414523 - RNA, 23 nt, Human
gccauggcugccccacaggccuc

SEQ ID NO: 414524 - RNA, 22 nt, Human
gggcugagauuggugcccuguc

SEQ ID NO: 414525 - RNA, 22 nt, Human
ugagugaggaagcgguggagga

SEQ ID NO: 414526 - RNA, 22 nt, Human
aucagcaaguccuguuaauucu

SEQ ID NO: 414527 - RNA, 22 nt, Human
ucucagagaccugaacucccug

SEQ ID NO: 414528 - RNA, 19 nt, Human
agcagagcccugaagaucc

SEQ ID NO: 414529 - RNA, 22 nt, Human
guguacauauugagucugcuga

SEQ ID NO: 414530 - RNA, 22 nt, Human
cauggaaggcaaaagacacaga

SEQ ID NO: 414531 - RNA, 22 nt, Human
uccaauaacaucuaaaaacuua

SEQ ID NO: 414532 - RNA, 22 nt, Human
ggcucccaggagggccuggagg

SEQ ID NO: 414533 - RNA, 22 nt, Human
guggcuucacauggcauuuggc

SEQ ID NO: 414534 - RNA, 22 nt, Human
acacacuguugcucauccaggc

SEQ ID NO: 414535 - RNA, 22 nt, Human
auuuucaucgcuagguuggccu

SEQ ID NO: 414536 - RNA, 20 nt, Human
acugagcugcauggagagga

SEQ ID NO: 414537 - RNA, 22 nt, Human
cugagggccuuggcuccugccc

SEQ ID NO: 414538 - RNA, 22 nt, Human
guggcaggucccauuggagcag

SEQ ID NO: 414539 - RNA, 22 nt, Human
uugcauugcuuggucuucaaga

SEQ ID NO: 414540 - RNA, 22 nt, Human
cccaggcagugugugcaugcgu

SEQ ID NO: 414541 - RNA, 22 nt, Human
uaagcaaauagcuagaucagag

SEQ ID NO: 414542 - RNA, 18 nt, Human
acucaggaaaugaugaca

SEQ ID NO: 414543 - RNA, 22 nt, Human
uuuuuaguagagguggguuuca

SEQ ID NO: 414544 - RNA, 22 nt, Human
auaaggcagaaauagggaaagu

SEQ ID NO: 414545 - RNA, 22 nt, Human
uuacauuuuaguuaaccuguga

SEQ ID NO: 414546 - RNA, 22 nt, Human
ucacagugagccaugucagaga

SEQ ID NO: 414547 - RNA, 22 nt, Human
gccugagagacccauggggcaa

SEQ ID NO: 414548 - RNA, 22 nt, Human
uuugaaaguccuaggagagucc

SEQ ID NO: 414549 - RNA, 22 nt, Human
cagaaguaagauuacugugaga

SEQ ID NO: 414550 - RNA, 22 nt, Human
ggcucagguuuccuucccagcu

SEQ ID NO: 414551 - RNA, 22 nt, Human
ucucauucauacccuacaugcu

SEQ ID NO: 414552 - RNA, 22 nt, Human
gggaggaaaugugcagcgaauu

SEQ ID NO: 414553 - RNA, 22 nt, Human
ucugagaguccaucuccaagcc

SEQ ID NO: 414554 - RNA, 22 nt, Human
ugucaacacaccuaucucaauu

SEQ ID NO: 414555 - RNA, 22 nt, Human
cugucucuguugccuguaggug

SEQ ID NO: 414556 - RNA, 22 nt, Human
uggaggugagugugguacagca

SEQ ID NO: 414557 - RNA, 22 nt, Human
gcaggcuggaggcuguucuggg

SEQ ID NO: 414558 - RNA, 22 nt, Human
agauuuccugcacugccuuuga

SEQ ID NO: 414559 - RNA, 22 nt, Human
agucaauuaucucuaggucauc

SEQ ID NO: 414560 - RNA, 22 nt, Human
uuuauuguuguuagucauaagu

SEQ ID NO: 414561 - RNA, 21 nt, Human
uggcugaguggaugcaugaau

SEQ ID NO: 414562 - RNA, 22 nt, Human
ucagggcacaggccuguggguu

SEQ ID NO: 414563 - RNA, 22 nt, Human
cagcugagcucccaggccauca

SEQ ID NO: 414564 - RNA, 22 nt, Human
gaagcagcgaaguggaagggac

SEQ ID NO: 414565 - RNA, 22 nt, Human
cccagcucaucaggagccgccc

SEQ ID NO: 414566 - RNA, 22 nt, Human
aaggugucggguuagcucagcc

SEQ ID NO: 414567 - RNA, 22 nt, Human
uuaugcaaaggggccucuuccu

SEQ ID NO: 414568 - RNA, 22 nt, Human
cagcauggagacaaagugggca

SEQ ID NO: 414569 - RNA, 22 nt, Human
acugcccuguaacugccaggua

SEQ ID NO: 414570 - RNA, 22 nt, Human
ugguuugcccacucgagugauu

SEQ ID NO: 414571 - RNA, 22 nt, Human
aggcccagcccguccucgugcu

SEQ ID NO: 414572 - RNA, 22 nt, Human
acuggacagaggaaauauggag

SEQ ID NO: 414573 - RNA, 22 nt, Human
cagcauggggcuuggagucagc

SEQ ID NO: 414574 - RNA, 22 nt, Human
ucaguggauuggaugagaucug

SEQ ID NO: 414575 - RNA, 22 nt, Human
ccagucacagguguguuuauau

SEQ ID NO: 414576 - RNA, 22 nt, Human
ucuggaguccagauccauuugg

SEQ ID NO: 414577 - RNA, 22 nt, Human
ucaguggauuguagaaggcuua

SEQ ID NO: 414578 - RNA, 22 nt, Human
caggagaagucucuagggggug

SEQ ID NO: 414579 - RNA, 22 nt, Human
ccacagggacuguuaaaacccu

SEQ ID NO: 414580 - RNA, 22 nt, Human
agaaagaacguugguuaucuua

SEQ ID NO: 414581 - RNA, 22 nt, Human
aggucacccguuugacuaucca

SEQ ID NO: 414582 - RNA, 22 nt, Human
cauuuguacagaacagcuuuau

SEQ ID NO: 414583 - RNA, 22 nt, Human
uuccucuuucucugugcuaugu

SEQ ID NO: 414584 - RNA, 22 nt, Human
auucaguuaaaaacuguacuuc

SEQ ID NO: 414585 - RNA, 22 nt, Human
ugaggcuccagccaggccagca

SEQ ID NO: 414586 - RNA, 22 nt, Human
gccuggagccucagcaaggagg

SEQ ID NO: 414587 - RNA, 22 nt, Human
caaggaaaaagcgagcucgggg

SEQ ID NO: 414588 - RNA, 22 nt, Human
aaaucuaggcucauccuggucc

SEQ ID NO: 414589 - RNA, 22 nt, Human
ucccaggaaaacacucgaggac

SEQ ID NO: 414590 - RNA, 22 nt, Human
gcacagggcaacaggucuguua

SEQ ID NO: 414591 - RNA, 21 nt, Human
ccuucuccacagggucuccgg

SEQ ID NO: 414592 - RNA, 22 nt, Human
cugagaggcacaaggcauuucg

SEQ ID NO: 414593 - RNA, 22 nt, Human
ugacagcugagccccaggcaag

SEQ ID NO: 414594 - RNA, 22 nt, Human
uccuuugacuucuugcagucca

SEQ ID NO: 414595 - RNA, 22 nt, Human
auucauuccaggucagucagac

SEQ ID NO: 414596 - RNA, 22 nt, Human
agaaauacuaggaauauucaua

SEQ ID NO: 414597 - RNA, 22 nt, Human
uuagcaucugcuguaagcuuau

SEQ ID NO: 414598 - RNA, 22 nt, Human
uccaggcauguugggaagauga

SEQ ID NO: 414599 - RNA, 22 nt, Human
aaugaucuggcucaggauauca

SEQ ID NO: 414600 - RNA, 22 nt, Human
aucuggcucgcuaggcucuggg

SEQ ID NO: 414601 - RNA, 22 nt, Human
aaaggucauugaaaaggaggaa

SEQ ID NO: 414602 - RNA, 22 nt, Human
gacagggcgagacucagucuca

SEQ ID NO: 414603 - RNA, 23 nt, Human
uccagcagagccuuccaggaggg

SEQ ID NO: 414604 - RNA, 22 nt, Human
aggaaaaaagucugugauuaua

SEQ ID NO: 414605 - RNA, 20 nt, Human
gaagcagcuucauguagaca

SEQ ID NO: 414606 - RNA, 22 nt, Human
gcaggcagagaaggaacauuua

SEQ ID NO: 414607 - RNA, 22 nt, Human
acauguggucaaucuguguagg

SEQ ID NO: 414608 - RNA, 22 nt, Human
aagagcuggagcugcuacagga

SEQ ID NO: 414609 - RNA, 22 nt, Human
accagagcuuacaugcuagaaa

SEQ ID NO: 414610 - RNA, 22 nt, Human
cuguccuguggaccugaggacg

SEQ ID NO: 414611 - RNA, 22 nt, Human
ccuccuuuccuguuuuccugag

SEQ ID NO: 414612 - RNA, 22 nt, Human
ucuacuuuucccuauacaguuu

SEQ ID NO: 414613 - RNA, 22 nt, Human
gcugcaggagcuggagcugugg

SEQ ID NO: 414614 - RNA, 22 nt, Human
gaagcagcagcuggggacaguu

SEQ ID NO: 414615 - RNA, 22 nt, Human
agagccacggcaggccuaggaa

SEQ ID NO: 414616 - RNA, 23 nt, Human
ugcucugugaauaguuggugacu

SEQ ID NO: 414617 - RNA, 22 nt, Human
ucauuuaauaauuuuugaguag

SEQ ID NO: 414618 - RNA, 22 nt, Human
ugcagaguaaaagcagaugcua

SEQ ID NO: 414619 - RNA, 22 nt, Human
gcagugccuugcuucucugucu

SEQ ID NO: 414620 - RNA, 22 nt, Human
uuguuucugaguuuucauguau

SEQ ID NO: 414621 - RNA, 22 nt, Human
auucauuugcuauuguguaugg

SEQ ID NO: 414622 - RNA, 22 nt, Human
cauuuguaucauauguaucuua

SEQ ID NO: 414623 - RNA, 22 nt, Human
uuacaucuaaacugugaacaau

SEQ ID NO: 414624 - RNA, 22 nt, Human
ucucuggccgagagucccuggg

SEQ ID NO: 414625 - RNA, 22 nt, Human
guccuggcccacuggcaggcug

SEQ ID NO: 414626 - RNA, 22 nt, Human
ccucccaccguaucucaguggc

SEQ ID NO: 414627 - RNA, 22 nt, Human
aagauuuccuggauguaauucc

SEQ ID NO: 414628 - RNA, 22 nt, Human
cugagaggugacagcgugcugg

SEQ ID NO: 414629 - RNA, 22 nt, Human
cauguacacucauguaacuaua

SEQ ID NO: 414630 - RNA, 23 nt, Human
uccaggcaugagcucuggaugga

SEQ ID NO: 414631 - RNA, 22 nt, Human
auuuauuauugugguuacuucu

SEQ ID NO: 414632 - RNA, 22 nt, Human
ccuuucucuuugcugaucaugu

SEQ ID NO: 414633 - RNA, 22 nt, Human
ucuuuacaaucuaagcauaguu

SEQ ID NO: 414634 - RNA, 22 nt, Human
ggggugggcgugcagggacacc

SEQ ID NO: 414635 - RNA, 22 nt, Human
caggcagauuugcugcccucca

SEQ ID NO: 414636 - RNA, 22 nt, Human
agugcugucccgacaacugagg

SEQ ID NO: 414637 - RNA, 22 nt, Human
gaggagcaugggaaggcucugg

SEQ ID NO: 414638 - RNA, 22 nt, Human
cauaauuuuuuuaagucagaac

SEQ ID NO: 414639 - RNA, 22 nt, Human
caccugcagggggagucaagag

SEQ ID NO: 414640 - RNA, 22 nt, Human
ccagaaggcggagauugcagug

SEQ ID NO: 414641 - RNA, 22 nt, Human
ugauuuccaugaagcugaaggc

SEQ ID NO: 414642 - RNA, 22 nt, Human
agguacagggugaaaguuuaug

SEQ ID NO: 414643 - RNA, 22 nt, Human
gccuucugauugcuggacugac

SEQ ID NO: 414644 - RNA, 22 nt, Human
acaugcaugucuaugggcaggu

SEQ ID NO: 414645 - RNA, 22 nt, Human
agggaccuugauggguuuggga

SEQ ID NO: 414646 - RNA, 22 nt, Human
ucaggaugagcucauaacuaug

SEQ ID NO: 414647 - RNA, 23 nt, Human
aggagacagggaagugccuggcu

SEQ ID NO: 414648 - RNA, 22 nt, Human
gaggcaggcccugaaugaguca

SEQ ID NO: 414649 - RNA, 22 nt, Human
uagggaggcuacuucuuguagg

SEQ ID NO: 414650 - RNA, 22 nt, Human
guuugcauaaaguggaugcagg

SEQ ID NO: 414651 - RNA, 23 nt, Human
ucagagaaguuguaggcugggga

SEQ ID NO: 414652 - RNA, 22 nt, Human
gcugcagugagccaagaucgug

SEQ ID NO: 414653 - RNA, 22 nt, Human
uaugagaaaauaaauaucuguu

SEQ ID NO: 414654 - RNA, 22 nt, Human
ucucagagugacaaugagaauu

SEQ ID NO: 414655 - RNA, 22 nt, Human
ugcaguggaggccgugagacag

SEQ ID NO: 414656 - RNA, 22 nt, Human
caggugggccgggguuuguucu

SEQ ID NO: 414657 - RNA, 22 nt, Human
acuuugcaaugggcagaaccca

SEQ ID NO: 414658 - RNA, 22 nt, Human
gccacucaugggaggugugcaa

SEQ ID NO: 414659 - RNA, 22 nt, Human
uuucacaaucaaauggugaaau

SEQ ID NO: 414660 - RNA, 22 nt, Human
uucauugucucuguuugccuuc

SEQ ID NO: 414661 - RNA, 22 nt, Human
agauuaugcuggcugcuacaag

SEQ ID NO: 414662 - RNA, 19 nt, Human
gcuguacaguaaggagaca

SEQ ID NO: 414663 - RNA, 22 nt, Human
uaagacacaugcguacaagaua

SEQ ID NO: 414664 - RNA, 22 nt, Human
ucagagugaggcccagcaaucu

SEQ ID NO: 414665 - RNA, 22 nt, Human
auaauaacaccugaauaggaaa

SEQ ID NO: 414666 - RNA, 22 nt, Human
uccguauuugacuauugcaccg

SEQ ID NO: 414667 - RNA, 23 nt, Human
ucuugaaaagccuacagcaguuc

SEQ ID NO: 414668 - RNA, 20 nt, Human
gcacugaagguuccagggga

SEQ ID NO: 414669 - RNA, 22 nt, Human
acguuuucagugacugugcuuc

SEQ ID NO: 414670 - RNA, 22 nt, Human
augaaaacggaccagagcuauu

SEQ ID NO: 414671 - RNA, 17 nt, Human
gguggccugcaguggcu

SEQ ID NO: 414672 - RNA, 19 nt, Human
ucugccucuggucaggcuc

SEQ ID NO: 414673 - RNA, 22 nt, Human
ugaaggccucugguacaugcca

SEQ ID NO: 414674 - RNA, 22 nt, Human
aggccuggccccaguugcuagg

SEQ ID NO: 414675 - RNA, 22 nt, Human
cugcucuguuaauuaaacuuug

SEQ ID NO: 414676 - RNA, 22 nt, Human
cagugcagguuuagggcugggg

SEQ ID NO: 414677 - RNA, 22 nt, Human
gcaaaugcucuccuuggucagg

SEQ ID NO: 414678 - RNA, 22 nt, Human
cuguccuaugaguacucacuag

SEQ ID NO: 414679 - RNA, 20 nt, Human
ggcagagggccugggagaag

SEQ ID NO: 414680 - RNA, 22 nt, Human
ggcucaggacacagugguuuag

SEQ ID NO: 414681 - RNA, 22 nt, Human
cguggccuuugagugagcuccc

SEQ ID NO: 414682 - RNA, 22 nt, Human
cacagcuggggaagcugaggcc

SEQ ID NO: 414683 - RNA, 22 nt, Human
ugauugaacugagcuucaagau

SEQ ID NO: 414684 - RNA, 22 nt, Human
ggccagagaagucagacccuug

SEQ ID NO: 414685 - RNA, 22 nt, Human
ucagcagcagcucagcauguuu

SEQ ID NO: 414686 - RNA, 22 nt, Human
guagggacuuguuuuacuagua

SEQ ID NO: 414687 - RNA, 22 nt, Human
caggagcugggucuggaagcag

SEQ ID NO: 414688 - RNA, 22 nt, Human
uggagagcaagucgcagacaug

SEQ ID NO: 414689 - RNA, 22 nt, Human
augauugaccaucugcugggcu

SEQ ID NO: 414690 - RNA, 22 nt, Human
uccagcucuaacaugcugggcc

SEQ ID NO: 414691 - RNA, 22 nt, Human
agccaguguuaagugacugguu

SEQ ID NO: 414692 - RNA, 22 nt, Human
cugggagggguagccaauccua

SEQ ID NO: 414693 - RNA, 22 nt, Human
gcuggcauuacaggagagaacc

SEQ ID NO: 414694 - RNA, 22 nt, Human
aggcaucugaguuugcaagcuu

SEQ ID NO: 414695 - RNA, 22 nt, Human
ccaggugucaugcgugugaccc

SEQ ID NO: 414696 - RNA, 19 nt, Human
ugggcuuccccagggcaga

SEQ ID NO: 414697 - RNA, 22 nt, Human
uaugagcuuccaguguugcaug

SEQ ID NO: 414698 - RNA, 17 nt, Human
gcagcagagagacccuc

SEQ ID NO: 414699 - RNA, 22 nt, Human
ugucucagaguaucccugaacu

SEQ ID NO: 414700 - RNA, 22 nt, Human
cccagcuccgagcuccgagccg

SEQ ID NO: 414701 - RNA, 22 nt, Human
ucacauuuuuuacuggacuuaa

SEQ ID NO: 414702 - RNA, 22 nt, Human
ucuuugcaugcauuuucccuua

SEQ ID NO: 414703 - RNA, 17 nt, Human
caggcagacauguaagc

SEQ ID NO: 414704 - RNA, 22 nt, Human
ugcuggccaauggcagaggcgg

SEQ ID NO: 414705 - RNA, 22 nt, Human
aggaggccgggauucuggagau

SEQ ID NO: 414706 - RNA, 22 nt, Human
accacugggcgggcagccugcu

SEQ ID NO: 414707 - RNA, 22 nt, Human
gccagggcaggggagcaucugc

SEQ ID NO: 414708 - RNA, 21 nt, Human
aggcccagcuuuccucuugcu

SEQ ID NO: 414709 - RNA, 22 nt, Human
gggcacuggaggccaaggagcu

SEQ ID NO: 414710 - RNA, 22 nt, Human
uccaggaggugaggggaccaaa

SEQ ID NO: 414711 - RNA, 22 nt, Human
aggcagaggaaggguggauuug

SEQ ID NO: 414712 - RNA, 22 nt, Human
cauuuacuguugaaucccuagc

SEQ ID NO: 414713 - RNA, 22 nt, Human
ugcugucugcaacaguacuaca

SEQ ID NO: 414714 - RNA, 22 nt, Human
agcuucuggaaggcaaggcuug

SEQ ID NO: 414715 - RNA, 22 nt, Human
guggccaggacauugccaggca

SEQ ID NO: 414716 - RNA, 22 nt, Human
uuuuuauaugaaggauagugcg

SEQ ID NO: 414717 - RNA, 22 nt, Human
ggcagaggaggggugaauuugc

SEQ ID NO: 414718 - RNA, 22 nt, Human
uggagggcucuuucaccuggua

SEQ ID NO: 414719 - RNA, 22 nt, Human
ucauggauggccgggaggugau

SEQ ID NO: 414720 - RNA, 22 nt, Human
ugccucugguuaucugguaccu

SEQ ID NO: 414721 - RNA, 22 nt, Human
gccuuggccuuccuaggccuga

SEQ ID NO: 414722 - RNA, 22 nt, Human
cuccagggaaaggggcguccgc

SEQ ID NO: 414723 - RNA, 22 nt, Human
cagagcugucauuugccaguga

SEQ ID NO: 414724 - RNA, 21 nt, Human
ugcagcagaguaagcagggga

SEQ ID NO: 414725 - RNA, 22 nt, Human
uacauaauugucuuuguccuca

SEQ ID NO: 414726 - RNA, 22 nt, Human
gggcugcuguagagaacauguu

SEQ ID NO: 414727 - RNA, 22 nt, Human
ggacuccucuagaaguugaggc

SEQ ID NO: 414728 - RNA, 19 nt, Human
agcauccagucaugggauc

SEQ ID NO: 414729 - RNA, 22 nt, Human
gggucagcugcugggggcugac

SEQ ID NO: 414730 - RNA, 22 nt, Human
agucccagcucugccacuuacu

SEQ ID NO: 414731 - RNA, 22 nt, Human
uuaauuuuuauguauagugugu

SEQ ID NO: 414732 - RNA, 22 nt, Human
auucuucacuguuucagaauga

SEQ ID NO: 414733 - RNA, 22 nt, Human
cagggcuguuagcugcugcucu

SEQ ID NO: 414734 - RNA, 22 nt, Human
uuauuagggugguuuauguucu

SEQ ID NO: 414735 - RNA, 22 nt, Human
cuggcccagagagcagagcuua

SEQ ID NO: 414736 - RNA, 22 nt, Human
uuucacauaugguuguugauug

SEQ ID NO: 414737 - RNA, 22 nt, Human
ccauaaggagccagacauucca

SEQ ID NO: 414738 - RNA, 21 nt, Human
ccaccaggucuucugcucggg

SEQ ID NO: 414739 - RNA, 22 nt, Human
ccuggugccacuagagaauguc

SEQ ID NO: 414740 - RNA, 22 nt, Human
aacacuguacuggaagauggac

SEQ ID NO: 414741 - RNA, 22 nt, Human
ccaggacuucgaggcuacagug

SEQ ID NO: 414742 - RNA, 18 nt, Human
cagaaaucacaccagcac

SEQ ID NO: 414743 - RNA, 22 nt, Human
aaacaucaauugcaucucccaa

SEQ ID NO: 414744 - RNA, 20 nt, Human
acaaaugcauucugugacau

SEQ ID NO: 414745 - RNA, 22 nt, Human
aggggugugcauccuggaggau

SEQ ID NO: 414746 - RNA, 22 nt, Human
acaggccugugugcacacgagg

SEQ ID NO: 414747 - RNA, 22 nt, Human
ggccucucucccuggcuugcag

SEQ ID NO: 414748 - RNA, 22 nt, Human
caggccuggguucaaaucccuu

SEQ ID NO: 414749 - RNA, 22 nt, Human
ccuucauugcaucuuuaagaga

SEQ ID NO: 414750 - RNA, 22 nt, Human
ugucagugguagacccagaggu

SEQ ID NO: 414751 - RNA, 22 nt, Human
caguggcugugaccagggaccu

SEQ ID NO: 414752 - RNA, 17 nt, Human
cucagaguugcuuuguc

SEQ ID NO: 414753 - RNA, 22 nt, Human
aagucagagcaacugagacauu

SEQ ID NO: 414754 - RNA, 22 nt, Human
ggugaggaauuggggacugacc

SEQ ID NO: 414755 - RNA, 22 nt, Human
gcucugagucucagcuaccaca

SEQ ID NO: 414756 - RNA, 22 nt, Human
uuugaaagcaccauuugaguag

SEQ ID NO: 414757 - RNA, 22 nt, Human
cagucucuugcuucauuaguug

SEQ ID NO: 414758 - RNA, 22 nt, Human
uggcuggggccugaauccugca

SEQ ID NO: 414759 - RNA, 22 nt, Human
aggcccagagcaggaaaggguu

SEQ ID NO: 414760 - RNA, 22 nt, Human
aaggagugcaugacucagagua

SEQ ID NO: 414761 - RNA, 22 nt, Human
ugaggcucacaaaucugcauuu

SEQ ID NO: 414762 - RNA, 22 nt, Human
agggcagcccuucugggagggc

SEQ ID NO: 414763 - RNA, 22 nt, Human
gccugagacagugugguccaau

SEQ ID NO: 414764 - RNA, 22 nt, Human
augaaggcaguuaaacgucauc

SEQ ID NO: 414765 - RNA, 22 nt, Human
gaaaggaaauauucuaagcacu

SEQ ID NO: 414766 - RNA, 22 nt, Human
agcuuuaugggagcuuagauaa

SEQ ID NO: 414767 - RNA, 22 nt, Human
ucauugcauuuauucacuggca

SEQ ID NO: 414768 - RNA, 22 nt, Human
gcucagaggaugcuccuuuaug

SEQ ID NO: 414769 - RNA, 21 nt, Human
uucuucaugaugauuaauggc

SEQ ID NO: 414770 - RNA, 22 nt, Human
aaauguaguauguugcauguau

SEQ ID NO: 414771 - RNA, 22 nt, Human
uuggaggcaaugggaaggaggc

SEQ ID NO: 414772 - RNA, 22 nt, Human
acagugugaugggccugccuga

SEQ ID NO: 414773 - RNA, 22 nt, Human
aguggggagguccaggccaccc

SEQ ID NO: 414774 - RNA, 22 nt, Human
ugucucugaacagcuuacuaaa

SEQ ID NO: 414775 - RNA, 22 nt, Human
agggcuggcuaggugcguuccc

SEQ ID NO: 414776 - RNA, 22 nt, Human
agcuuuauucaugauuucaggg

SEQ ID NO: 414777 - RNA, 22 nt, Human
agcuuuauggugccucacuuga

SEQ ID NO: 414778 - RNA, 22 nt, Human
aauuugcaugaugagaacaaua

SEQ ID NO: 414779 - RNA, 22 nt, Human
uggagcugguaaacagugacau

SEQ ID NO: 414780 - RNA, 22 nt, Human
gcagauggugggggaggaguac

SEQ ID NO: 414781 - RNA, 22 nt, Human
ccauccugcauugcuauucaga

SEQ ID NO: 414782 - RNA, 22 nt, Human
agcaccuggucuccuggcgcug

SEQ ID NO: 414783 - RNA, 22 nt, Human
gcccugucggaacugcgaccuc

SEQ ID NO: 414784 - RNA, 22 nt, Human
gggcucuggaaggugcaccaug

SEQ ID NO: 414785 - RNA, 22 nt, Human
ccagagagcuacaaggcauaaa

SEQ ID NO: 414786 - RNA, 22 nt, Human
agcaggcuuguuaugucugaga

SEQ ID NO: 414787 - RNA, 22 nt, Human
gcugcccaggguggagccggcu

SEQ ID NO: 414788 - RNA, 22 nt, Human
uuggaaggugagucccuggguu

SEQ ID NO: 414789 - RNA, 22 nt, Human
gugacucacacaggccugggcu

SEQ ID NO: 414790 - RNA, 22 nt, Human
ucaucaaagcgcuuggaguagg

SEQ ID NO: 414791 - RNA, 22 nt, Human
gcagggacgcagcacucuccgu

SEQ ID NO: 414792 - RNA, 22 nt, Human
gccaggugcauggcugagucuc

SEQ ID NO: 414793 - RNA, 22 nt, Human
ucacaggguguacaucaccuau

SEQ ID NO: 414794 - RNA, 22 nt, Human
gcagggugccgacuucagggau

SEQ ID NO: 414795 - RNA, 22 nt, Human
ucagcuuuugucagaaauugua

SEQ ID NO: 414796 - RNA, 22 nt, Human
ccucugaggucauggacuuggc

SEQ ID NO: 414797 - RNA, 22 nt, Human
gcaccaggcagcugagcaggcc

SEQ ID NO: 414798 - RNA, 22 nt, Human
ccaggcugugguuuagauagag

SEQ ID NO: 414799 - RNA, 17 nt, Human
aggcaggagauuggaga

SEQ ID NO: 414800 - RNA, 22 nt, Human
cauuuguaguaucuguuuauau

SEQ ID NO: 414801 - RNA, 22 nt, Human
ggcccugagcugaaguacugug

SEQ ID NO: 414802 - RNA, 22 nt, Human
agugcauugcaucucugcuuca

SEQ ID NO: 414803 - RNA, 22 nt, Human
aaggaagguucauagucaaaga

SEQ ID NO: 414804 - RNA, 22 nt, Human
ucagggacgugagcucagaguc

SEQ ID NO: 414805 - RNA, 22 nt, Human
ugcugccuuagcagccaggcaa

SEQ ID NO: 414806 - RNA, 22 nt, Human
ucugccuuccccauaaucugau

SEQ ID NO: 414807 - RNA, 22 nt, Human
cugagccuuauucaccagcccu

SEQ ID NO: 414808 - RNA, 20 nt, Human
cuucaggacccauccucccc

SEQ ID NO: 414809 - RNA, 23 nt, Human
gagggcucugagugcuugggcca

SEQ ID NO: 414810 - RNA, 22 nt, Human
aaauuuucucucuaagacuuaa

SEQ ID NO: 414811 - RNA, 22 nt, Human
agagcagauggccagggggccu

SEQ ID NO: 414812 - RNA, 22 nt, Human
gaggcucaacccacagggguug

SEQ ID NO: 414813 - RNA, 22 nt, Human
aaggcuuuugggaauuuucaac

SEQ ID NO: 414814 - RNA, 22 nt, Human
ucagaggaggcauuuaaacaga

SEQ ID NO: 414815 - RNA, 22 nt, Human
ucucagagugguggucccucug

SEQ ID NO: 414816 - RNA, 22 nt, Human
cagucccaucucccagguggcu

SEQ ID NO: 414817 - RNA, 22 nt, Human
uggcucuguugugcugagccag

SEQ ID NO: 414818 - RNA, 22 nt, Human
acuuccuggcguagcugacauu

SEQ ID NO: 414819 - RNA, 22 nt, Human
uacccagcuucaagucaggacu

SEQ ID NO: 414820 - RNA, 22 nt, Human
gcagagcuguuaauggagcuga

SEQ ID NO: 414821 - RNA, 22 nt, Human
uccaugagacagauacuguaag

SEQ ID NO: 414822 - RNA, 22 nt, Human
cugacucuccucaagcauaaau

SEQ ID NO: 414823 - RNA, 22 nt, Human
gcugagcugcuguucauccugc

SEQ ID NO: 414824 - RNA, 21 nt, Human
uccagaccucccucuccuagc

SEQ ID NO: 414825 - RNA, 22 nt, Human
acagugugguuugagcacuggg

SEQ ID NO: 414826 - RNA, 22 nt, Human
gaggaagcugcguggcauuuca

SEQ ID NO: 414827 - RNA, 22 nt, Human
uagggcugccuauggcuagaua

SEQ ID NO: 414828 - RNA, 22 nt, Human
uuaugaaagacauuucuguugg

SEQ ID NO: 414829 - RNA, 22 nt, Human
ccaaguacagauuccuccacug

SEQ ID NO: 414830 - RNA, 22 nt, Human
cccucccagaugggcuugaggu

SEQ ID NO: 414831 - RNA, 19 nt, Human
ucucacaucagcuccuagc

SEQ ID NO: 414832 - RNA, 22 nt, Human
aaggaaaggaugagcaugcauu

SEQ ID NO: 414833 - RNA, 22 nt, Human
agaaaagguugaaaguaggauu

SEQ ID NO: 414834 - RNA, 22 nt, Human
gcugagugauugauauuuuagu

SEQ ID NO: 414835 - RNA, 22 nt, Human
agggcccuuacgcaggcccuuc

SEQ ID NO: 414836 - RNA, 22 nt, Human
aaggucauugguucugaauucu

SEQ ID NO: 414837 - RNA, 22 nt, Human
accucuggccuucaggcaucau

SEQ ID NO: 414838 - RNA, 22 nt, Human
cagaggaagcagacacaucuug

SEQ ID NO: 414839 - RNA, 22 nt, Human
ccaguugguuucaaugggacag

SEQ ID NO: 414840 - RNA, 22 nt, Human
auuugucuuuggaccugugaga

SEQ ID NO: 414841 - RNA, 20 nt, Human
ccucaguguccuggacuggg

SEQ ID NO: 414842 - RNA, 22 nt, Human
gacagaagaggaacuuggacag

SEQ ID NO: 414843 - RNA, 17 nt, Human
uggcuucccugggccac

SEQ ID NO: 414844 - RNA, 22 nt, Human
uucuaguucauauucucaaaga

SEQ ID NO: 414845 - RNA, 22 nt, Human
ugucagggcaugcgguccagcc

SEQ ID NO: 414846 - RNA, 22 nt, Human
cugggugaguugaugaaggaga

SEQ ID NO: 414847 - RNA, 22 nt, Human
gaaaggccauuucugaggguuu

SEQ ID NO: 414848 - RNA, 22 nt, Human
ccagcugacgaugccuggucuc

SEQ ID NO: 414849 - RNA, 23 nt, Human
cccauuuucauguuaacuccugg

SEQ ID NO: 414850 - RNA, 22 nt, Human
cagagcuggguuugggaaaccu

SEQ ID NO: 414851 - RNA, 22 nt, Human
ucugagccguauggcuuggcua

SEQ ID NO: 414852 - RNA, 22 nt, Human
gggagggaggugcugguucacg

SEQ ID NO: 414853 - RNA, 22 nt, Human
gcucaaagaauauucagaauga

SEQ ID NO: 414854 - RNA, 22 nt, Human
agggaggauaguagucaguuua

SEQ ID NO: 414855 - RNA, 22 nt, Human
caggaacauuuaaccacagggu

SEQ ID NO: 414856 - RNA, 22 nt, Human
ccugcccagcuucaccucaggc

SEQ ID NO: 414857 - RNA, 22 nt, Human
ugcagcagacugaguaugagaa

SEQ ID NO: 414858 - RNA, 19 nt, Human
cagaccuguccagccugug

SEQ ID NO: 414859 - RNA, 22 nt, Human
uauggaaaguguuuucuucugu

SEQ ID NO: 414860 - RNA, 22 nt, Human
uauccaaaggaacaaucacagc

SEQ ID NO: 414861 - RNA, 19 nt, Human
ggcugucuggcguguggau

SEQ ID NO: 414862 - RNA, 22 nt, Human
ugucucagaauggcucauaaua

SEQ ID NO: 414863 - RNA, 22 nt, Human
uuguaacaaucugucauaaaug

SEQ ID NO: 414864 - RNA, 22 nt, Human
ugcaagagguaaaaugaaagga

SEQ ID NO: 414865 - RNA, 22 nt, Human
aaugguuuaacauaugcuugag

SEQ ID NO: 414866 - RNA, 22 nt, Human
ugaaggccagcagagugaaggc

SEQ ID NO: 414867 - RNA, 22 nt, Human
aaaggcaggcuuucacaucuca

SEQ ID NO: 414868 - RNA, 22 nt, Human
ggaggcuccuaagcugacuuga

SEQ ID NO: 414869 - RNA, 22 nt, Human
caggagugaaaugaggcccagg

SEQ ID NO: 414870 - RNA, 22 nt, Human
ucacacagauugguagagcuga

SEQ ID NO: 414871 - RNA, 23 nt, Human
cccagcuuucccacugccgagag

SEQ ID NO: 414872 - RNA, 22 nt, Human
acaggcagguccugucccagcu

SEQ ID NO: 414873 - RNA, 22 nt, Human
ucagagccaaucauggugcauu

SEQ ID NO: 414874 - RNA, 23 nt, Human
gcugagguacauuuacaggaaga

SEQ ID NO: 414875 - RNA, 22 nt, Human
caggggaaggagccuugaaacu

SEQ ID NO: 414876 - RNA, 22 nt, Human
aggaggccgauuucagaggucg

SEQ ID NO: 414877 - RNA, 22 nt, Human
cagccagaaccuaggaugagcu

SEQ ID NO: 414878 - RNA, 22 nt, Human
ucuugacauuguuguuagcagg

SEQ ID NO: 414879 - RNA, 22 nt, Human
gggagccaaggagagaggccuu

SEQ ID NO: 414880 - RNA, 19 nt, Human
ccugucugucuucagcuag

SEQ ID NO: 414881 - RNA, 22 nt, Human
acagauuuuaaaugacacuccc

SEQ ID NO: 414882 - RNA, 18 nt, Human
gucacuguguuucugagc

SEQ ID NO: 414883 - RNA, 22 nt, Human
gaggaccacagaugagccugca

SEQ ID NO: 414884 - RNA, 19 nt, Human
uugaggggccaggggagau

SEQ ID NO: 414885 - RNA, 22 nt, Human
ucucaguguguuuucucucaga

SEQ ID NO: 414886 - RNA, 22 nt, Human
ggcucuggaaaguguccuugau

SEQ ID NO: 414887 - RNA, 22 nt, Human
guuacaaaggucauaaaagugu

SEQ ID NO: 414888 - RNA, 22 nt, Human
gcaaggcugcugccacccaucu

SEQ ID NO: 414889 - RNA, 22 nt, Human
cuccagugcacccagaggauuu

SEQ ID NO: 414890 - RNA, 22 nt, Human
uucuuacuaguauguuucagca

SEQ ID NO: 414891 - RNA, 22 nt, Human
acauuuaaauaugccuuauauu

SEQ ID NO: 414892 - RNA, 22 nt, Human
caagaaauuucuuaagaacuaa

SEQ ID NO: 414893 - RNA, 22 nt, Human
caaaugcuaacuucuuuccaaa

SEQ ID NO: 414894 - RNA, 22 nt, Human
guuagggaagcgcuguguucuu

SEQ ID NO: 414895 - RNA, 22 nt, Human
uaugcauaauuggauaaguaga

SEQ ID NO: 414896 - RNA, 22 nt, Human
cagacagcugcuuucuugcugu

SEQ ID NO: 414897 - RNA, 22 nt, Human
cagaguguuagcgcugguuggg

SEQ ID NO: 414898 - RNA, 22 nt, Human
acacagggaggaggugcugugc

SEQ ID NO: 414899 - RNA, 22 nt, Human
gucaugccagcggagcucggga

SEQ ID NO: 414900 - RNA, 22 nt, Human
ugcugccuugaccuccugggcu

SEQ ID NO: 414901 - RNA, 22 nt, Human
acucacuuuccauucaagcacc

SEQ ID NO: 414902 - RNA, 22 nt, Human
gccuggaguggacuuggccccu

SEQ ID NO: 414903 - RNA, 22 nt, Human
aagauuucagaguuugggggaa

SEQ ID NO: 414904 - RNA, 22 nt, Human
ucugggagggagccucagaauc

SEQ ID NO: 414905 - RNA, 23 nt, Human
agggccacugggaaggauuacug

SEQ ID NO: 414906 - RNA, 22 nt, Human
agaaaucagaacccugaaguuc

SEQ ID NO: 414907 - RNA, 18 nt, Human
acagaggcagacauguau

SEQ ID NO: 414908 - RNA, 22 nt, Human
gguuucaaaguggacaguuagu

SEQ ID NO: 414909 - RNA, 22 nt, Human
caaaugaagggagcugaagucu

SEQ ID NO: 414910 - RNA, 20 nt, Human
ggcucuggaaucuggugggc

SEQ ID NO: 414911 - RNA, 22 nt, Human
gguuugcaugugauguugggca

SEQ ID NO: 414912 - RNA, 22 nt, Human
uaaaguauccaguuauucuucu

SEQ ID NO: 414913 - RNA, 22 nt, Human
acuguacacgugucauuuacag

SEQ ID NO: 414914 - RNA, 22 nt, Human
ucacugggagaugugggaaggg

SEQ ID NO: 414915 - RNA, 22 nt, Human
auuuucaucauggguuuaacau

SEQ ID NO: 414916 - RNA, 22 nt, Human
uccugcagacauuuacaccuuu

SEQ ID NO: 414917 - RNA, 22 nt, Human
augucuuucuuauggucuguug

SEQ ID NO: 414918 - RNA, 22 nt, Human
guuacacaggaaaacauuagca

SEQ ID NO: 414919 - RNA, 22 nt, Human
uuccuauuuccaugaaacacaa

SEQ ID NO: 414920 - RNA, 22 nt, Human
cauugcuguuaauugucucuag

SEQ ID NO: 414921 - RNA, 20 nt, Human
uccagggcuagggagcucau

SEQ ID NO: 414922 - RNA, 22 nt, Human
uguaagauauucagcuuauuga

SEQ ID NO: 414923 - RNA, 22 nt, Human
cagagagagucaaaucuuugcu

SEQ ID NO: 414924 - RNA, 17 nt, Human
gauuuccugaaguucuu

SEQ ID NO: 414925 - RNA, 21 nt, Human
agcugcuccagggagcucagg

SEQ ID NO: 414926 - RNA, 22 nt, Human
uucagugucaauuuuuaaauau

SEQ ID NO: 414927 - RNA, 20 nt, Human
gccugccucagcuagcugag

SEQ ID NO: 414928 - RNA, 22 nt, Human
ccuggcagcuguuuggcuuggc

SEQ ID NO: 414929 - RNA, 22 nt, Human
ucauccaguucacauggugagu

SEQ ID NO: 414930 - RNA, 22 nt, Human
ggaggccaccugaccugcuguu

SEQ ID NO: 414931 - RNA, 22 nt, Human
ccccagccuuccaugggaauug

SEQ ID NO: 414932 - RNA, 22 nt, Human
uuauuuucuccucagaaagugg

SEQ ID NO: 414933 - RNA, 22 nt, Human
caggcacuggccagucagcaca

SEQ ID NO: 414934 - RNA, 22 nt, Human
agagccagcauuugggcccugc

SEQ ID NO: 414935 - RNA, 22 nt, Human
gggcugaguuccugccucacuc

SEQ ID NO: 414936 - RNA, 22 nt, Human
uccagccacucagcagggauug

SEQ ID NO: 414937 - RNA, 22 nt, Human
gagccaaggguugccauggaga

SEQ ID NO: 414938 - RNA, 22 nt, Human
uauaguaaaauuuucauuuaug

SEQ ID NO: 414939 - RNA, 22 nt, Human
caaggagauaaaauguugagcu

SEQ ID NO: 414940 - RNA, 22 nt, Human
agcaugaaaggcgugccaacuu

SEQ ID NO: 414941 - RNA, 22 nt, Human
ggaugcaggggcagcagagccu

SEQ ID NO: 414942 - RNA, 22 nt, Human
gggcuggcaucaguugccgaga

SEQ ID NO: 414943 - RNA, 22 nt, Human
uuguaacagcuguuuauauagu

SEQ ID NO: 414944 - RNA, 22 nt, Human
uuucuacagguugauggguuug

SEQ ID NO: 414945 - RNA, 22 nt, Human
cagaggcacaagaaagcaaggc

SEQ ID NO: 414946 - RNA, 22 nt, Human
cacagcuugggcucugacaaua

SEQ ID NO: 414947 - RNA, 22 nt, Human
auguaacaaaugguauacaugu

SEQ ID NO: 414948 - RNA, 21 nt, Human
ggccucugucauccugggaag

SEQ ID NO: 414949 - RNA, 22 nt, Human
acuauacauugaauguuaaggu

SEQ ID NO: 414950 - RNA, 22 nt, Human
agacaucauguuacagauuaag

SEQ ID NO: 414951 - RNA, 22 nt, Human
gugcagcagggggaagacagug

SEQ ID NO: 414952 - RNA, 22 nt, Human
cuggccgguauuugccucuggg

SEQ ID NO: 414953 - RNA, 22 nt, Human
ggugggcacccgagacuggauc

SEQ ID NO: 414954 - RNA, 23 nt, Human
acugagccagggccugggucagc

SEQ ID NO: 414955 - RNA, 22 nt, Human
ccugggagcuguggaaaggcug

SEQ ID NO: 414956 - RNA, 22 nt, Human
acuguucauuuguccuguaucu

SEQ ID NO: 414957 - RNA, 22 nt, Human
gggaagguauuuagcugcugaa

SEQ ID NO: 414958 - RNA, 22 nt, Human
ggggugggguuacucauugugc

SEQ ID NO: 414959 - RNA, 22 nt, Human
ugucuuuaaaauuaaacacauc

SEQ ID NO: 414960 - RNA, 22 nt, Human
cuuggucauuuggggcugcuau

SEQ ID NO: 414961 - RNA, 22 nt, Human
aaguguauauaugacuuauaaa

SEQ ID NO: 414962 - RNA, 22 nt, Human
augggaggguggaaaggcucug

SEQ ID NO: 414963 - RNA, 22 nt, Human
ccugggagugugccaucucugu

SEQ ID NO: 414964 - RNA, 22 nt, Human
ucuccucugcgcggcagugccc

SEQ ID NO: 414965 - RNA, 22 nt, Human
cagaggccaccuguggccacug

SEQ ID NO: 414966 - RNA, 22 nt, Human
ccagggugaggaggcucccacg

SEQ ID NO: 414967 - RNA, 22 nt, Human
auguaacuucugugaaucugac

SEQ ID NO: 414968 - RNA, 22 nt, Human
uggagaaggggcagggucucca

SEQ ID NO: 414969 - RNA, 22 nt, Human
gcuggcagagacaagaagacua

SEQ ID NO: 414970 - RNA, 22 nt, Human
gcagcaaucuucacagugucau

SEQ ID NO: 414971 - RNA, 22 nt, Human
auuaaauuggacgcugggggaa

SEQ ID NO: 414972 - RNA, 22 nt, Human
gugcaggagguaacauagcaaa

SEQ ID NO: 414973 - RNA, 18 nt, Human
gcagcuuuugauucaccc

SEQ ID NO: 414974 - RNA, 22 nt, Human
cagggccacuguagaugaggag

SEQ ID NO: 414975 - RNA, 22 nt, Human
aaauuauuaugccccucuauaa

SEQ ID NO: 414976 - RNA, 22 nt, Human
cagcugggagcuccauuagaua

SEQ ID NO: 414977 - RNA, 22 nt, Human
gccagccccuuagggcucuccc

SEQ ID NO: 414978 - RNA, 22 nt, Human
gaaaugcagaaccugagaccau

SEQ ID NO: 414979 - RNA, 22 nt, Human
ucuggagccuuggaugggaaag

SEQ ID NO: 414980 - RNA, 22 nt, Human
cucagggcuugaguguccagga

SEQ ID NO: 414981 - RNA, 22 nt, Human
uuucaguguaagguuuccagga

SEQ ID NO: 414982 - RNA, 22 nt, Human
acaguaaaaagccuuagaauuu

SEQ ID NO: 414983 - RNA, 22 nt, Human
aagcugcccucauucccagugc

SEQ ID NO: 414984 - RNA, 22 nt, Human
uaaugcuucaauuuccuugauu

SEQ ID NO: 414985 - RNA, 22 nt, Human
aaacucuggagauguuuaugca

SEQ ID NO: 414986 - RNA, 22 nt, Human
ucacaacucuuuccauuuaaua

SEQ ID NO: 414987 - RNA, 22 nt, Human
uccagagggcgauggcuggggg

SEQ ID NO: 414988 - RNA, 22 nt, Human
acauuuaaccaaacuguuuaau

SEQ ID NO: 414989 - RNA, 22 nt, Human
acacagggauauuucagguggu

SEQ ID NO: 414990 - RNA, 22 nt, Human
gccugucucuuggaacuuggua

SEQ ID NO: 414991 - RNA, 22 nt, Human
ugaguucucacccauucuucuu

SEQ ID NO: 414992 - RNA, 22 nt, Human
auucuuggcaaggagauuuaaa

SEQ ID NO: 414993 - RNA, 22 nt, Human
ggggcagaaagcccacagagug

SEQ ID NO: 414994 - RNA, 21 nt, Human
cugugcuuuuuaagugugaug

SEQ ID NO: 414995 - RNA, 22 nt, Human
acauuuuuauucaucaaagcag

SEQ ID NO: 414996 - RNA, 22 nt, Human
ggacaggaugcugaagaugaag

SEQ ID NO: 414997 - RNA, 22 nt, Human
accaugaucugcucugguguuu

SEQ ID NO: 414998 - RNA, 22 nt, Human
acugugcaaugaguaauaaacu

SEQ ID NO: 414999 - RNA, 22 nt, Human
cccugagagugagugccaccuu

SEQ ID NO: 415000 - RNA, 22 nt, Human
agccccaggcccggacgccucu

SEQ ID NO: 415001 - RNA, 22 nt, Human
caagaugaaacuacagggagga

SEQ ID NO: 415002 - RNA, 19 nt, Human
gccugagccagccaugcaa

SEQ ID NO: 415003 - RNA, 22 nt, Human
uggcucugccacuaacuuggua

SEQ ID NO: 415004 - RNA, 22 nt, Human
agggguggagaguguugccagu

SEQ ID NO: 415005 - RNA, 22 nt, Human
uuugucagucaugucugcuuuu

SEQ ID NO: 415006 - RNA, 22 nt, Human
gaggccugucgcuaggccucug

SEQ ID NO: 415007 - RNA, 22 nt, Human
cauuucuaagaaggcugcacau

SEQ ID NO: 415008 - RNA, 22 nt, Human
cuggccacaacuagcccaggac

SEQ ID NO: 415009 - RNA, 22 nt, Human
cugggggcaauggucagagugu

SEQ ID NO: 415010 - RNA, 22 nt, Human
uagcugucaccagaaauggcca

SEQ ID NO: 415011 - RNA, 22 nt, Human
aaagauuugaguucugcuuaua

SEQ ID NO: 415012 - RNA, 22 nt, Human
gcuguacaaggccucugccauc

SEQ ID NO: 415013 - RNA, 22 nt, Human
ugcagaagauggucugagcacc

SEQ ID NO: 415014 - RNA, 22 nt, Human
gucccagggaagaaggcagcac

SEQ ID NO: 415015 - RNA, 22 nt, Human
cuggcuccaucacugggugaug

SEQ ID NO: 415016 - RNA, 22 nt, Human
guauuuuauggccuggggccua

SEQ ID NO: 415017 - RNA, 22 nt, Human
ggcagggucuggacugaaagcu

SEQ ID NO: 415018 - RNA, 22 nt, Human
ggaggccaggaaggcucggaga

SEQ ID NO: 415019 - RNA, 22 nt, Human
cugucaguucuuccagauagag

SEQ ID NO: 415020 - RNA, 22 nt, Human
ucaugccacuuacaaaauaaug

SEQ ID NO: 415021 - RNA, 22 nt, Human
gagaaagcuucuuucccacagg

SEQ ID NO: 415022 - RNA, 22 nt, Human
ugccuggaugugcuggccucac

SEQ ID NO: 415023 - RNA, 22 nt, Human
ggcauccaaauaccaagaugua

SEQ ID NO: 415024 - RNA, 22 nt, Human
aaacaucaccauuuuaccuaau

SEQ ID NO: 415025 - RNA, 22 nt, Human
uggaagaaggcagagaggcauu

SEQ ID NO: 415026 - RNA, 22 nt, Human
gagccuggggacccuccugagu

SEQ ID NO: 415027 - RNA, 22 nt, Human
agagggagcccagucauagcug

SEQ ID NO: 415028 - RNA, 22 nt, Human
agcccuggcccggcugugcuuu

SEQ ID NO: 415029 - RNA, 22 nt, Human
gcagcagaugcuuucauggaca

SEQ ID NO: 415030 - RNA, 22 nt, Human
ggcagugaaaaaguauguuucc

SEQ ID NO: 415031 - RNA, 22 nt, Human
ucucagggugaggaaagaauuu

SEQ ID NO: 415032 - RNA, 22 nt, Human
aggaggcuguggagcacuccau

SEQ ID NO: 415033 - RNA, 22 nt, Human
caggagcaaggagcagugggau

SEQ ID NO: 415034 - RNA, 22 nt, Human
cccaggcagugcugaucccuca

SEQ ID NO: 415035 - RNA, 22 nt, Human
guggcucuccauugacauggaa

SEQ ID NO: 415036 - RNA, 22 nt, Human
ccagucccgcaugguccagaau

SEQ ID NO: 415037 - RNA, 22 nt, Human
auuuuuccaugauacuuaucug

SEQ ID NO: 415038 - RNA, 22 nt, Human
gggcucagccccauugaaccag

SEQ ID NO: 415039 - RNA, 22 nt, Human
uuaaacagacaguaaaugaaac

SEQ ID NO: 415040 - RNA, 22 nt, Human
ucaguggauauuucuguggcug

SEQ ID NO: 415041 - RNA, 22 nt, Human
acugaaagauaaaucaguuagc

SEQ ID NO: 415042 - RNA, 20 nt, Human
ccugucucacguuccgcccc

SEQ ID NO: 415043 - RNA, 22 nt, Human
agguggggugagcugcagacua

SEQ ID NO: 415044 - RNA, 22 nt, Human
gcucccagauuucagccuugug

SEQ ID NO: 415045 - RNA, 22 nt, Human
ccagccacagcuuccagcuccu

SEQ ID NO: 415046 - RNA, 22 nt, Human
cucagagcaaugaacaugcaaa

SEQ ID NO: 415047 - RNA, 22 nt, Human
agggaagaaaauccaucgcugc

SEQ ID NO: 415048 - RNA, 22 nt, Human
ucaaauaugugauagaagcuaa

SEQ ID NO: 415049 - RNA, 22 nt, Human
aggcacugcuucuaaguaggaa

SEQ ID NO: 415050 - RNA, 21 nt, Human
ggccugagcaccuguccaccu

SEQ ID NO: 415051 - RNA, 22 nt, Human
aacagaaaagguagguggcuuu

SEQ ID NO: 415052 - RNA, 22 nt, Human
ccuggcagacugugagggcagg

SEQ ID NO: 415053 - RNA, 22 nt, Human
augcuucagugcuaccuucaaa

SEQ ID NO: 415054 - RNA, 22 nt, Human
cagagcauuuggaagccacgug

SEQ ID NO: 415055 - RNA, 22 nt, Human
aggcagaaaauagucauccaaa

SEQ ID NO: 415056 - RNA, 22 nt, Human
ugaggcucagagcaccugcucc

SEQ ID NO: 415057 - RNA, 22 nt, Human
agagcugaggauccagcugagc

SEQ ID NO: 415058 - RNA, 22 nt, Human
gggccucugugcagaggggccu

SEQ ID NO: 415059 - RNA, 22 nt, Human
uuucaaauaccauaaaccuaau

SEQ ID NO: 415060 - RNA, 22 nt, Human
ucaaaggcugcuugucuucugg

SEQ ID NO: 415061 - RNA, 22 nt, Human
ggcugcagguugguuggcagcu

SEQ ID NO: 415062 - RNA, 22 nt, Human
agacaacaccaaaugcuagugu

SEQ ID NO: 415063 - RNA, 22 nt, Human
accaggagccacaggaggagcc

SEQ ID NO: 415064 - RNA, 22 nt, Human
cuucuuuacuuucuagaaauaa

SEQ ID NO: 415065 - RNA, 22 nt, Human
aacaguaucuuuuaucagaaau

SEQ ID NO: 415066 - RNA, 22 nt, Human
ggcagugaaucugagagccugg

SEQ ID NO: 415067 - RNA, 22 nt, Human
gaggagagggcugcgggcccac

SEQ ID NO: 415068 - RNA, 22 nt, Human
uccagagguauguagagaguau

SEQ ID NO: 415069 - RNA, 22 nt, Human
uccaggcagagcaacaaaauau

SEQ ID NO: 415070 - RNA, 22 nt, Human
ccgggccucgggacaccgggua

SEQ ID NO: 415071 - RNA, 22 nt, Human
uuaucacuuaugagcuuuuugc

SEQ ID NO: 415072 - RNA, 22 nt, Human
auaauuuacaacugcuuuuaau

SEQ ID NO: 415073 - RNA, 22 nt, Human
cuguacaucucugaggacagua

SEQ ID NO: 415074 - RNA, 22 nt, Human
agaggccagguccagaguuugu

SEQ ID NO: 415075 - RNA, 22 nt, Human
ucuguuccaguagaaaggugca

SEQ ID NO: 415076 - RNA, 22 nt, Human
gggguugguuuaaaugcuugag

SEQ ID NO: 415077 - RNA, 22 nt, Human
auuuccacauaagggaaauaag

SEQ ID NO: 415078 - RNA, 22 nt, Human
cucugagcugaaacaugagcau

SEQ ID NO: 415079 - RNA, 22 nt, Human
gcucccuguucucagccaugau

SEQ ID NO: 415080 - RNA, 22 nt, Human
uguaacaaaauaccuuggauug

SEQ ID NO: 415081 - RNA, 22 nt, Human
uuccauaaugagauucccagcc

SEQ ID NO: 415082 - RNA, 22 nt, Human
ggcagggaagcuggcaucacgg

SEQ ID NO: 415083 - RNA, 22 nt, Human
caggcagccuucucgucucaca

SEQ ID NO: 415084 - RNA, 22 nt, Human
uccuggccugucuggaguagcu

SEQ ID NO: 415085 - RNA, 22 nt, Human
uggcagcuacagacagagguga

SEQ ID NO: 415086 - RNA, 22 nt, Human
acagcaaaggacgaacacucug

SEQ ID NO: 415087 - RNA, 22 nt, Human
gaccucagugaauggucaugua

SEQ ID NO: 415088 - RNA, 22 nt, Human
uuuucaucucugcuuuguaccu

SEQ ID NO: 415089 - RNA, 22 nt, Human
aagauggaguaguguaaugguu

SEQ ID NO: 415090 - RNA, 20 nt, Human
cacguuuuuccacuagcaaa

SEQ ID NO: 415091 - RNA, 22 nt, Human
auugagaauccauuugagauga

SEQ ID NO: 415092 - RNA, 22 nt, Human
ggagcuggcuacagagaacucc

SEQ ID NO: 415093 - RNA, 18 nt, Human
uguggcaggggugggaga

SEQ ID NO: 415094 - RNA, 22 nt, Human
ucucugaaggggagcuguuuaa

SEQ ID NO: 415095 - RNA, 22 nt, Human
cccuggagugccggaaucaaga

SEQ ID NO: 415096 - RNA, 22 nt, Human
gccaggcugaggcucuggaaga

SEQ ID NO: 415097 - RNA, 22 nt, Human
auaacagaugugaagugcuaau

SEQ ID NO: 415098 - RNA, 22 nt, Human
agggcugcuccuccuucaggcc

SEQ ID NO: 415099 - RNA, 22 nt, Human
cuggccuucagacucggacuga

SEQ ID NO: 415100 - RNA, 18 nt, Human
agggaucaucacugcagc

SEQ ID NO: 415101 - RNA, 22 nt, Human
ggaagccagagugcugggcagg

SEQ ID NO: 415102 - RNA, 22 nt, Human
gaugcugaagugaagugaucuu

SEQ ID NO: 415103 - RNA, 22 nt, Human
gcagaagcccggucagcgcacg

SEQ ID NO: 415104 - RNA, 22 nt, Human
acagaauuaaaguguuugugga

SEQ ID NO: 415105 - RNA, 22 nt, Human
ggagcauguggggugagcaggg

SEQ ID NO: 415106 - RNA, 22 nt, Human
agagccuggcucccagcuaccg

SEQ ID NO: 415107 - RNA, 22 nt, Human
ggcauuugagccauuggccugu

SEQ ID NO: 415108 - RNA, 22 nt, Human
cagagcugauuggauccagaga

SEQ ID NO: 415109 - RNA, 22 nt, Human
aggggcaggugcugcacuuaga

SEQ ID NO: 415110 - RNA, 22 nt, Human
cugccugggccggccacccucu

SEQ ID NO: 415111 - RNA, 22 nt, Human
ccucagaggugaacaucagugc

SEQ ID NO: 415112 - RNA, 22 nt, Human
aagguuaaauagguauuuucca

SEQ ID NO: 415113 - RNA, 22 nt, Human
ucuauauuccagauacagauua

SEQ ID NO: 415114 - RNA, 22 nt, Human
ugcacuggggucccagcgcacg

SEQ ID NO: 415115 - RNA, 22 nt, Human
aacaacuugcguucagagaugu

SEQ ID NO: 415116 - RNA, 20 nt, Human
gggcaguggcgcuaucucag

SEQ ID NO: 415117 - RNA, 22 nt, Human
agagcugcaauuucauguggug

SEQ ID NO: 415118 - RNA, 22 nt, Human
aaaucaguuggaacacaagcag

SEQ ID NO: 415119 - RNA, 19 nt, Human
uacuuuuucaggacagagu

SEQ ID NO: 415120 - RNA, 22 nt, Human
uucauuccugagcccauauuua

SEQ ID NO: 415121 - RNA, 22 nt, Human
agcugccuggagucauuuccug

SEQ ID NO: 415122 - RNA, 22 nt, Human
agcagggggaguuagacuagau

SEQ ID NO: 415123 - RNA, 22 nt, Human
uuuucaagggcagggaaaucau

SEQ ID NO: 415124 - RNA, 22 nt, Human
ccagcucugccaagcgucagcu

SEQ ID NO: 415125 - RNA, 22 nt, Human
ugaaauuccaggagaguuaaaa

SEQ ID NO: 415126 - RNA, 22 nt, Human
gucauuguguggacauggagaa

SEQ ID NO: 415127 - RNA, 22 nt, Human
cagggccugagggcugcucugc

SEQ ID NO: 415128 - RNA, 22 nt, Human
cauagagugauguaagguaugu

SEQ ID NO: 415129 - RNA, 22 nt, Human
gggcauggugaugugcaccugu

SEQ ID NO: 415130 - RNA, 22 nt, Human
ccacugcccaccccgacgucua

SEQ ID NO: 415131 - RNA, 20 nt, Human
cccucugcuacacugggagc

SEQ ID NO: 415132 - RNA, 22 nt, Human
aguuucuauguaagcuacguga

SEQ ID NO: 415133 - RNA, 20 nt, Human
acuuucucgguuucucaccu

SEQ ID NO: 415134 - RNA, 22 nt, Human
uggcugaguuccuggcacacgg

SEQ ID NO: 415135 - RNA, 22 nt, Human
agacaaaggauuaaugaugaug

SEQ ID NO: 415136 - RNA, 22 nt, Human
auucucaaacaagugguuugau

SEQ ID NO: 415137 - RNA, 22 nt, Human
cucagggucugguccuuagauu

SEQ ID NO: 415138 - RNA, 16 nt, Human
ucagggcagaauggca

SEQ ID NO: 415139 - RNA, 22 nt, Human
auuugagaugguaaauaacuuu

SEQ ID NO: 415140 - RNA, 22 nt, Human
agucccuucucaaagugugcgg

SEQ ID NO: 415141 - RNA, 22 nt, Human
uggauaaacucacuguaaguug

SEQ ID NO: 415142 - RNA, 18 nt, Human
aggcuucccaggcaggcc

SEQ ID NO: 415143 - RNA, 23 nt, Human
gcaguggaaugucucuguuugga

SEQ ID NO: 415144 - RNA, 22 nt, Human
acacagggcaaugcuuugaccu

SEQ ID NO: 415145 - RNA, 22 nt, Human
ucagcaauaugauaggcuuugu

SEQ ID NO: 415146 - RNA, 22 nt, Human
caaaugcuggcccugcuacuua

SEQ ID NO: 415147 - RNA, 22 nt, Human
uauuucuucgggauucaagcua

SEQ ID NO: 415148 - RNA, 22 nt, Human
ccuggagggcgccgcacagucc

SEQ ID NO: 415149 - RNA, 22 nt, Human
auuugucuucaguagguucuuc

SEQ ID NO: 415150 - RNA, 22 nt, Human
ugaggaggucagagucuggcug

SEQ ID NO: 415151 - RNA, 22 nt, Human
agcagcucaaagccugcaagga

SEQ ID NO: 415152 - RNA, 22 nt, Human
uccucugccccagaugaaauuu

SEQ ID NO: 415153 - RNA, 22 nt, Human
cuucaagaagacagcagagcau

SEQ ID NO: 415154 - RNA, 22 nt, Human
uaaagaacacagggaauagcac

SEQ ID NO: 415155 - RNA, 22 nt, Human
ucucagugauggcccauuugga

SEQ ID NO: 415156 - RNA, 19 nt, Human
gagcacagcggcauuuggu

SEQ ID NO: 415157 - RNA, 22 nt, Human
ccaaaguccuuucuccaccugc

SEQ ID NO: 415158 - RNA, 21 nt, Human
cccugcaggccagggcugagc

SEQ ID NO: 415159 - RNA, 22 nt, Human
uccaggcuagguuuacaggaca

SEQ ID NO: 415160 - RNA, 20 nt, Human
ccugucugcaauggagguca

SEQ ID NO: 415161 - RNA, 22 nt, Human
aggaaaaaccuguuaaugguag

SEQ ID NO: 415162 - RNA, 22 nt, Human
agcagggggccacagucacagc

SEQ ID NO: 415163 - RNA, 22 nt, Human
aagagcauauuaauaguggaga

SEQ ID NO: 415164 - RNA, 22 nt, Human
cugaggcuuggaggggucuggu

SEQ ID NO: 415165 - RNA, 22 nt, Human
cggcagagugugugcgugcaug

SEQ ID NO: 415166 - RNA, 17 nt, Human
aucuggaagcuagcuga

SEQ ID NO: 415167 - RNA, 22 nt, Human
agagucagcuuaugacacaguc

SEQ ID NO: 415168 - RNA, 20 nt, Human
ugagugauggaggcggguca

SEQ ID NO: 415169 - RNA, 22 nt, Human
cucaggauugugccuagggaga

SEQ ID NO: 415170 - RNA, 22 nt, Human
ugggcugcacccucagccucug

SEQ ID NO: 415171 - RNA, 22 nt, Human
ucagggcaccaaaaaagaugcc

SEQ ID NO: 415172 - RNA, 22 nt, Human
acacugcucacuucuucccuug

SEQ ID NO: 415173 - RNA, 21 nt, Human
uagcuuuaauauucccacauu

SEQ ID NO: 415174 - RNA, 22 nt, Human
agggcacaucugcugggaaugg

SEQ ID NO: 415175 - RNA, 22 nt, Human
agccaggaauuggacaacacau

SEQ ID NO: 415176 - RNA, 22 nt, Human
uagcuuuaauaagcugcugaau

SEQ ID NO: 415177 - RNA, 21 nt, Human
ccagagagagggaaguggguu

SEQ ID NO: 415178 - RNA, 22 nt, Human
uggaggcaccacuggcugcccg

SEQ ID NO: 415179 - RNA, 22 nt, Human
ucagagaguuacacaaauuguu

SEQ ID NO: 415180 - RNA, 22 nt, Human
augcugaagagugcacaggcua

SEQ ID NO: 415181 - RNA, 22 nt, Human
cagagcaggcccacugcccucc

SEQ ID NO: 415182 - RNA, 22 nt, Human
agucaggagcugcugcauugua

SEQ ID NO: 415183 - RNA, 22 nt, Human
cuuucacauaauugaccuugaa

SEQ ID NO: 415184 - RNA, 22 nt, Human
gaggcucagagggacuuucaag

SEQ ID NO: 415185 - RNA, 22 nt, Human
cuucuuaacuguauauacuaug

SEQ ID NO: 415186 - RNA, 22 nt, Human
cugaagccaugugcucacuggu

SEQ ID NO: 415187 - RNA, 22 nt, Human
acagugucaugucguguucccc

SEQ ID NO: 415188 - RNA, 22 nt, Human
ucacgagaggcacagaauagag

SEQ ID NO: 415189 - RNA, 22 nt, Human
ucacagacacagggagaagcau

SEQ ID NO: 415190 - RNA, 22 nt, Human
gggugaggagcugccagucaug

SEQ ID NO: 415191 - RNA, 22 nt, Human
auaugcaagcacauagaauacu

SEQ ID NO: 415192 - RNA, 22 nt, Human
ugagccugcaauaagcacagcc

SEQ ID NO: 415193 - RNA, 22 nt, Human
uugguuuacuaggauucaaauu

SEQ ID NO: 415194 - RNA, 22 nt, Human
ggaccugcucucccaguucucu

SEQ ID NO: 415195 - RNA, 18 nt, Human
aggugcagccucugaggc

SEQ ID NO: 415196 - RNA, 22 nt, Human
caguagcacucugucagugaag

SEQ ID NO: 415197 - RNA, 19 nt, Human
ccagagacauuggcaucuu

SEQ ID NO: 415198 - RNA, 22 nt, Human
augacacaauuuuagagcugaa

SEQ ID NO: 415199 - RNA, 22 nt, Human
agccagggauggcagugcccag

SEQ ID NO: 415200 - RNA, 22 nt, Human
agucccuguacuuuccacugcc

SEQ ID NO: 415201 - RNA, 22 nt, Human
caauaauauccugugcuguuug

SEQ ID NO: 415202 - RNA, 22 nt, Human
ugcauauugugaaaauguagau

SEQ ID NO: 415203 - RNA, 22 nt, Human
ggcugcugcccaccccugcaug

SEQ ID NO: 415204 - RNA, 22 nt, Human
cacugcuucuggaggaauuugg

SEQ ID NO: 415205 - RNA, 22 nt, Human
acccugggucauauacagugug

SEQ ID NO: 415206 - RNA, 22 nt, Human
gcagggcagggcaagaacuggg

SEQ ID NO: 415207 - RNA, 22 nt, Human
acagacaaguaguucagacaag

SEQ ID NO: 415208 - RNA, 22 nt, Human
gcuggagcuugagaggacaggg

SEQ ID NO: 415209 - RNA, 22 nt, Human
gguucacauauugagaguauuc

SEQ ID NO: 415210 - RNA, 18 nt, Human
auuuugaacaaugcugua

SEQ ID NO: 415211 - RNA, 22 nt, Human
gcgaaaaauguguaaauauguu

SEQ ID NO: 415212 - RNA, 19 nt, Human
gaggaggcuucagcuuucu

SEQ ID NO: 415213 - RNA, 20 nt, Human
aagggcagagggaacagacu

SEQ ID NO: 415214 - RNA, 22 nt, Human
ugcagcauucuuggccacuacu

SEQ ID NO: 415215 - RNA, 22 nt, Human
cauuaagauuuuuuucuacugg

SEQ ID NO: 415216 - RNA, 22 nt, Human
cagaccugagguugaguaccag

SEQ ID NO: 415217 - RNA, 22 nt, Human
aaagccuucaaguagauguaag

SEQ ID NO: 415218 - RNA, 19 nt, Human
cagcaauaaugccagaugg

SEQ ID NO: 415219 - RNA, 22 nt, Human
gaauuaguguugaaaucagggc

SEQ ID NO: 415220 - RNA, 22 nt, Human
ucccagagccucugccacucug

SEQ ID NO: 415221 - RNA, 22 nt, Human
gggcugagggccaauuccuacu

SEQ ID NO: 415222 - RNA, 22 nt, Human
uacaaaaaauugauacugacga

SEQ ID NO: 415223 - RNA, 22 nt, Human
ugucucugugacuccuuccgcc

SEQ ID NO: 415224 - RNA, 22 nt, Human
ggcaggucagguccaugaccaa

SEQ ID NO: 415225 - RNA, 22 nt, Human
uuggccuuaaccucucugugcc

SEQ ID NO: 415226 - RNA, 22 nt, Human
uggcugggagcuggaacugggc

SEQ ID NO: 415227 - RNA, 17 nt, Human
ccuuucucuuucaucuc

SEQ ID NO: 415228 - RNA, 22 nt, Human
ugccaggcccugugcuggaugc

SEQ ID NO: 415229 - RNA, 22 nt, Human
agcuguggcagcacuuuggagu

SEQ ID NO: 415230 - RNA, 22 nt, Human
uccugaaaauaauuucacaaga

SEQ ID NO: 415231 - RNA, 22 nt, Human
augaagucuagcaagcauugaa

SEQ ID NO: 415232 - RNA, 22 nt, Human
gaaguggaagccaucggcaguc

SEQ ID NO: 415233 - RNA, 22 nt, Human
cagauuuagaguggggcuugga

SEQ ID NO: 415234 - RNA, 22 nt, Human
uucauuccuucuguaccuugcc

SEQ ID NO: 415235 - RNA, 22 nt, Human
agcagcauagaagcugggagga

SEQ ID NO: 415236 - RNA, 22 nt, Human
cagguggagcugacugagggca

SEQ ID NO: 415237 - RNA, 22 nt, Human
uucaggauaugugauaucugaa

SEQ ID NO: 415238 - RNA, 22 nt, Human
cugcuguggguuaagacacugu

SEQ ID NO: 415239 - RNA, 22 nt, Human
aguuauauuccauagauucaga

SEQ ID NO: 415240 - RNA, 22 nt, Human
gagucacaaaagaugcccaggg

SEQ ID NO: 415241 - RNA, 22 nt, Human
cacauuuaaagguugaagcuga

SEQ ID NO: 415242 - RNA, 22 nt, Human
gucuggagccacccuaagcauu

SEQ ID NO: 415243 - RNA, 21 nt, Human
cucaggaucuuauauauuagu

SEQ ID NO: 415244 - RNA, 21 nt, Human
ugccagcauguaggcuaguug

SEQ ID NO: 415245 - RNA, 22 nt, Human
caggaaauaucuccuggcagag

SEQ ID NO: 415246 - RNA, 22 nt, Human
uucuuaaaacuuauggacaggu

SEQ ID NO: 415247 - RNA, 22 nt, Human
augcuuuauuauuuugcaggga

SEQ ID NO: 415248 - RNA, 22 nt, Human
ucaucaguuuagaaaaaauaug

SEQ ID NO: 415249 - RNA, 22 nt, Human
aucccaugagaccacguuggcu

SEQ ID NO: 415250 - RNA, 22 nt, Human
caagagcugaggcuggagaggu

SEQ ID NO: 415251 - RNA, 20 nt, Human
aacacagauaccaaagguug

SEQ ID NO: 415252 - RNA, 20 nt, Human
agucucuguagugccugaga

SEQ ID NO: 415253 - RNA, 22 nt, Human
cugucuguucagauucauuacu

SEQ ID NO: 415254 - RNA, 22 nt, Human
acuguacauguaaacauuguca

SEQ ID NO: 415255 - RNA, 22 nt, Human
ucucccagaggaucccagugga

SEQ ID NO: 415256 - RNA, 20 nt, Human
aaucagaaagugugagcucu

SEQ ID NO: 415257 - RNA, 22 nt, Human
caggcugccgugaagcaggccu

SEQ ID NO: 415258 - RNA, 22 nt, Human
ugggaggcagguaggugaugau

SEQ ID NO: 415259 - RNA, 22 nt, Human
ugggccugaguuugggaacugg

SEQ ID NO: 415260 - RNA, 22 nt, Human
caccuagggcaucccugcccca

SEQ ID NO: 415261 - RNA, 22 nt, Human
auacauuagcucauaugauuaa

SEQ ID NO: 415262 - RNA, 22 nt, Human
ucaguuuucauuucaugagcag

SEQ ID NO: 415263 - RNA, 17 nt, Human
caaggccagcaucuuca

SEQ ID NO: 415264 - RNA, 22 nt, Human
ucuggagcuggcagggcccugg

SEQ ID NO: 415265 - RNA, 22 nt, Human
cucccagggccaucgagucacu

SEQ ID NO: 415266 - RNA, 22 nt, Human
uccagggaugccagccauguug

SEQ ID NO: 415267 - RNA, 22 nt, Human
guccagcugaucuugacccagc

SEQ ID NO: 415268 - RNA, 22 nt, Human
cagcaauaacucaaagccauuu

SEQ ID NO: 415269 - RNA, 22 nt, Human
ucucagagauuuauggaaaacu

SEQ ID NO: 415270 - RNA, 22 nt, Human
cccuggguucuggcugggcugc

SEQ ID NO: 415271 - RNA, 22 nt, Human
agugaaaugauucugagcaaga

SEQ ID NO: 415272 - RNA, 22 nt, Human
aggaaucccgcaccagcugcug

SEQ ID NO: 415273 - RNA, 22 nt, Human
cucuggagugcagccugguggc

SEQ ID NO: 415274 - RNA, 22 nt, Human
auucuaggcuugaaacaugaag

SEQ ID NO: 415275 - RNA, 22 nt, Human
ucugucacuuauuaagauggau

SEQ ID NO: 415276 - RNA, 22 nt, Human
ucugucacugagcucaggauuc

SEQ ID NO: 415277 - RNA, 22 nt, Human
gcugcucucucccuaaguuggg

SEQ ID NO: 415278 - RNA, 22 nt, Human
gccuggagcagacgugucccgg

SEQ ID NO: 415279 - RNA, 19 nt, Human
cuguggcugaccucuggcc

SEQ ID NO: 415280 - RNA, 22 nt, Human
caguaggaaggaugcagaaaaa

SEQ ID NO: 415281 - RNA, 22 nt, Human
aggcucaggaggagcugccgga

SEQ ID NO: 415282 - RNA, 22 nt, Human
ccucacuggccagccaggggug

SEQ ID NO: 415283 - RNA, 22 nt, Human
caaaugugguuucucagcauuc

SEQ ID NO: 415284 - RNA, 22 nt, Human
ggcuucuuccugugaacauguu

SEQ ID NO: 415285 - RNA, 22 nt, Human
ggugaaggucagagcaggaaaa

SEQ ID NO: 415286 - RNA, 22 nt, Human
gcaggaugccagggcagcagcg

SEQ ID NO: 415287 - RNA, 20 nt, Human
acauguacuaaugaauacag

SEQ ID NO: 415288 - RNA, 20 nt, Human
ugcagcugcaggaggguggg

SEQ ID NO: 415289 - RNA, 22 nt, Human
ugcaaacuauugguagagaugg

SEQ ID NO: 415290 - RNA, 22 nt, Human
cugccugcugccuguggagggu

SEQ ID NO: 415291 - RNA, 18 nt, Human
cucaccauucugcccaau

SEQ ID NO: 415292 - RNA, 22 nt, Human
ggcaguggaggacccugugucu

SEQ ID NO: 415293 - RNA, 22 nt, Human
auggcagcaaaugucuggcugg

SEQ ID NO: 415294 - RNA, 22 nt, Human
gcucugcugagauaucugggag

SEQ ID NO: 415295 - RNA, 22 nt, Human
ucacaggguaucugggauggau

SEQ ID NO: 415296 - RNA, 22 nt, Human
ugaacgcagguccacauggcuc

SEQ ID NO: 415297 - RNA, 17 nt, Human
uguggccuucugagcuu

SEQ ID NO: 415298 - RNA, 22 nt, Human
uugagaagaauguguugaguuu

SEQ ID NO: 415299 - RNA, 20 nt, Human
aggcucagagcaguaguaca

SEQ ID NO: 415300 - RNA, 22 nt, Human
uugugaguagugccgcaauaaa

SEQ ID NO: 415301 - RNA, 22 nt, Human
ugcagaagaauguaggcauaag

SEQ ID NO: 415302 - RNA, 22 nt, Human
acugcagccuuugggcucauaa

SEQ ID NO: 415303 - RNA, 22 nt, Human
agaggagguggugaugcuuuaa

SEQ ID NO: 415304 - RNA, 22 nt, Human
uggggcugucccgguuuggcga

SEQ ID NO: 415305 - RNA, 22 nt, Human
gccucuggggcagcugagucau

SEQ ID NO: 415306 - RNA, 21 nt, Human
cugcaucucauagaacauguc

SEQ ID NO: 415307 - RNA, 22 nt, Human
aggcugaggaucguacuuucca

SEQ ID NO: 415308 - RNA, 22 nt, Human
agcugggucuugggccaggaga

SEQ ID NO: 415309 - RNA, 22 nt, Human
gcaguggggaaugcuggggaga

SEQ ID NO: 415310 - RNA, 22 nt, Human
auuaauuuuucugacagccaca

SEQ ID NO: 415311 - RNA, 21 nt, Human
uucaaagagugggcauuguca

SEQ ID NO: 415312 - RNA, 22 nt, Human
acaaaauuaugaagaggccuug

SEQ ID NO: 415313 - RNA, 22 nt, Human
agcaaggcagucagcuggcugg

SEQ ID NO: 415314 - RNA, 22 nt, Human
agacuguaauuuguggccuccu

SEQ ID NO: 415315 - RNA, 22 nt, Human
gaaaugugcagaauguguuaga

SEQ ID NO: 415316 - RNA, 22 nt, Human
cuguugucuccucucagauuau

SEQ ID NO: 415317 - RNA, 22 nt, Human
agggccagcuagagcccucgcc

SEQ ID NO: 415318 - RNA, 22 nt, Human
cccuggcagaaugucucugggc

SEQ ID NO: 415319 - RNA, 22 nt, Human
uguguccuucugggagucccag

SEQ ID NO: 415320 - RNA, 22 nt, Human
aggagugggggcgagaaguuaa

SEQ ID NO: 415321 - RNA, 20 nt, Human
agcuggagaagggcccuucc

SEQ ID NO: 415322 - RNA, 22 nt, Human
uauuuuaucugccagaguggag

SEQ ID NO: 415323 - RNA, 22 nt, Human
uguuucuuuguagauauucuuu

SEQ ID NO: 415324 - RNA, 22 nt, Human
aaggugucacugggacaggaaa

SEQ ID NO: 415325 - RNA, 22 nt, Human
cuuucauuugauaagaaugcca

SEQ ID NO: 415326 - RNA, 19 nt, Human
ccaggccuggcgucuccgc

SEQ ID NO: 415327 - RNA, 22 nt, Human
ugccaggcagugucagauugag

SEQ ID NO: 415328 - RNA, 22 nt, Human
ccuuucucuggcagcaggacag

SEQ ID NO: 415329 - RNA, 22 nt, Human
gagucgagcagaaagccgucgg

SEQ ID NO: 415330 - RNA, 22 nt, Human
aaagacugguguguuacauaua

SEQ ID NO: 415331 - RNA, 19 nt, Human
uuugaaagaguuuuauugg

SEQ ID NO: 415332 - RNA, 20 nt, Human
ggaagccagggugcagggga

SEQ ID NO: 415333 - RNA, 22 nt, Human
cuggacagaaaccaguccuggg

SEQ ID NO: 415334 - RNA, 22 nt, Human
agcagggcugcagugugucuuu

SEQ ID NO: 415335 - RNA, 22 nt, Human
agagcuggaaucagaccucagg

SEQ ID NO: 415336 - RNA, 22 nt, Human
aacagaacccgagugugaaucu

SEQ ID NO: 415337 - RNA, 22 nt, Human
uggcugccuagugucugagcag

SEQ ID NO: 415338 - RNA, 22 nt, Human
gagcagugacuggagcaugaga

SEQ ID NO: 415339 - RNA, 21 nt, Human
agcuggcagauauggugucug

SEQ ID NO: 415340 - RNA, 22 nt, Human
cuguccagucuuuagcaagcug

SEQ ID NO: 415341 - RNA, 18 nt, Human
ggagagugagaucaaaca

SEQ ID NO: 415342 - RNA, 22 nt, Human
ugcuggaggcaguggaggugcc

SEQ ID NO: 415343 - RNA, 22 nt, Human
ucugucacaauuugcuuacucu

SEQ ID NO: 415344 - RNA, 23 nt, Human
uuuuccagaaucgacucuguaga

SEQ ID NO: 415345 - RNA, 22 nt, Human
agaaugcuccagagcugaaaga

SEQ ID NO: 415346 - RNA, 22 nt, Human
ccaagggcugcugaggugucca

SEQ ID NO: 415347 - RNA, 22 nt, Human
gagggcuccauuccccgugccc

SEQ ID NO: 415348 - RNA, 22 nt, Human
uuccaaaggaauggggagcuau

SEQ ID NO: 415349 - RNA, 22 nt, Human
auucugucuuuuuaaaauaaua

SEQ ID NO: 415350 - RNA, 22 nt, Human
uucacuuaacaucauaucauga

SEQ ID NO: 415351 - RNA, 22 nt, Human
ucuggcucccuggagcuccaca

SEQ ID NO: 415352 - RNA, 22 nt, Human
caacagagagaccagaaacagg

SEQ ID NO: 415353 - RNA, 22 nt, Human
agccagcuggugggucagcugg

SEQ ID NO: 415354 - RNA, 22 nt, Human
uaauacuuaccuugcagagucu

SEQ ID NO: 415355 - RNA, 18 nt, Human
uggagccagcucuaggau

SEQ ID NO: 415356 - RNA, 22 nt, Human
uccugccugcaaucccagcacu

SEQ ID NO: 415357 - RNA, 22 nt, Human
gguggguauaguuagggccucu

SEQ ID NO: 415358 - RNA, 22 nt, Human
uuuccaaauaaggucacauucu

SEQ ID NO: 415359 - RNA, 22 nt, Human
uaugugcaguuugcucuuaaca

SEQ ID NO: 415360 - RNA, 22 nt, Human
ucagaagaagagacuccacagc

SEQ ID NO: 415361 - RNA, 22 nt, Human
ccugucucuuucaaucugagag

SEQ ID NO: 415362 - RNA, 21 nt, Human
cagaggccucaugcucugugc

SEQ ID NO: 415363 - RNA, 22 nt, Human
agguagagcuccaguagaaaau

SEQ ID NO: 415364 - RNA, 22 nt, Human
agaggccggccgagcccauggg

SEQ ID NO: 415365 - RNA, 22 nt, Human
cuguggcuuucucugccuccuu

SEQ ID NO: 415366 - RNA, 22 nt, Human
cuggaauguagagacagcuuag

SEQ ID NO: 415367 - RNA, 22 nt, Human
acagacuguuugguucaugucu

SEQ ID NO: 415368 - RNA, 22 nt, Human
gcaggagucacugacuuggucc

SEQ ID NO: 415369 - RNA, 22 nt, Human
agaccaagugcaggugccacua

SEQ ID NO: 415370 - RNA, 20 nt, Human
uccaagcccuccuuccauuc

SEQ ID NO: 415371 - RNA, 22 nt, Human
cagaggugcauacaggucauua

SEQ ID NO: 415372 - RNA, 16 nt, Human
agcagggcgggaagga

SEQ ID NO: 415373 - RNA, 22 nt, Human
uggccucuggcugaggacuaac

SEQ ID NO: 415374 - RNA, 22 nt, Human
uaacagaauagcagaaacagaa

SEQ ID NO: 415375 - RNA, 22 nt, Human
cuggaggcacccuuagagaggc

SEQ ID NO: 415376 - RNA, 22 nt, Human
gagaaggcugauccuuggaguu

SEQ ID NO: 415377 - RNA, 22 nt, Human
auuuaugacuggugaauagaac

SEQ ID NO: 415378 - RNA, 20 nt, Human
agugccagggcaggugagag

SEQ ID NO: 415379 - RNA, 22 nt, Human
aagcuggcaauuaucaaaacug

SEQ ID NO: 415380 - RNA, 22 nt, Human
gguccuggaaauugacggaaag

SEQ ID NO: 415381 - RNA, 22 nt, Human
ucagccuuguggcccugcucca

SEQ ID NO: 415382 - RNA, 22 nt, Human
ucuaggagaaccaucagggagg

SEQ ID NO: 415383 - RNA, 22 nt, Human
acagccugcagccccaggucgc

SEQ ID NO: 415384 - RNA, 22 nt, Human
guggccugucagaagccguggg

SEQ ID NO: 415385 - RNA, 19 nt, Human
ugaaauggcaguugcuaaa

SEQ ID NO: 415386 - RNA, 22 nt, Human
ugaagcccugugucagcuucca

SEQ ID NO: 415387 - RNA, 22 nt, Human
ccagagccggcucccucagcuu

SEQ ID NO: 415388 - RNA, 22 nt, Human
uggggcuccuccuggcaggagg

SEQ ID NO: 415389 - RNA, 22 nt, Human
uauguacaccggggaagguggg

SEQ ID NO: 415390 - RNA, 22 nt, Human
uuuccuaagguagugauaauuu

SEQ ID NO: 415391 - RNA, 22 nt, Human
gaaauguguuguucauuucuaa

SEQ ID NO: 415392 - RNA, 23 nt, Human
uuucacaaugagcauuacagaau

SEQ ID NO: 415393 - RNA, 22 nt, Human
caaagccucugauuucacuugu

SEQ ID NO: 415394 - RNA, 22 nt, Human
cagaggcauauaauugcugggg

SEQ ID NO: 415395 - RNA, 18 nt, Human
acagaacucaggggcacc

SEQ ID NO: 415396 - RNA, 22 nt, Human
accagagcuggcagaguaucaa

SEQ ID NO: 415397 - RNA, 22 nt, Human
cugagccagcuggcaugugcua

SEQ ID NO: 415398 - RNA, 22 nt, Human
guucaaggaagggaggaaagcc

SEQ ID NO: 415399 - RNA, 22 nt, Human
uguaaaaccaaaucaaucuagu

SEQ ID NO: 415400 - RNA, 22 nt, Human
cagagugaacagugggaugugc

SEQ ID NO: 415401 - RNA, 22 nt, Human
ucugccugagggagcugaggaa

SEQ ID NO: 415402 - RNA, 22 nt, Human
accagagaaaacacagcaggcu

SEQ ID NO: 415403 - RNA, 22 nt, Human
cagcagugaugugugaggguuc

SEQ ID NO: 415404 - RNA, 22 nt, Human
gggcuggaggagauccagaggc

SEQ ID NO: 415405 - RNA, 22 nt, Human
caccaucagcagcaggugucaa

SEQ ID NO: 415406 - RNA, 22 nt, Human
guccuggggauacagaagugaa

SEQ ID NO: 415407 - RNA, 22 nt, Human
cugccagcaaugugaccaugcu

SEQ ID NO: 415408 - RNA, 17 nt, Human
ccagguggaaucgugga

SEQ ID NO: 415409 - RNA, 22 nt, Human
uuucacaauuuuaaggagcaaa

SEQ ID NO: 415410 - RNA, 22 nt, Human
gccuggagcucggcugagggcg

SEQ ID NO: 415411 - RNA, 22 nt, Human
uggcugagaaugggaugaugcc

SEQ ID NO: 415412 - RNA, 22 nt, Human
agaggcuccuucacucuggcac

SEQ ID NO: 415413 - RNA, 22 nt, Human
ugccucagagugggcuugcuau

SEQ ID NO: 415414 - RNA, 22 nt, Human
cugccuggcuaaacucaagucg

SEQ ID NO: 415415 - RNA, 22 nt, Human
cagggcucccucuggcucccag

SEQ ID NO: 415416 - RNA, 22 nt, Human
ucacacguccuugcuacuccuc

SEQ ID NO: 415417 - RNA, 22 nt, Human
uggcucagcaagacauugaccu

SEQ ID NO: 415418 - RNA, 22 nt, Human
ucagaggaccuuacugagaacc

SEQ ID NO: 415419 - RNA, 22 nt, Human
gguggccaggccagcucuggcc

SEQ ID NO: 415420 - RNA, 22 nt, Human
cagggcagggccacacccccug

SEQ ID NO: 415421 - RNA, 22 nt, Human
aagggugggcccuggcagccau

SEQ ID NO: 415422 - RNA, 22 nt, Human
ccucugcaccauagccuucagc

SEQ ID NO: 415423 - RNA, 22 nt, Human
uucuaccuacccucugcauaca

SEQ ID NO: 415424 - RNA, 22 nt, Human
uucuguuugccauauauaguag

SEQ ID NO: 415425 - RNA, 22 nt, Human
gcugagcugaggcagggcuggg

SEQ ID NO: 415426 - RNA, 22 nt, Human
acugggaguucuccaugucccu

SEQ ID NO: 415427 - RNA, 22 nt, Human
ggcagcuguggacgucgucauu

SEQ ID NO: 415428 - RNA, 22 nt, Human
uaugcacacaggcuuaauucau

SEQ ID NO: 415429 - RNA, 22 nt, Human
acaguguuuuagaaaagcuuga

SEQ ID NO: 415430 - RNA, 22 nt, Human
cugugccuaagaugcaugucuc

SEQ ID NO: 415431 - RNA, 22 nt, Human
gaggcagagguuguugcaguga

SEQ ID NO: 415432 - RNA, 22 nt, Human
cuggacagaaaaggccacugga

SEQ ID NO: 415433 - RNA, 22 nt, Human
uucuuuccccauggaguucgga

SEQ ID NO: 415434 - RNA, 22 nt, Human
gggcugacgaaggccaugugug

SEQ ID NO: 415435 - RNA, 22 nt, Human
uagacagauuuaaaggaaugga

SEQ ID NO: 415436 - RNA, 21 nt, Human
ggagucagggucuggcugggg

SEQ ID NO: 415437 - RNA, 22 nt, Human
aggccuguuccaggccccuuuu

SEQ ID NO: 415438 - RNA, 22 nt, Human
aggcucagacaggaaaaguaac

SEQ ID NO: 415439 - RNA, 22 nt, Human
gccagcagguugucaaggagcu

SEQ ID NO: 415440 - RNA, 22 nt, Human
cagggcucgcugccagcuucag

SEQ ID NO: 415441 - RNA, 22 nt, Human
aggcucuggcaacagcuggugu

SEQ ID NO: 415442 - RNA, 22 nt, Human
ccucaggggcuuuucguuguug

SEQ ID NO: 415443 - RNA, 22 nt, Human
acaggcauauuucuagauuaca

SEQ ID NO: 415444 - RNA, 22 nt, Human
gcauugucaaaagugguaugac

SEQ ID NO: 415445 - RNA, 22 nt, Human
ggcuucuguccucuggaucugu

SEQ ID NO: 415446 - RNA, 22 nt, Human
cagcugccugucuggaggcaau

SEQ ID NO: 415447 - RNA, 22 nt, Human
ggccugcuccgggggcugagcu

SEQ ID NO: 415448 - RNA, 22 nt, Human
agggcagagauuaauuaagaca

SEQ ID NO: 415449 - RNA, 22 nt, Human
cagccaucaguaaagacagcuu

SEQ ID NO: 415450 - RNA, 22 nt, Human
gaagucugcugcucaggaguuu

SEQ ID NO: 415451 - RNA, 22 nt, Human
ggcccagaauacuuuguaaaau

SEQ ID NO: 415452 - RNA, 22 nt, Human
acagcuggaggccccauugucc

SEQ ID NO: 415453 - RNA, 22 nt, Human
gaggugggagggcagucccuaa

SEQ ID NO: 415454 - RNA, 22 nt, Human
uagccucuggaauccuuucucu

SEQ ID NO: 415455 - RNA, 22 nt, Human
ggcugccauaacugauaccaua

SEQ ID NO: 415456 - RNA, 22 nt, Human
gcucucuggaggccauggacag

SEQ ID NO: 415457 - RNA, 22 nt, Human
cuguccuuacugcuucuggcuu

SEQ ID NO: 415458 - RNA, 22 nt, Human
ugucccagcacuuugggagucu

SEQ ID NO: 415459 - RNA, 22 nt, Human
ucuggagcuuccucauuuacag

SEQ ID NO: 415460 - RNA, 22 nt, Human
auuagggaaacugacuugucuc

SEQ ID NO: 415461 - RNA, 22 nt, Human
gagccugcccagcccuguccac

SEQ ID NO: 415462 - RNA, 22 nt, Human
gcaggggcaggagaucucaggc

SEQ ID NO: 415463 - RNA, 21 nt, Human
uuuauuaacaacuguggacgu

SEQ ID NO: 415464 - RNA, 22 nt, Human
uugagucaguaauuccauuucu

SEQ ID NO: 415465 - RNA, 22 nt, Human
cccugagcccauaguugacauu

SEQ ID NO: 415466 - RNA, 22 nt, Human
gaaggcuaaaggggcagagguu

SEQ ID NO: 415467 - RNA, 22 nt, Human
aaucaguuagaaggaagagaau

SEQ ID NO: 415468 - RNA, 22 nt, Human
ccagcuggagccaagguggacu

SEQ ID NO: 415469 - RNA, 22 nt, Human
augaggcaaggcuggccguguu

SEQ ID NO: 415470 - RNA, 22 nt, Human
gcuggccacacugcugauggag

SEQ ID NO: 415471 - RNA, 22 nt, Human
ggggaggcugaugugggcaaag

SEQ ID NO: 415472 - RNA, 22 nt, Human
gcgguagcucaagcuuguaauc

SEQ ID NO: 415473 - RNA, 22 nt, Human
uccugguggugccagcugcagg

SEQ ID NO: 415474 - RNA, 22 nt, Human
gcccuuccuuagacagcaggau

SEQ ID NO: 415475 - RNA, 22 nt, Human
caaggaaacaugaaaugcauug

SEQ ID NO: 415476 - RNA, 22 nt, Human
gcuuccugauauucauacuguu

SEQ ID NO: 415477 - RNA, 22 nt, Human
agccuggauucgugcauccaca

SEQ ID NO: 415478 - RNA, 22 nt, Human
cucuccuccaacagcccugccg

SEQ ID NO: 415479 - RNA, 22 nt, Human
cccaggcagggacgugcucugg

SEQ ID NO: 415480 - RNA, 22 nt, Human
uccugguggcuuucccugccuu

SEQ ID NO: 415481 - RNA, 22 nt, Human
gguguagcucugugucccacug

SEQ ID NO: 415482 - RNA, 22 nt, Human
ucagaagagcuggugcugccug

SEQ ID NO: 415483 - RNA, 22 nt, Human
gaggccugguagccgagcccca

SEQ ID NO: 415484 - RNA, 22 nt, Human
acaauucuggguauuuauauag

SEQ ID NO: 415485 - RNA, 22 nt, Human
agggaggucuggcugcccugag

SEQ ID NO: 415486 - RNA, 22 nt, Human
gggcagagaaauggacaguugg

SEQ ID NO: 415487 - RNA, 19 nt, Human
gcaucagagcagaaggggu

SEQ ID NO: 415488 - RNA, 22 nt, Human
augaggcagauguugcaugagg

SEQ ID NO: 415489 - RNA, 22 nt, Human
gcauuucugugcauacacauga

SEQ ID NO: 415490 - RNA, 22 nt, Human
aaaguguggagauugaacuaaa

SEQ ID NO: 415491 - RNA, 22 nt, Human
ggaggccaaggaggagcuugcc

SEQ ID NO: 415492 - RNA, 22 nt, Human
ggacagcccauacacaugucug

SEQ ID NO: 415493 - RNA, 22 nt, Human
uuguacuugccauagaacaaca

SEQ ID NO: 415494 - RNA, 20 nt, Human
cugggcugcccagcuauggg

SEQ ID NO: 415495 - RNA, 22 nt, Human
aggcaguuguugcugagcagcu

SEQ ID NO: 415496 - RNA, 22 nt, Human
cuccagggagcuuggaaagacc

SEQ ID NO: 415497 - RNA, 22 nt, Human
uuauuuaaaagugguaagauuc

SEQ ID NO: 415498 - RNA, 23 nt, Human
ugggccuggaaagccuuagagag

SEQ ID NO: 415499 - RNA, 22 nt, Human
ggccugcugacccaaguccugu

SEQ ID NO: 415500 - RNA, 22 nt, Human
gccugcagggccugggccuacc

SEQ ID NO: 415501 - RNA, 23 nt, Human
ugggucagcugccuccaggacaa

SEQ ID NO: 415502 - RNA, 22 nt, Human
agaggcugcacuugcucaugau

SEQ ID NO: 415503 - RNA, 22 nt, Human
aauguacaaaccuucuuuguag

SEQ ID NO: 415504 - RNA, 22 nt, Human
augauugaaaaugacauugcca

SEQ ID NO: 415505 - RNA, 22 nt, Human
agucucugcaugaugcagcaca

SEQ ID NO: 415506 - RNA, 22 nt, Human
cagcuggcccuuugguagccuu

SEQ ID NO: 415507 - RNA, 21 nt, Human
uccucagggccccagagcacu

SEQ ID NO: 415508 - RNA, 22 nt, Human
gaggggcuugaggcccugaugg

SEQ ID NO: 415509 - RNA, 22 nt, Human
auuucucucauuguuagcuagg

SEQ ID NO: 415510 - RNA, 22 nt, Human
caaagcaaggcucaguuugaac

SEQ ID NO: 415511 - RNA, 22 nt, Human
auaccuuuuagacauguaguug

SEQ ID NO: 415512 - RNA, 22 nt, Human
cuuccccaaccccgacugugug

SEQ ID NO: 415513 - RNA, 22 nt, Human
uggcucaggugugagcugaaga

SEQ ID NO: 415514 - RNA, 22 nt, Human
cacagggcuuugauggcugagu

SEQ ID NO: 415515 - RNA, 22 nt, Human
aaaugcaucagcucauaagaga

SEQ ID NO: 415516 - RNA, 22 nt, Human
ucuggagccacaaaccucagcu

SEQ ID NO: 415517 - RNA, 22 nt, Human
cuggagggugagccucaucucu

SEQ ID NO: 415518 - RNA, 22 nt, Human
acucaggaaaugaagacugguu

SEQ ID NO: 415519 - RNA, 22 nt, Human
ucaucaguguccuuaucacuua

SEQ ID NO: 415520 - RNA, 22 nt, Human
cugcaggggcuggaguuggcuu

SEQ ID NO: 415521 - RNA, 22 nt, Human
ugccaggcauuugacagacacu

SEQ ID NO: 415522 - RNA, 22 nt, Human
ucaaagcuuagauaauuucuuu

SEQ ID NO: 415523 - RNA, 22 nt, Human
uagcuaucuguguccagaucca

SEQ ID NO: 415524 - RNA, 22 nt, Human
ccuuucucuuggauaccgauug

SEQ ID NO: 415525 - RNA, 22 nt, Human
gcuucuggaggagcugggcuga

SEQ ID NO: 415526 - RNA, 22 nt, Human
ugcugugguucccagaguggau

SEQ ID NO: 415527 - RNA, 22 nt, Human
uuaacauuucuuuuccacucau

SEQ ID NO: 415528 - RNA, 21 nt, Human
aggcucagagagaaacucuug

SEQ ID NO: 415529 - RNA, 22 nt, Human
uuuccaaagcugaguugagcaa

SEQ ID NO: 415530 - RNA, 22 nt, Human
uuucacauuuguuuuaagaagu

SEQ ID NO: 415531 - RNA, 21 nt, Human
agcagaacagucgagcacugc

SEQ ID NO: 415532 - RNA, 22 nt, Human
uaguaugggaagaacuuuguag

SEQ ID NO: 415533 - RNA, 22 nt, Human
uuguauauauucuuaaagaugu

SEQ ID NO: 415534 - RNA, 22 nt, Human
ucaaaauuaaaccaacguccag

SEQ ID NO: 415535 - RNA, 22 nt, Human
ccugggugucaugggcagcugg

SEQ ID NO: 415536 - RNA, 18 nt, Human
aagaacugagguccuaga

SEQ ID NO: 415537 - RNA, 22 nt, Human
cagagcugggaucccaugggcg

SEQ ID NO: 415538 - RNA, 22 nt, Human
uggguggcggccugguucugag

SEQ ID NO: 415539 - RNA, 22 nt, Human
gcaggggcugcugggaacucgg

SEQ ID NO: 415540 - RNA, 22 nt, Human
cuccaggagcugugucuuucuu

SEQ ID NO: 415541 - RNA, 22 nt, Human
caugucuguguacacaugcaca

SEQ ID NO: 415542 - RNA, 23 nt, Human
ucucugaguuguacuuucccuug

SEQ ID NO: 415543 - RNA, 22 nt, Human
guggccuggaaaggcuggucug

SEQ ID NO: 415544 - RNA, 23 nt, Human
agggcuccuuguugauuagcauu

SEQ ID NO: 415545 - RNA, 22 nt, Human
cauuucugggagacaugcuaga

SEQ ID NO: 415546 - RNA, 18 nt, Human
cugucuuuuuucucucca

SEQ ID NO: 415547 - RNA, 22 nt, Human
ucauuugugugagugauuugac

SEQ ID NO: 415548 - RNA, 22 nt, Human
agauguaaacucucaugucauu

SEQ ID NO: 415549 - RNA, 22 nt, Human
ccagggcugguggcugcagagg

SEQ ID NO: 415550 - RNA, 22 nt, Human
ggaugcaggaguugaagaagga

SEQ ID NO: 415551 - RNA, 22 nt, Human
uugacaauguccuuugaauuuc

SEQ ID NO: 415552 - RNA, 22 nt, Human
cugggccugguagggcuugaaa

SEQ ID NO: 415553 - RNA, 22 nt, Human
guauuuucaugauuucagacca

SEQ ID NO: 415554 - RNA, 22 nt, Human
ucugucacucccugaugaugaa

SEQ ID NO: 415555 - RNA, 22 nt, Human
aaagccagaguguguuagagac

SEQ ID NO: 415556 - RNA, 22 nt, Human
gggcagagguucaacuucaaca

SEQ ID NO: 415557 - RNA, 21 nt, Human
gccauuguuuucuaccuggag

SEQ ID NO: 415558 - RNA, 22 nt, Human
gcucagaggcacgaccucuugg

SEQ ID NO: 415559 - RNA, 22 nt, Human
gaguccaguuguucacagaggc

SEQ ID NO: 415560 - RNA, 22 nt, Human
ugagguguguccccagggaggu

SEQ ID NO: 415561 - RNA, 22 nt, Human
ccagaaaaugcagaacauagaa

SEQ ID NO: 415562 - RNA, 23 nt, Human
ccugcagcugcuggggcuccacc

SEQ ID NO: 415563 - RNA, 22 nt, Human
ggagcagagcucuucaucugca

SEQ ID NO: 415564 - RNA, 22 nt, Human
uucuacuuuggacauaaaggac

SEQ ID NO: 415565 - RNA, 22 nt, Human
caguagcaggcacucagcacgu

SEQ ID NO: 415566 - RNA, 22 nt, Human
gcucaggagcugacagccucaa

SEQ ID NO: 415567 - RNA, 22 nt, Human
uuuuaaguuaauauaauugagg

SEQ ID NO: 415568 - RNA, 21 nt, Human
caggaaaagcggaagucuagc

SEQ ID NO: 415569 - RNA, 22 nt, Human
ugauuucuuccuugucauuaga

SEQ ID NO: 415570 - RNA, 22 nt, Human
cccagccugucuuucccaauga

SEQ ID NO: 415571 - RNA, 22 nt, Human
ugacagaaagaauaugucaauc

SEQ ID NO: 415572 - RNA, 22 nt, Human
cuggagcuaggaaguccaagau

SEQ ID NO: 415573 - RNA, 22 nt, Human
ucugggagagcacguggcugac

SEQ ID NO: 415574 - RNA, 22 nt, Human
ucccugggcaucacguugcuuc

SEQ ID NO: 415575 - RNA, 22 nt, Human
auggccugggcccgcuucagau

SEQ ID NO: 415576 - RNA, 22 nt, Human
ucauuuaauugguuuugcucgu

SEQ ID NO: 415577 - RNA, 22 nt, Human
aagcagaaaaacugagcuccaa

SEQ ID NO: 415578 - RNA, 22 nt, Human
acugucugcaaaacucauacuc

SEQ ID NO: 415579 - RNA, 22 nt, Human
aacaugauuuaguauaaugcag

SEQ ID NO: 415580 - RNA, 22 nt, Human
ggcagaggaaggaugaauucac

SEQ ID NO: 415581 - RNA, 22 nt, Human
aaauguuccuuuggauuaaacu

SEQ ID NO: 415582 - RNA, 22 nt, Human
aguuucuagccucacuguuuag

SEQ ID NO: 415583 - RNA, 22 nt, Human
ugugugccugagccgugccugg

SEQ ID NO: 415584 - RNA, 19 nt, Human
acacagggcuagaguuaca

SEQ ID NO: 415585 - RNA, 22 nt, Human
agcugcuguccuaggcacugua

SEQ ID NO: 415586 - RNA, 21 nt, Human
gggagcuggaaacugggugac

SEQ ID NO: 415587 - RNA, 19 nt, Human
agucccaggcccgaaagag

SEQ ID NO: 415588 - RNA, 22 nt, Human
cuguaauucacuagggucagcg

SEQ ID NO: 415589 - RNA, 19 nt, Human
gcuguauuaaagauacaug

SEQ ID NO: 415590 - RNA, 22 nt, Human
caggugggcguggcgagaaggc

SEQ ID NO: 415591 - RNA, 22 nt, Human
ucagguggcuuggagggggacg

SEQ ID NO: 415592 - RNA, 22 nt, Human
aggccugaaguguggagugggg

SEQ ID NO: 415593 - RNA, 22 nt, Human
ccagagaccagaacauggggau

SEQ ID NO: 415594 - RNA, 20 nt, Human
agaauucuuacccuuugaug

SEQ ID NO: 415595 - RNA, 22 nt, Human
ggggccagcaauguugaggaau

SEQ ID NO: 415596 - RNA, 22 nt, Human
cugcaggcaucuaacugugggc

SEQ ID NO: 415597 - RNA, 22 nt, Human
gagcgggaggaacggcucgggc

SEQ ID NO: 415598 - RNA, 22 nt, Human
gcagcuuucuacuuccuacagc

SEQ ID NO: 415599 - RNA, 22 nt, Human
ggcagauguuauaugaucugag

SEQ ID NO: 415600 - RNA, 22 nt, Human
agagcagcuggggcagagacca

SEQ ID NO: 415601 - RNA, 22 nt, Human
ugucucaguauacgaaacacuu

SEQ ID NO: 415602 - RNA, 22 nt, Human
gagcugggcacacgccacuuga

SEQ ID NO: 415603 - RNA, 22 nt, Human
ugucucagggcagcagcagggg

SEQ ID NO: 415604 - RNA, 17 nt, Human
acucaggaucugggagu

SEQ ID NO: 415605 - RNA, 22 nt, Human
gugugccaggaacuggcugcug

SEQ ID NO: 415606 - RNA, 18 nt, Human
cugccuguugcugagagg

SEQ ID NO: 415607 - RNA, 22 nt, Human
cagcuuuauuucacguguuugu

SEQ ID NO: 415608 - RNA, 21 nt, Human
gggccacaccuucugcagacc

SEQ ID NO: 415609 - RNA, 22 nt, Human
ugcuugggaauguggagucaga

SEQ ID NO: 415610 - RNA, 22 nt, Human
gcugggcuugguuucccugcuu

SEQ ID NO: 415611 - RNA, 20 nt, Human
ucauugcacauaauggaagc

SEQ ID NO: 415612 - RNA, 22 nt, Human
ugaaggugaaugucuaugggga

SEQ ID NO: 415613 - RNA, 22 nt, Human
gaaugcacuuccaacaucuauu

SEQ ID NO: 415614 - RNA, 22 nt, Human
agguuuauguuuggugcaggag

SEQ ID NO: 415615 - RNA, 22 nt, Human
ugaggaaguuguuucucuucua

SEQ ID NO: 415616 - RNA, 22 nt, Human
aggcccugcuuuccagagcuca

SEQ ID NO: 415617 - RNA, 22 nt, Human
gcucacugccauucucuagaug

SEQ ID NO: 415618 - RNA, 18 nt, Human
ucagcuggggcugcagcc

SEQ ID NO: 415619 - RNA, 18 nt, Human
ugcucuggucucacuugg

SEQ ID NO: 415620 - RNA, 22 nt, Human
ccagcccugucaccaacuggag

SEQ ID NO: 415621 - RNA, 22 nt, Human
ugaaggccuaacuuccagugcu

SEQ ID NO: 415622 - RNA, 22 nt, Human
ucucugggugauggcagggcac

SEQ ID NO: 415623 - RNA, 22 nt, Human
agcugagccagcagcaacagga

SEQ ID NO: 415624 - RNA, 22 nt, Human
uggaggaauaacagcaaccuua

SEQ ID NO: 415625 - RNA, 22 nt, Human
cuguguggacugguugaggccc

SEQ ID NO: 415626 - RNA, 22 nt, Human
ccuggagauuauuugguccaau

SEQ ID NO: 415627 - RNA, 22 nt, Human
aggccugagguuccugugcuca

SEQ ID NO: 415628 - RNA, 22 nt, Human
ugaagcaggaaacuucuuguuu

SEQ ID NO: 415629 - RNA, 22 nt, Human
ggcucuggagacauguggagag

SEQ ID NO: 415630 - RNA, 22 nt, Human
agcagcucuguuuaccuggagg

SEQ ID NO: 415631 - RNA, 22 nt, Human
cuuccuguugucacagucugcg

SEQ ID NO: 415632 - RNA, 22 nt, Human
agccuucauaaucuugggcuuu

SEQ ID NO: 415633 - RNA, 22 nt, Human
acugcuuacaaaaggaaagaau

SEQ ID NO: 415634 - RNA, 22 nt, Human
ucuugccucuuccccuuuccau

SEQ ID NO: 415635 - RNA, 22 nt, Human
auacaaagcuaaauaugguuuc

SEQ ID NO: 415636 - RNA, 22 nt, Human
gcagguggauuaucagaagugc

SEQ ID NO: 415637 - RNA, 22 nt, Human
ugauuucauaguauauacauga

SEQ ID NO: 415638 - RNA, 22 nt, Human
ccacugucuuuuccaggcugaa

SEQ ID NO: 415639 - RNA, 22 nt, Human
aaacucuguagcuaaacauaau

SEQ ID NO: 415640 - RNA, 22 nt, Human
aggugucugugaugggagcgau

SEQ ID NO: 415641 - RNA, 22 nt, Human
uuuuuccuagcgauuugucagc

SEQ ID NO: 415642 - RNA, 20 nt, Human
cugagcgucuaagaggugag

SEQ ID NO: 415643 - RNA, 22 nt, Human
agauacauuguucuaagcauug

SEQ ID NO: 415644 - RNA, 22 nt, Human
ugucaaauuuuuauugcaguau

SEQ ID NO: 415645 - RNA, 22 nt, Human
cugggccagggaggugucugua

SEQ ID NO: 415646 - RNA, 22 nt, Human
ugaagccaucccucagauggcc

SEQ ID NO: 415647 - RNA, 22 nt, Human
aagcagcuuaaauuagagccug

SEQ ID NO: 415648 - RNA, 22 nt, Human
cuggcuccacucccugccugac

SEQ ID NO: 415649 - RNA, 20 nt, Human
agucccagaucaaauuucug

SEQ ID NO: 415650 - RNA, 22 nt, Human
aacaaauggaacacaaaucuuu

SEQ ID NO: 415651 - RNA, 18 nt, Human
acugugguuuauguguag

SEQ ID NO: 415652 - RNA, 22 nt, Human
agguaacacuacuuaguauacu

SEQ ID NO: 415653 - RNA, 19 nt, Human
aucagcaagguaggaugug

SEQ ID NO: 415654 - RNA, 20 nt, Human
cuguagggugcagcaggcuc

SEQ ID NO: 415655 - RNA, 22 nt, Human
gagagcuguguucauucuacca

SEQ ID NO: 415656 - RNA, 22 nt, Human
aaauuucuggaagugucagagu

SEQ ID NO: 415657 - RNA, 22 nt, Human
gccugccuguuggcugaggugc

SEQ ID NO: 415658 - RNA, 22 nt, Human
cacaaugcguacauauaucaaa

SEQ ID NO: 415659 - RNA, 22 nt, Human
gagaagguggaccugaaggagc

SEQ ID NO: 415660 - RNA, 22 nt, Human
aaaguucagugccuucuauaca

SEQ ID NO: 415661 - RNA, 22 nt, Human
aguguacauguuuacagcaucu

SEQ ID NO: 415662 - RNA, 22 nt, Human
cagagccaggucuaggagucuc

SEQ ID NO: 415663 - RNA, 22 nt, Human
ugggcugcagggguugagagcu

SEQ ID NO: 415664 - RNA, 22 nt, Human
gcacaugagcugcugggauggg

SEQ ID NO: 415665 - RNA, 21 nt, Human
ccagcuccaggaccuuggauc

SEQ ID NO: 415666 - RNA, 22 nt, Human
cuggagcccugaaugggcagga

SEQ ID NO: 415667 - RNA, 22 nt, Human
uggcucagugcauucacaguaa

SEQ ID NO: 415668 - RNA, 22 nt, Human
ugccugggccucugaggaaggc

SEQ ID NO: 415669 - RNA, 22 nt, Human
cacaagucuguggucuccaaca

SEQ ID NO: 415670 - RNA, 20 nt, Human
agcaagaguaaggacagcga

SEQ ID NO: 415671 - RNA, 22 nt, Human
aggcaguuuaggcagcgauuua

SEQ ID NO: 415672 - RNA, 23 nt, Human
agaaaaguucauaccuuuuuaac

SEQ ID NO: 415673 - RNA, 22 nt, Human
aguuuguaucaauuugcuuuau

SEQ ID NO: 415674 - RNA, 22 nt, Human
agcaugcugguguucauggcag

SEQ ID NO: 415675 - RNA, 21 nt, Human
ucccacucuaaauggacugaa

SEQ ID NO: 415676 - RNA, 22 nt, Human
ugucacauguguggcauuuuuc

SEQ ID NO: 415677 - RNA, 22 nt, Human
gcagauggcagcccaggcuggg

SEQ ID NO: 415678 - RNA, 22 nt, Human
ucauuuguucucauucucuacu

SEQ ID NO: 415679 - RNA, 22 nt, Human
gggccugugcacaguucuguua

SEQ ID NO: 415680 - RNA, 21 nt, Human
cacaagacacauaggguguuu

SEQ ID NO: 415681 - RNA, 22 nt, Human
cugcagugcaagcccagaugga

SEQ ID NO: 415682 - RNA, 22 nt, Human
ucucugguggcuccaucaguag

SEQ ID NO: 415683 - RNA, 22 nt, Human
uggccgggccgggcgccuccac

SEQ ID NO: 415684 - RNA, 22 nt, Human
aaggcaguacuuuauguccaua

SEQ ID NO: 415685 - RNA, 22 nt, Human
ugcagggcacacgcacgggugu

SEQ ID NO: 415686 - RNA, 22 nt, Human
auuucucagugaaaugacaggc

SEQ ID NO: 415687 - RNA, 22 nt, Human
gcagccagccccucugaccucu

SEQ ID NO: 415688 - RNA, 22 nt, Human
aagggcugaaagaccuugggca

SEQ ID NO: 415689 - RNA, 22 nt, Human
cauuucugucacguucuuuuau

SEQ ID NO: 415690 - RNA, 22 nt, Human
ugagcuggucuugaguguagcu

SEQ ID NO: 415691 - RNA, 19 nt, Human
uucuaccuuacuguaggcu

SEQ ID NO: 415692 - RNA, 22 nt, Human
agccugagagccaagcugugca

SEQ ID NO: 415693 - RNA, 20 nt, Human
gucucaaguaucucacaguc

SEQ ID NO: 415694 - RNA, 22 nt, Human
aaaugucuguuagucauaucau

SEQ ID NO: 415695 - RNA, 23 nt, Human
aacaauagguuuuggcagaauag

SEQ ID NO: 415696 - RNA, 22 nt, Human
caaggccagggaauuuuucugg

SEQ ID NO: 415697 - RNA, 22 nt, Human
uggcagagaaccugggcuuugu

SEQ ID NO: 415698 - RNA, 22 nt, Human
acaggugaccugcucauaugaa

SEQ ID NO: 415699 - RNA, 22 nt, Human
uaucuacuccucuuucagaugc

SEQ ID NO: 415700 - RNA, 22 nt, Human
caagacaagaucuaagcaugcu

SEQ ID NO: 415701 - RNA, 22 nt, Human
gugugcagggggccagcgcagc

SEQ ID NO: 415702 - RNA, 22 nt, Human
aaggugaaacuggaagcuggcc

SEQ ID NO: 415703 - RNA, 22 nt, Human
cagcccuguccagcagagggug

SEQ ID NO: 415704 - RNA, 22 nt, Human
cucccagguuacaucugagccu

SEQ ID NO: 415705 - RNA, 22 nt, Human
ggcuucuccccuuugagucuuc

SEQ ID NO: 415706 - RNA, 22 nt, Human
uuuccuuugcccaauacauguc

SEQ ID NO: 415707 - RNA, 22 nt, Human
ggcagagcuugcagugagccga

SEQ ID NO: 415708 - RNA, 22 nt, Human
ccucagagccuccagaaggaau

SEQ ID NO: 415709 - RNA, 22 nt, Human
gcuguacauucugcacaggccc

SEQ ID NO: 415710 - RNA, 22 nt, Human
uugaagcauuugcuauagcauu

SEQ ID NO: 415711 - RNA, 22 nt, Human
agggcucccgcgguguccggga

SEQ ID NO: 415712 - RNA, 22 nt, Human
uggcagagcuggcugcggauga

SEQ ID NO: 415713 - RNA, 22 nt, Human
gugcugucaauugcuuucagua

SEQ ID NO: 415714 - RNA, 18 nt, Human
uuuuacucauagcaggcc

SEQ ID NO: 415715 - RNA, 23 nt, Human
agaugagccaacaccuccaugcc

SEQ ID NO: 415716 - RNA, 22 nt, Human
uguggcucucagauccuccaau

SEQ ID NO: 415717 - RNA, 22 nt, Human
cuggcagcuggaggcuagaggc

SEQ ID NO: 415718 - RNA, 22 nt, Human
uuaagucacuuaucuaaagaca

SEQ ID NO: 415719 - RNA, 22 nt, Human
uuucacauuuuauacuuaagcc

SEQ ID NO: 415720 - RNA, 21 nt, Human
uguggcagauguugggaggca

SEQ ID NO: 415721 - RNA, 22 nt, Human
agugcugucuccuucccccggg

SEQ ID NO: 415722 - RNA, 22 nt, Human
cuggcugcuuguagacucgacu

SEQ ID NO: 415723 - RNA, 22 nt, Human
aggcucaguauagcuggcaagu

SEQ ID NO: 415724 - RNA, 22 nt, Human
uuucaaagguggaagagugaau

SEQ ID NO: 415725 - RNA, 22 nt, Human
ccugccugacagagaagguuca

SEQ ID NO: 415726 - RNA, 22 nt, Human
ccuggcagcgccgaagcuggcc

SEQ ID NO: 415727 - RNA, 22 nt, Human
aaugcuuuaauugcauguagug

SEQ ID NO: 415728 - RNA, 22 nt, Human
agccaacuaggagauuaaggua

SEQ ID NO: 415729 - RNA, 22 nt, Human
ugcaauaaguuguguuaucacu

SEQ ID NO: 415730 - RNA, 22 nt, Human
aaggucauuuuuuccucuguug

SEQ ID NO: 415731 - RNA, 22 nt, Human
cagggcucaggcucugggauuc

SEQ ID NO: 415732 - RNA, 23 nt, Human
caugggagugagaaugccagcuc

SEQ ID NO: 415733 - RNA, 22 nt, Human
cggggcaggagucccuguagag

SEQ ID NO: 415734 - RNA, 22 nt, Human
gcagggacagggcagggccuuu

SEQ ID NO: 415735 - RNA, 22 nt, Human
gguccccagcaguggcugcuuc

SEQ ID NO: 415736 - RNA, 22 nt, Human
augugaaagagguguucagugg

SEQ ID NO: 415737 - RNA, 22 nt, Human
cucccaagggguaagggagcug

SEQ ID NO: 415738 - RNA, 23 nt, Human
uggagcugggcucagacccuggg

SEQ ID NO: 415739 - RNA, 22 nt, Human
ugggcugcagagcccggccuuc

SEQ ID NO: 415740 - RNA, 18 nt, Human
ugucauugccagggaagc

SEQ ID NO: 415741 - RNA, 22 nt, Human
aucaggaugcugucaguuacca

SEQ ID NO: 415742 - RNA, 22 nt, Human
aaugcacaugccacauguggua

SEQ ID NO: 415743 - RNA, 22 nt, Human
ggucagcagugcagggcagagc

SEQ ID NO: 415744 - RNA, 22 nt, Human
uugaggaguguuuagggugagg

SEQ ID NO: 415745 - RNA, 23 nt, Human
cacacccaucacuaagagcuccu

SEQ ID NO: 415746 - RNA, 20 nt, Human
cugagcccccagccugcagg

SEQ ID NO: 415747 - RNA, 22 nt, Human
uucaggauucugugucugacaa

SEQ ID NO: 415748 - RNA, 23 nt, Human
ugcagcugccucuggcgggccgg

SEQ ID NO: 415749 - RNA, 22 nt, Human
aguguggguuuuauggagcccu

SEQ ID NO: 415750 - RNA, 22 nt, Human
acugagcucuugacugggaguu

SEQ ID NO: 415751 - RNA, 22 nt, Human
uagaaacagaaaacuguaauag

SEQ ID NO: 415752 - RNA, 22 nt, Human
uuaacauuguccuuagcagauu

SEQ ID NO: 415753 - RNA, 22 nt, Human
guggggaaaggaguggggcuca

SEQ ID NO: 415754 - RNA, 20 nt, Human
ggggcccaagcccucuugcc

SEQ ID NO: 415755 - RNA, 22 nt, Human
uuucaaauagaaucuuuccaaa

SEQ ID NO: 415756 - RNA, 22 nt, Human
ccugucugcaugagugagcaua

SEQ ID NO: 415757 - RNA, 22 nt, Human
ccagcccugccagagagagcug

SEQ ID NO: 415758 - RNA, 22 nt, Human
cacugaagaugcgacuagugcu

SEQ ID NO: 415759 - RNA, 22 nt, Human
uggccucugggaaagcagauuc

SEQ ID NO: 415760 - RNA, 22 nt, Human
ugaagcagauggucuggucauu

SEQ ID NO: 415761 - RNA, 22 nt, Human
uggcagaguaggauggcccugu

SEQ ID NO: 415762 - RNA, 22 nt, Human
agcagagaagacacaggcuuca

SEQ ID NO: 415763 - RNA, 22 nt, Human
aggagcugucagagugccagag

SEQ ID NO: 415764 - RNA, 22 nt, Human
gguggguuuggaagagcaggcu

SEQ ID NO: 415765 - RNA, 22 nt, Human
ccacagcugaccgcaggugagc

SEQ ID NO: 415766 - RNA, 22 nt, Human
gcuccuggcuccaggcagccaa

SEQ ID NO: 415767 - RNA, 22 nt, Human
cagggcucugccuugagggaug

SEQ ID NO: 415768 - RNA, 22 nt, Human
ugcuucucccaaccagggccug

SEQ ID NO: 415769 - RNA, 20 nt, Human
gcagagcuguucugugggga

SEQ ID NO: 415770 - RNA, 22 nt, Human
uccugcaguuacaucccagcca

SEQ ID NO: 415771 - RNA, 20 nt, Human
uauuuguauuugggaaaguu

SEQ ID NO: 415772 - RNA, 22 nt, Human
gcuguccucuuggacucagggc

SEQ ID NO: 415773 - RNA, 22 nt, Human
caggaugagaggcccagggaag

SEQ ID NO: 415774 - RNA, 22 nt, Human
uuugcauuuugauaagaucacu

SEQ ID NO: 415775 - RNA, 22 nt, Human
agcuuuauauuuaaugaauucu

SEQ ID NO: 415776 - RNA, 22 nt, Human
ugggaccugcuccuggaaugag

SEQ ID NO: 415777 - RNA, 22 nt, Human
gguuucaacuuuugugaggaau

SEQ ID NO: 415778 - RNA, 22 nt, Human
gaauucugguuuugaaaugaau

SEQ ID NO: 415779 - RNA, 22 nt, Human
cugcagcuguagaggacagugg

SEQ ID NO: 415780 - RNA, 22 nt, Human
gcugcagcagaaguucucagag

SEQ ID NO: 415781 - RNA, 22 nt, Human
uugaacagcuguuacauuguua

SEQ ID NO: 415782 - RNA, 17 nt, Human
ggcugcugugcuggugc

SEQ ID NO: 415783 - RNA, 22 nt, Human
caaggccacuccagagacuggu

SEQ ID NO: 415784 - RNA, 22 nt, Human
acaguggaagaagcacugaacu

SEQ ID NO: 415785 - RNA, 22 nt, Human
agcugcuguggggcucggccug

SEQ ID NO: 415786 - RNA, 23 nt, Human
uggcccugaaucuguccuggagg

SEQ ID NO: 415787 - RNA, 23 nt, Human
cagaccuggcagucauccucaac

SEQ ID NO: 415788 - RNA, 22 nt, Human
aaagcagcagcaccugcauuuc

SEQ ID NO: 415789 - RNA, 22 nt, Human
ccagaagagaucacaguucuug

SEQ ID NO: 415790 - RNA, 22 nt, Human
guccucuguagggcugggccac

SEQ ID NO: 415791 - RNA, 21 nt, Human
uagggcucuauuuuuauuuca

SEQ ID NO: 415792 - RNA, 22 nt, Human
ucagcaguguaguuuaucauuc

SEQ ID NO: 415793 - RNA, 19 nt, Human
uuucaauggcuuagagaaa

SEQ ID NO: 415794 - RNA, 18 nt, Human
aggccugggaagcugagg

SEQ ID NO: 415795 - RNA, 22 nt, Human
agucccagaugacccagcuacu

SEQ ID NO: 415796 - RNA, 22 nt, Human
aggugaaguugaggaggcagaa

SEQ ID NO: 415797 - RNA, 18 nt, Human
cgaggcaggcggaucacg

SEQ ID NO: 415798 - RNA, 22 nt, Human
guggccugccgugugguauggg

SEQ ID NO: 415799 - RNA, 19 nt, Human
ccuggaggugaagguucuc

SEQ ID NO: 415800 - RNA, 22 nt, Human
gggggcuggaauauccaucaac

SEQ ID NO: 415801 - RNA, 22 nt, Human
cuccuguauguugggcuucaca

SEQ ID NO: 415802 - RNA, 21 nt, Human
aggcucagcagguguauaaag

SEQ ID NO: 415803 - RNA, 22 nt, Human
ccacccagaccagggaucuggg

SEQ ID NO: 415804 - RNA, 22 nt, Human
cacaugggugugccuggaggaa

SEQ ID NO: 415805 - RNA, 22 nt, Human
aaggcugaggagggccugcagg

SEQ ID NO: 415806 - RNA, 22 nt, Human
agcugucuccagauacaggauu

SEQ ID NO: 415807 - RNA, 22 nt, Human
gaggcacaguguuuggucagug

SEQ ID NO: 415808 - RNA, 22 nt, Human
ggggaccuucccagagcaguug

SEQ ID NO: 415809 - RNA, 22 nt, Human
uuuuucauauuccccucucugg

SEQ ID NO: 415810 - RNA, 22 nt, Human
ucaccagggagcuuguccucug

SEQ ID NO: 415811 - RNA, 22 nt, Human
cucugggcaggaccaguggacc

SEQ ID NO: 415812 - RNA, 22 nt, Human
ucugaacauccagcaaugcaca

SEQ ID NO: 415813 - RNA, 22 nt, Human
acccacgaagaugagcggcaug

SEQ ID NO: 415814 - RNA, 22 nt, Human
uuguaacagcugcuuaauagag

SEQ ID NO: 415815 - RNA, 22 nt, Human
aacacagcuaauuucugucaau

SEQ ID NO: 415816 - RNA, 22 nt, Human
uggcucagaggggaagugguuu

SEQ ID NO: 415817 - RNA, 20 nt, Human
ucagaugggagugagccauc

SEQ ID NO: 415818 - RNA, 22 nt, Human
guuauaaaugacugcaaaaguu

SEQ ID NO: 415819 - RNA, 20 nt, Human
ugcucugucuaaaacuuccc

SEQ ID NO: 415820 - RNA, 22 nt, Human
ucaagagacaggacguguuuca

SEQ ID NO: 415821 - RNA, 22 nt, Human
ugaggcaggaggauugcaggau

SEQ ID NO: 415822 - RNA, 22 nt, Human
agccaggauuggcugagccuua

SEQ ID NO: 415823 - RNA, 22 nt, Human
acagccuguguaccagcuggga

SEQ ID NO: 415824 - RNA, 22 nt, Human
uuccucagccagcacuuagggg

SEQ ID NO: 415825 - RNA, 22 nt, Human
uaaagcaggccacauaugugau

SEQ ID NO: 415826 - RNA, 20 nt, Human
cuguggcucaugcaucugcc

SEQ ID NO: 415827 - RNA, 21 nt, Human
gcagggacaaagcuucaggag

SEQ ID NO: 415828 - RNA, 22 nt, Human
ugggcagagucguggggaauag

SEQ ID NO: 415829 - RNA, 18 nt, Human
aggcacagagcauacaua

SEQ ID NO: 415830 - RNA, 22 nt, Human
cuggccucaccucagacuuacu

SEQ ID NO: 415831 - RNA, 22 nt, Human
caggccugagacaucugagaua

SEQ ID NO: 415832 - RNA, 22 nt, Human
ccagagcccagggucaugcagg

SEQ ID NO: 415833 - RNA, 22 nt, Human
aauaccuuuccugccauucacu

SEQ ID NO: 415834 - RNA, 22 nt, Human
gugggcaaggucccugccagcu

SEQ ID NO: 415835 - RNA, 22 nt, Human
gcugccaguaguuggagcucca

SEQ ID NO: 415836 - RNA, 22 nt, Human
cagugaggaagcugucuggacc

SEQ ID NO: 415837 - RNA, 22 nt, Human
caguacuuggucaaggaagcag

SEQ ID NO: 415838 - RNA, 22 nt, Human
ggagcugucuguagggcacagg

SEQ ID NO: 415839 - RNA, 22 nt, Human
uuggagcccugaggaucuggau

SEQ ID NO: 415840 - RNA, 22 nt, Human
ggccucaguuucuccauggguu

SEQ ID NO: 415841 - RNA, 22 nt, Human
gaggcucagagagguccacaua

SEQ ID NO: 415842 - RNA, 22 nt, Human
gggggacuaacuggauccugga

SEQ ID NO: 415843 - RNA, 22 nt, Human
aagcccagcugaaagcauuuuu

SEQ ID NO: 415844 - RNA, 22 nt, Human
uuuguuuagaugguaaaucagu

SEQ ID NO: 415845 - RNA, 22 nt, Human
gcugagcuagcuaucucagucu

SEQ ID NO: 415846 - RNA, 22 nt, Human
cgucccaguuccagccgcgcug

SEQ ID NO: 415847 - RNA, 22 nt, Human
gagcucagauucuggugucaga

SEQ ID NO: 415848 - RNA, 19 nt, Human
ugucucagugucccuuccu

SEQ ID NO: 415849 - RNA, 22 nt, Human
cagcuggcaaguggagcagggu

SEQ ID NO: 415850 - RNA, 22 nt, Human
auaauuuacuaagcucuaccuu

SEQ ID NO: 415851 - RNA, 22 nt, Human
uggcccuguggaggucagugag

SEQ ID NO: 415852 - RNA, 22 nt, Human
aaagaaauagauggcauuuaaa

SEQ ID NO: 415853 - RNA, 22 nt, Human
gggaggaaggcuugggugagua

SEQ ID NO: 415854 - RNA, 22 nt, Human
acagaauuaucaggaaauguua

SEQ ID NO: 415855 - RNA, 22 nt, Human
ccaaggaguagagcaggaagcu

SEQ ID NO: 415856 - RNA, 22 nt, Human
gugggccucuugaggguggcua

SEQ ID NO: 415857 - RNA, 22 nt, Human
agguggcuccucccauggcugg

SEQ ID NO: 415858 - RNA, 15 nt, Human
uucaggauaugacuc

SEQ ID NO: 415859 - RNA, 22 nt, Human
gagccuguguuuccuguagcca

SEQ ID NO: 415860 - RNA, 22 nt, Human
acagucauagcagccuuuguua

SEQ ID NO: 415861 - RNA, 22 nt, Human
agcagcauucucugguaugggg

SEQ ID NO: 415862 - RNA, 22 nt, Human
ugggauggagccugaguauagu

SEQ ID NO: 415863 - RNA, 22 nt, Human
ggcacugaaguggguguugggu

SEQ ID NO: 415864 - RNA, 22 nt, Human
agcugguggauuaugcuguaca

SEQ ID NO: 415865 - RNA, 22 nt, Human
ccagcugcagguguuccagaug

SEQ ID NO: 415866 - RNA, 22 nt, Human
ucuggcucccagccugcucuca

SEQ ID NO: 415867 - RNA, 17 nt, Human
ccucccacaccgcccug

SEQ ID NO: 415868 - RNA, 22 nt, Human
aguccuucaagaaaucuggaaa

SEQ ID NO: 415869 - RNA, 22 nt, Human
ccucccucuguuagagcugucu

SEQ ID NO: 415870 - RNA, 22 nt, Human
guccuuugaaggcaaaaggaga

SEQ ID NO: 415871 - RNA, 22 nt, Human
ugacauuuaagccucugauuuc

SEQ ID NO: 415872 - RNA, 22 nt, Human
ccugggugacccgugagcgucc

SEQ ID NO: 415873 - RNA, 22 nt, Human
auguccagccaaccacuggauu

SEQ ID NO: 415874 - RNA, 22 nt, Human
guguauaacuaucuaucuagua

SEQ ID NO: 415875 - RNA, 22 nt, Human
ugaggcagcauucuucaagaca

SEQ ID NO: 415876 - RNA, 22 nt, Human
ggcuuuauuugcagccauuguu

SEQ ID NO: 415877 - RNA, 22 nt, Human
gaaaguuugccucucucuugag

SEQ ID NO: 415878 - RNA, 22 nt, Human
uuuguuuucaaugugucauuca

SEQ ID NO: 415879 - RNA, 22 nt, Human
uuagggacaaauuugcagaacc

SEQ ID NO: 415880 - RNA, 22 nt, Human
guaucuuuuacaccaggaaauu

SEQ ID NO: 415881 - RNA, 22 nt, Human
acaguggagaagcaaaugcagu

SEQ ID NO: 415882 - RNA, 22 nt, Human
aggguagggcccggagacagac

SEQ ID NO: 415883 - RNA, 22 nt, Human
agggacccugaugacugaggag

SEQ ID NO: 415884 - RNA, 22 nt, Human
acagaacugggaaaugcacaua

SEQ ID NO: 415885 - RNA, 22 nt, Human
aggcgcaggguuuggacccagg

SEQ ID NO: 415886 - RNA, 22 nt, Human
guucagggagggacagaugaag

SEQ ID NO: 415887 - RNA, 22 nt, Human
ucucugucccuaggagccuugc

SEQ ID NO: 415888 - RNA, 22 nt, Human
uucaggaugaaagugugcaaca

SEQ ID NO: 415889 - RNA, 22 nt, Human
agggugucagccacggaauggg

SEQ ID NO: 415890 - RNA, 22 nt, Human
ccugggagggcaagugcugaug

SEQ ID NO: 415891 - RNA, 22 nt, Human
ccagggccaguaagauuggcau

SEQ ID NO: 415892 - RNA, 22 nt, Human
cuuauguaaaacggaaagggaa

SEQ ID NO: 415893 - RNA, 22 nt, Human
aaaugcauguagaauaauagag

SEQ ID NO: 415894 - RNA, 22 nt, Human
gauaugaaguggcauugugaag

SEQ ID NO: 415895 - RNA, 22 nt, Human
ucccugcagacguccugcgggu

SEQ ID NO: 415896 - RNA, 22 nt, Human
cccuggcauaaaacuucuccag

SEQ ID NO: 415897 - RNA, 22 nt, Human
uuaauaaacaggugcagcugaa

SEQ ID NO: 415898 - RNA, 22 nt, Human
guggguggaggcgucgagggca

SEQ ID NO: 415899 - RNA, 20 nt, Human
aggcugagggugauuguguc

SEQ ID NO: 415900 - RNA, 22 nt, Human
uaaggccauuauggugggcccg

SEQ ID NO: 415901 - RNA, 22 nt, Human
ucauaacagcuaagucccuuuc

SEQ ID NO: 415902 - RNA, 22 nt, Human
ugcuucaggagaugucaccaug

SEQ ID NO: 415903 - RNA, 22 nt, Human
guuaauuuaguagaguccagau

SEQ ID NO: 415904 - RNA, 22 nt, Human
gggagcuggagcuggaagacuc

SEQ ID NO: 415905 - RNA, 22 nt, Human
ucagaggacaagcucccuggug

SEQ ID NO: 415906 - RNA, 22 nt, Human
cagggcucagggacugcagaaa

SEQ ID NO: 415907 - RNA, 22 nt, Human
agcagggcuuuggcuggcuuuc

SEQ ID NO: 415908 - RNA, 22 nt, Human
cugggcugucaauggcccucug

SEQ ID NO: 415909 - RNA, 22 nt, Human
ccucccaccauuuagagagagc

SEQ ID NO: 415910 - RNA, 22 nt, Human
caaagugcugagauuacaggua

SEQ ID NO: 415911 - RNA, 22 nt, Human
gcagcuguguaaugagcccaca

SEQ ID NO: 415912 - RNA, 22 nt, Human
uguguauucagcaagcgaaaca

SEQ ID NO: 415913 - RNA, 22 nt, Human
acaaacuaccuacagauguuca

SEQ ID NO: 415914 - RNA, 17 nt, Human
ccagagcuacugagacu

SEQ ID NO: 415915 - RNA, 22 nt, Human
agucucugcacaguaagaagca

SEQ ID NO: 415916 - RNA, 23 nt, Human
uaagaacagacaagcauuuacau

SEQ ID NO: 415917 - RNA, 22 nt, Human
agcuugccucuuaaucaccuca

SEQ ID NO: 415918 - RNA, 22 nt, Human
acagggcagagugaaaugcuau

SEQ ID NO: 415919 - RNA, 22 nt, Human
agccagccaguucacuaggaaa

SEQ ID NO: 415920 - RNA, 22 nt, Human
cagggagaucuuggcuccuggu

SEQ ID NO: 415921 - RNA, 22 nt, Human
ugaauccagagcuauuucgucc

SEQ ID NO: 415922 - RNA, 22 nt, Human
cugccuggccugaucuccacgc

SEQ ID NO: 415923 - RNA, 22 nt, Human
uaaaguucagugcaugaaugug

SEQ ID NO: 415924 - RNA, 22 nt, Human
agcaaagucaguggaaccaucc

SEQ ID NO: 415925 - RNA, 22 nt, Human
acuuucuccagaaaaccaagga

SEQ ID NO: 415926 - RNA, 19 nt, Human
aggcagaggcuuggcuagc

SEQ ID NO: 415927 - RNA, 23 nt, Human
ccagcccuccaccagcucuaggc

SEQ ID NO: 415928 - RNA, 22 nt, Human
uucuggaaguguuagaaucugg

SEQ ID NO: 415929 - RNA, 22 nt, Human
aagugguaggaagagagcacug

SEQ ID NO: 415930 - RNA, 23 nt, Human
ugggaguguugggaucucugcuc

SEQ ID NO: 415931 - RNA, 20 nt, Human
agaggccaguuaggagucua

SEQ ID NO: 415932 - RNA, 22 nt, Human
aaggcaggaugggaaaagauuu

SEQ ID NO: 415933 - RNA, 22 nt, Human
auguccagggcacacagcagug

SEQ ID NO: 415934 - RNA, 18 nt, Human
guucaaggucaagagaga

SEQ ID NO: 415935 - RNA, 22 nt, Human
cuggcucaguucuugguuuuca

SEQ ID NO: 415936 - RNA, 22 nt, Human
aucuggcucucucauuuacaaa

SEQ ID NO: 415937 - RNA, 20 nt, Human
ugcagaagaacguucugguu

SEQ ID NO: 415938 - RNA, 22 nt, Human
ccagaggcauguucaaagcaau

SEQ ID NO: 415939 - RNA, 22 nt, Human
aaaauaacuucuacuauuugca

SEQ ID NO: 415940 - RNA, 23 nt, Human
uggcugagguccagguaguuuca

SEQ ID NO: 415941 - RNA, 22 nt, Human
cacauaauugaacgugaugagu

SEQ ID NO: 415942 - RNA, 22 nt, Human
caguuucucucauacauauuug

SEQ ID NO: 415943 - RNA, 22 nt, Human
uggugugggcguggcaggcaag

SEQ ID NO: 415944 - RNA, 22 nt, Human
agaggaggcucugggaucgucc

SEQ ID NO: 415945 - RNA, 22 nt, Human
cugagccaaccacagcaggagc

SEQ ID NO: 415946 - RNA, 22 nt, Human
uggaagcacuuggguuuuguug

SEQ ID NO: 415947 - RNA, 22 nt, Human
aucaggaucugcaucauaagaa

SEQ ID NO: 415948 - RNA, 22 nt, Human
acagggccauuaucuguucuag

SEQ ID NO: 415949 - RNA, 22 nt, Human
gccagccugugcuuggccaggc

SEQ ID NO: 415950 - RNA, 20 nt, Human
ugcugcaguuucaugggacu

SEQ ID NO: 415951 - RNA, 22 nt, Human
aaaggccaauaaagacaagcug

SEQ ID NO: 415952 - RNA, 21 nt, Human
agggagcuauuuauaguaagc

SEQ ID NO: 415953 - RNA, 22 nt, Human
ggcugugggaugcauaggagcu

SEQ ID NO: 415954 - RNA, 22 nt, Human
uuucacauguggaaugccaggu

SEQ ID NO: 415955 - RNA, 22 nt, Human
uauuucugauugcucaugaggc

SEQ ID NO: 415956 - RNA, 22 nt, Human
uuuauuauagugguggggacug

SEQ ID NO: 415957 - RNA, 22 nt, Human
uagaaacucaggauacucuucc

SEQ ID NO: 415958 - RNA, 22 nt, Human
auaucuuuuagagcaagcuugu

SEQ ID NO: 415959 - RNA, 22 nt, Human
uuccucucucuugccagaaugu

SEQ ID NO: 415960 - RNA, 22 nt, Human
agacaaguucugugggucaccu

SEQ ID NO: 415961 - RNA, 22 nt, Human
cagaauuugaaguaauauucca

SEQ ID NO: 415962 - RNA, 22 nt, Human
ugccagcacuucuggcugucug

SEQ ID NO: 415963 - RNA, 17 nt, Human
ggaaaaggaugauacag

SEQ ID NO: 415964 - RNA, 22 nt, Human
gggcuggaucuccugcaggcag

SEQ ID NO: 415965 - RNA, 22 nt, Human
ucccagaggacuguuggugcua

SEQ ID NO: 415966 - RNA, 22 nt, Human
gccugagagucugcauuucuaa

SEQ ID NO: 415967 - RNA, 22 nt, Human
uccugagauucugcauuucuaa

SEQ ID NO: 415968 - RNA, 22 nt, Human
aaugaacacagcccucuacuuu

SEQ ID NO: 415969 - RNA, 22 nt, Human
ugggcacuggaagccugcugug

SEQ ID NO: 415970 - RNA, 22 nt, Human
gcaggcaggcuuccuugaacug

SEQ ID NO: 415971 - RNA, 22 nt, Human
caggcagcugcgacaagagagc

SEQ ID NO: 415972 - RNA, 22 nt, Human
ucauauuuaggccuuuaauuca

SEQ ID NO: 415973 - RNA, 22 nt, Human
ugcacaucuuucagcaucauac

SEQ ID NO: 415974 - RNA, 22 nt, Human
aagaagagaaaugugcugcugg

SEQ ID NO: 415975 - RNA, 22 nt, Human
acagagcauuugggacagagag

SEQ ID NO: 415976 - RNA, 22 nt, Human
acauacuuaacauuaaagucau

SEQ ID NO: 415977 - RNA, 22 nt, Human
ccugccugauuccaggauggcu

SEQ ID NO: 415978 - RNA, 22 nt, Human
caagagcugugaccucauucac

SEQ ID NO: 415979 - RNA, 22 nt, Human
gccuggcaaggcccuguugacu

SEQ ID NO: 415980 - RNA, 22 nt, Human
gcccuggccuucaucucagaca

SEQ ID NO: 415981 - RNA, 22 nt, Human
uccagccaugacucggacagug

SEQ ID NO: 415982 - RNA, 22 nt, Human
gcagcugcuggaaguuccugcc

SEQ ID NO: 415983 - RNA, 22 nt, Human
gaaacccaaacuaagacaguag

SEQ ID NO: 415984 - RNA, 22 nt, Human
ccugguguugugaaguagccgu

SEQ ID NO: 415985 - RNA, 22 nt, Human
gcugucuggguugagggcccug

SEQ ID NO: 415986 - RNA, 22 nt, Human
auguaacacccacuuuuauagc

SEQ ID NO: 415987 - RNA, 22 nt, Human
acugcagacucuacaguuauaa

SEQ ID NO: 415988 - RNA, 22 nt, Human
guccaggucuggacccugagcc

SEQ ID NO: 415989 - RNA, 22 nt, Human
ucccuggggauguuggccugcc

SEQ ID NO: 415990 - RNA, 22 nt, Human
agagcuggacgucugagcccua

SEQ ID NO: 415991 - RNA, 22 nt, Human
cagagcauugagggucugccaa

SEQ ID NO: 415992 - RNA, 19 nt, Human
uggcagaggacaaggacuu

SEQ ID NO: 415993 - RNA, 22 nt, Human
gcagccucagggcacucagaug

SEQ ID NO: 415994 - RNA, 22 nt, Human
uguggcugucuguucuccuagg

SEQ ID NO: 415995 - RNA, 22 nt, Human
gcuggccucuacaggccggcca

SEQ ID NO: 415996 - RNA, 22 nt, Human
ugcauuaugcuacccagaagcu

SEQ ID NO: 415997 - RNA, 22 nt, Human
auuccaguucuccucucuaaag

SEQ ID NO: 415998 - RNA, 22 nt, Human
gcugccucugcgacucugggcg

SEQ ID NO: 415999 - RNA, 22 nt, Human
cucccuggcacagcgagagguu

SEQ ID NO: 416000 - RNA, 22 nt, Human
uugcucuguaauaaucuggggu

SEQ ID NO: 416001 - RNA, 20 nt, Human
gugccuggagaagaggcugu

SEQ ID NO: 416002 - RNA, 22 nt, Human
gugccuggcacacagaaggcaa

SEQ ID NO: 416003 - RNA, 22 nt, Human
uggagaugaauauguguaccug

SEQ ID NO: 416004 - RNA, 22 nt, Human
cagagaaagggugaauuccuuc

SEQ ID NO: 416005 - RNA, 22 nt, Human
cuggcugggagcgagcugcuca

SEQ ID NO: 416006 - RNA, 22 nt, Human
cagggugacugcccuggccacu

SEQ ID NO: 416007 - RNA, 22 nt, Human
cuggaagguuccucccagcucc

SEQ ID NO: 416008 - RNA, 22 nt, Human
gucacuguuuccuauuauauuu

SEQ ID NO: 416009 - RNA, 22 nt, Human
ggauuucuuccuuccucagaag

SEQ ID NO: 416010 - RNA, 22 nt, Human
cagcagaggaaagcaaaucuaa

SEQ ID NO: 416011 - RNA, 22 nt, Human
gacaugcaugaaugcaggucuc

SEQ ID NO: 416012 - RNA, 22 nt, Human
uauuaguagcuugaaauuggug

SEQ ID NO: 416013 - RNA, 22 nt, Human
uggacaacauagugagaccuca

SEQ ID NO: 416014 - RNA, 22 nt, Human
uguguacucaauugagccauuu

SEQ ID NO: 416015 - RNA, 23 nt, Human
ggacagggcccugcccuauggcc

SEQ ID NO: 416016 - RNA, 22 nt, Human
cuggccugagaaugcuacccuu

SEQ ID NO: 416017 - RNA, 22 nt, Human
augggcagcugcagcaguggug

SEQ ID NO: 416018 - RNA, 22 nt, Human
ugaggcagguaagcaaguuuug

SEQ ID NO: 416019 - RNA, 22 nt, Human
ccugcacuaccuggggcugcug

SEQ ID NO: 416020 - RNA, 22 nt, Human
ucaggagucugugcaguuccac

SEQ ID NO: 416021 - RNA, 22 nt, Human
augauuuccaguuguugcuaag

SEQ ID NO: 416022 - RNA, 22 nt, Human
gccucugcccauccaccaucag

SEQ ID NO: 416023 - RNA, 17 nt, Human
gcacugaacaauccugu

SEQ ID NO: 416024 - RNA, 22 nt, Human
ugagaggcagaauggugccugc

SEQ ID NO: 416025 - RNA, 22 nt, Human
gccaggcuccaggcccuccuga

SEQ ID NO: 416026 - RNA, 22 nt, Human
acagcuuuugaaaaauuacugg

SEQ ID NO: 416027 - RNA, 22 nt, Human
uccaggcaaggauaauaaacau

SEQ ID NO: 416028 - RNA, 22 nt, Human
agggaccugucaaugacaguua

SEQ ID NO: 416029 - RNA, 22 nt, Human
aaggaagaagacucuuuacucc

SEQ ID NO: 416030 - RNA, 22 nt, Human
gagggacagcuaaagagaaauu

SEQ ID NO: 416031 - RNA, 20 nt, Human
aucaggauucuugcuuuguu

SEQ ID NO: 416032 - RNA, 22 nt, Human
cagggcucccugcagccucugu

SEQ ID NO: 416033 - RNA, 22 nt, Human
cacauaaguggguuccauugca

SEQ ID NO: 416034 - RNA, 23 nt, Human
uggggcugauggagacggaccag

SEQ ID NO: 416035 - RNA, 22 nt, Human
ggguccaggucuucaggcagag

SEQ ID NO: 416036 - RNA, 22 nt, Human
aagacagaccacgugacagggc

SEQ ID NO: 416037 - RNA, 22 nt, Human
agacaaagacagcaucucaggu

SEQ ID NO: 416038 - RNA, 22 nt, Human
aggaaggagggcagauauuaag

SEQ ID NO: 416039 - RNA, 22 nt, Human
ugcagcagguuccaaaggguua

SEQ ID NO: 416040 - RNA, 22 nt, Human
uuuucauugagcaccugaguaa

SEQ ID NO: 416041 - RNA, 22 nt, Human
guucuccauucagcuuccugug

SEQ ID NO: 416042 - RNA, 22 nt, Human
auccuuggaugugucuuuuugu

SEQ ID NO: 416043 - RNA, 22 nt, Human
gagcaggcauucuaguggcuga

SEQ ID NO: 416044 - RNA, 22 nt, Human
agagcagaggcauggccguggg

SEQ ID NO: 416045 - RNA, 22 nt, Human
cugugcauugucuugucuguag

SEQ ID NO: 416046 - RNA, 22 nt, Human
ccuccaggauaagucagggccu

SEQ ID NO: 416047 - RNA, 22 nt, Human
uggcagagccuugccaaacucc

SEQ ID NO: 416048 - RNA, 22 nt, Human
guuuacaacaucuuguccuuca

SEQ ID NO: 416049 - RNA, 22 nt, Human
ucacauacacuaggauauuuuu

SEQ ID NO: 416050 - RNA, 22 nt, Human
cuuuggaaaaauaccuggcaua

SEQ ID NO: 416051 - RNA, 22 nt, Human
ugggcagacugagcccuguccc

SEQ ID NO: 416052 - RNA, 22 nt, Human
cccagguggcagaagcugcagu

SEQ ID NO: 416053 - RNA, 22 nt, Human
cacagggcagguacucucagag

SEQ ID NO: 416054 - RNA, 22 nt, Human
guuuuacacaccuaugaaagac

SEQ ID NO: 416055 - RNA, 22 nt, Human
auucaagagcccauguuuccug

SEQ ID NO: 416056 - RNA, 22 nt, Human
cccuggaggcggauguugcagu

SEQ ID NO: 416057 - RNA, 22 nt, Human
cccuggaagguucucuggcuca

SEQ ID NO: 416058 - RNA, 22 nt, Human
aagagcaucaaugacucgcagu

SEQ ID NO: 416059 - RNA, 19 nt, Human
agugucaucagcuacucag

SEQ ID NO: 416060 - RNA, 22 nt, Human
gacagcaggagaucaugauaga

SEQ ID NO: 416061 - RNA, 22 nt, Human
cggcagagcggcgagccccucc

SEQ ID NO: 416062 - RNA, 22 nt, Human
cugccaaggcuggggaggacaa

SEQ ID NO: 416063 - RNA, 22 nt, Human
uagcugccuuugggcuccugcu

SEQ ID NO: 416064 - RNA, 22 nt, Human
gggaccuggggacuccuuguuc

SEQ ID NO: 416065 - RNA, 22 nt, Human
ggcucaggccagaccacgacuc

SEQ ID NO: 416066 - RNA, 22 nt, Human
agggucccgaaggagacagcaa

SEQ ID NO: 416067 - RNA, 22 nt, Human
ucaguuuucucaucuguaauuu

SEQ ID NO: 416068 - RNA, 22 nt, Human
ggcaguggcuccucucuacucc

SEQ ID NO: 416069 - RNA, 22 nt, Human
gcugccaccguggagaugagug

SEQ ID NO: 416070 - RNA, 22 nt, Human
ggcagcaguggcugcuauuguc

SEQ ID NO: 416071 - RNA, 22 nt, Human
cagagcuggggacuguuggaug

SEQ ID NO: 416072 - RNA, 22 nt, Human
gaaggaaaucugugauuuaugc

SEQ ID NO: 416073 - RNA, 22 nt, Human
cuccccagguucaggagguggg

SEQ ID NO: 416074 - RNA, 22 nt, Human
ggucauuguucuuuucugugau

SEQ ID NO: 416075 - RNA, 22 nt, Human
cagggugggcacccagccucca

SEQ ID NO: 416076 - RNA, 22 nt, Human
agaaaguuuugugcuauauaug

SEQ ID NO: 416077 - RNA, 22 nt, Human
uccauguggccagacacuggca

SEQ ID NO: 416078 - RNA, 22 nt, Human
aaaugcagguaguauuuauuuu

SEQ ID NO: 416079 - RNA, 22 nt, Human
aagucaaucacaugcacacuga

SEQ ID NO: 416080 - RNA, 22 nt, Human
ggcaugggccgaggugccuccu

SEQ ID NO: 416081 - RNA, 22 nt, Human
gcaggagagccagcaggcuucc

SEQ ID NO: 416082 - RNA, 22 nt, Human
ccuggcugcuuucacuauggag

SEQ ID NO: 416083 - RNA, 22 nt, Human
aaguuacuggcaagggcugcag

SEQ ID NO: 416084 - RNA, 22 nt, Human
cugggcagccucacacaauguu

SEQ ID NO: 416085 - RNA, 21 nt, Human
agcugcuuucagcuccuagag

SEQ ID NO: 416086 - RNA, 22 nt, Human
agaggucagaacaggaaagugu

SEQ ID NO: 416087 - RNA, 22 nt, Human
aaaagagucuuaggcagucaua

SEQ ID NO: 416088 - RNA, 22 nt, Human
aaggcacuguacuaguuaguua

SEQ ID NO: 416089 - RNA, 22 nt, Human
ucagcuuucuauguugcuaaac

SEQ ID NO: 416090 - RNA, 22 nt, Human
auaagaaacauuauucuuucca

SEQ ID NO: 416091 - RNA, 22 nt, Human
aggaggaauacaauccagcagc

SEQ ID NO: 416092 - RNA, 22 nt, Human
cugaggccuggugaggugguga

SEQ ID NO: 416093 - RNA, 22 nt, Human
aggcagggucuugcuauguugc

SEQ ID NO: 416094 - RNA, 22 nt, Human
gcugcugguccucagagcucau

SEQ ID NO: 416095 - RNA, 23 nt, Human
acuuuagauaaauuaugugcaca

SEQ ID NO: 416096 - RNA, 22 nt, Human
cagucccaaggaggaagcaguc

SEQ ID NO: 416097 - RNA, 22 nt, Human
uguguauuucuggaacagacua

SEQ ID NO: 416098 - RNA, 17 nt, Human
aggccagaugaggcaag

SEQ ID NO: 416099 - RNA, 22 nt, Human
aaguuaugaaauuuggacagcu

SEQ ID NO: 416100 - RNA, 19 nt, Human
guagggacagugguucuga

SEQ ID NO: 416101 - RNA, 22 nt, Human
ccucagagguguggcaucucug

SEQ ID NO: 416102 - RNA, 22 nt, Human
augcaguacagauaauucuaca

SEQ ID NO: 416103 - RNA, 22 nt, Human
aagacaugcaauuagcaaggaa

SEQ ID NO: 416104 - RNA, 22 nt, Human
uguaccuuuuucugugcaugcu

SEQ ID NO: 416105 - RNA, 22 nt, Human
cagggcaguaccgcccucuggc

SEQ ID NO: 416106 - RNA, 22 nt, Human
uccucagucguuugagccaaaa

SEQ ID NO: 416107 - RNA, 22 nt, Human
gcuggagccauuggcuuggccu

SEQ ID NO: 416108 - RNA, 20 nt, Human
gccagcccugacacaggagc

SEQ ID NO: 416109 - RNA, 22 nt, Human
cuguccucaccuuggcaggggg

SEQ ID NO: 416110 - RNA, 22 nt, Human
gggaccugccauugcucacagg

SEQ ID NO: 416111 - RNA, 22 nt, Human
cuguacauaaaggaauaggugu

SEQ ID NO: 416112 - RNA, 22 nt, Human
aggaggccgcugaugggcuccc

SEQ ID NO: 416113 - RNA, 22 nt, Human
ucaaaaguuucacauagagaua

SEQ ID NO: 416114 - RNA, 22 nt, Human
ccuggccaggcauggagucaca

SEQ ID NO: 416115 - RNA, 22 nt, Human
ggcagccagagggcagcuggau

SEQ ID NO: 416116 - RNA, 22 nt, Human
acagggcauuuccucuaugugu

SEQ ID NO: 416117 - RNA, 22 nt, Human
uaagaacauaaauucauacggg

SEQ ID NO: 416118 - RNA, 21 nt, Human
uguucacauggagcagaaugu

SEQ ID NO: 416119 - RNA, 22 nt, Human
uuaaauuccagccucauaauag

SEQ ID NO: 416120 - RNA, 22 nt, Human
cacagcagaaaguguaggagga

SEQ ID NO: 416121 - RNA, 22 nt, Human
acaaauuuauugaagggcauau

SEQ ID NO: 416122 - RNA, 22 nt, Human
aggugucuggauggguguccuu

SEQ ID NO: 416123 - RNA, 22 nt, Human
aggggcaguuccaaguuuugug

SEQ ID NO: 416124 - RNA, 22 nt, Human
cucuuaaaaacuugauauauuu

SEQ ID NO: 416125 - RNA, 22 nt, Human
ccaguucugacacaagcacagu

SEQ ID NO: 416126 - RNA, 17 nt, Human
uuccucucacauuuuuu

SEQ ID NO: 416127 - RNA, 22 nt, Human
uucucagauccaucagaagucc

SEQ ID NO: 416128 - RNA, 22 nt, Human
gccugccugaaggcuguaccag

SEQ ID NO: 416129 - RNA, 21 nt, Human
ucacaugcccauuacuggagc

SEQ ID NO: 416130 - RNA, 20 nt, Human
auauguguacguguauacau

SEQ ID NO: 416131 - RNA, 23 nt, Human
ggccauggagacuuagaaugggc

SEQ ID NO: 416132 - RNA, 22 nt, Human
ccucacagggccaggccccuca

SEQ ID NO: 416133 - RNA, 22 nt, Human
uaauuuauuucaacugccaagg

SEQ ID NO: 416134 - RNA, 22 nt, Human
guuauuaguaagacucgcacau

SEQ ID NO: 416135 - RNA, 22 nt, Human
cucuggcuucuaccuugcaguu

SEQ ID NO: 416136 - RNA, 22 nt, Human
uacauacacaaauauacuguuu

SEQ ID NO: 416137 - RNA, 22 nt, Human
acuccuggggauccauuccuuu

SEQ ID NO: 416138 - RNA, 22 nt, Human
agcagcucacaggauuccugaa

SEQ ID NO: 416139 - RNA, 22 nt, Human
ggcagcuuuuaucccugacaga

SEQ ID NO: 416140 - RNA, 22 nt, Human
cccugccugugggcaucaacau

SEQ ID NO: 416141 - RNA, 22 nt, Human
agcagggcuccauuucacugcc

SEQ ID NO: 416142 - RNA, 22 nt, Human
uaagaauuguguugaauagagu

SEQ ID NO: 416143 - RNA, 22 nt, Human
uauguuuuucaagugcacacua

SEQ ID NO: 416144 - RNA, 22 nt, Human
cccagacuccucuggcuggugg

SEQ ID NO: 416145 - RNA, 22 nt, Human
auaugugugaugcauggacuaa

SEQ ID NO: 416146 - RNA, 22 nt, Human
aauaauuuccagccaacuggaa

SEQ ID NO: 416147 - RNA, 22 nt, Human
gcuguguccucacacagccuuu

SEQ ID NO: 416148 - RNA, 22 nt, Human
cagaguggcgacccccucagcu

SEQ ID NO: 416149 - RNA, 22 nt, Human
ucugggcacugcugagccugua

SEQ ID NO: 416150 - RNA, 22 nt, Human
caggaaccuaaugaaggcucac

SEQ ID NO: 416151 - RNA, 22 nt, Human
cccugcagaaccacagacaaac

SEQ ID NO: 416152 - RNA, 22 nt, Human
cugggcagguauacaaaaaaug

SEQ ID NO: 416153 - RNA, 22 nt, Human
gggcacagaagucuaagacauc

SEQ ID NO: 416154 - RNA, 22 nt, Human
ucucagagagcuguguuuuccu

SEQ ID NO: 416155 - RNA, 22 nt, Human
agguggcaggaggucagagaaa

SEQ ID NO: 416156 - RNA, 22 nt, Human
gccucugcaucuucgccgcacu

SEQ ID NO: 416157 - RNA, 22 nt, Human
guauuaggugguggaauuguag

SEQ ID NO: 416158 - RNA, 18 nt, Human
ucuuggaguaaugaucaa

SEQ ID NO: 416159 - RNA, 22 nt, Human
aaggcugauuagacugauagcu

SEQ ID NO: 416160 - RNA, 22 nt, Human
uugaagcagagaaauacuugaa

SEQ ID NO: 416161 - RNA, 22 nt, Human
gggccuccggggugagcugugg

SEQ ID NO: 416162 - RNA, 22 nt, Human
cccagccaaggugcugguguug

SEQ ID NO: 416163 - RNA, 23 nt, Human
cucugcaggagagugggcagggc

SEQ ID NO: 416164 - RNA, 22 nt, Human
cacagcuuaugccacugauugg

SEQ ID NO: 416165 - RNA, 22 nt, Human
cagaggccuauccaguguccau

SEQ ID NO: 416166 - RNA, 19 nt, Human
guugaaaguaggugagggu

SEQ ID NO: 416167 - RNA, 22 nt, Human
aggcccuguccauggugcugaa

SEQ ID NO: 416168 - RNA, 22 nt, Human
cugccaggggccucacaggcca

SEQ ID NO: 416169 - RNA, 22 nt, Human
agaauguagucuuggagauuua

SEQ ID NO: 416170 - RNA, 22 nt, Human
guggcugcuaagucuccuuccu

SEQ ID NO: 416171 - RNA, 22 nt, Human
ccuggcugucguuuugugaaau

SEQ ID NO: 416172 - RNA, 22 nt, Human
ggggggugcugaucaguggagc

SEQ ID NO: 416173 - RNA, 22 nt, Human
gaagggugugugugagggacac

SEQ ID NO: 416174 - RNA, 22 nt, Human
ucauuuguugcuguuaccugag

SEQ ID NO: 416175 - RNA, 22 nt, Human
auacuguuuugugacuuaucuu

SEQ ID NO: 416176 - RNA, 22 nt, Human
uguuccaugucuuuguaggacu

SEQ ID NO: 416177 - RNA, 22 nt, Human
augugcaaauccaaugugaaug

SEQ ID NO: 416178 - RNA, 22 nt, Human
auccaaagcccuaaguuaacug

SEQ ID NO: 416179 - RNA, 22 nt, Human
ucaugcacaugugucaccauca

SEQ ID NO: 416180 - RNA, 22 nt, Human
uccuuccugcaggccaaguccu

SEQ ID NO: 416181 - RNA, 22 nt, Human
augagcuguaagguggcuuccu

SEQ ID NO: 416182 - RNA, 19 nt, Human
cgcaggagccgaggugacc

SEQ ID NO: 416183 - RNA, 16 nt, Human
aggcucagaggcugga

SEQ ID NO: 416184 - RNA, 22 nt, Human
uaggcuggaggaagcagugccu

SEQ ID NO: 416185 - RNA, 23 nt, Human
ugauuuccagugagucaguggga

SEQ ID NO: 416186 - RNA, 21 nt, Human
ucuugaaaauuguagcaguuu

SEQ ID NO: 416187 - RNA, 22 nt, Human
uccugggcugcagggaagagca

SEQ ID NO: 416188 - RNA, 22 nt, Human
accagggcccgggagagcucuc

SEQ ID NO: 416189 - RNA, 22 nt, Human
auagaauuacaguguguuugga

SEQ ID NO: 416190 - RNA, 21 nt, Human
cacuauuuauauaugccagcu

SEQ ID NO: 416191 - RNA, 22 nt, Human
uuagggcuuuucugaauaggcc

SEQ ID NO: 416192 - RNA, 22 nt, Human
augucuaaaagauaaaguuuaa

SEQ ID NO: 416193 - RNA, 18 nt, Human
ucagaggagauaccuaaa

SEQ ID NO: 416194 - RNA, 22 nt, Human
ggagucaggagcaggcugggcu

SEQ ID NO: 416195 - RNA, 19 nt, Human
acaagggcaggcaagguga

SEQ ID NO: 416196 - RNA, 22 nt, Human
ggacacagauaaucacacagau

SEQ ID NO: 416197 - RNA, 22 nt, Human
uggcucugucacugugagcuau

SEQ ID NO: 416198 - RNA, 22 nt, Human
uggcucaggccacuucuuuuau

SEQ ID NO: 416199 - RNA, 22 nt, Human
gggcaagcacagcgagcgugcg

SEQ ID NO: 416200 - RNA, 22 nt, Human
aaggggaauagaguggguugug

SEQ ID NO: 416201 - RNA, 22 nt, Human
aaggaagacuugagaagguucc

SEQ ID NO: 416202 - RNA, 22 nt, Human
aaaggaagauugagcuuuucca

SEQ ID NO: 416203 - RNA, 22 nt, Human
gcaucuucacacaaagccagug

SEQ ID NO: 416204 - RNA, 22 nt, Human
ugcacuccaggcugggugacag

SEQ ID NO: 416205 - RNA, 22 nt, Human
uccugccuucauacugcuguau

SEQ ID NO: 416206 - RNA, 18 nt, Human
gggcccuggcguccgccc

SEQ ID NO: 416207 - RNA, 22 nt, Human
cacagaaaaaggcuugaaaauc

SEQ ID NO: 416208 - RNA, 22 nt, Human
gccagggagucugggccacaga

SEQ ID NO: 416209 - RNA, 22 nt, Human
gggccuggggugacguaccccu

SEQ ID NO: 416210 - RNA, 22 nt, Human
cuuagaugaagucacagaaccc

SEQ ID NO: 416211 - RNA, 22 nt, Human
gcuggccaguguggugaccacc

SEQ ID NO: 416212 - RNA, 22 nt, Human
cagugcagaggccagggaggau

SEQ ID NO: 416213 - RNA, 22 nt, Human
acauuucuugaugccucuguga

SEQ ID NO: 416214 - RNA, 22 nt, Human
caaauguguagagcuuuugggg

SEQ ID NO: 416215 - RNA, 22 nt, Human
ucucuggagcugcagauccagg

SEQ ID NO: 416216 - RNA, 19 nt, Human
agcuguggggccuagcacc

SEQ ID NO: 416217 - RNA, 22 nt, Human
agggacagaugaaugacugagu

SEQ ID NO: 416218 - RNA, 22 nt, Human
gcugugcagccaagugccucug

SEQ ID NO: 416219 - RNA, 19 nt, Human
agccuggagggcuggucac

SEQ ID NO: 416220 - RNA, 22 nt, Human
cccuggcaaaacacucucuuga

SEQ ID NO: 416221 - RNA, 22 nt, Human
guacaaaaguuauugcgguuuu

SEQ ID NO: 416222 - RNA, 22 nt, Human
cuguauuucccacauucucuau

SEQ ID NO: 416223 - RNA, 22 nt, Human
gagggcugauaacaggaauaca

SEQ ID NO: 416224 - RNA, 22 nt, Human
cagcccuggugccaagguuccc

SEQ ID NO: 416225 - RNA, 22 nt, Human
ugcugcucucagccaccaggaa

SEQ ID NO: 416226 - RNA, 22 nt, Human
acuuucucaaaucagacuuuaa

SEQ ID NO: 416227 - RNA, 22 nt, Human
ugcagcugauuaaagggcagac

SEQ ID NO: 416228 - RNA, 22 nt, Human
ugcuggcccaguauggacugca

SEQ ID NO: 416229 - RNA, 22 nt, Human
cacugccuccccaggcuccaca

SEQ ID NO: 416230 - RNA, 22 nt, Human
gcagagcuucuguccuucagga

SEQ ID NO: 416231 - RNA, 22 nt, Human
gcagagguggcaucugggcucu

SEQ ID NO: 416232 - RNA, 21 nt, Human
uggcagggguaguaguacagc

SEQ ID NO: 416233 - RNA, 22 nt, Human
uuucacagguacaaacacuccu

SEQ ID NO: 416234 - RNA, 22 nt, Human
gggagggaagguaccuguguga

SEQ ID NO: 416235 - RNA, 22 nt, Human
ccugcucagagcgucuugugug

SEQ ID NO: 416236 - RNA, 22 nt, Human
aggagccaggaaaccugcucug

SEQ ID NO: 416237 - RNA, 22 nt, Human
gcagugauuggaucagagaugg

SEQ ID NO: 416238 - RNA, 22 nt, Human
gcaaagucugcaucuggaucag

SEQ ID NO: 416239 - RNA, 22 nt, Human
agcagggccucuggcacugguc

SEQ ID NO: 416240 - RNA, 20 nt, Human
gugcaauggcgcaaucucgg

SEQ ID NO: 416241 - RNA, 22 nt, Human
uucuuuugggaauuacguaugc

SEQ ID NO: 416242 - RNA, 22 nt, Human
gagaagcaaucaguggccaccc

SEQ ID NO: 416243 - RNA, 22 nt, Human
auuuguagugaagugaaaauaa

SEQ ID NO: 416244 - RNA, 22 nt, Human
auuauuagauucuuaauuguaa

SEQ ID NO: 416245 - RNA, 22 nt, Human
uuauuagguuuacauaaagguu

SEQ ID NO: 416246 - RNA, 22 nt, Human
aggccagcuguuacuagagcca

SEQ ID NO: 416247 - RNA, 22 nt, Human
caguucagcuagaagaaacaaa

SEQ ID NO: 416248 - RNA, 22 nt, Human
gcagugcuaaguagcuggccca

SEQ ID NO: 416249 - RNA, 22 nt, Human
gcagaugaggaagcuaaugcug

SEQ ID NO: 416250 - RNA, 22 nt, Human
cugugacuguguuggaugcaca

SEQ ID NO: 416251 - RNA, 22 nt, Human
gcaugagggggguuaggaaguu

SEQ ID NO: 416252 - RNA, 22 nt, Human
ucugugcaggaagucauuauga

SEQ ID NO: 416253 - RNA, 20 nt, Human
gagggcucguggauggauaa

SEQ ID NO: 416254 - RNA, 22 nt, Human
cacagagagcuacgugcagcgu

SEQ ID NO: 416255 - RNA, 22 nt, Human
caggaaaauggaaucaccugua

SEQ ID NO: 416256 - RNA, 21 nt, Human
cagagguggccugaccucuga

SEQ ID NO: 416257 - RNA, 22 nt, Human
uccucaggaucuaggagugcuu

SEQ ID NO: 416258 - RNA, 22 nt, Human
auauuagggucucuaaauucua

SEQ ID NO: 416259 - RNA, 22 nt, Human
uggggcagcuccaucuauucca

SEQ ID NO: 416260 - RNA, 22 nt, Human
accgggaaguccugcacugggc

SEQ ID NO: 416261 - RNA, 22 nt, Human
ugaggcucagagaagugcuguu

SEQ ID NO: 416262 - RNA, 22 nt, Human
ccccuuccuuccucagacagcc

SEQ ID NO: 416263 - RNA, 22 nt, Human
aucuggcuuucuuaaugacuua

SEQ ID NO: 416264 - RNA, 22 nt, Human
uucaggauaguggugaguggca

SEQ ID NO: 416265 - RNA, 22 nt, Human
uaugcacacauuagcacagggu

SEQ ID NO: 416266 - RNA, 22 nt, Human
uaaaacugaauacauacugagg

SEQ ID NO: 416267 - RNA, 22 nt, Human
cuaaaugccuuuccuaccuaac

SEQ ID NO: 416268 - RNA, 22 nt, Human
uucugaggcacuggcucuccca

SEQ ID NO: 416269 - RNA, 22 nt, Human
gcugugcuauaucucugagugu

SEQ ID NO: 416270 - RNA, 22 nt, Human
ccagggcagggaccacgugucu

SEQ ID NO: 416271 - RNA, 22 nt, Human
uauuuaaaaagaggccagcugg

SEQ ID NO: 416272 - RNA, 20 nt, Human
gucucagaauggauuugcau

SEQ ID NO: 416273 - RNA, 22 nt, Human
agguggguccuggcucugccau

SEQ ID NO: 416274 - RNA, 22 nt, Human
agggcuccgggccaccggccug

SEQ ID NO: 416275 - RNA, 22 nt, Human
ugcugcucuguaaagugaugag

SEQ ID NO: 416276 - RNA, 22 nt, Human
aggggcugacuggaaagugcca

SEQ ID NO: 416277 - RNA, 22 nt, Human
cagagaaagaagcccauucauu

SEQ ID NO: 416278 - RNA, 22 nt, Human
gucccuggucuaccguggcuuc

SEQ ID NO: 416279 - RNA, 22 nt, Human
ugggcugcuuccucagcugaga

SEQ ID NO: 416280 - RNA, 22 nt, Human
caggaggaaaugugacccugcu

SEQ ID NO: 416281 - RNA, 22 nt, Human
cagcaaaagccagcauaagcuc

SEQ ID NO: 416282 - RNA, 22 nt, Human
augaggcagucuggccugaggg

SEQ ID NO: 416283 - RNA, 22 nt, Human
gucuuguuugggauguggaugg

SEQ ID NO: 416284 - RNA, 22 nt, Human
guccuggggauuauagaguguu

SEQ ID NO: 416285 - RNA, 22 nt, Human
gagcucagcacuaaaaucaugu

SEQ ID NO: 416286 - RNA, 22 nt, Human
cuguggaccugcucuuagagac

SEQ ID NO: 416287 - RNA, 22 nt, Human
augauucagcaauuuuauaucu

SEQ ID NO: 416288 - RNA, 22 nt, Human
gagcaugguuccauagguuggu

SEQ ID NO: 416289 - RNA, 22 nt, Human
cuggccuuuuguuucuggagaa

SEQ ID NO: 416290 - RNA, 22 nt, Human
uggccugcagcucucagggaag

SEQ ID NO: 416291 - RNA, 22 nt, Human
cuggcagccaagugggauacuc

SEQ ID NO: 416292 - RNA, 22 nt, Human
ccagccaggcauugcaaacuga

SEQ ID NO: 416293 - RNA, 22 nt, Human
ucacuccucauugcugcccauu

SEQ ID NO: 416294 - RNA, 22 nt, Human
uugugcauuucucugagugugu

SEQ ID NO: 416295 - RNA, 22 nt, Human
ggcuucugccacgagagggaag

SEQ ID NO: 416296 - RNA, 22 nt, Human
uggacucagugcugccauuccc

SEQ ID NO: 416297 - RNA, 23 nt, Human
cuuuccuuucuuugacacccagc

SEQ ID NO: 416298 - RNA, 22 nt, Human
cagcugccagcuucucuccauc

SEQ ID NO: 416299 - RNA, 22 nt, Human
caggggcuuaagugacagaagg

SEQ ID NO: 416300 - RNA, 22 nt, Human
uugcagcuucgagucuaucugu

SEQ ID NO: 416301 - RNA, 22 nt, Human
aaggaagagaauccuucucaga

SEQ ID NO: 416302 - RNA, 22 nt, Human
ugcaagggcuuagggggcugug

SEQ ID NO: 416303 - RNA, 22 nt, Human
gagaggaguaggcugauggugc

SEQ ID NO: 416304 - RNA, 22 nt, Human
gaagcagcuaggaucuucauuu

SEQ ID NO: 416305 - RNA, 22 nt, Human
ggaggcagaacuucccgucagu

SEQ ID NO: 416306 - RNA, 22 nt, Human
aggcucagugcaaaucauucug

SEQ ID NO: 416307 - RNA, 22 nt, Human
caguggcaugguugacugcagu

SEQ ID NO: 416308 - RNA, 22 nt, Human
ugucucugauaaguaguucagu

SEQ ID NO: 416309 - RNA, 22 nt, Human
ucugccuggaugauggcagggc

SEQ ID NO: 416310 - RNA, 22 nt, Human
cagagcagggugcaccuugggc

SEQ ID NO: 416311 - RNA, 19 nt, Human
uggaccugugcccauggcu

SEQ ID NO: 416312 - RNA, 22 nt, Human
cuguccuguagcuccaucaguc

SEQ ID NO: 416313 - RNA, 22 nt, Human
ggccugcuuuccgagccugcag

SEQ ID NO: 416314 - RNA, 22 nt, Human
ucucagagagaugaaacuucca

SEQ ID NO: 416315 - RNA, 22 nt, Human
uggcccugaggggcugugcccc

SEQ ID NO: 416316 - RNA, 22 nt, Human
aaggcacuuaacgugggaggau

SEQ ID NO: 416317 - RNA, 22 nt, Human
cagucacacaaguggacuuggg

SEQ ID NO: 416318 - RNA, 22 nt, Human
ucauuuguacuugugugcuugu

SEQ ID NO: 416319 - RNA, 22 nt, Human
gcagacaggcccaguggaggga

SEQ ID NO: 416320 - RNA, 22 nt, Human
gaugugagugguagcugggauu

SEQ ID NO: 416321 - RNA, 22 nt, Human
ccagcagcucccucaggguccg

SEQ ID NO: 416322 - RNA, 22 nt, Human
uuucuuuguuguuaucacauca

SEQ ID NO: 416323 - RNA, 22 nt, Human
uuguaacagguacuaaauaacu

SEQ ID NO: 416324 - RNA, 22 nt, Human
uuacaaaguucugaguucaaac

SEQ ID NO: 416325 - RNA, 19 nt, Human
ggagaggcuggagggaugc

SEQ ID NO: 416326 - RNA, 22 nt, Human
uaauacaauggaguugggcccc

SEQ ID NO: 416327 - RNA, 22 nt, Human
aaaagacauaugugggcauucu

SEQ ID NO: 416328 - RNA, 22 nt, Human
ugcugcucaaugagaugccauc

SEQ ID NO: 416329 - RNA, 21 nt, Human
guggccugauuaugaaugggu

SEQ ID NO: 416330 - RNA, 22 nt, Human
auacauacauguacacauaaau

SEQ ID NO: 416331 - RNA, 22 nt, Human
gagggggagaugugcacacacu

SEQ ID NO: 416332 - RNA, 22 nt, Human
uagaaacauauaggauggcagg

SEQ ID NO: 416333 - RNA, 22 nt, Human
gugcccaggcccaaggcaccac

SEQ ID NO: 416334 - RNA, 22 nt, Human
ugucaugcuuauguuacauacu

SEQ ID NO: 416335 - RNA, 22 nt, Human
agaaaacauuacauaggugugu

SEQ ID NO: 416336 - RNA, 21 nt, Human
uugaagcaaggguggcucuga

SEQ ID NO: 416337 - RNA, 22 nt, Human
acugcagccuugaacucugggc

SEQ ID NO: 416338 - RNA, 22 nt, Human
cagugaggcucugcugagcggu

SEQ ID NO: 416339 - RNA, 22 nt, Human
ugucacaguuuguacuuuauag

SEQ ID NO: 416340 - RNA, 22 nt, Human
ugucaccucuuuggcugcagcu

SEQ ID NO: 416341 - RNA, 22 nt, Human
agugguaacuaaguccugcuua

SEQ ID NO: 416342 - RNA, 22 nt, Human
gcccuggaaucucuccauggga

SEQ ID NO: 416343 - RNA, 22 nt, Human
cugagguguugaugaccuaugc

SEQ ID NO: 416344 - RNA, 22 nt, Human
cagccagcugaauguaccauga

SEQ ID NO: 416345 - RNA, 22 nt, Human
ccacugagaccuuuuggaggag

SEQ ID NO: 416346 - RNA, 22 nt, Human
uuggccuucccuaccugggcca

SEQ ID NO: 416347 - RNA, 22 nt, Human
gagggagagugauggaccauug

SEQ ID NO: 416348 - RNA, 22 nt, Human
gccucugcaggugcgguuaucc

SEQ ID NO: 416349 - RNA, 22 nt, Human
uaaaugugagugaugcggugaa

SEQ ID NO: 416350 - RNA, 22 nt, Human
ugaagccacuuuccagaaucac

SEQ ID NO: 416351 - RNA, 22 nt, Human
uucaaaggcaggauagcagcug

SEQ ID NO: 416352 - RNA, 22 nt, Human
gccagcagguggagagaucaag

SEQ ID NO: 416353 - RNA, 22 nt, Human
uauccaaaguggcauauuauag

SEQ ID NO: 416354 - RNA, 22 nt, Human
cagcagugucuccagcaucaca

SEQ ID NO: 416355 - RNA, 22 nt, Human
caaagacugcauaacacaugaa

SEQ ID NO: 416356 - RNA, 22 nt, Human
gaggccugaggcugccuggagc

SEQ ID NO: 416357 - RNA, 22 nt, Human
gugagaguguuuggaaauagaa

SEQ ID NO: 416358 - RNA, 22 nt, Human
gauucugagcugguguuuuacg

SEQ ID NO: 416359 - RNA, 22 nt, Human
cucacuguuuaauagcuggauc

SEQ ID NO: 416360 - RNA, 22 nt, Human
aaccauuugccauuaucuuaag

SEQ ID NO: 416361 - RNA, 22 nt, Human
uacccagcuccucagaagacca

SEQ ID NO: 416362 - RNA, 22 nt, Human
agaaauguauucuguauguuuu

SEQ ID NO: 416363 - RNA, 22 nt, Human
acaaaaguguaggaauuccuua

SEQ ID NO: 416364 - RNA, 21 nt, Human
cagaggggcuagccuggcugc

SEQ ID NO: 416365 - RNA, 22 nt, Human
guguuaaccagcuaaacuuugc

SEQ ID NO: 416366 - RNA, 22 nt, Human
ggcccugggcagaggagugggc

SEQ ID NO: 416367 - RNA, 22 nt, Human
aaggccuggauuuagguuguga

SEQ ID NO: 416368 - RNA, 22 nt, Human
agcaggaggguuuuguagaguc

SEQ ID NO: 416369 - RNA, 21 nt, Human
cagacccucuagaggccaccu

SEQ ID NO: 416370 - RNA, 22 nt, Human
caggaugggauguagugggccc

SEQ ID NO: 416371 - RNA, 22 nt, Human
cagcacugcuucgcagccaggg

SEQ ID NO: 416372 - RNA, 22 nt, Human
ggagcugcuuugaucugaagaa

SEQ ID NO: 416373 - RNA, 22 nt, Human
aagggagacaguugugugagga

SEQ ID NO: 416374 - RNA, 22 nt, Human
aaguggacuaauacaaggacua

SEQ ID NO: 416375 - RNA, 22 nt, Human
uuuauauccaucuuugaaguaa

SEQ ID NO: 416376 - RNA, 22 nt, Human
aaauuugauaagccauuguuac

SEQ ID NO: 416377 - RNA, 22 nt, Human
uagccggguguugugucaugca

SEQ ID NO: 416378 - RNA, 22 nt, Human
cuacaggucaguaagaccuaga

SEQ ID NO: 416379 - RNA, 22 nt, Human
agugacugggcagggcagggcc

SEQ ID NO: 416380 - RNA, 22 nt, Human
cugagggagggacuuugagacu

SEQ ID NO: 416381 - RNA, 22 nt, Human
gccuggagcucaugugggcauu

SEQ ID NO: 416382 - RNA, 22 nt, Human
accauguguuuuacacauggua

SEQ ID NO: 416383 - RNA, 22 nt, Human
uggcugaggagagggcggaagu

SEQ ID NO: 416384 - RNA, 22 nt, Human
cauggccuugagugacugcacu

SEQ ID NO: 416385 - RNA, 22 nt, Human
gaagaagcaggaguguguagca

SEQ ID NO: 416386 - RNA, 22 nt, Human
gaggcucacuaggcauccuggg

SEQ ID NO: 416387 - RNA, 22 nt, Human
auugucuguacuuuaaaaaugu

SEQ ID NO: 416388 - RNA, 22 nt, Human
acaguggaaagaaacgaauuag

SEQ ID NO: 416389 - RNA, 22 nt, Human
ucauuucaaguucugacagcua

SEQ ID NO: 416390 - RNA, 20 nt, Human
aggaacuggaagggaggaaa

SEQ ID NO: 416391 - RNA, 22 nt, Human
gugaaggcuacaagagaucaag

SEQ ID NO: 416392 - RNA, 22 nt, Human
ucucacucauuuccuaggucuu

SEQ ID NO: 416393 - RNA, 22 nt, Human
cuguccagcuuggcuccugggg

SEQ ID NO: 416394 - RNA, 23 nt, Human
cagggcccugcucaauuucucca

SEQ ID NO: 416395 - RNA, 22 nt, Human
gcuggugcauuagcugcaguuc

SEQ ID NO: 416396 - RNA, 22 nt, Human
gccuucccacccugcgaggcug

SEQ ID NO: 416397 - RNA, 22 nt, Human
cacagaagaaucaugcuguguu

SEQ ID NO: 416398 - RNA, 22 nt, Human
guggccagaagacugcaaugcu

SEQ ID NO: 416399 - RNA, 20 nt, Human
ugcuuuaugcuauacuuugu

SEQ ID NO: 416400 - RNA, 22 nt, Human
uuuguaaagucuguucugaguu

SEQ ID NO: 416401 - RNA, 22 nt, Human
cagcugcccauccugggaaaug

SEQ ID NO: 416402 - RNA, 22 nt, Human
agcuuuuaguacguuaaaauug

SEQ ID NO: 416403 - RNA, 22 nt, Human
aucaguuuuuauuaauguagcu

SEQ ID NO: 416404 - RNA, 22 nt, Human
ucagcagaggggaaggcaucug

SEQ ID NO: 416405 - RNA, 22 nt, Human
gaggaggaaacccuguuccucu

SEQ ID NO: 416406 - RNA, 22 nt, Human
gcugugcagucuuuggugugcc

SEQ ID NO: 416407 - RNA, 22 nt, Human
agaaaugcucuuccugaccaga

SEQ ID NO: 416408 - RNA, 17 nt, Human
agauggcaggaggcaga

SEQ ID NO: 416409 - RNA, 22 nt, Human
agacagaacagaauaauuguug

SEQ ID NO: 416410 - RNA, 22 nt, Human
uggcugagugauauuugcaaag

SEQ ID NO: 416411 - RNA, 22 nt, Human
ugggcugcugcggugcucuugg

SEQ ID NO: 416412 - RNA, 20 nt, Human
agaguaacuggcacauaggg

SEQ ID NO: 416413 - RNA, 22 nt, Human
gcucugcugcuuacuagauggu

SEQ ID NO: 416414 - RNA, 22 nt, Human
caggcccauucuaggcuugcua

SEQ ID NO: 416415 - RNA, 22 nt, Human
gagugcagaugaacagaagauu

SEQ ID NO: 416416 - RNA, 19 nt, Human
ucauucaggaccaguggau

SEQ ID NO: 416417 - RNA, 22 nt, Human
gcuugcucaacccccgucucuc

SEQ ID NO: 416418 - RNA, 22 nt, Human
gcagcuggucuggccuagagua

SEQ ID NO: 416419 - RNA, 20 nt, Human
aguguuccggaagacuggca

SEQ ID NO: 416420 - RNA, 22 nt, Human
ugcagccaucgcagagucugua

SEQ ID NO: 416421 - RNA, 23 nt, Human
ucagagaggcccccugcagagau

SEQ ID NO: 416422 - RNA, 22 nt, Human
uaaaauguagcuucuaggcugg

SEQ ID NO: 416423 - RNA, 23 nt, Human
ucucagaggauuccugggccuug

SEQ ID NO: 416424 - RNA, 22 nt, Human
aaugcuguaaagaugcuaucug

SEQ ID NO: 416425 - RNA, 22 nt, Human
caggcagcuagauuuauaacaa

SEQ ID NO: 416426 - RNA, 22 nt, Human
acauuuuaauaugcuuagugug

SEQ ID NO: 416427 - RNA, 22 nt, Human
agggccagcugcagaauuagca

SEQ ID NO: 416428 - RNA, 22 nt, Human
uccaucaccauuucugcgagcu

SEQ ID NO: 416429 - RNA, 22 nt, Human
cuggggcugcagcgaucuucau

SEQ ID NO: 416430 - RNA, 22 nt, Human
uauaauccugcuucacauugaa

SEQ ID NO: 416431 - RNA, 22 nt, Human
cagggacccuacuagcucacac

SEQ ID NO: 416432 - RNA, 20 nt, Human
caucaucacaugagccaauu

SEQ ID NO: 416433 - RNA, 22 nt, Human
cuauuucuaaaccuauaaguga

SEQ ID NO: 416434 - RNA, 22 nt, Human
gccuuuuuuguugcucugucac

SEQ ID NO: 416435 - RNA, 21 nt, Human
uuucccagcugaaaauaaaug

SEQ ID NO: 416436 - RNA, 22 nt, Human
gcugggagccccgagccagcgc

SEQ ID NO: 416437 - RNA, 22 nt, Human
agcucugcaggcacagcugagg

SEQ ID NO: 416438 - RNA, 22 nt, Human
aucuggaaaacacaguguagac

SEQ ID NO: 416439 - RNA, 22 nt, Human
gcugaggcuccucgggaggaca

SEQ ID NO: 416440 - RNA, 20 nt, Human
gugugaagcccucaggagga

SEQ ID NO: 416441 - RNA, 23 nt, Human
ccucagggucuagcagagagaag

SEQ ID NO: 416442 - RNA, 22 nt, Human
cugaggucaauuaaucaacaac

SEQ ID NO: 416443 - RNA, 19 nt, Human
aauuagggagucgguuaag

SEQ ID NO: 416444 - RNA, 19 nt, Human
gcacugaagaguuggucac

SEQ ID NO: 416445 - RNA, 22 nt, Human
ugaagccaccgaaccagaagag

SEQ ID NO: 416446 - RNA, 22 nt, Human
cugccucuccccagaguggccc

SEQ ID NO: 416447 - RNA, 19 nt, Human
ucucagaggaaaaauugcu

SEQ ID NO: 416448 - RNA, 22 nt, Human
uuucacauacaguguauaguag

SEQ ID NO: 416449 - RNA, 22 nt, Human
uggggaggacgggcgccuuccu

SEQ ID NO: 416450 - RNA, 22 nt, Human
uacaaacuuguuuuaaguaagu

SEQ ID NO: 416451 - RNA, 22 nt, Human
uuuccuuccuugcuagccugag

SEQ ID NO: 416452 - RNA, 22 nt, Human
gcuggcagaauuucuucuugcu

SEQ ID NO: 416453 - RNA, 22 nt, Human
aggcugugacagggucauggag

SEQ ID NO: 416454 - RNA, 22 nt, Human
gugucaugggguuuguuauaca

SEQ ID NO: 416455 - RNA, 22 nt, Human
ugggccuguggcuuggcucuag

SEQ ID NO: 416456 - RNA, 22 nt, Human
cagaaggcauagaugaaggccu

SEQ ID NO: 416457 - RNA, 22 nt, Human
gaauuguacgcuuuacauaggu

SEQ ID NO: 416458 - RNA, 22 nt, Human
ugggcccugacuucaagcaucc

SEQ ID NO: 416459 - RNA, 19 nt, Human
ugucccagacuccgugucu

SEQ ID NO: 416460 - RNA, 22 nt, Human
ccccuuccgucucuugaguguc

SEQ ID NO: 416461 - RNA, 22 nt, Human
aacucagucauaaagcgaaugc

SEQ ID NO: 416462 - RNA, 22 nt, Human
ugcagggcacggugcgcguggg

SEQ ID NO: 416463 - RNA, 22 nt, Human
uagcaguggaaucuuuugucca

SEQ ID NO: 416464 - RNA, 22 nt, Human
auaauauaauccuacuucccau

SEQ ID NO: 416465 - RNA, 22 nt, Human
ucuggcuccaccuccuuuacua

SEQ ID NO: 416466 - RNA, 22 nt, Human
ggccaggcgaugaccccuccac

SEQ ID NO: 416467 - RNA, 22 nt, Human
gaggccuggaccagccacagag

SEQ ID NO: 416468 - RNA, 22 nt, Human
gcucaagagagaugcaguucuu

SEQ ID NO: 416469 - RNA, 22 nt, Human
aaggcugccucugccagaggag

SEQ ID NO: 416470 - RNA, 22 nt, Human
uggcugagugaacauguccauu

SEQ ID NO: 416471 - RNA, 22 nt, Human
gggaggugauggcaagcagcgg

SEQ ID NO: 416472 - RNA, 22 nt, Human
guauuauuggguaguaugguaa

SEQ ID NO: 416473 - RNA, 22 nt, Human
cugggcucagaugagaggaagg

SEQ ID NO: 416474 - RNA, 22 nt, Human
gcuggggagcuagaccucagca

SEQ ID NO: 416475 - RNA, 22 nt, Human
ggauccuucuuugaccucacag

SEQ ID NO: 416476 - RNA, 22 nt, Human
ggaaagaaucaagugauccugu

SEQ ID NO: 416477 - RNA, 20 nt, Human
gccugcagagaaggucagag

SEQ ID NO: 416478 - RNA, 22 nt, Human
cucacagguaccagcacccucc

SEQ ID NO: 416479 - RNA, 22 nt, Human
acaugcauacaagcacauguag

SEQ ID NO: 416480 - RNA, 22 nt, Human
uuuguuuacucauucauugaug

SEQ ID NO: 416481 - RNA, 22 nt, Human
gggggucccaagcugggcugcu

SEQ ID NO: 416482 - RNA, 22 nt, Human
agaagagccuggggaccauggc

SEQ ID NO: 416483 - RNA, 22 nt, Human
cacaggaggaggugcccgggcc

SEQ ID NO: 416484 - RNA, 22 nt, Human
ugucccucauugacgcugugcc

SEQ ID NO: 416485 - RNA, 23 nt, Human
uggcucucucagugcugcagagg

SEQ ID NO: 416486 - RNA, 22 nt, Human
caagggcauugcuugggaccuu

SEQ ID NO: 416487 - RNA, 22 nt, Human
gaggcagcaugguaccuuggag

SEQ ID NO: 416488 - RNA, 22 nt, Human
auuguauuuccagcuugaaugu

SEQ ID NO: 416489 - RNA, 22 nt, Human
agauuucacaugcugcucuauu

SEQ ID NO: 416490 - RNA, 20 nt, Human
cucaggauugucuagccccu

SEQ ID NO: 416491 - RNA, 22 nt, Human
agcaauauuucagcuagcaggu

SEQ ID NO: 416492 - RNA, 22 nt, Human
gccggggcuggggagagacaug

SEQ ID NO: 416493 - RNA, 22 nt, Human
aagggcuggaauaucucuuaga

SEQ ID NO: 416494 - RNA, 22 nt, Human
agucucugagguucagaugccu

SEQ ID NO: 416495 - RNA, 20 nt, Human
uaugaguauuacuuucagga

SEQ ID NO: 416496 - RNA, 22 nt, Human
cugcugcaggaugggcacucug

SEQ ID NO: 416497 - RNA, 22 nt, Human
cugccugugcaugcagucagaa

SEQ ID NO: 416498 - RNA, 22 nt, Human
gagccugagugcugccuccccu

SEQ ID NO: 416499 - RNA, 22 nt, Human
ucaggaaaauacugcuuaucca

SEQ ID NO: 416500 - RNA, 22 nt, Human
gcucucugccuuucucaaugac

SEQ ID NO: 416501 - RNA, 22 nt, Human
auguaauuugcccucaaguuaa

SEQ ID NO: 416502 - RNA, 22 nt, Human
ccagcuggaagagugcagaacu

SEQ ID NO: 416503 - RNA, 22 nt, Human
uagggcagagcuuguacacgau

SEQ ID NO: 416504 - RNA, 23 nt, Human
agaggccaacuucuugccccucc

SEQ ID NO: 416505 - RNA, 22 nt, Human
guguccuuauuucugucucuca

SEQ ID NO: 416506 - RNA, 22 nt, Human
ccugccagugaagcugacgggc

SEQ ID NO: 416507 - RNA, 22 nt, Human
aggcacugaaagguggccagag

SEQ ID NO: 416508 - RNA, 22 nt, Human
ccagccugguucagaauuggcu

SEQ ID NO: 416509 - RNA, 22 nt, Human
cagagacaguuucacagggucu

SEQ ID NO: 416510 - RNA, 22 nt, Human
uuaguuuucccaucuuuauggu

SEQ ID NO: 416511 - RNA, 22 nt, Human
uccaggcauaagccuugagugu

SEQ ID NO: 416512 - RNA, 22 nt, Human
auuuucucucaaaccuuaaaau

SEQ ID NO: 416513 - RNA, 17 nt, Human
ucugggcuucagugguc

SEQ ID NO: 416514 - RNA, 22 nt, Human
cugagcugggaguagagacucu

SEQ ID NO: 416515 - RNA, 22 nt, Human
uggagcaggccggaaguggcuu

SEQ ID NO: 416516 - RNA, 21 nt, Human
ugaaaucugaugggacaaaug

SEQ ID NO: 416517 - RNA, 22 nt, Human
agaagugccgaaaggaagacag

SEQ ID NO: 416518 - RNA, 19 nt, Human
ugccagcauuaggcugaag

SEQ ID NO: 416519 - RNA, 22 nt, Human
acauuuacagugcuagacaauc

SEQ ID NO: 416520 - RNA, 19 nt, Human
aucugccuguuaucacaua

SEQ ID NO: 416521 - RNA, 22 nt, Human
cagaagaaaguggggagacaag

SEQ ID NO: 416522 - RNA, 22 nt, Human
aagugguagacaaagauaauug

SEQ ID NO: 416523 - RNA, 22 nt, Human
cuucugugcuucacaguugcca

SEQ ID NO: 416524 - RNA, 22 nt, Human
cuacaaaaguaauugugguuuu

SEQ ID NO: 416525 - RNA, 22 nt, Human
aggcugugcacagggcaccugc

SEQ ID NO: 416526 - RNA, 22 nt, Human
aggaagccugcaggugacugcu

SEQ ID NO: 416527 - RNA, 22 nt, Human
cucugcagaauuugagcugcuc

SEQ ID NO: 416528 - RNA, 22 nt, Human
ucagcccugaggacagaggcag

SEQ ID NO: 416529 - RNA, 22 nt, Human
uuaacaugucuugacuucaucu

SEQ ID NO: 416530 - RNA, 22 nt, Human
ugguuuaccccuguccuauauc

SEQ ID NO: 416531 - RNA, 22 nt, Human
gaaaucugaaucuucuguuggu

SEQ ID NO: 416532 - RNA, 22 nt, Human
auggcagagggauugaacagcu

SEQ ID NO: 416533 - RNA, 22 nt, Human
acaggcagguugagaaacauuu

SEQ ID NO: 416534 - RNA, 22 nt, Human
gauuucaaaaguagauccauca

SEQ ID NO: 416535 - RNA, 22 nt, Human
uccaggcauagaaggcacgcac

SEQ ID NO: 416536 - RNA, 22 nt, Human
ugaggcagugugagauaauaaa

SEQ ID NO: 416537 - RNA, 22 nt, Human
ucucaguguuguucugcagaug

SEQ ID NO: 416538 - RNA, 22 nt, Human
ggcucagggaaugaggaagaau

SEQ ID NO: 416539 - RNA, 22 nt, Human
gcagcacauauaaacaaagaga

SEQ ID NO: 416540 - RNA, 22 nt, Human
ugcucuguugugcaugugggau

SEQ ID NO: 416541 - RNA, 22 nt, Human
caggaaccuaaagagacauuac

SEQ ID NO: 416542 - RNA, 22 nt, Human
ucaagauaccaccauuauaugu

SEQ ID NO: 416543 - RNA, 22 nt, Human
aaugauauagcagacauagccu

SEQ ID NO: 416544 - RNA, 22 nt, Human
uccuccucuaucagacagugcc

SEQ ID NO: 416545 - RNA, 22 nt, Human
aaggcauaugcuguguacaguu

SEQ ID NO: 416546 - RNA, 22 nt, Human
caugucuugcccugauuaguag

SEQ ID NO: 416547 - RNA, 22 nt, Human
ucaggcugguccccacagugga

SEQ ID NO: 416548 - RNA, 22 nt, Human
uucagcagugcagacacccagu

SEQ ID NO: 416549 - RNA, 18 nt, Human
ucugagggugcgggagcu

SEQ ID NO: 416550 - RNA, 20 nt, Human
guauuagguguuccucuuuc

SEQ ID NO: 416551 - RNA, 22 nt, Human
uuucauguuuauggaaaaugag

SEQ ID NO: 416552 - RNA, 22 nt, Human
ggaaagaccugagauaggaaua

SEQ ID NO: 416553 - RNA, 22 nt, Human
cugaaggagcauagucaguuuu

SEQ ID NO: 416554 - RNA, 22 nt, Human
cugugcaguaggucagggcugg

SEQ ID NO: 416555 - RNA, 22 nt, Human
cagcuuucaucagugacacuca

SEQ ID NO: 416556 - RNA, 22 nt, Human
uggcagcacuugaacuugagcc

SEQ ID NO: 416557 - RNA, 22 nt, Human
aacauugcagcuuaauugcagg

SEQ ID NO: 416558 - RNA, 22 nt, Human
aguuauucauuuauucuguaca

SEQ ID NO: 416559 - RNA, 22 nt, Human
cuuccaaauguaaauaaguuuc

SEQ ID NO: 416560 - RNA, 22 nt, Human
uacaagacgagggaaguucuuu

SEQ ID NO: 416561 - RNA, 19 nt, Human
gcuccugggccucacucau

SEQ ID NO: 416562 - RNA, 22 nt, Human
guguccaucagcagccacugug

SEQ ID NO: 416563 - RNA, 22 nt, Human
aucugccugcaguggagguggg

SEQ ID NO: 416564 - RNA, 22 nt, Human
ucugcaggccucgacaaggcca

SEQ ID NO: 416565 - RNA, 22 nt, Human
ggauggcaggacaaggacccag

SEQ ID NO: 416566 - RNA, 22 nt, Human
ugaagcagcaccauuuuagagc

SEQ ID NO: 416567 - RNA, 22 nt, Human
ucucugagcgcauuccuccggc

SEQ ID NO: 416568 - RNA, 22 nt, Human
ucacaccuguaaucccaggccu

SEQ ID NO: 416569 - RNA, 22 nt, Human
uuuuaauacugcuauuguagga

SEQ ID NO: 416570 - RNA, 23 nt, Human
gagcugggauacaggcuuacugc

SEQ ID NO: 416571 - RNA, 22 nt, Human
uccucacaagcaagcacaggua

SEQ ID NO: 416572 - RNA, 22 nt, Human
ggccucaguuucuucaacugua

SEQ ID NO: 416573 - RNA, 22 nt, Human
caguguggugugcacagcuuag

SEQ ID NO: 416574 - RNA, 22 nt, Human
acagaauugauggaaaucucag

SEQ ID NO: 416575 - RNA, 22 nt, Human
uuugggcaguagauguaucacu

SEQ ID NO: 416576 - RNA, 22 nt, Human
cucagaaguucagccuagagua

SEQ ID NO: 416577 - RNA, 19 nt, Human
ccuuggaguuccaggugga

SEQ ID NO: 416578 - RNA, 22 nt, Human
ugcagcugaggccagcuaugcc

SEQ ID NO: 416579 - RNA, 22 nt, Human
ggcucagagaccugcgaucuga

SEQ ID NO: 416580 - RNA, 22 nt, Human
cuacauaaucuggauuugucug

SEQ ID NO: 416581 - RNA, 22 nt, Human
gguggcagucuuaagagaucuu

SEQ ID NO: 416582 - RNA, 22 nt, Human
uugggcucaggaguuugagacc

SEQ ID NO: 416583 - RNA, 22 nt, Human
gcugaagagagaugcguccagc

SEQ ID NO: 416584 - RNA, 22 nt, Human
aggcacugugcugaugucuuau

SEQ ID NO: 416585 - RNA, 22 nt, Human
cugcuguggaugcaggaccuca

SEQ ID NO: 416586 - RNA, 22 nt, Human
uuugaaaguucuucugacacua

SEQ ID NO: 416587 - RNA, 22 nt, Human
acuguaaccaguguggugagag

SEQ ID NO: 416588 - RNA, 22 nt, Human
ucacaggguuuggaagccuccu

SEQ ID NO: 416589 - RNA, 22 nt, Human
caguggaaaucagagugagagu

SEQ ID NO: 416590 - RNA, 19 nt, Human
gugauuucuuuccacaagc

SEQ ID NO: 416591 - RNA, 22 nt, Human
acacuucuauucccugcacaaa

SEQ ID NO: 416592 - RNA, 22 nt, Human
uuucaagcauaacugggaagag

SEQ ID NO: 416593 - RNA, 19 nt, Human
uggcagggagaguuugaag

SEQ ID NO: 416594 - RNA, 22 nt, Human
cccaggcagccccagaagcuug

SEQ ID NO: 416595 - RNA, 21 nt, Human
ccuggcugcacaguugcuggu

SEQ ID NO: 416596 - RNA, 22 nt, Human
cacccaggcagguggcugagaa

SEQ ID NO: 416597 - RNA, 22 nt, Human
aggauccuuuggccacuucuua

SEQ ID NO: 416598 - RNA, 22 nt, Human
cucuggagaugguucucaauug

SEQ ID NO: 416599 - RNA, 22 nt, Human
aaaugucuaucuggcauauucc

SEQ ID NO: 416600 - RNA, 22 nt, Human
ucuguuuaggcaaaauagcuac

SEQ ID NO: 416601 - RNA, 22 nt, Human
uuccaaagaaguucacauuuac

SEQ ID NO: 416602 - RNA, 22 nt, Human
gaagcaaaaugucugcacauau

SEQ ID NO: 416603 - RNA, 18 nt, Human
ggagagugacagagucgu

SEQ ID NO: 416604 - RNA, 22 nt, Human
gcaggcugggguagccccacuu

SEQ ID NO: 416605 - RNA, 22 nt, Human
cuauuagguaugcagccuauuu

SEQ ID NO: 416606 - RNA, 22 nt, Human
gcaggaugagugaguacauuua

SEQ ID NO: 416607 - RNA, 22 nt, Human
agagugaaguucaucgugcagc

SEQ ID NO: 416608 - RNA, 21 nt, Human
ggcuccugcuuugugaggggc

SEQ ID NO: 416609 - RNA, 19 nt, Human
gugaggauacugcucagag

SEQ ID NO: 416610 - RNA, 22 nt, Human
aucaggaucagggcuagcagag

SEQ ID NO: 416611 - RNA, 22 nt, Human
ugggccuccaauuccagcggga

SEQ ID NO: 416612 - RNA, 22 nt, Human
agggcuggccacaugauuuggu

SEQ ID NO: 416613 - RNA, 21 nt, Human
ucugagaacuucugcugcagc

SEQ ID NO: 416614 - RNA, 22 nt, Human
gguaacaguauguagaguaaga

SEQ ID NO: 416615 - RNA, 23 nt, Human
uaguuauuuucucuguaauuugc

SEQ ID NO: 416616 - RNA, 22 nt, Human
aaaggcuccuucucccaugacc

SEQ ID NO: 416617 - RNA, 22 nt, Human
gaagucugacucuuuguaagcu

SEQ ID NO: 416618 - RNA, 22 nt, Human
cuggaagggucuacuuagcaga

SEQ ID NO: 416619 - RNA, 22 nt, Human
agcaauauaaauguuggguaga

SEQ ID NO: 416620 - RNA, 22 nt, Human
cuugcaggauuuugcugcugua

SEQ ID NO: 416621 - RNA, 22 nt, Human
agaauucuuggugguuagaaua

SEQ ID NO: 416622 - RNA, 22 nt, Human
uuuuuuaguuaggucagaaugu

SEQ ID NO: 416623 - RNA, 19 nt, Human
uccaggaggcugccauuga

SEQ ID NO: 416624 - RNA, 22 nt, Human
gaugccucuuuuggcugaauua

SEQ ID NO: 416625 - RNA, 22 nt, Human
gccaggcacaguucuaggugcu

SEQ ID NO: 416626 - RNA, 22 nt, Human
ugcagucuggauguccucagau

SEQ ID NO: 416627 - RNA, 19 nt, Human
gcuggggccugaccagaca

SEQ ID NO: 416628 - RNA, 17 nt, Human
guuugcaugguguuaac

SEQ ID NO: 416629 - RNA, 22 nt, Human
ggcucaccauggccucccugcu

SEQ ID NO: 416630 - RNA, 22 nt, Human
cagggccucauccucagagauu

SEQ ID NO: 416631 - RNA, 22 nt, Human
agcagaaccacagcacuguuga

SEQ ID NO: 416632 - RNA, 22 nt, Human
cugggcugcaguuccugguccu

SEQ ID NO: 416633 - RNA, 22 nt, Human
aaaugcagaucccugaaucuca

SEQ ID NO: 416634 - RNA, 22 nt, Human
cagggagaaaucuccaggaggu

SEQ ID NO: 416635 - RNA, 22 nt, Human
cugugcuuccaggauggcagcu

SEQ ID NO: 416636 - RNA, 22 nt, Human
gcucuguacgcaggaugagggg

SEQ ID NO: 416637 - RNA, 22 nt, Human
ccugagggcgccgagcucccag

SEQ ID NO: 416638 - RNA, 22 nt, Human
acuguacuguguauuguagaau

SEQ ID NO: 416639 - RNA, 22 nt, Human
acaagagauuaucuacagauga

SEQ ID NO: 416640 - RNA, 22 nt, Human
cugcuuccauaaauaaugugcu

SEQ ID NO: 416641 - RNA, 22 nt, Human
acagggcaccugagguaggaag

SEQ ID NO: 416642 - RNA, 22 nt, Human
cuuguauuccccuaucucuaaa

SEQ ID NO: 416643 - RNA, 18 nt, Human
acauuucucucugcguga

SEQ ID NO: 416644 - RNA, 22 nt, Human
augaggcaucugcagucacuag

SEQ ID NO: 416645 - RNA, 22 nt, Human
acuguguccuauuuccuugaca

SEQ ID NO: 416646 - RNA, 22 nt, Human
cugaaauuccauuucagccaca

SEQ ID NO: 416647 - RNA, 22 nt, Human
ccaggggaaacagggagcacuc

SEQ ID NO: 416648 - RNA, 22 nt, Human
aggccagacagcuagaaacagg

SEQ ID NO: 416649 - RNA, 22 nt, Human
gacccaggguggucaccugaaa

SEQ ID NO: 416650 - RNA, 22 nt, Human
gccuggagaccugcuccucuac

SEQ ID NO: 416651 - RNA, 22 nt, Human
ugcuugagacacauaugaauuu

SEQ ID NO: 416652 - RNA, 22 nt, Human
auguccuuccauuuugaucugu

SEQ ID NO: 416653 - RNA, 22 nt, Human
acucugccuuucagcagaugaa

SEQ ID NO: 416654 - RNA, 22 nt, Human
cuggaaugccucccugucagag

SEQ ID NO: 416655 - RNA, 18 nt, Human
ucucagaggccauccuag

SEQ ID NO: 416656 - RNA, 22 nt, Human
gugucccaaucuacuuuucccu

SEQ ID NO: 416657 - RNA, 22 nt, Human
ggggcagagaauaaaaaccuaa

SEQ ID NO: 416658 - RNA, 22 nt, Human
auucucaguucacuaguuucuu

SEQ ID NO: 416659 - RNA, 22 nt, Human
agcagccacagcagaucugagu

SEQ ID NO: 416660 - RNA, 23 nt, Human
uggcauuuuaguuagcuucagug

SEQ ID NO: 416661 - RNA, 22 nt, Human
ucuucacaccgggcagcaggaa

SEQ ID NO: 416662 - RNA, 22 nt, Human
cagcagagcauuugguaggagg

SEQ ID NO: 416663 - RNA, 22 nt, Human
caguguacuuggaauguaacag

SEQ ID NO: 416664 - RNA, 22 nt, Human
ccugucaggguuugccucagaa

SEQ ID NO: 416665 - RNA, 22 nt, Human
cacccaggcuggagugcagggg

SEQ ID NO: 416666 - RNA, 22 nt, Human
acagugucuccugguacccagu

SEQ ID NO: 416667 - RNA, 22 nt, Human
gcagcagagcuuuguccuggcu

SEQ ID NO: 416668 - RNA, 20 nt, Human
cagcuuggaugagaggcuga

SEQ ID NO: 416669 - RNA, 22 nt, Human
caggugcccagcuccugcugug

SEQ ID NO: 416670 - RNA, 22 nt, Human
ccuggcugguggcagcgacaag

SEQ ID NO: 416671 - RNA, 23 nt, Human
ucaggauauugugugccaaggug

SEQ ID NO: 416672 - RNA, 22 nt, Human
agcaggaacucagggaguucuc

SEQ ID NO: 416673 - RNA, 22 nt, Human
ugaugggaggugcugcaggacc

SEQ ID NO: 416674 - RNA, 22 nt, Human
agggcucugagugggaaagagg

SEQ ID NO: 416675 - RNA, 22 nt, Human
aagcagaacugggaaguagugg

SEQ ID NO: 416676 - RNA, 22 nt, Human
ccugucuggaacauggccuguu

SEQ ID NO: 416677 - RNA, 22 nt, Human
aaacugaauucccaagggcaug

SEQ ID NO: 416678 - RNA, 22 nt, Human
gaaaaugugccuuuggguauug

SEQ ID NO: 416679 - RNA, 22 nt, Human
cauggccucaaaggacugcaga

SEQ ID NO: 416680 - RNA, 22 nt, Human
agcagccagaaagggcagucga

SEQ ID NO: 416681 - RNA, 22 nt, Human
uguggcaguauaagagcuagaa

SEQ ID NO: 416682 - RNA, 22 nt, Human
ugcaagcacucaaugcaaacag

SEQ ID NO: 416683 - RNA, 22 nt, Human
gcuggugagcaaaggagaagga

SEQ ID NO: 416684 - RNA, 22 nt, Human
acagcugugaaaauccacagga

SEQ ID NO: 416685 - RNA, 22 nt, Human
ugugacagaucuuuaaauaaug

SEQ ID NO: 416686 - RNA, 22 nt, Human
aaauucuuucauggcuaauaag

SEQ ID NO: 416687 - RNA, 20 nt, Human
ugcagggcucugcuucucuc

SEQ ID NO: 416688 - RNA, 22 nt, Human
agaaguuaccacauacuucucu

SEQ ID NO: 416689 - RNA, 22 nt, Human
agcugcccuggcggagcugcuc

SEQ ID NO: 416690 - RNA, 22 nt, Human
ggcugcagauagccagccacca

SEQ ID NO: 416691 - RNA, 22 nt, Human
augaugguggguaauguguaaa

SEQ ID NO: 416692 - RNA, 22 nt, Human
ccuguacauuagcugugaauug

SEQ ID NO: 416693 - RNA, 22 nt, Human
ggagcuguugcgcaugcgcucg

SEQ ID NO: 416694 - RNA, 22 nt, Human
ggcugccugggagcccuccucu

SEQ ID NO: 416695 - RNA, 22 nt, Human
ugcaaacaggagaguaaguaua

SEQ ID NO: 416696 - RNA, 22 nt, Human
gcaggaguguggugggacaucc

SEQ ID NO: 416697 - RNA, 22 nt, Human
agccaaggacacggagccuccu

SEQ ID NO: 416698 - RNA, 20 nt, Human
uucuuaaagaccucacuuug

SEQ ID NO: 416699 - RNA, 22 nt, Human
gcugcccauuccacuggauggu

SEQ ID NO: 416700 - RNA, 22 nt, Human
aguguguguuugggcgguuuau

SEQ ID NO: 416701 - RNA, 22 nt, Human
uucucuuagcuguaaagucaau

SEQ ID NO: 416702 - RNA, 22 nt, Human
gaggccuggagccgccuaggcg

SEQ ID NO: 416703 - RNA, 22 nt, Human
gcugccuggagcucagccugcc

SEQ ID NO: 416704 - RNA, 22 nt, Human
aggagcugagggagcgcccuug

SEQ ID NO: 416705 - RNA, 22 nt, Human
uggcagagcaaaaagauagaau

SEQ ID NO: 416706 - RNA, 19 nt, Human
ugggcagcucccucugucc

SEQ ID NO: 416707 - RNA, 22 nt, Human
cauuguuaccaucuuuuaccua

SEQ ID NO: 416708 - RNA, 22 nt, Human
gcugaggccccagggugauggg

SEQ ID NO: 416709 - RNA, 22 nt, Human
aggcagccaguucagguuucuu

SEQ ID NO: 416710 - RNA, 22 nt, Human
agauuucaaugugagcauuagu

SEQ ID NO: 416711 - RNA, 22 nt, Human
uguccacaucacucacuuguca

SEQ ID NO: 416712 - RNA, 22 nt, Human
cauccacuagaaugacagaguu

SEQ ID NO: 416713 - RNA, 22 nt, Human
auguaguguagagauuagucuc

SEQ ID NO: 416714 - RNA, 22 nt, Human
gggaaggagccugcuugcuaga

SEQ ID NO: 416715 - RNA, 22 nt, Human
ucauugcaguagggagagaccc

SEQ ID NO: 416716 - RNA, 22 nt, Human
ucauuacagagauauaaucuac

SEQ ID NO: 416717 - RNA, 22 nt, Human
uucacaggaggguggaugcaug

SEQ ID NO: 416718 - RNA, 22 nt, Human
guaaacaugcuguguacucagc

SEQ ID NO: 416719 - RNA, 22 nt, Human
uuggcucaggaccccugugacu

SEQ ID NO: 416720 - RNA, 22 nt, Human
ccucgaccuccccaggcucagg

SEQ ID NO: 416721 - RNA, 22 nt, Human
gucagcacuuuuccgaggcaga

SEQ ID NO: 416722 - RNA, 22 nt, Human
ggcuuccuuucacuacccucag

SEQ ID NO: 416723 - RNA, 22 nt, Human
guguuuccaguucagaaagcaa

SEQ ID NO: 416724 - RNA, 22 nt, Human
agaccaugggcucugaagagca

SEQ ID NO: 416725 - RNA, 22 nt, Human
uggcucagaguucaucuuuuag

SEQ ID NO: 416726 - RNA, 22 nt, Human
agaaaucugacugcugugcaca

SEQ ID NO: 416727 - RNA, 22 nt, Human
ucauuuucaaguuugaacagga

SEQ ID NO: 416728 - RNA, 22 nt, Human
ugacuccaaacagaaaacgaau

SEQ ID NO: 416729 - RNA, 22 nt, Human
uccuuccucggggacccagauc

SEQ ID NO: 416730 - RNA, 22 nt, Human
uuucacauaaauauuaugccua

SEQ ID NO: 416731 - RNA, 18 nt, Human
agcagcugucagaaugcc

SEQ ID NO: 416732 - RNA, 18 nt, Human
aggggcagcuugugugga

SEQ ID NO: 416733 - RNA, 22 nt, Human
uggggcugaggagccucacucu

SEQ ID NO: 416734 - RNA, 22 nt, Human
ugcccacauucaaaaggugaug

SEQ ID NO: 416735 - RNA, 22 nt, Human
cuggugggagcagcaggcagcu

SEQ ID NO: 416736 - RNA, 20 nt, Human
uggcaggaauagggccagag

SEQ ID NO: 416737 - RNA, 22 nt, Human
ugagcccaggaguuggagaccg

SEQ ID NO: 416738 - RNA, 22 nt, Human
agggaccucuucuugcagcuga

SEQ ID NO: 416739 - RNA, 22 nt, Human
cagccucuaagcacagccucuc

SEQ ID NO: 416740 - RNA, 22 nt, Human
uauugaaaugaaugacagugau

SEQ ID NO: 416741 - RNA, 22 nt, Human
ugaaggccacuuccugugagcu

SEQ ID NO: 416742 - RNA, 22 nt, Human
uccuggagauaauugcagugaa

SEQ ID NO: 416743 - RNA, 22 nt, Human
gaggcagugaacaauuccugug

SEQ ID NO: 416744 - RNA, 22 nt, Human
uuagauaaauugcaacuugauu

SEQ ID NO: 416745 - RNA, 22 nt, Human
ugacacagaaauuaagcuguca

SEQ ID NO: 416746 - RNA, 22 nt, Human
agggcagccaugagccuucagg

SEQ ID NO: 416747 - RNA, 21 nt, Human
gccucugcugucuuauuguga

SEQ ID NO: 416748 - RNA, 22 nt, Human
gaauucugucgcuuacuagaug

SEQ ID NO: 416749 - RNA, 18 nt, Human
uucagcagcagacacacu

SEQ ID NO: 416750 - RNA, 22 nt, Human
ucaaggcuaaacuuucagagua

SEQ ID NO: 416751 - RNA, 22 nt, Human
cuggagccgcauggagcaggga

SEQ ID NO: 416752 - RNA, 22 nt, Human
agagaggcgaguuaccugugcu

SEQ ID NO: 416753 - RNA, 22 nt, Human
uuucuucugagaucagggagaa

SEQ ID NO: 416754 - RNA, 22 nt, Human
caggaggcuccuagggcucugu

SEQ ID NO: 416755 - RNA, 22 nt, Human
gcugcaggggggucuggacuug

SEQ ID NO: 416756 - RNA, 22 nt, Human
aagaagguguggaaagaugcuc

SEQ ID NO: 416757 - RNA, 22 nt, Human
acaggcuggugguccuggccau

SEQ ID NO: 416758 - RNA, 19 nt, Human
uuagggacaugaauucuag

SEQ ID NO: 416759 - RNA, 22 nt, Human
ucaaaccaccuuguuacugggg

SEQ ID NO: 416760 - RNA, 22 nt, Human
caguuucuucaucaguuaagca

SEQ ID NO: 416761 - RNA, 22 nt, Human
ucacaagauacaguuagaagca

SEQ ID NO: 416762 - RNA, 22 nt, Human
gcccagcuggcuuccagcacau

SEQ ID NO: 416763 - RNA, 22 nt, Human
caggauggagaguuguugguug

SEQ ID NO: 416764 - RNA, 18 nt, Human
uggacaggguggagaaaa

SEQ ID NO: 416765 - RNA, 19 nt, Human
cugaagucuuuucagcugg

SEQ ID NO: 416766 - RNA, 22 nt, Human
uaauccacaauagagauuaucu

SEQ ID NO: 416767 - RNA, 20 nt, Human
ggcagggcaucaacagcucu

SEQ ID NO: 416768 - RNA, 22 nt, Human
uacaaaguagaaauucaguaaa

SEQ ID NO: 416769 - RNA, 22 nt, Human
acauauuuccaugcagcauguc

SEQ ID NO: 416770 - RNA, 22 nt, Human
agcugcccugggucuugcugcu

SEQ ID NO: 416771 - RNA, 22 nt, Human
aucuggcuccuacacuugaaga

SEQ ID NO: 416772 - RNA, 22 nt, Human
ccugagagagaagcgaccuggu

SEQ ID NO: 416773 - RNA, 22 nt, Human
ucucuuaaaagauuuuaaugac

SEQ ID NO: 416774 - RNA, 22 nt, Human
agccaagcugaucuccugcuga

SEQ ID NO: 416775 - RNA, 22 nt, Human
cuggagccuagguugaccuggg

SEQ ID NO: 416776 - RNA, 22 nt, Human
cccagcacuuugaauaugucac

SEQ ID NO: 416777 - RNA, 22 nt, Human
ccugggcagggagaccaggcuc

SEQ ID NO: 416778 - RNA, 22 nt, Human
uagaaauguugguauuaacauu

SEQ ID NO: 416779 - RNA, 22 nt, Human
cauggggagacaccuagggaaa

SEQ ID NO: 416780 - RNA, 22 nt, Human
ugagcccagagcccuuguaggg

SEQ ID NO: 416781 - RNA, 22 nt, Human
ggagcugcacgcucugaagccu

SEQ ID NO: 416782 - RNA, 22 nt, Human
cauuugcauaugaagaaguaag

SEQ ID NO: 416783 - RNA, 22 nt, Human
cuccaguggcaaguccgggcgg

SEQ ID NO: 416784 - RNA, 22 nt, Human
ccaggcagcucugauuuauguc

SEQ ID NO: 416785 - RNA, 22 nt, Human
agguaaagacagugaaagaggg

SEQ ID NO: 416786 - RNA, 22 nt, Human
agaugugguaguugaagggaag

SEQ ID NO: 416787 - RNA, 22 nt, Human
gugccugugcggacucagggaa

SEQ ID NO: 416788 - RNA, 22 nt, Human
ugggcuccggcggccucaggcu

SEQ ID NO: 416789 - RNA, 22 nt, Human
cucuguccuccaccugcuuuca

SEQ ID NO: 416790 - RNA, 22 nt, Human
agagauaugaguaguugugaca

SEQ ID NO: 416791 - RNA, 20 nt, Human
guccugggagccacagcaca

SEQ ID NO: 416792 - RNA, 22 nt, Human
aguggggaagagcaugggcccu

SEQ ID NO: 416793 - RNA, 22 nt, Human
ccuggcuuccuggagcucacaa

SEQ ID NO: 416794 - RNA, 22 nt, Human
agcucacagaaauccugcagga

SEQ ID NO: 416795 - RNA, 16 nt, Human
ccacagggcaaggggc

SEQ ID NO: 416796 - RNA, 22 nt, Human
uuucaaugacacaaaagagaaa

SEQ ID NO: 416797 - RNA, 22 nt, Human
guggccucugugcuccugccua

SEQ ID NO: 416798 - RNA, 22 nt, Human
aucugacaaccuauugacuuga

SEQ ID NO: 416799 - RNA, 22 nt, Human
ucagagagaaauaguuuuugac

SEQ ID NO: 416800 - RNA, 22 nt, Human
agggcagauggaacuuccccga

SEQ ID NO: 416801 - RNA, 22 nt, Human
gccaggcauucuagaaguagug

SEQ ID NO: 416802 - RNA, 22 nt, Human
uaggcagaaaggaaggcaaguu

SEQ ID NO: 416803 - RNA, 22 nt, Human
uaauuucuggagggagaaagag

SEQ ID NO: 416804 - RNA, 20 nt, Human
gaggccucagccucagcucc

SEQ ID NO: 416805 - RNA, 22 nt, Human
aaaagguaguugccaaauaagg

SEQ ID NO: 416806 - RNA, 22 nt, Human
ucacagaaauaagauaguuauu

SEQ ID NO: 416807 - RNA, 22 nt, Human
acccagcuaacccuacccugga

SEQ ID NO: 416808 - RNA, 22 nt, Human
agggcagcagcccauggcucug

SEQ ID NO: 416809 - RNA, 17 nt, Human
gcagugaaaagagauca

SEQ ID NO: 416810 - RNA, 22 nt, Human
aauuucaaacuaauaggaacca

SEQ ID NO: 416811 - RNA, 19 nt, Human
aauguaguguuaugucaac

SEQ ID NO: 416812 - RNA, 22 nt, Human
gaggccuggugugucucccgcu

SEQ ID NO: 416813 - RNA, 22 nt, Human
aaaugcacaggagaaccaauuc

SEQ ID NO: 416814 - RNA, 21 nt, Human
cucuggaggcaagggagagug

SEQ ID NO: 416815 - RNA, 22 nt, Human
aaggcagagggcuggaucagag

SEQ ID NO: 416816 - RNA, 22 nt, Human
caguggagaggcaugcuuggca

SEQ ID NO: 416817 - RNA, 22 nt, Human
ggcuggccuguguggccgccac

SEQ ID NO: 416818 - RNA, 22 nt, Human
uauaauuuuaagugguaaauua

SEQ ID NO: 416819 - RNA, 22 nt, Human
ucauucuccucuggaaaaggca

SEQ ID NO: 416820 - RNA, 22 nt, Human
cccacucccugcacgccugccg

SEQ ID NO: 416821 - RNA, 22 nt, Human
ugggcagaaggaagagccaccu

SEQ ID NO: 416822 - RNA, 22 nt, Human
gccaguggcaugcggcagggac

SEQ ID NO: 416823 - RNA, 22 nt, Human
aggcuggguaccugucauaugc

SEQ ID NO: 416824 - RNA, 22 nt, Human
aauuaugagguagauaucacau

SEQ ID NO: 416825 - RNA, 22 nt, Human
gcugguuaggugagggugcgcc

SEQ ID NO: 416826 - RNA, 22 nt, Human
aggcugagagcaacgugucaga

SEQ ID NO: 416827 - RNA, 22 nt, Human
ggcuuuauuucacuguaccaua

SEQ ID NO: 416828 - RNA, 22 nt, Human
uuuaaucaggcaaagcauaaua

SEQ ID NO: 416829 - RNA, 22 nt, Human
aggccacaguacuuugcagacc

SEQ ID NO: 416830 - RNA, 18 nt, Human
ggcaugugagugcugagg

SEQ ID NO: 416831 - RNA, 19 nt, Human
uucaggauugacccuacug

SEQ ID NO: 416832 - RNA, 22 nt, Human
ggcagugagucccggagaggcc

SEQ ID NO: 416833 - RNA, 22 nt, Human
uuuugagauggugucucgcucc

SEQ ID NO: 416834 - RNA, 22 nt, Human
ggggacaguuaaagaccaagac

SEQ ID NO: 416835 - RNA, 22 nt, Human
uccaggcauguggccaguacuc

SEQ ID NO: 416836 - RNA, 22 nt, Human
uccaggcaguuuuccagguugu

SEQ ID NO: 416837 - RNA, 20 nt, Human
ccagagcagccacugaaguu

SEQ ID NO: 416838 - RNA, 22 nt, Human
gcuguccaugucuggccucagu

SEQ ID NO: 416839 - RNA, 18 nt, Human
aaugcacacauuuacucc

SEQ ID NO: 416840 - RNA, 22 nt, Human
acaguggaugacauccuuuugc

SEQ ID NO: 416841 - RNA, 22 nt, Human
ggugaccucaccuggucccacc

SEQ ID NO: 416842 - RNA, 22 nt, Human
agaugaagacucaggagcaggu

SEQ ID NO: 416843 - RNA, 22 nt, Human
aggcuccuugcucacaggcuca

SEQ ID NO: 416844 - RNA, 22 nt, Human
auuuccucaugaucauaaugca

SEQ ID NO: 416845 - RNA, 22 nt, Human
agagaugaaaaguggagacugg

SEQ ID NO: 416846 - RNA, 22 nt, Human
uaugcacaauaugaucuauuug

SEQ ID NO: 416847 - RNA, 20 nt, Human
augugagggguugaaguggg

SEQ ID NO: 416848 - RNA, 22 nt, Human
auauucuuccaaaacaucauuu

SEQ ID NO: 416849 - RNA, 22 nt, Human
ucucuuauuuugccuuugacaa

SEQ ID NO: 416850 - RNA, 22 nt, Human
cugugucccccucagccaggug

SEQ ID NO: 416851 - RNA, 22 nt, Human
ucacaacuugaagcugauuuaa

SEQ ID NO: 416852 - RNA, 22 nt, Human
aaugucugaaaaucagacugca

SEQ ID NO: 416853 - RNA, 22 nt, Human
gcugagcucccagcaguaucug

SEQ ID NO: 416854 - RNA, 22 nt, Human
uggcagggugggcuucagcccc

SEQ ID NO: 416855 - RNA, 22 nt, Human
uccagcagguuggucaggugca

SEQ ID NO: 416856 - RNA, 22 nt, Human
ggcaggagggcggacaaugacc

SEQ ID NO: 416857 - RNA, 22 nt, Human
ugaguccauguggaggggaggu

SEQ ID NO: 416858 - RNA, 22 nt, Human
ggccaugguuggggaagacaug

SEQ ID NO: 416859 - RNA, 22 nt, Human
ucagagaggcaauacuguuuaa

SEQ ID NO: 416860 - RNA, 22 nt, Human
uguggaaaagaauaagggagau

SEQ ID NO: 416861 - RNA, 22 nt, Human
cucuggagaacuccuugugucu

SEQ ID NO: 416862 - RNA, 22 nt, Human
gggccugacugagagcuccuca

SEQ ID NO: 416863 - RNA, 23 nt, Human
gggaccugguaggaggugauugg

SEQ ID NO: 416864 - RNA, 22 nt, Human
uguauacauuuaacuagauaga

SEQ ID NO: 416865 - RNA, 22 nt, Human
cagccagugugaccgaggagga

SEQ ID NO: 416866 - RNA, 22 nt, Human
ccacaggggcccacgagccgcu

SEQ ID NO: 416867 - RNA, 22 nt, Human
ccagccuuacugcccuucagug

SEQ ID NO: 416868 - RNA, 22 nt, Human
ucgggguagacgccagcucgga

SEQ ID NO: 416869 - RNA, 22 nt, Human
ugugaaagcaagucuaguucuc

SEQ ID NO: 416870 - RNA, 22 nt, Human
uuagccaugcccuagaagagga

SEQ ID NO: 416871 - RNA, 20 nt, Human
ucccuggaggugguggcauc

SEQ ID NO: 416872 - RNA, 22 nt, Human
uaaugcuuuguuuugaucuaac

SEQ ID NO: 416873 - RNA, 22 nt, Human
gugcaaugugcuucgugccaug

SEQ ID NO: 416874 - RNA, 21 nt, Human
uggcucugaaagagugcugca

SEQ ID NO: 416875 - RNA, 22 nt, Human
ugagccuggcggaagcagcgug

SEQ ID NO: 416876 - RNA, 16 nt, Human
ugggcagaugagaaga

SEQ ID NO: 416877 - RNA, 22 nt, Human
aauauuucuccuucguuauagc

SEQ ID NO: 416878 - RNA, 22 nt, Human
cugugacuagaccugcaggaga

SEQ ID NO: 416879 - RNA, 23 nt, Human
ccucagcauggcaggagcccagc

SEQ ID NO: 416880 - RNA, 22 nt, Human
gcagcccaaaaaagagguagau

SEQ ID NO: 416881 - RNA, 22 nt, Human
gaaaugugggucaugacccauu

SEQ ID NO: 416882 - RNA, 22 nt, Human
ccugggcuucugucuagauguu

SEQ ID NO: 416883 - RNA, 22 nt, Human
caaugacauggauaaucauauu

SEQ ID NO: 416884 - RNA, 22 nt, Human
caucaucaaaagugacagagaa

SEQ ID NO: 416885 - RNA, 22 nt, Human
ggaggcagaauagagugugggu

SEQ ID NO: 416886 - RNA, 18 nt, Human
agucucagcggaggagua

SEQ ID NO: 416887 - RNA, 19 nt, Human
caucuggaugauucuccug

SEQ ID NO: 416888 - RNA, 22 nt, Human
cagaggaaaguauuucuggaag

SEQ ID NO: 416889 - RNA, 22 nt, Human
aagaugauaggacuugcuuaag

SEQ ID NO: 416890 - RNA, 19 nt, Human
uggcugggugccaauggcc

SEQ ID NO: 416891 - RNA, 22 nt, Human
uuaaaaugcagauucugauuca

SEQ ID NO: 416892 - RNA, 19 nt, Human
aucuuacagagcagaguac

SEQ ID NO: 416893 - RNA, 22 nt, Human
guggcugcuacagagcuggagg

SEQ ID NO: 416894 - RNA, 22 nt, Human
agauggagaccuuggaugaacu

SEQ ID NO: 416895 - RNA, 22 nt, Human
ggauggcagucugcaugagaaa

SEQ ID NO: 416896 - RNA, 22 nt, Human
accaaggagacaaagguguauu

SEQ ID NO: 416897 - RNA, 22 nt, Human
ccagcuccaaguuugggcauca

SEQ ID NO: 416898 - RNA, 22 nt, Human
cagagcaguccuugucaaucag

SEQ ID NO: 416899 - RNA, 22 nt, Human
cucaaggaaagucuggagaaga

SEQ ID NO: 416900 - RNA, 22 nt, Human
ugcuuucaaaggcuuucuagau

SEQ ID NO: 416901 - RNA, 22 nt, Human
uggcagcuuccugcucauagga

SEQ ID NO: 416902 - RNA, 22 nt, Human
auccaaaccuggacaugagugg

SEQ ID NO: 416903 - RNA, 22 nt, Human
cagcugcccaggccaccuggag

SEQ ID NO: 416904 - RNA, 17 nt, Human
acagggcagaaacagcu

SEQ ID NO: 416905 - RNA, 22 nt, Human
ggccucagaccggagcuggcca

SEQ ID NO: 416906 - RNA, 22 nt, Human
aacaaguaaguuuauauauauu

SEQ ID NO: 416907 - RNA, 22 nt, Human
uauuucugaggcccaggaagug

SEQ ID NO: 416908 - RNA, 21 nt, Human
aggcagcucaggcccagagag

SEQ ID NO: 416909 - RNA, 22 nt, Human
caggaggaggugagguagaacu

SEQ ID NO: 416910 - RNA, 20 nt, Human
cucugcagcaaggccugggu

SEQ ID NO: 416911 - RNA, 22 nt, Human
gagagugaugaaugguuaaaca

SEQ ID NO: 416912 - RNA, 22 nt, Human
cagcugaauucuucagacucca

SEQ ID NO: 416913 - RNA, 22 nt, Human
aggaggcugguucaggccauau

SEQ ID NO: 416914 - RNA, 22 nt, Human
accaugccaguggcagccagac

SEQ ID NO: 416915 - RNA, 22 nt, Human
cagggagcuggcuggcugugcc

SEQ ID NO: 416916 - RNA, 22 nt, Human
guucaaguucauaucucuuaac

SEQ ID NO: 416917 - RNA, 22 nt, Human
uuagauaacaguagaauaucaa

SEQ ID NO: 416918 - RNA, 20 nt, Human
cucuuaaauguaaaguaggc

SEQ ID NO: 416919 - RNA, 22 nt, Human
ggcugcagcagagggacucacg

SEQ ID NO: 416920 - RNA, 22 nt, Human
gauuuucaugauaaacuuguga

SEQ ID NO: 416921 - RNA, 22 nt, Human
ugagcaucuuuuuacagguuua

SEQ ID NO: 416922 - RNA, 22 nt, Human
gcagcugccgugagcucacgcc

SEQ ID NO: 416923 - RNA, 22 nt, Human
ucaaaguaaaaguauagaguuu

SEQ ID NO: 416924 - RNA, 22 nt, Human
ccugggcaacauagugagaccu

SEQ ID NO: 416925 - RNA, 22 nt, Human
uauugaaauccauuacguucuu

SEQ ID NO: 416926 - RNA, 22 nt, Human
agagccugaggaugucccagcu

SEQ ID NO: 416927 - RNA, 22 nt, Human
cagacaugauguaagcagaggc

SEQ ID NO: 416928 - RNA, 22 nt, Human
gggcugagaaguugaucccaag

SEQ ID NO: 416929 - RNA, 22 nt, Human
uacuuucuguccuucuguuaaa

SEQ ID NO: 416930 - RNA, 22 nt, Human
acauuucuggaguuucucaaca

SEQ ID NO: 416931 - RNA, 22 nt, Human
gcuguauuuauuuucuaggguu

SEQ ID NO: 416932 - RNA, 22 nt, Human
aggucaaaccacagcucuaggc

SEQ ID NO: 416933 - RNA, 22 nt, Human
ugcagaaguauuccaggcccca

SEQ ID NO: 416934 - RNA, 22 nt, Human
ugugacaucgcugugucuguuu

SEQ ID NO: 416935 - RNA, 22 nt, Human
cucucccccacagcagccuucu

SEQ ID NO: 416936 - RNA, 22 nt, Human
gagaggcugaaaucacaggagc

SEQ ID NO: 416937 - RNA, 22 nt, Human
augcagcaguuuacaaagcaau

SEQ ID NO: 416938 - RNA, 22 nt, Human
caggcagcaggagcccugcucg

SEQ ID NO: 416939 - RNA, 22 nt, Human
uggccuggcagagcaaggccug

SEQ ID NO: 416940 - RNA, 22 nt, Human
cccuggagugugacgaggcauu

SEQ ID NO: 416941 - RNA, 22 nt, Human
gcuguuccugcuuagaggucgg

SEQ ID NO: 416942 - RNA, 22 nt, Human
ugagggaggcccuuugagcaga

SEQ ID NO: 416943 - RNA, 22 nt, Human
uucuucaaaauccagcaugauu

SEQ ID NO: 416944 - RNA, 22 nt, Human
aacauuucuucugaaacugagu

SEQ ID NO: 416945 - RNA, 22 nt, Human
ggcuguggggccggguacagug

SEQ ID NO: 416946 - RNA, 22 nt, Human
ggagcugggguuggcaucuucc

SEQ ID NO: 416947 - RNA, 22 nt, Human
gggggacuggaccguccugggu

SEQ ID NO: 416948 - RNA, 22 nt, Human
gcaggggcugagcaccagcggg

SEQ ID NO: 416949 - RNA, 23 nt, Human
ccagggccccuacaccacugucc

SEQ ID NO: 416950 - RNA, 22 nt, Human
agcagggcuucugugccugugc

SEQ ID NO: 416951 - RNA, 22 nt, Human
cucaggaugcaauuccaucaag

SEQ ID NO: 416952 - RNA, 22 nt, Human
uggcaggagacacauggcauag

SEQ ID NO: 416953 - RNA, 22 nt, Human
ugcagggccaugguggcggcug

SEQ ID NO: 416954 - RNA, 22 nt, Human
gacagggccgcagauggagacu

SEQ ID NO: 416955 - RNA, 22 nt, Human
aaaauacacauacuaggggaaa

SEQ ID NO: 416956 - RNA, 22 nt, Human
aagugaaacauguaucucuuua

SEQ ID NO: 416957 - RNA, 23 nt, Human
ccugugugcccuuaauucacagc

SEQ ID NO: 416958 - RNA, 22 nt, Human
cuccuuccugguuagcaccuua

SEQ ID NO: 416959 - RNA, 22 nt, Human
ugcauugcauuugucaugaaga

SEQ ID NO: 416960 - RNA, 22 nt, Human
uauguacauguuaaagggcaaa

SEQ ID NO: 416961 - RNA, 22 nt, Human
cauuuguuaauuacuauuaucu

SEQ ID NO: 416962 - RNA, 22 nt, Human
auaugcauguacgugugcacaa

SEQ ID NO: 416963 - RNA, 22 nt, Human
caauguaucaagaagcaucagu

SEQ ID NO: 416964 - RNA, 22 nt, Human
cucuguccuugcacaguuccua

SEQ ID NO: 416965 - RNA, 22 nt, Human
ccuggcagguggagguugcagu

SEQ ID NO: 416966 - RNA, 22 nt, Human
agagugggugaucucuguuguc

SEQ ID NO: 416967 - RNA, 18 nt, Human
cuguccaguagacucugc

SEQ ID NO: 416968 - RNA, 22 nt, Human
guuuuuccuugcugaggacccg

SEQ ID NO: 416969 - RNA, 22 nt, Human
agugggcaggcagggugcgcag

SEQ ID NO: 416970 - RNA, 22 nt, Human
uagaaaugauuuugaugcuuca

SEQ ID NO: 416971 - RNA, 18 nt, Human
uggcagagugucuguucu

SEQ ID NO: 416972 - RNA, 22 nt, Human
cugagcaggauauucacagcag

SEQ ID NO: 416973 - RNA, 22 nt, Human
uggccuuggacagagcgcuccu

SEQ ID NO: 416974 - RNA, 22 nt, Human
uauuucuugaguggucaguuuc

SEQ ID NO: 416975 - RNA, 22 nt, Human
gagcugccagacaugggaauga

SEQ ID NO: 416976 - RNA, 22 nt, Human
cuccagucuaguagagccugcu

SEQ ID NO: 416977 - RNA, 22 nt, Human
uagagcaguuggcagcuguauu

SEQ ID NO: 416978 - RNA, 22 nt, Human
uauguguacaucugguugagca

SEQ ID NO: 416979 - RNA, 22 nt, Human
ucucaggguuuccugggggcug

SEQ ID NO: 416980 - RNA, 22 nt, Human
gugaauggggcaggaaggaugg

SEQ ID NO: 416981 - RNA, 22 nt, Human
ucugccuggauuccauucucca

SEQ ID NO: 416982 - RNA, 22 nt, Human
ggcuugcuucuuguccaggaau

SEQ ID NO: 416983 - RNA, 22 nt, Human
ggaggaagcacacggcuuguau

SEQ ID NO: 416984 - RNA, 19 nt, Human
ggcauccagaacuaccagu

SEQ ID NO: 416985 - RNA, 22 nt, Human
cugugaggcccugggugcugga

SEQ ID NO: 416986 - RNA, 23 nt, Human
uggccucuccccaccuggcagaa

SEQ ID NO: 416987 - RNA, 22 nt, Human
ugcagaggaccauuguccugga

SEQ ID NO: 416988 - RNA, 22 nt, Human
cgcagggccgcgagcgggacca

SEQ ID NO: 416989 - RNA, 22 nt, Human
uggccugccucccggcuucuuu

SEQ ID NO: 416990 - RNA, 22 nt, Human
uagcuuuaaaaaucaucaaagc

SEQ ID NO: 416991 - RNA, 22 nt, Human
ucugcgcugccuugauccuugg

SEQ ID NO: 416992 - RNA, 22 nt, Human
cagggugccuguccucagcaaa

SEQ ID NO: 416993 - RNA, 22 nt, Human
gaggccugguuuccagcauccu

SEQ ID NO: 416994 - RNA, 22 nt, Human
cagggcucccuugcaaggaggg

SEQ ID NO: 416995 - RNA, 22 nt, Human
uaugcacaccuggguccuuguc

SEQ ID NO: 416996 - RNA, 23 nt, Human
gggugggccaaauuagguagccu

SEQ ID NO: 416997 - RNA, 22 nt, Human
ucucacugggucacagcagagg

SEQ ID NO: 416998 - RNA, 22 nt, Human
ucccagcacgucugcuguuucu

SEQ ID NO: 416999 - RNA, 22 nt, Human
uccuggcccacuaugccagcau

SEQ ID NO: 417000 - RNA, 22 nt, Human
augcugugccuggaaagcggcu

SEQ ID NO: 417001 - RNA, 22 nt, Human
aagacaagcaucaaaucaggca

SEQ ID NO: 417002 - RNA, 22 nt, Human
ccaggguggcguagaugcuggg

SEQ ID NO: 417003 - RNA, 22 nt, Human
ucucaguguuaucuaucugccu

SEQ ID NO: 417004 - RNA, 22 nt, Human
aguaaacauuuucauauuuucu

SEQ ID NO: 417005 - RNA, 22 nt, Human
cagggccugcuuccuucuuguu

SEQ ID NO: 417006 - RNA, 22 nt, Human
uaggcagcugcaaacuucgguc

SEQ ID NO: 417007 - RNA, 22 nt, Human
agcuucuugaccaagccuguaa

SEQ ID NO: 417008 - RNA, 22 nt, Human
uauuuagaacagacaauagaaa

SEQ ID NO: 417009 - RNA, 22 nt, Human
ucagagugggagaaugugccaa

SEQ ID NO: 417010 - RNA, 22 nt, Human
uuccuguccgcaauggccuggg

SEQ ID NO: 417011 - RNA, 22 nt, Human
gcuucgggguccaagcgcgugu

SEQ ID NO: 417012 - RNA, 22 nt, Human
aggcuucccaagcagcugcaaa

SEQ ID NO: 417013 - RNA, 22 nt, Human
agacaggacacaagcugcauaa

SEQ ID NO: 417014 - RNA, 22 nt, Human
gcacagggcugccaggcggcuu

SEQ ID NO: 417015 - RNA, 22 nt, Human
aagagcuggcucuugcagcagc

SEQ ID NO: 417016 - RNA, 22 nt, Human
cauugcacaucugagaagagau

SEQ ID NO: 417017 - RNA, 22 nt, Human
aggucaggguauucacgucugu

SEQ ID NO: 417018 - RNA, 22 nt, Human
ggcuagaguggaacuggagcgg

SEQ ID NO: 417019 - RNA, 22 nt, Human
aauaugugagguauguucagug

SEQ ID NO: 417020 - RNA, 22 nt, Human
uacagucuuuggaaagagauag

SEQ ID NO: 417021 - RNA, 22 nt, Human
agccuggauccauguggcuacc

SEQ ID NO: 417022 - RNA, 22 nt, Human
caggcagccugcggucugcaca

SEQ ID NO: 417023 - RNA, 22 nt, Human
cccugcaggcucagacuggagu

SEQ ID NO: 417024 - RNA, 22 nt, Human
caaagagcuguucagugucgcu

SEQ ID NO: 417025 - RNA, 22 nt, Human
ucuguagcaagugagaggcauu

SEQ ID NO: 417026 - RNA, 22 nt, Human
acugccuuauaugcugugugug

SEQ ID NO: 417027 - RNA, 20 nt, Human
uuguuucugcuauuuucuaa

SEQ ID NO: 417028 - RNA, 19 nt, Human
uaaaaugucuguggucagu

SEQ ID NO: 417029 - RNA, 22 nt, Human
gaggcugcacuggcuaaaggcu

SEQ ID NO: 417030 - RNA, 22 nt, Human
auggcagccuguggacagucaa

SEQ ID NO: 417031 - RNA, 22 nt, Human
cuuucacacacauacauuugga

SEQ ID NO: 417032 - RNA, 22 nt, Human
cuucacauguuggaguccuuug

SEQ ID NO: 417033 - RNA, 22 nt, Human
aaacagaaauuuccucaugcuc

SEQ ID NO: 417034 - RNA, 22 nt, Human
ucaaaugcuucuacuccuaaga

SEQ ID NO: 417035 - RNA, 22 nt, Human
caucaaauggcaagugaaagcu

SEQ ID NO: 417036 - RNA, 23 nt, Human
acucacaaagcaggaucauguug

SEQ ID NO: 417037 - RNA, 22 nt, Human
agggccaggaucacagccaaga

SEQ ID NO: 417038 - RNA, 22 nt, Human
cugcagagaauuguggggcuuc

SEQ ID NO: 417039 - RNA, 22 nt, Human
aagagagaacucccuucgccag

SEQ ID NO: 417040 - RNA, 22 nt, Human
cucucugggcccaguuggcacc

SEQ ID NO: 417041 - RNA, 22 nt, Human
gggcugcuuuuaagggucucag

SEQ ID NO: 417042 - RNA, 22 nt, Human
caggaugguggcaugaucagaa

SEQ ID NO: 417043 - RNA, 22 nt, Human
cugugcuuaccugcccagguga

SEQ ID NO: 417044 - RNA, 22 nt, Human
gccugcuguuaacugcaggaau

SEQ ID NO: 417045 - RNA, 22 nt, Human
cuccucuuuggggauuuacaca

SEQ ID NO: 417046 - RNA, 22 nt, Human
agaggccaguggcugugcuguc

SEQ ID NO: 417047 - RNA, 23 nt, Human
ugcucugggaggcccuggagagc

SEQ ID NO: 417048 - RNA, 22 nt, Human
ugggcuggcugaacuucaaccu

SEQ ID NO: 417049 - RNA, 22 nt, Human
caggaaagagcugccaggcagg

SEQ ID NO: 417050 - RNA, 22 nt, Human
gucagaggggacaagacacaga

SEQ ID NO: 417051 - RNA, 22 nt, Human
uaaaggcuucugcagggacuga

SEQ ID NO: 417052 - RNA, 22 nt, Human
cugggcaguaugaauauucaaa

SEQ ID NO: 417053 - RNA, 22 nt, Human
gagcagaacuacucacauaucg

SEQ ID NO: 417054 - RNA, 22 nt, Human
cacaggugcuccucggggagcu

SEQ ID NO: 417055 - RNA, 22 nt, Human
ugcaccauacccauuccccucu

SEQ ID NO: 417056 - RNA, 22 nt, Human
acaggccuuggcaggcauguga

SEQ ID NO: 417057 - RNA, 21 nt, Human
gcccucaggggaggauggccu

SEQ ID NO: 417058 - RNA, 22 nt, Human
gaaccaaguaggauacaaggag

SEQ ID NO: 417059 - RNA, 22 nt, Human
aggcugccucgugagcucgcug

SEQ ID NO: 417060 - RNA, 22 nt, Human
ucuggaaguuagaggaggaaag

SEQ ID NO: 417061 - RNA, 22 nt, Human
cugggaguguucuaggucacau

SEQ ID NO: 417062 - RNA, 22 nt, Human
cagcaauaguguguuuguuuca

SEQ ID NO: 417063 - RNA, 19 nt, Human
gagggcucauuugaacaau

SEQ ID NO: 417064 - RNA, 22 nt, Human
aucuauuaugcugagaaacugu

SEQ ID NO: 417065 - RNA, 22 nt, Human
gggagguucuguucgcacuuga

SEQ ID NO: 417066 - RNA, 22 nt, Human
ugcaccugagaggucucugagg

SEQ ID NO: 417067 - RNA, 22 nt, Human
uggcccugccacucacugcuga

SEQ ID NO: 417068 - RNA, 22 nt, Human
ccugggcagggcuggacucuca

SEQ ID NO: 417069 - RNA, 22 nt, Human
cuggccuuuagccccagugucu

SEQ ID NO: 417070 - RNA, 22 nt, Human
guaaaauugcaauuacuuuugc

SEQ ID NO: 417071 - RNA, 22 nt, Human
aagacauuacuggaaucugacu

SEQ ID NO: 417072 - RNA, 22 nt, Human
gaagcccagcaaacugugauca

SEQ ID NO: 417073 - RNA, 22 nt, Human
cagagcagaagcgguccucaca

SEQ ID NO: 417074 - RNA, 22 nt, Human
aaagucaaaaugcucuccuguc

SEQ ID NO: 417075 - RNA, 22 nt, Human
uguggccagcagguggcugugu

SEQ ID NO: 417076 - RNA, 22 nt, Human
aaggcccuaauagagcacauau

SEQ ID NO: 417077 - RNA, 22 nt, Human
cuauuagguuggugcaaaagua

SEQ ID NO: 417078 - RNA, 20 nt, Human
uuuacauuuugaaacaguga

SEQ ID NO: 417079 - RNA, 19 nt, Human
uucacauuggaagaaguag

SEQ ID NO: 417080 - RNA, 22 nt, Human
gcugccuuugugagccaagggg

SEQ ID NO: 417081 - RNA, 22 nt, Human
acuuuggguaagccaggugcua

SEQ ID NO: 417082 - RNA, 22 nt, Human
cagcuuuuuagaaucuagggca

SEQ ID NO: 417083 - RNA, 19 nt, Human
ugaguucugugguucucaa

SEQ ID NO: 417084 - RNA, 22 nt, Human
gcccaucaucacuguggaggcu

SEQ ID NO: 417085 - RNA, 22 nt, Human
ucagaggaacuggacuaaagcc

SEQ ID NO: 417086 - RNA, 19 nt, Human
ggugaccaccuggucagug

SEQ ID NO: 417087 - RNA, 22 nt, Human
ggaugcugcuaucaggcuucga

SEQ ID NO: 417088 - RNA, 22 nt, Human
gaagucuggcugacgagaguua

SEQ ID NO: 417089 - RNA, 22 nt, Human
ucccagaggcuccagucucuau

SEQ ID NO: 417090 - RNA, 23 nt, Human
gccucugcucugcguuggggacu

SEQ ID NO: 417091 - RNA, 22 nt, Human
gcuggcagguccaagauagagc

SEQ ID NO: 417092 - RNA, 22 nt, Human
gggcuggucuggcuuagucagg

SEQ ID NO: 417093 - RNA, 18 nt, Human
cccucuccugcuaguggg

SEQ ID NO: 417094 - RNA, 22 nt, Human
gcagggagguuugcugaccugg

SEQ ID NO: 417095 - RNA, 20 nt, Human
ggcugugcccuuccguggcc

SEQ ID NO: 417096 - RNA, 16 nt, Human
cagcuuuaugucagug

SEQ ID NO: 417097 - RNA, 22 nt, Human
agcagagcgccugcucagaggg

SEQ ID NO: 417098 - RNA, 22 nt, Human
acagcugugagggucacuugua

SEQ ID NO: 417099 - RNA, 22 nt, Human
gccucccuggcccacagcagcg

SEQ ID NO: 417100 - RNA, 22 nt, Human
agcuaggaaauugaggcugaga

SEQ ID NO: 417101 - RNA, 22 nt, Human
ucugcugcacaaauucaucucu

SEQ ID NO: 417102 - RNA, 22 nt, Human
gcucaggacccaggugugaccu

SEQ ID NO: 417103 - RNA, 22 nt, Human
ucuuagaaauuccccaguggcu

SEQ ID NO: 417104 - RNA, 22 nt, Human
ccagcaccuugaucuuggaguu

SEQ ID NO: 417105 - RNA, 22 nt, Human
gccaggcuggucuugaacuccu

SEQ ID NO: 417106 - RNA, 22 nt, Human
gcucuguccagcgugcacagaa

SEQ ID NO: 417107 - RNA, 22 nt, Human
accagggcacaggagucugaag

SEQ ID NO: 417108 - RNA, 22 nt, Human
gugcaguggcagauccuagcuc

SEQ ID NO: 417109 - RNA, 22 nt, Human
cccaggcuggagugcaauggca

SEQ ID NO: 417110 - RNA, 22 nt, Human
cugcugucuuuauuucacugcu

SEQ ID NO: 417111 - RNA, 22 nt, Human
ugcaccauuuugucaggcuacu

SEQ ID NO: 417112 - RNA, 22 nt, Human
uggagaagucaaagugaacagg

SEQ ID NO: 417113 - RNA, 23 nt, Human
gccucagagaaacagcugcacac

SEQ ID NO: 417114 - RNA, 22 nt, Human
agacucugauaagcaacucuug

SEQ ID NO: 417115 - RNA, 22 nt, Human
auaucuuuguaugguucagcag

SEQ ID NO: 417116 - RNA, 20 nt, Human
uucuggaggcuacaagucug

SEQ ID NO: 417117 - RNA, 22 nt, Human
agaggugacauaggagaggcuc

SEQ ID NO: 417118 - RNA, 22 nt, Human
acacugugacaaaggcuguucu

SEQ ID NO: 417119 - RNA, 22 nt, Human
aauacaaucaaauucacuagca

SEQ ID NO: 417120 - RNA, 19 nt, Human
ccagaggacuguuaaugaa

SEQ ID NO: 417121 - RNA, 22 nt, Human
ggagagugggagcaacuguugc

SEQ ID NO: 417122 - RNA, 19 nt, Human
ugaagcagcaaacucucag

SEQ ID NO: 417123 - RNA, 22 nt, Human
auucagcauaaucaguagcuug

SEQ ID NO: 417124 - RNA, 22 nt, Human
cauuuauucaugaucuguagcu

SEQ ID NO: 417125 - RNA, 22 nt, Human
caguuucuuaucuucaaaauug

SEQ ID NO: 417126 - RNA, 22 nt, Human
cacauggggcgcugcauuggcc

SEQ ID NO: 417127 - RNA, 22 nt, Human
ugccagaguuacaugaggguca

SEQ ID NO: 417128 - RNA, 22 nt, Human
ugcuuccugaggccgucuucuc

SEQ ID NO: 417129 - RNA, 22 nt, Human
ggagaugguggaagcuggugca

SEQ ID NO: 417130 - RNA, 22 nt, Human
uuugcaauuugugcugcaaaug

SEQ ID NO: 417131 - RNA, 22 nt, Human
acacugugagcugaagggcugc

SEQ ID NO: 417132 - RNA, 22 nt, Human
cccucugcucaggugcauaggc

SEQ ID NO: 417133 - RNA, 22 nt, Human
gcagcccagguguagcucuuug

SEQ ID NO: 417134 - RNA, 22 nt, Human
ccauuguaaagaguauacuuug

SEQ ID NO: 417135 - RNA, 22 nt, Human
aucaguuugagugcugugucaa

SEQ ID NO: 417136 - RNA, 22 nt, Human
cugcuguguuucacaccucugg

SEQ ID NO: 417137 - RNA, 21 nt, Human
ugaagccugaggcauagcccc

SEQ ID NO: 417138 - RNA, 22 nt, Human
cuuauuuugcugaugacccagg

SEQ ID NO: 417139 - RNA, 23 nt, Human
aaggucacagaacuuagcaagcc

SEQ ID NO: 417140 - RNA, 22 nt, Human
gcaccugguuuauauaaucaua

SEQ ID NO: 417141 - RNA, 22 nt, Human
ucucagaguaauucuuuaaggu

SEQ ID NO: 417142 - RNA, 23 nt, Human
agaugaggcuucuccauguuggu

SEQ ID NO: 417143 - RNA, 22 nt, Human
auguaaggcugccuaugacacu

SEQ ID NO: 417144 - RNA, 22 nt, Human
gcaagcugcuuaagcucauugu

SEQ ID NO: 417145 - RNA, 22 nt, Human
agcugucuaccugcagaguccu

SEQ ID NO: 417146 - RNA, 22 nt, Human
guguacaugagaaaucaacuuu

SEQ ID NO: 417147 - RNA, 22 nt, Human
caagaauuguacaaacugggug

SEQ ID NO: 417148 - RNA, 22 nt, Human
augaaacaaaccucuauggagu

SEQ ID NO: 417149 - RNA, 22 nt, Human
ugggcugaguggcagccagagu

SEQ ID NO: 417150 - RNA, 22 nt, Human
gcucugaggcugggagcacucu

SEQ ID NO: 417151 - RNA, 22 nt, Human
gcuguggccaacaaaccacuuu

SEQ ID NO: 417152 - RNA, 22 nt, Human
cauuuauucauuugcuagggcu

SEQ ID NO: 417153 - RNA, 22 nt, Human
aucuggcuauugacauguuaua

SEQ ID NO: 417154 - RNA, 22 nt, Human
cugagauggccacugggucuca

SEQ ID NO: 417155 - RNA, 22 nt, Human
aaaguguugggaagaaagugca

SEQ ID NO: 417156 - RNA, 22 nt, Human
ccaaagucagugcucagucguc

SEQ ID NO: 417157 - RNA, 22 nt, Human
uagcuuuaaugaguugguaaga

SEQ ID NO: 417158 - RNA, 22 nt, Human
uauuuugacuauuaaaccaaca

SEQ ID NO: 417159 - RNA, 22 nt, Human
caaaggcuuccacugcauccuu

SEQ ID NO: 417160 - RNA, 22 nt, Human
cugggcacuugcucacagcucu

SEQ ID NO: 417161 - RNA, 22 nt, Human
caggggccaggcugucugcugu

SEQ ID NO: 417162 - RNA, 22 nt, Human
aucuggaacaaagcuuaggaau

SEQ ID NO: 417163 - RNA, 22 nt, Human
cacagggccuugugugacugca

SEQ ID NO: 417164 - RNA, 22 nt, Human
uuuuucauugcagccucucucc

SEQ ID NO: 417165 - RNA, 22 nt, Human
caauaugcaagcuauuaaguau

SEQ ID NO: 417166 - RNA, 22 nt, Human
uucaagaucgaguuuaaaguga

SEQ ID NO: 417167 - RNA, 22 nt, Human
aaggaaagacauauaaaugacu

SEQ ID NO: 417168 - RNA, 19 nt, Human
ccugggagucagcugaagg

SEQ ID NO: 417169 - RNA, 22 nt, Human
cauacauaugcauguguguaua

SEQ ID NO: 417170 - RNA, 22 nt, Human
acauacuaugaauacauguguc

SEQ ID NO: 417171 - RNA, 22 nt, Human
ugaacccaggagguugcaguga

SEQ ID NO: 417172 - RNA, 22 nt, Human
uguguccuuuggaggaucagcg

SEQ ID NO: 417173 - RNA, 22 nt, Human
agcccucugcaaacaccugaua

SEQ ID NO: 417174 - RNA, 22 nt, Human
gcugggcagccuggccgcugcc

SEQ ID NO: 417175 - RNA, 22 nt, Human
aaagcaaugaugguagacacgu

SEQ ID NO: 417176 - RNA, 22 nt, Human
augagcuucccagacaggaugg

SEQ ID NO: 417177 - RNA, 22 nt, Human
cugaggcuuugugugcaugccu

SEQ ID NO: 417178 - RNA, 22 nt, Human
cugcucuggucucuucauguuu

SEQ ID NO: 417179 - RNA, 22 nt, Human
uuccauaauaggcuuaagugaa

SEQ ID NO: 417180 - RNA, 22 nt, Human
uucaggaggugagcaagaaggg

SEQ ID NO: 417181 - RNA, 21 nt, Human
ccugucuuggacugaggcacc

SEQ ID NO: 417182 - RNA, 20 nt, Human
cucugcuuuaggagagucag

SEQ ID NO: 417183 - RNA, 22 nt, Human
ggugaggcccagugaucugugu

SEQ ID NO: 417184 - RNA, 22 nt, Human
caucccugcccucaugccuaua

SEQ ID NO: 417185 - RNA, 22 nt, Human
gcccucucuucugcagccucca

SEQ ID NO: 417186 - RNA, 21 nt, Human
ucauuuuuauugcuaccuugc

SEQ ID NO: 417187 - RNA, 22 nt, Human
uaaguucauaagcuuauucuua

SEQ ID NO: 417188 - RNA, 22 nt, Human
ucagcagugcagggugaggcag

SEQ ID NO: 417189 - RNA, 22 nt, Human
aaaauguguuuaugcauuucgu

SEQ ID NO: 417190 - RNA, 22 nt, Human
caggacagaaauaaggaauaua

SEQ ID NO: 417191 - RNA, 22 nt, Human
gaggcacaauacaugucucaag

SEQ ID NO: 417192 - RNA, 21 nt, Human
agaaaaacacgauauaagccc

SEQ ID NO: 417193 - RNA, 22 nt, Human
gcacaggcacagagggccacug

SEQ ID NO: 417194 - RNA, 22 nt, Human
uuuccucuccggggccuccagg

SEQ ID NO: 417195 - RNA, 22 nt, Human
caguggugaagagcaggggcuc

SEQ ID NO: 417196 - RNA, 22 nt, Human
gaauccaggguuguuugagcua

SEQ ID NO: 417197 - RNA, 20 nt, Human
ucauuucuugggguuccaag

SEQ ID NO: 417198 - RNA, 22 nt, Human
ccaggugcucuugccagggcug

SEQ ID NO: 417199 - RNA, 22 nt, Human
agccaaggcagcuagagcucug

SEQ ID NO: 417200 - RNA, 22 nt, Human
acugcuuuucuaagauucugug

SEQ ID NO: 417201 - RNA, 22 nt, Human
ccagcauggcaccugagaugag

SEQ ID NO: 417202 - RNA, 22 nt, Human
ucucucagggggaaggcugaag

SEQ ID NO: 417203 - RNA, 22 nt, Human
ccaggaguuggagguugcagug

SEQ ID NO: 417204 - RNA, 22 nt, Human
gcugcagccaaauucauuguca

SEQ ID NO: 417205 - RNA, 22 nt, Human
aagggcugcuguagaagcagag

SEQ ID NO: 417206 - RNA, 22 nt, Human
uugucuuuggaaauuuaauguu

SEQ ID NO: 417207 - RNA, 22 nt, Human
cugcucugaguauuaacggagg

SEQ ID NO: 417208 - RNA, 22 nt, Human
uuucuuucaauucuccuaaugc

SEQ ID NO: 417209 - RNA, 22 nt, Human
ugggcucauggcccagcacugg

SEQ ID NO: 417210 - RNA, 22 nt, Human
ccuggcagcaggugggcccgug

SEQ ID NO: 417211 - RNA, 22 nt, Human
uuagccauauagaaaaagagcu

SEQ ID NO: 417212 - RNA, 22 nt, Human
ucagugucuugggcuugaaugc

SEQ ID NO: 417213 - RNA, 22 nt, Human
uaugcacagaaguuugcugaau

SEQ ID NO: 417214 - RNA, 17 nt, Human
uggcacagaggugcuau

SEQ ID NO: 417215 - RNA, 22 nt, Human
cugcugugcacccaggaaggcu

SEQ ID NO: 417216 - RNA, 22 nt, Human
uggccuggcucacagugagauu

SEQ ID NO: 417217 - RNA, 22 nt, Human
ugccuacauuccuugcuuaugg

SEQ ID NO: 417218 - RNA, 22 nt, Human
acagguggcuuauuggcugauu

SEQ ID NO: 417219 - RNA, 19 nt, Human
ccagcccugucacuucuug

SEQ ID NO: 417220 - RNA, 22 nt, Human
guuauguaugggggccuuauga

SEQ ID NO: 417221 - RNA, 19 nt, Human
cuggcagccugucuguguc

SEQ ID NO: 417222 - RNA, 22 nt, Human
ugaggcagaguaagauacauga

SEQ ID NO: 417223 - RNA, 22 nt, Human
ugaggcaguucuuacuuguauu

SEQ ID NO: 417224 - RNA, 22 nt, Human
ucacagggauggaauagaaaua

SEQ ID NO: 417225 - RNA, 22 nt, Human
uagcugccaaaagggugggcua

SEQ ID NO: 417226 - RNA, 22 nt, Human
agagccugcaucaggcuugggg

SEQ ID NO: 417227 - RNA, 22 nt, Human
cugaggaggggccugagugaga

SEQ ID NO: 417228 - RNA, 22 nt, Human
ccagcagcagcguccaaggaga

SEQ ID NO: 417229 - RNA, 19 nt, Human
ucaaagucugagucacuuu

SEQ ID NO: 417230 - RNA, 22 nt, Human
uggcagcugauuagauggugcc

SEQ ID NO: 417231 - RNA, 22 nt, Human
uguuucauguggacauaguugu

SEQ ID NO: 417232 - RNA, 23 nt, Human
agcaauaagaagggauacaugug

SEQ ID NO: 417233 - RNA, 22 nt, Human
uggcagcagggccccuggagga

SEQ ID NO: 417234 - RNA, 22 nt, Human
cuuuauuagauguagacuuucu

SEQ ID NO: 417235 - RNA, 22 nt, Human
auuucccuccagggaaagcuua

SEQ ID NO: 417236 - RNA, 22 nt, Human
ccagguggugaaagugggcccu

SEQ ID NO: 417237 - RNA, 22 nt, Human
gucccagggaugcagacaugag

SEQ ID NO: 417238 - RNA, 18 nt, Human
cccagcuccacuucccuc

SEQ ID NO: 417239 - RNA, 22 nt, Human
gcuccucuccucggagucgggg

SEQ ID NO: 417240 - RNA, 22 nt, Human
ccucaggggugcccacagcugc

SEQ ID NO: 417241 - RNA, 22 nt, Human
ccagcuuucugggugguuucug

SEQ ID NO: 417242 - RNA, 22 nt, Human
caggcagaaggaaguaccaggc

SEQ ID NO: 417243 - RNA, 22 nt, Human
agaauuagaggccauguacuug

SEQ ID NO: 417244 - RNA, 23 nt, Human
aaagacugcugagaauuuuagga

SEQ ID NO: 417245 - RNA, 22 nt, Human
auaauaaaccaggaugggucug

SEQ ID NO: 417246 - RNA, 22 nt, Human
gcagagcucuguucuuaucucc

SEQ ID NO: 417247 - RNA, 22 nt, Human
cugcagggcccgccugagcccu

SEQ ID NO: 417248 - RNA, 22 nt, Human
ggcugcuucucacucauuugca

SEQ ID NO: 417249 - RNA, 22 nt, Human
uuccuuccgggcaccaggcacu

SEQ ID NO: 417250 - RNA, 22 nt, Human
cagguccccuccccuaccaggc

SEQ ID NO: 417251 - RNA, 22 nt, Human
cagcuccccucuguggggcagu

SEQ ID NO: 417252 - RNA, 22 nt, Human
gccuggagaggaagccggugga

SEQ ID NO: 417253 - RNA, 22 nt, Human
ggcagaagaaaggcuaagucuc

SEQ ID NO: 417254 - RNA, 22 nt, Human
caggaggcuuugggauccaagu

SEQ ID NO: 417255 - RNA, 22 nt, Human
gagagcugggaaagccguggag

SEQ ID NO: 417256 - RNA, 22 nt, Human
ucagcagggaggcucugugccc

SEQ ID NO: 417257 - RNA, 22 nt, Human
gccuggagacaaggacaaaggg

SEQ ID NO: 417258 - RNA, 22 nt, Human
ucacaucuuauuagaguaucuc

SEQ ID NO: 417259 - RNA, 22 nt, Human
acagaaauaacuuuuuauguuu

SEQ ID NO: 417260 - RNA, 22 nt, Human
ggagcuguaacgagccauugcu

SEQ ID NO: 417261 - RNA, 22 nt, Human
ccuuuuucaauauagaauugca

SEQ ID NO: 417262 - RNA, 19 nt, Human
gagcugccuuuugaagacc

SEQ ID NO: 417263 - RNA, 22 nt, Human
gccaggcucagcagucaaccug

SEQ ID NO: 417264 - RNA, 22 nt, Human
gccaccucggcuuucucugcuc

SEQ ID NO: 417265 - RNA, 22 nt, Human
ccagguggaaggucugugcucu

SEQ ID NO: 417266 - RNA, 22 nt, Human
ggagaguggauuccagcuguau

SEQ ID NO: 417267 - RNA, 18 nt, Human
cucagggcaucagucugg

SEQ ID NO: 417268 - RNA, 22 nt, Human
cagcugccccuccagggcuggg

SEQ ID NO: 417269 - RNA, 22 nt, Human
ucucagaggugcccuggcaucu

SEQ ID NO: 417270 - RNA, 22 nt, Human
cuggcagcgguuugcagccugg

SEQ ID NO: 417271 - RNA, 22 nt, Human
ggaggccaugaggcucuaggug

SEQ ID NO: 417272 - RNA, 22 nt, Human
ugguaaaguguacugaauauga

SEQ ID NO: 417273 - RNA, 22 nt, Human
acagcagcaauagcagugacau

SEQ ID NO: 417274 - RNA, 22 nt, Human
cugagagaugauauagcuuaau

SEQ ID NO: 417275 - RNA, 22 nt, Human
cuguugucccugggagcucagc

SEQ ID NO: 417276 - RNA, 22 nt, Human
uccaguggcaccuuggcccuca

SEQ ID NO: 417277 - RNA, 22 nt, Human
ggcugcuggcauugagguaggu

SEQ ID NO: 417278 - RNA, 22 nt, Human
cagcuucccuuggcugagcaga

SEQ ID NO: 417279 - RNA, 21 nt, Human
aaaaugugagcgugaugcuua

SEQ ID NO: 417280 - RNA, 22 nt, Human
gcugccugaucauacaccaggg

SEQ ID NO: 417281 - RNA, 22 nt, Human
ucaggcaggacaauuauuuagg

SEQ ID NO: 417282 - RNA, 22 nt, Human
uggaccugaagaauaggaagua

SEQ ID NO: 417283 - RNA, 22 nt, Human
ccauggcauuuuaugugucuua

SEQ ID NO: 417284 - RNA, 22 nt, Human
ugccugucagggggagugggaa

SEQ ID NO: 417285 - RNA, 22 nt, Human
aguucacauuccgagguacugg

SEQ ID NO: 417286 - RNA, 22 nt, Human
uacugugacagaguacuuaaac

SEQ ID NO: 417287 - RNA, 18 nt, Human
gcaaggcucaggccaggc

SEQ ID NO: 417288 - RNA, 22 nt, Human
uccaggcuggaaaugucaaacu

SEQ ID NO: 417289 - RNA, 22 nt, Human
ugccuuccuggagcugaaggcu

SEQ ID NO: 417290 - RNA, 22 nt, Human
cacagguguaugaauaugucca

SEQ ID NO: 417291 - RNA, 22 nt, Human
gcaggcaguugcaguuuucuag

SEQ ID NO: 417292 - RNA, 22 nt, Human
aggcugagguaggaggaucgcu

SEQ ID NO: 417293 - RNA, 22 nt, Human
cagagcugcaaaugccccuccg

SEQ ID NO: 417294 - RNA, 22 nt, Human
uccuuggcaugccgucuucucc

SEQ ID NO: 417295 - RNA, 22 nt, Human
uggcagcaauuagcuagagcug

SEQ ID NO: 417296 - RNA, 22 nt, Human
cuucuaggcuucucagggggca

SEQ ID NO: 417297 - RNA, 23 nt, Human
uggggagaguuacccuggaagcg

SEQ ID NO: 417298 - RNA, 22 nt, Human
gacaaaggaucagagguuggga

SEQ ID NO: 417299 - RNA, 22 nt, Human
acauuguagacuuuucauaugu

SEQ ID NO: 417300 - RNA, 22 nt, Human
agcagcugggcucagagcuggg

SEQ ID NO: 417301 - RNA, 22 nt, Human
guuuauuauacaacaaaagcua

SEQ ID NO: 417302 - RNA, 22 nt, Human
ugcccuguuccugccuccagcu

SEQ ID NO: 417303 - RNA, 21 nt, Human
ggggcagagcuaggcccugca

SEQ ID NO: 417304 - RNA, 22 nt, Human
auuuucugguugagguuuaaca

SEQ ID NO: 417305 - RNA, 21 nt, Human
auggagccuaagaguggaggu

SEQ ID NO: 417306 - RNA, 22 nt, Human
agggucuguggaugcaucuggg

SEQ ID NO: 417307 - RNA, 22 nt, Human
uggucagacaaaggagaauguu

SEQ ID NO: 417308 - RNA, 22 nt, Human
uggcagucggacuucuaucuca

SEQ ID NO: 417309 - RNA, 22 nt, Human
auagacuugguuaguaaauuug

SEQ ID NO: 417310 - RNA, 22 nt, Human
cuacauaaauauuuaugugucu

SEQ ID NO: 417311 - RNA, 22 nt, Human
aguccccucuaacccaacuuua

SEQ ID NO: 417312 - RNA, 22 nt, Human
gcagggaccucacuacccccag

SEQ ID NO: 417313 - RNA, 22 nt, Human
uggaagaauaggauagaagaac

SEQ ID NO: 417314 - RNA, 22 nt, Human
gcagaggagugauuaugccgug

SEQ ID NO: 417315 - RNA, 19 nt, Human
uugguggugguuuugguuc

SEQ ID NO: 417316 - RNA, 22 nt, Human
agggcugcaucugccuggugaa

SEQ ID NO: 417317 - RNA, 22 nt, Human
acaguguguuggaggagacugu

SEQ ID NO: 417318 - RNA, 22 nt, Human
uguuugaauuuugcuaacgugu

SEQ ID NO: 417319 - RNA, 18 nt, Human
ugacagaaccuggagccu

SEQ ID NO: 417320 - RNA, 22 nt, Human
uguggcaggcaagauguacaga

SEQ ID NO: 417321 - RNA, 22 nt, Human
gaggcugcuguuagcccugggc

SEQ ID NO: 417322 - RNA, 22 nt, Human
ccagcuuucucagaggcuucua

SEQ ID NO: 417323 - RNA, 22 nt, Human
accauuuaauaaguauuuccau

SEQ ID NO: 417324 - RNA, 22 nt, Human
agauguguuucuaguuccugca

SEQ ID NO: 417325 - RNA, 22 nt, Human
ugucaguguauacauacaguau

SEQ ID NO: 417326 - RNA, 22 nt, Human
aaucaguuucuuggcaaguuua

SEQ ID NO: 417327 - RNA, 22 nt, Human
cugaaggauuuaguucuuugcu

SEQ ID NO: 417328 - RNA, 22 nt, Human
cccagcccccgagugucuggaa

SEQ ID NO: 417329 - RNA, 22 nt, Human
gccagaagacuggagucagcug

SEQ ID NO: 417330 - RNA, 22 nt, Human
agggccugagcuggcugaccuc

SEQ ID NO: 417331 - RNA, 21 nt, Human
uagaaaucagcuggugccucu

SEQ ID NO: 417332 - RNA, 22 nt, Human
gcugccacucugagcuugcuuc

SEQ ID NO: 417333 - RNA, 19 nt, Human
ggaccagguccugggcagc

SEQ ID NO: 417334 - RNA, 22 nt, Human
aaggucauuuaacaauuuauga

SEQ ID NO: 417335 - RNA, 22 nt, Human
cucccugggcagauguggcucu

SEQ ID NO: 417336 - RNA, 22 nt, Human
cuucaagauauuucuagaauca

SEQ ID NO: 417337 - RNA, 18 nt, Human
ugcuggcaacuacuauug

SEQ ID NO: 417338 - RNA, 22 nt, Human
ugcaaaauaaugaacgauuuuu

SEQ ID NO: 417339 - RNA, 22 nt, Human
acaaaggugcgucccuucagcu

SEQ ID NO: 417340 - RNA, 22 nt, Human
ccuguguggccaggcuggaguc

SEQ ID NO: 417341 - RNA, 23 nt, Human
ccaggccucucagagggugugcc

SEQ ID NO: 417342 - RNA, 22 nt, Human
gauuuuucaguauaaaauauau

SEQ ID NO: 417343 - RNA, 22 nt, Human
acacuucucccaucuccuguug

SEQ ID NO: 417344 - RNA, 22 nt, Human
auuucuuuucaagagggugcuu

SEQ ID NO: 417345 - RNA, 22 nt, Human
uucagaaagugaaucuuguuau

SEQ ID NO: 417346 - RNA, 22 nt, Human
gcugcuccgucugagcucuggu

SEQ ID NO: 417347 - RNA, 22 nt, Human
ugggaccucucuugagagagca

SEQ ID NO: 417348 - RNA, 22 nt, Human
uacauuguucaugcaugagaaa

SEQ ID NO: 417349 - RNA, 22 nt, Human
ugucuuuagccagcagucuucu

SEQ ID NO: 417350 - RNA, 22 nt, Human
aacuagaaccacuuguauuucc

SEQ ID NO: 417351 - RNA, 22 nt, Human
cucuuucaguucugauagucuc

SEQ ID NO: 417352 - RNA, 22 nt, Human
cagcugaggucaaagaagcagg

SEQ ID NO: 417353 - RNA, 22 nt, Human
augcagcugugggcaagaaaug

SEQ ID NO: 417354 - RNA, 22 nt, Human
gcccagcagaucucagugucuc

SEQ ID NO: 417355 - RNA, 22 nt, Human
aagggcuggagacugggucuuc

SEQ ID NO: 417356 - RNA, 22 nt, Human
gcauguuuugcaacaagugacc

SEQ ID NO: 417357 - RNA, 22 nt, Human
aagaugcacaauguggcaauua

SEQ ID NO: 417358 - RNA, 22 nt, Human
ggcccaaggcccaggucgagcu

SEQ ID NO: 417359 - RNA, 22 nt, Human
uguccucuuccagugcuccuuc

SEQ ID NO: 417360 - RNA, 22 nt, Human
gaagaacugugacagaagcagu

SEQ ID NO: 417361 - RNA, 22 nt, Human
gcuuccuggagggagagagcug

SEQ ID NO: 417362 - RNA, 22 nt, Human
uauuucuguaacucagggucug

SEQ ID NO: 417363 - RNA, 22 nt, Human
gagagcugggggacuguggaug

SEQ ID NO: 417364 - RNA, 22 nt, Human
uugcucugaacccagggcacca

SEQ ID NO: 417365 - RNA, 22 nt, Human
agagcagguggcaacucuggga

SEQ ID NO: 417366 - RNA, 22 nt, Human
aagcccagaugggagcauuuca

SEQ ID NO: 417367 - RNA, 19 nt, Human
auuccucaaggacagaaau

SEQ ID NO: 417368 - RNA, 22 nt, Human
aagggcagcuuaaauugguagc

SEQ ID NO: 417369 - RNA, 22 nt, Human
ugggaaauguguuucuggacca

SEQ ID NO: 417370 - RNA, 22 nt, Human
caggccugucugcacaugaggc

SEQ ID NO: 417371 - RNA, 22 nt, Human
uaagaacauuuucggaaagaua

SEQ ID NO: 417372 - RNA, 22 nt, Human
cagucacauggaugauggauag

SEQ ID NO: 417373 - RNA, 22 nt, Human
gaaggcuguuucugguagugau

SEQ ID NO: 417374 - RNA, 22 nt, Human
gcucugcugucuucuugcaggc

SEQ ID NO: 417375 - RNA, 22 nt, Human
gagcagcuuaugucaagccaga

SEQ ID NO: 417376 - RNA, 22 nt, Human
agcaccugcuaugugucaggga

SEQ ID NO: 417377 - RNA, 22 nt, Human
aaaugcauaucaaagacuugaa

SEQ ID NO: 417378 - RNA, 22 nt, Human
gcaguccucucauuggccuccu

SEQ ID NO: 417379 - RNA, 22 nt, Human
aaagccuuggucaucugguucc

SEQ ID NO: 417380 - RNA, 20 nt, Human
cagagcuguuauggaugaug

SEQ ID NO: 417381 - RNA, 22 nt, Human
ucucagggcagcaaggaagcau

SEQ ID NO: 417382 - RNA, 22 nt, Human
ggcagcuccucucagcaaaaga

SEQ ID NO: 417383 - RNA, 22 nt, Human
guggauggauugaggcaguggg

SEQ ID NO: 417384 - RNA, 22 nt, Human
ggcuggcuuucucuccgcaccu

SEQ ID NO: 417385 - RNA, 22 nt, Human
accuggagucauuugaggagua

SEQ ID NO: 417386 - RNA, 22 nt, Human
uaccaggcagcugcacagaggc

SEQ ID NO: 417387 - RNA, 22 nt, Human
uuccaggaauucagcucucagu

SEQ ID NO: 417388 - RNA, 22 nt, Human
aggagcugcagauucugccuug

SEQ ID NO: 417389 - RNA, 22 nt, Human
uuccuguauuuugcgaauuuuc

SEQ ID NO: 417390 - RNA, 22 nt, Human
auaugaagaauuccaauuugga

SEQ ID NO: 417391 - RNA, 18 nt, Human
gaugggagcaagagaaga

SEQ ID NO: 417392 - RNA, 22 nt, Human
uacaaagcuguauagccugguc

SEQ ID NO: 417393 - RNA, 22 nt, Human
uacuuugucauucuaaccuucc

SEQ ID NO: 417394 - RNA, 18 nt, Human
gcaggagauggguggggu

SEQ ID NO: 417395 - RNA, 22 nt, Human
ggccaggcugcccugggagcag

SEQ ID NO: 417396 - RNA, 22 nt, Human
uacauauacugagugauuugcu

SEQ ID NO: 417397 - RNA, 22 nt, Human
uauuugcaaagaacuacacuag

SEQ ID NO: 417398 - RNA, 22 nt, Human
ugccugggguuggcaaacugcu

SEQ ID NO: 417399 - RNA, 22 nt, Human
ccagcucccugaagccuggucu

SEQ ID NO: 417400 - RNA, 22 nt, Human
ugaggccuggagggaggaguuu

SEQ ID NO: 417401 - RNA, 22 nt, Human
ucagggcaucucuuaaguggug

SEQ ID NO: 417402 - RNA, 20 nt, Human
accaauguuagcuuaguacu

SEQ ID NO: 417403 - RNA, 22 nt, Human
uuguccaaggucccacaguuag

SEQ ID NO: 417404 - RNA, 22 nt, Human
ccucugcugcuguugagcaccg

SEQ ID NO: 417405 - RNA, 22 nt, Human
uuauacuaaaacgcauugaauu

SEQ ID NO: 417406 - RNA, 22 nt, Human
agcugcugaaugacacugcaag

SEQ ID NO: 417407 - RNA, 22 nt, Human
uccaugagggacacuggaugcu

SEQ ID NO: 417408 - RNA, 22 nt, Human
ucugugcucuucucaguaucac

SEQ ID NO: 417409 - RNA, 22 nt, Human
ucauugcaccccagucccagcu

SEQ ID NO: 417410 - RNA, 22 nt, Human
cagcugagucugagguucuuug

SEQ ID NO: 417411 - RNA, 19 nt, Human
gggaaauucacuugcuucc

SEQ ID NO: 417412 - RNA, 22 nt, Human
ccuggggcucaagauggcgccg

SEQ ID NO: 417413 - RNA, 20 nt, Human
caagcccucuuuagccugcc

SEQ ID NO: 417414 - RNA, 22 nt, Human
gagggaggcaucaugaauccag

SEQ ID NO: 417415 - RNA, 22 nt, Human
ggaggccaggguggguggaucg

SEQ ID NO: 417416 - RNA, 22 nt, Human
gcugccacgaucucugcuguag

SEQ ID NO: 417417 - RNA, 22 nt, Human
gggcagagacucagaaacagaa

SEQ ID NO: 417418 - RNA, 22 nt, Human
cuugaaagauuuggccucugug

SEQ ID NO: 417419 - RNA, 22 nt, Human
ggagacagugacuuagagacug

SEQ ID NO: 417420 - RNA, 22 nt, Human
gcugaaggaggcucugguacua

SEQ ID NO: 417421 - RNA, 22 nt, Human
agggcagagcugucuaaauggc

SEQ ID NO: 417422 - RNA, 18 nt, Human
caggaugagugaugggga

SEQ ID NO: 417423 - RNA, 22 nt, Human
cagcccaggccgacaguuccuc

SEQ ID NO: 417424 - RNA, 22 nt, Human
ugucauuuucuaaucuguuguc

SEQ ID NO: 417425 - RNA, 22 nt, Human
uaucuuuagaggaagagaaucu

SEQ ID NO: 417426 - RNA, 22 nt, Human
uggacucagaaguguucuuuua

SEQ ID NO: 417427 - RNA, 22 nt, Human
cggggacacacuggcagcuccu

SEQ ID NO: 417428 - RNA, 22 nt, Human
ucaguaacuuacuuauucaccu

SEQ ID NO: 417429 - RNA, 22 nt, Human
gaaauugucagcuucuuucagu

SEQ ID NO: 417430 - RNA, 22 nt, Human
ccaggccaaauucagucagcag

SEQ ID NO: 417431 - RNA, 20 nt, Human
ugcagcugguuucacaggga

SEQ ID NO: 417432 - RNA, 22 nt, Human
uuugagaagcaucugguccacu

SEQ ID NO: 417433 - RNA, 22 nt, Human
ugcugcuccccagcacacagca

SEQ ID NO: 417434 - RNA, 22 nt, Human
uuagauauguuuuugcuaaugc

SEQ ID NO: 417435 - RNA, 22 nt, Human
gcagggaccagggccagaucca

SEQ ID NO: 417436 - RNA, 22 nt, Human
agccugagugcuuaggacuguu

SEQ ID NO: 417437 - RNA, 22 nt, Human
aggugcagcugacaccaugugg

SEQ ID NO: 417438 - RNA, 22 nt, Human
ccacagggcucuaggcgcuucc

SEQ ID NO: 417439 - RNA, 22 nt, Human
ucagagccccuccgcuguccca

SEQ ID NO: 417440 - RNA, 22 nt, Human
uuacaagauaaccugaugcugu

SEQ ID NO: 417441 - RNA, 22 nt, Human
aggcucagucuguucaugcacu

SEQ ID NO: 417442 - RNA, 22 nt, Human
gcauuuagcuuuaaaauauuuc

SEQ ID NO: 417443 - RNA, 22 nt, Human
uccugcugagcgucugucauuu

SEQ ID NO: 417444 - RNA, 19 nt, Human
agcagccauagacaauaug

SEQ ID NO: 417445 - RNA, 23 nt, Human
ugcagccacucaggagcucagug

SEQ ID NO: 417446 - RNA, 22 nt, Human
uaauccaauggcacaauguaug

SEQ ID NO: 417447 - RNA, 22 nt, Human
gacgccucuucccugcugcacu

SEQ ID NO: 417448 - RNA, 22 nt, Human
aggagcugaaacuucucauaug

SEQ ID NO: 417449 - RNA, 22 nt, Human
gugucacaugguuuacugcagc

SEQ ID NO: 417450 - RNA, 23 nt, Human
ucuccuccuagauacagucaugg

SEQ ID NO: 417451 - RNA, 23 nt, Human
ccagcucccaggucugaggacug

SEQ ID NO: 417452 - RNA, 20 nt, Human
aggaaaaggguggugguaga

SEQ ID NO: 417453 - RNA, 22 nt, Human
uucuaguuuugccuuaucaaca

SEQ ID NO: 417454 - RNA, 22 nt, Human
gugucccaggccucuggaauua

SEQ ID NO: 417455 - RNA, 18 nt, Human
gugcugugggcaguggcc

SEQ ID NO: 417456 - RNA, 23 nt, Human
ggcugagacuacaggcgcuugcc

SEQ ID NO: 417457 - RNA, 21 nt, Human
ccacauucucauucugacugc

SEQ ID NO: 417458 - RNA, 22 nt, Human
ucuuuuggguucuuaugauuua

SEQ ID NO: 417459 - RNA, 21 nt, Human
ugguuugcggccaaaguuaaa

SEQ ID NO: 417460 - RNA, 22 nt, Human
aaaguguaaggaauuuaaguaa

SEQ ID NO: 417461 - RNA, 22 nt, Human
uaaggcagaaauaugagcaggg

SEQ ID NO: 417462 - RNA, 17 nt, Human
gcucccugaggacagcu

SEQ ID NO: 417463 - RNA, 22 nt, Human
guauuuucaagagcaguaguau

SEQ ID NO: 417464 - RNA, 22 nt, Human
cccuuccucccaggcuucugug

SEQ ID NO: 417465 - RNA, 22 nt, Human
gugggggcaggcagugcuagga

SEQ ID NO: 417466 - RNA, 22 nt, Human
cccagugccaggcacaggcagc

SEQ ID NO: 417467 - RNA, 21 nt, Human
gaaaagcaagggaguagaaca

SEQ ID NO: 417468 - RNA, 22 nt, Human
cugcccuguuuggacagcccgg

SEQ ID NO: 417469 - RNA, 22 nt, Human
gccugccuggagcuugagguga

SEQ ID NO: 417470 - RNA, 22 nt, Human
cuagagggauguuaggauagca

SEQ ID NO: 417471 - RNA, 22 nt, Human
cugccucuauaggaguccacca

SEQ ID NO: 417472 - RNA, 16 nt, Human
agccaggcugccucgg

SEQ ID NO: 417473 - RNA, 22 nt, Human
gagcuggaagucuguggucaga

SEQ ID NO: 417474 - RNA, 22 nt, Human
ugcagggagcucuggggugcag

SEQ ID NO: 417475 - RNA, 22 nt, Human
ugccaggcauguaguagacuug

SEQ ID NO: 417476 - RNA, 22 nt, Human
gggggaagacugggcuagugau

SEQ ID NO: 417477 - RNA, 22 nt, Human
agccagggagguggagguugca

SEQ ID NO: 417478 - RNA, 22 nt, Human
caggacaguuugcuuugcccug

SEQ ID NO: 417479 - RNA, 22 nt, Human
aucuaagaguuaacaucaagaa

SEQ ID NO: 417480 - RNA, 22 nt, Human
cacugcaguaacucuaggacug

SEQ ID NO: 417481 - RNA, 22 nt, Human
cagacuuucaaggagugaaggc

SEQ ID NO: 417482 - RNA, 22 nt, Human
ucccagccuuccagucugguuu

SEQ ID NO: 417483 - RNA, 22 nt, Human
agaaaguucacugguauauuuu

SEQ ID NO: 417484 - RNA, 22 nt, Human
cugagaguguggcuuccaggcc

SEQ ID NO: 417485 - RNA, 19 nt, Human
caagugaagccugggaugg

SEQ ID NO: 417486 - RNA, 22 nt, Human
cccaguggaaggaguagaagac

SEQ ID NO: 417487 - RNA, 19 nt, Human
agaggcugucaccuguagc

SEQ ID NO: 417488 - RNA, 22 nt, Human
ucaggcugcuggccagcaggcu

SEQ ID NO: 417489 - RNA, 22 nt, Human
gggaagggacuuguuuaagguc

SEQ ID NO: 417490 - RNA, 22 nt, Human
uaaacagaaagcagauguacuu

SEQ ID NO: 417491 - RNA, 20 nt, Human
ccugccugccucggcucauu

SEQ ID NO: 417492 - RNA, 22 nt, Human
cagaaacuucuggugucaaaua

SEQ ID NO: 417493 - RNA, 22 nt, Human
ugagccagaguggagugugccu

SEQ ID NO: 417494 - RNA, 20 nt, Human
caaugcacacagcugcuucu

SEQ ID NO: 417495 - RNA, 22 nt, Human
aaacuugauuuagaacuaaggc

SEQ ID NO: 417496 - RNA, 22 nt, Human
caggagcucucaucgucagggc

SEQ ID NO: 417497 - RNA, 22 nt, Human
gccugaggaaugcuccugacuu

SEQ ID NO: 417498 - RNA, 22 nt, Human
guuugcauuccaauuuagggga

SEQ ID NO: 417499 - RNA, 22 nt, Human
uuuccacuguagagauguugaa

SEQ ID NO: 417500 - RNA, 22 nt, Human
cugcuggccuagcccauccucu

SEQ ID NO: 417501 - RNA, 22 nt, Human
agcagcugcagagggcuccccc

SEQ ID NO: 417502 - RNA, 22 nt, Human
aaauguagaccuauagggaccu

SEQ ID NO: 417503 - RNA, 22 nt, Human
cagggccaagccccuuuggcug

SEQ ID NO: 417504 - RNA, 22 nt, Human
gcagaggccaggccaccagcaa

SEQ ID NO: 417505 - RNA, 22 nt, Human
uugcugaauugaauccuuuggu

SEQ ID NO: 417506 - RNA, 22 nt, Human
auaaacagaguaguugcuacug

SEQ ID NO: 417507 - RNA, 22 nt, Human
agcuucuggaagccuggcagca

SEQ ID NO: 417508 - RNA, 22 nt, Human
uggcuucaucugcagcacugcc

SEQ ID NO: 417509 - RNA, 22 nt, Human
ugggacagggaaucugaucccc

SEQ ID NO: 417510 - RNA, 22 nt, Human
gagggcuccucacauucucuau

SEQ ID NO: 417511 - RNA, 19 nt, Human
cugugcaggccgggcugag

SEQ ID NO: 417512 - RNA, 22 nt, Human
cuuccugcaggacagccaucug

SEQ ID NO: 417513 - RNA, 22 nt, Human
uccuccagugucuggggccuug

SEQ ID NO: 417514 - RNA, 22 nt, Human
cagcuugggaguuugguuuuau

SEQ ID NO: 417515 - RNA, 22 nt, Human
caguguuuaaucauugugaauu

SEQ ID NO: 417516 - RNA, 22 nt, Human
ucccagcagcauagcucagaau

SEQ ID NO: 417517 - RNA, 22 nt, Human
gggacagaaggaagugagcaca

SEQ ID NO: 417518 - RNA, 22 nt, Human
ucuuuccauggccacacagucu

SEQ ID NO: 417519 - RNA, 22 nt, Human
aagaauguuaguuucugauaca

SEQ ID NO: 417520 - RNA, 22 nt, Human
aaggcuaugaucuuuuucauga

SEQ ID NO: 417521 - RNA, 22 nt, Human
cccaggcacauccacucuguga

SEQ ID NO: 417522 - RNA, 22 nt, Human
uuuauguaauuucauaggugug

SEQ ID NO: 417523 - RNA, 22 nt, Human
uugcugaaaucuaugacauccu

SEQ ID NO: 417524 - RNA, 22 nt, Human
aaggcucucugauggcagcagu

SEQ ID NO: 417525 - RNA, 22 nt, Human
ugaagccagucaauguuaaguu

SEQ ID NO: 417526 - RNA, 22 nt, Human
ugcuuccuucccguucuucucc

SEQ ID NO: 417527 - RNA, 22 nt, Human
uguggucucguuauguugccca

SEQ ID NO: 417528 - RNA, 22 nt, Human
ccagcuggugggucuuucucug

SEQ ID NO: 417529 - RNA, 22 nt, Human
auacaaaaauuagccgggagua

SEQ ID NO: 417530 - RNA, 22 nt, Human
agcugugguucugggcagcgac

SEQ ID NO: 417531 - RNA, 22 nt, Human
uugguuuaggaacuggcuugga

SEQ ID NO: 417532 - RNA, 22 nt, Human
aggcugagcugguagugaguac

SEQ ID NO: 417533 - RNA, 22 nt, Human
agcuguguggugucugacagcu

SEQ ID NO: 417534 - RNA, 19 nt, Human
ggcuggaguggccaucugu

SEQ ID NO: 417535 - RNA, 22 nt, Human
ggacacagcugcagccacaccc

SEQ ID NO: 417536 - RNA, 22 nt, Human
acagaauacuacagacugguua

SEQ ID NO: 417537 - RNA, 22 nt, Human
uccuucagucuucugagccaua

SEQ ID NO: 417538 - RNA, 20 nt, Human
gcccacucuaauccacuguc

SEQ ID NO: 417539 - RNA, 22 nt, Human
gggcagauggggcacaggcuga

SEQ ID NO: 417540 - RNA, 22 nt, Human
acccagccuacaaagcucaccu

SEQ ID NO: 417541 - RNA, 19 nt, Human
gcaggcaguggcauucgga

SEQ ID NO: 417542 - RNA, 22 nt, Human
gcuuccucgcugggcagaggca

SEQ ID NO: 417543 - RNA, 22 nt, Human
ugcaggagcagagauggcugga

SEQ ID NO: 417544 - RNA, 22 nt, Human
ucuggcagggguucugcacuug

SEQ ID NO: 417545 - RNA, 21 nt, Human
agaguaauuccugcuggaaag

SEQ ID NO: 417546 - RNA, 22 nt, Human
cagaggcugccagccaugugca

SEQ ID NO: 417547 - RNA, 22 nt, Human
aaaucaguucucccuuucuuca

SEQ ID NO: 417548 - RNA, 22 nt, Human
acagauauaaacuauaguagug

SEQ ID NO: 417549 - RNA, 22 nt, Human
guguuuggucagacguccgggg

SEQ ID NO: 417550 - RNA, 22 nt, Human
gcuggccucaucacugacuucu

SEQ ID NO: 417551 - RNA, 22 nt, Human
agaggucauaucucagaagaga

SEQ ID NO: 417552 - RNA, 19 nt, Human
cugagagaugcuucacaca

SEQ ID NO: 417553 - RNA, 22 nt, Human
cacagcagaaauaugaaggcag

SEQ ID NO: 417554 - RNA, 22 nt, Human
gacaugcaacaauuuggcauuu

SEQ ID NO: 417555 - RNA, 22 nt, Human
gagagcuggccagcuucaguau

SEQ ID NO: 417556 - RNA, 22 nt, Human
aucaguuucuaccauguggaau

SEQ ID NO: 417557 - RNA, 22 nt, Human
cugcccuggcagccuaccaugg

SEQ ID NO: 417558 - RNA, 22 nt, Human
uuauucuucuucucuugccagg

SEQ ID NO: 417559 - RNA, 22 nt, Human
gaggcaugucuggccuguccca

SEQ ID NO: 417560 - RNA, 23 nt, Human
uugugggcagauuccauggggag

SEQ ID NO: 417561 - RNA, 17 nt, Human
uccuucagugccucugc

SEQ ID NO: 417562 - RNA, 22 nt, Human
agggaggaguccucaaagucau

SEQ ID NO: 417563 - RNA, 22 nt, Human
cuggagcuccagggucuccucu

SEQ ID NO: 417564 - RNA, 22 nt, Human
ugcccaggguggagugcagcgg

SEQ ID NO: 417565 - RNA, 22 nt, Human
agcucccauuaucuucugaaac

SEQ ID NO: 417566 - RNA, 22 nt, Human
aggcugaggggcgagggacccu

SEQ ID NO: 417567 - RNA, 22 nt, Human
aggagaaggaagugcaucacua

SEQ ID NO: 417568 - RNA, 22 nt, Human
gccuggagugguccugcugccc

SEQ ID NO: 417569 - RNA, 22 nt, Human
uuggccacacucacuagagccc

SEQ ID NO: 417570 - RNA, 22 nt, Human
aggccuguuccuuccugggcac

SEQ ID NO: 417571 - RNA, 22 nt, Human
guuugcauguauuaagucaaua

SEQ ID NO: 417572 - RNA, 22 nt, Human
ugugcagggaagggcaugcuau

SEQ ID NO: 417573 - RNA, 22 nt, Human
ugcaggcucacccuggagcuga

SEQ ID NO: 417574 - RNA, 22 nt, Human
auggacagugugucuguuucca

SEQ ID NO: 417575 - RNA, 22 nt, Human
agguacagcaauauaagagguc

SEQ ID NO: 417576 - RNA, 16 nt, Human
cuuccucuucacuggc

SEQ ID NO: 417577 - RNA, 22 nt, Human
gcugagggcuguaacagcagag

SEQ ID NO: 417578 - RNA, 19 nt, Human
cccucaggucugagcaguc

SEQ ID NO: 417579 - RNA, 19 nt, Human
gccugggaugggcagaacu

SEQ ID NO: 417580 - RNA, 22 nt, Human
cagaggcauuacugaaaaggug

SEQ ID NO: 417581 - RNA, 22 nt, Human
cuuacauuaaguaagagauuga

SEQ ID NO: 417582 - RNA, 22 nt, Human
aaggcauauauucuaaacagga

SEQ ID NO: 417583 - RNA, 22 nt, Human
cugugccuuuguagcugugccu

SEQ ID NO: 417584 - RNA, 22 nt, Human
ggcugaggcucaugccaucuug

SEQ ID NO: 417585 - RNA, 22 nt, Human
gcagagaggauauuauugucca

SEQ ID NO: 417586 - RNA, 23 nt, Human
cugcuguguuggucucgauggga

SEQ ID NO: 417587 - RNA, 22 nt, Human
aagggcaggaaaagauggaugu

SEQ ID NO: 417588 - RNA, 22 nt, Human
ucagggacugcagagggaagcu

SEQ ID NO: 417589 - RNA, 22 nt, Human
uuagucaauagugaauauagag

SEQ ID NO: 417590 - RNA, 22 nt, Human
ugagaagcaguuucaguaagaa

SEQ ID NO: 417591 - RNA, 17 nt, Human
gcuuccugugcugggga

SEQ ID NO: 417592 - RNA, 22 nt, Human
aggggccauuguucugcccgcu

SEQ ID NO: 417593 - RNA, 22 nt, Human
cucuuccuacagucugcuaugc

SEQ ID NO: 417594 - RNA, 22 nt, Human
aggagagaauguuccaggcuug

SEQ ID NO: 417595 - RNA, 22 nt, Human
caguggccaugguggcaggggu

SEQ ID NO: 417596 - RNA, 22 nt, Human
ccagcccuugcugaaggguggc

SEQ ID NO: 417597 - RNA, 22 nt, Human
gagugcaguaugagaggcugcu

SEQ ID NO: 417598 - RNA, 18 nt, Human
acacacacaccuguguau

SEQ ID NO: 417599 - RNA, 22 nt, Human
uucaguuucagucuugcaaaaa

SEQ ID NO: 417600 - RNA, 22 nt, Human
gggacuggcacagggcugggag

SEQ ID NO: 417601 - RNA, 22 nt, Human
uuacaguuuaguccaagccaga

SEQ ID NO: 417602 - RNA, 22 nt, Human
ugagaaagugggugccuagcaa

SEQ ID NO: 417603 - RNA, 22 nt, Human
uuucuacauuuguaaccagauu

SEQ ID NO: 417604 - RNA, 22 nt, Human
gcucccacgcaauucuuuucag

SEQ ID NO: 417605 - RNA, 22 nt, Human
aaaaaugugaccacaggguguu

SEQ ID NO: 417606 - RNA, 22 nt, Human
ggggccuguagagcuucaggga

SEQ ID NO: 417607 - RNA, 22 nt, Human
caggacagguguucuagaucag

SEQ ID NO: 417608 - RNA, 22 nt, Human
cuauugaaaguguacaauucaa

SEQ ID NO: 417609 - RNA, 22 nt, Human
gcaccugcaggaugagccaggg

SEQ ID NO: 417610 - RNA, 22 nt, Human
agaaagaacgcacuugugcugc

SEQ ID NO: 417611 - RNA, 22 nt, Human
uauaagaaacaaggcaaauuuu

SEQ ID NO: 417612 - RNA, 22 nt, Human
aguggagaauaugcagaaagcc

SEQ ID NO: 417613 - RNA, 18 nt, Human
aggcaggugcuggaaguc

SEQ ID NO: 417614 - RNA, 22 nt, Human
gccaaaucacagggccaaaagc

SEQ ID NO: 417615 - RNA, 22 nt, Human
cagaguucaaagccugcuggga

SEQ ID NO: 417616 - RNA, 22 nt, Human
acaguccuguacaggccauauc

SEQ ID NO: 417617 - RNA, 22 nt, Human
agcugccaucugaagaacugca

SEQ ID NO: 417618 - RNA, 22 nt, Human
gcagggcagcugaagcuaggug

SEQ ID NO: 417619 - RNA, 17 nt, Human
ugcauuguaggcuagcc

SEQ ID NO: 417620 - RNA, 22 nt, Human
gcaaaggcuagagacacaggga

SEQ ID NO: 417621 - RNA, 22 nt, Human
caggcagcucaaccuugggagc

SEQ ID NO: 417622 - RNA, 17 nt, Human
uuuucucucuuggauuc

SEQ ID NO: 417623 - RNA, 22 nt, Human
cagagcaugaauaaaaguuaca

SEQ ID NO: 417624 - RNA, 22 nt, Human
acaggccugagauuuugcauuu

SEQ ID NO: 417625 - RNA, 22 nt, Human
aauuuguuacacagcaauauaa

SEQ ID NO: 417626 - RNA, 22 nt, Human
gaaggcugaugacagauucugc

SEQ ID NO: 417627 - RNA, 22 nt, Human
cacagaggacuguagcggggag

SEQ ID NO: 417628 - RNA, 22 nt, Human
gcacagaagagcuuuggaauga

SEQ ID NO: 417629 - RNA, 19 nt, Human
uuagccauccacagugaaa

SEQ ID NO: 417630 - RNA, 22 nt, Human
cagccagccucucaaccaugca

SEQ ID NO: 417631 - RNA, 22 nt, Human
gggcagguuggcaucccgggca

SEQ ID NO: 417632 - RNA, 22 nt, Human
cccaggagguggagguugcagu

SEQ ID NO: 417633 - RNA, 22 nt, Human
caggguggcaggcaccauggcc

SEQ ID NO: 417634 - RNA, 22 nt, Human
uagaaaucuacuuagacuuucu

SEQ ID NO: 417635 - RNA, 22 nt, Human
ccaggcagagggauccccaucc

SEQ ID NO: 417636 - RNA, 22 nt, Human
ucucagagggaggauuacugcc

SEQ ID NO: 417637 - RNA, 22 nt, Human
uccuuuguugagauaaauuggg

SEQ ID NO: 417638 - RNA, 22 nt, Human
agccucugguccucccucagcu

SEQ ID NO: 417639 - RNA, 22 nt, Human
cauuuauucucagauccuuguc

SEQ ID NO: 417640 - RNA, 22 nt, Human
gcacacccucucaccagcacug

SEQ ID NO: 417641 - RNA, 21 nt, Human
uccuccuucaaguccuggccu

SEQ ID NO: 417642 - RNA, 22 nt, Human
augcaucauggaaaacucaguu

SEQ ID NO: 417643 - RNA, 22 nt, Human
gcucugucauuuugcagacacu

SEQ ID NO: 417644 - RNA, 22 nt, Human
cuuccucccggcccaugcucug

SEQ ID NO: 417645 - RNA, 22 nt, Human
cagggcuagugacaccccaguc

SEQ ID NO: 417646 - RNA, 22 nt, Human
ggagagcaggguccugagauac

SEQ ID NO: 417647 - RNA, 22 nt, Human
guacauuuuacuuuguuugaau

SEQ ID NO: 417648 - RNA, 22 nt, Human
ucaguggagcuaagcaugagau

SEQ ID NO: 417649 - RNA, 21 nt, Human
acagagccgggcacaaagcug

SEQ ID NO: 417650 - RNA, 22 nt, Human
cagagcucuauguucauggagg

SEQ ID NO: 417651 - RNA, 22 nt, Human
uggcucaggauaauuuucccaa

SEQ ID NO: 417652 - RNA, 22 nt, Human
ugaccugcguaggugguuucug

SEQ ID NO: 417653 - RNA, 20 nt, Human
gagauggacagaugaagggg

SEQ ID NO: 417654 - RNA, 22 nt, Human
ggagggcaucaaucaggccugg

SEQ ID NO: 417655 - RNA, 22 nt, Human
auguaucagauaaagcaugugg

SEQ ID NO: 417656 - RNA, 22 nt, Human
guugggaagcagauggaugagc

SEQ ID NO: 417657 - RNA, 22 nt, Human
gggagccaugcuggucuucuuu

SEQ ID NO: 417658 - RNA, 22 nt, Human
ggccuugggcagacacgucaca

SEQ ID NO: 417659 - RNA, 22 nt, Human
augcccaaugucacaauuuuug

SEQ ID NO: 417660 - RNA, 22 nt, Human
aaagacugcaaaaacgcacaga

SEQ ID NO: 417661 - RNA, 22 nt, Human
ugcauccuuaaccagcaucacu

SEQ ID NO: 417662 - RNA, 22 nt, Human
ggagggagcauccccuugcuga

SEQ ID NO: 417663 - RNA, 22 nt, Human
ucucagagcuucagaaagcacc

SEQ ID NO: 417664 - RNA, 22 nt, Human
uccuggcccgaucccugugaag

SEQ ID NO: 417665 - RNA, 22 nt, Human
cuggggacuugcagacacaauu

SEQ ID NO: 417666 - RNA, 19 nt, Human
ccaggccuccugggagguc

SEQ ID NO: 417667 - RNA, 22 nt, Human
ccuggaagauucaccacuacca

SEQ ID NO: 417668 - RNA, 22 nt, Human
cugaaggacacgugaggagcca

SEQ ID NO: 417669 - RNA, 22 nt, Human
gucugcccucacgccagcuggg

SEQ ID NO: 417670 - RNA, 22 nt, Human
gggcauggaggucugucugcag

SEQ ID NO: 417671 - RNA, 22 nt, Human
uuagagccaguuacaaggucaa

SEQ ID NO: 417672 - RNA, 22 nt, Human
ucuuacagaaaauagauaacau

SEQ ID NO: 417673 - RNA, 22 nt, Human
cuucaggauuuaggaagaugaa

SEQ ID NO: 417674 - RNA, 22 nt, Human
agagacagaggcaauauagcuu

SEQ ID NO: 417675 - RNA, 22 nt, Human
auccuugacacacuccaguacu

SEQ ID NO: 417676 - RNA, 22 nt, Human
caugggagguuggcuuggcaug

SEQ ID NO: 417677 - RNA, 22 nt, Human
ggcaaggccuugcccagcauuc

SEQ ID NO: 417678 - RNA, 22 nt, Human
auaaaacuuauuagaauugugu

SEQ ID NO: 417679 - RNA, 23 nt, Human
gggcugcuccaggccaaggcugg

SEQ ID NO: 417680 - RNA, 22 nt, Human
ggagauaguccaggugaaggga

SEQ ID NO: 417681 - RNA, 22 nt, Human
cacuguacuggguugaaggacg

SEQ ID NO: 417682 - RNA, 22 nt, Human
ucucccaggugggugccuggag

SEQ ID NO: 417683 - RNA, 22 nt, Human
uuuguaaaggccugaauuucag

SEQ ID NO: 417684 - RNA, 22 nt, Human
cuggaggcugaguugggucucc

SEQ ID NO: 417685 - RNA, 22 nt, Human
agaggccaucugcucugugggg

SEQ ID NO: 417686 - RNA, 21 nt, Human
agcagagugcuuugacuuugu

SEQ ID NO: 417687 - RNA, 22 nt, Human
agagacaggguuuugccauguu

SEQ ID NO: 417688 - RNA, 22 nt, Human
acagaaaugauguuuggcaaua

SEQ ID NO: 417689 - RNA, 22 nt, Human
cugugcugauucagcacaggcc

SEQ ID NO: 417690 - RNA, 22 nt, Human
agauggggcagaauggagccau

SEQ ID NO: 417691 - RNA, 22 nt, Human
cagcugccaagaaucuuuucua

SEQ ID NO: 417692 - RNA, 22 nt, Human
cagcucucacacccuccuccca

SEQ ID NO: 417693 - RNA, 22 nt, Human
ccuuguccucugguuuccuguu

SEQ ID NO: 417694 - RNA, 21 nt, Human
gcucccuggcugugugaccug

SEQ ID NO: 417695 - RNA, 22 nt, Human
caagaaauguuuacugagcauc

SEQ ID NO: 417696 - RNA, 22 nt, Human
aggcuggcccuacuggcugccu

SEQ ID NO: 417697 - RNA, 22 nt, Human
gauuucuucauucauuagaugg

SEQ ID NO: 417698 - RNA, 22 nt, Human
aacaaauguguuuuguaauuaa

SEQ ID NO: 417699 - RNA, 22 nt, Human
ggcugggcugcugggucagagc

SEQ ID NO: 417700 - RNA, 22 nt, Human
auggauaagaacaaauaucuga

SEQ ID NO: 417701 - RNA, 22 nt, Human
gcagaauguaggccuucagugu

SEQ ID NO: 417702 - RNA, 22 nt, Human
ccagcuuuggaguguuguugcu

SEQ ID NO: 417703 - RNA, 21 nt, Human
uggcucugcucagagcagucc

SEQ ID NO: 417704 - RNA, 22 nt, Human
cugcagagcagccaguccccca

SEQ ID NO: 417705 - RNA, 22 nt, Human
acagggcaugugcaagagacau

SEQ ID NO: 417706 - RNA, 22 nt, Human
ucaacacucuuuggcacaguua

SEQ ID NO: 417707 - RNA, 22 nt, Human
uauuucuuuucgugacuuauug

SEQ ID NO: 417708 - RNA, 22 nt, Human
gagcagugagugaauguugccu

SEQ ID NO: 417709 - RNA, 22 nt, Human
cugagccauccauaccagcuua

SEQ ID NO: 417710 - RNA, 22 nt, Human
ugggcacaaacaucugccuguu

SEQ ID NO: 417711 - RNA, 22 nt, Human
cagcuucucagaaagcugaggu

SEQ ID NO: 417712 - RNA, 22 nt, Human
aagaauucacugguagagucaa

SEQ ID NO: 417713 - RNA, 22 nt, Human
ugcauauuuguaugauguuuag

SEQ ID NO: 417714 - RNA, 22 nt, Human
ugucucugggugauucaguccu

SEQ ID NO: 417715 - RNA, 22 nt, Human
ugggccugugaugcugggcuau

SEQ ID NO: 417716 - RNA, 22 nt, Human
auguccaguuucuacacacaua

SEQ ID NO: 417717 - RNA, 22 nt, Human
uucaggauuauacucucuuccc

SEQ ID NO: 417718 - RNA, 23 nt, Human
uagagcagggaaaucugucagag

SEQ ID NO: 417719 - RNA, 22 nt, Human
guauuagggccaaaggcaggaa

SEQ ID NO: 417720 - RNA, 22 nt, Human
auuaagggccaauccuccagcc

SEQ ID NO: 417721 - RNA, 22 nt, Human
gcagccucaaacuccccagcuc

SEQ ID NO: 417722 - RNA, 18 nt, Human
aggcuucuuggcucaguc

SEQ ID NO: 417723 - RNA, 23 nt, Human
cagagcugauuaaacuuaaucuc

SEQ ID NO: 417724 - RNA, 22 nt, Human
cccaggaggccaagguugcagu

SEQ ID NO: 417725 - RNA, 22 nt, Human
ccugucuggccaccagggcgau

SEQ ID NO: 417726 - RNA, 22 nt, Human
gcaggcagagagggguuuccag

SEQ ID NO: 417727 - RNA, 22 nt, Human
gagcacagccaaaguaagaagg

SEQ ID NO: 417728 - RNA, 22 nt, Human
uccucaggauguggaguagaau

SEQ ID NO: 417729 - RNA, 22 nt, Human
gcauuuauuucuuuacugcauc

SEQ ID NO: 417730 - RNA, 22 nt, Human
ucuucucccaucuccaggcagg

SEQ ID NO: 417731 - RNA, 22 nt, Human
uccugccuugccugggacauca

SEQ ID NO: 417732 - RNA, 22 nt, Human
ugcagcucauugguguccuggu

SEQ ID NO: 417733 - RNA, 22 nt, Human
cuccagggggcauccacacagc

SEQ ID NO: 417734 - RNA, 22 nt, Human
guaagcaucugucucuucugca

SEQ ID NO: 417735 - RNA, 22 nt, Human
augaggcaucuaacauugcaaa

SEQ ID NO: 417736 - RNA, 22 nt, Human
aaaucugguucaguaaguccuc

SEQ ID NO: 417737 - RNA, 22 nt, Human
gaugguuuggaaugaaguagcu

SEQ ID NO: 417738 - RNA, 22 nt, Human
ucuguacaccaggggccauucu

SEQ ID NO: 417739 - RNA, 22 nt, Human
agcuuuaucuucaccugggaau

SEQ ID NO: 417740 - RNA, 20 nt, Human
aggcugggguguuuugccca

SEQ ID NO: 417741 - RNA, 22 nt, Human
gaaaaugugucaucccuacugu

SEQ ID NO: 417742 - RNA, 22 nt, Human
gccagagcugagacacgagucc

SEQ ID NO: 417743 - RNA, 22 nt, Human
uacuuguuaucaucuuuuccuu

SEQ ID NO: 417744 - RNA, 22 nt, Human
gugccuggcaugcgccggugcu

SEQ ID NO: 417745 - RNA, 22 nt, Human
ucccacacagcccgcucaccgg

SEQ ID NO: 417746 - RNA, 17 nt, Human
cacaggugugguuugag

SEQ ID NO: 417747 - RNA, 22 nt, Human
accugagaccuaaucugacugu

SEQ ID NO: 417748 - RNA, 22 nt, Human
ugguagggacacuaugcagaaa

SEQ ID NO: 417749 - RNA, 22 nt, Human
ugcugggcuagaagcugaggcc

SEQ ID NO: 417750 - RNA, 22 nt, Human
accugaggcuguuagucuaggu

SEQ ID NO: 417751 - RNA, 20 nt, Human
ucuggcucuuugcuccuccc

SEQ ID NO: 417752 - RNA, 22 nt, Human
ucccaggcuggggccaggugac

SEQ ID NO: 417753 - RNA, 22 nt, Human
acugugugggccgcucacuggg

SEQ ID NO: 417754 - RNA, 22 nt, Human
uggaaagaaaguaaaggcguau

SEQ ID NO: 417755 - RNA, 22 nt, Human
uuuccucugacugcuccccugc

SEQ ID NO: 417756 - RNA, 22 nt, Human
uggguaaacugggucuggagag

SEQ ID NO: 417757 - RNA, 22 nt, Human
ugggcuguccagcaccugggcu

SEQ ID NO: 417758 - RNA, 22 nt, Human
aucacaaaggcugcuucaugau

SEQ ID NO: 417759 - RNA, 22 nt, Human
agaaauguggaucguuuuaaaa

SEQ ID NO: 417760 - RNA, 20 nt, Human
gugggcagcaggcauacugg

SEQ ID NO: 417761 - RNA, 22 nt, Human
ggcuggcuugccaagcucaggg

SEQ ID NO: 417762 - RNA, 22 nt, Human
cccagccucugggcucacccaa

SEQ ID NO: 417763 - RNA, 22 nt, Human
uuccaaagucauguugcugaua

SEQ ID NO: 417764 - RNA, 22 nt, Human
ucgagucauguucucccauuaa

SEQ ID NO: 417765 - RNA, 22 nt, Human
cccuggugguacggcacuggca

SEQ ID NO: 417766 - RNA, 22 nt, Human
gaggagaagcuaagaaacacag

SEQ ID NO: 417767 - RNA, 22 nt, Human
ggucccugaagaggccuggggu

SEQ ID NO: 417768 - RNA, 22 nt, Human
ucuuugcuccacacucuagaga

SEQ ID NO: 417769 - RNA, 22 nt, Human
ccuccaggaacuugagagacac

SEQ ID NO: 417770 - RNA, 22 nt, Human
cucugguguccuuuagaauuua

SEQ ID NO: 417771 - RNA, 22 nt, Human
uaagcauaacuaaaaaugauuu

SEQ ID NO: 417772 - RNA, 22 nt, Human
guuauuuuaucucugagagguu

SEQ ID NO: 417773 - RNA, 22 nt, Human
ggcuggguuauuuauggccaag

SEQ ID NO: 417774 - RNA, 22 nt, Human
guccucuguguaggcugcagac

SEQ ID NO: 417775 - RNA, 22 nt, Human
aaaugguauuuacucuguauua

SEQ ID NO: 417776 - RNA, 22 nt, Human
gggcugccaagccugccugccu

SEQ ID NO: 417777 - RNA, 22 nt, Human
ccaaaguccauaguuuacauaa

SEQ ID NO: 417778 - RNA, 22 nt, Human
cauugcacucuggcuggaacgg

SEQ ID NO: 417779 - RNA, 22 nt, Human
cagcauugaucccaggcugugg

SEQ ID NO: 417780 - RNA, 22 nt, Human
aauccagguggcggagguugug

SEQ ID NO: 417781 - RNA, 22 nt, Human
cagggcuggauuucauuucuag

SEQ ID NO: 417782 - RNA, 22 nt, Human
ugcuggcuguauaugugagagu

SEQ ID NO: 417783 - RNA, 20 nt, Human
aggcugccaggucucacauc

SEQ ID NO: 417784 - RNA, 22 nt, Human
gagcugcccugagcuuugcaug

SEQ ID NO: 417785 - RNA, 22 nt, Human
uugcauaaaagaguauaucuua

SEQ ID NO: 417786 - RNA, 22 nt, Human
cagcagcugcgugcccaggccg

SEQ ID NO: 417787 - RNA, 22 nt, Human
ccaggugugauuuggcaguguc

SEQ ID NO: 417788 - RNA, 22 nt, Human
ggccaggcacugugugagauau

SEQ ID NO: 417789 - RNA, 22 nt, Human
gaaaggucuuccggucuuccag

SEQ ID NO: 417790 - RNA, 22 nt, Human
ugcagggcuuccucuuggaguu

SEQ ID NO: 417791 - RNA, 22 nt, Human
gcugagaguccaggaaaacauc

SEQ ID NO: 417792 - RNA, 22 nt, Human
cagaagaggacuggguagcuca

SEQ ID NO: 417793 - RNA, 22 nt, Human
uaaacaaggguuacugagcaug

SEQ ID NO: 417794 - RNA, 22 nt, Human
caugcagugacucagacacagg

SEQ ID NO: 417795 - RNA, 22 nt, Human
aagcuuuaugacuuggagacag

SEQ ID NO: 417796 - RNA, 22 nt, Human
uuuacucuugcuacacaacugu

SEQ ID NO: 417797 - RNA, 22 nt, Human
agggaaggagguuagaacccac

SEQ ID NO: 417798 - RNA, 22 nt, Human
cagcuugcuaauuuugacuuca

SEQ ID NO: 417799 - RNA, 20 nt, Human
ggagcugcccugggcuggag

SEQ ID NO: 417800 - RNA, 22 nt, Human
acagaauugaaaguauaaucug

SEQ ID NO: 417801 - RNA, 22 nt, Human
gggcugagagugacuguucugu

SEQ ID NO: 417802 - RNA, 22 nt, Human
ccuggcucuguccucgcgcaaa

SEQ ID NO: 417803 - RNA, 22 nt, Human
guggugcauccuugaguaagcu

SEQ ID NO: 417804 - RNA, 23 nt, Human
agacccagagacuggcucugcuc

SEQ ID NO: 417805 - RNA, 22 nt, Human
aggcugaggcagguggaucacu

SEQ ID NO: 417806 - RNA, 22 nt, Human
augggcaguguauuggaaggaa

SEQ ID NO: 417807 - RNA, 22 nt, Human
ccugcaggggagagacuucuag

SEQ ID NO: 417808 - RNA, 22 nt, Human
caggguugcaugcaucuguggg

SEQ ID NO: 417809 - RNA, 22 nt, Human
auggcagagaaagcgagccaca

SEQ ID NO: 417810 - RNA, 22 nt, Human
gugcccugguccccagcauaua

SEQ ID NO: 417811 - RNA, 20 nt, Human
cuuggccuacuuagcuuugu

SEQ ID NO: 417812 - RNA, 22 nt, Human
ucucuccuuaucauuguguuua

SEQ ID NO: 417813 - RNA, 22 nt, Human
caguggaagcuggcugugaaga

SEQ ID NO: 417814 - RNA, 22 nt, Human
cagcuuccaucuccacugcccu

SEQ ID NO: 417815 - RNA, 22 nt, Human
aaugaugguuaaacacuggagg

SEQ ID NO: 417816 - RNA, 22 nt, Human
cuccugaguaguagcauuguca

SEQ ID NO: 417817 - RNA, 22 nt, Human
cagguaagagacggauuggccc

SEQ ID NO: 417818 - RNA, 17 nt, Human
gccucugcuugugucau

SEQ ID NO: 417819 - RNA, 22 nt, Human
uuucaauguaacauuuccaggc

SEQ ID NO: 417820 - RNA, 22 nt, Human
ucaauucaacacaugcacauug

SEQ ID NO: 417821 - RNA, 22 nt, Human
agaucucaccucuguguauuau

SEQ ID NO: 417822 - RNA, 22 nt, Human
ccagagagaguacugggcucug

SEQ ID NO: 417823 - RNA, 18 nt, Human
ugggcugccuggccucug

SEQ ID NO: 417824 - RNA, 22 nt, Human
cccaggcuggagugcaauggug

SEQ ID NO: 417825 - RNA, 22 nt, Human
agggugggcuagacucuucccc

SEQ ID NO: 417826 - RNA, 22 nt, Human
ccagcugcgggcaucgagaguu

SEQ ID NO: 417827 - RNA, 22 nt, Human
ccugucuguauugguuugcuau

SEQ ID NO: 417828 - RNA, 22 nt, Human
cauugaaaccuaacauaggcug

SEQ ID NO: 417829 - RNA, 22 nt, Human
ccagccuggacugggucuugug

SEQ ID NO: 417830 - RNA, 21 nt, Human
cugccuugaaugguacuggga

SEQ ID NO: 417831 - RNA, 22 nt, Human
ugccugucuucaggagugucac

SEQ ID NO: 417832 - RNA, 22 nt, Human
gccuggugguauccuggcaaga

SEQ ID NO: 417833 - RNA, 22 nt, Human
gggaucagaaacauagcccuga

SEQ ID NO: 417834 - RNA, 22 nt, Human
aggccagcucacccuggcuccu

SEQ ID NO: 417835 - RNA, 22 nt, Human
agggccagggaaacgaucagca

SEQ ID NO: 417836 - RNA, 22 nt, Human
ucccagcauaacaaacugcccg

SEQ ID NO: 417837 - RNA, 22 nt, Human
ugcuuaaaaugaugauuauuuu

SEQ ID NO: 417838 - RNA, 21 nt, Human
ccaggcuccugaggcugguca

SEQ ID NO: 417839 - RNA, 20 nt, Human
aggaagccaaaggcugucuu

SEQ ID NO: 417840 - RNA, 22 nt, Human
aauguauaaaguguuaauaacu

SEQ ID NO: 417841 - RNA, 22 nt, Human
ggcccagcacagugcuuggggg

SEQ ID NO: 417842 - RNA, 22 nt, Human
acauuucugagcagggagcugu

SEQ ID NO: 417843 - RNA, 22 nt, Human
cccugcagggaggauucugaag

SEQ ID NO: 417844 - RNA, 22 nt, Human
acugcagggcauccuggccaag

SEQ ID NO: 417845 - RNA, 22 nt, Human
ugaggccuuuucugucuggcua

SEQ ID NO: 417846 - RNA, 22 nt, Human
acuuguguaacacagaaagaac

SEQ ID NO: 417847 - RNA, 22 nt, Human
aaugauuuggcaaaggaaucca

SEQ ID NO: 417848 - RNA, 22 nt, Human
aguuuuucuccccuggcuucau

SEQ ID NO: 417849 - RNA, 18 nt, Human
agugucuggauauuuggg

SEQ ID NO: 417850 - RNA, 22 nt, Human
gacaagacagcuugcagacaac

SEQ ID NO: 417851 - RNA, 22 nt, Human
cacuguuuuauuccaacauagg

SEQ ID NO: 417852 - RNA, 22 nt, Human
uaccaaaagcuuguuucauaca

SEQ ID NO: 417853 - RNA, 22 nt, Human
agcagggcuuugucucugugaa

SEQ ID NO: 417854 - RNA, 22 nt, Human
gccagaagggguggauccaggc

SEQ ID NO: 417855 - RNA, 20 nt, Human
acauugauuauguuuguaga

SEQ ID NO: 417856 - RNA, 22 nt, Human
ugcauuaucuuuaauguucuca

SEQ ID NO: 417857 - RNA, 22 nt, Human
caaaauucugcauuucuaauaa

SEQ ID NO: 417858 - RNA, 22 nt, Human
auuauucuuaugucaucauggc

SEQ ID NO: 417859 - RNA, 22 nt, Human
aaguccagguccucauuccauc

SEQ ID NO: 417860 - RNA, 23 nt, Human
agggcugaaugcagagaagcaga

SEQ ID NO: 417861 - RNA, 22 nt, Human
cgggcuggcugcagcugcugga

SEQ ID NO: 417862 - RNA, 22 nt, Human
ccagaggagggcucugaugagg

SEQ ID NO: 417863 - RNA, 23 nt, Human
aggauguaggauguauggcagag

SEQ ID NO: 417864 - RNA, 22 nt, Human
agggacuuguguccuauguaug

SEQ ID NO: 417865 - RNA, 22 nt, Human
aagguacaguuuuaagaauaag

SEQ ID NO: 417866 - RNA, 22 nt, Human
gcccagugguaaaagcaggccu

SEQ ID NO: 417867 - RNA, 22 nt, Human
aauaaauguuaagauugucuca

SEQ ID NO: 417868 - RNA, 18 nt, Human
gagagcugcuaccuagcu

SEQ ID NO: 417869 - RNA, 22 nt, Human
ccagggccaagagaccucgagg

SEQ ID NO: 417870 - RNA, 22 nt, Human
gugcuuccugccuggugccuuu

SEQ ID NO: 417871 - RNA, 22 nt, Human
uuguggcagaccaugagucuaa

SEQ ID NO: 417872 - RNA, 22 nt, Human
ccugucuggccuuccacggggg

SEQ ID NO: 417873 - RNA, 19 nt, Human
uugaaagauuagcuuucua

SEQ ID NO: 417874 - RNA, 22 nt, Human
ucacagugaugacgugggagca

SEQ ID NO: 417875 - RNA, 22 nt, Human
guguggcuaccucagaggagca

SEQ ID NO: 417876 - RNA, 22 nt, Human
uauucuugucuuuuccagaaau

SEQ ID NO: 417877 - RNA, 22 nt, Human
ucuggcucaaaauacguacucu

SEQ ID NO: 417878 - RNA, 22 nt, Human
cucucuucccgugaguguugca

SEQ ID NO: 417879 - RNA, 22 nt, Human
ggcaggagaaaggucucuucuu

SEQ ID NO: 417880 - RNA, 22 nt, Human
ggaggcaggaaagacagguuca

SEQ ID NO: 417881 - RNA, 20 nt, Human
cuuguacaugauaaagauuu

SEQ ID NO: 417882 - RNA, 22 nt, Human
cuggggcucacuuuggucaggc

SEQ ID NO: 417883 - RNA, 22 nt, Human
aucacauugccagugauuaccc

SEQ ID NO: 417884 - RNA, 22 nt, Human
aauauuuguuaguguuuuaaug

SEQ ID NO: 417885 - RNA, 22 nt, Human
ucagcagucacauguuguccca

SEQ ID NO: 417886 - RNA, 22 nt, Human
ugagugccugaacauagaguag

SEQ ID NO: 417887 - RNA, 21 nt, Human
aaagugguaaggauuauuuug

SEQ ID NO: 417888 - RNA, 22 nt, Human
acauaauggacaauaaugcauc

SEQ ID NO: 417889 - RNA, 22 nt, Human
uggcucagcugacucggcuucu

SEQ ID NO: 417890 - RNA, 22 nt, Human
agugcauuauauguuucaaugg

SEQ ID NO: 417891 - RNA, 22 nt, Human
ugggugggagcgcccugucugg

SEQ ID NO: 417892 - RNA, 22 nt, Human
gccaguggcccucuggagaagg

SEQ ID NO: 417893 - RNA, 22 nt, Human
aggcuauuuccacucuucucau

SEQ ID NO: 417894 - RNA, 22 nt, Human
acuucuugggacccuggcaccg

SEQ ID NO: 417895 - RNA, 22 nt, Human
uggcuggggccacaguuuuccu

SEQ ID NO: 417896 - RNA, 22 nt, Human
ccagcugcaggggagcagugga

SEQ ID NO: 417897 - RNA, 22 nt, Human
agagucuuccaggcagccugag

SEQ ID NO: 417898 - RNA, 22 nt, Human
gagcagcugcagugcagacccu

SEQ ID NO: 417899 - RNA, 22 nt, Human
ggcacugaucugauuucccucc

SEQ ID NO: 417900 - RNA, 22 nt, Human
gggccugggaacuugcauuuag

SEQ ID NO: 417901 - RNA, 22 nt, Human
uauuaggguuuugaagguuugu

SEQ ID NO: 417902 - RNA, 22 nt, Human
ucucuuaauuuuggaauagugu

SEQ ID NO: 417903 - RNA, 22 nt, Human
ugacauuuuaucaauaucacag

SEQ ID NO: 417904 - RNA, 22 nt, Human
gcguaaggccucuggucucgga

SEQ ID NO: 417905 - RNA, 22 nt, Human
cuggcagcaguuaugaaacaau

SEQ ID NO: 417906 - RNA, 22 nt, Human
gagcugucuggggacucugggu

SEQ ID NO: 417907 - RNA, 22 nt, Human
uagcugccauugcuccaggaag

SEQ ID NO: 417908 - RNA, 22 nt, Human
cacacaugaaucccuaguaccu

SEQ ID NO: 417909 - RNA, 22 nt, Human
acauacuuuuuaaaagauugcu

SEQ ID NO: 417910 - RNA, 22 nt, Human
ccagggcagcgccccuccacgc

SEQ ID NO: 417911 - RNA, 22 nt, Human
aagggcucugugcuugucccau

SEQ ID NO: 417912 - RNA, 22 nt, Human
auuuuuaugacaaaccauccuc

SEQ ID NO: 417913 - RNA, 22 nt, Human
uaaaugcaguacaaauuguucu

SEQ ID NO: 417914 - RNA, 22 nt, Human
ggucagggcucuuccaguggcu

SEQ ID NO: 417915 - RNA, 22 nt, Human
uugcauugauguuccuucuugc

SEQ ID NO: 417916 - RNA, 22 nt, Human
acagcuuuguuuucccugcuga

SEQ ID NO: 417917 - RNA, 22 nt, Human
ccugggaggcugugggucugcu

SEQ ID NO: 417918 - RNA, 22 nt, Human
aguucuuuugugaacauaugcu

SEQ ID NO: 417919 - RNA, 22 nt, Human
aaacuuuaagacaguccucaag

SEQ ID NO: 417920 - RNA, 22 nt, Human
cagggcaggaugcugugauuau

SEQ ID NO: 417921 - RNA, 22 nt, Human
gccugccugcugucaucugccu

SEQ ID NO: 417922 - RNA, 22 nt, Human
auuuauuaccucggaguuucug

SEQ ID NO: 417923 - RNA, 22 nt, Human
gccccagcucugccacaacuag

SEQ ID NO: 417924 - RNA, 22 nt, Human
acagcuuuucugauagauccug

SEQ ID NO: 417925 - RNA, 22 nt, Human
agucucagggccacccggggaa

SEQ ID NO: 417926 - RNA, 22 nt, Human
agaaauguuguggguuuuguua

SEQ ID NO: 417927 - RNA, 22 nt, Human
gcaaaucaccaccuagcuggau

SEQ ID NO: 417928 - RNA, 22 nt, Human
ugaggaaacuuacaaggcagaa

SEQ ID NO: 417929 - RNA, 22 nt, Human
aaauuagucgguuuaggaauuu

SEQ ID NO: 417930 - RNA, 22 nt, Human
ugcuuuauagacaaggaaguag

SEQ ID NO: 417931 - RNA, 22 nt, Human
uggcuagcccuuguggggagag

SEQ ID NO: 417932 - RNA, 22 nt, Human
ugugcagcucuagagccaagcc

SEQ ID NO: 417933 - RNA, 22 nt, Human
acacauuucuaaauuuuuaccg

SEQ ID NO: 417934 - RNA, 22 nt, Human
ggcaggcugcuugggucauguc

SEQ ID NO: 417935 - RNA, 22 nt, Human
gaaggcugagcagacaggccaa

SEQ ID NO: 417936 - RNA, 22 nt, Human
augcacuugcguguuugcaaau

SEQ ID NO: 417937 - RNA, 22 nt, Human
ucaugacaacuauauuauucca

SEQ ID NO: 417938 - RNA, 22 nt, Human
cuggggcuggugaggcaggcuc

SEQ ID NO: 417939 - RNA, 22 nt, Human
aaugggagguaguaugggaggu

SEQ ID NO: 417940 - RNA, 22 nt, Human
gccaggcuguggggaacuugaa

SEQ ID NO: 417941 - RNA, 22 nt, Human
acaacaggguaaggcaggccau

SEQ ID NO: 417942 - RNA, 22 nt, Human
ggcccuguuagagcucccacaa

SEQ ID NO: 417943 - RNA, 22 nt, Human
gccagggaggcuguaggguccu

SEQ ID NO: 417944 - RNA, 22 nt, Human
agggcagagaucugagugggca

SEQ ID NO: 417945 - RNA, 22 nt, Human
uccagggagauggcagaggcug

SEQ ID NO: 417946 - RNA, 22 nt, Human
guggagcccugguagggacccc

SEQ ID NO: 417947 - RNA, 22 nt, Human
ugagccuggguggucgaggcug

SEQ ID NO: 417948 - RNA, 22 nt, Human
aucaguuuauacuuauaaaucu

SEQ ID NO: 417949 - RNA, 22 nt, Human
aaucuggcauuugagaguagga

SEQ ID NO: 417950 - RNA, 22 nt, Human
ucuuuauuucugaaucccccau

SEQ ID NO: 417951 - RNA, 18 nt, Human
cugucaccgccaccacac

SEQ ID NO: 417952 - RNA, 22 nt, Human
ucagaaauuuucucaguaguuc

SEQ ID NO: 417953 - RNA, 22 nt, Human
aggcugucaucuuugcaggcag

SEQ ID NO: 417954 - RNA, 22 nt, Human
cuuuuuccagcuucaggguggg

SEQ ID NO: 417955 - RNA, 22 nt, Human
uggccuggcccugaggcccugu

SEQ ID NO: 417956 - RNA, 23 nt, Human
uuuuaauuuggacauaagaagau

SEQ ID NO: 417957 - RNA, 22 nt, Human
gaagccacccuccuuccagccc

SEQ ID NO: 417958 - RNA, 22 nt, Human
auugaaaaauucacaauucugg

SEQ ID NO: 417959 - RNA, 18 nt, Human
gcuggcugcacuucugcu

SEQ ID NO: 417960 - RNA, 22 nt, Human
agaguguuuuucugucaaggac

SEQ ID NO: 417961 - RNA, 22 nt, Human
uuccaaagaaauugaccaagac

SEQ ID NO: 417962 - RNA, 20 nt, Human
guucucacugaucugcaggg

SEQ ID NO: 417963 - RNA, 22 nt, Human
aaccugcaguuuuuauucugag

SEQ ID NO: 417964 - RNA, 22 nt, Human
ccaaggcaggggaucaaaguuu

SEQ ID NO: 417965 - RNA, 22 nt, Human
cuuccaaacccaggguaugggc

SEQ ID NO: 417966 - RNA, 22 nt, Human
ugcagagguguugcugagauaa

SEQ ID NO: 417967 - RNA, 22 nt, Human
aggcagaauguuggaaaggaag

SEQ ID NO: 417968 - RNA, 21 nt, Human
uauacaugugugcauacgugu

SEQ ID NO: 417969 - RNA, 22 nt, Human
gggcuccaacggugagcaugga

SEQ ID NO: 417970 - RNA, 22 nt, Human
uuguaacacuuuucuauuaaua

SEQ ID NO: 417971 - RNA, 23 nt, Human
acacaaggguaacugccagccau

SEQ ID NO: 417972 - RNA, 22 nt, Human
cagcuccccaugguuccugaag

SEQ ID NO: 417973 - RNA, 22 nt, Human
aagucacagcuaaauagcuaag

SEQ ID NO: 417974 - RNA, 22 nt, Human
ugccaggcugucaauucaccca

SEQ ID NO: 417975 - RNA, 18 nt, Human
cagcagagacauucaaaa

SEQ ID NO: 417976 - RNA, 23 nt, Human
gaagccacacaaaggucgccaag

SEQ ID NO: 417977 - RNA, 22 nt, Human
aauaugcauguauacaugugua

SEQ ID NO: 417978 - RNA, 22 nt, Human
uuuccucuuauacaguguuuau

SEQ ID NO: 417979 - RNA, 23 nt, Human
gugcaugugucuuuacaguagca

SEQ ID NO: 417980 - RNA, 22 nt, Human
uucacaggaauguaggggucuu

SEQ ID NO: 417981 - RNA, 22 nt, Human
agucucagaaaagaagcaugga

SEQ ID NO: 417982 - RNA, 22 nt, Human
cggcagagcuuccugcucagcg

SEQ ID NO: 417983 - RNA, 22 nt, Human
ggcaggagcucagguugguucc

SEQ ID NO: 417984 - RNA, 23 nt, Human
ugaugggaaggaacgacuaccac

SEQ ID NO: 417985 - RNA, 22 nt, Human
gucagaggaauggaugagugau

SEQ ID NO: 417986 - RNA, 22 nt, Human
guaagagcacugucuccugcug

SEQ ID NO: 417987 - RNA, 22 nt, Human
aaggcugaauucaaggguaggc

SEQ ID NO: 417988 - RNA, 22 nt, Human
caucuuuaaaggggagacaccc

SEQ ID NO: 417989 - RNA, 21 nt, Human
aaguaaaucagagaaauaacc

SEQ ID NO: 417990 - RNA, 22 nt, Human
gugucaugggagucagaaguga

SEQ ID NO: 417991 - RNA, 22 nt, Human
gagaggccaccugacgagcagu

SEQ ID NO: 417992 - RNA, 22 nt, Human
gcaaagucucaagacccaagug

SEQ ID NO: 417993 - RNA, 22 nt, Human
aaugcacauauauguguauaca

SEQ ID NO: 417994 - RNA, 22 nt, Human
agaagccagucgcucucccgca

SEQ ID NO: 417995 - RNA, 22 nt, Human
ccagagaggcaaaacuccuucc

SEQ ID NO: 417996 - RNA, 22 nt, Human
ccuggagcuuuuccauccugga

SEQ ID NO: 417997 - RNA, 19 nt, Human
ucaguggaugaacauguuu

SEQ ID NO: 417998 - RNA, 22 nt, Human
aaauaauuauagcgagucuauc

SEQ ID NO: 417999 - RNA, 22 nt, Human
cuguggcaggaagggacuagca

SEQ ID NO: 418000 - RNA, 22 nt, Human
uuacaaacaagaucuuauucuu

SEQ ID NO: 418001 - RNA, 22 nt, Human
acguguucaauuuccaucugac

SEQ ID NO: 418002 - RNA, 21 nt, Human
gugucaugguugacuuuggca

SEQ ID NO: 418003 - RNA, 22 nt, Human
cagaggccauauuucuucacuc

SEQ ID NO: 418004 - RNA, 22 nt, Human
gcauacagagaggauguggcau

SEQ ID NO: 418005 - RNA, 22 nt, Human
ccacccugagccgcaagagcag

SEQ ID NO: 418006 - RNA, 22 nt, Human
cagggcuggcucaugaaaaguu

SEQ ID NO: 418007 - RNA, 18 nt, Human
uccagcgugcuccagggc

SEQ ID NO: 418008 - RNA, 23 nt, Human
aucaagucaucagcaaaauacau

SEQ ID NO: 418009 - RNA, 22 nt, Human
ugggaugggaucucgcuguguc

SEQ ID NO: 418010 - RNA, 22 nt, Human
gcugaggccucagaaggcugag

SEQ ID NO: 418011 - RNA, 22 nt, Human
uccucuucugcccaucagaggc

SEQ ID NO: 418012 - RNA, 21 nt, Human
uucuacaggaugaaugaaaac

SEQ ID NO: 418013 - RNA, 22 nt, Human
ggguggggcccaggaaaucuau

SEQ ID NO: 418014 - RNA, 22 nt, Human
cacaaaaguaggaggcaggcgg

SEQ ID NO: 418015 - RNA, 21 nt, Human
agggcagauuagcuguaagag

SEQ ID NO: 418016 - RNA, 22 nt, Human
aagaacagauucagccugaacu

SEQ ID NO: 418017 - RNA, 22 nt, Human
cagaggguugucaggcgccuug

SEQ ID NO: 418018 - RNA, 22 nt, Human
cagggcugugcccaucuucccc

SEQ ID NO: 418019 - RNA, 22 nt, Human
cuguuuauacgacagguggagg

SEQ ID NO: 418020 - RNA, 22 nt, Human
uccugaaaaauuacauguucag

SEQ ID NO: 418021 - RNA, 22 nt, Human
cagggcaggaauuugacauugc

SEQ ID NO: 418022 - RNA, 22 nt, Human
ggaggaagugcaguucuacuac

SEQ ID NO: 418023 - RNA, 22 nt, Human
aagaaacuguugcgugacagcg

SEQ ID NO: 418024 - RNA, 22 nt, Human
cuucccuuggugaacagagcau

SEQ ID NO: 418025 - RNA, 22 nt, Human
aaggcuuuaugugaccaaaaga

SEQ ID NO: 418026 - RNA, 22 nt, Human
gcucccaggaugaggagccagg

SEQ ID NO: 418027 - RNA, 22 nt, Human
gggcccuggggccugauuugca

SEQ ID NO: 418028 - RNA, 22 nt, Human
ugggccagcaauugcugcucag

SEQ ID NO: 418029 - RNA, 22 nt, Human
aggccucacucucagagcuucu

SEQ ID NO: 418030 - RNA, 21 nt, Human
agccugggaggcggagguugc

SEQ ID NO: 418031 - RNA, 22 nt, Human
aggagcccugcgggaggcagag

SEQ ID NO: 418032 - RNA, 22 nt, Human
agggucugacuccucuggcaag

SEQ ID NO: 418033 - RNA, 22 nt, Human
agggcugccauuucuggcccaa

SEQ ID NO: 418034 - RNA, 22 nt, Human
gggaccuggcgagggucacaca

SEQ ID NO: 418035 - RNA, 22 nt, Human
ugcagcuucuuguccugugauu

SEQ ID NO: 418036 - RNA, 22 nt, Human
cugugucggacgugggcagcag

SEQ ID NO: 418037 - RNA, 22 nt, Human
auaaaauuugcuacuguuaaau

SEQ ID NO: 418038 - RNA, 22 nt, Human
gcaggaagcauagaagaaugcc

SEQ ID NO: 418039 - RNA, 22 nt, Human
ugcucuggagggugaagcuuuu

SEQ ID NO: 418040 - RNA, 22 nt, Human
agcuaagacuuagugacuuagu

SEQ ID NO: 418041 - RNA, 22 nt, Human
aaggccugaacaugaggagaug

SEQ ID NO: 418042 - RNA, 22 nt, Human
aaugauggauuuagacaagcug

SEQ ID NO: 418043 - RNA, 22 nt, Human
uucuguuuacucagaaauacaa

SEQ ID NO: 418044 - RNA, 22 nt, Human
uucuucauggguucuuuuagga

SEQ ID NO: 418045 - RNA, 22 nt, Human
agcugccucagcaacacagacc

SEQ ID NO: 418046 - RNA, 22 nt, Human
uggcagcuccggguaggggcug

SEQ ID NO: 418047 - RNA, 22 nt, Human
acaggcaggcgggacagcccga

SEQ ID NO: 418048 - RNA, 21 nt, Human
agaaaauggcguuuuagauuu

SEQ ID NO: 418049 - RNA, 22 nt, Human
agcaauauuuaaagguuugcaa

SEQ ID NO: 418050 - RNA, 22 nt, Human
cccagcagaaucugaugagggc

SEQ ID NO: 418051 - RNA, 22 nt, Human
uugcucugauuagguggaaaca

SEQ ID NO: 418052 - RNA, 22 nt, Human
ggccuguccagccugccuggcu

SEQ ID NO: 418053 - RNA, 22 nt, Human
aagcaauaagccagauuuggau

SEQ ID NO: 418054 - RNA, 22 nt, Human
caccugagcacuggggccgccc

SEQ ID NO: 418055 - RNA, 22 nt, Human
uucacauaaugauacaaagcuu

SEQ ID NO: 418056 - RNA, 22 nt, Human
gggcaguugauggaggucugga

SEQ ID NO: 418057 - RNA, 23 nt, Human
ugggcagcuucugcaugcccacc

SEQ ID NO: 418058 - RNA, 22 nt, Human
cucugaauggacacuccagugu

SEQ ID NO: 418059 - RNA, 22 nt, Human
gugcuugggggaaguaacagac

SEQ ID NO: 418060 - RNA, 22 nt, Human
ugugccuacugauagagccaag

SEQ ID NO: 418061 - RNA, 22 nt, Human
cugaggcuggcguuugaggaag

SEQ ID NO: 418062 - RNA, 18 nt, Human
ccucagggagagagacgc

SEQ ID NO: 418063 - RNA, 22 nt, Human
agcaguggcugaagauguuccu

SEQ ID NO: 418064 - RNA, 22 nt, Human
gcuggccacauugugccguccu

SEQ ID NO: 418065 - RNA, 22 nt, Human
agggcuggcuccguuaccuuga

SEQ ID NO: 418066 - RNA, 18 nt, Human
ccuggcagccaugcgcgc

SEQ ID NO: 418067 - RNA, 22 nt, Human
gcugagagcggccagcugggaa

SEQ ID NO: 418068 - RNA, 23 nt, Human
uguugaaguaacuguuacauaga

SEQ ID NO: 418069 - RNA, 22 nt, Human
uauuugauagagauaaaugaua

SEQ ID NO: 418070 - RNA, 22 nt, Human
agggcagaaaccaccuugaugg

SEQ ID NO: 418071 - RNA, 22 nt, Human
caggggcaagaaugcugucagc

SEQ ID NO: 418072 - RNA, 22 nt, Human
aacuguucuucauuuucaguau

SEQ ID NO: 418073 - RNA, 22 nt, Human
agcagcuucuuucacuccugga

SEQ ID NO: 418074 - RNA, 22 nt, Human
uuuccucuaaacgcauuugcuu

SEQ ID NO: 418075 - RNA, 22 nt, Human
ccccaggacacauggaccaagu

SEQ ID NO: 418076 - RNA, 22 nt, Human
cucuuaaagaauguuccagcug

SEQ ID NO: 418077 - RNA, 22 nt, Human
uauucacaaaaugagguccuca

SEQ ID NO: 418078 - RNA, 22 nt, Human
ucccagagcaguacuccaggag

SEQ ID NO: 418079 - RNA, 22 nt, Human
ucaggagaaucagggcuguccu

SEQ ID NO: 418080 - RNA, 22 nt, Human
cagggcuccccagagagccucu

SEQ ID NO: 418081 - RNA, 22 nt, Human
agggcugagcccaggcauguag

SEQ ID NO: 418082 - RNA, 22 nt, Human
uagagugguuaacaguuuagaa

SEQ ID NO: 418083 - RNA, 22 nt, Human
ucagggcauacucuucaagguc

SEQ ID NO: 418084 - RNA, 22 nt, Human
cuggagagggagcccuggcagu

SEQ ID NO: 418085 - RNA, 22 nt, Human
ugauuucaaguagugacaugcu

SEQ ID NO: 418086 - RNA, 22 nt, Human
aacaaaugaccugauuucuucc

SEQ ID NO: 418087 - RNA, 22 nt, Human
aggaccugaaauucuugcuuuu

SEQ ID NO: 418088 - RNA, 19 nt, Human
ucaggcaguuauucacaaa

SEQ ID NO: 418089 - RNA, 22 nt, Human
ggggaggaagcuggaacacggg

SEQ ID NO: 418090 - RNA, 22 nt, Human
cccagcacaggcaauuccauac

SEQ ID NO: 418091 - RNA, 22 nt, Human
cagcccugcacgcugccuccgc

SEQ ID NO: 418092 - RNA, 22 nt, Human
ggagccagagucugcaguguaa

SEQ ID NO: 418093 - RNA, 22 nt, Human
gggacccugggaggcuggcgca

SEQ ID NO: 418094 - RNA, 19 nt, Human
uggagacugagagugagca

SEQ ID NO: 418095 - RNA, 22 nt, Human
gcagagccgugaauggauuuca

SEQ ID NO: 418096 - RNA, 22 nt, Human
agucucugugagcucccaaugg

SEQ ID NO: 418097 - RNA, 22 nt, Human
uuccaugugaguacacugugau

SEQ ID NO: 418098 - RNA, 22 nt, Human
uggcagagaacacggcugaucu

SEQ ID NO: 418099 - RNA, 22 nt, Human
ggugacuggagggacccaggcc

SEQ ID NO: 418100 - RNA, 22 nt, Human
ucagaaaugaucguuauucauu

SEQ ID NO: 418101 - RNA, 22 nt, Human
aaauccuaaggagaauaugauu

SEQ ID NO: 418102 - RNA, 22 nt, Human
aaaacaggugucagcaaacuau

SEQ ID NO: 418103 - RNA, 22 nt, Human
acacaggaagucagcacugaug

SEQ ID NO: 418104 - RNA, 22 nt, Human
uccucaggucaaagcaggagaa

SEQ ID NO: 418105 - RNA, 22 nt, Human
cagcagugugcaggugugcugg

SEQ ID NO: 418106 - RNA, 22 nt, Human
aacucaguucuuuccacaaugc

SEQ ID NO: 418107 - RNA, 22 nt, Human
aagcagccucauuugugguaag

SEQ ID NO: 418108 - RNA, 22 nt, Human
agauacauugaguuuccuccug

SEQ ID NO: 418109 - RNA, 22 nt, Human
gaagagcuguagccugcucuuu

SEQ ID NO: 418110 - RNA, 22 nt, Human
ggcaggcaagucugcucuguga

SEQ ID NO: 418111 - RNA, 22 nt, Human
uugcagggcaggaccauggaca

SEQ ID NO: 418112 - RNA, 22 nt, Human
guuucuuagguaaauucuuuga

SEQ ID NO: 418113 - RNA, 22 nt, Human
uaguaucuauuaguaacaagag

SEQ ID NO: 418114 - RNA, 18 nt, Human
gagcugggagaaggaagg

SEQ ID NO: 418115 - RNA, 21 nt, Human
gcagccagacgggauucaguu

SEQ ID NO: 418116 - RNA, 22 nt, Human
ccuuccaggugcaggcaagccu

SEQ ID NO: 418117 - RNA, 22 nt, Human
auauucacugagcauaaagcca

SEQ ID NO: 418118 - RNA, 22 nt, Human
cgccugggaguccacaccugcu

SEQ ID NO: 418119 - RNA, 22 nt, Human
ccaggcugcucacaagcugccc

SEQ ID NO: 418120 - RNA, 22 nt, Human
uuccuaaaagaauacacuggau

SEQ ID NO: 418121 - RNA, 22 nt, Human
uggagcagagaugggagcccaa

SEQ ID NO: 418122 - RNA, 22 nt, Human
ggcagugaugucaaacagugaa

SEQ ID NO: 418123 - RNA, 22 nt, Human
ucagagugaccuuacauggucu

SEQ ID NO: 418124 - RNA, 21 nt, Human
agauuguauggaggugagagg

SEQ ID NO: 418125 - RNA, 22 nt, Human
aggcugcagaacagucaggugc

SEQ ID NO: 418126 - RNA, 22 nt, Human
gagagcuggauucuggauaggu

SEQ ID NO: 418127 - RNA, 22 nt, Human
ccagggcugcugugggacucca

SEQ ID NO: 418128 - RNA, 22 nt, Human
acagagcuguacaugugccaug

SEQ ID NO: 418129 - RNA, 22 nt, Human
gcuggccauggggagugaggag

SEQ ID NO: 418130 - RNA, 22 nt, Human
uccauucauucauugaugaaca

SEQ ID NO: 418131 - RNA, 22 nt, Human
ugcagggcagauaugacuguag

SEQ ID NO: 418132 - RNA, 22 nt, Human
cacucugagaaguacaagcucc

SEQ ID NO: 418133 - RNA, 22 nt, Human
gauuauauaauggaagcucuug

SEQ ID NO: 418134 - RNA, 22 nt, Human
auuaaacaauguaaaguucuug

SEQ ID NO: 418135 - RNA, 22 nt, Human
cucaucugauaaaucacucuua

SEQ ID NO: 418136 - RNA, 22 nt, Human
agcugauuccacuuuuucccca

SEQ ID NO: 418137 - RNA, 22 nt, Human
ucugcagcuucuugccagagag

SEQ ID NO: 418138 - RNA, 21 nt, Human
uuagaaagcucacuacaguua

SEQ ID NO: 418139 - RNA, 22 nt, Human
uugaauaggacucagcagugau

SEQ ID NO: 418140 - RNA, 18 nt, Human
gaucgggggcgccccaag

SEQ ID NO: 418141 - RNA, 22 nt, Human
uucugaaaggcagguuguuugc

SEQ ID NO: 418142 - RNA, 22 nt, Human
ggggcugggauuugaacccagg

SEQ ID NO: 418143 - RNA, 16 nt, Human
gcagaggaaaggggag

SEQ ID NO: 418144 - RNA, 22 nt, Human
agacucaagacugcagaagacg

SEQ ID NO: 418145 - RNA, 22 nt, Human
uagaacacuugaccacugcucc

SEQ ID NO: 418146 - RNA, 22 nt, Human
uggcucuguugagguauggauu

SEQ ID NO: 418147 - RNA, 22 nt, Human
ucucagagccuaacuaaccuaa

SEQ ID NO: 418148 - RNA, 22 nt, Human
aggcucagaggugagcaucugc

SEQ ID NO: 418149 - RNA, 22 nt, Human
cucaggauagcugcgcagccug

SEQ ID NO: 418150 - RNA, 22 nt, Human
guacccaggcacgccuugcuga

SEQ ID NO: 418151 - RNA, 20 nt, Human
ucaggaugugcugagugaag

SEQ ID NO: 418152 - RNA, 22 nt, Human
ggcucacgcaauuaucccggcc

SEQ ID NO: 418153 - RNA, 22 nt, Human
acaggcuuuuuuagaaugacau

SEQ ID NO: 418154 - RNA, 22 nt, Human
aaaauguaaagcuugaguguag

SEQ ID NO: 418155 - RNA, 22 nt, Human
uagggcagaguccaggaugggc

SEQ ID NO: 418156 - RNA, 22 nt, Human
gagagcccugcuccuaucccag

SEQ ID NO: 418157 - RNA, 22 nt, Human
uccaggcagggcagccaucaag

SEQ ID NO: 418158 - RNA, 22 nt, Human
agaggcagcagucauacuacag

SEQ ID NO: 418159 - RNA, 22 nt, Human
cagcuuuaccuuuaggaguaac

SEQ ID NO: 418160 - RNA, 22 nt, Human
uauuucuuucagguauguguug

SEQ ID NO: 418161 - RNA, 22 nt, Human
ugcuggccaacaaggcuccaag

SEQ ID NO: 418162 - RNA, 22 nt, Human
ucuauuucgcauauaaguuuug

SEQ ID NO: 418163 - RNA, 22 nt, Human
gaaugugugacucuauugagca

SEQ ID NO: 418164 - RNA, 22 nt, Human
gaguccaguucuuuccagcagu

SEQ ID NO: 418165 - RNA, 22 nt, Human
aaaucugggucaagguggagug

SEQ ID NO: 418166 - RNA, 22 nt, Human
ccucacugaagaggugacauuu

SEQ ID NO: 418167 - RNA, 22 nt, Human
gaugcagggcuggcaggagcuu

SEQ ID NO: 418168 - RNA, 22 nt, Human
accaaaggcagagcugaacacu

SEQ ID NO: 418169 - RNA, 22 nt, Human
cuggcugcgucugcucugacag

SEQ ID NO: 418170 - RNA, 22 nt, Human
ucauugcaguugaguuguguua

SEQ ID NO: 418171 - RNA, 21 nt, Human
aggucccagguuugggcagca

SEQ ID NO: 418172 - RNA, 18 nt, Human
cucagagaugcccuuauu

SEQ ID NO: 418173 - RNA, 22 nt, Human
uccuggaggcaaaugaagacuc

SEQ ID NO: 418174 - RNA, 22 nt, Human
uggcagcagacaaaaggccauu

SEQ ID NO: 418175 - RNA, 22 nt, Human
agggacugagcuaggaucuagu

SEQ ID NO: 418176 - RNA, 22 nt, Human
uuugcuuguucaagauuucugu

SEQ ID NO: 418177 - RNA, 21 nt, Human
agcagaggcugccuggugacu

SEQ ID NO: 418178 - RNA, 22 nt, Human
gcacugcagccucagauggugg

SEQ ID NO: 418179 - RNA, 22 nt, Human
uaaggccaauuacauauguuca

SEQ ID NO: 418180 - RNA, 22 nt, Human
ggggaugguggcauuuguaaaa

SEQ ID NO: 418181 - RNA, 22 nt, Human
aaugcacauaaauauggucuua

SEQ ID NO: 418182 - RNA, 23 nt, Human
uuucauaugguguggaugaagaa

SEQ ID NO: 418183 - RNA, 22 nt, Human
ggucaggguauaaucaagugag

SEQ ID NO: 418184 - RNA, 22 nt, Human
agaggaaaaugaguuccagaau

SEQ ID NO: 418185 - RNA, 23 nt, Human
ucuguacaauugagaagagaaca

SEQ ID NO: 418186 - RNA, 22 nt, Human
ugucuucaucuccaugcacaga

SEQ ID NO: 418187 - RNA, 22 nt, Human
acuuaaaaacagauccagcagg

SEQ ID NO: 418188 - RNA, 22 nt, Human
uuuuuccuagugcuuucuggua

SEQ ID NO: 418189 - RNA, 22 nt, Human
aggucauuccuugucuucuugc

SEQ ID NO: 418190 - RNA, 22 nt, Human
aggaaacuguccccucauccua

SEQ ID NO: 418191 - RNA, 22 nt, Human
cugucugucaaguucaucucca

SEQ ID NO: 418192 - RNA, 22 nt, Human
acagaaugcguagugcauguug

SEQ ID NO: 418193 - RNA, 22 nt, Human
gaugccuccaaaugagggcaga

SEQ ID NO: 418194 - RNA, 22 nt, Human
ucuuuacacaagacaagaauaa

SEQ ID NO: 418195 - RNA, 22 nt, Human
uuucauaauacuguacaugaaa

SEQ ID NO: 418196 - RNA, 20 nt, Human
gcugggggugugcugaguga

SEQ ID NO: 418197 - RNA, 22 nt, Human
cacaucagggcugcuugggggu

SEQ ID NO: 418198 - RNA, 22 nt, Human
cacugccugugagcugugugcc

SEQ ID NO: 418199 - RNA, 22 nt, Human
gaacaaacacaucccagcagug

SEQ ID NO: 418200 - RNA, 22 nt, Human
ugaaaaggaguccuuguuuuca

SEQ ID NO: 418201 - RNA, 22 nt, Human
uugaaggaggcuccuuuuuaaa

SEQ ID NO: 418202 - RNA, 22 nt, Human
gagggcucugaaaggaggucac

SEQ ID NO: 418203 - RNA, 21 nt, Human
ucagaacaauuccaugccucc

SEQ ID NO: 418204 - RNA, 22 nt, Human
ggccuugggcuggcugcaguau

SEQ ID NO: 418205 - RNA, 22 nt, Human
aggcuggaguacaguggcuauu

SEQ ID NO: 418206 - RNA, 22 nt, Human
uauaauuuaucaugucacaguu

SEQ ID NO: 418207 - RNA, 22 nt, Human
ggagccagugcccucuggugga

SEQ ID NO: 418208 - RNA, 22 nt, Human
cuggagaggcugggaacagguu

SEQ ID NO: 418209 - RNA, 22 nt, Human
aaggcaggaugcggacccaucu

SEQ ID NO: 418210 - RNA, 22 nt, Human
ugcaccccauuuuacauuuaca

SEQ ID NO: 418211 - RNA, 22 nt, Human
cacaggccugucucuuucuaac

SEQ ID NO: 418212 - RNA, 18 nt, Human
uggcagcaggaagccauu

SEQ ID NO: 418213 - RNA, 22 nt, Human
agaagccaauucugugugaguc

SEQ ID NO: 418214 - RNA, 18 nt, Human
cccagcuuagcgccccuc

SEQ ID NO: 418215 - RNA, 22 nt, Human
ucauuuucacacauaaauagca

SEQ ID NO: 418216 - RNA, 22 nt, Human
uaaauuguuuucuagaaguugu

SEQ ID NO: 418217 - RNA, 22 nt, Human
ggcuuuauaggguagaggauca

SEQ ID NO: 418218 - RNA, 22 nt, Human
ucugucugcucauuuaccucag

SEQ ID NO: 418219 - RNA, 22 nt, Human
gauggcagucaaccaggugagg

SEQ ID NO: 418220 - RNA, 21 nt, Human
uggcucuguucaauauaugga

SEQ ID NO: 418221 - RNA, 22 nt, Human
augcugaauugaugcgagggag

SEQ ID NO: 418222 - RNA, 22 nt, Human
agaggaaguaaucaggaccugc

SEQ ID NO: 418223 - RNA, 22 nt, Human
aaaaguauuggccaccauuucu

SEQ ID NO: 418224 - RNA, 19 nt, Human
caggagagcaugcacuuug

SEQ ID NO: 418225 - RNA, 18 nt, Human
ccuggcuuccaucuuggu

SEQ ID NO: 418226 - RNA, 22 nt, Human
uuucacauaucaacucuauccu

SEQ ID NO: 418227 - RNA, 22 nt, Human
acucagaguuugcguuccauac

SEQ ID NO: 418228 - RNA, 22 nt, Human
ggccucagugggccgcugcagg

SEQ ID NO: 418229 - RNA, 22 nt, Human
cugccucucaggucccugagau

SEQ ID NO: 418230 - RNA, 22 nt, Human
ccagagccugcugagccccauu

SEQ ID NO: 418231 - RNA, 22 nt, Human
gcaguggggcgcugggaguugg

SEQ ID NO: 418232 - RNA, 23 nt, Human
ccagccucugggucuucauccag

SEQ ID NO: 418233 - RNA, 22 nt, Human
gcagagcagcaaauggaaagga

SEQ ID NO: 418234 - RNA, 22 nt, Human
agccagagcagggaauuggaca

SEQ ID NO: 418235 - RNA, 22 nt, Human
augguacaaaauguauaaaguc

SEQ ID NO: 418236 - RNA, 23 nt, Human
ugcagagggacugaagccagcuu

SEQ ID NO: 418237 - RNA, 21 nt, Human
uucaaugaaaacaaagugagg

SEQ ID NO: 418238 - RNA, 22 nt, Human
augcaguagauaggcacuuuua

SEQ ID NO: 418239 - RNA, 22 nt, Human
caaggccacugcucagguuucc

SEQ ID NO: 418240 - RNA, 22 nt, Human
uugaaaggugcugugugcugau

SEQ ID NO: 418241 - RNA, 22 nt, Human
auccuugagccuuaucuuuugu

SEQ ID NO: 418242 - RNA, 22 nt, Human
ugauguucuguauaucauauag

SEQ ID NO: 418243 - RNA, 22 nt, Human
cuggccuuggaagggagcccgu

SEQ ID NO: 418244 - RNA, 22 nt, Human
aaagccagugguaugagagaaa

SEQ ID NO: 418245 - RNA, 22 nt, Human
uggucaggcugcucugcggcgu

SEQ ID NO: 418246 - RNA, 22 nt, Human
uacaaagugugcccaugcugag

SEQ ID NO: 418247 - RNA, 21 nt, Human
ggcacugagccagauggacuc

SEQ ID NO: 418248 - RNA, 22 nt, Human
ccugcugggccugagcaaugag

SEQ ID NO: 418249 - RNA, 19 nt, Human
uggcugggcgugccuccgu

SEQ ID NO: 418250 - RNA, 22 nt, Human
accaggcaguauggugcugcaa

SEQ ID NO: 418251 - RNA, 22 nt, Human
ccaggccucuggcugcuuaguc

SEQ ID NO: 418252 - RNA, 22 nt, Human
uucaacacaggaacaugauaua

SEQ ID NO: 418253 - RNA, 22 nt, Human
ucccagacaaucauuggccacc

SEQ ID NO: 418254 - RNA, 22 nt, Human
acuugguugaugucauaagguu

SEQ ID NO: 418255 - RNA, 22 nt, Human
uuugaaaggaauuaggaugaca

SEQ ID NO: 418256 - RNA, 22 nt, Human
acaugggaucaaugaggcaggc

SEQ ID NO: 418257 - RNA, 22 nt, Human
gcagggugauagugaggcucag

SEQ ID NO: 418258 - RNA, 22 nt, Human
ggcuccugaaagacuaugggaa

SEQ ID NO: 418259 - RNA, 19 nt, Human
gccaggagggcucuggcug

SEQ ID NO: 418260 - RNA, 22 nt, Human
uuggaugaagucuagcuuuagu

SEQ ID NO: 418261 - RNA, 22 nt, Human
uccauccauguaggaagauggu

SEQ ID NO: 418262 - RNA, 22 nt, Human
gucauuucuguuucuucagugc

SEQ ID NO: 418263 - RNA, 22 nt, Human
ucugccugcaguguggcagggc

SEQ ID NO: 418264 - RNA, 22 nt, Human
cucaggauggaagccuacagga

SEQ ID NO: 418265 - RNA, 22 nt, Human
uuuguuagagugugggaggcug

SEQ ID NO: 418266 - RNA, 22 nt, Human
uucuuaaagaggcaaaacacag

SEQ ID NO: 418267 - RNA, 22 nt, Human
uccucagggcggccuccgucuu

SEQ ID NO: 418268 - RNA, 22 nt, Human
cggcagggcuccaugcauuucu

SEQ ID NO: 418269 - RNA, 22 nt, Human
aguuuauagcccagauucaugg

SEQ ID NO: 418270 - RNA, 22 nt, Human
ggcugcugguagggguaggaag

SEQ ID NO: 418271 - RNA, 22 nt, Human
gugccugugccaggggugugcu

SEQ ID NO: 418272 - RNA, 22 nt, Human
gagagcuguaauagucaugucu

SEQ ID NO: 418273 - RNA, 23 nt, Human
ucacacagcuggucagguacaga

SEQ ID NO: 418274 - RNA, 22 nt, Human
cucacagaugcugugggucagg

SEQ ID NO: 418275 - RNA, 22 nt, Human
cugccucugguuuuggucccug

SEQ ID NO: 418276 - RNA, 22 nt, Human
augccagucaaagaagaugaca

SEQ ID NO: 418277 - RNA, 22 nt, Human
agcuuccugaugcaagagggcu

SEQ ID NO: 418278 - RNA, 22 nt, Human
cagagcucagagcagggcacuc

SEQ ID NO: 418279 - RNA, 22 nt, Human
gucacacucagaaugacuagag

SEQ ID NO: 418280 - RNA, 23 nt, Human
ucagaaugcacugaauuuacccu

SEQ ID NO: 418281 - RNA, 22 nt, Human
agggcccuaaggaaggcacaca

SEQ ID NO: 418282 - RNA, 22 nt, Human
ucuuuugugauucuucaguuac

SEQ ID NO: 418283 - RNA, 22 nt, Human
uaauuuaauccaaguguuacau

SEQ ID NO: 418284 - RNA, 22 nt, Human
gagcccagguucugcuuccagc

SEQ ID NO: 418285 - RNA, 23 nt, Human
gugugccaagcacugugccagga

SEQ ID NO: 418286 - RNA, 23 nt, Human
acagagaucuugacuuguaugga

SEQ ID NO: 418287 - RNA, 22 nt, Human
cuggcagcccaaccuagagucu

SEQ ID NO: 418288 - RNA, 22 nt, Human
ccagccaguccagcauuggugu

SEQ ID NO: 418289 - RNA, 20 nt, Human
uucugcuugcaaauaucaag

SEQ ID NO: 418290 - RNA, 22 nt, Human
agauggagaaugacaauuaagg

SEQ ID NO: 418291 - RNA, 22 nt, Human
uacaguagaauuuuuaguaacu

SEQ ID NO: 418292 - RNA, 22 nt, Human
uggccugaauuauggcagaucu

SEQ ID NO: 418293 - RNA, 22 nt, Human
gcaggccuccccugcuggagcu

SEQ ID NO: 418294 - RNA, 22 nt, Human
gcagcuggagccagccagacac

SEQ ID NO: 418295 - RNA, 22 nt, Human
accugccuaucagcugccugcu

SEQ ID NO: 418296 - RNA, 22 nt, Human
caguguggagggagagagccug

SEQ ID NO: 418297 - RNA, 22 nt, Human
cuggcuucugggccagggcaga

SEQ ID NO: 418298 - RNA, 22 nt, Human
ccccuuccaggaagcagaaucg

SEQ ID NO: 418299 - RNA, 22 nt, Human
uucaggaucaaguugccaguag

SEQ ID NO: 418300 - RNA, 22 nt, Human
ucuguccuguuuccuccugaca

SEQ ID NO: 418301 - RNA, 19 nt, Human
agguggucuaggcuggaga

SEQ ID NO: 418302 - RNA, 22 nt, Human
gagaaagauguaggcugggagg

SEQ ID NO: 418303 - RNA, 22 nt, Human
ucccccacucuaaaggagccuu

SEQ ID NO: 418304 - RNA, 22 nt, Human
aggaccagaggccagagucagc

SEQ ID NO: 418305 - RNA, 22 nt, Human
agcaccugcacaguggaggaaa

SEQ ID NO: 418306 - RNA, 20 nt, Human
ggguggaguugcggucugug

SEQ ID NO: 418307 - RNA, 22 nt, Human
cuagggacagaaagaggguaga

SEQ ID NO: 418308 - RNA, 21 nt, Human
gcugucucuggcuccugggaa

SEQ ID NO: 418309 - RNA, 22 nt, Human
ggcagagcugcaugagcacuca

SEQ ID NO: 418310 - RNA, 22 nt, Human
ugggccugggucuuugcugcca

SEQ ID NO: 418311 - RNA, 22 nt, Human
ggcuccuguccuccuggagcuc

SEQ ID NO: 418312 - RNA, 22 nt, Human
gagggccaacuagcaccacuuu

SEQ ID NO: 418313 - RNA, 22 nt, Human
uuagccauuaaauuacaaggug

SEQ ID NO: 418314 - RNA, 20 nt, Human
cccugcagccaugggagugg

SEQ ID NO: 418315 - RNA, 22 nt, Human
gcugagguggagauugcaguga

SEQ ID NO: 418316 - RNA, 22 nt, Human
ugugucccuuggaaccucagcu

SEQ ID NO: 418317 - RNA, 22 nt, Human
augggguggaguccgggcagcg

SEQ ID NO: 418318 - RNA, 22 nt, Human
uggcccugcuggccaaaggcua

SEQ ID NO: 418319 - RNA, 22 nt, Human
uugauaaaaugauaucuucuuu

SEQ ID NO: 418320 - RNA, 22 nt, Human
caggagcaugcugaugccagaa

SEQ ID NO: 418321 - RNA, 22 nt, Human
ucaggcagagcuguggagcucu

SEQ ID NO: 418322 - RNA, 19 nt, Human
ugucuuaauuaacucagag

SEQ ID NO: 418323 - RNA, 16 nt, Human
agcagccagcacugga

SEQ ID NO: 418324 - RNA, 22 nt, Human
auuguuaugaaaauaagauguu

SEQ ID NO: 418325 - RNA, 22 nt, Human
ugucacaaacauacauuauaga

SEQ ID NO: 418326 - RNA, 23 nt, Human
cccagcgcugagcccugcaggca

SEQ ID NO: 418327 - RNA, 22 nt, Human
uagcagcucugauucugggccc

SEQ ID NO: 418328 - RNA, 22 nt, Human
cccagggagguagcaggagaaa

SEQ ID NO: 418329 - RNA, 22 nt, Human
aagcaauauacugauaugauua

SEQ ID NO: 418330 - RNA, 22 nt, Human
uccuggagccacggagcuuuca

SEQ ID NO: 418331 - RNA, 22 nt, Human
uaggcaggugugcacugcccac

SEQ ID NO: 418332 - RNA, 22 nt, Human
cacauacaaugguguuauuugg

SEQ ID NO: 418333 - RNA, 22 nt, Human
uaggagcuaaaauauuuuauau

SEQ ID NO: 418334 - RNA, 22 nt, Human
uugggcugaaguagagggcaga

SEQ ID NO: 418335 - RNA, 19 nt, Human
gcugugugaccuugggcaa

SEQ ID NO: 418336 - RNA, 22 nt, Human
gcugccuguugaagggucugug

SEQ ID NO: 418337 - RNA, 22 nt, Human
ccuguggcucucuuuggagguc

SEQ ID NO: 418338 - RNA, 22 nt, Human
gagcccuggcagucugggaugg

SEQ ID NO: 418339 - RNA, 22 nt, Human
ucccaaggccaggcaucuagaa

SEQ ID NO: 418340 - RNA, 22 nt, Human
agcucuccacacauaggacuag

SEQ ID NO: 418341 - RNA, 21 nt, Human
guggcccugccgcagugucca

SEQ ID NO: 418342 - RNA, 22 nt, Human
gaggugagaagggggucagaug

SEQ ID NO: 418343 - RNA, 22 nt, Human
cacugaaucucaaggggagggu

SEQ ID NO: 418344 - RNA, 22 nt, Human
aauuucaagucuugaagaagua

SEQ ID NO: 418345 - RNA, 22 nt, Human
gugauuccuauuaguacaugca

SEQ ID NO: 418346 - RNA, 22 nt, Human
ccaggcagagugcuccagaaag

SEQ ID NO: 418347 - RNA, 22 nt, Human
agaagaaacugucggggauauu

SEQ ID NO: 418348 - RNA, 22 nt, Human
acuucaaacaauuaacagagaa

SEQ ID NO: 418349 - RNA, 22 nt, Human
cccaggcaguagaaagaagagg

SEQ ID NO: 418350 - RNA, 22 nt, Human
acagagauggcacagagaaggu

SEQ ID NO: 418351 - RNA, 22 nt, Human
cucaggagagucuuauaucucc

SEQ ID NO: 418352 - RNA, 17 nt, Human
gagaguguauuggaugc

SEQ ID NO: 418353 - RNA, 19 nt, Human
gggaugggcccucacccuc

SEQ ID NO: 418354 - RNA, 22 nt, Human
ggguuucaugguucucacaaug

SEQ ID NO: 418355 - RNA, 23 nt, Human
uggcucuguggaucccucaggag

SEQ ID NO: 418356 - RNA, 22 nt, Human
ucaaggaggugcuuggcuucac

SEQ ID NO: 418357 - RNA, 22 nt, Human
cucaggagguuuccugucuagg

SEQ ID NO: 418358 - RNA, 22 nt, Human
ccagagggccuuuggaguuauc

SEQ ID NO: 418359 - RNA, 22 nt, Human
ggucccaguugcccaggucagg

SEQ ID NO: 418360 - RNA, 22 nt, Human
agaauaauacugaaaugcugaa

SEQ ID NO: 418361 - RNA, 22 nt, Human
gccagguggagguugcagugag

SEQ ID NO: 418362 - RNA, 21 nt, Human
ucagggcagcugcucuucaga

SEQ ID NO: 418363 - RNA, 22 nt, Human
aguauuucuaguugguucuacu

SEQ ID NO: 418364 - RNA, 23 nt, Human
cuuuuaacuugaucugagaccag

SEQ ID NO: 418365 - RNA, 22 nt, Human
aggcuggagggcaauggcaaga

SEQ ID NO: 418366 - RNA, 19 nt, Human
ccucugccagcccgccucu

SEQ ID NO: 418367 - RNA, 22 nt, Human
uucagagagaaaccagugggaa

SEQ ID NO: 418368 - RNA, 22 nt, Human
guuugucuuaauuaggcaucga

SEQ ID NO: 418369 - RNA, 22 nt, Human
uggcagagucaucacaucugga

SEQ ID NO: 418370 - RNA, 22 nt, Human
gcugcucugaaaaugacuguug

SEQ ID NO: 418371 - RNA, 22 nt, Human
aauguuguuuuucugcaugucu

SEQ ID NO: 418372 - RNA, 17 nt, Human
cccagcuggcagugccg

SEQ ID NO: 418373 - RNA, 22 nt, Human
gaaagagaaccugggccuagau

SEQ ID NO: 418374 - RNA, 22 nt, Human
cagucaccaccagguggcagua

SEQ ID NO: 418375 - RNA, 22 nt, Human
uugacaaaggaccuugcuauuu

SEQ ID NO: 418376 - RNA, 22 nt, Human
ugccugggaaccaauccuggcu

SEQ ID NO: 418377 - RNA, 17 nt, Human
aaguccagccugcagcu

SEQ ID NO: 418378 - RNA, 22 nt, Human
augagcugggccauccagugau

SEQ ID NO: 418379 - RNA, 22 nt, Human
agggagaagguuuagcugugag

SEQ ID NO: 418380 - RNA, 22 nt, Human
uguuuguucccucucuuuccug

SEQ ID NO: 418381 - RNA, 22 nt, Human
caauauucaguggaaaagccau

SEQ ID NO: 418382 - RNA, 22 nt, Human
gcugagccccccugcguggguc

SEQ ID NO: 418383 - RNA, 22 nt, Human
gucucccaucguuugugaggaa

SEQ ID NO: 418384 - RNA, 21 nt, Human
uggcucuggguaggagagugc

SEQ ID NO: 418385 - RNA, 22 nt, Human
ugccaggcuguccugggccugg

SEQ ID NO: 418386 - RNA, 22 nt, Human
agccugccuugggcugcuugag

SEQ ID NO: 418387 - RNA, 22 nt, Human
cuggcagcauuaacagagagca

SEQ ID NO: 418388 - RNA, 22 nt, Human
aacaggcaggagaauucugccu

SEQ ID NO: 418389 - RNA, 22 nt, Human
uccugcaggccuguucccagua

SEQ ID NO: 418390 - RNA, 22 nt, Human
agaggagugggaagcagugcaa

SEQ ID NO: 418391 - RNA, 22 nt, Human
uuucaauguaugucuuucugag

SEQ ID NO: 418392 - RNA, 22 nt, Human
ccaguccagugccaugcauggc

SEQ ID NO: 418393 - RNA, 22 nt, Human
cucaacagcucugccauacucc

SEQ ID NO: 418394 - RNA, 22 nt, Human
agggcugacacaccuuauccuc

SEQ ID NO: 418395 - RNA, 22 nt, Human
auagugggaauuacgauauacu

SEQ ID NO: 418396 - RNA, 22 nt, Human
uggcuccuaggauggugccugg

SEQ ID NO: 418397 - RNA, 22 nt, Human
cagugccaugucugagccccua

SEQ ID NO: 418398 - RNA, 22 nt, Human
gcuggcagucccaucagcuggg

SEQ ID NO: 418399 - RNA, 22 nt, Human
agccagcaugaagacagaggcc

SEQ ID NO: 418400 - RNA, 22 nt, Human
ccagagaguaaacauuuuccgg

SEQ ID NO: 418401 - RNA, 22 nt, Human
cagagccaaaugcugugguuau

SEQ ID NO: 418402 - RNA, 22 nt, Human
uuccauauuuguguggcaaaag

SEQ ID NO: 418403 - RNA, 22 nt, Human
gccaccagggggcuccagugag

SEQ ID NO: 418404 - RNA, 22 nt, Human
guucacaagaguuacagacaga

SEQ ID NO: 418405 - RNA, 17 nt, Human
agcagcuggguugaucu

SEQ ID NO: 418406 - RNA, 22 nt, Human
gcaggcagucaucuuucauauu

SEQ ID NO: 418407 - RNA, 22 nt, Human
uguaucaaggguuuauguaagc

SEQ ID NO: 418408 - RNA, 22 nt, Human
cagucucugugccagauccugg

SEQ ID NO: 418409 - RNA, 22 nt, Human
uagggcugugucuccaggacca

SEQ ID NO: 418410 - RNA, 22 nt, Human
cccagcuccuuacagggccgaa

SEQ ID NO: 418411 - RNA, 22 nt, Human
cugcugggcagaggcugcauga

SEQ ID NO: 418412 - RNA, 22 nt, Human
uucuuucucaacaugaauguuu

SEQ ID NO: 418413 - RNA, 18 nt, Human
caugucugcgccacaagg

SEQ ID NO: 418414 - RNA, 22 nt, Human
uggcucuguucgccaucaggag

SEQ ID NO: 418415 - RNA, 22 nt, Human
uugcacagaugagggugaugcu

SEQ ID NO: 418416 - RNA, 22 nt, Human
caggcagcugaggacuuugcua

SEQ ID NO: 418417 - RNA, 22 nt, Human
aacagcuuugcuucuggagaca

SEQ ID NO: 418418 - RNA, 22 nt, Human
uccaggcugauccaugaagaau

SEQ ID NO: 418419 - RNA, 22 nt, Human
acugucacuccaacugagucgu

SEQ ID NO: 418420 - RNA, 21 nt, Human
aggggacagaguagcuccagg

SEQ ID NO: 418421 - RNA, 22 nt, Human
uaccauuucauucuuuccucau

SEQ ID NO: 418422 - RNA, 22 nt, Human
guggcagguuauaagcaucuca

SEQ ID NO: 418423 - RNA, 22 nt, Human
gcugccuggaauaacggcuggc

SEQ ID NO: 418424 - RNA, 22 nt, Human
aggguggggugcuacaucuuua

SEQ ID NO: 418425 - RNA, 22 nt, Human
ucuggcuccaggaccgggcaca

SEQ ID NO: 418426 - RNA, 22 nt, Human
agugggggccaacgagggcagc

SEQ ID NO: 418427 - RNA, 22 nt, Human
ugcagaggagcuggaaggcugg

SEQ ID NO: 418428 - RNA, 22 nt, Human
acccugagucagacagccugac

SEQ ID NO: 418429 - RNA, 22 nt, Human
auaaggaaugauguaucaguuu

SEQ ID NO: 418430 - RNA, 22 nt, Human
guguccucuuauugcucuuggc

SEQ ID NO: 418431 - RNA, 22 nt, Human
aaggaagacacagaugaaguga

SEQ ID NO: 418432 - RNA, 22 nt, Human
uuguuacaucuuauguaagugg

SEQ ID NO: 418433 - RNA, 18 nt, Human
agggucagugucacuggc

SEQ ID NO: 418434 - RNA, 22 nt, Human
ggcagcaacucggagagaagag

SEQ ID NO: 418435 - RNA, 22 nt, Human
auauuucuccaaauguuuucaa

SEQ ID NO: 418436 - RNA, 17 nt, Human
ggcagcugccacuuuuu

SEQ ID NO: 418437 - RNA, 22 nt, Human
agaauuuuugauuaucuacucg

SEQ ID NO: 418438 - RNA, 22 nt, Human
cagagccugcucacgucucugu

SEQ ID NO: 418439 - RNA, 22 nt, Human
cagcuggcuggucagugcacaa

SEQ ID NO: 418440 - RNA, 22 nt, Human
gagagugaggcaucaggggcag

SEQ ID NO: 418441 - RNA, 22 nt, Human
cacacaugucucuccaugcucu

SEQ ID NO: 418442 - RNA, 22 nt, Human
agcagcaggcuguguggacuga

SEQ ID NO: 418443 - RNA, 19 nt, Human
ucaaagcaagcauguucug

SEQ ID NO: 418444 - RNA, 21 nt, Human
ugucagcaacaauacuuucuc

SEQ ID NO: 418445 - RNA, 22 nt, Human
cucuggaaaaccacuagcagga

SEQ ID NO: 418446 - RNA, 22 nt, Human
ucucuuuuauguacacccugac

SEQ ID NO: 418447 - RNA, 22 nt, Human
ccugccuggagcugagugugga

SEQ ID NO: 418448 - RNA, 20 nt, Human
cauuuguuagcuuucuacug

SEQ ID NO: 418449 - RNA, 22 nt, Human
cccucugcaggcuggaccugcc

SEQ ID NO: 418450 - RNA, 22 nt, Human
ggaugcugacuuuggagcaugg

SEQ ID NO: 418451 - RNA, 22 nt, Human
ccagguggcuucugcccgaugu

SEQ ID NO: 418452 - RNA, 22 nt, Human
gggcagaggggcgcuucccucu

SEQ ID NO: 418453 - RNA, 22 nt, Human
aggacuccauguguccuggaga

SEQ ID NO: 418454 - RNA, 22 nt, Human
gcagggcagugugucugugggg

SEQ ID NO: 418455 - RNA, 22 nt, Human
aguggugcugcgcgcggagcuc

SEQ ID NO: 418456 - RNA, 22 nt, Human
cccacagguccccaugaacucg

SEQ ID NO: 418457 - RNA, 22 nt, Human
gaggaugugucuggucugggca

SEQ ID NO: 418458 - RNA, 22 nt, Human
aagacagagggaagcaaugaug

SEQ ID NO: 418459 - RNA, 22 nt, Human
uaguggaggggaugcaaagcuu

SEQ ID NO: 418460 - RNA, 22 nt, Human
cuagggaccucagcuccuggag

SEQ ID NO: 418461 - RNA, 22 nt, Human
cccagcuugcccaggacugagg

SEQ ID NO: 418462 - RNA, 22 nt, Human
ucagagcuaaggggagagcaaa

SEQ ID NO: 418463 - RNA, 22 nt, Human
agagugaucagauaucaggugu

SEQ ID NO: 418464 - RNA, 22 nt, Human
gccaggcuccccggaucccugg

SEQ ID NO: 418465 - RNA, 22 nt, Human
cuguccugcaguugggggcagg

SEQ ID NO: 418466 - RNA, 22 nt, Human
cgccucagccguggucaucuuc

SEQ ID NO: 418467 - RNA, 22 nt, Human
auagacauauggcuuuguuucu

SEQ ID NO: 418468 - RNA, 22 nt, Human
ggccugcacagagguggcucua

SEQ ID NO: 418469 - RNA, 20 nt, Human
aggcacuggggauagguaag

SEQ ID NO: 418470 - RNA, 22 nt, Human
uuguguccugauuugacacaau

SEQ ID NO: 418471 - RNA, 22 nt, Human
acccagaggcggagguugcagu

SEQ ID NO: 418472 - RNA, 22 nt, Human
gugucccacucuggaggugaag

SEQ ID NO: 418473 - RNA, 22 nt, Human
ugugucaauuuucauuccuacu

SEQ ID NO: 418474 - RNA, 22 nt, Human
cagcuuugcaggcuggucagug

SEQ ID NO: 418475 - RNA, 22 nt, Human
ggucccaggaaucuguguucua

SEQ ID NO: 418476 - RNA, 22 nt, Human
aaagccaguucuuagagaaagc

SEQ ID NO: 418477 - RNA, 22 nt, Human
acagccauagaugcuuauguaa

SEQ ID NO: 418478 - RNA, 22 nt, Human
agguagaggccuccaggcagca

SEQ ID NO: 418479 - RNA, 22 nt, Human
acauucuagaagucuuugcaau

SEQ ID NO: 418480 - RNA, 22 nt, Human
agaagccagaauauucauggau

SEQ ID NO: 418481 - RNA, 22 nt, Human
ugcuuuauguggcugauacuca

SEQ ID NO: 418482 - RNA, 22 nt, Human
acuuucuuaggcuguauaaaug

SEQ ID NO: 418483 - RNA, 22 nt, Human
caggaacaauguaagucucauu

SEQ ID NO: 418484 - RNA, 22 nt, Human
auaccuguguauccacaagcgu

SEQ ID NO: 418485 - RNA, 22 nt, Human
aaguaacaaugcuguugaauug

SEQ ID NO: 418486 - RNA, 18 nt, Human
uggguggcuagggaguuu

SEQ ID NO: 418487 - RNA, 22 nt, Human
acaauguaggauauguacuugu

SEQ ID NO: 418488 - RNA, 22 nt, Human
ugggggagauuagagcuucuua

SEQ ID NO: 418489 - RNA, 22 nt, Human
aacuguaaggcuuagaacagca

SEQ ID NO: 418490 - RNA, 22 nt, Human
ggcagccaugcacgcugccugg

SEQ ID NO: 418491 - RNA, 22 nt, Human
cagcucugugcaggccugggga

SEQ ID NO: 418492 - RNA, 22 nt, Human
aggcugcucugcgaagucagcu

SEQ ID NO: 418493 - RNA, 22 nt, Human
cggcugugucuucacaggagcc

SEQ ID NO: 418494 - RNA, 22 nt, Human
auguuacacauaggcauaaaug

SEQ ID NO: 418495 - RNA, 22 nt, Human
uuuacacauaccucuuuaaagu

SEQ ID NO: 418496 - RNA, 22 nt, Human
agggcaguucaacuucauagug

SEQ ID NO: 418497 - RNA, 22 nt, Human
gcucccugcagcugagaguucc

SEQ ID NO: 418498 - RNA, 22 nt, Human
cugcccugagucaugccagaug

SEQ ID NO: 418499 - RNA, 22 nt, Human
aucagcaaucucguguauuagg

SEQ ID NO: 418500 - RNA, 23 nt, Human
ugagcugguauuguccaucucca

SEQ ID NO: 418501 - RNA, 22 nt, Human
ccagucugaggccuggugaggg

SEQ ID NO: 418502 - RNA, 22 nt, Human
agcuggcccucgagagccaauu

SEQ ID NO: 418503 - RNA, 22 nt, Human
caagggugguauugggagcaua

SEQ ID NO: 418504 - RNA, 22 nt, Human
uaaugcacagaauugacauggg

SEQ ID NO: 418505 - RNA, 22 nt, Human
cuggccugaggucggcuguagg

SEQ ID NO: 418506 - RNA, 22 nt, Human
agccaaagaucagugugcaagu

SEQ ID NO: 418507 - RNA, 22 nt, Human
ugccuggguccaggccaagccu

SEQ ID NO: 418508 - RNA, 22 nt, Human
ugcagaaggccugacauugcac

SEQ ID NO: 418509 - RNA, 22 nt, Human
ucagggcaggacaguguaggcc

SEQ ID NO: 418510 - RNA, 22 nt, Human
cuucugcaauaaguuuuggucc

SEQ ID NO: 418511 - RNA, 22 nt, Human
uauugaaauucuucauguccuc

SEQ ID NO: 418512 - RNA, 22 nt, Human
guuucaaagcacagcucacauu

SEQ ID NO: 418513 - RNA, 22 nt, Human
cauaauaucuccgauuacuugc

SEQ ID NO: 418514 - RNA, 19 nt, Human
uagaaugcccacuuaaaaa

SEQ ID NO: 418515 - RNA, 22 nt, Human
agaggcugaaugaugucaucau

SEQ ID NO: 418516 - RNA, 21 nt, Human
aaaggccauaaucacggagca

SEQ ID NO: 418517 - RNA, 22 nt, Human
agccucucuccagcuuggcaga

SEQ ID NO: 418518 - RNA, 22 nt, Human
auacauacguacauacguaugu

SEQ ID NO: 418519 - RNA, 22 nt, Human
ucucaugugauucccgugcaug

SEQ ID NO: 418520 - RNA, 20 nt, Human
ucacauccucucccaacaug

SEQ ID NO: 418521 - RNA, 22 nt, Human
uccugcagcucugagaagcauc

SEQ ID NO: 418522 - RNA, 22 nt, Human
uguuugcucugacuaucuugcg

SEQ ID NO: 418523 - RNA, 22 nt, Human
ugcauuucagaagaaaauucgg

SEQ ID NO: 418524 - RNA, 22 nt, Human
aggcacaguuucauccccgggc

SEQ ID NO: 418525 - RNA, 22 nt, Human
uaggccaggacagagcuuccag

SEQ ID NO: 418526 - RNA, 22 nt, Human
aggagccuccuucucaugugca

SEQ ID NO: 418527 - RNA, 22 nt, Human
cugggagcugucaggagcgugu

SEQ ID NO: 418528 - RNA, 22 nt, Human
cagcuguguaugagagcaugcu

SEQ ID NO: 418529 - RNA, 22 nt, Human
gcagagccuugcgucaugugcc

SEQ ID NO: 418530 - RNA, 22 nt, Human
cucugugcccuacugcucagcu

SEQ ID NO: 418531 - RNA, 22 nt, Human
ggacuucuaagugccagacacu

SEQ ID NO: 418532 - RNA, 22 nt, Human
aagaggaacugggggcugaguc

SEQ ID NO: 418533 - RNA, 22 nt, Human
ucaaagucucugcuucuguaac

SEQ ID NO: 418534 - RNA, 22 nt, Human
gggcacuguacacugugcaugg

SEQ ID NO: 418535 - RNA, 22 nt, Human
acagucuugcuguauggucagg

SEQ ID NO: 418536 - RNA, 22 nt, Human
caaggccacguucugcaugcgg

SEQ ID NO: 418537 - RNA, 22 nt, Human
gucccucugugucccugcaguc

SEQ ID NO: 418538 - RNA, 22 nt, Human
gugugggcugcagaggcacagc

SEQ ID NO: 418539 - RNA, 22 nt, Human
cacagcugcccuacuccaugug

SEQ ID NO: 418540 - RNA, 22 nt, Human
caggggcugugggcggagccuc

SEQ ID NO: 418541 - RNA, 22 nt, Human
uugauguacagaauuguucaca

SEQ ID NO: 418542 - RNA, 18 nt, Human
ccagcaugccagaggcug

SEQ ID NO: 418543 - RNA, 22 nt, Human
cugccuuggcccuaguucaugg

SEQ ID NO: 418544 - RNA, 20 nt, Human
auaauuuacccugcaccacu

SEQ ID NO: 418545 - RNA, 22 nt, Human
gcuuuaaaccucuacucugucc

SEQ ID NO: 418546 - RNA, 22 nt, Human
ggcugccuccugcugggcugga

SEQ ID NO: 418547 - RNA, 22 nt, Human
gagcuuuaagggcacuggucuu

SEQ ID NO: 418548 - RNA, 22 nt, Human
ucugggcuuuacacugugcuua

SEQ ID NO: 418549 - RNA, 22 nt, Human
aucuggcucacuuagucuagga

SEQ ID NO: 418550 - RNA, 22 nt, Human
gcagaggagcaagcuggacacc

SEQ ID NO: 418551 - RNA, 22 nt, Human
cucagccccaauucuccccauu

SEQ ID NO: 418552 - RNA, 22 nt, Human
cagcucugugggagcguaugug

SEQ ID NO: 418553 - RNA, 19 nt, Human
uggggccuccugucccugg

SEQ ID NO: 418554 - RNA, 21 nt, Human
gagugcagcaagguagagucu

SEQ ID NO: 418555 - RNA, 22 nt, Human
caguaaaagauggaaauagaau

SEQ ID NO: 418556 - RNA, 22 nt, Human
gaggggcucuuuaauaguaaca

SEQ ID NO: 418557 - RNA, 22 nt, Human
aggacccagaggcagaggacgu

SEQ ID NO: 418558 - RNA, 22 nt, Human
uccuugaagaaugauucuugga

SEQ ID NO: 418559 - RNA, 22 nt, Human
agagcagagggcucugggacaa

SEQ ID NO: 418560 - RNA, 22 nt, Human
acagagagcugugauugaguua

SEQ ID NO: 418561 - RNA, 22 nt, Human
agagccaguuacaacuguggag

SEQ ID NO: 418562 - RNA, 22 nt, Human
caaacuguucucugugggauuc

SEQ ID NO: 418563 - RNA, 22 nt, Human
auccuugagaaaauaaaugacc

SEQ ID NO: 418564 - RNA, 22 nt, Human
cagggcucgcucgcucgcucgc

SEQ ID NO: 418565 - RNA, 22 nt, Human
ugggcugagcacugaggaagga

SEQ ID NO: 418566 - RNA, 22 nt, Human
guccucagggaauguggcgggu

SEQ ID NO: 418567 - RNA, 19 nt, Human
gagcccucuccauggccac

SEQ ID NO: 418568 - RNA, 22 nt, Human
ugggaguguucuuggcuugcuu

SEQ ID NO: 418569 - RNA, 22 nt, Human
ugaaagguagcuggccucauag

SEQ ID NO: 418570 - RNA, 22 nt, Human
cccccuggcaggcuggccucuc

SEQ ID NO: 418571 - RNA, 22 nt, Human
agcaggaaguagucuguaagca

SEQ ID NO: 418572 - RNA, 21 nt, Human
ccagagccugcugagcccccu

SEQ ID NO: 418573 - RNA, 22 nt, Human
ggggcuguuuuuggaauggcug

SEQ ID NO: 418574 - RNA, 22 nt, Human
ggcugcucugccuuccagcugg

SEQ ID NO: 418575 - RNA, 22 nt, Human
ggccccugcggacugccuagag

SEQ ID NO: 418576 - RNA, 22 nt, Human
caguacuuauuucuauuuaggg

SEQ ID NO: 418577 - RNA, 22 nt, Human
cugagccagagggagucggguc

SEQ ID NO: 418578 - RNA, 22 nt, Human
cagcacaauuuucaggagucca

SEQ ID NO: 418579 - RNA, 22 nt, Human
auugaaagauauacuguucuca

SEQ ID NO: 418580 - RNA, 23 nt, Human
gggaccagcuagggcugugaccu

SEQ ID NO: 418581 - RNA, 22 nt, Human
caggcugcagcagcaguggccc

SEQ ID NO: 418582 - RNA, 22 nt, Human
uggaggaaguugcuggaaguca

SEQ ID NO: 418583 - RNA, 22 nt, Human
uggcugagagucauccugugug

SEQ ID NO: 418584 - RNA, 22 nt, Human
agagugggccucugagucccag

SEQ ID NO: 418585 - RNA, 22 nt, Human
cugagcuuggccaggaaugaau

SEQ ID NO: 418586 - RNA, 22 nt, Human
ucagcuuugggggucucaggag

SEQ ID NO: 418587 - RNA, 23 nt, Human
aggaaggagguccuaacaguauc

SEQ ID NO: 418588 - RNA, 22 nt, Human
agcaugaagacuucagagcuag

SEQ ID NO: 418589 - RNA, 22 nt, Human
gcacugcaucuacuggcaagua

SEQ ID NO: 418590 - RNA, 22 nt, Human
agggcucuguccccagaggccc

SEQ ID NO: 418591 - RNA, 22 nt, Human
cugagcagccccaccagccauu

SEQ ID NO: 418592 - RNA, 22 nt, Human
ucagagguaguagcagaguuga

SEQ ID NO: 418593 - RNA, 22 nt, Human
ugcucauuggcgaucugaggga

SEQ ID NO: 418594 - RNA, 22 nt, Human
gaacagcugcuagagaucugug

SEQ ID NO: 418595 - RNA, 22 nt, Human
ggaggacaggggcugcagcaca

SEQ ID NO: 418596 - RNA, 22 nt, Human
ucagagaugcagugccaccuac

SEQ ID NO: 418597 - RNA, 22 nt, Human
ccaggccuucugaggacacucu

SEQ ID NO: 418598 - RNA, 22 nt, Human
ggcacagggagccgcaguugca

SEQ ID NO: 418599 - RNA, 22 nt, Human
acugugcuuucucuggaggcau

SEQ ID NO: 418600 - RNA, 22 nt, Human
cagcagcuacuuggagcagcag

SEQ ID NO: 418601 - RNA, 22 nt, Human
cuuugaaaacuuaaauaacagc

SEQ ID NO: 418602 - RNA, 22 nt, Human
ggagccugagcggcccagggcc

SEQ ID NO: 418603 - RNA, 22 nt, Human
accaaggagaaggugcaagcuu

SEQ ID NO: 418604 - RNA, 22 nt, Human
ucagagucauugcaaguagaag

SEQ ID NO: 418605 - RNA, 22 nt, Human
uccuggccuugcuccugaugcc

SEQ ID NO: 418606 - RNA, 22 nt, Human
cugcugagguccuugcucagac

SEQ ID NO: 418607 - RNA, 23 nt, Human
gccaggcacaugguggacacgca

SEQ ID NO: 418608 - RNA, 22 nt, Human
ugcuggcugggcugcuggagac

SEQ ID NO: 418609 - RNA, 22 nt, Human
gccugaaguuucaugccucuau

SEQ ID NO: 418610 - RNA, 23 nt, Human
uggcuggcagaaacugaagcaug

SEQ ID NO: 418611 - RNA, 22 nt, Human
agguaagggucacaguucauau

SEQ ID NO: 418612 - RNA, 22 nt, Human
ugaaaucuacccuauucagggu

SEQ ID NO: 418613 - RNA, 22 nt, Human
gcuggccauggccugcgccauc

SEQ ID NO: 418614 - RNA, 22 nt, Human
ugaugaauaaacuugagaguca

SEQ ID NO: 418615 - RNA, 22 nt, Human
uuucucuaaauagggaggcuua

SEQ ID NO: 418616 - RNA, 22 nt, Human
gaaagacauaguugcaagaugg

SEQ ID NO: 418617 - RNA, 18 nt, Human
agcagaauucuaggguuc

SEQ ID NO: 418618 - RNA, 22 nt, Human
ggccugcucugcagccucuaca

SEQ ID NO: 418619 - RNA, 22 nt, Human
ugauucuauggaaggcauaagg

SEQ ID NO: 418620 - RNA, 22 nt, Human
acccagcaugacaccugcacau

SEQ ID NO: 418621 - RNA, 22 nt, Human
uuuggaaaguguacaaauuuga

SEQ ID NO: 418622 - RNA, 22 nt, Human
uaacacugguauuucauuuagu

SEQ ID NO: 418623 - RNA, 17 nt, Human
aggagucucagaugagc

SEQ ID NO: 418624 - RNA, 22 nt, Human
aagugggaauagaaaugaaggu

SEQ ID NO: 418625 - RNA, 22 nt, Human
gcuuggccagcagccgggaugc

SEQ ID NO: 418626 - RNA, 22 nt, Human
aaagaggaaccaagagcacgug

SEQ ID NO: 418627 - RNA, 22 nt, Human
uggccugauuuugcuaagagaa

SEQ ID NO: 418628 - RNA, 22 nt, Human
gucugaggaagaugcaggggga

SEQ ID NO: 418629 - RNA, 22 nt, Human
ucuggcucaucucuccagguaa

SEQ ID NO: 418630 - RNA, 22 nt, Human
guggaggguuugcaaugugcag

SEQ ID NO: 418631 - RNA, 22 nt, Human
auuuuuuagaaccuggccugau

SEQ ID NO: 418632 - RNA, 22 nt, Human
gaguguggugaacaggagcacc

SEQ ID NO: 418633 - RNA, 22 nt, Human
cugugcuggcagaccuggaguu

SEQ ID NO: 418634 - RNA, 22 nt, Human
accagaguaauguguggaaauu

SEQ ID NO: 418635 - RNA, 22 nt, Human
aaagaagggacagacugccucu

SEQ ID NO: 418636 - RNA, 22 nt, Human
auaauuaauuucaguaaucucc

SEQ ID NO: 418637 - RNA, 22 nt, Human
cugggagguggagguugcauug

SEQ ID NO: 418638 - RNA, 22 nt, Human
gcagcuuggugaaaggugaugg

SEQ ID NO: 418639 - RNA, 22 nt, Human
uggcacuggcgcaggauggcgg

SEQ ID NO: 418640 - RNA, 22 nt, Human
acuuuuuacaggguguauacca

SEQ ID NO: 418641 - RNA, 22 nt, Human
ucaacacuauccaggcaaucuu

SEQ ID NO: 418642 - RNA, 22 nt, Human
auacauguaacugcauuguaau

SEQ ID NO: 418643 - RNA, 22 nt, Human
agugacugacaccuguaauccc

SEQ ID NO: 418644 - RNA, 22 nt, Human
uuauguacaauguuaauguaaa

SEQ ID NO: 418645 - RNA, 22 nt, Human
cagcuuuaggacucauaauaaa

SEQ ID NO: 418646 - RNA, 22 nt, Human
cugucuguuucugauucaaccu

SEQ ID NO: 418647 - RNA, 22 nt, Human
acagcuuuguguuaaugggaag

SEQ ID NO: 418648 - RNA, 22 nt, Human
acaggcucucagccaguuggca

SEQ ID NO: 418649 - RNA, 22 nt, Human
ggggcagagucuggacuguugu

SEQ ID NO: 418650 - RNA, 22 nt, Human
acauguuagaaaugcagaaucu

SEQ ID NO: 418651 - RNA, 22 nt, Human
gcuuuuucaaaugaaagcuggu

SEQ ID NO: 418652 - RNA, 22 nt, Human
guccucaggaaggcuuucugac

SEQ ID NO: 418653 - RNA, 22 nt, Human
uccaugccaggcagucgaugca

SEQ ID NO: 418654 - RNA, 22 nt, Human
ucaggugggaccugcuaggaca

SEQ ID NO: 418655 - RNA, 22 nt, Human
ggacagaggguugacagaguau

SEQ ID NO: 418656 - RNA, 22 nt, Human
uugacaauugggagauauaaag

SEQ ID NO: 418657 - RNA, 22 nt, Human
cacugcccagcgucuuaggcac

SEQ ID NO: 418658 - RNA, 22 nt, Human
uggaaugacagagagucugaau

SEQ ID NO: 418659 - RNA, 22 nt, Human
cugcagggagaggggacagccu

SEQ ID NO: 418660 - RNA, 17 nt, Human
agaaagaggauccacag

SEQ ID NO: 418661 - RNA, 22 nt, Human
gccagacacuccccugggcagg

SEQ ID NO: 418662 - RNA, 22 nt, Human
gcaucuaaauaaacgugggagu

SEQ ID NO: 418663 - RNA, 22 nt, Human
gaggaguguauuccacaccacu

SEQ ID NO: 418664 - RNA, 22 nt, Human
ccagaagaccccguccaccucc

SEQ ID NO: 418665 - RNA, 22 nt, Human
uauuucuauuccccaggcaagu

SEQ ID NO: 418666 - RNA, 22 nt, Human
ucccagggacugggcuaggcuu

SEQ ID NO: 418667 - RNA, 22 nt, Human
ugcaggugguuuggacacugcu

SEQ ID NO: 418668 - RNA, 22 nt, Human
gaggcagcuuggggcugugggu

SEQ ID NO: 418669 - RNA, 22 nt, Human
agggaaaguaagcauuucauua

SEQ ID NO: 418670 - RNA, 22 nt, Human
ccaggaagccucagaugcugag

SEQ ID NO: 418671 - RNA, 22 nt, Human
guugaguggguuaggaugcuga

SEQ ID NO: 418672 - RNA, 22 nt, Human
cugggcuccuaaccauccaggu

SEQ ID NO: 418673 - RNA, 22 nt, Human
caugaaaaauuuacuguuaaca

SEQ ID NO: 418674 - RNA, 22 nt, Human
gcuggccugucuagagccuuac

SEQ ID NO: 418675 - RNA, 22 nt, Human
ucaggauaaaauguaauggcaa

SEQ ID NO: 418676 - RNA, 22 nt, Human
aagagccagcuagugaagaggc

SEQ ID NO: 418677 - RNA, 22 nt, Human
agggccucugacgcccccagcc

SEQ ID NO: 418678 - RNA, 22 nt, Human
uuucuuauacuauauugucauc

SEQ ID NO: 418679 - RNA, 22 nt, Human
aaagaugucauacacauuaaga

SEQ ID NO: 418680 - RNA, 20 nt, Human
aggcagacaaggagucuguu

SEQ ID NO: 418681 - RNA, 22 nt, Human
uacagagacuuuauggcacaaa

SEQ ID NO: 418682 - RNA, 22 nt, Human
ggggcuccagucuucacauuuu

SEQ ID NO: 418683 - RNA, 22 nt, Human
uggcucugaucagauguccagu

SEQ ID NO: 418684 - RNA, 22 nt, Human
gccagggaacccaagggccuca

SEQ ID NO: 418685 - RNA, 22 nt, Human
uggaagcaucacuucuugccug

SEQ ID NO: 418686 - RNA, 22 nt, Human
uggcugaaggaagauucuucua

SEQ ID NO: 418687 - RNA, 22 nt, Human
ucacuuuugaucccuaugcagu

SEQ ID NO: 418688 - RNA, 22 nt, Human
cucaccaggaacagcugcggag

SEQ ID NO: 418689 - RNA, 22 nt, Human
caaaguuaucaacugcaacauu

SEQ ID NO: 418690 - RNA, 22 nt, Human
auagaaauggcagcuggugcua

SEQ ID NO: 418691 - RNA, 22 nt, Human
uccuugaagcaacgugcagaca

SEQ ID NO: 418692 - RNA, 19 nt, Human
accugcaguaauaauuccu

SEQ ID NO: 418693 - RNA, 19 nt, Human
ucaucucacagggccuggc

SEQ ID NO: 418694 - RNA, 22 nt, Human
uggcccugcuguaucaucugcu

SEQ ID NO: 418695 - RNA, 22 nt, Human
gcaccugggguacacagcuaca

SEQ ID NO: 418696 - RNA, 22 nt, Human
agagcccucucauuggcuuauu

SEQ ID NO: 418697 - RNA, 22 nt, Human
gggacagcuguagugcuuggcu

SEQ ID NO: 418698 - RNA, 20 nt, Human
cccaggugucugaagcucug

SEQ ID NO: 418699 - RNA, 22 nt, Human
ucuuggagacucuuguauauuu

SEQ ID NO: 418700 - RNA, 22 nt, Human
gagagaggccuccauguacuga

SEQ ID NO: 418701 - RNA, 22 nt, Human
cuggugccuccucccugugcuu

SEQ ID NO: 418702 - RNA, 22 nt, Human
cagcuccuauuagacacugaau

SEQ ID NO: 418703 - RNA, 22 nt, Human
gcugugagcugccugugucaca

SEQ ID NO: 418704 - RNA, 22 nt, Human
ggucucaggagacuggagagca

SEQ ID NO: 418705 - RNA, 22 nt, Human
ggccccacgggggaguccuagu

SEQ ID NO: 418706 - RNA, 21 nt, Human
ugauuuccaucuuaaaauaaa

SEQ ID NO: 418707 - RNA, 22 nt, Human
auaugucgcuacaucauuagau

SEQ ID NO: 418708 - RNA, 22 nt, Human
ggaaagagcccagcagugcuug

SEQ ID NO: 418709 - RNA, 22 nt, Human
ccugccugucccucaguccaca

SEQ ID NO: 418710 - RNA, 22 nt, Human
guggccuggauagacuccaucu

SEQ ID NO: 418711 - RNA, 22 nt, Human
ugggccacaagccaugggacca

SEQ ID NO: 418712 - RNA, 20 nt, Human
agggucagagagcgugagug

SEQ ID NO: 418713 - RNA, 22 nt, Human
uuugcauuccugccugcauuca

SEQ ID NO: 418714 - RNA, 22 nt, Human
ucugaaaauguugacuuuguuu

SEQ ID NO: 418715 - RNA, 22 nt, Human
guguuuccucuagaagccaugg

SEQ ID NO: 418716 - RNA, 22 nt, Human
ucacuuaaaaauucuaguuaug

SEQ ID NO: 418717 - RNA, 19 nt, Human
ccugggaggcggagguugc

SEQ ID NO: 418718 - RNA, 21 nt, Human
gcaugccugcaucuuaguguu

SEQ ID NO: 418719 - RNA, 22 nt, Human
gccagcagggcccaaaugcugg

SEQ ID NO: 418720 - RNA, 22 nt, Human
agccuggagcuugaguuaugag

SEQ ID NO: 418721 - RNA, 22 nt, Human
ucugaggcuauguucaggcuaa

SEQ ID NO: 418722 - RNA, 22 nt, Human
aaagccacugcauguguaguau

SEQ ID NO: 418723 - RNA, 22 nt, Human
gauacaaauucaugucugaauu

SEQ ID NO: 418724 - RNA, 22 nt, Human
uuguacaaguauuaugugaaca

SEQ ID NO: 418725 - RNA, 22 nt, Human
cagcuucuucaguccuggagcu

SEQ ID NO: 418726 - RNA, 22 nt, Human
guugaaaguagaugcuauuugg

SEQ ID NO: 418727 - RNA, 22 nt, Human
ugcaucuguucagagcugucga

SEQ ID NO: 418728 - RNA, 22 nt, Human
ucaggcagcuccaggaauggua

SEQ ID NO: 418729 - RNA, 22 nt, Human
uucacaguggcugugccauuug

SEQ ID NO: 418730 - RNA, 22 nt, Human
ggggaccuuuccauuucugaga

SEQ ID NO: 418731 - RNA, 22 nt, Human
agugcauauaugaagaguauga

SEQ ID NO: 418732 - RNA, 22 nt, Human
ugggccuggaguuuguccagag

SEQ ID NO: 418733 - RNA, 22 nt, Human
gccagggcucgcggucccucgu

SEQ ID NO: 418734 - RNA, 22 nt, Human
ccaggccuguguuguguggagg

SEQ ID NO: 418735 - RNA, 22 nt, Human
ccugccugcagaaaguaucucc

SEQ ID NO: 418736 - RNA, 22 nt, Human
gcacacacaugugaguacaugc

SEQ ID NO: 418737 - RNA, 22 nt, Human
uucaagguaugguagcugguca

SEQ ID NO: 418738 - RNA, 22 nt, Human
ucuggcuuucauuuguuuaaag

SEQ ID NO: 418739 - RNA, 22 nt, Human
ugugccugucacccucagagag

SEQ ID NO: 418740 - RNA, 22 nt, Human
uggacagguugaguaggaggag

SEQ ID NO: 418741 - RNA, 22 nt, Human
gcuguauuccugcacuguauag

SEQ ID NO: 418742 - RNA, 22 nt, Human
gcuggcagccaagugaagaggg

SEQ ID NO: 418743 - RNA, 22 nt, Human
ucucccaggucauacacagaga

SEQ ID NO: 418744 - RNA, 22 nt, Human
gaaggcacugaacuccuucugg

SEQ ID NO: 418745 - RNA, 22 nt, Human
gagggcugauguugccaccuca

SEQ ID NO: 418746 - RNA, 22 nt, Human
gaacagcuucuugggagcuggg

SEQ ID NO: 418747 - RNA, 22 nt, Human
gugguaaucggauucuuaccgg

SEQ ID NO: 418748 - RNA, 22 nt, Human
aggccuggguguucaccagaag

SEQ ID NO: 418749 - RNA, 22 nt, Human
agugucauuccagggacccucg

SEQ ID NO: 418750 - RNA, 22 nt, Human
auaaggcagucacuggaauguu

SEQ ID NO: 418751 - RNA, 22 nt, Human
ggcugccagugagugcagaccg

SEQ ID NO: 418752 - RNA, 22 nt, Human
ucucugagcaugccauauugcu

SEQ ID NO: 418753 - RNA, 22 nt, Human
agcucccagcuccuuugagaga

SEQ ID NO: 418754 - RNA, 22 nt, Human
uggaccugcguaggugcugggc

SEQ ID NO: 418755 - RNA, 22 nt, Human
ggcaaaaaguucccaucagugu

SEQ ID NO: 418756 - RNA, 22 nt, Human
gcugucuugcucacucuugcag

SEQ ID NO: 418757 - RNA, 22 nt, Human
uugugucccccuuugagagcca

SEQ ID NO: 418758 - RNA, 21 nt, Human
ugaggcaggggugcuuuuguc

SEQ ID NO: 418759 - RNA, 22 nt, Human
ucacauaaauuauacaauuuca

SEQ ID NO: 418760 - RNA, 22 nt, Human
cugccacuuacuaggcauggug

SEQ ID NO: 418761 - RNA, 22 nt, Human
gucaggauuggggucaugaguc

SEQ ID NO: 418762 - RNA, 22 nt, Human
ucuguacaguaccagauaguaa

SEQ ID NO: 418763 - RNA, 22 nt, Human
gggaucagcaagccacugcacc

SEQ ID NO: 418764 - RNA, 22 nt, Human
uggagcugagagccaggcuggc

SEQ ID NO: 418765 - RNA, 23 nt, Human
ucagugauguugaaccuagcagu

SEQ ID NO: 418766 - RNA, 21 nt, Human
uuagcaaagcaaacacaugcu

SEQ ID NO: 418767 - RNA, 22 nt, Human
ugaggccugacagaccaagccu

SEQ ID NO: 418768 - RNA, 22 nt, Human
agccucaguuucaggccuccuc

SEQ ID NO: 418769 - RNA, 22 nt, Human
aaacacaccuuuggaacuguga

SEQ ID NO: 418770 - RNA, 22 nt, Human
cugcuccacaccuccauuuccu

SEQ ID NO: 418771 - RNA, 22 nt, Human
accagagcucuucagcacagga

SEQ ID NO: 418772 - RNA, 22 nt, Human
uccacuuuagcaaugauugaau

SEQ ID NO: 418773 - RNA, 22 nt, Human
aagccuuccugagugcaaggcc

SEQ ID NO: 418774 - RNA, 22 nt, Human
aagcagccuggacuugggcugg

SEQ ID NO: 418775 - RNA, 22 nt, Human
gcaggaguguauuugcauguaa

SEQ ID NO: 418776 - RNA, 22 nt, Human
gugccagcaguuauggugauuu

SEQ ID NO: 418777 - RNA, 22 nt, Human
agggugcagaaggagccuagga

SEQ ID NO: 418778 - RNA, 22 nt, Human
gagagcuguccggcugagcagc

SEQ ID NO: 418779 - RNA, 22 nt, Human
ugcauuguugaccaguugugca

SEQ ID NO: 418780 - RNA, 21 nt, Human
ggcagcacuaccugaagcaua

SEQ ID NO: 418781 - RNA, 21 nt, Human
ucuuugcaucaguuguuuucu

SEQ ID NO: 418782 - RNA, 22 nt, Human
gcuguacaucacaauuugcugu

SEQ ID NO: 418783 - RNA, 22 nt, Human
uacacuuuuuacuacagauucu

SEQ ID NO: 418784 - RNA, 22 nt, Human
gaugaggggucauuggcuggga

SEQ ID NO: 418785 - RNA, 22 nt, Human
uucaagauaauaggaaugaaaa

SEQ ID NO: 418786 - RNA, 22 nt, Human
agcuuuaucacaauauuggcua

SEQ ID NO: 418787 - RNA, 22 nt, Human
ucuaauccuugcuaccugggug

SEQ ID NO: 418788 - RNA, 22 nt, Human
gucucagaccacccucuuuggc

SEQ ID NO: 418789 - RNA, 22 nt, Human
uggaaggcaacggagugagcug

SEQ ID NO: 418790 - RNA, 22 nt, Human
gcccagcuuuuugaggcaggca

SEQ ID NO: 418791 - RNA, 22 nt, Human
agaauuagucacaauuauagga

SEQ ID NO: 418792 - RNA, 22 nt, Human
acuguacaaauauugcaaaaua

SEQ ID NO: 418793 - RNA, 22 nt, Human
aaauguguuucuuugugaaugg

SEQ ID NO: 418794 - RNA, 22 nt, Human
gccugggaagacuaagugggag

SEQ ID NO: 418795 - RNA, 22 nt, Human
cugccucaugcugccugcagcc

SEQ ID NO: 418796 - RNA, 22 nt, Human
aagggcugcauuugauguguca

SEQ ID NO: 418797 - RNA, 20 nt, Human
cguaaggcaagugcugcauc

SEQ ID NO: 418798 - RNA, 22 nt, Human
gcagcuggauuucaagagggag

SEQ ID NO: 418799 - RNA, 23 nt, Human
gggagccauggguggucauggag

SEQ ID NO: 418800 - RNA, 22 nt, Human
ccacccagccagaugcaggaag

SEQ ID NO: 418801 - RNA, 22 nt, Human
gcucaggaaggcucaaccagga

SEQ ID NO: 418802 - RNA, 22 nt, Human
agagcuguagcuuccuagagcc

SEQ ID NO: 418803 - RNA, 22 nt, Human
ugacaccacaacuagccauuga

SEQ ID NO: 418804 - RNA, 22 nt, Human
gacuguacuugagagaggaacu

SEQ ID NO: 418805 - RNA, 22 nt, Human
uggcucugugcuucuaguaucu

SEQ ID NO: 418806 - RNA, 18 nt, Human
cugaggcccagagagggc

SEQ ID NO: 418807 - RNA, 22 nt, Human
agagccagagaccuggguucac

SEQ ID NO: 418808 - RNA, 22 nt, Human
ugcuggggcucugaccacucca

SEQ ID NO: 418809 - RNA, 15 nt, Human
cagucccagggaccc

SEQ ID NO: 418810 - RNA, 22 nt, Human
ucuuuauuuaagucuguuguaa

SEQ ID NO: 418811 - RNA, 22 nt, Human
agcaauaacagaaaacuuuccu

SEQ ID NO: 418812 - RNA, 22 nt, Human
gcagggcaucccugagcgggug

SEQ ID NO: 418813 - RNA, 22 nt, Human
agagcugaauuuggguggugga

SEQ ID NO: 418814 - RNA, 22 nt, Human
aaaggccacacagagcagggag

SEQ ID NO: 418815 - RNA, 22 nt, Human
ccugaagcaaggguaggcaggu

SEQ ID NO: 418816 - RNA, 22 nt, Human
agugcugaagacuggcuaggga

SEQ ID NO: 418817 - RNA, 22 nt, Human
ucaggauguccaaaauccagcc

SEQ ID NO: 418818 - RNA, 22 nt, Human
agagacaggguuuugucguguu

SEQ ID NO: 418819 - RNA, 22 nt, Human
cucacuggcaagacuacaggug

SEQ ID NO: 418820 - RNA, 22 nt, Human
augggaggaucacuugaggcca

SEQ ID NO: 418821 - RNA, 22 nt, Human
ccagagaggggaagggcuugcc

SEQ ID NO: 418822 - RNA, 22 nt, Human
auauauuuacucuccuguugca

SEQ ID NO: 418823 - RNA, 22 nt, Human
ugaggccagugacauauauuaa

SEQ ID NO: 418824 - RNA, 22 nt, Human
cugccgagugggucaugaggca

SEQ ID NO: 418825 - RNA, 22 nt, Human
agggcuccuaugaugcucugcc

SEQ ID NO: 418826 - RNA, 22 nt, Human
agcugggccugagcuggaagcu

SEQ ID NO: 418827 - RNA, 22 nt, Human
ggugaagguggaacgcagagca

SEQ ID NO: 418828 - RNA, 22 nt, Human
cugagcagcaacccagagccuc

SEQ ID NO: 418829 - RNA, 22 nt, Human
acauuucucagggaguuuugcu

SEQ ID NO: 418830 - RNA, 22 nt, Human
agcagugaaacagcugcauaug

SEQ ID NO: 418831 - RNA, 22 nt, Human
agccaggcgggucuuugcuccu

SEQ ID NO: 418832 - RNA, 22 nt, Human
cuggagcagguuuaggaguccc

SEQ ID NO: 418833 - RNA, 22 nt, Human
agccagugcaacagcagugaag

SEQ ID NO: 418834 - RNA, 22 nt, Human
augcugugauuguagaaauauu

SEQ ID NO: 418835 - RNA, 20 nt, Human
acagcagauaccacaacuau

SEQ ID NO: 418836 - RNA, 19 nt, Human
ucucugcuucucuuggcau

SEQ ID NO: 418837 - RNA, 22 nt, Human
agggcaugugggagaggagccu

SEQ ID NO: 418838 - RNA, 20 nt, Human
cugagcugagcuccaugggu

SEQ ID NO: 418839 - RNA, 22 nt, Human
aagcuuuaagugucagucagcc

SEQ ID NO: 418840 - RNA, 22 nt, Human
aauaagaauuuacuugucaaga

SEQ ID NO: 418841 - RNA, 22 nt, Human
agcccucauggaacagcuccua

SEQ ID NO: 418842 - RNA, 22 nt, Human
aaggaggaauuucagggugaau

SEQ ID NO: 418843 - RNA, 22 nt, Human
cacaguccuacagagaucagag

SEQ ID NO: 418844 - RNA, 22 nt, Human
caaaugcagucccuuuguugcu

SEQ ID NO: 418845 - RNA, 22 nt, Human
ugaggccuggacucugcaugga

SEQ ID NO: 418846 - RNA, 22 nt, Human
cugccugugccaccgccucauu

SEQ ID NO: 418847 - RNA, 22 nt, Human
uagccgggugugguggaacucc

SEQ ID NO: 418848 - RNA, 22 nt, Human
ugacacauuaaaugcucacaaa

SEQ ID NO: 418849 - RNA, 20 nt, Human
cuguaucagguuacaaagua

SEQ ID NO: 418850 - RNA, 22 nt, Human
agagacuggagaugggcagugu

SEQ ID NO: 418851 - RNA, 22 nt, Human
ccugagcuggaagagcuugugc

SEQ ID NO: 418852 - RNA, 22 nt, Human
caggggcugagaaggaacgucc

SEQ ID NO: 418853 - RNA, 22 nt, Human
gcucucugccauaugaggauac

SEQ ID NO: 418854 - RNA, 22 nt, Human
auuguaauuuuagagaaagugg

SEQ ID NO: 418855 - RNA, 18 nt, Human
aggagccuuugcacugga

SEQ ID NO: 418856 - RNA, 22 nt, Human
uagaaaucauuuagaaguauug

SEQ ID NO: 418857 - RNA, 22 nt, Human
gaaaggagggaaacagagcggu

SEQ ID NO: 418858 - RNA, 22 nt, Human
aggcagccuauggggagcucag

SEQ ID NO: 418859 - RNA, 19 nt, Human
ucauaaggagagaggaaau

SEQ ID NO: 418860 - RNA, 22 nt, Human
gcauucaucuuccuccaugcag

SEQ ID NO: 418861 - RNA, 19 nt, Human
cucucacucgccacauccu

SEQ ID NO: 418862 - RNA, 22 nt, Human
agucacccuccaacucuccacu

SEQ ID NO: 418863 - RNA, 22 nt, Human
aagagcuggaugaagaaaucaa

SEQ ID NO: 418864 - RNA, 22 nt, Human
gggcugggaauggcuaaguaug

SEQ ID NO: 418865 - RNA, 22 nt, Human
gaggcauaaaucacaguguuca

SEQ ID NO: 418866 - RNA, 22 nt, Human
agcuggugcugaagcucuugag

SEQ ID NO: 418867 - RNA, 22 nt, Human
augcccgauaccuaguuaacuc

SEQ ID NO: 418868 - RNA, 22 nt, Human
ggucucagaucuuuauuaaggc

SEQ ID NO: 418869 - RNA, 22 nt, Human
aggcagccugguuugaauggaa

SEQ ID NO: 418870 - RNA, 22 nt, Human
acagcagccuuguugguuucga

SEQ ID NO: 418871 - RNA, 22 nt, Human
ugcugccacugguagucucauu

SEQ ID NO: 418872 - RNA, 22 nt, Human
gcugucccgaaccccugguaau

SEQ ID NO: 418873 - RNA, 20 nt, Human
auucuacaagaauaagcaug

SEQ ID NO: 418874 - RNA, 22 nt, Human
cugaggaguuuggguuguucaa

SEQ ID NO: 418875 - RNA, 22 nt, Human
auuagcugaccucuaaggagcc

SEQ ID NO: 418876 - RNA, 22 nt, Human
uagggacaaagagcugaggccu

SEQ ID NO: 418877 - RNA, 22 nt, Human
uggaugcuguaggacacgcucu

SEQ ID NO: 418878 - RNA, 19 nt, Human
ggcuccuguggcugcagcc

SEQ ID NO: 418879 - RNA, 22 nt, Human
guggcagcaaaauccugcauuc

SEQ ID NO: 418880 - RNA, 22 nt, Human
aguagaaagaaggcacugggcc

SEQ ID NO: 418881 - RNA, 22 nt, Human
ugcaaucucggcacuuugggag

SEQ ID NO: 418882 - RNA, 22 nt, Human
gacacauagaucuaucucacuc

SEQ ID NO: 418883 - RNA, 22 nt, Human
aaacauuguaauuuuagcaugg

SEQ ID NO: 418884 - RNA, 22 nt, Human
caggcagaguuagugauuuagg

SEQ ID NO: 418885 - RNA, 22 nt, Human
cucagcccagcccaggaccagg

SEQ ID NO: 418886 - RNA, 22 nt, Human
gcaaaaaaugcuuguugcuuag

SEQ ID NO: 418887 - RNA, 23 nt, Human
ugagaagccauuagagcaggugg

SEQ ID NO: 418888 - RNA, 22 nt, Human
aaaucagucccucuuggaauuu

SEQ ID NO: 418889 - RNA, 22 nt, Human
gagccuggccuccugccucagc

SEQ ID NO: 418890 - RNA, 22 nt, Human
ggcagcuggccuccucgcccac

SEQ ID NO: 418891 - RNA, 22 nt, Human
uccaggcaucccccaggacaga

SEQ ID NO: 418892 - RNA, 22 nt, Human
gcugccugggcaggaggcgcug

SEQ ID NO: 418893 - RNA, 22 nt, Human
ugaaugauacagaauuauguag

SEQ ID NO: 418894 - RNA, 22 nt, Human
aaagguuaagguguucaagaaa

SEQ ID NO: 418895 - RNA, 22 nt, Human
auccuugaacuuagacacuagg

SEQ ID NO: 418896 - RNA, 21 nt, Human
acagacagggccagugucccc

SEQ ID NO: 418897 - RNA, 22 nt, Human
ggcaggugugagaucgaggcca

SEQ ID NO: 418898 - RNA, 23 nt, Human
ccacagagcugccaauuccugug

SEQ ID NO: 418899 - RNA, 22 nt, Human
aaagcccauguggaaguacagg

SEQ ID NO: 418900 - RNA, 22 nt, Human
gggcacugcuggaggcucccug

SEQ ID NO: 418901 - RNA, 22 nt, Human
ugguccuggggaucugcaguga

SEQ ID NO: 418902 - RNA, 22 nt, Human
uugauuucuuacucuuccaagg

SEQ ID NO: 418903 - RNA, 22 nt, Human
cacugcauggaugauggcugua

SEQ ID NO: 418904 - RNA, 22 nt, Human
uacaguaaagcugcuaugaauu

SEQ ID NO: 418905 - RNA, 19 nt, Human
uccuccuuacuuccucuug

SEQ ID NO: 418906 - RNA, 22 nt, Human
gcugagagaaaagugagguucu

SEQ ID NO: 418907 - RNA, 22 nt, Human
ugagccugcugucgcuggaccc

SEQ ID NO: 418908 - RNA, 22 nt, Human
uggucgaccaguuggaaaguaa

SEQ ID NO: 418909 - RNA, 22 nt, Human
agucccagcccaguccuguaag

SEQ ID NO: 418910 - RNA, 22 nt, Human
ccagggcugagcugugaccaug

SEQ ID NO: 418911 - RNA, 23 nt, Human
uugcuucugugcaauucaguacu

SEQ ID NO: 418912 - RNA, 20 nt, Human
gaagccagaggggaaaggag

SEQ ID NO: 418913 - RNA, 22 nt, Human
acagagagaauuggguuuacag

SEQ ID NO: 418914 - RNA, 22 nt, Human
agaaaguucugugaguuguuca

SEQ ID NO: 418915 - RNA, 22 nt, Human
ucagaaugaaauuucuuucaga

SEQ ID NO: 418916 - RNA, 22 nt, Human
cagguacauucguagacccauu

SEQ ID NO: 418917 - RNA, 22 nt, Human
cuggcugguuacuauuucuggu

SEQ ID NO: 418918 - RNA, 22 nt, Human
aagaacaacugcuuuaaaagca

SEQ ID NO: 418919 - RNA, 22 nt, Human
uggcugcuuguuuuagugaggc

SEQ ID NO: 418920 - RNA, 22 nt, Human
ggcagcuccuccuagucugccc

SEQ ID NO: 418921 - RNA, 19 nt, Human
gucagcaccauggacaggg

SEQ ID NO: 418922 - RNA, 22 nt, Human
ugaggcuuagagaagaugggau

SEQ ID NO: 418923 - RNA, 22 nt, Human
agugugugcaugcauucgugca

SEQ ID NO: 418924 - RNA, 22 nt, Human
ggcucuggguucugcaaugcgu

SEQ ID NO: 418925 - RNA, 22 nt, Human
ccacagggcacagacaggaagc

SEQ ID NO: 418926 - RNA, 22 nt, Human
agucucugcugguugugccuau

SEQ ID NO: 418927 - RNA, 22 nt, Human
ucugcagaaguggcugggccac

SEQ ID NO: 418928 - RNA, 22 nt, Human
uaauccaggguauucuaguuuc

SEQ ID NO: 418929 - RNA, 22 nt, Human
caaaguuuggcucucaugacau

SEQ ID NO: 418930 - RNA, 22 nt, Human
gggcgccgugggaaacagccgg

SEQ ID NO: 418931 - RNA, 22 nt, Human
cagacccugggccacagaggag

SEQ ID NO: 418932 - RNA, 17 nt, Human
ggccuugggcugcucuu

SEQ ID NO: 418933 - RNA, 22 nt, Human
cauuuguauguuccuccuuagg

SEQ ID NO: 418934 - RNA, 22 nt, Human
auucuguauggaaaagcacuau

SEQ ID NO: 418935 - RNA, 22 nt, Human
ugcuguagcccugcacagugca

SEQ ID NO: 418936 - RNA, 22 nt, Human
acauuguauaaugauuaucaca

SEQ ID NO: 418937 - RNA, 22 nt, Human
cgccaggcuugguagcucaugc

SEQ ID NO: 418938 - RNA, 22 nt, Human
ucccagagauuuccucuccuuc

SEQ ID NO: 418939 - RNA, 22 nt, Human
cagcccuggccccagguggucu

SEQ ID NO: 418940 - RNA, 22 nt, Human
aggauccuguauggagaagcug

SEQ ID NO: 418941 - RNA, 22 nt, Human
gcuggcuguaucaccuggccag

SEQ ID NO: 418942 - RNA, 22 nt, Human
ggcucuggugugaagcagccuc

SEQ ID NO: 418943 - RNA, 22 nt, Human
gagagaagggggauaugagccu

SEQ ID NO: 418944 - RNA, 22 nt, Human
cagcccuuuccuucucagcuuu

SEQ ID NO: 418945 - RNA, 22 nt, Human
ccguggaguugugcugaguaug

SEQ ID NO: 418946 - RNA, 21 nt, Human
uccugcagaaugccuuccuac

SEQ ID NO: 418947 - RNA, 22 nt, Human
cuggcagcuuagcacucugguu

SEQ ID NO: 418948 - RNA, 22 nt, Human
augccaggaacaaacaguggug

SEQ ID NO: 418949 - RNA, 22 nt, Human
cauuauguucaguagcuuaaaa

SEQ ID NO: 418950 - RNA, 21 nt, Human
agcuuguguguaucacagugu

SEQ ID NO: 418951 - RNA, 22 nt, Human
aaggcacucauucaaggagaua

SEQ ID NO: 418952 - RNA, 23 nt, Human
cucccuggaguuucuggaagaug

SEQ ID NO: 418953 - RNA, 22 nt, Human
uagagcuguaucaaagagccuu

SEQ ID NO: 418954 - RNA, 22 nt, Human
ucccaggcuggcaggcagcagu

SEQ ID NO: 418955 - RNA, 22 nt, Human
uggagccagagcgcagccuggg

SEQ ID NO: 418956 - RNA, 22 nt, Human
cagagccauccaggugccuguu

SEQ ID NO: 418957 - RNA, 19 nt, Human
cuugguuaugguaugaugc

SEQ ID NO: 418958 - RNA, 22 nt, Human
acuuccuguuaugugugccucu

SEQ ID NO: 418959 - RNA, 22 nt, Human
cagcugaguuacucugaggucu

SEQ ID NO: 418960 - RNA, 22 nt, Human
ucagaaauacuaucagcuuuug

SEQ ID NO: 418961 - RNA, 22 nt, Human
gcauggcaaauaucgagggcag

SEQ ID NO: 418962 - RNA, 22 nt, Human
gcugagaguguaggauguuuac

SEQ ID NO: 418963 - RNA, 21 nt, Human
agcugccacccuagcuucuga

SEQ ID NO: 418964 - RNA, 22 nt, Human
ucagacaguuugcagugugccu

SEQ ID NO: 418965 - RNA, 18 nt, Human
gucuggaggucaggagcu

SEQ ID NO: 418966 - RNA, 18 nt, Human
cugaggcuggcaggagcc

SEQ ID NO: 418967 - RNA, 22 nt, Human
gaaggagaggauugugaggcug

SEQ ID NO: 418968 - RNA, 21 nt, Human
gagccuucccucugcccuuuc

SEQ ID NO: 418969 - RNA, 22 nt, Human
uccugcagcugcagaccugggg

SEQ ID NO: 418970 - RNA, 23 nt, Human
gggauauggaccuuggaggaguc

SEQ ID NO: 418971 - RNA, 22 nt, Human
aggcugagucaaguuaggguga

SEQ ID NO: 418972 - RNA, 22 nt, Human
caaauguguuuuuucuucuaca

SEQ ID NO: 418973 - RNA, 22 nt, Human
aauuagggagccaucauaaggu

SEQ ID NO: 418974 - RNA, 22 nt, Human
cuccacagccccuccaguggca

SEQ ID NO: 418975 - RNA, 22 nt, Human
ugguuuugcuccaguauaaaua

SEQ ID NO: 418976 - RNA, 22 nt, Human
aagcacagaaaaggagcaugga

SEQ ID NO: 418977 - RNA, 22 nt, Human
aaaugcuugcucuugauuauuu

SEQ ID NO: 418978 - RNA, 22 nt, Human
gggcugcacguauucugcucac

SEQ ID NO: 418979 - RNA, 23 nt, Human
aaaugcagggucgcagguuacag

SEQ ID NO: 418980 - RNA, 22 nt, Human
uggcugaacuaaugugcuguuu

SEQ ID NO: 418981 - RNA, 22 nt, Human
ugaugauguuuaucuugguauu

SEQ ID NO: 418982 - RNA, 22 nt, Human
guuuucaugucuauugggcaua

SEQ ID NO: 418983 - RNA, 22 nt, Human
ucagggcaaagggcagaguuug

SEQ ID NO: 418984 - RNA, 23 nt, Human
agcagugaguaaacagauaggau

SEQ ID NO: 418985 - RNA, 22 nt, Human
agucucaggcagaggaaggcua

SEQ ID NO: 418986 - RNA, 22 nt, Human
uccaggcaaagggacuagcagg

SEQ ID NO: 418987 - RNA, 22 nt, Human
gcagugcugaucccauggcaga

SEQ ID NO: 418988 - RNA, 22 nt, Human
aaagguuugcauggaauuuacc

SEQ ID NO: 418989 - RNA, 22 nt, Human
auagcuguuagauuggggucga

SEQ ID NO: 418990 - RNA, 22 nt, Human
aaaugaacaguugcauucucug

SEQ ID NO: 418991 - RNA, 22 nt, Human
aaggcacugaaaaauugugugu

SEQ ID NO: 418992 - RNA, 22 nt, Human
gcaggcaguuauuuaguagaau

SEQ ID NO: 418993 - RNA, 22 nt, Human
aucuggcuuacgaagcacuggu

SEQ ID NO: 418994 - RNA, 22 nt, Human
uggcagagucugggcuugggca

SEQ ID NO: 418995 - RNA, 22 nt, Human
ucugagcuuuuauuaucaaccu

SEQ ID NO: 418996 - RNA, 22 nt, Human
ccugcagcuguaggagaaggcg

SEQ ID NO: 418997 - RNA, 22 nt, Human
aauucuauaggcaagcuauuuu

SEQ ID NO: 418998 - RNA, 20 nt, Human
gguagcagcugcugucaucc

SEQ ID NO: 418999 - RNA, 22 nt, Human
ggcaggcagaggcugagacagg

SEQ ID NO: 419000 - RNA, 22 nt, Human
uuugaacaugcugcaugauaau

SEQ ID NO: 419001 - RNA, 22 nt, Human
ggccaggaagggaagaucagca

SEQ ID NO: 419002 - RNA, 22 nt, Human
cacucugacuggcccugcagga

SEQ ID NO: 419003 - RNA, 22 nt, Human
cuguacauauacauuuuuuucc

SEQ ID NO: 419004 - RNA, 22 nt, Human
ucccagaaaaaggaggcuauga

SEQ ID NO: 419005 - RNA, 22 nt, Human
agggccagaguacaucagggcu

SEQ ID NO: 419006 - RNA, 22 nt, Human
uggaggaugccauccaggauac

SEQ ID NO: 419007 - RNA, 22 nt, Human
uuucuuccuuaccuuacuagag

SEQ ID NO: 419008 - RNA, 22 nt, Human
gcauagucaguaggauucucaa

SEQ ID NO: 419009 - RNA, 22 nt, Human
cagccugggcuccagagucccu

SEQ ID NO: 419010 - RNA, 22 nt, Human
ucuugggauugcccugcaguuc

SEQ ID NO: 419011 - RNA, 22 nt, Human
guuacaaaugccaaagcugaga

SEQ ID NO: 419012 - RNA, 22 nt, Human
aagcagugcgcucaucuaaggg

SEQ ID NO: 419013 - RNA, 22 nt, Human
acuguggaugccaaaggggagg

SEQ ID NO: 419014 - RNA, 22 nt, Human
gaggcagcaaaauauaucauaa

SEQ ID NO: 419015 - RNA, 22 nt, Human
cuggccaggcuugggacagaca

SEQ ID NO: 419016 - RNA, 22 nt, Human
ugaaacaagggaccguccuuuc

SEQ ID NO: 419017 - RNA, 22 nt, Human
augucuuucaaauucugccuag

SEQ ID NO: 419018 - RNA, 23 nt, Human
uccugcagauaagcugguugaca

SEQ ID NO: 419019 - RNA, 22 nt, Human
ugcagggccuucuagaccaugg

SEQ ID NO: 419020 - RNA, 22 nt, Human
agaaaaggauugauggaucaga

SEQ ID NO: 419021 - RNA, 22 nt, Human
agguaguguagcugagugggau

SEQ ID NO: 419022 - RNA, 21 nt, Human
agccaggcaagcacccccacu

SEQ ID NO: 419023 - RNA, 22 nt, Human
cuguuuucccuggaguucagca

SEQ ID NO: 419024 - RNA, 22 nt, Human
gccagcuggagacuggcagggg

SEQ ID NO: 419025 - RNA, 22 nt, Human
ggcgcaggccuuggauccuggu

SEQ ID NO: 419026 - RNA, 22 nt, Human
auccaggguguggagagagcuc

SEQ ID NO: 419027 - RNA, 22 nt, Human
cacaggagcuguggggcagugu

SEQ ID NO: 419028 - RNA, 22 nt, Human
aguggggacuuaugccagcauu

SEQ ID NO: 419029 - RNA, 19 nt, Human
ucuggagcugaugcaggug

SEQ ID NO: 419030 - RNA, 21 nt, Human
gcugcucgagauccagugcuu

SEQ ID NO: 419031 - RNA, 22 nt, Human
cuggcucaauuuguacugcugu

SEQ ID NO: 419032 - RNA, 22 nt, Human
gagcagugaagacagaaguaca

SEQ ID NO: 419033 - RNA, 22 nt, Human
aagcagcauaauugcuauuuua

SEQ ID NO: 419034 - RNA, 22 nt, Human
aggacuucaucaccuguauaaa

SEQ ID NO: 419035 - RNA, 20 nt, Human
aguggggagucaggagugcc

SEQ ID NO: 419036 - RNA, 22 nt, Human
agucccaguucgguucuuccuc

SEQ ID NO: 419037 - RNA, 22 nt, Human
ucugcaggaaaaaagugccugg

SEQ ID NO: 419038 - RNA, 22 nt, Human
guccagggcuaaaucagguucc

SEQ ID NO: 419039 - RNA, 22 nt, Human
uaaaauguuugcaagagaccag

SEQ ID NO: 419040 - RNA, 22 nt, Human
caggaacacaaguucagggaug

SEQ ID NO: 419041 - RNA, 22 nt, Human
gagaggcugacuggcuguccug

SEQ ID NO: 419042 - RNA, 22 nt, Human
gagggaaagguuaauacaugau

SEQ ID NO: 419043 - RNA, 19 nt, Human
ccuuugaaucaggacacuu

SEQ ID NO: 419044 - RNA, 22 nt, Human
gaaaugugugacaaguuucaau

SEQ ID NO: 419045 - RNA, 22 nt, Human
aaggggaaguagcaccagaggu

SEQ ID NO: 419046 - RNA, 22 nt, Human
uuuguguuuuagcuggugaggc

SEQ ID NO: 419047 - RNA, 22 nt, Human
cacccacauggaaauucacagu

SEQ ID NO: 419048 - RNA, 22 nt, Human
uguucuugagccuuuagaccua

SEQ ID NO: 419049 - RNA, 22 nt, Human
acagacagauuuugucugaugu

SEQ ID NO: 419050 - RNA, 22 nt, Human
cauuuucagcacccaucugaaa

SEQ ID NO: 419051 - RNA, 22 nt, Human
aucaggauuauuaaaucuggau

SEQ ID NO: 419052 - RNA, 22 nt, Human
acauaaaggugacuaacaucuu

SEQ ID NO: 419053 - RNA, 22 nt, Human
gcucuguguugucagaggcacc

SEQ ID NO: 419054 - RNA, 22 nt, Human
gccccagguugccugucccagg

SEQ ID NO: 419055 - RNA, 22 nt, Human
gcucugagccgggggccugucc

SEQ ID NO: 419056 - RNA, 23 nt, Human
agccacuucuaucuugcuccugg

SEQ ID NO: 419057 - RNA, 22 nt, Human
ucagagagguuggugauaagaa

SEQ ID NO: 419058 - RNA, 23 nt, Human
uggagcugacagucagagggagg

SEQ ID NO: 419059 - RNA, 22 nt, Human
auguaucaacaaauuguacagu

SEQ ID NO: 419060 - RNA, 22 nt, Human
ugaggcagauauuuauuggguu

SEQ ID NO: 419061 - RNA, 22 nt, Human
aggugagugugacugcaagaga

SEQ ID NO: 419062 - RNA, 22 nt, Human
ucagaggaauuugcuuuucaug

SEQ ID NO: 419063 - RNA, 22 nt, Human
cauuuguuggucagauuguagu

SEQ ID NO: 419064 - RNA, 22 nt, Human
acacaugagaaacaucaguugu

SEQ ID NO: 419065 - RNA, 22 nt, Human
aaauuucuaagcagccacuucc

SEQ ID NO: 419066 - RNA, 22 nt, Human
cauguacauucuguagauggag

SEQ ID NO: 419067 - RNA, 22 nt, Human
gucacuggggccacaugcagaa

SEQ ID NO: 419068 - RNA, 22 nt, Human
cagggcucaucugugugaccag

SEQ ID NO: 419069 - RNA, 22 nt, Human
auuccaaaaggauguuagaaug

SEQ ID NO: 419070 - RNA, 22 nt, Human
ucaggaucggccuuuuuuuaag

SEQ ID NO: 419071 - RNA, 22 nt, Human
aguuacuugagacguuuaugaa

SEQ ID NO: 419072 - RNA, 22 nt, Human
caguuccuaugggcaaaacaca

SEQ ID NO: 419073 - RNA, 22 nt, Human
accauuugacucucuaaggaua

SEQ ID NO: 419074 - RNA, 22 nt, Human
uuucaaauggagucgugaaaug

SEQ ID NO: 419075 - RNA, 18 nt, Human
ucucuuuuccccucauug

SEQ ID NO: 419076 - RNA, 22 nt, Human
uuacauuuggcuauguccucua

SEQ ID NO: 419077 - RNA, 22 nt, Human
gcugagagcaguguggccuuaa

SEQ ID NO: 419078 - RNA, 22 nt, Human
ccugcagagccacgugccagcg

SEQ ID NO: 419079 - RNA, 22 nt, Human
ccagaggaguugaggcuuuggg

SEQ ID NO: 419080 - RNA, 22 nt, Human
caaggcugugcaggguccauau

SEQ ID NO: 419081 - RNA, 20 nt, Human
gucagaggacccuagagcga

SEQ ID NO: 419082 - RNA, 22 nt, Human
aggucauuuuugccuucuauuu

SEQ ID NO: 419083 - RNA, 22 nt, Human
gaaucacgguauucugcacggg

SEQ ID NO: 419084 - RNA, 22 nt, Human
guauccuccccgcuggccuuca

SEQ ID NO: 419085 - RNA, 22 nt, Human
agagggcuggacgcagguugga

SEQ ID NO: 419086 - RNA, 22 nt, Human
agcacuuuccuggcaaaugugg

SEQ ID NO: 419087 - RNA, 20 nt, Human
agugugcauuuagagucugc

SEQ ID NO: 419088 - RNA, 22 nt, Human
gugauuucuaaucaucugaaug

SEQ ID NO: 419089 - RNA, 21 nt, Human
gccacugcacuccagccuggg

SEQ ID NO: 419090 - RNA, 22 nt, Human
augggaggcagcagagcccagc

SEQ ID NO: 419091 - RNA, 22 nt, Human
gcagagcaccaaagugaaagau

SEQ ID NO: 419092 - RNA, 23 nt, Human
uggagaugccccacucccugucu

SEQ ID NO: 419093 - RNA, 22 nt, Human
gaauuagguaauagaacuagua

SEQ ID NO: 419094 - RNA, 22 nt, Human
cuagaaauacaggcacgugcca

SEQ ID NO: 419095 - RNA, 22 nt, Human
gccuuggcugaugugcgaauga

SEQ ID NO: 419096 - RNA, 21 nt, Human
ggcagccucuguggaagggga

SEQ ID NO: 419097 - RNA, 22 nt, Human
ucagaagacuacuaggacacau

SEQ ID NO: 419098 - RNA, 22 nt, Human
guguccacggcugagaaugauu

SEQ ID NO: 419099 - RNA, 20 nt, Human
acaggggcagcacaauaaug

SEQ ID NO: 419100 - RNA, 22 nt, Human
cagcuuguuuuauuuggggacc

SEQ ID NO: 419101 - RNA, 22 nt, Human
aaagccagagcaagcugucaca

SEQ ID NO: 419102 - RNA, 18 nt, Human
gggaucaggcugccuagg

SEQ ID NO: 419103 - RNA, 22 nt, Human
ccugucauacuaacguaguggg

SEQ ID NO: 419104 - RNA, 22 nt, Human
acugagcugcaagucagggagg

SEQ ID NO: 419105 - RNA, 22 nt, Human
uuguuacagcacuuaaccuuuu

SEQ ID NO: 419106 - RNA, 19 nt, Human
aggcaggugcagagguccc

SEQ ID NO: 419107 - RNA, 22 nt, Human
ccuccacaggagcugcagugcu

SEQ ID NO: 419108 - RNA, 22 nt, Human
ugaggcucagaagugccaagug

SEQ ID NO: 419109 - RNA, 22 nt, Human
augcugugucaccuuaggauuu

SEQ ID NO: 419110 - RNA, 22 nt, Human
caggcccagugaucagggcucu

SEQ ID NO: 419111 - RNA, 22 nt, Human
aagaagaaguguuauuuuuaga

SEQ ID NO: 419112 - RNA, 22 nt, Human
uaacacacugaaggugagaugg

SEQ ID NO: 419113 - RNA, 22 nt, Human
uacagagaguacagcauccaca

SEQ ID NO: 419114 - RNA, 22 nt, Human
uuuauuuggcauccagggagaa

SEQ ID NO: 419115 - RNA, 22 nt, Human
guccucuccaggaggcucugau

SEQ ID NO: 419116 - RNA, 22 nt, Human
gaggcugauucggggaacagca

SEQ ID NO: 419117 - RNA, 22 nt, Human
gccaggcuggugucacaacucu

SEQ ID NO: 419118 - RNA, 22 nt, Human
ucucccagaaguccucaguaca

SEQ ID NO: 419119 - RNA, 22 nt, Human
ugaaaugcuguagagacuguau

SEQ ID NO: 419120 - RNA, 22 nt, Human
gcagggcuguucaggagggugg

SEQ ID NO: 419121 - RNA, 22 nt, Human
auacaucuaugccuuucugaca

SEQ ID NO: 419122 - RNA, 22 nt, Human
accaggcacuccugaggucuga

SEQ ID NO: 419123 - RNA, 22 nt, Human
gggcuacagacaugcucuaagc

SEQ ID NO: 419124 - RNA, 22 nt, Human
caggcagcccugcaccaagugu

SEQ ID NO: 419125 - RNA, 22 nt, Human
ugauuuccacgugcacccaggu

SEQ ID NO: 419126 - RNA, 22 nt, Human
auccagggauaaaaguaagguu

SEQ ID NO: 419127 - RNA, 22 nt, Human
gagcccuccauggagccaggca

SEQ ID NO: 419128 - RNA, 22 nt, Human
auuuccaagaaagcuuuaggau

SEQ ID NO: 419129 - RNA, 22 nt, Human
aagggcagccugacucacgguc

SEQ ID NO: 419130 - RNA, 22 nt, Human
auugacaaucuacuauguucug

SEQ ID NO: 419131 - RNA, 22 nt, Human
agugggguccucaguaugguuc

SEQ ID NO: 419132 - RNA, 22 nt, Human
uccagcagggaauuaguagucu

SEQ ID NO: 419133 - RNA, 22 nt, Human
guuugcauggaagacagugagu

SEQ ID NO: 419134 - RNA, 22 nt, Human
ggcuagaacuuuacacuuugca

SEQ ID NO: 419135 - RNA, 22 nt, Human
caggcacugugcugagcucugc

SEQ ID NO: 419136 - RNA, 22 nt, Human
ucaaagcaucagucaauuuagg

SEQ ID NO: 419137 - RNA, 22 nt, Human
caggguuucaccauguuagcag

SEQ ID NO: 419138 - RNA, 22 nt, Human
uguggcuguguccaccugcugc

SEQ ID NO: 419139 - RNA, 22 nt, Human
aggcugagggcuccugagggca

SEQ ID NO: 419140 - RNA, 22 nt, Human
agaagccauugaagcagaccuc

SEQ ID NO: 419141 - RNA, 22 nt, Human
gcugggcuucucaaugcugccu

SEQ ID NO: 419142 - RNA, 22 nt, Human
gcugcagcaagcccuccagggg

SEQ ID NO: 419143 - RNA, 21 nt, Human
ggucagggggugccuccaggu

SEQ ID NO: 419144 - RNA, 22 nt, Human
aagagaaggauucugagccugg

SEQ ID NO: 419145 - RNA, 22 nt, Human
agaccauggccauccuaggaaa

SEQ ID NO: 419146 - RNA, 22 nt, Human
ucaccgccuugcccggccgggc

SEQ ID NO: 419147 - RNA, 22 nt, Human
ugccugcuaggcccugcugggu

SEQ ID NO: 419148 - RNA, 22 nt, Human
gccuggcugagguggggaggca

SEQ ID NO: 419149 - RNA, 22 nt, Human
cuuaacagcaagaucuguguca

SEQ ID NO: 419150 - RNA, 19 nt, Human
auuucaagagguuuauugg

SEQ ID NO: 419151 - RNA, 22 nt, Human
gcugccuggcuuuaguccacuu

SEQ ID NO: 419152 - RNA, 22 nt, Human
ggugggcagcucuuggcaggca

SEQ ID NO: 419153 - RNA, 22 nt, Human
uuguaacaggcacucugugcca

SEQ ID NO: 419154 - RNA, 22 nt, Human
augaccccuaaaauuuacuguc

SEQ ID NO: 419155 - RNA, 22 nt, Human
cugcagggcagaagggcauaga

SEQ ID NO: 419156 - RNA, 22 nt, Human
uucuuuccucccagccuuugga

SEQ ID NO: 419157 - RNA, 22 nt, Human
uacauguaauuuucauaguaag

SEQ ID NO: 419158 - RNA, 22 nt, Human
gccuucaggaggguuccagaca

SEQ ID NO: 419159 - RNA, 22 nt, Human
cucaggguaaugaaagacgaau

SEQ ID NO: 419160 - RNA, 22 nt, Human
ugcugccaagcccgugcuccug

SEQ ID NO: 419161 - RNA, 22 nt, Human
auagaaaacagauguccuuaaa

SEQ ID NO: 419162 - RNA, 22 nt, Human
ugucagagagcaggcaguagaa

SEQ ID NO: 419163 - RNA, 22 nt, Human
acauuucugcauguaggguaau

SEQ ID NO: 419164 - RNA, 22 nt, Human
cacacaggaugaagcagcagaa

SEQ ID NO: 419165 - RNA, 22 nt, Human
acaggccugacacacagagggc

SEQ ID NO: 419166 - RNA, 22 nt, Human
cugaggugagcuucccugggcu

SEQ ID NO: 419167 - RNA, 22 nt, Human
uuuacauugcauuagguauuau

SEQ ID NO: 419168 - RNA, 22 nt, Human
ggcugagcguggcugccguggg

SEQ ID NO: 419169 - RNA, 22 nt, Human
agccagagcugaugucauucuc

SEQ ID NO: 419170 - RNA, 22 nt, Human
aaucacaauuacuuuugcacca

SEQ ID NO: 419171 - RNA, 22 nt, Human
uggccugcuuucauuugaugcu

SEQ ID NO: 419172 - RNA, 22 nt, Human
aaggcgacacaggcagcaggcc

SEQ ID NO: 419173 - RNA, 22 nt, Human
ccucuggggguccucagagucu

SEQ ID NO: 419174 - RNA, 22 nt, Human
uauucacaggcuggagugaugu

SEQ ID NO: 419175 - RNA, 17 nt, Human
ugcauuguuggaaauuu

SEQ ID NO: 419176 - RNA, 22 nt, Human
cugggguggauggguccaaguu

SEQ ID NO: 419177 - RNA, 22 nt, Human
aucauguuccagaaacagugau

SEQ ID NO: 419178 - RNA, 22 nt, Human
aguguuguaugggaugacugcu

SEQ ID NO: 419179 - RNA, 22 nt, Human
uauguuaaauguuugauguuua

SEQ ID NO: 419180 - RNA, 22 nt, Human
ugaggccugcauugaacuagaa

SEQ ID NO: 419181 - RNA, 22 nt, Human
gcugagucuugagcacugagca

SEQ ID NO: 419182 - RNA, 22 nt, Human
cagcaggcccagaguuucaugg

SEQ ID NO: 419183 - RNA, 22 nt, Human
cacagggcagugauuguccaca

SEQ ID NO: 419184 - RNA, 22 nt, Human
caccagggcagcagccuagucu

SEQ ID NO: 419185 - RNA, 22 nt, Human
ggcaucuguccaucucuccagc

SEQ ID NO: 419186 - RNA, 22 nt, Human
uggaaggggagcuggaaagggg

SEQ ID NO: 419187 - RNA, 22 nt, Human
gaagccacuauagauauucuaa

SEQ ID NO: 419188 - RNA, 22 nt, Human
ugguccugagcaccagccugac

SEQ ID NO: 419189 - RNA, 22 nt, Human
ccagccagccuugaucugagua

SEQ ID NO: 419190 - RNA, 22 nt, Human
ccuguggcacaugcagggauuc

SEQ ID NO: 419191 - RNA, 22 nt, Human
gcagcugccuauucagggcuug

SEQ ID NO: 419192 - RNA, 18 nt, Human
cagauccaggcagcuauu

SEQ ID NO: 419193 - RNA, 22 nt, Human
gcagcugauggaaguccuauug

SEQ ID NO: 419194 - RNA, 22 nt, Human
gcagugaaacaauaggaucaaa

SEQ ID NO: 419195 - RNA, 22 nt, Human
cucaggaggaggaaguucauug

SEQ ID NO: 419196 - RNA, 22 nt, Human
agaaauaugcugauuagaugaa

SEQ ID NO: 419197 - RNA, 22 nt, Human
ugcagagggacagccacagcuc

SEQ ID NO: 419198 - RNA, 22 nt, Human
cagugggugaugaguccugggg

SEQ ID NO: 419199 - RNA, 18 nt, Human
uggagcaggaagccuggc

SEQ ID NO: 419200 - RNA, 22 nt, Human
gccaggcaggugucggagcccu

SEQ ID NO: 419201 - RNA, 22 nt, Human
cccaucaggaacccaggagccc

SEQ ID NO: 419202 - RNA, 20 nt, Human
gagagcuggggaugaggcug

SEQ ID NO: 419203 - RNA, 18 nt, Human
cucucugggugaggacaa

SEQ ID NO: 419204 - RNA, 22 nt, Human
gccuaauaugcaaaauugauac

SEQ ID NO: 419205 - RNA, 22 nt, Human
aagggcucuucuauuuauggcc

SEQ ID NO: 419206 - RNA, 22 nt, Human
uggcagcauuuuuuccagaaca

SEQ ID NO: 419207 - RNA, 19 nt, Human
ucugugcugggaggcagca

SEQ ID NO: 419208 - RNA, 22 nt, Human
gaggccuggucuaugagauguu

SEQ ID NO: 419209 - RNA, 21 nt, Human
aagagcugucaggaaggcugc

SEQ ID NO: 419210 - RNA, 22 nt, Human
ccaggccuccugugaguggacc

SEQ ID NO: 419211 - RNA, 22 nt, Human
ugagagggcccagagcacacca

SEQ ID NO: 419212 - RNA, 22 nt, Human
agagcaauggcauccagcugau

SEQ ID NO: 419213 - RNA, 22 nt, Human
ccaggagcaaagaucacuggga

SEQ ID NO: 419214 - RNA, 22 nt, Human
caggauggccccggggcugugc

SEQ ID NO: 419215 - RNA, 22 nt, Human
uuugaaauaugaggcauuauga

SEQ ID NO: 419216 - RNA, 22 nt, Human
gaggcuggaauauuagaaaugu

SEQ ID NO: 419217 - RNA, 22 nt, Human
gcagggcaaacccagguguuca

SEQ ID NO: 419218 - RNA, 22 nt, Human
ugaggaagcaaaggcuugugug

SEQ ID NO: 419219 - RNA, 22 nt, Human
cucugugagggucuguacagaa

SEQ ID NO: 419220 - RNA, 18 nt, Human
cacaggcucccagugagg

SEQ ID NO: 419221 - RNA, 22 nt, Human
agcaggcuccuuccuucucugg

SEQ ID NO: 419222 - RNA, 22 nt, Human
agcagagguguuuauuauggga

SEQ ID NO: 419223 - RNA, 22 nt, Human
cagccugcucucagauguugag

SEQ ID NO: 419224 - RNA, 22 nt, Human
uuucacauucagauauagacuu

SEQ ID NO: 419225 - RNA, 22 nt, Human
ugucaccagcugcuccucagga

SEQ ID NO: 419226 - RNA, 22 nt, Human
aguuuuuccugauuuuacagaa

SEQ ID NO: 419227 - RNA, 22 nt, Human
gccaggcuggugcaaggauauu

SEQ ID NO: 419228 - RNA, 22 nt, Human
uacccagcaaucccuagagguu

SEQ ID NO: 419229 - RNA, 22 nt, Human
gccuggaguuguggugaagcca

SEQ ID NO: 419230 - RNA, 22 nt, Human
ucuggagcgaggucccugucug

SEQ ID NO: 419231 - RNA, 22 nt, Human
aacaaauggggccuuguaugaa

SEQ ID NO: 419232 - RNA, 22 nt, Human
gccugcagggcccuuguggguc

SEQ ID NO: 419233 - RNA, 22 nt, Human
ccaaaguccauaguuuacauua

SEQ ID NO: 419234 - RNA, 22 nt, Human
ugccaaauugcccuauaaauga

SEQ ID NO: 419235 - RNA, 22 nt, Human
uuauuauaaugagggauaaaaa

SEQ ID NO: 419236 - RNA, 22 nt, Human
uggcagaguuggagguggaaga

SEQ ID NO: 419237 - RNA, 22 nt, Human
gccuguccacuaaacagccaag

SEQ ID NO: 419238 - RNA, 22 nt, Human
ucaggccacggcucacugagac

SEQ ID NO: 419239 - RNA, 22 nt, Human
gcccucagaguuccccacagug

SEQ ID NO: 419240 - RNA, 22 nt, Human
ccaggcugagcaugauuggagc

SEQ ID NO: 419241 - RNA, 22 nt, Human
agugaccauuuucagcuagagg

SEQ ID NO: 419242 - RNA, 22 nt, Human
ucaguuuuuacggucacaggga

SEQ ID NO: 419243 - RNA, 22 nt, Human
aagggccuccuggggagccugg

SEQ ID NO: 419244 - RNA, 22 nt, Human
caggacccaaccucccugcucu

SEQ ID NO: 419245 - RNA, 22 nt, Human
gcaugggcaagaggacuggggg

SEQ ID NO: 419246 - RNA, 22 nt, Human
gcuggcagacugggggcagaac

SEQ ID NO: 419247 - RNA, 22 nt, Human
cucagcagagaccagggaggaa

SEQ ID NO: 419248 - RNA, 18 nt, Human
gccagagggaagcaggug

SEQ ID NO: 419249 - RNA, 19 nt, Human
uuacaucugcaacacuggu

SEQ ID NO: 419250 - RNA, 15 nt, Human
aaucuggcggcaagu

SEQ ID NO: 419251 - RNA, 22 nt, Human
caaaaugugagucccaccucaa

SEQ ID NO: 419252 - RNA, 22 nt, Human
agauggguaacuggagucugcu

SEQ ID NO: 419253 - RNA, 22 nt, Human
agaggagguccuuuucugaugu

SEQ ID NO: 419254 - RNA, 22 nt, Human
aggcaagaacagacaugggagu

SEQ ID NO: 419255 - RNA, 22 nt, Human
cagaugaggcaaccucauugcu

SEQ ID NO: 419256 - RNA, 22 nt, Human
gucuggaguggggccugagaau

SEQ ID NO: 419257 - RNA, 21 nt, Human
ugaggccugccagucucagaa

SEQ ID NO: 419258 - RNA, 22 nt, Human
gcaaggagacuguagggccaag

SEQ ID NO: 419259 - RNA, 22 nt, Human
cccuggagguggagguugcagg

SEQ ID NO: 419260 - RNA, 18 nt, Human
gggcaucauucacaaagu

SEQ ID NO: 419261 - RNA, 22 nt, Human
acaggcagcacuaaucucuggu

SEQ ID NO: 419262 - RNA, 22 nt, Human
caauuucuggaacuaauucuga

SEQ ID NO: 419263 - RNA, 16 nt, Human
gcacacacaucaauga

SEQ ID NO: 419264 - RNA, 21 nt, Human
ucagggcagugggagguuccu

SEQ ID NO: 419265 - RNA, 22 nt, Human
agaugaagauaucugcaggggc

SEQ ID NO: 419266 - RNA, 22 nt, Human
ugccugggagugaccaagacuc

SEQ ID NO: 419267 - RNA, 22 nt, Human
guggagccaggggcuguaggua

SEQ ID NO: 419268 - RNA, 22 nt, Human
aauguguguucggggcccagag

SEQ ID NO: 419269 - RNA, 22 nt, Human
cucagaagaacaaaggcucuac

SEQ ID NO: 419270 - RNA, 22 nt, Human
gagugugggcacgggggccuug

SEQ ID NO: 419271 - RNA, 22 nt, Human
guacccagaggcaugaucccag

SEQ ID NO: 419272 - RNA, 22 nt, Human
gcagagccccauugcuggcggg

SEQ ID NO: 419273 - RNA, 22 nt, Human
uaacagaaaggggacagaaaua

SEQ ID NO: 419274 - RNA, 22 nt, Human
ggcccugggaugcucagcagug

SEQ ID NO: 419275 - RNA, 22 nt, Human
agcugcugagagucugccgggc

SEQ ID NO: 419276 - RNA, 22 nt, Human
agcacagauucugaagaguccu

SEQ ID NO: 419277 - RNA, 18 nt, Human
acaggccucaguccugca

SEQ ID NO: 419278 - RNA, 22 nt, Human
acagcuuuucaauucugcugag

SEQ ID NO: 419279 - RNA, 22 nt, Human
uugcaggggaaggagcagagcu

SEQ ID NO: 419280 - RNA, 23 nt, Human
gccugggacucaggaggagcuca

SEQ ID NO: 419281 - RNA, 22 nt, Human
uucacagucacccuucuccaug

SEQ ID NO: 419282 - RNA, 22 nt, Human
aacccgggaggcagagguugug

SEQ ID NO: 419283 - RNA, 22 nt, Human
gauuuucugagccuucaaauuu

SEQ ID NO: 419284 - RNA, 22 nt, Human
gcaccuggacagugacccuagc

SEQ ID NO: 419285 - RNA, 22 nt, Human
aggcugccuguuccaaucuccu

SEQ ID NO: 419286 - RNA, 22 nt, Human
aacuuuaaggcuauaaauuaug

SEQ ID NO: 419287 - RNA, 19 nt, Human
cacaucagcagggcugugg

SEQ ID NO: 419288 - RNA, 22 nt, Human
agcugcugagccaggcugaugu

SEQ ID NO: 419289 - RNA, 22 nt, Human
aaaaugcaugagaaugugcucg

SEQ ID NO: 419290 - RNA, 22 nt, Human
cuguccccgcgaguccagagcu

SEQ ID NO: 419291 - RNA, 22 nt, Human
accugcagguguuuccacacuu

SEQ ID NO: 419292 - RNA, 22 nt, Human
aaaguucugggggagaagaacg

SEQ ID NO: 419293 - RNA, 22 nt, Human
ugggugaggaugaugaggcagc

SEQ ID NO: 419294 - RNA, 22 nt, Human
gcauggcauuugaagguagaag

SEQ ID NO: 419295 - RNA, 22 nt, Human
agguaaggcuguaagcuaagcc

SEQ ID NO: 419296 - RNA, 22 nt, Human
ccugccagcauggcuuaucucc

SEQ ID NO: 419297 - RNA, 20 nt, Human
cuguccccgaggucaccagg

SEQ ID NO: 419298 - RNA, 22 nt, Human
gauccuugcacuugacuuggca

SEQ ID NO: 419299 - RNA, 22 nt, Human
uccuggagaauccugccaccug

SEQ ID NO: 419300 - RNA, 22 nt, Human
cacaggguuguucugaggauuc

SEQ ID NO: 419301 - RNA, 22 nt, Human
gagcucugacugcugggugaca

SEQ ID NO: 419302 - RNA, 22 nt, Human
auauucguggucaaguaaggcc

SEQ ID NO: 419303 - RNA, 22 nt, Human
ucucugagcugcuucuugcaua

SEQ ID NO: 419304 - RNA, 22 nt, Human
ucagagugcagcgggaggcugg

SEQ ID NO: 419305 - RNA, 22 nt, Human
ucugggugaugaaaugcacugu

SEQ ID NO: 419306 - RNA, 22 nt, Human
gggacagacccaugggccaggu

SEQ ID NO: 419307 - RNA, 22 nt, Human
uuucuguagggauuucacaguu

SEQ ID NO: 419308 - RNA, 22 nt, Human
auuguacaaugccuggaacauu

SEQ ID NO: 419309 - RNA, 22 nt, Human
auagugguuggauaugucagag

SEQ ID NO: 419310 - RNA, 22 nt, Human
gcaggccucuguugagggccuu

SEQ ID NO: 419311 - RNA, 22 nt, Human
ccagguguggggaggacucaca

SEQ ID NO: 419312 - RNA, 22 nt, Human
ggagaggcgaugagucacagcc

SEQ ID NO: 419313 - RNA, 18 nt, Human
uggcucagauggcuuuaa

SEQ ID NO: 419314 - RNA, 22 nt, Human
aggaaagcucccaguagggcuc

SEQ ID NO: 419315 - RNA, 22 nt, Human
uuccuuguuuguagcucuggga

SEQ ID NO: 419316 - RNA, 22 nt, Human
cagcuggaugggagaccauguu

SEQ ID NO: 419317 - RNA, 22 nt, Human
ugucauuuaguccucugugugu

SEQ ID NO: 419318 - RNA, 22 nt, Human
agcaggaguguccccuggcugu

SEQ ID NO: 419319 - RNA, 22 nt, Human
uuucagauuaucucaacuuugg

SEQ ID NO: 419320 - RNA, 22 nt, Human
cuauugcauuugcaucuucauc

SEQ ID NO: 419321 - RNA, 22 nt, Human
ggcucuggcguccaauggagcg

SEQ ID NO: 419322 - RNA, 21 nt, Human
uggcugcuggcccucucucca

SEQ ID NO: 419323 - RNA, 20 nt, Human
agucugucaauuuacagugg

SEQ ID NO: 419324 - RNA, 22 nt, Human
uacaaaguauauuucuagcugu

SEQ ID NO: 419325 - RNA, 22 nt, Human
ugcagccaggaaauauuugcug

SEQ ID NO: 419326 - RNA, 22 nt, Human
ccagcuuuucuuaucauuauaa

SEQ ID NO: 419327 - RNA, 22 nt, Human
aguaaaaauugaggugcaaaau

SEQ ID NO: 419328 - RNA, 22 nt, Human
ccagcugguuaaaauagagaaa

SEQ ID NO: 419329 - RNA, 22 nt, Human
gaggaagaagcaaaccagcuaa

SEQ ID NO: 419330 - RNA, 22 nt, Human
cagaaauguucuaaugauucag

SEQ ID NO: 419331 - RNA, 22 nt, Human
ugaagcaggguggccagauugu

SEQ ID NO: 419332 - RNA, 21 nt, Human
aaagagcccgcugagagguuc

SEQ ID NO: 419333 - RNA, 22 nt, Human
uaagaacaucuguccccagauu

SEQ ID NO: 419334 - RNA, 22 nt, Human
gcccugcugucuucagaguaua

SEQ ID NO: 419335 - RNA, 22 nt, Human
aggagaaagacuggacagccaa

SEQ ID NO: 419336 - RNA, 22 nt, Human
gcucugcuugcaucaugacugc

SEQ ID NO: 419337 - RNA, 22 nt, Human
cugggaggauacacaagaucag

SEQ ID NO: 419338 - RNA, 22 nt, Human
ggccuuggugccauggccaguu

SEQ ID NO: 419339 - RNA, 22 nt, Human
uuuccucuucuggcaggcaggg

SEQ ID NO: 419340 - RNA, 22 nt, Human
uagggcaguuauaacauuagug

SEQ ID NO: 419341 - RNA, 22 nt, Human
gcucugagaggugcagcaguaa

SEQ ID NO: 419342 - RNA, 22 nt, Human
uuagccaugugggaaaaacagc

SEQ ID NO: 419343 - RNA, 22 nt, Human
cagagaaacucagauagcugau

SEQ ID NO: 419344 - RNA, 22 nt, Human
ucugucuccugccagugccucu

SEQ ID NO: 419345 - RNA, 21 nt, Human
uauuucuuugacucucucccu

SEQ ID NO: 419346 - RNA, 22 nt, Human
aggcuucuuagauuggcuggag

SEQ ID NO: 419347 - RNA, 22 nt, Human
agaugcugccucuccucacaag

SEQ ID NO: 419348 - RNA, 22 nt, Human
ucuggccuauuucugucagauc

SEQ ID NO: 419349 - RNA, 22 nt, Human
uggucucuucuuccaagauggc

SEQ ID NO: 419350 - RNA, 22 nt, Human
gggaauuauagcugucacaggc

SEQ ID NO: 419351 - RNA, 22 nt, Human
gaaggcaggcuucugauuaggu

SEQ ID NO: 419352 - RNA, 22 nt, Human
uuuacaaguuuacagaaugaug

SEQ ID NO: 419353 - RNA, 22 nt, Human
aggcagagcuggguuuugaaau

SEQ ID NO: 419354 - RNA, 22 nt, Human
agggaaaggcugaugcuguggg

SEQ ID NO: 419355 - RNA, 22 nt, Human
ucaggggcugugcauuucccag

SEQ ID NO: 419356 - RNA, 22 nt, Human
uuuaauuuucugggcccagcag

SEQ ID NO: 419357 - RNA, 22 nt, Human
aagucaauuaguaaacuuggaa

SEQ ID NO: 419358 - RNA, 22 nt, Human
acagccagggucucaggaggcg

SEQ ID NO: 419359 - RNA, 22 nt, Human
uugugaaauguuucaaaauagu

SEQ ID NO: 419360 - RNA, 22 nt, Human
aggugccagugcuguggucccc

SEQ ID NO: 419361 - RNA, 22 nt, Human
aaacaucauaggcaugcaugau

SEQ ID NO: 419362 - RNA, 22 nt, Human
cggcuggguucggcugcaggcc

SEQ ID NO: 419363 - RNA, 22 nt, Human
cugugccaggcccagcugacuu

SEQ ID NO: 419364 - RNA, 22 nt, Human
ucagggcaaaagggaaaccauu

SEQ ID NO: 419365 - RNA, 22 nt, Human
uuucuacaguacugauuucaua

SEQ ID NO: 419366 - RNA, 22 nt, Human
ccugggaggcagagguugcagu

SEQ ID NO: 419367 - RNA, 22 nt, Human
gucuggaggaggaagaaggcac

SEQ ID NO: 419368 - RNA, 22 nt, Human
aaucaggaugacugucauuuca

SEQ ID NO: 419369 - RNA, 22 nt, Human
aucuccaggcauuucaagagac

SEQ ID NO: 419370 - RNA, 22 nt, Human
ugucucugaggugagggucagc

SEQ ID NO: 419371 - RNA, 22 nt, Human
gcagagaggaaugaagccaucc

SEQ ID NO: 419372 - RNA, 22 nt, Human
ggcccagcugugcuuccagccc

SEQ ID NO: 419373 - RNA, 22 nt, Human
gagagugagauaauuucacaua

SEQ ID NO: 419374 - RNA, 22 nt, Human
ucugugucugcagaaguucagc

SEQ ID NO: 419375 - RNA, 22 nt, Human
auacuaaaguauagaacuuagu

SEQ ID NO: 419376 - RNA, 22 nt, Human
auuucuacugugagaaacauga

SEQ ID NO: 419377 - RNA, 20 nt, Human
ggcagcaggaguuuccucuu

SEQ ID NO: 419378 - RNA, 22 nt, Human
ugcugccaugcagagcaacaga

SEQ ID NO: 419379 - RNA, 22 nt, Human
agggcagagcacugaauuggga

SEQ ID NO: 419380 - RNA, 22 nt, Human
ucuguggcacgauugcacugca

SEQ ID NO: 419381 - RNA, 22 nt, Human
cacaggcuccggccuugcagcc

SEQ ID NO: 419382 - RNA, 22 nt, Human
aguuuccaaauauuguuuuagc

SEQ ID NO: 419383 - RNA, 22 nt, Human
uccaaacgggagccaaaugagc

SEQ ID NO: 419384 - RNA, 22 nt, Human
ugagaugaauaacuccugcuaa

SEQ ID NO: 419385 - RNA, 22 nt, Human
uuacacaacagugcaucagcag

SEQ ID NO: 419386 - RNA, 22 nt, Human
aaugauggucauggcaacuuuu

SEQ ID NO: 419387 - RNA, 19 nt, Human
ugccugucaguagaucuca

SEQ ID NO: 419388 - RNA, 22 nt, Human
cuacagguaugugcaugacauc

SEQ ID NO: 419389 - RNA, 22 nt, Human
ggcuuuauuaagcaggguaagu

SEQ ID NO: 419390 - RNA, 22 nt, Human
ccucaggguggcaucagaucuu

SEQ ID NO: 419391 - RNA, 22 nt, Human
gcagggacugugaucucacaga

SEQ ID NO: 419392 - RNA, 22 nt, Human
ugugcuucuugcagcuccugua

SEQ ID NO: 419393 - RNA, 22 nt, Human
cagaccuggaaaacaggcuugc

SEQ ID NO: 419394 - RNA, 22 nt, Human
auuaauuuccaggcacugugcu

SEQ ID NO: 419395 - RNA, 22 nt, Human
agagcuggguggacuuguaguu

SEQ ID NO: 419396 - RNA, 20 nt, Human
aguuuauuccaggagaacug

SEQ ID NO: 419397 - RNA, 22 nt, Human
ucccagggacaccaagcuguuu

SEQ ID NO: 419398 - RNA, 22 nt, Human
cuggagugaagucuggcagcuu

SEQ ID NO: 419399 - RNA, 22 nt, Human
gagacagaguuucacucuuguu

SEQ ID NO: 419400 - RNA, 18 nt, Human
uggugaaggguggaggag

SEQ ID NO: 419401 - RNA, 22 nt, Human
cuggauuuaauuaacuguugcu

SEQ ID NO: 419402 - RNA, 22 nt, Human
aguggcagagcugugucuugaa

SEQ ID NO: 419403 - RNA, 22 nt, Human
ccucuccaguuuuaacgugacc

SEQ ID NO: 419404 - RNA, 22 nt, Human
uucccaguauuaccuucaggaa

SEQ ID NO: 419405 - RNA, 22 nt, Human
ggguccagacacuccagaggaa

SEQ ID NO: 419406 - RNA, 23 nt, Human
ccaaagucgaagucuaguccaga

SEQ ID NO: 419407 - RNA, 22 nt, Human
gcagauggcugagccugcagau

SEQ ID NO: 419408 - RNA, 21 nt, Human
acagagcauaaugguguggca

SEQ ID NO: 419409 - RNA, 19 nt, Human
gaaggagagcugaguuagg

SEQ ID NO: 419410 - RNA, 22 nt, Human
uaaaugcagcaguuucuguucu

SEQ ID NO: 419411 - RNA, 22 nt, Human
auguagcagauauuugugcaca

SEQ ID NO: 419412 - RNA, 22 nt, Human
ucuggcucucauacucgccagu

SEQ ID NO: 419413 - RNA, 22 nt, Human
aggcucagccccugggaggaga

SEQ ID NO: 419414 - RNA, 22 nt, Human
caaaugcauagaaagaugaaac

SEQ ID NO: 419415 - RNA, 22 nt, Human
uauguacacauacacuuguaau

SEQ ID NO: 419416 - RNA, 17 nt, Human
gcagccagugcagcagg

SEQ ID NO: 419417 - RNA, 21 nt, Human
aaacugaagagacaggaacuu

SEQ ID NO: 419418 - RNA, 22 nt, Human
caguuucuacgaaggucaaccc

SEQ ID NO: 419419 - RNA, 22 nt, Human
uaaauguguuguggaugaaguu

SEQ ID NO: 419420 - RNA, 22 nt, Human
agaguccagaaaacagugugcu

SEQ ID NO: 419421 - RNA, 22 nt, Human
cccagccuggugcacugugggg

SEQ ID NO: 419422 - RNA, 22 nt, Human
cagcagccuacaaugcacagaa

SEQ ID NO: 419423 - RNA, 22 nt, Human
uauguacaugauuucauuugcu

SEQ ID NO: 419424 - RNA, 19 nt, Human
cagugcccgacgcaggucu

SEQ ID NO: 419425 - RNA, 22 nt, Human
aaggcugcuuuuaacaugcaua

SEQ ID NO: 419426 - RNA, 23 nt, Human
gacagagugagaccuugucuuac

SEQ ID NO: 419427 - RNA, 22 nt, Human
gauacauuuuaucuccuaacag

SEQ ID NO: 419428 - RNA, 22 nt, Human
gccaggcugcuccagggaggcc

SEQ ID NO: 419429 - RNA, 22 nt, Human
caguggagugggacuggucuga

SEQ ID NO: 419430 - RNA, 22 nt, Human
ggaccugcauuuuaacaagauc

SEQ ID NO: 419431 - RNA, 22 nt, Human
acaacugucaguaaagaauauu

SEQ ID NO: 419432 - RNA, 22 nt, Human
cuggccuguccugacccagccu

SEQ ID NO: 419433 - RNA, 22 nt, Human
acagagcuucccagccugagca

SEQ ID NO: 419434 - RNA, 22 nt, Human
gauggcagcagcagccagggau

SEQ ID NO: 419435 - RNA, 22 nt, Human
ucugagaggcagaccuuccuaa

SEQ ID NO: 419436 - RNA, 22 nt, Human
augucuuucgcaucaguagcua

SEQ ID NO: 419437 - RNA, 22 nt, Human
ccugcagguccccggaugcgca

SEQ ID NO: 419438 - RNA, 22 nt, Human
uggcagaaagaaccaugugcaa

SEQ ID NO: 419439 - RNA, 22 nt, Human
cugaaacauugcaauaacaaag

SEQ ID NO: 419440 - RNA, 22 nt, Human
cugccagcacugccuccugagg

SEQ ID NO: 419441 - RNA, 22 nt, Human
cgaggcagacaaaaguuggaag

SEQ ID NO: 419442 - RNA, 20 nt, Human
ucagauuuuucuaacuuuga

SEQ ID NO: 419443 - RNA, 22 nt, Human
agaagccacuggagguugagau

SEQ ID NO: 419444 - RNA, 22 nt, Human
gggcaguagcuucguaggcauc

SEQ ID NO: 419445 - RNA, 22 nt, Human
gagcugccggcccacaguacua

SEQ ID NO: 419446 - RNA, 22 nt, Human
cauaccuuucucaagcacaugu

SEQ ID NO: 419447 - RNA, 22 nt, Human
cuauuuaucuauuucugaauga

SEQ ID NO: 419448 - RNA, 22 nt, Human
cagagcuggcucugcauguaca

SEQ ID NO: 419449 - RNA, 22 nt, Human
ucagggcaaugucccucagaag

SEQ ID NO: 419450 - RNA, 22 nt, Human
ucagcuuucucucgccaucagg

SEQ ID NO: 419451 - RNA, 22 nt, Human
uggcccugcugggucagagcug

SEQ ID NO: 419452 - RNA, 21 nt, Human
cagagcagcguucugcugugg

SEQ ID NO: 419453 - RNA, 22 nt, Human
cagaagccugccucagaugcac

SEQ ID NO: 419454 - RNA, 22 nt, Human
gccuucugcgcucgugucuccg

SEQ ID NO: 419455 - RNA, 22 nt, Human
ggccaggagcaagccaggcucu

SEQ ID NO: 419456 - RNA, 22 nt, Human
aacuucuugguccugagcuguu

SEQ ID NO: 419457 - RNA, 22 nt, Human
agagggaaugugauugcaccau

SEQ ID NO: 419458 - RNA, 23 nt, Human
uuccuuaacuguuaagauugucu

SEQ ID NO: 419459 - RNA, 22 nt, Human
aggacccugaggucuccuguga

SEQ ID NO: 419460 - RNA, 22 nt, Human
acccaggagccgugagagguua

SEQ ID NO: 419461 - RNA, 22 nt, Human
ugggcagaucuuugguggcuag

SEQ ID NO: 419462 - RNA, 22 nt, Human
cagcccagcagggucuggcccu

SEQ ID NO: 419463 - RNA, 22 nt, Human
ucaccaggauuccuaucaguag

SEQ ID NO: 419464 - RNA, 22 nt, Human
uggcucagcuuacuuuugaggg

SEQ ID NO: 419465 - RNA, 22 nt, Human
uggcucaguuugggggauugaa

SEQ ID NO: 419466 - RNA, 22 nt, Human
aggcucauucuugccucugagc

SEQ ID NO: 419467 - RNA, 22 nt, Human
ccacugucagaggggcugugcc

SEQ ID NO: 419468 - RNA, 22 nt, Human
uugucugucccagcuugugcau

SEQ ID NO: 419469 - RNA, 18 nt, Human
ugucucugaauuccagug

SEQ ID NO: 419470 - RNA, 22 nt, Human
aaagggcugucaaauaagcaac

SEQ ID NO: 419471 - RNA, 22 nt, Human
ggccugcugcuaugacuuccug

SEQ ID NO: 419472 - RNA, 22 nt, Human
auaacagagagcuacugaacug

SEQ ID NO: 419473 - RNA, 21 nt, Human
auuuucauuuccaggggagga

SEQ ID NO: 419474 - RNA, 22 nt, Human
uccagcagaccaucaaggcuca

SEQ ID NO: 419475 - RNA, 22 nt, Human
cuggccugggagcugcuagcgu

SEQ ID NO: 419476 - RNA, 22 nt, Human
ccaggaugacccccacuuuccu

SEQ ID NO: 419477 - RNA, 22 nt, Human
ucuguaguagguuguaguucuu

SEQ ID NO: 419478 - RNA, 22 nt, Human
caggagcagaggguggucagca

SEQ ID NO: 419479 - RNA, 22 nt, Human
ucugcucagugcuuaucucuaa

SEQ ID NO: 419480 - RNA, 22 nt, Human
uggcucuggcgugaagcccaga

SEQ ID NO: 419481 - RNA, 22 nt, Human
aaaaacuguaauuacuuuugca

SEQ ID NO: 419482 - RNA, 22 nt, Human
ugcuucaggaagaaacgccagg

SEQ ID NO: 419483 - RNA, 22 nt, Human
auugacaauuagcccuuaggug

SEQ ID NO: 419484 - RNA, 22 nt, Human
agagugaaggccagguuacagu

SEQ ID NO: 419485 - RNA, 17 nt, Human
ucaggauccaggguucu

SEQ ID NO: 419486 - RNA, 22 nt, Human
ucuuuccuuagaauaauucuuu

SEQ ID NO: 419487 - RNA, 22 nt, Human
uggguagagcaggcuggggcuu

SEQ ID NO: 419488 - RNA, 22 nt, Human
guaacacagaaaugaaauucca

SEQ ID NO: 419489 - RNA, 22 nt, Human
agaugcugcuccacaggccagg

SEQ ID NO: 419490 - RNA, 22 nt, Human
aacacuguggucuuuucaguaa

SEQ ID NO: 419491 - RNA, 19 nt, Human
uggcagggagugauauuag

SEQ ID NO: 419492 - RNA, 22 nt, Human
uauaacacucagaaagaaucau

SEQ ID NO: 419493 - RNA, 22 nt, Human
gagccaggucgggccgcggcga

SEQ ID NO: 419494 - RNA, 22 nt, Human
uugaaaguuaucuagauucuga

SEQ ID NO: 419495 - RNA, 22 nt, Human
gagagucuagugcaccuaguuu

SEQ ID NO: 419496 - RNA, 22 nt, Human
ucaaugauaguacaaucagccu

SEQ ID NO: 419497 - RNA, 22 nt, Human
cauugcacuccaucuugggcaa

SEQ ID NO: 419498 - RNA, 22 nt, Human
cucugcaggggaggcaugcacu

SEQ ID NO: 419499 - RNA, 22 nt, Human
aaacaaacauagguuugaaagu

SEQ ID NO: 419500 - RNA, 21 nt, Human
uuugcauuuuacaugugggga

SEQ ID NO: 419501 - RNA, 22 nt, Human
aggaccaacauagcagcagugg

SEQ ID NO: 419502 - RNA, 22 nt, Human
ggcagcaggagccaucugguag

SEQ ID NO: 419503 - RNA, 22 nt, Human
cagagggcucaguccugcugga

SEQ ID NO: 419504 - RNA, 22 nt, Human
acaugucaauuuaguacucuua

SEQ ID NO: 419505 - RNA, 19 nt, Human
ggcugggucuggcagguuc

SEQ ID NO: 419506 - RNA, 22 nt, Human
cccugcaggggaccugcagccu

SEQ ID NO: 419507 - RNA, 22 nt, Human
uccaggcuggccucgcgugaca

SEQ ID NO: 419508 - RNA, 22 nt, Human
ugccaggcgauugcuaucagca

SEQ ID NO: 419509 - RNA, 22 nt, Human
cauuuagaaacuguuuuuaaca

SEQ ID NO: 419510 - RNA, 22 nt, Human
uguggccucaaggcugcccuca

SEQ ID NO: 419511 - RNA, 22 nt, Human
auccaguucucagugcuuacag

SEQ ID NO: 419512 - RNA, 22 nt, Human
ucugucacccagagugcagugg

SEQ ID NO: 419513 - RNA, 22 nt, Human
aaauugugagcuauagaucuag

SEQ ID NO: 419514 - RNA, 22 nt, Human
ccaaggagcugcaggcacuugu

SEQ ID NO: 419515 - RNA, 22 nt, Human
aaggagcucccggcagaccagg

SEQ ID NO: 419516 - RNA, 20 nt, Human
uccaggcagacagcuauggg

SEQ ID NO: 419517 - RNA, 22 nt, Human
ccagugcacagccaggcaggug

SEQ ID NO: 419518 - RNA, 22 nt, Human
ccagcagccaccuucucgaaau

SEQ ID NO: 419519 - RNA, 22 nt, Human
agcaguggcuggauggugugcu

SEQ ID NO: 419520 - RNA, 22 nt, Human
aggcuuuaaguggccuacagcu

SEQ ID NO: 419521 - RNA, 22 nt, Human
aggcacugggggaugagcaagg

SEQ ID NO: 419522 - RNA, 22 nt, Human
aagugaagaaauacaugagaau

SEQ ID NO: 419523 - RNA, 22 nt, Human
acagcuggaggucugugagcac

SEQ ID NO: 419524 - RNA, 21 nt, Human
agaggcaggcauuaaguacac

SEQ ID NO: 419525 - RNA, 22 nt, Human
gcuggccugaccagccacaggc

SEQ ID NO: 419526 - RNA, 22 nt, Human
gcugccugcacagagcugcuuu

SEQ ID NO: 419527 - RNA, 22 nt, Human
uugaagcauuguggcuuguauu

SEQ ID NO: 419528 - RNA, 21 nt, Human
gcagccagccgagaccaugcc

SEQ ID NO: 419529 - RNA, 22 nt, Human
gagcugcuggcuccucagguua

SEQ ID NO: 419530 - RNA, 21 nt, Human
gagcucucaggcaagaagcag

SEQ ID NO: 419531 - RNA, 22 nt, Human
gucagcugucuccccagagugg

SEQ ID NO: 419532 - RNA, 22 nt, Human
cucugcuuggaacuggacagaa

SEQ ID NO: 419533 - RNA, 22 nt, Human
auggcaagcaagcugaagagau

SEQ ID NO: 419534 - RNA, 22 nt, Human
ugccugucuccucugcagggug

SEQ ID NO: 419535 - RNA, 22 nt, Human
cuuuggcaaugaaacacaagaa

SEQ ID NO: 419536 - RNA, 22 nt, Human
gcucaggaaaacagucuaguaa

SEQ ID NO: 419537 - RNA, 22 nt, Human
ucauugcagcuucagguguuca

SEQ ID NO: 419538 - RNA, 22 nt, Human
ccaggcagggcucaaggaaccu

SEQ ID NO: 419539 - RNA, 22 nt, Human
agcagccauagauagcaugcaa

SEQ ID NO: 419540 - RNA, 22 nt, Human
uggcagaguucgcuccuauuca

SEQ ID NO: 419541 - RNA, 22 nt, Human
aagauuuagggccaguuuacau

SEQ ID NO: 419542 - RNA, 22 nt, Human
uccaggcuaauuuugcauuguu

SEQ ID NO: 419543 - RNA, 22 nt, Human
uggaggcauuuuagguugucac

SEQ ID NO: 419544 - RNA, 22 nt, Human
aagcccaguuucacacugagac

SEQ ID NO: 419545 - RNA, 22 nt, Human
cagagcagggguuucccagguu

SEQ ID NO: 419546 - RNA, 22 nt, Human
ugggcccaagagagucuccaac

SEQ ID NO: 419547 - RNA, 23 nt, Human
uauuacaauuggucuuauuaaga

SEQ ID NO: 419548 - RNA, 22 nt, Human
aucaguuuggaacauucaggcc

SEQ ID NO: 419549 - RNA, 21 nt, Human
ugaaugaggaggauggcauuu

SEQ ID NO: 419550 - RNA, 22 nt, Human
guaaucucagcuacuugggagg

SEQ ID NO: 419551 - RNA, 22 nt, Human
auucuccagcucacuguccaua

SEQ ID NO: 419552 - RNA, 22 nt, Human
agcaggagagcagugcgugguc

SEQ ID NO: 419553 - RNA, 22 nt, Human
aggcagguguuaccucugguuu

SEQ ID NO: 419554 - RNA, 23 nt, Human
uuaggcacuuaguagggccagag

SEQ ID NO: 419555 - RNA, 18 nt, Human
cagaggagagacauucag

SEQ ID NO: 419556 - RNA, 22 nt, Human
ucauugaacgaagagcuccauu

SEQ ID NO: 419557 - RNA, 20 nt, Human
uggcuccucuuggcuguggc

SEQ ID NO: 419558 - RNA, 22 nt, Human
uucaaaauuguucuaagcucug

SEQ ID NO: 419559 - RNA, 22 nt, Human
ucucacagugcaggucugucuc

SEQ ID NO: 419560 - RNA, 22 nt, Human
agcccaaggcuucccugcuggc

SEQ ID NO: 419561 - RNA, 22 nt, Human
agucauaauuauaaacaucagu

SEQ ID NO: 419562 - RNA, 22 nt, Human
auccuugagccaaugacugauu

SEQ ID NO: 419563 - RNA, 22 nt, Human
ccacuggcauccagcugccauc

SEQ ID NO: 419564 - RNA, 22 nt, Human
gcagaggccaucaacuuugcca

SEQ ID NO: 419565 - RNA, 22 nt, Human
uguaucaaaccaaauuaauucu

SEQ ID NO: 419566 - RNA, 22 nt, Human
gggcugugcugaguaggaggug

SEQ ID NO: 419567 - RNA, 22 nt, Human
cugggccucauccucagaguuu

SEQ ID NO: 419568 - RNA, 22 nt, Human
uccugccugagcguggaggagg

SEQ ID NO: 419569 - RNA, 22 nt, Human
aacuguaagacaaaugacuucu

SEQ ID NO: 419570 - RNA, 22 nt, Human
gcacugaaugcuuuuacuguaa

SEQ ID NO: 419571 - RNA, 22 nt, Human
guccucugacucagccuuggga

SEQ ID NO: 419572 - RNA, 22 nt, Human
cugcagccuaggugcagcuggg

SEQ ID NO: 419573 - RNA, 22 nt, Human
cagagcuggagaaguggauuua

SEQ ID NO: 419574 - RNA, 22 nt, Human
cagggccuuuuagcaucuucuc

SEQ ID NO: 419575 - RNA, 22 nt, Human
cacauuucugugagucaauauu

SEQ ID NO: 419576 - RNA, 22 nt, Human
cauaagaaauaaugaugaugac

SEQ ID NO: 419577 - RNA, 22 nt, Human
ucaguggaguauggaugaaguc

SEQ ID NO: 419578 - RNA, 22 nt, Human
agcaaacagugugcuaagaaau

SEQ ID NO: 419579 - RNA, 22 nt, Human
guuccacaaaauguacccaguu

SEQ ID NO: 419580 - RNA, 20 nt, Human
aauguauauuuuaugccagg

SEQ ID NO: 419581 - RNA, 23 nt, Human
aggagccaggugcagcccuugug

SEQ ID NO: 419582 - RNA, 22 nt, Human
guggccucuguuggcuccuagg

SEQ ID NO: 419583 - RNA, 22 nt, Human
agcugcuccuuuccugcaggcg

SEQ ID NO: 419584 - RNA, 22 nt, Human
ugcagaagcugcaggucagugg

SEQ ID NO: 419585 - RNA, 21 nt, Human
gcacagcaugaguguuggcau

SEQ ID NO: 419586 - RNA, 22 nt, Human
uagcugccuaugugauaagaga

SEQ ID NO: 419587 - RNA, 22 nt, Human
ggucucuguugccuccaucaag

SEQ ID NO: 419588 - RNA, 22 nt, Human
ccuggccagaggcgugccugug

SEQ ID NO: 419589 - RNA, 22 nt, Human
cucuguagaaacagggcagaag

SEQ ID NO: 419590 - RNA, 22 nt, Human
cacucccuucaggagccuagga

SEQ ID NO: 419591 - RNA, 22 nt, Human
caggugucuaauucucaccccc

SEQ ID NO: 419592 - RNA, 22 nt, Human
ggcucaggggccaggccugucc

SEQ ID NO: 419593 - RNA, 22 nt, Human
gagacauggcaaaagcacuggu

SEQ ID NO: 419594 - RNA, 22 nt, Human
guccucaggaaagcagauaaca

SEQ ID NO: 419595 - RNA, 22 nt, Human
gagccagguuggaggcugcagu

SEQ ID NO: 419596 - RNA, 22 nt, Human
guggaaguagauuugagaaggu

SEQ ID NO: 419597 - RNA, 22 nt, Human
ugggggugacuaucucgggaau

SEQ ID NO: 419598 - RNA, 18 nt, Human
uccugcagcuucuaugua

SEQ ID NO: 419599 - RNA, 22 nt, Human
uuuccucuucgauuaaguuugg

SEQ ID NO: 419600 - RNA, 22 nt, Human
aaagacuuggcuuaugauuugc

SEQ ID NO: 419601 - RNA, 22 nt, Human
ugccaggcccagcuccagagcu

SEQ ID NO: 419602 - RNA, 22 nt, Human
cugaagccacgauagcuuccua

SEQ ID NO: 419603 - RNA, 22 nt, Human
ggcagcugagcauggcuaccuu

SEQ ID NO: 419604 - RNA, 22 nt, Human
caguacuuugaagauauuuuag

SEQ ID NO: 419605 - RNA, 21 nt, Human
cacuggaauuuucugugacau

SEQ ID NO: 419606 - RNA, 20 nt, Human
uaucaaucagaaagaagacu

SEQ ID NO: 419607 - RNA, 22 nt, Human
gggcucugcgcucagcuccagc

SEQ ID NO: 419608 - RNA, 22 nt, Human
gaaaguuuauagguuauauaau

SEQ ID NO: 419609 - RNA, 22 nt, Human
cagccugacaccagcuuugggc

SEQ ID NO: 419610 - RNA, 20 nt, Human
ucauuguguugccaauuccc

SEQ ID NO: 419611 - RNA, 22 nt, Human
aagacugugucuauggcuacuc

SEQ ID NO: 419612 - RNA, 22 nt, Human
ccuuucucuaucgacccaucgc

SEQ ID NO: 419613 - RNA, 22 nt, Human
ugucauaaaacacaagcuguug

SEQ ID NO: 419614 - RNA, 22 nt, Human
cuaguucuagaucccugaggaa

SEQ ID NO: 419615 - RNA, 21 nt, Human
uugaaaguaaauucagcagcu

SEQ ID NO: 419616 - RNA, 22 nt, Human
ccugcucagccccagcucaccc

SEQ ID NO: 419617 - RNA, 22 nt, Human
uccagccuaggggaacagcugc

SEQ ID NO: 419618 - RNA, 22 nt, Human
aacauugccaugguuaauuuua

SEQ ID NO: 419619 - RNA, 22 nt, Human
ucagucuucccuccagugcaac

SEQ ID NO: 419620 - RNA, 22 nt, Human
cugcaggcccccuuccuggagu

SEQ ID NO: 419621 - RNA, 22 nt, Human
ccuccagggcagacggggagca

SEQ ID NO: 419622 - RNA, 22 nt, Human
acaguggaguugggguagcccu

SEQ ID NO: 419623 - RNA, 22 nt, Human
uuugucuuguguccuuaggacc

SEQ ID NO: 419624 - RNA, 22 nt, Human
auggggcugggauucuccucgg

SEQ ID NO: 419625 - RNA, 22 nt, Human
cccucugaccuccugccacagu

SEQ ID NO: 419626 - RNA, 21 nt, Human
ucagcuuugcaacugcacauc

SEQ ID NO: 419627 - RNA, 22 nt, Human
uuucaaaguggagaauuagaca

SEQ ID NO: 419628 - RNA, 22 nt, Human
cuucugggcauucagcugcaca

SEQ ID NO: 419629 - RNA, 22 nt, Human
gcuucucgggccugaugucguc

SEQ ID NO: 419630 - RNA, 22 nt, Human
gaggaguggaguugcuggguug

SEQ ID NO: 419631 - RNA, 22 nt, Human
cacuacuugaaagaauuacaga

SEQ ID NO: 419632 - RNA, 22 nt, Human
uugccucccagcaugggcagcu

SEQ ID NO: 419633 - RNA, 22 nt, Human
uggccugggccugccggugcaa

SEQ ID NO: 419634 - RNA, 22 nt, Human
acuuggcaaguaucuauaaagu

SEQ ID NO: 419635 - RNA, 22 nt, Human
aguggccagugcugcucugggg

SEQ ID NO: 419636 - RNA, 22 nt, Human
uuguuucaaauauuucagaaua

SEQ ID NO: 419637 - RNA, 22 nt, Human
aggcugggcaccguuuugaucc

SEQ ID NO: 419638 - RNA, 22 nt, Human
cugggcacagcguugggcucuu

SEQ ID NO: 419639 - RNA, 22 nt, Human
uaagcauucaaugcuuagcacu

SEQ ID NO: 419640 - RNA, 22 nt, Human
ugaaagcagcaccaauaccauu

SEQ ID NO: 419641 - RNA, 22 nt, Human
gggcugaccccaccccucacuc

SEQ ID NO: 419642 - RNA, 22 nt, Human
uuacaaagagugccagagugug

SEQ ID NO: 419643 - RNA, 22 nt, Human
caaagugcuggaauuacaggug

SEQ ID NO: 419644 - RNA, 22 nt, Human
cagggugcagugucgcugcuag

SEQ ID NO: 419645 - RNA, 22 nt, Human
aacaacugaaaagcuuuuucug

SEQ ID NO: 419646 - RNA, 22 nt, Human
gagugugucggucagcguggcg

SEQ ID NO: 419647 - RNA, 22 nt, Human
agagugcaaccgaaacaagcag

SEQ ID NO: 419648 - RNA, 18 nt, Human
ugaacagaugaguugaag

SEQ ID NO: 419649 - RNA, 22 nt, Human
uggaggaugagugugggcucug

SEQ ID NO: 419650 - RNA, 22 nt, Human
ugcugggcuaggguggagcucu

SEQ ID NO: 419651 - RNA, 22 nt, Human
caagagcucagaaacccuugcu

SEQ ID NO: 419652 - RNA, 22 nt, Human
acaggcacugucaagucaugaa

SEQ ID NO: 419653 - RNA, 22 nt, Human
uugaagcaggaaaauuucuauu

SEQ ID NO: 419654 - RNA, 22 nt, Human
gggcacuggaaggcucucaggc

SEQ ID NO: 419655 - RNA, 22 nt, Human
acaggcugcccgcuccccaccu

SEQ ID NO: 419656 - RNA, 22 nt, Human
uuugacaggacuaacauauggc

SEQ ID NO: 419657 - RNA, 22 nt, Human
cugccuggucucaggcaugggg

SEQ ID NO: 419658 - RNA, 22 nt, Human
ucaagcaucuuggucuacgauc

SEQ ID NO: 419659 - RNA, 22 nt, Human
ggagaagcagcuucuugaugaa

SEQ ID NO: 419660 - RNA, 22 nt, Human
augugaaacugaagcauccaua

SEQ ID NO: 419661 - RNA, 22 nt, Human
ucaguuuuuaagaguuaugcga

SEQ ID NO: 419662 - RNA, 22 nt, Human
uggcccugacuuggaggccuga

SEQ ID NO: 419663 - RNA, 18 nt, Human
uguacaguuaugagcauu

SEQ ID NO: 419664 - RNA, 22 nt, Human
uagggcagcugcaucaggcacu

SEQ ID NO: 419665 - RNA, 22 nt, Human
aaaacauguccauacagaaacu

SEQ ID NO: 419666 - RNA, 22 nt, Human
acagcuguggggacucuugccc

SEQ ID NO: 419667 - RNA, 18 nt, Human
agaagccacgaggagucc

SEQ ID NO: 419668 - RNA, 22 nt, Human
augcaucuauucccaagggcag

SEQ ID NO: 419669 - RNA, 22 nt, Human
acagaaauauucguggugcuug

SEQ ID NO: 419670 - RNA, 22 nt, Human
uccauuuucuugcucuagguaa

SEQ ID NO: 419671 - RNA, 22 nt, Human
gcugccugauguccagcaggac

SEQ ID NO: 419672 - RNA, 22 nt, Human
cagaggaaguuccuugaugaga

SEQ ID NO: 419673 - RNA, 22 nt, Human
uuugcauuuuagauuuaggccu

SEQ ID NO: 419674 - RNA, 22 nt, Human
agggaggaccaaugugugguua

SEQ ID NO: 419675 - RNA, 22 nt, Human
cauugcugugggcauuugcugc

SEQ ID NO: 419676 - RNA, 22 nt, Human
ucaauuaugccauugcaauauu

SEQ ID NO: 419677 - RNA, 22 nt, Human
ggucaggguuccagguaucuuc

SEQ ID NO: 419678 - RNA, 22 nt, Human
caaaugcaugagaaauaagagg

SEQ ID NO: 419679 - RNA, 22 nt, Human
accagguggccccagcgugguu

SEQ ID NO: 419680 - RNA, 22 nt, Human
aggugauguccacagcuugcag

SEQ ID NO: 419681 - RNA, 22 nt, Human
cuggcucccagcuuucagggag

SEQ ID NO: 419682 - RNA, 22 nt, Human
cuggagcccaggccuggugucu

SEQ ID NO: 419683 - RNA, 20 nt, Human
ucaaaggcaaaggugggugu

SEQ ID NO: 419684 - RNA, 22 nt, Human
ugggauaguggccaggaccccc

SEQ ID NO: 419685 - RNA, 22 nt, Human
gcugagcuagaaaaggaccaca

SEQ ID NO: 419686 - RNA, 22 nt, Human
gaagcccuauccucuccuggga

SEQ ID NO: 419687 - RNA, 22 nt, Human
acucccagguugccuggcaggc

SEQ ID NO: 419688 - RNA, 22 nt, Human
aucucccagccacagcauucuu

SEQ ID NO: 419689 - RNA, 22 nt, Human
uccaugucuucaugugucuaac

SEQ ID NO: 419690 - RNA, 20 nt, Human
caggaugauuggacacgaug

SEQ ID NO: 419691 - RNA, 22 nt, Human
ucuuacauauagcaugaguaca

SEQ ID NO: 419692 - RNA, 22 nt, Human
aaggcagcccuggcucagccug

SEQ ID NO: 419693 - RNA, 17 nt, Human
agugacuuggaaagagc

SEQ ID NO: 419694 - RNA, 22 nt, Human
ugggccuggagcccuggagagu

SEQ ID NO: 419695 - RNA, 22 nt, Human
uacaggaggauuaucaaaggau

SEQ ID NO: 419696 - RNA, 17 nt, Human
aggugcuggagcaucag

SEQ ID NO: 419697 - RNA, 22 nt, Human
gaggcaggcagauugcuugagg

SEQ ID NO: 419698 - RNA, 22 nt, Human
uccagugguuugaaaggggugu

SEQ ID NO: 419699 - RNA, 22 nt, Human
gcagagccugggggucugcgga

SEQ ID NO: 419700 - RNA, 22 nt, Human
ggucuuccgagaggccugugcu

SEQ ID NO: 419701 - RNA, 22 nt, Human
cugucccucaucaccucugggu

SEQ ID NO: 419702 - RNA, 22 nt, Human
agccacagcaacaagugcaauu

SEQ ID NO: 419703 - RNA, 22 nt, Human
gcucuggaagcaucugagagga

SEQ ID NO: 419704 - RNA, 22 nt, Human
ggcuccucucuggccgcucccg

SEQ ID NO: 419705 - RNA, 22 nt, Human
aggcucagauccuuguguccug

SEQ ID NO: 419706 - RNA, 22 nt, Human
aagggacccuggaucaaaugga

SEQ ID NO: 419707 - RNA, 22 nt, Human
caauagcagcuucugaaugcaa

SEQ ID NO: 419708 - RNA, 22 nt, Human
aaccaggacaauuuugaaagua

SEQ ID NO: 419709 - RNA, 22 nt, Human
uugcauugugauuacagaggug

SEQ ID NO: 419710 - RNA, 22 nt, Human
uggcugagccacuuguucagau

SEQ ID NO: 419711 - RNA, 22 nt, Human
ccuggagcaaaaaucuaaggag

SEQ ID NO: 419712 - RNA, 22 nt, Human
gggacaggccccucgcuagcuu

SEQ ID NO: 419713 - RNA, 22 nt, Human
ccuggagcacauggcaggaggc

SEQ ID NO: 419714 - RNA, 22 nt, Human
auguguuuguaccuuuaaauau

SEQ ID NO: 419715 - RNA, 22 nt, Human
auguccagagccggccugcuga

SEQ ID NO: 419716 - RNA, 19 nt, Human
cugagcagcggcagcacuu

SEQ ID NO: 419717 - RNA, 22 nt, Human
uccagggaaggugugaggcugg

SEQ ID NO: 419718 - RNA, 22 nt, Human
cugucagcacucuacuacagau

SEQ ID NO: 419719 - RNA, 22 nt, Human
uaacaucuuuagcagcucgaac

SEQ ID NO: 419720 - RNA, 22 nt, Human
accagggcugacaaucugaugg

SEQ ID NO: 419721 - RNA, 22 nt, Human
ugggggugugccagggaccucc

SEQ ID NO: 419722 - RNA, 22 nt, Human
gaaaagggcaagagagagggca

SEQ ID NO: 419723 - RNA, 22 nt, Human
uggcucuguuuguuaacuagac

SEQ ID NO: 419724 - RNA, 22 nt, Human
agggccucuaccauccaagguu

SEQ ID NO: 419725 - RNA, 22 nt, Human
gccugugcauagcagcggacuc

SEQ ID NO: 419726 - RNA, 22 nt, Human
uguuuuaugagccauauaaccu

SEQ ID NO: 419727 - RNA, 22 nt, Human
aagcccagaugugagaacugag

SEQ ID NO: 419728 - RNA, 22 nt, Human
caggcugcggucggcucugguc

SEQ ID NO: 419729 - RNA, 22 nt, Human
guucacauccuugugaggauuu

SEQ ID NO: 419730 - RNA, 22 nt, Human
acauuucuccuacuuguuauuu

SEQ ID NO: 419731 - RNA, 23 nt, Human
cauuucugggagauuuauaaaau

SEQ ID NO: 419732 - RNA, 22 nt, Human
uccuggccucacaguccugggu

SEQ ID NO: 419733 - RNA, 22 nt, Human
gaugugggguugagggaccagc

SEQ ID NO: 419734 - RNA, 22 nt, Human
gagcaggaugggagcuggggcc

SEQ ID NO: 419735 - RNA, 22 nt, Human
ccagagcaauucucacagaacu

SEQ ID NO: 419736 - RNA, 22 nt, Human
aaauaauguuaggccuuugcuc

SEQ ID NO: 419737 - RNA, 22 nt, Human
ugaauggucacugagcaucugu

SEQ ID NO: 419738 - RNA, 22 nt, Human
agcagaagaaagccacaugacu

SEQ ID NO: 419739 - RNA, 22 nt, Human
cucugcagaggcccaaggcuga

SEQ ID NO: 419740 - RNA, 22 nt, Human
uggagugaaguaaagaggacaa

SEQ ID NO: 419741 - RNA, 22 nt, Human
gcacugaaaauguuggauucca

SEQ ID NO: 419742 - RNA, 22 nt, Human
uccaggcaaaaaccaacuacag

SEQ ID NO: 419743 - RNA, 22 nt, Human
ugcuagaauaccuaccuggagg

SEQ ID NO: 419744 - RNA, 22 nt, Human
gccagcugguaggcaccuagcc

SEQ ID NO: 419745 - RNA, 22 nt, Human
gcugccuguggcccuucugggu

SEQ ID NO: 419746 - RNA, 22 nt, Human
ucagcuggauguggaagugcua

SEQ ID NO: 419747 - RNA, 22 nt, Human
ugcuggggucauggggcgcccg

SEQ ID NO: 419748 - RNA, 22 nt, Human
agcucccaggcagucaugagga

SEQ ID NO: 419749 - RNA, 22 nt, Human
cucccagagagcaggugggccg

SEQ ID NO: 419750 - RNA, 22 nt, Human
gcagggcuguggacacuuuggu

SEQ ID NO: 419751 - RNA, 22 nt, Human
gagggcagagacagugauucac

SEQ ID NO: 419752 - RNA, 22 nt, Human
aguucccaggugaugcugaugu

SEQ ID NO: 419753 - RNA, 22 nt, Human
aagcaaaagguuacacuucugg

SEQ ID NO: 419754 - RNA, 22 nt, Human
uucugcaggagcccuaguguau

SEQ ID NO: 419755 - RNA, 22 nt, Human
ggcaggaggugaguggcgggug

SEQ ID NO: 419756 - RNA, 22 nt, Human
ggcagggaggaggugaaaguga

SEQ ID NO: 419757 - RNA, 22 nt, Human
ucuggccuuaucuguccaagcc

SEQ ID NO: 419758 - RNA, 22 nt, Human
uggcagggaguugcaggauuuc

SEQ ID NO: 419759 - RNA, 19 nt, Human
ggacacagaaagcugcauu

SEQ ID NO: 419760 - RNA, 22 nt, Human
gccugugacucgucuugggcca

SEQ ID NO: 419761 - RNA, 22 nt, Human
acaaauguggacauggauaaug

SEQ ID NO: 419762 - RNA, 22 nt, Human
cacccagcacagagggaggcga

SEQ ID NO: 419763 - RNA, 20 nt, Human
gcagggcaagggauaugaaa

SEQ ID NO: 419764 - RNA, 22 nt, Human
aaggcagccucugccagccggg

SEQ ID NO: 419765 - RNA, 22 nt, Human
aggcugugagcaagaacaccua

SEQ ID NO: 419766 - RNA, 22 nt, Human
uuuuuaaugcagucugagacau

SEQ ID NO: 419767 - RNA, 22 nt, Human
aagaugcagcuuuacaauaagg

SEQ ID NO: 419768 - RNA, 22 nt, Human
uccuucagaggacggcagccag

SEQ ID NO: 419769 - RNA, 22 nt, Human
agccuggcacugaggcagggcg

SEQ ID NO: 419770 - RNA, 22 nt, Human
aggccuuccucggagacaggga

SEQ ID NO: 419771 - RNA, 17 nt, Human
gcaaucucagucuccuu

SEQ ID NO: 419772 - RNA, 22 nt, Human
agagccuguuuugugggagaug

SEQ ID NO: 419773 - RNA, 22 nt, Human
ugcagggcuacaggacuacaac

SEQ ID NO: 419774 - RNA, 16 nt, Human
gaggcuggcagauguc

SEQ ID NO: 419775 - RNA, 22 nt, Human
cugcagagguugguucuaagau

SEQ ID NO: 419776 - RNA, 22 nt, Human
uccuuuuuauaguuagagaaac

SEQ ID NO: 419777 - RNA, 22 nt, Human
cuagagaggcagauguccugug

SEQ ID NO: 419778 - RNA, 22 nt, Human
uggucucugacucugaagaccc

SEQ ID NO: 419779 - RNA, 22 nt, Human
cauucucaauaguagaugagua

SEQ ID NO: 419780 - RNA, 22 nt, Human
cauuaucugccauugacaccau

SEQ ID NO: 419781 - RNA, 22 nt, Human
agccuggcacugccccauccau

SEQ ID NO: 419782 - RNA, 22 nt, Human
uuuuaaucaugcuucuaugucc

SEQ ID NO: 419783 - RNA, 22 nt, Human
gaggaacccagcugggguugcc

SEQ ID NO: 419784 - RNA, 22 nt, Human
uguuuaagcugaugagguaucg

SEQ ID NO: 419785 - RNA, 22 nt, Human
ucugccuggauuuuggaaagcu

SEQ ID NO: 419786 - RNA, 22 nt, Human
ccagcagagggucuuggccauu

SEQ ID NO: 419787 - RNA, 22 nt, Human
cugccuuugcccuugacacugu

SEQ ID NO: 419788 - RNA, 22 nt, Human
gccucugccaagggggcugcgg

SEQ ID NO: 419789 - RNA, 22 nt, Human
uaaauucugaucaaguuccuuc

SEQ ID NO: 419790 - RNA, 22 nt, Human
cugagcugggaguggauagugg

SEQ ID NO: 419791 - RNA, 22 nt, Human
ucagcuuucucuucuaucgaua

SEQ ID NO: 419792 - RNA, 22 nt, Human
ugaggcagugcugggaagccug

SEQ ID NO: 419793 - RNA, 22 nt, Human
gugccagcucuccccacaucug

SEQ ID NO: 419794 - RNA, 22 nt, Human
ucaggagauguaaccuuagcug

SEQ ID NO: 419795 - RNA, 23 nt, Human
auugaugacuugauuacacuuuu

SEQ ID NO: 419796 - RNA, 22 nt, Human
cuacagaaaaucagccacaggc

SEQ ID NO: 419797 - RNA, 22 nt, Human
uuucccaauugagagguucugu

SEQ ID NO: 419798 - RNA, 22 nt, Human
ccagagagucgaugggggacac

SEQ ID NO: 419799 - RNA, 22 nt, Human
uuaggaaauuaugguuucagau

SEQ ID NO: 419800 - RNA, 22 nt, Human
caaagguaaagaucugcugugg

SEQ ID NO: 419801 - RNA, 18 nt, Human
uuucacagauucaugacu

SEQ ID NO: 419802 - RNA, 22 nt, Human
agcagggcucacauuaguggau

SEQ ID NO: 419803 - RNA, 22 nt, Human
ucugccuguucaagucuucuag

SEQ ID NO: 419804 - RNA, 22 nt, Human
ccaccuccaccuauugccagcc

SEQ ID NO: 419805 - RNA, 22 nt, Human
cugacucccaaagaggacgcgu

SEQ ID NO: 419806 - RNA, 22 nt, Human
aagcugcccuguguuagaguuc

SEQ ID NO: 419807 - RNA, 22 nt, Human
ucucagagggaaaggccaauuu

SEQ ID NO: 419808 - RNA, 22 nt, Human
gcucccaccuuugcuaucagua

SEQ ID NO: 419809 - RNA, 22 nt, Human
aaggccaggagacuuggaguca

SEQ ID NO: 419810 - RNA, 22 nt, Human
cucuguccacagguuugucccu

SEQ ID NO: 419811 - RNA, 22 nt, Human
uagcauuuauggucaugugucc

SEQ ID NO: 419812 - RNA, 22 nt, Human
augaguucaauuguuucaguca

SEQ ID NO: 419813 - RNA, 22 nt, Human
cagagccagcuguccuuggcau

SEQ ID NO: 419814 - RNA, 22 nt, Human
uggggcuguggauucucacgaa

SEQ ID NO: 419815 - RNA, 20 nt, Human
ucagugauuuugaagaggaa

SEQ ID NO: 419816 - RNA, 22 nt, Human
auugaggcagcauaguucaggg

SEQ ID NO: 419817 - RNA, 22 nt, Human
gcucucuggguggugggcaaca

SEQ ID NO: 419818 - RNA, 22 nt, Human
cugggaggcccacguugggaag

SEQ ID NO: 419819 - RNA, 22 nt, Human
aacagacagaaaaaugugaucu

SEQ ID NO: 419820 - RNA, 22 nt, Human
cauuugcagagggugacacucu

SEQ ID NO: 419821 - RNA, 22 nt, Human
cagggcagagccaggauuucaa

SEQ ID NO: 419822 - RNA, 22 nt, Human
aaggaggagcggaggcuuguug

SEQ ID NO: 419823 - RNA, 22 nt, Human
aggaggccccuccuggguugcu

SEQ ID NO: 419824 - RNA, 22 nt, Human
ucacauuuucauauucucugag

SEQ ID NO: 419825 - RNA, 22 nt, Human
gacugccagaaugugaggccug

SEQ ID NO: 419826 - RNA, 22 nt, Human
cucugggcaaagaugccucauc

SEQ ID NO: 419827 - RNA, 22 nt, Human
ggccacuccgcugcuacuggaa

SEQ ID NO: 419828 - RNA, 22 nt, Human
gagguagcaugcuggaagggac

SEQ ID NO: 419829 - RNA, 22 nt, Human
uuucacaaguuucaggauucug

SEQ ID NO: 419830 - RNA, 22 nt, Human
ucaccagucuuucuuaccauug

SEQ ID NO: 419831 - RNA, 22 nt, Human
aaaugcaauuguauguacucca

SEQ ID NO: 419832 - RNA, 22 nt, Human
gacaggggucccucugggcugu

SEQ ID NO: 419833 - RNA, 22 nt, Human
uuuucacacaaggugauaaguu

SEQ ID NO: 419834 - RNA, 22 nt, Human
cagaacugggcagggagcagag

SEQ ID NO: 419835 - RNA, 22 nt, Human
ggcagagaugugggucagaauc

SEQ ID NO: 419836 - RNA, 22 nt, Human
cagggccauuggcguggcuguc

SEQ ID NO: 419837 - RNA, 22 nt, Human
ccagagcuaaacacacaggcug

SEQ ID NO: 419838 - RNA, 18 nt, Human
acaaauguagugucuuaa

SEQ ID NO: 419839 - RNA, 22 nt, Human
uaguucuucaugaauucagcuu

SEQ ID NO: 419840 - RNA, 22 nt, Human
ccauccuaucugaccuacuugu

SEQ ID NO: 419841 - RNA, 22 nt, Human
agcagcagaggucagaaaggua

SEQ ID NO: 419842 - RNA, 22 nt, Human
acagcagcuaaaggugucuccu

SEQ ID NO: 419843 - RNA, 22 nt, Human
gggccuggggacaccaccauga

SEQ ID NO: 419844 - RNA, 22 nt, Human
aacauguagcagaaacgacuaa

SEQ ID NO: 419845 - RNA, 22 nt, Human
acuuaguauuuuucagcuuuga

SEQ ID NO: 419846 - RNA, 21 nt, Human
gaggccacuaauaggggcaga

SEQ ID NO: 419847 - RNA, 22 nt, Human
cuccagggagcugcgggagcca

SEQ ID NO: 419848 - RNA, 22 nt, Human
gcagcugcagguggucccaugc

SEQ ID NO: 419849 - RNA, 22 nt, Human
agaggggcucauauccugucau

SEQ ID NO: 419850 - RNA, 22 nt, Human
uggagccauaacccuuucguac

SEQ ID NO: 419851 - RNA, 22 nt, Human
uuuuaagaugcuaguauuucag

SEQ ID NO: 419852 - RNA, 22 nt, Human
cagcugaguuuccaagucugcc

SEQ ID NO: 419853 - RNA, 22 nt, Human
ugcccaaguccuccaccgaggu

SEQ ID NO: 419854 - RNA, 22 nt, Human
uccagggcugacuugggagagg

SEQ ID NO: 419855 - RNA, 19 nt, Human
ccuguacauuauucucccc

SEQ ID NO: 419856 - RNA, 23 nt, Human
uggcagcuguguaagagaaagca

SEQ ID NO: 419857 - RNA, 22 nt, Human
caugucuuauauccugucuuca

SEQ ID NO: 419858 - RNA, 22 nt, Human
ucugggagauccaagcagaacu

SEQ ID NO: 419859 - RNA, 22 nt, Human
uagggcagccuuauagcuccca

SEQ ID NO: 419860 - RNA, 22 nt, Human
uguccucuaauuggccucuugc

SEQ ID NO: 419861 - RNA, 22 nt, Human
agggcugaaacauaauccuucu

SEQ ID NO: 419862 - RNA, 22 nt, Human
ugcugaaggcaggggagguggc

SEQ ID NO: 419863 - RNA, 22 nt, Human
ccuggaggcucugggagggcag

SEQ ID NO: 419864 - RNA, 22 nt, Human
aggucagcugcugauaggcagc

SEQ ID NO: 419865 - RNA, 22 nt, Human
gggcacugcuuugcucugucac

SEQ ID NO: 419866 - RNA, 22 nt, Human
ugagcuguagcagaugcuguug

SEQ ID NO: 419867 - RNA, 22 nt, Human
acccuggacuggggcugaggcu

SEQ ID NO: 419868 - RNA, 19 nt, Human
uugaaauuguuugauaugg

SEQ ID NO: 419869 - RNA, 22 nt, Human
gggucuggacggcugcaggaag

SEQ ID NO: 419870 - RNA, 22 nt, Human
ucagcugcucuguugagcugaa

SEQ ID NO: 419871 - RNA, 22 nt, Human
ggagccagggaagcugcuuccu

SEQ ID NO: 419872 - RNA, 22 nt, Human
cagugucuuauuuguagcucag

SEQ ID NO: 419873 - RNA, 22 nt, Human
acacuuuacagcuuccuuugca

SEQ ID NO: 419874 - RNA, 22 nt, Human
cagugcaugaaacaauaugcag

SEQ ID NO: 419875 - RNA, 21 nt, Human
uggaccuguccuucucgcugu

SEQ ID NO: 419876 - RNA, 22 nt, Human
agcugcccccagggcugugcuu

SEQ ID NO: 419877 - RNA, 22 nt, Human
ucuccgaucacagguuuucaau

SEQ ID NO: 419878 - RNA, 22 nt, Human
gcagagugaagcaguauggaaa

SEQ ID NO: 419879 - RNA, 18 nt, Human
uggcagggaggaaauaua

SEQ ID NO: 419880 - RNA, 22 nt, Human
cccagggacagcuagguggggc

SEQ ID NO: 419881 - RNA, 22 nt, Human
aggcacugauucucagaguuac

SEQ ID NO: 419882 - RNA, 22 nt, Human
cugggaguugacgaggcuugua

SEQ ID NO: 419883 - RNA, 22 nt, Human
aagcagaauuuaauagaaaggu

SEQ ID NO: 419884 - RNA, 22 nt, Human
uucuuugcccuuaaugaaauaa

SEQ ID NO: 419885 - RNA, 22 nt, Human
ccagggcagaaaaagagggaau

SEQ ID NO: 419886 - RNA, 22 nt, Human
gcaggagcucguuuccaggcug

SEQ ID NO: 419887 - RNA, 22 nt, Human
gccaggcaaauuaaggaaugca

SEQ ID NO: 419888 - RNA, 22 nt, Human
uagaaagugaagguuaauuaau

SEQ ID NO: 419889 - RNA, 22 nt, Human
uagcuuuaggaugguucucuug

SEQ ID NO: 419890 - RNA, 22 nt, Human
uguugaagauaaaguucucauu

SEQ ID NO: 419891 - RNA, 19 nt, Human
ugggcagguucaguaaugg

SEQ ID NO: 419892 - RNA, 22 nt, Human
uacaugaacaaaauagcagaaa

SEQ ID NO: 419893 - RNA, 22 nt, Human
ugucaugccauuuaaaauguuu

SEQ ID NO: 419894 - RNA, 22 nt, Human
cugaggugcuagggucccugcu

SEQ ID NO: 419895 - RNA, 22 nt, Human
gccugccuucggugcgcagcgg

SEQ ID NO: 419896 - RNA, 22 nt, Human
gguucacacuaagcuuaagugg

SEQ ID NO: 419897 - RNA, 22 nt, Human
ggcugugccucaaggcuacuca

SEQ ID NO: 419898 - RNA, 22 nt, Human
gagggcucaacuacuacuaggc

SEQ ID NO: 419899 - RNA, 22 nt, Human
aacuuuauuguuaggggcuaaa

SEQ ID NO: 419900 - RNA, 17 nt, Human
gagauggguggaucacc

SEQ ID NO: 419901 - RNA, 22 nt, Human
uuagauaauguagagauaugag

SEQ ID NO: 419902 - RNA, 22 nt, Human
aggcaggagugacccugacagg

SEQ ID NO: 419903 - RNA, 22 nt, Human
ugcuggggauccguaccaaccc

SEQ ID NO: 419904 - RNA, 22 nt, Human
cugaggccucucuccugggcuu

SEQ ID NO: 419905 - RNA, 22 nt, Human
ggccuguguccuccuugcccug

SEQ ID NO: 419906 - RNA, 20 nt, Human
cacaggccuugugagcagac

SEQ ID NO: 419907 - RNA, 20 nt, Human
cugcucugcuuugcaggugg

SEQ ID NO: 419908 - RNA, 22 nt, Human
acuggaagccaguugacaauca

SEQ ID NO: 419909 - RNA, 22 nt, Human
cagagcagcagagcuuccaugg

SEQ ID NO: 419910 - RNA, 22 nt, Human
cuugccuucuguuccuauagaa

SEQ ID NO: 419911 - RNA, 22 nt, Human
auaaguucagguaaagaaauca

SEQ ID NO: 419912 - RNA, 22 nt, Human
guucuugccagcauccucaggu

SEQ ID NO: 419913 - RNA, 22 nt, Human
cucuggaguggguggccgggag

SEQ ID NO: 419914 - RNA, 22 nt, Human
uaaagguagcaugaaacugcaa

SEQ ID NO: 419915 - RNA, 22 nt, Human
ucagaagcaaacaucacucuag

SEQ ID NO: 419916 - RNA, 22 nt, Human
aggcuucuacguggucccaggg

SEQ ID NO: 419917 - RNA, 22 nt, Human
agcugcucccuauccuuuccuu

SEQ ID NO: 419918 - RNA, 22 nt, Human
cagcuuggaggaggaucuaaga

SEQ ID NO: 419919 - RNA, 22 nt, Human
ucucuggagggcuccaggcggg

SEQ ID NO: 419920 - RNA, 22 nt, Human
gguucccggaucuccgaguccc

SEQ ID NO: 419921 - RNA, 22 nt, Human
acacuguagcugagggcaugcg

SEQ ID NO: 419922 - RNA, 22 nt, Human
ucacaggcuugugaacauugca

SEQ ID NO: 419923 - RNA, 22 nt, Human
gagaaagacguaggcugggagg

SEQ ID NO: 419924 - RNA, 22 nt, Human
cagagcagguaucuuuggugaa

SEQ ID NO: 419925 - RNA, 22 nt, Human
acagagcuaaauuucaauccca

SEQ ID NO: 419926 - RNA, 22 nt, Human
acaaaggcagccaaucaucugc

SEQ ID NO: 419927 - RNA, 22 nt, Human
ggagagcagggaggcugcucug

SEQ ID NO: 419928 - RNA, 22 nt, Human
agcuguggcaaccuugucagac

SEQ ID NO: 419929 - RNA, 22 nt, Human
cugggacacccaaggaaagagc

SEQ ID NO: 419930 - RNA, 22 nt, Human
aaugcagugagccauuaaaugg

SEQ ID NO: 419931 - RNA, 22 nt, Human
ugggcuacucugggagccuaac

SEQ ID NO: 419932 - RNA, 22 nt, Human
aaugggaagccagaagacaagg

SEQ ID NO: 419933 - RNA, 22 nt, Human
gcaaguacaaacgcaucggcug

SEQ ID NO: 419934 - RNA, 22 nt, Human
agggcaaguugagugugcgugg

SEQ ID NO: 419935 - RNA, 22 nt, Human
cccuggggcugagggauggccg

SEQ ID NO: 419936 - RNA, 22 nt, Human
ucccagagcucugacaccagcu

SEQ ID NO: 419937 - RNA, 22 nt, Human
ggccucuguucugcauuccucc

SEQ ID NO: 419938 - RNA, 22 nt, Human
uggcagagucucuccuuuccag

SEQ ID NO: 419939 - RNA, 22 nt, Human
agaaauguuacaguuguuauuu

SEQ ID NO: 419940 - RNA, 22 nt, Human
ggggcaggagguguucucuuuu

SEQ ID NO: 419941 - RNA, 22 nt, Human
acugugugaaacaucaaugugu

SEQ ID NO: 419942 - RNA, 22 nt, Human
cuggcagcugugugaagaacug

SEQ ID NO: 419943 - RNA, 22 nt, Human
cugcugcucagugucaucaugu

SEQ ID NO: 419944 - RNA, 22 nt, Human
ugaggaaacugaggcacagaug

SEQ ID NO: 419945 - RNA, 19 nt, Human
agcuguggaugugggauuu

SEQ ID NO: 419946 - RNA, 22 nt, Human
gaggagaagcuauuggaaggac

SEQ ID NO: 419947 - RNA, 22 nt, Human
caaacugagcaucagaaaguuu

SEQ ID NO: 419948 - RNA, 22 nt, Human
ugaguaauaaacugucuugcuc

SEQ ID NO: 419949 - RNA, 22 nt, Human
uggagcugggguuugaaucugg

SEQ ID NO: 419950 - RNA, 22 nt, Human
agguggaacguucaggugcuag

SEQ ID NO: 419951 - RNA, 22 nt, Human
agccacagcgaaccucucuucc

SEQ ID NO: 419952 - RNA, 22 nt, Human
gcugagacuggcagcaggaagu

SEQ ID NO: 419953 - RNA, 22 nt, Human
ugggcagaggcucugaagucca

SEQ ID NO: 419954 - RNA, 19 nt, Human
accucugcagagauguuua

SEQ ID NO: 419955 - RNA, 22 nt, Human
cagcuuggcuuccgcuuuacug

SEQ ID NO: 419956 - RNA, 21 nt, Human
guuugcaugaacaagucagcc

SEQ ID NO: 419957 - RNA, 22 nt, Human
gccuggcccagggcuccgcagg

SEQ ID NO: 419958 - RNA, 22 nt, Human
aguggcagagccaaguagagcc

SEQ ID NO: 419959 - RNA, 22 nt, Human
uuaguuagucccugguaccuuu

SEQ ID NO: 419960 - RNA, 22 nt, Human
ucucagucagccuugauguccc

SEQ ID NO: 419961 - RNA, 22 nt, Human
cuccuggacauggagcggagga

SEQ ID NO: 419962 - RNA, 19 nt, Human
gaagaagcuugagaaguag

SEQ ID NO: 419963 - RNA, 22 nt, Human
ugaaaucugcaugcaaaguccu

SEQ ID NO: 419964 - RNA, 22 nt, Human
ccugagaccaaguugcagccau

SEQ ID NO: 419965 - RNA, 18 nt, Human
caaagcucacguuccauc

SEQ ID NO: 419966 - RNA, 22 nt, Human
ucugagggugggagaaggagcu

SEQ ID NO: 419967 - RNA, 21 nt, Human
cccuguguuccacagcagaca

SEQ ID NO: 419968 - RNA, 22 nt, Human
gaugcacugcaguauauacugu

SEQ ID NO: 419969 - RNA, 22 nt, Human
augcaguaaaauaggagguaau

SEQ ID NO: 419970 - RNA, 22 nt, Human
caggugaccuuuguccuaaguu

SEQ ID NO: 419971 - RNA, 22 nt, Human
acagaguuaauggauaggcagg

SEQ ID NO: 419972 - RNA, 22 nt, Human
gcagggaggaagagaugcuucc

SEQ ID NO: 419973 - RNA, 22 nt, Human
acauuuaaauaccuauguuucu

SEQ ID NO: 419974 - RNA, 22 nt, Human
ggagugaguacuggaguagcug

SEQ ID NO: 419975 - RNA, 22 nt, Human
gcucucugucguuaugcuucau

SEQ ID NO: 419976 - RNA, 22 nt, Human
uagaaguuaaaggaauacagaa

SEQ ID NO: 419977 - RNA, 20 nt, Human
ccagucccugagcaccaggg

SEQ ID NO: 419978 - RNA, 22 nt, Human
aucuuucaguuucauaccaauu

SEQ ID NO: 419979 - RNA, 22 nt, Human
aaugguuuguaccuguccuugg

SEQ ID NO: 419980 - RNA, 22 nt, Human
ucccuggcagcuaagggugguc

SEQ ID NO: 419981 - RNA, 22 nt, Human
acauuucuuccacaugcugcug

SEQ ID NO: 419982 - RNA, 19 nt, Human
cugcugggugcugagggag

SEQ ID NO: 419983 - RNA, 22 nt, Human
aggaagagcuggaccagaggac

SEQ ID NO: 419984 - RNA, 22 nt, Human
ggacuggacucucaggcucaca

SEQ ID NO: 419985 - RNA, 22 nt, Human
ucuguacaugaguugagaauca

SEQ ID NO: 419986 - RNA, 22 nt, Human
ucccagagcugauaagccuuua

SEQ ID NO: 419987 - RNA, 22 nt, Human
gagggcugcugccagauaugcc

SEQ ID NO: 419988 - RNA, 22 nt, Human
acagggcaaccucugggagacu

SEQ ID NO: 419989 - RNA, 22 nt, Human
cagugauggauauggagaaguc

SEQ ID NO: 419990 - RNA, 22 nt, Human
agcugccccaugagaggcaggu

SEQ ID NO: 419991 - RNA, 22 nt, Human
uggggcagggaugggaaacuau

SEQ ID NO: 419992 - RNA, 22 nt, Human
gaagccaguguuugaagaauuu

SEQ ID NO: 419993 - RNA, 22 nt, Human
agagaggcugggcguagggcuu

SEQ ID NO: 419994 - RNA, 22 nt, Human
ucaagucuugaugagacaaacc

SEQ ID NO: 419995 - RNA, 22 nt, Human
aucuggcuauuucuggucgggg

SEQ ID NO: 419996 - RNA, 22 nt, Human
cccuggaggaccccaauguggc

SEQ ID NO: 419997 - RNA, 16 nt, Human
gccuggaguggcaggg

SEQ ID NO: 419998 - RNA, 22 nt, Human
ccugagcugaacuaagcaguuu

SEQ ID NO: 419999 - RNA, 22 nt, Human
uccucaggugacuagguaucuu

SEQ ID NO: 420000 - RNA, 22 nt, Human
gcugggagaggcccugaaguga

SEQ ID NO: 420001 - RNA, 22 nt, Human
gaagcagccacggggagacaga

SEQ ID NO: 420002 - RNA, 22 nt, Human
auguaucagaaauagcauuggc

SEQ ID NO: 420003 - RNA, 22 nt, Human
guaauuaggaauaaaaugggaa

SEQ ID NO: 420004 - RNA, 22 nt, Human
ugcugaggagguggcugugcuu

SEQ ID NO: 420005 - RNA, 22 nt, Human
acagucucuccacacugcaggg

SEQ ID NO: 420006 - RNA, 20 nt, Human
ucagagucaucaaagauggu

SEQ ID NO: 420007 - RNA, 22 nt, Human
ccuauugacaauucucuucucc

SEQ ID NO: 420008 - RNA, 22 nt, Human
agagcugugcuuugcaccacgu

SEQ ID NO: 420009 - RNA, 22 nt, Human
ggccugagucccaccuggcugu

SEQ ID NO: 420010 - RNA, 22 nt, Human
gcagagccaggcuggggcaggu

SEQ ID NO: 420011 - RNA, 22 nt, Human
ugaaauauuuagagaguaaguu

SEQ ID NO: 420012 - RNA, 22 nt, Human
ucacucagguucaugucuuugu

SEQ ID NO: 420013 - RNA, 22 nt, Human
uugaaagucacaauggcauuaa

SEQ ID NO: 420014 - RNA, 22 nt, Human
caggccucccggugcacacuga

SEQ ID NO: 420015 - RNA, 22 nt, Human
ucccagagaagagcuggaugga

SEQ ID NO: 420016 - RNA, 22 nt, Human
gguguccucaugauuuucuaga

SEQ ID NO: 420017 - RNA, 22 nt, Human
agagugaaguuuuugaaaguga

SEQ ID NO: 420018 - RNA, 22 nt, Human
ugccaggcccucccacagauua

SEQ ID NO: 420019 - RNA, 22 nt, Human
cccugccucugaagcugcucag

SEQ ID NO: 420020 - RNA, 23 nt, Human
aucaaaguggaaaucaauuaucu

SEQ ID NO: 420021 - RNA, 22 nt, Human
agugucauuuuguccaucuucu

SEQ ID NO: 420022 - RNA, 22 nt, Human
gcugucuucacuuccugguuuc

SEQ ID NO: 420023 - RNA, 22 nt, Human
ugaggcucaagaaucugcauuu

SEQ ID NO: 420024 - RNA, 22 nt, Human
aagggcuggaucucucugagca

SEQ ID NO: 420025 - RNA, 22 nt, Human
auggaaagggaagcaaggaaca

SEQ ID NO: 420026 - RNA, 22 nt, Human
cagagccaaaccucagggcccg

SEQ ID NO: 420027 - RNA, 22 nt, Human
augaggcaggauuaagcuauca

SEQ ID NO: 420028 - RNA, 22 nt, Human
cugauuccugauucaugcucuu

SEQ ID NO: 420029 - RNA, 22 nt, Human
cugcucugugguccaugagaca

SEQ ID NO: 420030 - RNA, 22 nt, Human
ggagaggaaaugccagcacuuc

SEQ ID NO: 420031 - RNA, 22 nt, Human
guuucauucggcagcucauaag

SEQ ID NO: 420032 - RNA, 22 nt, Human
aaugcuguauaucuuagcuaau

SEQ ID NO: 420033 - RNA, 22 nt, Human
gcugaagcccacguggcuugua

SEQ ID NO: 420034 - RNA, 22 nt, Human
uggcucaggggucuggcucugu

SEQ ID NO: 420035 - RNA, 23 nt, Human
uuguuuuuagagguggcaugaga

SEQ ID NO: 420036 - RNA, 22 nt, Human
cccugccuacaggguuuucuuu

SEQ ID NO: 420037 - RNA, 22 nt, Human
cuuaagaauauugaaguugugg

SEQ ID NO: 420038 - RNA, 22 nt, Human
uagcugcccaucuuuccuuuag

SEQ ID NO: 420039 - RNA, 22 nt, Human
uuuuaucuucauuccuaucuac

SEQ ID NO: 420040 - RNA, 22 nt, Human
ugcuuuauaucucucuucuuag

SEQ ID NO: 420041 - RNA, 22 nt, Human
agaggccagcagugccuaucug

SEQ ID NO: 420042 - RNA, 22 nt, Human
ggagccagcagggugacacuga

SEQ ID NO: 420043 - RNA, 22 nt, Human
uaaagucaucuuuacaucuuug

SEQ ID NO: 420044 - RNA, 22 nt, Human
ugaaagcuguccacuaggcugu

SEQ ID NO: 420045 - RNA, 22 nt, Human
ucccagcagggccgaccagccu

SEQ ID NO: 420046 - RNA, 22 nt, Human
uagugauuaaaggcagaauguu

SEQ ID NO: 420047 - RNA, 21 nt, Human
gcagccacagccaccaagcua

SEQ ID NO: 420048 - RNA, 22 nt, Human
ggcagcucugaugaugcucugg

SEQ ID NO: 420049 - RNA, 22 nt, Human
uucacuuauagggauguuauug

SEQ ID NO: 420050 - RNA, 22 nt, Human
ugcaguggugguaaagaugcuc

SEQ ID NO: 420051 - RNA, 22 nt, Human
cccugggacccgcugcagaggc

SEQ ID NO: 420052 - RNA, 22 nt, Human
auuuccauacacccauuucuga

SEQ ID NO: 420053 - RNA, 22 nt, Human
ggaggagacccugugucaguuu

SEQ ID NO: 420054 - RNA, 22 nt, Human
uuuauuugucuugccauuuagu

SEQ ID NO: 420055 - RNA, 21 nt, Human
agcugggccucagccugcagu

SEQ ID NO: 420056 - RNA, 22 nt, Human
ugaaugauuugggugcauucag

SEQ ID NO: 420057 - RNA, 21 nt, Human
agacagagugcagucuacaua

SEQ ID NO: 420058 - RNA, 23 nt, Human
uggcucugagcuuccugguggcc

SEQ ID NO: 420059 - RNA, 22 nt, Human
agggcuccuccccggccuccac

SEQ ID NO: 420060 - RNA, 22 nt, Human
agaauucugacaauagaauugg

SEQ ID NO: 420061 - RNA, 20 nt, Human
caggccagagguuugauggc

SEQ ID NO: 420062 - RNA, 22 nt, Human
ugugccugaguuggcugaguac

SEQ ID NO: 420063 - RNA, 22 nt, Human
gaggcagagaccuucaggaccu

SEQ ID NO: 420064 - RNA, 22 nt, Human
caggaugaagggcaaaggcaag

SEQ ID NO: 420065 - RNA, 22 nt, Human
cccagguggguuggccucuguc

SEQ ID NO: 420066 - RNA, 22 nt, Human
aaaggccagguuggcugguauu

SEQ ID NO: 420067 - RNA, 22 nt, Human
uuguuuuuaugaacauccagga

SEQ ID NO: 420068 - RNA, 22 nt, Human
ccaggugggaggaaagcagaga

SEQ ID NO: 420069 - RNA, 22 nt, Human
gggccuggcaugcagccccguu

SEQ ID NO: 420070 - RNA, 22 nt, Human
aggccagcaagaaagagagucu

SEQ ID NO: 420071 - RNA, 22 nt, Human
ugaggugaagaguggagcucag

SEQ ID NO: 420072 - RNA, 22 nt, Human
gggcaguguggucgugccuuug

SEQ ID NO: 420073 - RNA, 22 nt, Human
agcccaugcaacaggccuagcg

SEQ ID NO: 420074 - RNA, 22 nt, Human
caggcagcagccacucugguau

SEQ ID NO: 420075 - RNA, 22 nt, Human
uaggcagagguaugguaaggac

SEQ ID NO: 420076 - RNA, 20 nt, Human
gcccuggagccuuguccugg

SEQ ID NO: 420077 - RNA, 22 nt, Human
ugcauauuuuauaaagauggaa

SEQ ID NO: 420078 - RNA, 20 nt, Human
gucagugucuucaguaguga

SEQ ID NO: 420079 - RNA, 22 nt, Human
gcagggugaaggucacauagaa

SEQ ID NO: 420080 - RNA, 22 nt, Human
aauggccagcugggagaguuga

SEQ ID NO: 420081 - RNA, 22 nt, Human
aagcgccaugguuccugcgcag

SEQ ID NO: 420082 - RNA, 22 nt, Human
aagugacacauggcacuucuau

SEQ ID NO: 420083 - RNA, 22 nt, Human
cgugucaucugagccuugggcg

SEQ ID NO: 420084 - RNA, 22 nt, Human
uucacauuauaaucaguucugc

SEQ ID NO: 420085 - RNA, 22 nt, Human
uaugcauacaaugagauauucc

SEQ ID NO: 420086 - RNA, 22 nt, Human
gggcugagucugcugccuguca

SEQ ID NO: 420087 - RNA, 22 nt, Human
cacagcugcacagaggaggugc

SEQ ID NO: 420088 - RNA, 22 nt, Human
accucugcuucccggguucaag

SEQ ID NO: 420089 - RNA, 22 nt, Human
ucugucacccgagcaggcgaga

SEQ ID NO: 420090 - RNA, 22 nt, Human
aggcugaggaucccuguguucu

SEQ ID NO: 420091 - RNA, 22 nt, Human
auuaaauuuucacuaggcuccc

SEQ ID NO: 420092 - RNA, 22 nt, Human
ggggcacacuuuugguagauau

SEQ ID NO: 420093 - RNA, 22 nt, Human
uggcucuggggacaguaagucc

SEQ ID NO: 420094 - RNA, 22 nt, Human
gggcuggaggugagcaggacag

SEQ ID NO: 420095 - RNA, 22 nt, Human
ucucaggacuuugggaagcuca

SEQ ID NO: 420096 - RNA, 22 nt, Human
ccugugccauccugagcauccc

SEQ ID NO: 420097 - RNA, 22 nt, Human
acugugcaugaaccgaaacaaa

SEQ ID NO: 420098 - RNA, 22 nt, Human
uguauuagagcaguagaauuau

SEQ ID NO: 420099 - RNA, 22 nt, Human
uuuuaucugcuucauuaguuga

SEQ ID NO: 420100 - RNA, 22 nt, Human
aggcugcuggcaggcguggacg

SEQ ID NO: 420101 - RNA, 22 nt, Human
caugucuuuguuaugcucacca

SEQ ID NO: 420102 - RNA, 22 nt, Human
ucaaaagucugcauucuucaca

SEQ ID NO: 420103 - RNA, 22 nt, Human
acaugaaaagacuaucugauua

SEQ ID NO: 420104 - RNA, 22 nt, Human
cucaaggacuuauucaugccug

SEQ ID NO: 420105 - RNA, 22 nt, Human
uccuucaguuaucacaguacug

SEQ ID NO: 420106 - RNA, 22 nt, Human
gcucccaggaagagaagggcca

SEQ ID NO: 420107 - RNA, 22 nt, Human
cccaggaggcagagcuugcagu

SEQ ID NO: 420108 - RNA, 22 nt, Human
gccaggcugcuggcugcugucc

SEQ ID NO: 420109 - RNA, 22 nt, Human
gaguuauuaauggcugaguuug

SEQ ID NO: 420110 - RNA, 21 nt, Human
aggcuguccuuugccagcccu

SEQ ID NO: 420111 - RNA, 22 nt, Human
gagcucauccccaugguccguc

SEQ ID NO: 420112 - RNA, 22 nt, Human
ucaagaaagggcuucaccagga

SEQ ID NO: 420113 - RNA, 22 nt, Human
aacaucagaauauccauguugg

SEQ ID NO: 420114 - RNA, 22 nt, Human
uccgcccgcacguauggagugg

SEQ ID NO: 420115 - RNA, 22 nt, Human
ucccagagcagaugugcuaaag

SEQ ID NO: 420116 - RNA, 22 nt, Human
cccagggauuauaaaggugaaa

SEQ ID NO: 420117 - RNA, 22 nt, Human
accuuucaaaguggcuaucacu

SEQ ID NO: 420118 - RNA, 22 nt, Human
guggcaggagagacacagccau

SEQ ID NO: 420119 - RNA, 21 nt, Human
guguuuccuguuuauggcuug

SEQ ID NO: 420120 - RNA, 22 nt, Human
uuuagaaauugcagagugggug

SEQ ID NO: 420121 - RNA, 22 nt, Human
ucccucuguguugggcaugccu

SEQ ID NO: 420122 - RNA, 20 nt, Human
cugggaggucuuccaaauca

SEQ ID NO: 420123 - RNA, 22 nt, Human
agcagcugucccuuaacaucag

SEQ ID NO: 420124 - RNA, 22 nt, Human
gugcuaggauuacaggcauggg

SEQ ID NO: 420125 - RNA, 22 nt, Human
gggcugggcaugguguucccuc

SEQ ID NO: 420126 - RNA, 22 nt, Human
ccaaggagaaugacaccaugga

SEQ ID NO: 420127 - RNA, 22 nt, Human
acaggcucuggggcaggauggc

SEQ ID NO: 420128 - RNA, 22 nt, Human
cagagcugcuucccaguuugug

SEQ ID NO: 420129 - RNA, 22 nt, Human
acugucuccucaucaugccugg

SEQ ID NO: 420130 - RNA, 22 nt, Human
aagcagccaccucaucuccacu

SEQ ID NO: 420131 - RNA, 22 nt, Human
uuccauuuauucuuguccagau

SEQ ID NO: 420132 - RNA, 22 nt, Human
ccacaggggucucuguagcuga

SEQ ID NO: 420133 - RNA, 22 nt, Human
cggggcugcucguccuccugug

SEQ ID NO: 420134 - RNA, 22 nt, Human
ccaggcaggcgauggugcagug

SEQ ID NO: 420135 - RNA, 20 nt, Human
agagugagacuccaucucag

SEQ ID NO: 420136 - RNA, 19 nt, Human
agggcuaggcacauagggc

SEQ ID NO: 420137 - RNA, 22 nt, Human
agaguggggaagguguugagaa

SEQ ID NO: 420138 - RNA, 22 nt, Human
ugccagaagugcuuuauaagug

SEQ ID NO: 420139 - RNA, 22 nt, Human
ugucagagcaaggccaggccag

SEQ ID NO: 420140 - RNA, 22 nt, Human
aagagccagugggaaagucuug

SEQ ID NO: 420141 - RNA, 22 nt, Human
ugugcugguacaugugaggaug

SEQ ID NO: 420142 - RNA, 18 nt, Human
gcccagaggucugggccc

SEQ ID NO: 420143 - RNA, 22 nt, Human
cugugugcugaaaugcagugag

SEQ ID NO: 420144 - RNA, 22 nt, Human
caggccuccacuccacgcagac

SEQ ID NO: 420145 - RNA, 22 nt, Human
agugggcagugcgcucggaugc

SEQ ID NO: 420146 - RNA, 22 nt, Human
gcccagcaggacagagugguuu

SEQ ID NO: 420147 - RNA, 22 nt, Human
ugcccugugugugcaagcacug

SEQ ID NO: 420148 - RNA, 22 nt, Human
gggcugggauggcuugaagauu

SEQ ID NO: 420149 - RNA, 21 nt, Human
ugauuuccagaaaauuggccc

SEQ ID NO: 420150 - RNA, 22 nt, Human
agaagauuuagguugacgcuau

SEQ ID NO: 420151 - RNA, 22 nt, Human
aggcuuuaauuaucuacaggag

SEQ ID NO: 420152 - RNA, 22 nt, Human
agggcaguucagccacaggcuc

SEQ ID NO: 420153 - RNA, 21 nt, Human
uuuagggaggauauuuaacuu

SEQ ID NO: 420154 - RNA, 22 nt, Human
acuggcaguuugagaaugcauu

SEQ ID NO: 420155 - RNA, 22 nt, Human
aggagcugcaaauauuaguaau

SEQ ID NO: 420156 - RNA, 22 nt, Human
agagggcaugcuugguggccug

SEQ ID NO: 420157 - RNA, 22 nt, Human
aaagagcuaacauugccgagau

SEQ ID NO: 420158 - RNA, 22 nt, Human
uccucugcuccaucuuuacugu

SEQ ID NO: 420159 - RNA, 17 nt, Human
ucagagggaugagcagg

SEQ ID NO: 420160 - RNA, 22 nt, Human
uguacauugucacucaucaagu

SEQ ID NO: 420161 - RNA, 22 nt, Human
cagcucucuaaggucuugcuuu

SEQ ID NO: 420162 - RNA, 22 nt, Human
ucugccagugguuuggcccuga

SEQ ID NO: 420163 - RNA, 23 nt, Human
aaauauucuuuuuuaguaagugc

SEQ ID NO: 420164 - RNA, 22 nt, Human
uccagacccaugacccugggga

SEQ ID NO: 420165 - RNA, 22 nt, Human
agcuguggggcaggcagcgagg

SEQ ID NO: 420166 - RNA, 19 nt, Human
uccccagcaccucugaguc

SEQ ID NO: 420167 - RNA, 22 nt, Human
cagccacguagcccuuggccgu

SEQ ID NO: 420168 - RNA, 21 nt, Human
uggcucugagccucauggcug

SEQ ID NO: 420169 - RNA, 23 nt, Human
ucaguuuuggcuguucaguguug

SEQ ID NO: 420170 - RNA, 22 nt, Human
ucugaaaugcaaauuugacuga

SEQ ID NO: 420171 - RNA, 22 nt, Human
gagagcugcagccgagaggggg

SEQ ID NO: 420172 - RNA, 22 nt, Human
gacccagccugguuuuuauagg

SEQ ID NO: 420173 - RNA, 22 nt, Human
gaaggaaaaauacucuguaagg

SEQ ID NO: 420174 - RNA, 22 nt, Human
ugccacagaggugaagcccacu

SEQ ID NO: 420175 - RNA, 22 nt, Human
acaggugggcuuaagagucggc

SEQ ID NO: 420176 - RNA, 22 nt, Human
aaaguuuuagaacuaggaagca

SEQ ID NO: 420177 - RNA, 22 nt, Human
aaacauuugcaacucgguuugg

SEQ ID NO: 420178 - RNA, 22 nt, Human
cagcacaguacaaggcacggau

SEQ ID NO: 420179 - RNA, 22 nt, Human
ccagugccugugggcauggugc

SEQ ID NO: 420180 - RNA, 22 nt, Human
cagcucccaguggcagcuccuu

SEQ ID NO: 420181 - RNA, 22 nt, Human
uaugcacauauaaccugcacug

SEQ ID NO: 420182 - RNA, 22 nt, Human
aaggaagagucuagaacaggca

SEQ ID NO: 420183 - RNA, 21 nt, Human
acagggcaugcagcuggcugu

SEQ ID NO: 420184 - RNA, 22 nt, Human
ggugaggcagguggcugcugag

SEQ ID NO: 420185 - RNA, 22 nt, Human
uaagacauuugaaaugugaucc

SEQ ID NO: 420186 - RNA, 22 nt, Human
gcacagccagcaucugagggau

SEQ ID NO: 420187 - RNA, 22 nt, Human
agagccaggcggcugggcaccu

SEQ ID NO: 420188 - RNA, 22 nt, Human
gucccugcaucaccacgggacu

SEQ ID NO: 420189 - RNA, 22 nt, Human
ggagaagcaggugcuuuggguc

SEQ ID NO: 420190 - RNA, 23 nt, Human
uguaaaaugggguaguguuacca

SEQ ID NO: 420191 - RNA, 22 nt, Human
uagagcuggccgggacagcugg

SEQ ID NO: 420192 - RNA, 22 nt, Human
ucacugcucuccaauguggagu

SEQ ID NO: 420193 - RNA, 22 nt, Human
cauugcacuccagcuugggcaa

SEQ ID NO: 420194 - RNA, 22 nt, Human
ugugcuucaucacuucucaguu

SEQ ID NO: 420195 - RNA, 22 nt, Human
gccacaugucaugugcucagua

SEQ ID NO: 420196 - RNA, 22 nt, Human
gcuuucuugguucugcaggggc

SEQ ID NO: 420197 - RNA, 17 nt, Human
uucaaugauuaaugcau

SEQ ID NO: 420198 - RNA, 22 nt, Human
gucccugggaugcccuucuggg

SEQ ID NO: 420199 - RNA, 22 nt, Human
uaagaagcuucugcuaaugccu

SEQ ID NO: 420200 - RNA, 21 nt, Human
aucagaaguuuuggucaguag

SEQ ID NO: 420201 - RNA, 19 nt, Human
cuuuucaucaacagccaau

SEQ ID NO: 420202 - RNA, 22 nt, Human
aaauguauugcauaggauauuu

SEQ ID NO: 420203 - RNA, 22 nt, Human
gcaccugggacccagaggcacc

SEQ ID NO: 420204 - RNA, 22 nt, Human
gugacagaguuuuagaucucau

SEQ ID NO: 420205 - RNA, 19 nt, Human
cagagcagugguuccugaa

SEQ ID NO: 420206 - RNA, 22 nt, Human
acugucugcuggccccugguua

SEQ ID NO: 420207 - RNA, 22 nt, Human
cagaggcauacucccagucuug

SEQ ID NO: 420208 - RNA, 22 nt, Human
ucaggcuggagugcaguggcgc

SEQ ID NO: 420209 - RNA, 22 nt, Human
uugugugguagcuucauugaac

SEQ ID NO: 420210 - RNA, 22 nt, Human
cagcugggugaucuugggcagg

SEQ ID NO: 420211 - RNA, 22 nt, Human
uccugcagaccucagucagguc

SEQ ID NO: 420212 - RNA, 22 nt, Human
caggccucuauggucagcugag

SEQ ID NO: 420213 - RNA, 22 nt, Human
ucucuucugaaaccugucuuua

SEQ ID NO: 420214 - RNA, 22 nt, Human
gcaggccugacuguagggggca

SEQ ID NO: 420215 - RNA, 20 nt, Human
ugcagagcuggcuggcuccu

SEQ ID NO: 420216 - RNA, 22 nt, Human
cccugcagaucuaggguccuuc

SEQ ID NO: 420217 - RNA, 22 nt, Human
cggggcugcgcucuuccugccg

SEQ ID NO: 420218 - RNA, 22 nt, Human
gaauucugguccuguccaaggu

SEQ ID NO: 420219 - RNA, 22 nt, Human
gccugggagagggauagugcag

SEQ ID NO: 420220 - RNA, 22 nt, Human
aaagggaggggcgauaagccgg

SEQ ID NO: 420221 - RNA, 22 nt, Human
uuaauacagucuccagaaguaa

SEQ ID NO: 420222 - RNA, 22 nt, Human
gaggcucagggaaacagcgcag

SEQ ID NO: 420223 - RNA, 22 nt, Human
aggaccugccaggugcaaagca

SEQ ID NO: 420224 - RNA, 22 nt, Human
ccuccaggcugaauaucuagaa

SEQ ID NO: 420225 - RNA, 22 nt, Human
gccugcuggauguggccaggcc

SEQ ID NO: 420226 - RNA, 22 nt, Human
uguaaucauuacaguacaugga

SEQ ID NO: 420227 - RNA, 20 nt, Human
cccuggagagaagcuccacg

SEQ ID NO: 420228 - RNA, 22 nt, Human
agcuuccuuggcgcugaggccu

SEQ ID NO: 420229 - RNA, 19 nt, Human
cugcucaggucagucuguc

SEQ ID NO: 420230 - RNA, 22 nt, Human
gcagggucgcucuaggagauca

SEQ ID NO: 420231 - RNA, 22 nt, Human
agccuccaaaugucaggucccg

SEQ ID NO: 420232 - RNA, 22 nt, Human
uagggcugcugcagaugacagg

SEQ ID NO: 420233 - RNA, 22 nt, Human
aaugaacaaaauaugcuuugca

SEQ ID NO: 420234 - RNA, 22 nt, Human
ucaggcugaaggaggccuaucu

SEQ ID NO: 420235 - RNA, 22 nt, Human
uuauccaacaugacuuaugucc

SEQ ID NO: 420236 - RNA, 22 nt, Human
auuucacaaagaacagaugcag

SEQ ID NO: 420237 - RNA, 22 nt, Human
ucugucacccaggcuggagugc

SEQ ID NO: 420238 - RNA, 22 nt, Human
ggaagaagggucauuggcagcc

SEQ ID NO: 420239 - RNA, 22 nt, Human
acagaacugcaggaggaaaagc

SEQ ID NO: 420240 - RNA, 22 nt, Human
auguuauuaaaguacagauucu

SEQ ID NO: 420241 - RNA, 20 nt, Human
uaaggcuguuuuguauuccu

SEQ ID NO: 420242 - RNA, 22 nt, Human
ggcugccuccucgagacaggau

SEQ ID NO: 420243 - RNA, 22 nt, Human
aucuggcuuaccuagggugccu

SEQ ID NO: 420244 - RNA, 22 nt, Human
acauuucuauagugcaucuguu

SEQ ID NO: 420245 - RNA, 22 nt, Human
ucuaugaaaagucuauucauuc

SEQ ID NO: 420246 - RNA, 22 nt, Human
cugggcacacagugacucugca

SEQ ID NO: 420247 - RNA, 22 nt, Human
guguuccauguuugagguaguu

SEQ ID NO: 420248 - RNA, 22 nt, Human
gucaggauuaaugggaguaugc

SEQ ID NO: 420249 - RNA, 22 nt, Human
uccucuggcccagcugccucug

SEQ ID NO: 420250 - RNA, 22 nt, Human
gcuggggucugugaggagggcu

SEQ ID NO: 420251 - RNA, 20 nt, Human
uggagccaaggugugucugg

SEQ ID NO: 420252 - RNA, 22 nt, Human
uggugcaagucucugaggaggg

SEQ ID NO: 420253 - RNA, 22 nt, Human
uauaauuuuagaagagauggaa

SEQ ID NO: 420254 - RNA, 22 nt, Human
cccaccaguacagaugguagau

SEQ ID NO: 420255 - RNA, 22 nt, Human
uucucuagguuuuagaugaaga

SEQ ID NO: 420256 - RNA, 22 nt, Human
ucaaagagcuauucaguugugg

SEQ ID NO: 420257 - RNA, 22 nt, Human
agggcagugggaaagccugcuc

SEQ ID NO: 420258 - RNA, 22 nt, Human
gggcugagaauucagcuuuccu

SEQ ID NO: 420259 - RNA, 22 nt, Human
aguggcagaagccaagucugca

SEQ ID NO: 420260 - RNA, 22 nt, Human
ggaaggaggggcaaagcaguuc

SEQ ID NO: 420261 - RNA, 19 nt, Human
gggcagaauggcaucucag

SEQ ID NO: 420262 - RNA, 22 nt, Human
uccaaacacccuccaugcugca

SEQ ID NO: 420263 - RNA, 21 nt, Human
agagacugucacugcaguacc

SEQ ID NO: 420264 - RNA, 22 nt, Human
uggcccugacugauguggaggg

SEQ ID NO: 420265 - RNA, 22 nt, Human
auugaaagauuuugggcucaug

SEQ ID NO: 420266 - RNA, 22 nt, Human
cugcccucuagaggaggacuga

SEQ ID NO: 420267 - RNA, 22 nt, Human
caagaaggcuauaugggccagg

SEQ ID NO: 420268 - RNA, 20 nt, Human
uggcaucucucaauuguagg

SEQ ID NO: 420269 - RNA, 22 nt, Human
aagcugccuagaguugaauguc

SEQ ID NO: 420270 - RNA, 22 nt, Human
caguuauuaugaggucauuagg

SEQ ID NO: 420271 - RNA, 22 nt, Human
agaaggcacucacacuggcacg

SEQ ID NO: 420272 - RNA, 22 nt, Human
aauucugugcaggcagagcuau

SEQ ID NO: 420273 - RNA, 22 nt, Human
uaaccauauuuuccauuaaguu

SEQ ID NO: 420274 - RNA, 23 nt, Human
gggcuccagucucugcucaguug

SEQ ID NO: 420275 - RNA, 22 nt, Human
acuaaggaauaugacaaacuca

SEQ ID NO: 420276 - RNA, 22 nt, Human
ucuuucagccacuuaccugucu

SEQ ID NO: 420277 - RNA, 22 nt, Human
uuauguaccugaauuaguaaag

SEQ ID NO: 420278 - RNA, 22 nt, Human
ucugccugagcagagggaggcc

SEQ ID NO: 420279 - RNA, 22 nt, Human
aaggcaggagcuguaucuuauu

SEQ ID NO: 420280 - RNA, 22 nt, Human
agggccacaguggggccugaga

SEQ ID NO: 420281 - RNA, 22 nt, Human
uugaaaggugaacaugaugcac

SEQ ID NO: 420282 - RNA, 22 nt, Human
uugcaacaucugaacauuuauc

SEQ ID NO: 420283 - RNA, 22 nt, Human
aggugcaggagcugugcaggga

SEQ ID NO: 420284 - RNA, 22 nt, Human
caguagcacuagauaugugugg

SEQ ID NO: 420285 - RNA, 22 nt, Human
uguuuauucauggcuaaugaaa

SEQ ID NO: 420286 - RNA, 22 nt, Human
uggcagggucuugcuguguugc

SEQ ID NO: 420287 - RNA, 22 nt, Human
caggagcucuuaaggaugugau

SEQ ID NO: 420288 - RNA, 22 nt, Human
uggcucaggguccccaaauggu

SEQ ID NO: 420289 - RNA, 23 nt, Human
agaaaagcuuggacacauggccu

SEQ ID NO: 420290 - RNA, 22 nt, Human
acaagagacaagagguucuucu

SEQ ID NO: 420291 - RNA, 22 nt, Human
cucucagacugaagggccugug

SEQ ID NO: 420292 - RNA, 22 nt, Human
ugggcucugcaucagugcccau

SEQ ID NO: 420293 - RNA, 22 nt, Human
ugcagggccccucugcaugagu

SEQ ID NO: 420294 - RNA, 22 nt, Human
aauaugcauuaacuguguacau

SEQ ID NO: 420295 - RNA, 22 nt, Human
gaaaucuuuauggaaauaacaa

SEQ ID NO: 420296 - RNA, 22 nt, Human
ucacaguaaaagcauggaagag

SEQ ID NO: 420297 - RNA, 22 nt, Human
gccaggcagccacccucugcga

SEQ ID NO: 420298 - RNA, 21 nt, Human
aggcugcuggcucaggguccu

SEQ ID NO: 420299 - RNA, 22 nt, Human
cacagcuggugcacuagcucug

SEQ ID NO: 420300 - RNA, 22 nt, Human
caggagcccagaguccucagcu

SEQ ID NO: 420301 - RNA, 22 nt, Human
auguagagcaguguuguccaau

SEQ ID NO: 420302 - RNA, 22 nt, Human
ugcagcaggagccaggccuggu

SEQ ID NO: 420303 - RNA, 21 nt, Human
gagacagcccagugccagggc

SEQ ID NO: 420304 - RNA, 22 nt, Human
acuguauaaggcauagguaagc

SEQ ID NO: 420305 - RNA, 22 nt, Human
ugcucuccggcuuccguggccu

SEQ ID NO: 420306 - RNA, 22 nt, Human
gggccacauugaagggugggua

SEQ ID NO: 420307 - RNA, 22 nt, Human
ggcugcaggaugcccagccgug

SEQ ID NO: 420308 - RNA, 22 nt, Human
cuggccuuuaaaaugaccuuau

SEQ ID NO: 420309 - RNA, 22 nt, Human
ggcagccauacucagaccuggg

SEQ ID NO: 420310 - RNA, 23 nt, Human
agggaaaguaguaauggccuuug

SEQ ID NO: 420311 - RNA, 18 nt, Human
acaaaggucugcaagacc

SEQ ID NO: 420312 - RNA, 22 nt, Human
ccaucagcuccaguaucuucug

SEQ ID NO: 420313 - RNA, 21 nt, Human
cagagcuguccaaacccugac

SEQ ID NO: 420314 - RNA, 22 nt, Human
ggaagccacccagcuuugauag

SEQ ID NO: 420315 - RNA, 22 nt, Human
cucaggccauucuuccagcugc

SEQ ID NO: 420316 - RNA, 18 nt, Human
cauuguacaaugcuuuau

SEQ ID NO: 420317 - RNA, 20 nt, Human
ucccaggcugggcuccagcu

SEQ ID NO: 420318 - RNA, 22 nt, Human
aagucacacuagacaacugagg

SEQ ID NO: 420319 - RNA, 22 nt, Human
ucuuuccuagaggcugaugagu

SEQ ID NO: 420320 - RNA, 22 nt, Human
uuccauaaucaccuuauucuuu

SEQ ID NO: 420321 - RNA, 22 nt, Human
aagaguuaagcaacagauacca

SEQ ID NO: 420322 - RNA, 22 nt, Human
accaggagccauagagucaggc

SEQ ID NO: 420323 - RNA, 22 nt, Human
uggggcaguuaauaaacauucu

SEQ ID NO: 420324 - RNA, 22 nt, Human
cuggcucaccuccgcuccagca

SEQ ID NO: 420325 - RNA, 19 nt, Human
agccacagaacuugcagga

SEQ ID NO: 420326 - RNA, 22 nt, Human
cacaggggcaaacuguagggga

SEQ ID NO: 420327 - RNA, 23 nt, Human
agcagccauagggaagcaauaca

SEQ ID NO: 420328 - RNA, 22 nt, Human
uggaggaugccuggggaggccu

SEQ ID NO: 420329 - RNA, 22 nt, Human
cucagagaaaugucacaacaau

SEQ ID NO: 420330 - RNA, 22 nt, Human
ucagaagguggagguugcagug

SEQ ID NO: 420331 - RNA, 22 nt, Human
uucuacuuuagcaugcucauuc

SEQ ID NO: 420332 - RNA, 22 nt, Human
uguguguauaugcauuuaucua

SEQ ID NO: 420333 - RNA, 22 nt, Human
gcugggagcccuggucugcucc

SEQ ID NO: 420334 - RNA, 23 nt, Human
uggauaaagcugugcugcauagg

SEQ ID NO: 420335 - RNA, 19 nt, Human
ugagagugaggaaggcuuc

SEQ ID NO: 420336 - RNA, 22 nt, Human
cagccugcauuuguaucuguau

SEQ ID NO: 420337 - RNA, 22 nt, Human
cagcugcuguucaguuuuguuu

SEQ ID NO: 420338 - RNA, 22 nt, Human
gggaguggguuuggccuaggcc

SEQ ID NO: 420339 - RNA, 22 nt, Human
ucagagcugcccaugcaagggg

SEQ ID NO: 420340 - RNA, 22 nt, Human
ucugaggcauaaccuguucugc

SEQ ID NO: 420341 - RNA, 22 nt, Human
ggugaaggucuacugugugcca

SEQ ID NO: 420342 - RNA, 22 nt, Human
uucuaguucccacauaguugcc

SEQ ID NO: 420343 - RNA, 22 nt, Human
cguguacagucuaucuuuuuuc

SEQ ID NO: 420344 - RNA, 22 nt, Human
aggcucagcccaagguggagag

SEQ ID NO: 420345 - RNA, 22 nt, Human
ccugcuggccaguggagggcug

SEQ ID NO: 420346 - RNA, 22 nt, Human
ucagcuuggacagcuugguuga

SEQ ID NO: 420347 - RNA, 22 nt, Human
gugccugcugcagagucgcugu

SEQ ID NO: 420348 - RNA, 22 nt, Human
uccauaagcagguucuuccuga

SEQ ID NO: 420349 - RNA, 22 nt, Human
caaugugucaggaaaagggcca

SEQ ID NO: 420350 - RNA, 22 nt, Human
aggcacagcacaccuggccccc

SEQ ID NO: 420351 - RNA, 17 nt, Human
ccugggaggaguuauga

SEQ ID NO: 420352 - RNA, 21 nt, Human
ccugggagaucagcugccuuc

SEQ ID NO: 420353 - RNA, 22 nt, Human
gcucccaguucccaaagugacc

SEQ ID NO: 420354 - RNA, 22 nt, Human
agggcccucuggcaggccaggc

SEQ ID NO: 420355 - RNA, 22 nt, Human
ggccucugcccucacuccuguc

SEQ ID NO: 420356 - RNA, 22 nt, Human
ucacauuuuccuugguaucugu

SEQ ID NO: 420357 - RNA, 22 nt, Human
gucagagagggcacgugcacac

SEQ ID NO: 420358 - RNA, 22 nt, Human
ugaaggcauugaugaaggaauc

SEQ ID NO: 420359 - RNA, 22 nt, Human
uccagaguacggaagagucauc

SEQ ID NO: 420360 - RNA, 22 nt, Human
acagcuuuuaugggaccagcca

SEQ ID NO: 420361 - RNA, 17 nt, Human
aggcugcugggccaggg

SEQ ID NO: 420362 - RNA, 22 nt, Human
acuggcagcuguaggaugcaug

SEQ ID NO: 420363 - RNA, 22 nt, Human
ugugcucuggaguugccuucac

SEQ ID NO: 420364 - RNA, 22 nt, Human
cagaguccuggacacagagaca

SEQ ID NO: 420365 - RNA, 22 nt, Human
agcagggccuggcacuccuggg

SEQ ID NO: 420366 - RNA, 22 nt, Human
agccaggcagacucucuuucuu

SEQ ID NO: 420367 - RNA, 23 nt, Human
agcauggaauaggaaagaggcag

SEQ ID NO: 420368 - RNA, 21 nt, Human
uuaagagcuuagcaguaggcc

SEQ ID NO: 420369 - RNA, 22 nt, Human
caggaagcugagcugcacugca

SEQ ID NO: 420370 - RNA, 22 nt, Human
gcuguacaaauuccacaagaga

SEQ ID NO: 420371 - RNA, 22 nt, Human
uggaguuccuuugaaaggcucu

SEQ ID NO: 420372 - RNA, 22 nt, Human
gcuggcagaagagcugguucaa

SEQ ID NO: 420373 - RNA, 22 nt, Human
gggagggaaagcuugaucuguc

SEQ ID NO: 420374 - RNA, 21 nt, Human
gucagcagauccagcacuugu

SEQ ID NO: 420375 - RNA, 22 nt, Human
ucagggacauuuagacacugau

SEQ ID NO: 420376 - RNA, 22 nt, Human
ccagcugcugugcagggaggcu

SEQ ID NO: 420377 - RNA, 22 nt, Human
cacuguaucuuuuccaaagucu

SEQ ID NO: 420378 - RNA, 22 nt, Human
cuuauuagugucugucugaguu

SEQ ID NO: 420379 - RNA, 22 nt, Human
auucaguaggucuagaauaaga

SEQ ID NO: 420380 - RNA, 22 nt, Human
cugaggucucuuuccauaguga

SEQ ID NO: 420381 - RNA, 22 nt, Human
aucugaagggaaguggaaggca

SEQ ID NO: 420382 - RNA, 22 nt, Human
ucucaguguuuaaaaagauuuc

SEQ ID NO: 420383 - RNA, 22 nt, Human
gguuugguuuuggccaucuucc

SEQ ID NO: 420384 - RNA, 22 nt, Human
agcugccaggccccugagaacc

SEQ ID NO: 420385 - RNA, 17 nt, Human
uccuucagggccucaca

SEQ ID NO: 420386 - RNA, 22 nt, Human
gaaaguauuuaaguccauauuu

SEQ ID NO: 420387 - RNA, 22 nt, Human
ccuuccuggagcccaugcagau

SEQ ID NO: 420388 - RNA, 22 nt, Human
agcagggcuguguagguaauga

SEQ ID NO: 420389 - RNA, 17 nt, Human
ucugccgacugccagcu

SEQ ID NO: 420390 - RNA, 22 nt, Human
auaaacagcuccauuuagugcc

SEQ ID NO: 420391 - RNA, 22 nt, Human
ggcaggugcaccugagccaucu

SEQ ID NO: 420392 - RNA, 22 nt, Human
uccaguggcacuggagacuaga

SEQ ID NO: 420393 - RNA, 22 nt, Human
uucuugcucaaugucuguuuaa

SEQ ID NO: 420394 - RNA, 23 nt, Human
ugcauuauccucucugaagacca

SEQ ID NO: 420395 - RNA, 22 nt, Human
gaggaggaaguucucuguaggc

SEQ ID NO: 420396 - RNA, 23 nt, Human
uucuuauuuacuuuggaaucucc

SEQ ID NO: 420397 - RNA, 22 nt, Human
agugucugccaacugcaugguc

SEQ ID NO: 420398 - RNA, 19 nt, Human
acagaaauguaagugagac

SEQ ID NO: 420399 - RNA, 22 nt, Human
acagagccaaaaggacauagua

SEQ ID NO: 420400 - RNA, 22 nt, Human
uggccucuuacgacauagccuu

SEQ ID NO: 420401 - RNA, 22 nt, Human
agccaagcacucaacuccugga

SEQ ID NO: 420402 - RNA, 22 nt, Human
gugucccaauguucaggacggc

SEQ ID NO: 420403 - RNA, 22 nt, Human
uugucugaaagaucauuacauu

SEQ ID NO: 420404 - RNA, 22 nt, Human
ccagggagccuggugugucagc

SEQ ID NO: 420405 - RNA, 23 nt, Human
aagcugccagucugaagccuggg

SEQ ID NO: 420406 - RNA, 22 nt, Human
ccagagccagagaggugccugc

SEQ ID NO: 420407 - RNA, 22 nt, Human
uuucacaacguuguggugagag

SEQ ID NO: 420408 - RNA, 22 nt, Human
guccagugacaaguagcuggcc

SEQ ID NO: 420409 - RNA, 21 nt, Human
uccugccuuaguccagagcag

SEQ ID NO: 420410 - RNA, 22 nt, Human
gucaggauuauuuuauuaaaag

SEQ ID NO: 420411 - RNA, 22 nt, Human
uccagcuugacaaaugauuuua

SEQ ID NO: 420412 - RNA, 22 nt, Human
ucuuccugaaacccuguuccag

SEQ ID NO: 420413 - RNA, 22 nt, Human
gcucagagauggggaaugaaaa

SEQ ID NO: 420414 - RNA, 22 nt, Human
caagggcucuuuugaggaaugu

SEQ ID NO: 420415 - RNA, 22 nt, Human
gcuggguggaucggaggcucug

SEQ ID NO: 420416 - RNA, 22 nt, Human
agaguguaauaagggcaagggc

SEQ ID NO: 420417 - RNA, 22 nt, Human
uggaggcaguaacugagcaaca

SEQ ID NO: 420418 - RNA, 22 nt, Human
aacagaaaucauuuagggcucu

SEQ ID NO: 420419 - RNA, 22 nt, Human
caggugggaccaugauagggca

SEQ ID NO: 420420 - RNA, 22 nt, Human
ccucugcucugguccaugugcu

SEQ ID NO: 420421 - RNA, 22 nt, Human
agaacagaugugggcagaccug

SEQ ID NO: 420422 - RNA, 22 nt, Human
gggaccaggugggugcauuccg

SEQ ID NO: 420423 - RNA, 17 nt, Human
uguuuucauucauugcu

SEQ ID NO: 420424 - RNA, 20 nt, Human
ggggcugcaugcagagaaga

SEQ ID NO: 420425 - RNA, 22 nt, Human
agauuugcggcuuuacuuugca

SEQ ID NO: 420426 - RNA, 22 nt, Human
cagcugagcaucacuagucugg

SEQ ID NO: 420427 - RNA, 22 nt, Human
auuacacaggcuggcucuuuga

SEQ ID NO: 420428 - RNA, 22 nt, Human
augcaccugaacuccaucagcu

SEQ ID NO: 420429 - RNA, 22 nt, Human
gagcuuuacuucugacuggugc

SEQ ID NO: 420430 - RNA, 22 nt, Human
uuucuacaugucaauccaaacc

SEQ ID NO: 420431 - RNA, 22 nt, Human
cgcuggccauagccuccugugu

SEQ ID NO: 420432 - RNA, 22 nt, Human
ugcuuuauucgacaucugguag

SEQ ID NO: 420433 - RNA, 20 nt, Human
cccucccagaugcuucccaa

SEQ ID NO: 420434 - RNA, 22 nt, Human
aggcacugaauauccaguaaaa

SEQ ID NO: 420435 - RNA, 22 nt, Human
agccuggcuguaaccucauggu

SEQ ID NO: 420436 - RNA, 22 nt, Human
agggacacacuccaguguuauu

SEQ ID NO: 420437 - RNA, 22 nt, Human
aagcacaaugaacaucuuagau

SEQ ID NO: 420438 - RNA, 22 nt, Human
acaggcuuacaggcugcaagua

SEQ ID NO: 420439 - RNA, 20 nt, Human
acaguggaaauugaugucug

SEQ ID NO: 420440 - RNA, 22 nt, Human
agccuauuccaggaugagcuca

SEQ ID NO: 420441 - RNA, 22 nt, Human
ugaagaagccaauugguaggcu

SEQ ID NO: 420442 - RNA, 22 nt, Human
acagaacugagaauucucuauc

SEQ ID NO: 420443 - RNA, 22 nt, Human
guguggcugugggagauguuca

SEQ ID NO: 420444 - RNA, 22 nt, Human
ucuguccucuuugaagcugcuc

SEQ ID NO: 420445 - RNA, 22 nt, Human
ugaaacagucuccagacuugga

SEQ ID NO: 420446 - RNA, 22 nt, Human
uuuccucugaugcugacuugga

SEQ ID NO: 420447 - RNA, 22 nt, Human
ugcucccaaacgaccuacugug

SEQ ID NO: 420448 - RNA, 22 nt, Human
aacccagccguguagcugccgc

SEQ ID NO: 420449 - RNA, 22 nt, Human
agcauggggcuccgcaaugaac

SEQ ID NO: 420450 - RNA, 22 nt, Human
auccagcuuugucuggucuucg

SEQ ID NO: 420451 - RNA, 22 nt, Human
cucagagagggcaccagggcca

SEQ ID NO: 420452 - RNA, 22 nt, Human
cugcuuccauggucuggagacu

SEQ ID NO: 420453 - RNA, 22 nt, Human
aaacaccagucccaguauacac

SEQ ID NO: 420454 - RNA, 22 nt, Human
agcucccagggcugggcaaguu

SEQ ID NO: 420455 - RNA, 22 nt, Human
uguaugcuuguguauaauauaa

SEQ ID NO: 420456 - RNA, 22 nt, Human
ugucucuggcccaugagcagag

SEQ ID NO: 420457 - RNA, 20 nt, Human
ugggccuguggcagaagucu

SEQ ID NO: 420458 - RNA, 22 nt, Human
ucacugaauacuugucucaucc

SEQ ID NO: 420459 - RNA, 22 nt, Human
gggcugucaugugucagugacc

SEQ ID NO: 420460 - RNA, 22 nt, Human
gcuggcuguguuccuucugcca

SEQ ID NO: 420461 - RNA, 22 nt, Human
agcaggaacgaguucaugggga

SEQ ID NO: 420462 - RNA, 22 nt, Human
caaggccaguccauuuuggaag

SEQ ID NO: 420463 - RNA, 22 nt, Human
auuuuucucuccacuccauuaa

SEQ ID NO: 420464 - RNA, 22 nt, Human
ccuccuggcccugggccuggaa

SEQ ID NO: 420465 - RNA, 22 nt, Human
gcugucugggaugucacugcug

SEQ ID NO: 420466 - RNA, 22 nt, Human
cccaggagauggagguugcagu

SEQ ID NO: 420467 - RNA, 22 nt, Human
agugaaauccuggucaacaggu

SEQ ID NO: 420468 - RNA, 22 nt, Human
uggguagaggaauugggcuacc

SEQ ID NO: 420469 - RNA, 22 nt, Human
aagguacagaaauuaacaagga

SEQ ID NO: 420470 - RNA, 22 nt, Human
agagcugcaggguggacccagg

SEQ ID NO: 420471 - RNA, 22 nt, Human
ggagucagccugucagagugua

SEQ ID NO: 420472 - RNA, 22 nt, Human
cugccuggguucaaguccuguu

SEQ ID NO: 420473 - RNA, 22 nt, Human
ccuuaaaagaacuaucucuucu

SEQ ID NO: 420474 - RNA, 22 nt, Human
gucaggauuugaacucaggucu

SEQ ID NO: 420475 - RNA, 22 nt, Human
ccagggugagugucauggguua

SEQ ID NO: 420476 - RNA, 22 nt, Human
gaaggagagagacaucgucccu

SEQ ID NO: 420477 - RNA, 22 nt, Human
guaacagaaagucaugcucauu

SEQ ID NO: 420478 - RNA, 22 nt, Human
uggccugacugucaggcuguau

SEQ ID NO: 420479 - RNA, 22 nt, Human
ucugcucuccauacuuccgcac

SEQ ID NO: 420480 - RNA, 22 nt, Human
accagugcuuccugcuggagcu

SEQ ID NO: 420481 - RNA, 22 nt, Human
ugcaggaguccaaucaggagac

SEQ ID NO: 420482 - RNA, 22 nt, Human
ugcaggagcugugcggugaggg

SEQ ID NO: 420483 - RNA, 19 nt, Human
uuagaaacuguugacacug

SEQ ID NO: 420484 - RNA, 19 nt, Human
ggagaagcccaggaauccu

SEQ ID NO: 420485 - RNA, 22 nt, Human
auguaacaggugaagcucugag

SEQ ID NO: 420486 - RNA, 22 nt, Human
uccagccaccaccuugauugcc

SEQ ID NO: 420487 - RNA, 22 nt, Human
uacauuccauguguguguauuc

SEQ ID NO: 420488 - RNA, 22 nt, Human
gccucacugcagccccaggaag

SEQ ID NO: 420489 - RNA, 22 nt, Human
uuuaagaugguauuuuauaaag

SEQ ID NO: 420490 - RNA, 22 nt, Human
cagccaccauacagcagaagcu

SEQ ID NO: 420491 - RNA, 22 nt, Human
ggcugccuacuuucccagaguu

SEQ ID NO: 420492 - RNA, 22 nt, Human
ggcuguggcauuaggugaggcc

SEQ ID NO: 420493 - RNA, 23 nt, Human
gccugccugaccugugcaaaguc

SEQ ID NO: 420494 - RNA, 22 nt, Human
ccucugugugugcaugcaugcg

SEQ ID NO: 420495 - RNA, 23 nt, Human
ccucccaggcugcgagucccgag

SEQ ID NO: 420496 - RNA, 22 nt, Human
ccucaggaaaugaauaaauggc

SEQ ID NO: 420497 - RNA, 22 nt, Human
ggaaaaggccacagggacacau

SEQ ID NO: 420498 - RNA, 19 nt, Human
gagcugagaguagcacugg

SEQ ID NO: 420499 - RNA, 22 nt, Human
gcaagcuggcuguuagaggaug

SEQ ID NO: 420500 - RNA, 22 nt, Human
ggagagaaauugagguagcaag

SEQ ID NO: 420501 - RNA, 22 nt, Human
cacauccuucagcugagcccag

SEQ ID NO: 420502 - RNA, 22 nt, Human
uggcucugcaccucaguguacc

SEQ ID NO: 420503 - RNA, 22 nt, Human
acuggcaguggcagcagaaaga

SEQ ID NO: 420504 - RNA, 22 nt, Human
ugggaccuguuacauugaguua

SEQ ID NO: 420505 - RNA, 22 nt, Human
agugcacuggcaccaucucagc

SEQ ID NO: 420506 - RNA, 22 nt, Human
cugggaggugcagcaaaaauca

SEQ ID NO: 420507 - RNA, 22 nt, Human
cagcugggcuaagaguagaggc

SEQ ID NO: 420508 - RNA, 22 nt, Human
gaggccuggcugucagucccca

SEQ ID NO: 420509 - RNA, 22 nt, Human
caggcugggcuccggagauaaa

SEQ ID NO: 420510 - RNA, 21 nt, Human
uucauaaaccauucucaugca

SEQ ID NO: 420511 - RNA, 20 nt, Human
uauuuagauucaaguaugga

SEQ ID NO: 420512 - RNA, 22 nt, Human
aaugauguauuaguacaacaca

SEQ ID NO: 420513 - RNA, 22 nt, Human
cagggacaauggcagagccuga

SEQ ID NO: 420514 - RNA, 22 nt, Human
agcucccagaagccagagucgg

SEQ ID NO: 420515 - RNA, 22 nt, Human
ucccaguguggcaggccaugga

SEQ ID NO: 420516 - RNA, 22 nt, Human
cagggagcuuucccaggacccu

SEQ ID NO: 420517 - RNA, 20 nt, Human
cucuccuugccgacuuggca

SEQ ID NO: 420518 - RNA, 22 nt, Human
agcagggcacuggaaggcacug

SEQ ID NO: 420519 - RNA, 21 nt, Human
ggccucugccuugccccacuc

SEQ ID NO: 420520 - RNA, 22 nt, Human
uauccaauucaccauugauggg

SEQ ID NO: 420521 - RNA, 22 nt, Human
aauguacaauaagacaaagagg

SEQ ID NO: 420522 - RNA, 22 nt, Human
gaguccaggcucagaaacccgu

SEQ ID NO: 420523 - RNA, 22 nt, Human
aggggacacggcuucuccaggg

SEQ ID NO: 420524 - RNA, 22 nt, Human
ucuuucuacaucauuugcuucu

SEQ ID NO: 420525 - RNA, 22 nt, Human
accugggagucacaccugagaa

SEQ ID NO: 420526 - RNA, 22 nt, Human
acagccugagaguggagcuggc

SEQ ID NO: 420527 - RNA, 22 nt, Human
cagggccagagagggcuggcug

SEQ ID NO: 420528 - RNA, 21 nt, Human
uuugaaagugggugauucuuu

SEQ ID NO: 420529 - RNA, 22 nt, Human
ccagacccugcucuggggcucu

SEQ ID NO: 420530 - RNA, 18 nt, Human
gaggccugagaaccaggu

SEQ ID NO: 420531 - RNA, 22 nt, Human
auuuuccaaaauaauuguuacu

SEQ ID NO: 420532 - RNA, 22 nt, Human
aggcaguggcugagaccagggg

SEQ ID NO: 420533 - RNA, 21 nt, Human
gagagggcauuauaggaagug

SEQ ID NO: 420534 - RNA, 22 nt, Human
ccaucagcaugggagcaugggc

SEQ ID NO: 420535 - RNA, 22 nt, Human
ccagcccuucccaacuggccag

SEQ ID NO: 420536 - RNA, 22 nt, Human
uggcagagugcagaagaggcau

SEQ ID NO: 420537 - RNA, 22 nt, Human
ccagcagagucuaggaaggagg

SEQ ID NO: 420538 - RNA, 22 nt, Human
aucacugucgucaucugagauu

SEQ ID NO: 420539 - RNA, 22 nt, Human
agcugcugcggaaagaugccac

SEQ ID NO: 420540 - RNA, 22 nt, Human
cuggccugcugggugagguccu

SEQ ID NO: 420541 - RNA, 22 nt, Human
aaguucaagucuccugaguaua

SEQ ID NO: 420542 - RNA, 22 nt, Human
ggccucgcggcuucugguggcu

SEQ ID NO: 420543 - RNA, 22 nt, Human
aucuguaaaugcaaauguagcu

SEQ ID NO: 420544 - RNA, 22 nt, Human
accaggcagagcugggccuuaa

SEQ ID NO: 420545 - RNA, 22 nt, Human
gccuggaguacuccuugaagug

SEQ ID NO: 420546 - RNA, 22 nt, Human
cugaaugucgaucagcuugggu

SEQ ID NO: 420547 - RNA, 22 nt, Human
ugauuuccuagcugacaugaaa

SEQ ID NO: 420548 - RNA, 22 nt, Human
ucagcagggcugugguguggcu

SEQ ID NO: 420549 - RNA, 21 nt, Human
agcagccauuucacagagacu

SEQ ID NO: 420550 - RNA, 22 nt, Human
cagaccagcucuaugaacccaa

SEQ ID NO: 420551 - RNA, 22 nt, Human
uuuuuggguccaggcuguaucu

SEQ ID NO: 420552 - RNA, 22 nt, Human
aagaauguucuuguagucauga

SEQ ID NO: 420553 - RNA, 22 nt, Human
gaaaugugaccuacuuccuugu

SEQ ID NO: 420554 - RNA, 22 nt, Human
cuucuuaaugcauaaacugugu

SEQ ID NO: 420555 - RNA, 23 nt, Human
uggcaccaggcauucuaggggua

SEQ ID NO: 420556 - RNA, 22 nt, Human
aagccucuggggccucaucugu

SEQ ID NO: 420557 - RNA, 22 nt, Human
uggcucagaaggcugccuucac

SEQ ID NO: 420558 - RNA, 22 nt, Human
cuacauuuuucaccgagccucu

SEQ ID NO: 420559 - RNA, 22 nt, Human
uagagaaauaagcuuugccuug

SEQ ID NO: 420560 - RNA, 22 nt, Human
cagcagagcuuauguuggguca

SEQ ID NO: 420561 - RNA, 22 nt, Human
guggccagcaagugcugccucu

SEQ ID NO: 420562 - RNA, 22 nt, Human
cucaggaugcaggucacaggac

SEQ ID NO: 420563 - RNA, 22 nt, Human
ugggccugggagggcagacgcu

SEQ ID NO: 420564 - RNA, 22 nt, Human
agcagccagugggagugauaca

SEQ ID NO: 420565 - RNA, 22 nt, Human
ggagccuugggcgcucucccau

SEQ ID NO: 420566 - RNA, 22 nt, Human
uucuagaugauaaaccagcagc

SEQ ID NO: 420567 - RNA, 22 nt, Human
gccaaaucuugcacacucuugu

SEQ ID NO: 420568 - RNA, 22 nt, Human
uggagcagcaucacuuugagcu

SEQ ID NO: 420569 - RNA, 22 nt, Human
aaagccaaaugaaagaugguuc

SEQ ID NO: 420570 - RNA, 17 nt, Human
uccaggcagcaacugag

SEQ ID NO: 420571 - RNA, 22 nt, Human
cagagcagugaggaguugugua

SEQ ID NO: 420572 - RNA, 22 nt, Human
uccaaaaaacguuugaauaguu

SEQ ID NO: 420573 - RNA, 22 nt, Human
ucaaaguccuugcuuuuucugu

SEQ ID NO: 420574 - RNA, 22 nt, Human
gucaccaggucugaugcagcca

SEQ ID NO: 420575 - RNA, 22 nt, Human
gccugucugcgucacgcuuauu

SEQ ID NO: 420576 - RNA, 19 nt, Human
gaggaggaaaacuagugua

SEQ ID NO: 420577 - RNA, 22 nt, Human
agggagcaugggugaagcaggc

SEQ ID NO: 420578 - RNA, 20 nt, Human
gcaaggcacagugaggaggg

SEQ ID NO: 420579 - RNA, 22 nt, Human
agggugccuggaagccacucac

SEQ ID NO: 420580 - RNA, 22 nt, Human
caaaugugacuuuugggcuucu

SEQ ID NO: 420581 - RNA, 22 nt, Human
uuauggcauauuccucauugua

SEQ ID NO: 420582 - RNA, 22 nt, Human
agcauccaacaggagggaaggg

SEQ ID NO: 420583 - RNA, 22 nt, Human
gcugauccuuuuaugucuagcu

SEQ ID NO: 420584 - RNA, 20 nt, Human
gaaggaagggggcaagguga

SEQ ID NO: 420585 - RNA, 22 nt, Human
ucaggagauggucuuuauaggc

SEQ ID NO: 420586 - RNA, 20 nt, Human
ugaggcaggagaauggcaug

SEQ ID NO: 420587 - RNA, 22 nt, Human
gccugucugcagggcugucauu

SEQ ID NO: 420588 - RNA, 20 nt, Human
aaagucuuaugguuaauuuu

SEQ ID NO: 420589 - RNA, 21 nt, Human
ggagcugcaggagccgaaggc

SEQ ID NO: 420590 - RNA, 22 nt, Human
gagagggcucuguguggguacu

SEQ ID NO: 420591 - RNA, 22 nt, Human
gcaggaugaaggcagaggcuga

SEQ ID NO: 420592 - RNA, 22 nt, Human
ugcucugguaacucacuuccau

SEQ ID NO: 420593 - RNA, 19 nt, Human
caugagcugcucacuuccc

SEQ ID NO: 420594 - RNA, 22 nt, Human
cucuggaauuaaggaagccugu

SEQ ID NO: 420595 - RNA, 19 nt, Human
cugguccugacugaggggu

SEQ ID NO: 420596 - RNA, 22 nt, Human
uagggcucgggcacaggacagg

SEQ ID NO: 420597 - RNA, 19 nt, Human
gcugucugaugcugagguc

SEQ ID NO: 420598 - RNA, 22 nt, Human
cuggugcuggagccuagucccu

SEQ ID NO: 420599 - RNA, 22 nt, Human
uggcauuucaccuuucauuucc

SEQ ID NO: 420600 - RNA, 22 nt, Human
guggagacuucuacuagagacc

SEQ ID NO: 420601 - RNA, 22 nt, Human
cauguuauuuauccauuaaaca

SEQ ID NO: 420602 - RNA, 22 nt, Human
cagccccucccucaggcaggug

SEQ ID NO: 420603 - RNA, 22 nt, Human
acauuucucuugaugucucuau

SEQ ID NO: 420604 - RNA, 22 nt, Human
ccucuggcuguaccacuggcac

SEQ ID NO: 420605 - RNA, 22 nt, Human
cagcaguguggaagcugagggg

SEQ ID NO: 420606 - RNA, 22 nt, Human
caggguggggcuggcuaucaaa

SEQ ID NO: 420607 - RNA, 22 nt, Human
uaaauucccaacucugcucuuc

SEQ ID NO: 420608 - RNA, 21 nt, Human
ucagcagcuuuugcagucccu

SEQ ID NO: 420609 - RNA, 22 nt, Human
caaugauguuuagauaaaaucc

SEQ ID NO: 420610 - RNA, 22 nt, Human
cucagaauuacaucccauuuua

SEQ ID NO: 420611 - RNA, 22 nt, Human
agaaggccuaacuugggggcaa

SEQ ID NO: 420612 - RNA, 22 nt, Human
ucagcuuugaucucaggcaauc

SEQ ID NO: 420613 - RNA, 22 nt, Human
aaugaugguauugaugagcuaa

SEQ ID NO: 420614 - RNA, 22 nt, Human
agacucugauucccucauguca

SEQ ID NO: 420615 - RNA, 22 nt, Human
guucauuuaugauguaacaugu

SEQ ID NO: 420616 - RNA, 22 nt, Human
gccucugcaacuccgccuuggu

SEQ ID NO: 420617 - RNA, 22 nt, Human
guccuggggaauacagaagccg

SEQ ID NO: 420618 - RNA, 19 nt, Human
ucucagagcccuagaggcc

SEQ ID NO: 420619 - RNA, 21 nt, Human
aagagcuggaucaaggauaag

SEQ ID NO: 420620 - RNA, 22 nt, Human
gccugaugagcuuccagcugag

SEQ ID NO: 420621 - RNA, 22 nt, Human
ccaggccuggccaggggaugcc

SEQ ID NO: 420622 - RNA, 22 nt, Human
ggagcagagcugggcuuggcug

SEQ ID NO: 420623 - RNA, 22 nt, Human
uguaugcuuuccaaaaaugcug

SEQ ID NO: 420624 - RNA, 20 nt, Human
cuggcaggagcgagucuacc

SEQ ID NO: 420625 - RNA, 22 nt, Human
caaaugcaggucauaaccugag

SEQ ID NO: 420626 - RNA, 22 nt, Human
ucaggaugaccacgagccucua

SEQ ID NO: 420627 - RNA, 22 nt, Human
augaggcauuccacucaaacuc

SEQ ID NO: 420628 - RNA, 22 nt, Human
cuggccaguuguccuggcuugg

SEQ ID NO: 420629 - RNA, 22 nt, Human
ccaaaauuauuacauuuguagg

SEQ ID NO: 420630 - RNA, 22 nt, Human
gggcugacaguuuccccugaaa

SEQ ID NO: 420631 - RNA, 22 nt, Human
gggccacacagaaccuccuggu

SEQ ID NO: 420632 - RNA, 23 nt, Human
uguagcaucucuuauuucucagc

SEQ ID NO: 420633 - RNA, 22 nt, Human
uucaagaugcacaguggcauuc

SEQ ID NO: 420634 - RNA, 22 nt, Human
gucccagagagcacuaguccau

SEQ ID NO: 420635 - RNA, 22 nt, Human
ccagaggcuggguucaccucag

SEQ ID NO: 420636 - RNA, 22 nt, Human
ugcuuccuugagcucuccaauc

SEQ ID NO: 420637 - RNA, 22 nt, Human
agucccagaucuccauucgguc

SEQ ID NO: 420638 - RNA, 22 nt, Human
uccaggcauaaugcccaguggu

SEQ ID NO: 420639 - RNA, 22 nt, Human
ggagcuguuggcagcuaucuug

SEQ ID NO: 420640 - RNA, 22 nt, Human
aacucagcauccugcacagaga

SEQ ID NO: 420641 - RNA, 22 nt, Human
cccaggugggcaccucgaggaa

SEQ ID NO: 420642 - RNA, 22 nt, Human
gggcugagugucccaggccgaa

SEQ ID NO: 420643 - RNA, 22 nt, Human
caucucaugggcaugccaagcu

SEQ ID NO: 420644 - RNA, 22 nt, Human
acuguguccucauguggcagaa

SEQ ID NO: 420645 - RNA, 22 nt, Human
agacagcauggagcugauaaca

SEQ ID NO: 420646 - RNA, 22 nt, Human
agcaguggccuggggcucugug

SEQ ID NO: 420647 - RNA, 22 nt, Human
uagcuuuaagacauggugaaug

SEQ ID NO: 420648 - RNA, 22 nt, Human
agagacaccgcgcaucauggcu

SEQ ID NO: 420649 - RNA, 22 nt, Human
uaagccacuagucuguuaugaa

SEQ ID NO: 420650 - RNA, 22 nt, Human
agagccaggcaggcaauguuga

SEQ ID NO: 420651 - RNA, 22 nt, Human
cauucacucagcgaugccagua

SEQ ID NO: 420652 - RNA, 22 nt, Human
cagcaggggaacugugggccag

SEQ ID NO: 420653 - RNA, 22 nt, Human
gaggccuguagucauggaugua

SEQ ID NO: 420654 - RNA, 22 nt, Human
caaagugcuaggauuacaggcc

SEQ ID NO: 420655 - RNA, 22 nt, Human
aacagaaugcaggggaugcugc

SEQ ID NO: 420656 - RNA, 22 nt, Human
cagccagcuucagauccaagcc

SEQ ID NO: 420657 - RNA, 22 nt, Human
ggugucuguugccuccugguua

SEQ ID NO: 420658 - RNA, 22 nt, Human
agccaggccagacucacacccu

SEQ ID NO: 420659 - RNA, 23 nt, Human
aggauccugguacaggagcagag

SEQ ID NO: 420660 - RNA, 22 nt, Human
cauuuguauagugcuuagacca

SEQ ID NO: 420661 - RNA, 22 nt, Human
ugugggcacuaaugacaugcag

SEQ ID NO: 420662 - RNA, 22 nt, Human
ucacaguuauagucuguagaau

SEQ ID NO: 420663 - RNA, 22 nt, Human
uggcugagcucccuguguguug

SEQ ID NO: 420664 - RNA, 17 nt, Human
uccuggcucugccacug

SEQ ID NO: 420665 - RNA, 22 nt, Human
aggccucacauugggcuucaag

SEQ ID NO: 420666 - RNA, 22 nt, Human
uugcucagcacuggagccagcu

SEQ ID NO: 420667 - RNA, 18 nt, Human
guaggucaguaccaagca

SEQ ID NO: 420668 - RNA, 22 nt, Human
ggcugaguugagaggauuacuu

SEQ ID NO: 420669 - RNA, 22 nt, Human
agugucugccagcugccaggug

SEQ ID NO: 420670 - RNA, 22 nt, Human
cauuuauugaguggccacagug

SEQ ID NO: 420671 - RNA, 22 nt, Human
gcucccucugcucaggcacuug

SEQ ID NO: 420672 - RNA, 22 nt, Human
gcugagugagguccagagcuug

SEQ ID NO: 420673 - RNA, 22 nt, Human
uuuuucaagacaaccugcaugu

SEQ ID NO: 420674 - RNA, 22 nt, Human
uaauuuuaacugugcuguuugg

SEQ ID NO: 420675 - RNA, 21 nt, Human
uggccucccacacuuccaugg

SEQ ID NO: 420676 - RNA, 22 nt, Human
cuguuauuucugccaggugagu

SEQ ID NO: 420677 - RNA, 22 nt, Human
aggggugaaggcccgauaggag

SEQ ID NO: 420678 - RNA, 22 nt, Human
agucuccuuggccucaaugccu

SEQ ID NO: 420679 - RNA, 22 nt, Human
uacuguacugcaguucugcaaa

SEQ ID NO: 420680 - RNA, 22 nt, Human
cugaggaugguguggucuucuc

SEQ ID NO: 420681 - RNA, 22 nt, Human
ccuucucuacuccugaugcaug

SEQ ID NO: 420682 - RNA, 22 nt, Human
uuacaaagcaggucagcugaaa

SEQ ID NO: 420683 - RNA, 22 nt, Human
aagaaaacguuuugaggaguuu

SEQ ID NO: 420684 - RNA, 22 nt, Human
gagacguggccuuugccugagc

SEQ ID NO: 420685 - RNA, 22 nt, Human
ugcaggcuguaaucugaggcua

SEQ ID NO: 420686 - RNA, 22 nt, Human
auuuauuaugggauuuggcaca

SEQ ID NO: 420687 - RNA, 22 nt, Human
acaguggaugugauguccaggu

SEQ ID NO: 420688 - RNA, 22 nt, Human
agugaaaucagguuuugacugc

SEQ ID NO: 420689 - RNA, 22 nt, Human
uucuccucuguuggccuucccu

SEQ ID NO: 420690 - RNA, 22 nt, Human
uaauuuuaugacaguguauuuu

SEQ ID NO: 420691 - RNA, 22 nt, Human
augggaggcagacacuaaguuc

SEQ ID NO: 420692 - RNA, 22 nt, Human
acaguguguucugggaccucca

SEQ ID NO: 420693 - RNA, 22 nt, Human
ugagccuguggggugacaacca

SEQ ID NO: 420694 - RNA, 22 nt, Human
uucugcagcccaacaguaguuu

SEQ ID NO: 420695 - RNA, 22 nt, Human
cugagccaugagccugcgccca

SEQ ID NO: 420696 - RNA, 18 nt, Human
gggcucugauccuucacc

SEQ ID NO: 420697 - RNA, 22 nt, Human
acucaggagggaucagcuauca

SEQ ID NO: 420698 - RNA, 22 nt, Human
uucaagaucuuccaaaggauac

SEQ ID NO: 420699 - RNA, 22 nt, Human
aaaggccacacugcucuuucuc

SEQ ID NO: 420700 - RNA, 22 nt, Human
gcagagugagauaugaacccag

SEQ ID NO: 420701 - RNA, 22 nt, Human
cagggcuguggcuuugugcugu

SEQ ID NO: 420702 - RNA, 22 nt, Human
acaguggaauggugggccugca

SEQ ID NO: 420703 - RNA, 22 nt, Human
ccagggcagccaacccagaugc

SEQ ID NO: 420704 - RNA, 22 nt, Human
ccagggcacguugggacaguac

SEQ ID NO: 420705 - RNA, 22 nt, Human
cccagagccucauucuguuggg

SEQ ID NO: 420706 - RNA, 22 nt, Human
gagucugagaacugggcucagu

SEQ ID NO: 420707 - RNA, 22 nt, Human
agcuggguguguaucagauaaa

SEQ ID NO: 420708 - RNA, 22 nt, Human
cccuggaggcaaagguugcagu

SEQ ID NO: 420709 - RNA, 22 nt, Human
cacccacccacugcucauuggc

SEQ ID NO: 420710 - RNA, 22 nt, Human
caucaguguggcaguucacugu

SEQ ID NO: 420711 - RNA, 22 nt, Human
aagccucaccuuuuagaagcua

SEQ ID NO: 420712 - RNA, 22 nt, Human
uggagcaggacugcugcccuca

SEQ ID NO: 420713 - RNA, 22 nt, Human
ucuuuuauuaggcugaaauggg

SEQ ID NO: 420714 - RNA, 22 nt, Human
ugggacuugccucgagggcugc

SEQ ID NO: 420715 - RNA, 22 nt, Human
aaggccagccugagagcuaaca

SEQ ID NO: 420716 - RNA, 22 nt, Human
aggccugggcaagaaggggcgu

SEQ ID NO: 420717 - RNA, 22 nt, Human
guauuaggagguggagccuuug

SEQ ID NO: 420718 - RNA, 22 nt, Human
aaggcaguaggaucuuccacag

SEQ ID NO: 420719 - RNA, 21 nt, Human
ucucugugucuuuaagcugga

SEQ ID NO: 420720 - RNA, 22 nt, Human
cugucauugagccugucagggc

SEQ ID NO: 420721 - RNA, 22 nt, Human
aaaggccaccaacaugaagcau

SEQ ID NO: 420722 - RNA, 22 nt, Human
ccacagaguuacaaaacaguca

SEQ ID NO: 420723 - RNA, 22 nt, Human
gccaggcucucagugacugccc

SEQ ID NO: 420724 - RNA, 22 nt, Human
ggagccugacagugcccagcau

SEQ ID NO: 420725 - RNA, 22 nt, Human
aggcaggugggucacuugaguc

SEQ ID NO: 420726 - RNA, 22 nt, Human
uucaagucaaggaaagaggucu

SEQ ID NO: 420727 - RNA, 19 nt, Human
ccagcagcuuugauucucu

SEQ ID NO: 420728 - RNA, 21 nt, Human
acuuugggcacuuuccugccc

SEQ ID NO: 420729 - RNA, 22 nt, Human
uugcagcagggugaauucacuc

SEQ ID NO: 420730 - RNA, 22 nt, Human
uuauguauggauggcugaaagu

SEQ ID NO: 420731 - RNA, 21 nt, Human
aaaugaaugugguagugcaag

SEQ ID NO: 420732 - RNA, 22 nt, Human
caaaugcaggucagcagguguc

SEQ ID NO: 420733 - RNA, 22 nt, Human
caaaguauauuggauugaaugg

SEQ ID NO: 420734 - RNA, 23 nt, Human
cagggccaggcagcagcugucac

SEQ ID NO: 420735 - RNA, 22 nt, Human
caggguggaaaagcuaguugga

SEQ ID NO: 420736 - RNA, 22 nt, Human
caaugauggcuaggcagcugcu

SEQ ID NO: 420737 - RNA, 22 nt, Human
caggaucccuggccuccgccca

SEQ ID NO: 420738 - RNA, 22 nt, Human
uaguccaguaaaacagcuaacg

SEQ ID NO: 420739 - RNA, 22 nt, Human
caguuuuuagauuaguuggugg

SEQ ID NO: 420740 - RNA, 22 nt, Human
gaucauuuacuuguucuggacu

SEQ ID NO: 420741 - RNA, 22 nt, Human
acacagggcggaaagcaugaga

SEQ ID NO: 420742 - RNA, 22 nt, Human
ggcucagaaacuaaaggcgcug

SEQ ID NO: 420743 - RNA, 22 nt, Human
uagcagggaaggugugcugagc

SEQ ID NO: 420744 - RNA, 19 nt, Human
gcucugagaggggcauggg

SEQ ID NO: 420745 - RNA, 22 nt, Human
auccucagcaucuagcaugaag

SEQ ID NO: 420746 - RNA, 22 nt, Human
agaugauggccauguccucucc

SEQ ID NO: 420747 - RNA, 22 nt, Human
uucaggaucauuuguuuuaucu

SEQ ID NO: 420748 - RNA, 22 nt, Human
ugcagggcagcuagggagcuuu

SEQ ID NO: 420749 - RNA, 23 nt, Human
cagagcuggcucagagcugccug

SEQ ID NO: 420750 - RNA, 21 nt, Human
ggcagcugaccgcgcggugca

SEQ ID NO: 420751 - RNA, 22 nt, Human
cugccugugccaaugcuccuuu

SEQ ID NO: 420752 - RNA, 22 nt, Human
gcagagcuccccaagacaccaa

SEQ ID NO: 420753 - RNA, 18 nt, Human
agcugcagaccaggaggu

SEQ ID NO: 420754 - RNA, 22 nt, Human
cuggucugagggcucuugaggc

SEQ ID NO: 420755 - RNA, 22 nt, Human
ucccuggacaacagacuucacu

SEQ ID NO: 420756 - RNA, 22 nt, Human
accuuaaaacugacacauggag

SEQ ID NO: 420757 - RNA, 22 nt, Human
ugaguacucggagugcuuugga

SEQ ID NO: 420758 - RNA, 22 nt, Human
guguugaugacauuuuagaaac

SEQ ID NO: 420759 - RNA, 22 nt, Human
agcagagccaggucucucugua

SEQ ID NO: 420760 - RNA, 22 nt, Human
cucuccuugcagauggcugccu

SEQ ID NO: 420761 - RNA, 22 nt, Human
ggcugucugugguggagcguug

SEQ ID NO: 420762 - RNA, 22 nt, Human
cucucccagucaggcucaggau

SEQ ID NO: 420763 - RNA, 22 nt, Human
uggcucagagcagggacucugg

SEQ ID NO: 420764 - RNA, 18 nt, Human
agagaugguguagaguuu

SEQ ID NO: 420765 - RNA, 22 nt, Human
uacauucaacaugucacuaugu

SEQ ID NO: 420766 - RNA, 22 nt, Human
agguuuucagcuguauccugag

SEQ ID NO: 420767 - RNA, 22 nt, Human
guggcuugaccaucccugcuac

SEQ ID NO: 420768 - RNA, 22 nt, Human
ugucacauaggcaaaauguuuu

SEQ ID NO: 420769 - RNA, 22 nt, Human
agugcagccgagaucaggugcu

SEQ ID NO: 420770 - RNA, 21 nt, Human
uggccaaacuggagcauuuga

SEQ ID NO: 420771 - RNA, 22 nt, Human
caggggcucccugggugccagu

SEQ ID NO: 420772 - RNA, 22 nt, Human
aucagagauuguaguaugugca

SEQ ID NO: 420773 - RNA, 22 nt, Human
ggcaggguccacaccugggaaa

SEQ ID NO: 420774 - RNA, 22 nt, Human
ccucccuggccagagcagcagc

SEQ ID NO: 420775 - RNA, 22 nt, Human
gauugaaacauaggcagucgag

SEQ ID NO: 420776 - RNA, 22 nt, Human
cagaaacuauguaagaaaguga

SEQ ID NO: 420777 - RNA, 22 nt, Human
cagguggguguaugaaugcaaa

SEQ ID NO: 420778 - RNA, 22 nt, Human
cagguuuagguggacgugcagg

SEQ ID NO: 420779 - RNA, 18 nt, Human
cagaagcaggcagugcag

SEQ ID NO: 420780 - RNA, 22 nt, Human
agugugagccuacaggccaaag

SEQ ID NO: 420781 - RNA, 23 nt, Human
ggcaccaggccauggagcgggag

SEQ ID NO: 420782 - RNA, 18 nt, Human
uacaugcauaaaugaagc

SEQ ID NO: 420783 - RNA, 22 nt, Human
gucaggauuuacaaacuucagu

SEQ ID NO: 420784 - RNA, 22 nt, Human
ccuggcuuuuguuuauaaauuc

SEQ ID NO: 420785 - RNA, 22 nt, Human
auaaauuuauaauuguuuccug

SEQ ID NO: 420786 - RNA, 22 nt, Human
acccugagggguauagcagaag

SEQ ID NO: 420787 - RNA, 22 nt, Human
gaugagggccugguggcugugc

SEQ ID NO: 420788 - RNA, 22 nt, Human
ggcaaaaacagcaaugacuuuu

SEQ ID NO: 420789 - RNA, 21 nt, Human
uccucugcucucauaccacaa

SEQ ID NO: 420790 - RNA, 22 nt, Human
agcaauaugacauugcuacauc

SEQ ID NO: 420791 - RNA, 22 nt, Human
agucagugaaaacuagaauguu

SEQ ID NO: 420792 - RNA, 22 nt, Human
guaauugacucagcucuguuca

SEQ ID NO: 420793 - RNA, 22 nt, Human
auugacaagcaguaugucuuag

SEQ ID NO: 420794 - RNA, 22 nt, Human
gaugggaggaaccugggucccu

SEQ ID NO: 420795 - RNA, 22 nt, Human
ucuccucucuuaccugguacaa

SEQ ID NO: 420796 - RNA, 22 nt, Human
gagcugcuucugugugccgggu

SEQ ID NO: 420797 - RNA, 22 nt, Human
uuauucagauuggcuacaggau

SEQ ID NO: 420798 - RNA, 22 nt, Human
ucugucacuuuuauuuacugaa

SEQ ID NO: 420799 - RNA, 22 nt, Human
ucuguccauucagccauccauc

SEQ ID NO: 420800 - RNA, 22 nt, Human
ugagccaggcucaagugauccu

SEQ ID NO: 420801 - RNA, 22 nt, Human
cugagcugggcucucuugaggg

SEQ ID NO: 420802 - RNA, 22 nt, Human
ggaagaggcucucauugagggc

SEQ ID NO: 420803 - RNA, 22 nt, Human
guauuuuaagugacuacuaggu

SEQ ID NO: 420804 - RNA, 22 nt, Human
ugauucacagacuucacaaggc

SEQ ID NO: 420805 - RNA, 22 nt, Human
acagacagggcaccugccuccu

SEQ ID NO: 420806 - RNA, 22 nt, Human
caggccacaaguuggguucaag

SEQ ID NO: 420807 - RNA, 22 nt, Human
ugcucacugaacucuugcuguc

SEQ ID NO: 420808 - RNA, 22 nt, Human
ugcccacauggugccauggcca

SEQ ID NO: 420809 - RNA, 22 nt, Human
gucucagauaacauguauucua

SEQ ID NO: 420810 - RNA, 22 nt, Human
uauugacaauaggcaacugagg

SEQ ID NO: 420811 - RNA, 22 nt, Human
agggcugcuuugcuaaauaugg

SEQ ID NO: 420812 - RNA, 22 nt, Human
ugucugagugugccugggcauu

SEQ ID NO: 420813 - RNA, 22 nt, Human
auuuauuaugggauuuggcuca

SEQ ID NO: 420814 - RNA, 22 nt, Human
uucacauugguucuugauagcu

SEQ ID NO: 420815 - RNA, 22 nt, Human
cagccagagaaagggcacugcc

SEQ ID NO: 420816 - RNA, 22 nt, Human
cagaaauggaauuuuccaucac

SEQ ID NO: 420817 - RNA, 23 nt, Human
cuugcagggcuggaggcuuagaa

SEQ ID NO: 420818 - RNA, 22 nt, Human
auacagaaaaugaugcagaguu

SEQ ID NO: 420819 - RNA, 22 nt, Human
agcauuuaggagaauuugagaa

SEQ ID NO: 420820 - RNA, 23 nt, Human
cagcugaagcagccugggcugga

SEQ ID NO: 420821 - RNA, 22 nt, Human
ugcuauugugaacagugccaca

SEQ ID NO: 420822 - RNA, 22 nt, Human
auacaagaucacuccagaaaau

SEQ ID NO: 420823 - RNA, 22 nt, Human
uugcagcuuagugauguuaucu

SEQ ID NO: 420824 - RNA, 22 nt, Human
ccagcccucacugaggccucuc

SEQ ID NO: 420825 - RNA, 22 nt, Human
ggcuucagugacuggugcccuc

SEQ ID NO: 420826 - RNA, 22 nt, Human
caaggccaagucucugugaaga

SEQ ID NO: 420827 - RNA, 22 nt, Human
acugugcacaauucuaaguccu

SEQ ID NO: 420828 - RNA, 22 nt, Human
uuuuagauaguuuaacugcacu

SEQ ID NO: 420829 - RNA, 20 nt, Human
uguacacaguacuuuacaau

SEQ ID NO: 420830 - RNA, 22 nt, Human
cugucccaggagcuguaagaca

SEQ ID NO: 420831 - RNA, 22 nt, Human
ugucagaacucuauugaugucc

SEQ ID NO: 420832 - RNA, 22 nt, Human
caaaaacugcaauuacuuuuac

SEQ ID NO: 420833 - RNA, 22 nt, Human
acagagcuaauguugcauaggc

SEQ ID NO: 420834 - RNA, 22 nt, Human
ucaucacauaugucaugauuug

SEQ ID NO: 420835 - RNA, 22 nt, Human
ugccuggguucccaccccaaag

SEQ ID NO: 420836 - RNA, 22 nt, Human
uccugcagccauuagaggucaa

SEQ ID NO: 420837 - RNA, 22 nt, Human
ugggacagagugagcuuuggcc

SEQ ID NO: 420838 - RNA, 22 nt, Human
gccuggaguagcauggcaagcc

SEQ ID NO: 420839 - RNA, 22 nt, Human
cugagccuguguuucucuggca

SEQ ID NO: 420840 - RNA, 22 nt, Human
ucagggcaucaucaugaauaua

SEQ ID NO: 420841 - RNA, 22 nt, Human
agccccuuccaguucucagauc

SEQ ID NO: 420842 - RNA, 23 nt, Human
ggccucuguguucugcccacaug

SEQ ID NO: 420843 - RNA, 22 nt, Human
ucucaggaguagugggauccau

SEQ ID NO: 420844 - RNA, 22 nt, Human
acaguggaagcaugaugcuauc

SEQ ID NO: 420845 - RNA, 22 nt, Human
aaaugcaccuugcugugagacu

SEQ ID NO: 420846 - RNA, 22 nt, Human
aaugcaguuucauuuguagaau

SEQ ID NO: 420847 - RNA, 22 nt, Human
ugugaaagucaaauuaauugaa

SEQ ID NO: 420848 - RNA, 22 nt, Human
ugaaaucugucccacuuuagcu

SEQ ID NO: 420849 - RNA, 22 nt, Human
ugcucucucaggccuggcccac

SEQ ID NO: 420850 - RNA, 22 nt, Human
uccagcagguccgagacaaguu

SEQ ID NO: 420851 - RNA, 22 nt, Human
agauguuccagccaaugggaau

SEQ ID NO: 420852 - RNA, 18 nt, Human
cugcugcaggcacucagg

SEQ ID NO: 420853 - RNA, 22 nt, Human
agccucucuuucugguggcuaa

SEQ ID NO: 420854 - RNA, 22 nt, Human
uuuuaccugaaccacacaguau

SEQ ID NO: 420855 - RNA, 22 nt, Human
uauguacauggagagcaauuga

SEQ ID NO: 420856 - RNA, 22 nt, Human
auauuucuugagcaccugguau

SEQ ID NO: 420857 - RNA, 22 nt, Human
aauuaguauugcgauucauuag

SEQ ID NO: 420858 - RNA, 20 nt, Human
ugucauuguuucuaggaccu

SEQ ID NO: 420859 - RNA, 22 nt, Human
aggguggcaguuacuggagcaa

SEQ ID NO: 420860 - RNA, 22 nt, Human
uaaagguaacaugaacugcuuu

SEQ ID NO: 420861 - RNA, 22 nt, Human
ccuacacaucucaccucacagg

SEQ ID NO: 420862 - RNA, 22 nt, Human
aauauuuuaggcuuuccaggcu

SEQ ID NO: 420863 - RNA, 22 nt, Human
auguacauuuuccuaauguuuu

SEQ ID NO: 420864 - RNA, 22 nt, Human
auuauuagacuuauaugguagu

SEQ ID NO: 420865 - RNA, 23 nt, Human
gugauuucagggaacagaaucag

SEQ ID NO: 420866 - RNA, 22 nt, Human
cccucugccugggaccaagucc

SEQ ID NO: 420867 - RNA, 22 nt, Human
ugcccugucuaagcugucagua

SEQ ID NO: 420868 - RNA, 22 nt, Human
aggacagugguguucuggagug

SEQ ID NO: 420869 - RNA, 22 nt, Human
aaauccuaaugacaaguuuagu

SEQ ID NO: 420870 - RNA, 22 nt, Human
aucagagauggcuccagugcuc

SEQ ID NO: 420871 - RNA, 22 nt, Human
uagccgcuuaauuauuugguga

SEQ ID NO: 420872 - RNA, 22 nt, Human
agcugcagugaacuguuuuguc

SEQ ID NO: 420873 - RNA, 22 nt, Human
agccagugaugaagacucugga

SEQ ID NO: 420874 - RNA, 22 nt, Human
cacaucagguagaccuacagag

SEQ ID NO: 420875 - RNA, 22 nt, Human
gccugccuagaauugcagcuuu

SEQ ID NO: 420876 - RNA, 22 nt, Human
uuauuauagauuaugcaagauu

SEQ ID NO: 420877 - RNA, 22 nt, Human
gccuggugcuaugagggccagc

SEQ ID NO: 420878 - RNA, 22 nt, Human
cagcugaagagaggugcugagu

SEQ ID NO: 420879 - RNA, 22 nt, Human
gaggccaaguuggagaccaggu

SEQ ID NO: 420880 - RNA, 22 nt, Human
agcauuuaauuacaguuuaauu

SEQ ID NO: 420881 - RNA, 22 nt, Human
uaauuauuaugacaacaauugc

SEQ ID NO: 420882 - RNA, 22 nt, Human
agcagggcuggggcacgagcca

SEQ ID NO: 420883 - RNA, 22 nt, Human
cacuggggaaaacaggcuucuu

SEQ ID NO: 420884 - RNA, 22 nt, Human
aggcuucuaggguuggcagcgg

SEQ ID NO: 420885 - RNA, 22 nt, Human
auccccagaaaauaggugccua

SEQ ID NO: 420886 - RNA, 22 nt, Human
ugcugugagguugagaaggaag

SEQ ID NO: 420887 - RNA, 22 nt, Human
cuggggcuucaaugcuucggug

SEQ ID NO: 420888 - RNA, 22 nt, Human
caggcacuggggaugcugggau

SEQ ID NO: 420889 - RNA, 22 nt, Human
ggugcccaccugucuuccugga

SEQ ID NO: 420890 - RNA, 22 nt, Human
auaagagcuagucuuuuccuug

SEQ ID NO: 420891 - RNA, 22 nt, Human
ucucccacugcaagcccaggcu

SEQ ID NO: 420892 - RNA, 22 nt, Human
ggcagcuccaaaaggaaacacu

SEQ ID NO: 420893 - RNA, 22 nt, Human
aacaaaugauuguugguuggag

SEQ ID NO: 420894 - RNA, 22 nt, Human
ucauguuuuaguaaagugaagg

SEQ ID NO: 420895 - RNA, 22 nt, Human
cucaggauguacuacagaaggc

SEQ ID NO: 420896 - RNA, 22 nt, Human
caguagccacuagacacaugua

SEQ ID NO: 420897 - RNA, 22 nt, Human
uacuuccagcaaucugcauauu

SEQ ID NO: 420898 - RNA, 22 nt, Human
cucaggauuaaggaaucuaaau

SEQ ID NO: 420899 - RNA, 22 nt, Human
aauuaguaaccuaauuccaucu

SEQ ID NO: 420900 - RNA, 22 nt, Human
uugaaucauuacaauagauaag

SEQ ID NO: 420901 - RNA, 22 nt, Human
uucucuuauucuggauaugcag

SEQ ID NO: 420902 - RNA, 22 nt, Human
agcuccugaaaagcgcuugcuu

SEQ ID NO: 420903 - RNA, 22 nt, Human
cuuuccuagauggccaucuuuc

SEQ ID NO: 420904 - RNA, 22 nt, Human
caaugguggugucagaagagau

SEQ ID NO: 420905 - RNA, 22 nt, Human
aaagcaguauauugguaguugu

SEQ ID NO: 420906 - RNA, 22 nt, Human
ccagcacugcucucagacugag

SEQ ID NO: 420907 - RNA, 22 nt, Human
uccugcagcugauaaauacagu

SEQ ID NO: 420908 - RNA, 22 nt, Human
auugaaagagaauguagcucuu

SEQ ID NO: 420909 - RNA, 22 nt, Human
aaguccagcagugcuuguugau

SEQ ID NO: 420910 - RNA, 22 nt, Human
ucuggccacccgaggccccugc

SEQ ID NO: 420911 - RNA, 21 nt, Human
ccuauugaauauaggaagauu

SEQ ID NO: 420912 - RNA, 22 nt, Human
ucucagggccucccucuguuuc

SEQ ID NO: 420913 - RNA, 22 nt, Human
acagaguaggugcugucgacug

SEQ ID NO: 420914 - RNA, 22 nt, Human
aaaagguuuugaguacaaauau

SEQ ID NO: 420915 - RNA, 22 nt, Human
uacaacauguaaagugguuuaa

SEQ ID NO: 420916 - RNA, 22 nt, Human
aggccuguuggcgugggcucua

SEQ ID NO: 420917 - RNA, 22 nt, Human
ccagagagaaauggauuugagu

SEQ ID NO: 420918 - RNA, 22 nt, Human
ucucagggaccaugaugaugac

SEQ ID NO: 420919 - RNA, 22 nt, Human
gaaaggccagcucacagaugag

SEQ ID NO: 420920 - RNA, 22 nt, Human
agcaguggaccucagugcuauu

SEQ ID NO: 420921 - RNA, 23 nt, Human
acagugugguggacaaggagcag

SEQ ID NO: 420922 - RNA, 18 nt, Human
ugaauuaguuugugguuu

SEQ ID NO: 420923 - RNA, 22 nt, Human
uucaugugaauauauuugucuu

SEQ ID NO: 420924 - RNA, 22 nt, Human
cagggcucgcucuugcccuucg

SEQ ID NO: 420925 - RNA, 22 nt, Human
gcccugagggguggugucugua

SEQ ID NO: 420926 - RNA, 22 nt, Human
ccuccugguccagcaucucuuu

SEQ ID NO: 420927 - RNA, 22 nt, Human
ccaggccuggaccaugccaggg

SEQ ID NO: 420928 - RNA, 18 nt, Human
agcuggcccuggcugccg

SEQ ID NO: 420929 - RNA, 22 nt, Human
ggcacucagagauucaggcugu

SEQ ID NO: 420930 - RNA, 22 nt, Human
ccacagcaugcaggccugacac

SEQ ID NO: 420931 - RNA, 22 nt, Human
gauuuauuggucuuucauuggu

SEQ ID NO: 420932 - RNA, 22 nt, Human
cccaagaucuuucgugcacuaa

SEQ ID NO: 420933 - RNA, 22 nt, Human
ucgggcucgcucuccuagcgga

SEQ ID NO: 420934 - RNA, 22 nt, Human
ucccaggcuaggccucugcguu

SEQ ID NO: 420935 - RNA, 22 nt, Human
agugagcauucguuuggaaccc

SEQ ID NO: 420936 - RNA, 22 nt, Human
aaacugaaacaucaucauguug

SEQ ID NO: 420937 - RNA, 22 nt, Human
cauuucuagggaucauaaagua

SEQ ID NO: 420938 - RNA, 22 nt, Human
agcucuggaauaaugaugugau

SEQ ID NO: 420939 - RNA, 17 nt, Human
ucagcaggggccaagcu

SEQ ID NO: 420940 - RNA, 22 nt, Human
uaauaucuacuucauagaguuu

SEQ ID NO: 420941 - RNA, 22 nt, Human
uagcugcugcagcacagggagg

SEQ ID NO: 420942 - RNA, 22 nt, Human
caaggccaguucaccaagggca

SEQ ID NO: 420943 - RNA, 22 nt, Human
gccugagauucugcauuucuaa

SEQ ID NO: 420944 - RNA, 22 nt, Human
ggugggcaacauuuggccugag

SEQ ID NO: 420945 - RNA, 22 nt, Human
caggagugaguuggggucuaca

SEQ ID NO: 420946 - RNA, 20 nt, Human
cugcaggguuagaggcucca

SEQ ID NO: 420947 - RNA, 22 nt, Human
gcccucucggcauagcaggggc

SEQ ID NO: 420948 - RNA, 22 nt, Human
uuagaaaucaccucugaagauc

SEQ ID NO: 420949 - RNA, 22 nt, Human
ugggcugccggcaggcucugcc

SEQ ID NO: 420950 - RNA, 22 nt, Human
gagcuggcuccgccaugcugcu

SEQ ID NO: 420951 - RNA, 22 nt, Human
uugaggagcacuagucagguau

SEQ ID NO: 420952 - RNA, 22 nt, Human
uuugcauuauauuuauagaaga

SEQ ID NO: 420953 - RNA, 18 nt, Human
gggaagccgggaagccgg

SEQ ID NO: 420954 - RNA, 22 nt, Human
aggcagggugaugauaaugauu

SEQ ID NO: 420955 - RNA, 22 nt, Human
gagcuuccacucuagaaggagu

SEQ ID NO: 420956 - RNA, 22 nt, Human
augggaugcauggcuguggcca

SEQ ID NO: 420957 - RNA, 22 nt, Human
agugugcugcuuaaacaguugu

SEQ ID NO: 420958 - RNA, 22 nt, Human
agagccagcaacucuagcccug

SEQ ID NO: 420959 - RNA, 22 nt, Human
ccaggccugauugggaaucuug

SEQ ID NO: 420960 - RNA, 22 nt, Human
uuggaaggagucaaccagcuga

SEQ ID NO: 420961 - RNA, 22 nt, Human
cugcugugaguuuggaggucua

SEQ ID NO: 420962 - RNA, 22 nt, Human
guagggacuguucucaccugag

SEQ ID NO: 420963 - RNA, 22 nt, Human
cauggcugcgagaagagugggu

SEQ ID NO: 420964 - RNA, 22 nt, Human
uaauuucuaauucauuuucagu

SEQ ID NO: 420965 - RNA, 22 nt, Human
ggccuggaagaggacagagaaa

SEQ ID NO: 420966 - RNA, 22 nt, Human
ucuguacauuuguguugugaau

SEQ ID NO: 420967 - RNA, 20 nt, Human
agagccuggaaaaagacauc

SEQ ID NO: 420968 - RNA, 22 nt, Human
ccaguggaguuuuuauacccag

SEQ ID NO: 420969 - RNA, 22 nt, Human
aggcugggaaaccugaaguugu

SEQ ID NO: 420970 - RNA, 21 nt, Human
auccauccaucuuggccuaac

SEQ ID NO: 420971 - RNA, 22 nt, Human
agcagcagauccaaaaaaugug

SEQ ID NO: 420972 - RNA, 21 nt, Human
aggcccagagucuugggggga

SEQ ID NO: 420973 - RNA, 22 nt, Human
ucccagagccaagcuauggaug

SEQ ID NO: 420974 - RNA, 19 nt, Human
agggucaggacaaggacuu

SEQ ID NO: 420975 - RNA, 22 nt, Human
aaaucuggccccuugccuauuu

SEQ ID NO: 420976 - RNA, 22 nt, Human
ccagagggcaaaaugaagcuua

SEQ ID NO: 420977 - RNA, 22 nt, Human
ucacaguaucacacaaggauua

SEQ ID NO: 420978 - RNA, 20 nt, Human
uauuucugggcaaccauuua

SEQ ID NO: 420979 - RNA, 22 nt, Human
gagaaacuaacaucugaaggug

SEQ ID NO: 420980 - RNA, 22 nt, Human
acagagcugggaucugaaccca

SEQ ID NO: 420981 - RNA, 22 nt, Human
ucaaacuagccugacugguauu

SEQ ID NO: 420982 - RNA, 22 nt, Human
aagcagaugggacuccaaggca

SEQ ID NO: 420983 - RNA, 22 nt, Human
auggacaggcugagcuuccuca

SEQ ID NO: 420984 - RNA, 22 nt, Human
ggagccuggcaaugcugcgucc

SEQ ID NO: 420985 - RNA, 22 nt, Human
cggcugagcagugcugauggaa

SEQ ID NO: 420986 - RNA, 22 nt, Human
uagcugugagcacccaggcugu

SEQ ID NO: 420987 - RNA, 22 nt, Human
agccucugcacgggcacgggug

SEQ ID NO: 420988 - RNA, 22 nt, Human
ugaaggugucuuugugaacauc

SEQ ID NO: 420989 - RNA, 22 nt, Human
gcuuuuauuucuucacaaaagu

SEQ ID NO: 420990 - RNA, 16 nt, Human
uccaggcauaucugag

SEQ ID NO: 420991 - RNA, 22 nt, Human
aagucuguuugagugucacacu

SEQ ID NO: 420992 - RNA, 22 nt, Human
acauuucuuugcuagacagcag

SEQ ID NO: 420993 - RNA, 22 nt, Human
uuccagggcuaauuccugugga

SEQ ID NO: 420994 - RNA, 23 nt, Human
aagcugccuucgcaguuggucug

SEQ ID NO: 420995 - RNA, 22 nt, Human
cugggaggcagucucucuagaa

SEQ ID NO: 420996 - RNA, 22 nt, Human
uagggacccucccugcucuaac

SEQ ID NO: 420997 - RNA, 22 nt, Human
gugucaugcacacucaguguug

SEQ ID NO: 420998 - RNA, 22 nt, Human
cagggccuccccggcagucuuu

SEQ ID NO: 420999 - RNA, 22 nt, Human
gagaggucaucucccaucagca

SEQ ID NO: 421000 - RNA, 22 nt, Human
aggaacugauuuauaacuuuag

SEQ ID NO: 421001 - RNA, 21 nt, Human
agucccaggggugagugaugu

SEQ ID NO: 421002 - RNA, 22 nt, Human
uccucucagugugguuguggga

SEQ ID NO: 421003 - RNA, 22 nt, Human
uuagggcaggcaugagagaacu

SEQ ID NO: 421004 - RNA, 22 nt, Human
aagagggaggugcgggugcaga

SEQ ID NO: 421005 - RNA, 22 nt, Human
ccagcucuagccccauguggcu

SEQ ID NO: 421006 - RNA, 22 nt, Human
augcauaauguauguauugacu

SEQ ID NO: 421007 - RNA, 22 nt, Human
gcugccugccuaguuccacagu

SEQ ID NO: 421008 - RNA, 22 nt, Human
ucacacacauaaucuaagauua

SEQ ID NO: 421009 - RNA, 22 nt, Human
auaguuuucuaugcacuguuau

SEQ ID NO: 421010 - RNA, 22 nt, Human
uauaaaguuucgaaagauguau

SEQ ID NO: 421011 - RNA, 22 nt, Human
gcugcccaguucugcugcugcc

SEQ ID NO: 421012 - RNA, 22 nt, Human
ggagccugcgggagcucccauu

SEQ ID NO: 421013 - RNA, 22 nt, Human
cuggcucccucgcugaggugcu

SEQ ID NO: 421014 - RNA, 22 nt, Human
agccucugugacucacagguca

SEQ ID NO: 421015 - RNA, 22 nt, Human
gagucccaugaugauagccaca

SEQ ID NO: 421016 - RNA, 22 nt, Human
cacaagacuuauuuguguagaa

SEQ ID NO: 421017 - RNA, 22 nt, Human
gaaaacuaacggaaaaguuagg

SEQ ID NO: 421018 - RNA, 22 nt, Human
cugcaggaauucaaagugagcu

SEQ ID NO: 421019 - RNA, 22 nt, Human
augugaggaagaaagagguaag

SEQ ID NO: 421020 - RNA, 22 nt, Human
acuuugcagagccagaagagaa

SEQ ID NO: 421021 - RNA, 22 nt, Human
agccugucugucuccaaagcug

SEQ ID NO: 421022 - RNA, 22 nt, Human
uggcuuccugcacagugucugc

SEQ ID NO: 421023 - RNA, 22 nt, Human
cuuuauguuggggugucuuagu

SEQ ID NO: 421024 - RNA, 22 nt, Human
acacccagagcgccagugccga

SEQ ID NO: 421025 - RNA, 22 nt, Human
cagaaugagauaacccagauug

SEQ ID NO: 421026 - RNA, 23 nt, Human
uauuagggccaggacuggcaaau

SEQ ID NO: 421027 - RNA, 22 nt, Human
aucagcaaucaaauugcagagu

SEQ ID NO: 421028 - RNA, 22 nt, Human
ggcagaggagcuggaaacaugg

SEQ ID NO: 421029 - RNA, 22 nt, Human
agcagcugguaggaguggccac

SEQ ID NO: 421030 - RNA, 22 nt, Human
gaggcaggcacuguuaucagca

SEQ ID NO: 421031 - RNA, 22 nt, Human
caguacuuugcaucauuccacu

SEQ ID NO: 421032 - RNA, 22 nt, Human
gaagagcuauguccagggagca

SEQ ID NO: 421033 - RNA, 22 nt, Human
cugggcagaauuuuaggauggc

SEQ ID NO: 421034 - RNA, 22 nt, Human
acauuugacauuuaguaucagc

SEQ ID NO: 421035 - RNA, 21 nt, Human
aggcucccagaaaugggcauc

SEQ ID NO: 421036 - RNA, 22 nt, Human
cugggaggacaacuuggagcuc

SEQ ID NO: 421037 - RNA, 22 nt, Human
acagagcaguucuggagcuggc

SEQ ID NO: 421038 - RNA, 22 nt, Human
ccagcuuguuugaagcucguca

SEQ ID NO: 421039 - RNA, 22 nt, Human
gaggugaguggaucacgagguc

SEQ ID NO: 421040 - RNA, 22 nt, Human
agcugacucuggccucuggucc

SEQ ID NO: 421041 - RNA, 22 nt, Human
ucucugagaaguuccuuuguga

SEQ ID NO: 421042 - RNA, 22 nt, Human
gggcugccuuucuucugggagc

SEQ ID NO: 421043 - RNA, 22 nt, Human
uaagaacaguguuucaucucua

SEQ ID NO: 421044 - RNA, 22 nt, Human
ggcugagacuagagugaggcau

SEQ ID NO: 421045 - RNA, 22 nt, Human
gcagccacagaggagggaugca

SEQ ID NO: 421046 - RNA, 22 nt, Human
gggcccuggauuuaagcaugga

SEQ ID NO: 421047 - RNA, 22 nt, Human
ucuguccauuuuccauuuuggc

SEQ ID NO: 421048 - RNA, 22 nt, Human
ccucuugccaaucagcuacaga

SEQ ID NO: 421049 - RNA, 22 nt, Human
ucccuguccugggcaaucccag

SEQ ID NO: 421050 - RNA, 22 nt, Human
ccagcuggcaggagagucaggg

SEQ ID NO: 421051 - RNA, 22 nt, Human
aucaccaggcaaaaugucagag

SEQ ID NO: 421052 - RNA, 22 nt, Human
gccuggagaaaggaagguggga

SEQ ID NO: 421053 - RNA, 22 nt, Human
gucuggggaagucagggcauca

SEQ ID NO: 421054 - RNA, 22 nt, Human
gcagagccaggagcccaggauc

SEQ ID NO: 421055 - RNA, 18 nt, Human
ccuggagcuccacagcaa

SEQ ID NO: 421056 - RNA, 22 nt, Human
aaagccagggacagugugcaug

SEQ ID NO: 421057 - RNA, 22 nt, Human
augcauugucugguuucauuuu

SEQ ID NO: 421058 - RNA, 22 nt, Human
ucuuuucuggacucugcaugga

SEQ ID NO: 421059 - RNA, 17 nt, Human
aucuggcugcuucuaga

SEQ ID NO: 421060 - RNA, 22 nt, Human
cugccuugaaaaugaagcuuua

SEQ ID NO: 421061 - RNA, 22 nt, Human
aagcucugcucagcagacuagg

SEQ ID NO: 421062 - RNA, 22 nt, Human
cacauuucucuaccucacacaa

SEQ ID NO: 421063 - RNA, 22 nt, Human
agaccacagucaggcuccuggu

SEQ ID NO: 421064 - RNA, 22 nt, Human
ggaguucacugugcaggcucug

SEQ ID NO: 421065 - RNA, 22 nt, Human
augcaguacauacaaacacuga

SEQ ID NO: 421066 - RNA, 22 nt, Human
aucagcaagauguaauuucuau

SEQ ID NO: 421067 - RNA, 21 nt, Human
caaagccaggcaacucucucc

SEQ ID NO: 421068 - RNA, 22 nt, Human
cuggaagugggguuggcuugaa

SEQ ID NO: 421069 - RNA, 22 nt, Human
uguauguaaaguuuguaauaga

SEQ ID NO: 421070 - RNA, 22 nt, Human
gccugccuuugugaggaagcgg

SEQ ID NO: 421071 - RNA, 22 nt, Human
aaagaggauggaguagucagcu

SEQ ID NO: 421072 - RNA, 22 nt, Human
uggagcagccaugaugacagag

SEQ ID NO: 421073 - RNA, 19 nt, Human
aggcagcaggccagggaug

SEQ ID NO: 421074 - RNA, 22 nt, Human
cagggccaagcugcagcaucug

SEQ ID NO: 421075 - RNA, 18 nt, Human
gccaggcaggguggggaa

SEQ ID NO: 421076 - RNA, 22 nt, Human
cagagcugguaagugguagagg

SEQ ID NO: 421077 - RNA, 22 nt, Human
uucugggacaucuggacaguuu

SEQ ID NO: 421078 - RNA, 22 nt, Human
ucaccaggcuggaaugcagugg

SEQ ID NO: 421079 - RNA, 21 nt, Human
ugcuucucuagaucaacuacu

SEQ ID NO: 421080 - RNA, 22 nt, Human
ccuaagaauuaaugaauacacc

SEQ ID NO: 421081 - RNA, 22 nt, Human
ucccuggguccugcuugcucuc

SEQ ID NO: 421082 - RNA, 22 nt, Human
uggggccugagguggagcugca

SEQ ID NO: 421083 - RNA, 22 nt, Human
uggagcugacucacaccagcua

SEQ ID NO: 421084 - RNA, 22 nt, Human
ugucuuuauauauuuggaaaau

SEQ ID NO: 421085 - RNA, 22 nt, Human
gggcccagcgugguuccaucug

SEQ ID NO: 421086 - RNA, 22 nt, Human
acugggccggugcagaguaguu

SEQ ID NO: 421087 - RNA, 21 nt, Human
uucaagauauuuaaaaggugg

SEQ ID NO: 421088 - RNA, 22 nt, Human
ggccuggcucuugcccagccug

SEQ ID NO: 421089 - RNA, 22 nt, Human
aggguccaucaaggacugcaca

SEQ ID NO: 421090 - RNA, 22 nt, Human
guuagggagggugcauaugugu

SEQ ID NO: 421091 - RNA, 22 nt, Human
ugucaugcccaggagcaaggua

SEQ ID NO: 421092 - RNA, 22 nt, Human
agcagcugaucaaagcacuuau

SEQ ID NO: 421093 - RNA, 22 nt, Human
gagaggccaaaaucccugcccc

SEQ ID NO: 421094 - RNA, 22 nt, Human
caugccaguuuugagaugcacc

SEQ ID NO: 421095 - RNA, 22 nt, Human
ucccaggugaugcugaggccac

SEQ ID NO: 421096 - RNA, 22 nt, Human
aguucaggcauaaggcaugaac

SEQ ID NO: 421097 - RNA, 22 nt, Human
caagagcuagaaauugguuaga

SEQ ID NO: 421098 - RNA, 22 nt, Human
ugcucacagcccagaacauaau

SEQ ID NO: 421099 - RNA, 22 nt, Human
auugcacaaacacagucagacu

SEQ ID NO: 421100 - RNA, 22 nt, Human
ugaggccucuugguauggugug

SEQ ID NO: 421101 - RNA, 19 nt, Human
aggacccuuauccuggcuu

SEQ ID NO: 421102 - RNA, 18 nt, Human
uugagggaggggcagagu

SEQ ID NO: 421103 - RNA, 21 nt, Human
agacagaacaacugcucucca

SEQ ID NO: 421104 - RNA, 22 nt, Human
gaguuauuuguagggauuauau

SEQ ID NO: 421105 - RNA, 22 nt, Human
cuacuuuaauuuucugcagaga

SEQ ID NO: 421106 - RNA, 22 nt, Human
cagccugcccuggaagcccagc

SEQ ID NO: 421107 - RNA, 22 nt, Human
cugucuuuucauacuuucccuc

SEQ ID NO: 421108 - RNA, 22 nt, Human
ugcucugggcaacagccucccu

SEQ ID NO: 421109 - RNA, 22 nt, Human
gaguggagaucgugccacugca

SEQ ID NO: 421110 - RNA, 22 nt, Human
ucugagcuggagcccaucaccu

SEQ ID NO: 421111 - RNA, 22 nt, Human
acagggucaagggugcuacaag

SEQ ID NO: 421112 - RNA, 22 nt, Human
auuuagaaguuggagggcaaga

SEQ ID NO: 421113 - RNA, 22 nt, Human
gugcagugagcagugcagcacc

SEQ ID NO: 421114 - RNA, 22 nt, Human
guguguccaggcgggagucaag

SEQ ID NO: 421115 - RNA, 22 nt, Human
agggagccuuccuggcuguggu

SEQ ID NO: 421116 - RNA, 22 nt, Human
uuccuucucagcccucgaggau

SEQ ID NO: 421117 - RNA, 22 nt, Human
uacaacauaacgggcauucagu

SEQ ID NO: 421118 - RNA, 22 nt, Human
gaaaacacuuugaucugaaagu

SEQ ID NO: 421119 - RNA, 22 nt, Human
aaggcacucagccuugggacag

SEQ ID NO: 421120 - RNA, 18 nt, Human
cacaggcaggugauaggu

SEQ ID NO: 421121 - RNA, 22 nt, Human
gcugccuugaacuuggccuggg

SEQ ID NO: 421122 - RNA, 22 nt, Human
aguucucagcuuaguaugcugu

SEQ ID NO: 421123 - RNA, 22 nt, Human
auccuugaaugacucugcccuc

SEQ ID NO: 421124 - RNA, 22 nt, Human
ucuccuggauggaccuucucuu

SEQ ID NO: 421125 - RNA, 22 nt, Human
gagcaacaguuuaugguuuuuc

SEQ ID NO: 421126 - RNA, 22 nt, Human
uacaaagucacauugaaaugaa

SEQ ID NO: 421127 - RNA, 22 nt, Human
auguuuauguugggcuauauuu

SEQ ID NO: 421128 - RNA, 20 nt, Human
gccugagcuccgccuccugu

SEQ ID NO: 421129 - RNA, 22 nt, Human
uuguuucaggaugguuuguuac

SEQ ID NO: 421130 - RNA, 22 nt, Human
gggacuguaaauucauauggcc

SEQ ID NO: 421131 - RNA, 22 nt, Human
uccuuucaccaaaaaguguugu

SEQ ID NO: 421132 - RNA, 22 nt, Human
aauuugauucccugcaccuguu

SEQ ID NO: 421133 - RNA, 22 nt, Human
uuuagaaauucaucuauggccu

SEQ ID NO: 421134 - RNA, 22 nt, Human
aaggugugaagagaugggaaga

SEQ ID NO: 421135 - RNA, 22 nt, Human
ggagcagagcauuucacagccu

SEQ ID NO: 421136 - RNA, 22 nt, Human
uggagcagcacaagaaagggga

SEQ ID NO: 421137 - RNA, 22 nt, Human
gggauggggggaagcguccaug

SEQ ID NO: 421138 - RNA, 22 nt, Human
cacauaauacauguuccacuua

SEQ ID NO: 421139 - RNA, 22 nt, Human
auaaaaacugacccauccuuug

SEQ ID NO: 421140 - RNA, 22 nt, Human
uccagggccaagucauggaacc

SEQ ID NO: 421141 - RNA, 22 nt, Human
ccugucuguccucucaugagcc

SEQ ID NO: 421142 - RNA, 22 nt, Human
auguggaaugaacaaaggaggc

SEQ ID NO: 421143 - RNA, 17 nt, Human
aaguccagaguugagca

SEQ ID NO: 421144 - RNA, 22 nt, Human
gugguaauagagcuccaaacua

SEQ ID NO: 421145 - RNA, 21 nt, Human
acaugucucuaaucucaguga

SEQ ID NO: 421146 - RNA, 22 nt, Human
cucugagcuccuggaagcgugc

SEQ ID NO: 421147 - RNA, 22 nt, Human
agagccacugggagacagagca

SEQ ID NO: 421148 - RNA, 19 nt, Human
gcaggguguugacuguccc

SEQ ID NO: 421149 - RNA, 22 nt, Human
ugucccagacacaguaugcgcu

SEQ ID NO: 421150 - RNA, 22 nt, Human
ugcagggauuagaggccgggga

SEQ ID NO: 421151 - RNA, 22 nt, Human
aaaguguagagacuuuggaacc

SEQ ID NO: 421152 - RNA, 22 nt, Human
ccagccagucccgcaugaccgc

SEQ ID NO: 421153 - RNA, 22 nt, Human
ccucuuugugccugcaggcugc

SEQ ID NO: 421154 - RNA, 22 nt, Human
ggcugggcucgcugauuggcug

SEQ ID NO: 421155 - RNA, 22 nt, Human
ccagaauagaaggcagcuguca

SEQ ID NO: 421156 - RNA, 22 nt, Human
ggcagcuggggcagugcccugu

SEQ ID NO: 421157 - RNA, 22 nt, Human
ucagcuuuccuugcuuuagauu

SEQ ID NO: 421158 - RNA, 22 nt, Human
ucuguacacuucagcaugcauc

SEQ ID NO: 421159 - RNA, 22 nt, Human
uguuaaucaaucaacaguauua

SEQ ID NO: 421160 - RNA, 22 nt, Human
cugccagcucucuggaggcucu

SEQ ID NO: 421161 - RNA, 22 nt, Human
aagggacuuugucagcuuucca

SEQ ID NO: 421162 - RNA, 22 nt, Human
ucugcaggaggcuggcugcagg

SEQ ID NO: 421163 - RNA, 22 nt, Human
ugcugucccuaagucucuucaa

SEQ ID NO: 421164 - RNA, 22 nt, Human
ucccacuggacgucugugcugg

SEQ ID NO: 421165 - RNA, 22 nt, Human
agacccagaaagcagcugcauu

SEQ ID NO: 421166 - RNA, 22 nt, Human
aggcccagacucagcggggcgg

SEQ ID NO: 421167 - RNA, 23 nt, Human
aaguaacagggauaauagcaguu

SEQ ID NO: 421168 - RNA, 23 nt, Human
caugccaguuugugcaggcagau

SEQ ID NO: 421169 - RNA, 22 nt, Human
aaagcugcugccaaucaggcuu

SEQ ID NO: 421170 - RNA, 23 nt, Human
cccuggaguaaauucuuggaagg

SEQ ID NO: 421171 - RNA, 21 nt, Human
aucuuuauuacgcagagaaga

SEQ ID NO: 421172 - RNA, 22 nt, Human
ucuggcucagggcucugaggga

SEQ ID NO: 421173 - RNA, 22 nt, Human
uggccugguuguugcugccguu

SEQ ID NO: 421174 - RNA, 22 nt, Human
uuagauaauguuauuguaauuu

SEQ ID NO: 421175 - RNA, 22 nt, Human
aggcagccuuuagacagucugc

SEQ ID NO: 421176 - RNA, 22 nt, Human
uggaaacuaagacuagagagac

SEQ ID NO: 421177 - RNA, 22 nt, Human
agagggcccauguugggcugcu

SEQ ID NO: 421178 - RNA, 22 nt, Human
ggcuugggagcaggcaugugac

SEQ ID NO: 421179 - RNA, 22 nt, Human
caggaugcacuaggaaccaggg

SEQ ID NO: 421180 - RNA, 22 nt, Human
agcugggcagacugcagugguu

SEQ ID NO: 421181 - RNA, 22 nt, Human
cacugcucgcugcagcauggcc

SEQ ID NO: 421182 - RNA, 22 nt, Human
ccaggcagagggaauagcaagu

SEQ ID NO: 421183 - RNA, 22 nt, Human
auuguauuagcacaauacaauu

SEQ ID NO: 421184 - RNA, 22 nt, Human
aaaugcaaggccaugugaagga

SEQ ID NO: 421185 - RNA, 22 nt, Human
gcagagcuaucuucuggauuug

SEQ ID NO: 421186 - RNA, 22 nt, Human
gggcuaggcuuggccagcacug

SEQ ID NO: 421187 - RNA, 22 nt, Human
uucaggauucuuucagacuggg

SEQ ID NO: 421188 - RNA, 22 nt, Human
gagagcuggguucaaguagcug

SEQ ID NO: 421189 - RNA, 22 nt, Human
gaggaaaauaacaacuaagggc

SEQ ID NO: 421190 - RNA, 23 nt, Human
gagagcugacugucaagacuguu

SEQ ID NO: 421191 - RNA, 22 nt, Human
cagagcccagggccuacguccc

SEQ ID NO: 421192 - RNA, 22 nt, Human
aucucagacauguuguccauga

SEQ ID NO: 421193 - RNA, 22 nt, Human
uucacauuggugauauguuucu

SEQ ID NO: 421194 - RNA, 19 nt, Human
augauacaggugaaaauug

SEQ ID NO: 421195 - RNA, 22 nt, Human
cuugugcaauugacauugaauc

SEQ ID NO: 421196 - RNA, 22 nt, Human
uggcugaggucuggggcuucug

SEQ ID NO: 421197 - RNA, 19 nt, Human
ugcucauggggacuucucc

SEQ ID NO: 421198 - RNA, 22 nt, Human
cugggcuacguguugacagcau

SEQ ID NO: 421199 - RNA, 22 nt, Human
gcugucugcugugcacugagca

SEQ ID NO: 421200 - RNA, 22 nt, Human
ccugaggcuuaaucugucccaa

SEQ ID NO: 421201 - RNA, 22 nt, Human
gcaugggcuuucucagaguucu

SEQ ID NO: 421202 - RNA, 22 nt, Human
caugaaugcuggguucauguaa

SEQ ID NO: 421203 - RNA, 17 nt, Human
acagagguuauacagac

SEQ ID NO: 421204 - RNA, 22 nt, Human
ugaggcagcuuuuucugugugu

SEQ ID NO: 421205 - RNA, 22 nt, Human
gcauggcaagaucaggagacca

SEQ ID NO: 421206 - RNA, 22 nt, Human
uggcugagggggcucugcucag

SEQ ID NO: 421207 - RNA, 22 nt, Human
cuuauaaaguccaucugaacaa

SEQ ID NO: 421208 - RNA, 22 nt, Human
ccugucucccuggcauggcuca

SEQ ID NO: 421209 - RNA, 22 nt, Human
uacaaaguuuucuuggauugag

SEQ ID NO: 421210 - RNA, 22 nt, Human
cugcucugaagccaggauucug

SEQ ID NO: 421211 - RNA, 22 nt, Human
gccugagaaggauaggaagcga

SEQ ID NO: 421212 - RNA, 22 nt, Human
uuagauaaauuaagacuuuaca

SEQ ID NO: 421213 - RNA, 22 nt, Human
augcuguagaucuuagccucua

SEQ ID NO: 421214 - RNA, 22 nt, Human
gcugaaggucucuggagagguc

SEQ ID NO: 421215 - RNA, 22 nt, Human
ucaguguccggagccugagugc

SEQ ID NO: 421216 - RNA, 22 nt, Human
cccugagaugccucacccuagu

SEQ ID NO: 421217 - RNA, 22 nt, Human
gagagcacaugaacauggagga

SEQ ID NO: 421218 - RNA, 22 nt, Human
uuugcauuaguuuagauuucaa

SEQ ID NO: 421219 - RNA, 20 nt, Human
aaaggaauauaugaaguaua

SEQ ID NO: 421220 - RNA, 22 nt, Human
auuuaugauuagccuauuguug

SEQ ID NO: 421221 - RNA, 18 nt, Human
auccuugaugagaggucu

SEQ ID NO: 421222 - RNA, 22 nt, Human
uucaucuugauggcuuccuaau

SEQ ID NO: 421223 - RNA, 22 nt, Human
ggccaggcugguuccuugaccu

SEQ ID NO: 421224 - RNA, 18 nt, Human
agagcagcggcaucacac

SEQ ID NO: 421225 - RNA, 22 nt, Human
uuuauuccaugugucuaugacc

SEQ ID NO: 421226 - RNA, 22 nt, Human
uauuuguauguguguacauaua

SEQ ID NO: 421227 - RNA, 22 nt, Human
aaccugcauguuucuaaaagca

SEQ ID NO: 421228 - RNA, 22 nt, Human
gagcucauucauucauugccug

SEQ ID NO: 421229 - RNA, 22 nt, Human
aagguacaaaguauuauuuaaa

SEQ ID NO: 421230 - RNA, 22 nt, Human
acagaguagcucaagaagauug

SEQ ID NO: 421231 - RNA, 22 nt, Human
aacuuucaggcaaugaauauuu

SEQ ID NO: 421232 - RNA, 22 nt, Human
uggaagggagugacagucagag

SEQ ID NO: 421233 - RNA, 22 nt, Human
gagugcaucguggccauuuuaa

SEQ ID NO: 421234 - RNA, 22 nt, Human
uggccuccccuaacagccucuu

SEQ ID NO: 421235 - RNA, 22 nt, Human
cuacagcagagcuacacuaacu

SEQ ID NO: 421236 - RNA, 22 nt, Human
auccucagaccucagcaaagcc

SEQ ID NO: 421237 - RNA, 18 nt, Human
ccagguggugacagagau

SEQ ID NO: 421238 - RNA, 22 nt, Human
gagagcugggcuuugggugaag

SEQ ID NO: 421239 - RNA, 23 nt, Human
gcagauggccccagagugcugcc

SEQ ID NO: 421240 - RNA, 22 nt, Human
agcagagcggggccuccggaag

SEQ ID NO: 421241 - RNA, 18 nt, Human
ugacucacccugucagug

SEQ ID NO: 421242 - RNA, 22 nt, Human
aggcaggaaaaucgcuugaacc

SEQ ID NO: 421243 - RNA, 22 nt, Human
accucccagcucugagcuuggg

SEQ ID NO: 421244 - RNA, 21 nt, Human
gcucagaguauugcacuguuu

SEQ ID NO: 421245 - RNA, 22 nt, Human
ucagaacagaagcuggcuauaa

SEQ ID NO: 421246 - RNA, 22 nt, Human
ugccaggcuaaguggaggacuu

SEQ ID NO: 421247 - RNA, 22 nt, Human
agugaaauaugcccauugcugu

SEQ ID NO: 421248 - RNA, 22 nt, Human
gcucuguguccacagcuggaaa

SEQ ID NO: 421249 - RNA, 22 nt, Human
aaaaugugcaguuuuuaagcug

SEQ ID NO: 421250 - RNA, 22 nt, Human
cugagcugguggaagcaugcag

SEQ ID NO: 421251 - RNA, 22 nt, Human
ggcagccagcaaugagaaguuu

SEQ ID NO: 421252 - RNA, 22 nt, Human
cagagcugcagauugaaggcau

SEQ ID NO: 421253 - RNA, 22 nt, Human
ucucaaacuaacaaugauuaua

SEQ ID NO: 421254 - RNA, 22 nt, Human
gccacaugcaauugcagcacgu

SEQ ID NO: 421255 - RNA, 22 nt, Human
aacaaauguguggcaguguggg

SEQ ID NO: 421256 - RNA, 22 nt, Human
aggagggagcuuaagccaggca

SEQ ID NO: 421257 - RNA, 22 nt, Human
ggcagucagugugguucauaaa

SEQ ID NO: 421258 - RNA, 22 nt, Human
agcagcagaagggagacccagg

SEQ ID NO: 421259 - RNA, 22 nt, Human
guccaguguguuuaucuuggau

SEQ ID NO: 421260 - RNA, 22 nt, Human
gugcaugugucuuuauaguagc

SEQ ID NO: 421261 - RNA, 22 nt, Human
ugugaaggcagagccagugaaa

SEQ ID NO: 421262 - RNA, 22 nt, Human
acacacaacucauuguguaaua

SEQ ID NO: 421263 - RNA, 22 nt, Human
ggcucagguuuaaagugcuuua

SEQ ID NO: 421264 - RNA, 22 nt, Human
cauuguuauagcauuacacacc

SEQ ID NO: 421265 - RNA, 22 nt, Human
uggcucugugucucccagcagc

SEQ ID NO: 421266 - RNA, 19 nt, Human
aagaagcaauaagcuguga

SEQ ID NO: 421267 - RNA, 22 nt, Human
gcagcuuucuaagcuuuauugc

SEQ ID NO: 421268 - RNA, 22 nt, Human
uccaaagggaagcgcuuucugu

SEQ ID NO: 421269 - RNA, 22 nt, Human
augauggugagguugagcacag

SEQ ID NO: 421270 - RNA, 20 nt, Human
ggcugccuccuuccuuuccu

SEQ ID NO: 421271 - RNA, 22 nt, Human
gcuguggcugaccaccaggggg

SEQ ID NO: 421272 - RNA, 21 nt, Human
agcaacucugacuagaugagg

SEQ ID NO: 421273 - RNA, 22 nt, Human
uaggacaggugaggggcugugg

SEQ ID NO: 421274 - RNA, 20 nt, Human
cugcuguguuauuguagaac

SEQ ID NO: 421275 - RNA, 22 nt, Human
aaggcagcagugcacgacugau

SEQ ID NO: 421276 - RNA, 22 nt, Human
cugaggccuaagacaugaauga

SEQ ID NO: 421277 - RNA, 22 nt, Human
ucuggccugggccugccggugc

SEQ ID NO: 421278 - RNA, 22 nt, Human
ccuccaguacuccaguccagcg

SEQ ID NO: 421279 - RNA, 22 nt, Human
gaaacuuuuaaaccucaugagu

SEQ ID NO: 421280 - RNA, 22 nt, Human
acagagcugggugcccccugga

SEQ ID NO: 421281 - RNA, 23 nt, Human
gcuguacaggaaccaguuuggag

SEQ ID NO: 421282 - RNA, 17 nt, Human
aggcauggucuggggug

SEQ ID NO: 421283 - RNA, 22 nt, Human
uuuaaauuauaguuaaugucug

SEQ ID NO: 421284 - RNA, 22 nt, Human
ucaccacugaacagaccuuugg

SEQ ID NO: 421285 - RNA, 22 nt, Human
uggcuuccuccagagcaggagg

SEQ ID NO: 421286 - RNA, 20 nt, Human
acauccuggugacuagaacu

SEQ ID NO: 421287 - RNA, 22 nt, Human
ggagggagucagcugauuagaa

SEQ ID NO: 421288 - RNA, 22 nt, Human
uugcagagaucagcagguuuga

SEQ ID NO: 421289 - RNA, 20 nt, Human
ccucucugaagaggucaucu

SEQ ID NO: 421290 - RNA, 22 nt, Human
caggcagcugcuggguucagcc

SEQ ID NO: 421291 - RNA, 17 nt, Human
ugaggccugcaucagug

SEQ ID NO: 421292 - RNA, 22 nt, Human
ggcggggguccaggagccugca

SEQ ID NO: 421293 - RNA, 22 nt, Human
aggaaaaucgagucuggaggca

SEQ ID NO: 421294 - RNA, 22 nt, Human
ucuagggaacaugggucaagcu

SEQ ID NO: 421295 - RNA, 22 nt, Human
auguucuguuuuguaauucaua

SEQ ID NO: 421296 - RNA, 20 nt, Human
cucuccucacccgugucagg

SEQ ID NO: 421297 - RNA, 21 nt, Human
uagggcucucugugucaggug

SEQ ID NO: 421298 - RNA, 22 nt, Human
auuuagaaauuccaaaaguauu

SEQ ID NO: 421299 - RNA, 21 nt, Human
gccugcagaccccaccaggcu

SEQ ID NO: 421300 - RNA, 20 nt, Human
uagauuucauacuucucuuu

SEQ ID NO: 421301 - RNA, 17 nt, Human
cagugcagagcccuuuc

SEQ ID NO: 421302 - RNA, 22 nt, Human
cugagguggaacagaggugaag

SEQ ID NO: 421303 - RNA, 17 nt, Human
cauguguaugugggagu

SEQ ID NO: 421304 - RNA, 22 nt, Human
ggcagcagaacuggcccuguau

SEQ ID NO: 421305 - RNA, 22 nt, Human
accaggcuggagugcaguggcg

SEQ ID NO: 421306 - RNA, 22 nt, Human
ugucuucaguaaaauacacuau

SEQ ID NO: 421307 - RNA, 22 nt, Human
ugucccaggccucauguugcca

SEQ ID NO: 421308 - RNA, 22 nt, Human
agggucugacaaugugacuuag

SEQ ID NO: 421309 - RNA, 22 nt, Human
agcccuucaaccugccuacucc

SEQ ID NO: 421310 - RNA, 22 nt, Human
ugggcuguggagcaccuuugca

SEQ ID NO: 421311 - RNA, 22 nt, Human
cauguuuucuaggcuuucacaa

SEQ ID NO: 421312 - RNA, 22 nt, Human
gcagauggaaagugcuugaggg

SEQ ID NO: 421313 - RNA, 22 nt, Human
auaguguuacccuucuuaaagu

SEQ ID NO: 421314 - RNA, 22 nt, Human
gcucccugccuacacggaccuu

SEQ ID NO: 421315 - RNA, 22 nt, Human
uggcuugucauguaucugaggc

SEQ ID NO: 421316 - RNA, 22 nt, Human
gcugaagggagugcugagucug

SEQ ID NO: 421317 - RNA, 22 nt, Human
cagcccucagguccucagcagc

SEQ ID NO: 421318 - RNA, 22 nt, Human
aagggcagagggaaucccacau

SEQ ID NO: 421319 - RNA, 22 nt, Human
cuuaauuucaaacugcuaguga

SEQ ID NO: 421320 - RNA, 22 nt, Human
ggaggccuagccagcuccaguu

SEQ ID NO: 421321 - RNA, 22 nt, Human
ccugcagaccacacucaguccu

SEQ ID NO: 421322 - RNA, 22 nt, Human
gaaauccaguucccuacucuua

SEQ ID NO: 421323 - RNA, 22 nt, Human
uucacaggauauaugugcaggg

SEQ ID NO: 421324 - RNA, 22 nt, Human
ucagagaaguaagguggggugc

SEQ ID NO: 421325 - RNA, 22 nt, Human
ccaggcugcagucaaggggcau

SEQ ID NO: 421326 - RNA, 22 nt, Human
agagccaggaaguggcgugggg

SEQ ID NO: 421327 - RNA, 22 nt, Human
uaacagaaguuguucauugugg

SEQ ID NO: 421328 - RNA, 22 nt, Human
cugcaggcucgaagacacggau

SEQ ID NO: 421329 - RNA, 22 nt, Human
uaauuuacuugcaaauaacaau

SEQ ID NO: 421330 - RNA, 22 nt, Human
caggaaagguagucacaaugua

SEQ ID NO: 421331 - RNA, 22 nt, Human
ggcagcucugcuccacaugagu

SEQ ID NO: 421332 - RNA, 22 nt, Human
ugucaugcagguuuguuauaga

SEQ ID NO: 421333 - RNA, 22 nt, Human
augggggccugaacaggcaaaa

SEQ ID NO: 421334 - RNA, 22 nt, Human
uagaaauccccagucucauagu

SEQ ID NO: 421335 - RNA, 22 nt, Human
aauacagaggggucacaauuca

SEQ ID NO: 421336 - RNA, 22 nt, Human
augauugcagcccuacagcugu

SEQ ID NO: 421337 - RNA, 22 nt, Human
aggcugaggugugcugugaucg

SEQ ID NO: 421338 - RNA, 22 nt, Human
ucagggugaaccaggcaggaau

SEQ ID NO: 421339 - RNA, 22 nt, Human
cucugucccagacccaccucuc

SEQ ID NO: 421340 - RNA, 22 nt, Human
aacaaaugauaccaguucucaa

SEQ ID NO: 421341 - RNA, 22 nt, Human
cagaggcucuuccucacugccc

SEQ ID NO: 421342 - RNA, 19 nt, Human
gcccugcaggagguggggc

SEQ ID NO: 421343 - RNA, 22 nt, Human
cuucuugcaauuuucaucuuau

SEQ ID NO: 421344 - RNA, 22 nt, Human
ggcugccacgucgaggguccaa

SEQ ID NO: 421345 - RNA, 18 nt, Human
acauuucuccuucugacc

SEQ ID NO: 421346 - RNA, 22 nt, Human
gagcuuuaccuuagguucuguu

SEQ ID NO: 421347 - RNA, 22 nt, Human
cucaggacccgguccagguggg

SEQ ID NO: 421348 - RNA, 19 nt, Human
uuugugaagaaaaugaugc

SEQ ID NO: 421349 - RNA, 22 nt, Human
gcagagccagaauggccaggac

SEQ ID NO: 421350 - RNA, 22 nt, Human
cuugaaagcacuuaguaaauua

SEQ ID NO: 421351 - RNA, 22 nt, Human
ggggccagcuucgcgugcucuu

SEQ ID NO: 421352 - RNA, 22 nt, Human
cagggcugaacugagcuuguga

SEQ ID NO: 421353 - RNA, 22 nt, Human
gcccaggccggagagcagugcu

SEQ ID NO: 421354 - RNA, 22 nt, Human
ucucagugcuauccauauucca

SEQ ID NO: 421355 - RNA, 22 nt, Human
aacaugauggggaagaacaaga

SEQ ID NO: 421356 - RNA, 22 nt, Human
gugugcaugcauagacaccaca

SEQ ID NO: 421357 - RNA, 22 nt, Human
cacagccuugagcgaggacaag

SEQ ID NO: 421358 - RNA, 22 nt, Human
auuucuuccucugucaguaacu

SEQ ID NO: 421359 - RNA, 22 nt, Human
ccagggcaggggcuggaguuca

SEQ ID NO: 421360 - RNA, 22 nt, Human
cugccagcucaaagcgcagcua

SEQ ID NO: 421361 - RNA, 22 nt, Human
gcuggccauucucuuugagaug

SEQ ID NO: 421362 - RNA, 22 nt, Human
gaugguuugguaaaaguauguu

SEQ ID NO: 421363 - RNA, 23 nt, Human
ugacacauuuccuuuccacugca

SEQ ID NO: 421364 - RNA, 22 nt, Human
cagcuuuauugagguauaauug

SEQ ID NO: 421365 - RNA, 22 nt, Human
ggguuccuccaguuccuagagc

SEQ ID NO: 421366 - RNA, 22 nt, Human
agagaacacgugcaucugcaau

SEQ ID NO: 421367 - RNA, 22 nt, Human
caagggaccugagauggucucu

SEQ ID NO: 421368 - RNA, 22 nt, Human
cacugcuuucacaguuuguucc

SEQ ID NO: 421369 - RNA, 22 nt, Human
gaggcucagagacuuuaaguuu

SEQ ID NO: 421370 - RNA, 22 nt, Human
cagagcauuaaaaccagcucug

SEQ ID NO: 421371 - RNA, 22 nt, Human
cagagcuguugcggggcuuggc

SEQ ID NO: 421372 - RNA, 22 nt, Human
agcagccagagucugaacauua

SEQ ID NO: 421373 - RNA, 20 nt, Human
cccagggaccugagcuccau

SEQ ID NO: 421374 - RNA, 22 nt, Human
caaugauucugcaacugugugc

SEQ ID NO: 421375 - RNA, 22 nt, Human
ucugagaggauuccugucccga

SEQ ID NO: 421376 - RNA, 22 nt, Human
cuguagccaguuuggccucacc

SEQ ID NO: 421377 - RNA, 22 nt, Human
cucacaggagaaagucaugguc

SEQ ID NO: 421378 - RNA, 22 nt, Human
cagggccaaguuggugccuuuu

SEQ ID NO: 421379 - RNA, 22 nt, Human
ccuggcucucugcagauccugg

SEQ ID NO: 421380 - RNA, 19 nt, Human
acauggcaucccaggaggu

SEQ ID NO: 421381 - RNA, 22 nt, Human
ugugaaaggagccauagacagu

SEQ ID NO: 421382 - RNA, 22 nt, Human
gggagaaguggaaaucucauua

SEQ ID NO: 421383 - RNA, 22 nt, Human
ggcugccuucagacuccagcuu

SEQ ID NO: 421384 - RNA, 22 nt, Human
aagcugccauagaacgagaggu

SEQ ID NO: 421385 - RNA, 22 nt, Human
gauuucaaggaguuuucacagu

SEQ ID NO: 421386 - RNA, 22 nt, Human
gugcaugaagacucagaaaguc

SEQ ID NO: 421387 - RNA, 22 nt, Human
cccauuuaucccaagguuacuc

SEQ ID NO: 421388 - RNA, 22 nt, Human
auauuaggaguuaaauguauua

SEQ ID NO: 421389 - RNA, 22 nt, Human
gccucugcccuccugggacugc

SEQ ID NO: 421390 - RNA, 20 nt, Human
aguaccuuuuguauguuacc

SEQ ID NO: 421391 - RNA, 22 nt, Human
cacugucuuuugugaagacaau

SEQ ID NO: 421392 - RNA, 22 nt, Human
ggcuccacugcugaccacucca

SEQ ID NO: 421393 - RNA, 22 nt, Human
augaggcaaggaucagguaagg

SEQ ID NO: 421394 - RNA, 22 nt, Human
uccuugaagagugggcggucga

SEQ ID NO: 421395 - RNA, 22 nt, Human
caaauccagaucccagucguag

SEQ ID NO: 421396 - RNA, 22 nt, Human
uacagaauuagauuauuagaga

SEQ ID NO: 421397 - RNA, 22 nt, Human
ucugccugcggcugcagguggc

SEQ ID NO: 421398 - RNA, 22 nt, Human
aaggcaguuaauuuggcuagaa

SEQ ID NO: 421399 - RNA, 19 nt, Human
uggaggagaggaaaaguca

SEQ ID NO: 421400 - RNA, 22 nt, Human
augguuuguguggcccagauga

SEQ ID NO: 421401 - RNA, 22 nt, Human
gcuggggagggcgucaaggcca

SEQ ID NO: 421402 - RNA, 22 nt, Human
uccagaccaugugagaggcgca

SEQ ID NO: 421403 - RNA, 22 nt, Human
gcugcaggcauuuuccugggca

SEQ ID NO: 421404 - RNA, 22 nt, Human
cugcuguguuccuccugcaucu

SEQ ID NO: 421405 - RNA, 19 nt, Human
uggcaggcccaggauggac

SEQ ID NO: 421406 - RNA, 22 nt, Human
cuuccagagauagggccucaag

SEQ ID NO: 421407 - RNA, 22 nt, Human
uucuacacucacccagcuguaa

SEQ ID NO: 421408 - RNA, 22 nt, Human
aucuggcuuuuaccccacggcc

SEQ ID NO: 421409 - RNA, 22 nt, Human
auugucuuuggugcuuccagga

SEQ ID NO: 421410 - RNA, 22 nt, Human
cugcccugugaggguccuuggg

SEQ ID NO: 421411 - RNA, 19 nt, Human
ggcugccuuuccuuaccag

SEQ ID NO: 421412 - RNA, 22 nt, Human
uccuucaggguugaggccgacu

SEQ ID NO: 421413 - RNA, 22 nt, Human
aucuagaaguggcaugaauuac

SEQ ID NO: 421414 - RNA, 22 nt, Human
ugaggcaggagaaucaccggaa

SEQ ID NO: 421415 - RNA, 22 nt, Human
ucuuguccuaagagcuggauuc

SEQ ID NO: 421416 - RNA, 22 nt, Human
cucagcagugacaagagaguau

SEQ ID NO: 421417 - RNA, 22 nt, Human
uagcuuuagugaaaaauaucag

SEQ ID NO: 421418 - RNA, 21 nt, Human
ggccuuggcgggggccgaauu

SEQ ID NO: 421419 - RNA, 22 nt, Human
gccugagcccaggugugcagag

SEQ ID NO: 421420 - RNA, 22 nt, Human
gggcaguggcucacgccuguaa

SEQ ID NO: 421421 - RNA, 22 nt, Human
auucccaucgucaacuucacug

SEQ ID NO: 421422 - RNA, 19 nt, Human
ugucacugucauggcccag

SEQ ID NO: 421423 - RNA, 22 nt, Human
cacuggcaugugaggcgguggc

SEQ ID NO: 421424 - RNA, 23 nt, Human
ugccagaggcagucacaguggug

SEQ ID NO: 421425 - RNA, 22 nt, Human
uuuugaaagggugauuuggcuu

SEQ ID NO: 421426 - RNA, 22 nt, Human
uagggcucuggugggcucuguu

SEQ ID NO: 421427 - RNA, 22 nt, Human
uucucuugugccaaguuguugc

SEQ ID NO: 421428 - RNA, 22 nt, Human
aguacauuuauuaaugguaaaa

SEQ ID NO: 421429 - RNA, 22 nt, Human
ugggcucugcugcguaccaguu

SEQ ID NO: 421430 - RNA, 22 nt, Human
gcaggagugacauggaugugga

SEQ ID NO: 421431 - RNA, 22 nt, Human
gcagcugcaggcaggcuugcug

SEQ ID NO: 421432 - RNA, 22 nt, Human
cagagccagaacuagaccuugu

SEQ ID NO: 421433 - RNA, 22 nt, Human
uguacaaugccgagacuaacuc

SEQ ID NO: 421434 - RNA, 22 nt, Human
ugcugccagagagacagggacu

SEQ ID NO: 421435 - RNA, 22 nt, Human
aggagccaugagugacaucaca

SEQ ID NO: 421436 - RNA, 22 nt, Human
ugcugccuucuaggcgugcccu

SEQ ID NO: 421437 - RNA, 22 nt, Human
uugcaagacacuuggaagcaca

SEQ ID NO: 421438 - RNA, 22 nt, Human
gcagggcaaugaucccgagagg

SEQ ID NO: 421439 - RNA, 23 nt, Human
aaaguguagccagguuaagaacc

SEQ ID NO: 421440 - RNA, 19 nt, Human
auuuccaagaauuggagag

SEQ ID NO: 421441 - RNA, 22 nt, Human
gugcagggcuggcaccggaggc

SEQ ID NO: 421442 - RNA, 22 nt, Human
ucaaaggcuugugguucuggga

SEQ ID NO: 421443 - RNA, 22 nt, Human
uguaugcaaauuuauuagcaca

SEQ ID NO: 421444 - RNA, 22 nt, Human
ucaggacagccagggugcagac

SEQ ID NO: 421445 - RNA, 22 nt, Human
aacucuauuuacccuacuaaac

SEQ ID NO: 421446 - RNA, 22 nt, Human
ggcagaagauaggacagggaau

SEQ ID NO: 421447 - RNA, 20 nt, Human
ggggcaguggcucaugccug

SEQ ID NO: 421448 - RNA, 22 nt, Human
gccucugcaucaucacuccagc

SEQ ID NO: 421449 - RNA, 22 nt, Human
auuauuaaagcuuaggucuuau

SEQ ID NO: 421450 - RNA, 22 nt, Human
gcuggccugggcucaagaccag

SEQ ID NO: 421451 - RNA, 22 nt, Human
aaggucauggcaaauuacuuuu

SEQ ID NO: 421452 - RNA, 22 nt, Human
acuuaaaaccagacagcgucau

SEQ ID NO: 421453 - RNA, 22 nt, Human
uggcaggguggcaacuuuuggu

SEQ ID NO: 421454 - RNA, 17 nt, Human
cagcuuuaugcuacugu

SEQ ID NO: 421455 - RNA, 22 nt, Human
gcucagaggagcaucauaagga

SEQ ID NO: 421456 - RNA, 22 nt, Human
gcucacugcaaccucugcuucc

SEQ ID NO: 421457 - RNA, 22 nt, Human
ccucccucuuucagucccacag

SEQ ID NO: 421458 - RNA, 22 nt, Human
ugggcuccuugggagcaaguga

SEQ ID NO: 421459 - RNA, 22 nt, Human
ggcuucucucccccagcuccac

SEQ ID NO: 421460 - RNA, 22 nt, Human
agggccaccucucuggguuccc

SEQ ID NO: 421461 - RNA, 22 nt, Human
uucuaguuuagggcucuucaac

SEQ ID NO: 421462 - RNA, 22 nt, Human
gcaagauguuaacauagggaga

SEQ ID NO: 421463 - RNA, 22 nt, Human
uuacaaagcguugagacaagua

SEQ ID NO: 421464 - RNA, 22 nt, Human
uggcucugaccagguagaggag

SEQ ID NO: 421465 - RNA, 22 nt, Human
cagguggguacaucacagagac

SEQ ID NO: 421466 - RNA, 22 nt, Human
ugccugucuuuccucccucgua

SEQ ID NO: 421467 - RNA, 22 nt, Human
aagaacaguguccugggacucg

SEQ ID NO: 421468 - RNA, 22 nt, Human
uggcucugucaaacugcacaca

SEQ ID NO: 421469 - RNA, 22 nt, Human
ggagcacccugcucagccaagc

SEQ ID NO: 421470 - RNA, 22 nt, Human
uauuuucuggacagucuugcuu

SEQ ID NO: 421471 - RNA, 22 nt, Human
cugggaggcaccgcgucgugcu

SEQ ID NO: 421472 - RNA, 22 nt, Human
uggcucaggccuacgacgccuu

SEQ ID NO: 421473 - RNA, 22 nt, Human
uucuccccugacccugaugagg

SEQ ID NO: 421474 - RNA, 22 nt, Human
cccaggacucggcacucuccuu

SEQ ID NO: 421475 - RNA, 22 nt, Human
agcuggccuucggugucacugg

SEQ ID NO: 421476 - RNA, 22 nt, Human
uggcuuccaaaggaaugggccu

SEQ ID NO: 421477 - RNA, 22 nt, Human
agggagcucaguuggaagcggu

SEQ ID NO: 421478 - RNA, 22 nt, Human
gagguagccacagauagagacu

SEQ ID NO: 421479 - RNA, 21 nt, Human
ggagauggguaucgccugggc

SEQ ID NO: 421480 - RNA, 22 nt, Human
gagggcagaaaauuaugcggug

SEQ ID NO: 421481 - RNA, 22 nt, Human
uuaaguccuugguaauuuucuu

SEQ ID NO: 421482 - RNA, 22 nt, Human
ucaggcacugcuuucugauaug

SEQ ID NO: 421483 - RNA, 22 nt, Human
aaugaucuacucucauuaucuc

SEQ ID NO: 421484 - RNA, 22 nt, Human
gaugcacaugugaguauagaag

SEQ ID NO: 421485 - RNA, 22 nt, Human
aggccagaugucgggcuagaag

SEQ ID NO: 421486 - RNA, 22 nt, Human
cugggcugcgggcgccccucca

SEQ ID NO: 421487 - RNA, 22 nt, Human
guguaucaaagcacagacuuca

SEQ ID NO: 421488 - RNA, 22 nt, Human
aaugcuuuagcagugauuagug

SEQ ID NO: 421489 - RNA, 22 nt, Human
gguggccucucaugcaagguag

SEQ ID NO: 421490 - RNA, 21 nt, Human
ugcuccuuagcugccccugcc

SEQ ID NO: 421491 - RNA, 22 nt, Human
cagacacaccaggcccauucug

SEQ ID NO: 421492 - RNA, 22 nt, Human
aggaagcaaaaggcagggucua

SEQ ID NO: 421493 - RNA, 18 nt, Human
uccagagcuacuguggug

SEQ ID NO: 421494 - RNA, 22 nt, Human
cagcuuauucaguaagcacaua

SEQ ID NO: 421495 - RNA, 22 nt, Human
cagggccaguucucgcagcagu

SEQ ID NO: 421496 - RNA, 22 nt, Human
ugcaccauuaauuuaugugaga

SEQ ID NO: 421497 - RNA, 22 nt, Human
gcaggccagcugugcagauggg

SEQ ID NO: 421498 - RNA, 22 nt, Human
gucaggcugccagucuuuauug

SEQ ID NO: 421499 - RNA, 21 nt, Human
acaggcucuggggaugcuggg

SEQ ID NO: 421500 - RNA, 22 nt, Human
ccaaggcuccucagcuggucuu

SEQ ID NO: 421501 - RNA, 22 nt, Human
ugguuuauuucucugaaagguu

SEQ ID NO: 421502 - RNA, 22 nt, Human
ugcagggcaguggagguugagu

SEQ ID NO: 421503 - RNA, 22 nt, Human
cccuggagcugcuugcauguug

SEQ ID NO: 421504 - RNA, 22 nt, Human
uagaaagcuugggguguuuaaa

SEQ ID NO: 421505 - RNA, 22 nt, Human
ugaggcucugcuucuguggcuc

SEQ ID NO: 421506 - RNA, 22 nt, Human
agcuuccuguugagagagggag

SEQ ID NO: 421507 - RNA, 22 nt, Human
ccuggcagacagcacugaagcu

SEQ ID NO: 421508 - RNA, 22 nt, Human
uccugagagcagaguccaggug

SEQ ID NO: 421509 - RNA, 22 nt, Human
gcugcagcccggcgcgccugag

SEQ ID NO: 421510 - RNA, 22 nt, Human
ucagagaguuggaaagaauuaa

SEQ ID NO: 421511 - RNA, 23 nt, Human
aggugcagcccuggaccugcccc

SEQ ID NO: 421512 - RNA, 22 nt, Human
ugcuuaauauugugauguaaua

SEQ ID NO: 421513 - RNA, 22 nt, Human
aucaguuuaaaugggcuguugg

SEQ ID NO: 421514 - RNA, 22 nt, Human
cuuucacagcacaagccugccu

SEQ ID NO: 421515 - RNA, 22 nt, Human
gcucugcuggaaguucucugga

SEQ ID NO: 421516 - RNA, 22 nt, Human
caggaggaggguacaccaucag

SEQ ID NO: 421517 - RNA, 22 nt, Human
ccuuuugcucucccauccagaa

SEQ ID NO: 421518 - RNA, 21 nt, Human
auugaaagucaacaaucaguu

SEQ ID NO: 421519 - RNA, 22 nt, Human
augggcagcagcugccauucau

SEQ ID NO: 421520 - RNA, 17 nt, Human
aggccucccuccaggcc

SEQ ID NO: 421521 - RNA, 18 nt, Human
gcugagguggugucagag

SEQ ID NO: 421522 - RNA, 20 nt, Human
ugggccugagccugugggcu

SEQ ID NO: 421523 - RNA, 22 nt, Human
accucugcaacccuggaauggg

SEQ ID NO: 421524 - RNA, 22 nt, Human
ugaggcaguauuuuagugacuu

SEQ ID NO: 421525 - RNA, 22 nt, Human
ugcuggaggaguuuacuguggc

SEQ ID NO: 421526 - RNA, 22 nt, Human
cagggcaguuugugccuaugag

SEQ ID NO: 421527 - RNA, 22 nt, Human
gcucuggagauggagccuugag

SEQ ID NO: 421528 - RNA, 22 nt, Human
caugcuuucuguccaaauguua

SEQ ID NO: 421529 - RNA, 22 nt, Human
uauguacagggauagaacuuga

SEQ ID NO: 421530 - RNA, 22 nt, Human
uacauucuacuuuuucacuccc

SEQ ID NO: 421531 - RNA, 22 nt, Human
agggcuggagccacagcuggga

SEQ ID NO: 421532 - RNA, 22 nt, Human
aagccaggcaugcuuggacagu

SEQ ID NO: 421533 - RNA, 22 nt, Human
uacuguuuuuuagacucauggu

SEQ ID NO: 421534 - RNA, 22 nt, Human
ggcucaagcagucugccugccu

SEQ ID NO: 421535 - RNA, 22 nt, Human
cagggcaguaacgggaacaucu

SEQ ID NO: 421536 - RNA, 22 nt, Human
ugugaaaggggucacagggaaa

SEQ ID NO: 421537 - RNA, 22 nt, Human
agauguaguagugggucuuuua

SEQ ID NO: 421538 - RNA, 22 nt, Human
aaugcuuugacuauaucuauaa

SEQ ID NO: 421539 - RNA, 22 nt, Human
acauuuaggauguuuugagaga

SEQ ID NO: 421540 - RNA, 23 nt, Human
aggcccaacucugugagggcugc

SEQ ID NO: 421541 - RNA, 22 nt, Human
uuguuucaugaguguaaaggga

SEQ ID NO: 421542 - RNA, 22 nt, Human
ucuaaaaaagucuguucacuug

SEQ ID NO: 421543 - RNA, 22 nt, Human
cucuguccuaugcuugauagaa

SEQ ID NO: 421544 - RNA, 22 nt, Human
aaaauccacaacgcucauuuca

SEQ ID NO: 421545 - RNA, 22 nt, Human
uggccugguaccacauagauuu

SEQ ID NO: 421546 - RNA, 20 nt, Human
ccaagagcaugcaugaggaa

SEQ ID NO: 421547 - RNA, 22 nt, Human
uaagaaauuuaguuauagaaug

SEQ ID NO: 421548 - RNA, 22 nt, Human
cauuaugugggaaaauguucuu

SEQ ID NO: 421549 - RNA, 22 nt, Human
aauguacaucucaguguaguac

SEQ ID NO: 421550 - RNA, 22 nt, Human
acguggagagaauagggcacca

SEQ ID NO: 421551 - RNA, 22 nt, Human
ucugggagagcugcugucagag

SEQ ID NO: 421552 - RNA, 22 nt, Human
ugugggcucccccucacucugu

SEQ ID NO: 421553 - RNA, 22 nt, Human
gggcaaguccggugcccagagc

SEQ ID NO: 421554 - RNA, 20 nt, Human
ccuggaagagcuccccaggc

SEQ ID NO: 421555 - RNA, 22 nt, Human
augaugugugcugaucaagcuu

SEQ ID NO: 421556 - RNA, 22 nt, Human
ccagucacuggaaaaugggaau

SEQ ID NO: 421557 - RNA, 22 nt, Human
agguggggaggagugucucuuu

SEQ ID NO: 421558 - RNA, 22 nt, Human
aggcagagaaaaaccagauaug

SEQ ID NO: 421559 - RNA, 22 nt, Human
ugggcugcuguuacaggggcug

SEQ ID NO: 421560 - RNA, 22 nt, Human
acaaaauuaccuaguuauuuuc

SEQ ID NO: 421561 - RNA, 22 nt, Human
guucauauuacuuugagugcag

SEQ ID NO: 421562 - RNA, 22 nt, Human
agcugguucauucauucauggu

SEQ ID NO: 421563 - RNA, 22 nt, Human
guacauuuugagguuaaaacaa

SEQ ID NO: 421564 - RNA, 22 nt, Human
aggccucuucagggagcaugga

SEQ ID NO: 421565 - RNA, 22 nt, Human
ucugcagauuuaucagcagcug

SEQ ID NO: 421566 - RNA, 22 nt, Human
aaaggaagaugccaggacucug

SEQ ID NO: 421567 - RNA, 22 nt, Human
uccuaguucucugccagucgcu

SEQ ID NO: 421568 - RNA, 22 nt, Human
agaaacuucagcuauucuuuug

SEQ ID NO: 421569 - RNA, 22 nt, Human
agcagagccugggcuaggggug

SEQ ID NO: 421570 - RNA, 22 nt, Human
gcaaggcugagcacauuugcau

SEQ ID NO: 421571 - RNA, 22 nt, Human
cccagggaaugacucuggccuu

SEQ ID NO: 421572 - RNA, 22 nt, Human
aagcuuuagagaugaguuccuu

SEQ ID NO: 421573 - RNA, 21 nt, Human
gacaggggaagaagcaaggag

SEQ ID NO: 421574 - RNA, 22 nt, Human
gaaggagacccugaagaugcug

SEQ ID NO: 421575 - RNA, 22 nt, Human
uaaguuuaaauguacaugaagc

SEQ ID NO: 421576 - RNA, 22 nt, Human
uacuguuuucuauaauggcugu

SEQ ID NO: 421577 - RNA, 22 nt, Human
caggagacaaguuagcagcuga

SEQ ID NO: 421578 - RNA, 22 nt, Human
agccacagagguugaugugguu

SEQ ID NO: 421579 - RNA, 22 nt, Human
gcuaucuuucugcaccauaauu

SEQ ID NO: 421580 - RNA, 22 nt, Human
agcuguggaagacugucagggu

SEQ ID NO: 421581 - RNA, 22 nt, Human
ugaagccauuacuguguuaggg

SEQ ID NO: 421582 - RNA, 22 nt, Human
gaaaugcagauucugauucugu

SEQ ID NO: 421583 - RNA, 22 nt, Human
ggcugcugugaccucaggugau

SEQ ID NO: 421584 - RNA, 22 nt, Human
ccagagcagggcagcagggcuc

SEQ ID NO: 421585 - RNA, 22 nt, Human
cagcugugcuguauuaagcucu

SEQ ID NO: 421586 - RNA, 22 nt, Human
ccugucugcagauaucucaggu

SEQ ID NO: 421587 - RNA, 22 nt, Human
uccugcagcauccgucgucugu

SEQ ID NO: 421588 - RNA, 22 nt, Human
uagaaacccauguuuauucagu

SEQ ID NO: 421589 - RNA, 22 nt, Human
cacccuagcugucauuucaguu

SEQ ID NO: 421590 - RNA, 22 nt, Human
cugcugagcaucagggcugccc

SEQ ID NO: 421591 - RNA, 21 nt, Human
cugagggccgcagcugggcuc

SEQ ID NO: 421592 - RNA, 22 nt, Human
ccacagggccuuuccugcuggc

SEQ ID NO: 421593 - RNA, 22 nt, Human
uuguuucauggggauguuuauu

SEQ ID NO: 421594 - RNA, 23 nt, Human
ugagaagccaggggagcgugagg

SEQ ID NO: 421595 - RNA, 22 nt, Human
ggccaggccaagaggguuggaa

SEQ ID NO: 421596 - RNA, 22 nt, Human
gccuggguuccaugaucuccag

SEQ ID NO: 421597 - RNA, 22 nt, Human
uucgaguuggcuuuauuaaacu

SEQ ID NO: 421598 - RNA, 22 nt, Human
gacagacauuuccugauccaau

SEQ ID NO: 421599 - RNA, 22 nt, Human
ccuggagcucacugggagccgg

SEQ ID NO: 421600 - RNA, 22 nt, Human
uuacugaaaauucuucaggauu

SEQ ID NO: 421601 - RNA, 22 nt, Human
aauuauauguuaaucuucaauu

SEQ ID NO: 421602 - RNA, 22 nt, Human
gggcagcagagcccugccgagu

SEQ ID NO: 421603 - RNA, 22 nt, Human
agccugcuucccuuugugcccc

SEQ ID NO: 421604 - RNA, 22 nt, Human
agagcugggacuuggacucaau

SEQ ID NO: 421605 - RNA, 22 nt, Human
uugugucugggggagugacauc

SEQ ID NO: 421606 - RNA, 22 nt, Human
ccagcagcuuuauuggcucucc

SEQ ID NO: 421607 - RNA, 22 nt, Human
uaauuuuacuuccugagcaccu

SEQ ID NO: 421608 - RNA, 22 nt, Human
gaaugcagauggcugguguaug

SEQ ID NO: 421609 - RNA, 22 nt, Human
gcugcagcagcugcaggguugu

SEQ ID NO: 421610 - RNA, 22 nt, Human
gcugcagcucgccuuccggccu

SEQ ID NO: 421611 - RNA, 22 nt, Human
aaauguguguauguacauauau

SEQ ID NO: 421612 - RNA, 22 nt, Human
uucuaauuguguuugcauaucu

SEQ ID NO: 421613 - RNA, 22 nt, Human
uuugaaagggacaaagucacug

SEQ ID NO: 421614 - RNA, 22 nt, Human
acucugaggagugacuagaggu

SEQ ID NO: 421615 - RNA, 22 nt, Human
ugcugugggcaguacauaagcu

SEQ ID NO: 421616 - RNA, 22 nt, Human
gcagcagagaacacaaugaugg

SEQ ID NO: 421617 - RNA, 22 nt, Human
ucuccacucugagugccuuuca

SEQ ID NO: 421618 - RNA, 20 nt, Human
ucuguacacucaucuucugc

SEQ ID NO: 421619 - RNA, 22 nt, Human
agcugccacugagggugcacag

SEQ ID NO: 421620 - RNA, 22 nt, Human
gcuggagguuucaccugaguuu

SEQ ID NO: 421621 - RNA, 22 nt, Human
acauaugcucaucugcauuccc

SEQ ID NO: 421622 - RNA, 22 nt, Human
ccagagcugauuccugggacuu

SEQ ID NO: 421623 - RNA, 22 nt, Human
cucuuuccucagccacagucua

SEQ ID NO: 421624 - RNA, 22 nt, Human
agaacuuaggaacaacagcuua

SEQ ID NO: 421625 - RNA, 22 nt, Human
uggcuccuucauucuccugcca

SEQ ID NO: 421626 - RNA, 22 nt, Human
agagugaaguaauuguuaggau

SEQ ID NO: 421627 - RNA, 22 nt, Human
cucugugauuuugugagccaga

SEQ ID NO: 421628 - RNA, 22 nt, Human
cugagcugcggcaggcaccugg

SEQ ID NO: 421629 - RNA, 22 nt, Human
acuuugcacuaaguuacucauu

SEQ ID NO: 421630 - RNA, 22 nt, Human
aagcagagccaccagcuuugga

SEQ ID NO: 421631 - RNA, 22 nt, Human
aagaaaugcagaaaugugcugg

SEQ ID NO: 421632 - RNA, 22 nt, Human
gggcugcuuauacugaugauaa

SEQ ID NO: 421633 - RNA, 22 nt, Human
gcuggccuugugucugaggaag

SEQ ID NO: 421634 - RNA, 22 nt, Human
aguauguagugcaaucagucag

SEQ ID NO: 421635 - RNA, 21 nt, Human
ugguggagugugcugagcaug

SEQ ID NO: 421636 - RNA, 22 nt, Human
ucagcuuucucaaagaagcugg

SEQ ID NO: 421637 - RNA, 22 nt, Human
caguggaaacuaugcugcugga

SEQ ID NO: 421638 - RNA, 22 nt, Human
uuuuccucuguauuugaaaugc

SEQ ID NO: 421639 - RNA, 22 nt, Human
acuggcagagguuggacaccau

SEQ ID NO: 421640 - RNA, 22 nt, Human
ccagcugucacucagaaaggcc

SEQ ID NO: 421641 - RNA, 22 nt, Human
cagggucuuauaaggccaauuu

SEQ ID NO: 421642 - RNA, 17 nt, Human
uuccccugaccaagccu

SEQ ID NO: 421643 - RNA, 22 nt, Human
uaucuguuccaggcacucagcu

SEQ ID NO: 421644 - RNA, 22 nt, Human
ccugggucacucaggcaggcgg

SEQ ID NO: 421645 - RNA, 22 nt, Human
ggcaguggguggaucucaggga

SEQ ID NO: 421646 - RNA, 22 nt, Human
aggcccugcccagagcuccucg

SEQ ID NO: 421647 - RNA, 20 nt, Human
aguuauaguaucuagccaug

SEQ ID NO: 421648 - RNA, 22 nt, Human
cagcugccugcaacacaagcuu

SEQ ID NO: 421649 - RNA, 22 nt, Human
agagaaggucacuaaggaccca

SEQ ID NO: 421650 - RNA, 22 nt, Human
gaaaaguacacagcccaaacau

SEQ ID NO: 421651 - RNA, 22 nt, Human
aacuagaacgucuaguugcugg

SEQ ID NO: 421652 - RNA, 22 nt, Human
uggagccaaugaacauuugcug

SEQ ID NO: 421653 - RNA, 22 nt, Human
ggaccugaacauaaaacgaggc

SEQ ID NO: 421654 - RNA, 22 nt, Human
agccaaggagugcagguggcuu

SEQ ID NO: 421655 - RNA, 22 nt, Human
cagccugcuagggcaaugccuu

SEQ ID NO: 421656 - RNA, 22 nt, Human
ccugccugguguaagucuaagg

SEQ ID NO: 421657 - RNA, 22 nt, Human
uuauucugcacuuuuaaaauau

SEQ ID NO: 421658 - RNA, 22 nt, Human
gccuccuggccuuugcuccuca

SEQ ID NO: 421659 - RNA, 22 nt, Human
gcugcucugugacagccuccgg

SEQ ID NO: 421660 - RNA, 22 nt, Human
ccaggccucaccugcccaccua

SEQ ID NO: 421661 - RNA, 22 nt, Human
uuuuagauugggaaauguaaag

SEQ ID NO: 421662 - RNA, 22 nt, Human
uuuccaauaaagugucauuguu

SEQ ID NO: 421663 - RNA, 20 nt, Human
uggcagaguugucccaccca

SEQ ID NO: 421664 - RNA, 22 nt, Human
gguuccccaggcggcccuugga

SEQ ID NO: 421665 - RNA, 22 nt, Human
uccaggcucucaggugucagca

SEQ ID NO: 421666 - RNA, 22 nt, Human
gggacaggcugagacuugagcu

SEQ ID NO: 421667 - RNA, 22 nt, Human
ccagagccuaagaucugauccu

SEQ ID NO: 421668 - RNA, 19 nt, Human
uggcugagcuggacugagg

SEQ ID NO: 421669 - RNA, 22 nt, Human
uguguccauucaggcacugacc

SEQ ID NO: 421670 - RNA, 22 nt, Human
accaaggagccacauacaaccu

SEQ ID NO: 421671 - RNA, 17 nt, Human
uuccuggaagucauucc

SEQ ID NO: 421672 - RNA, 22 nt, Human
cugcccugacugaccuuuugaa

SEQ ID NO: 421673 - RNA, 22 nt, Human
agggcacagccuaaagccuaug

SEQ ID NO: 421674 - RNA, 19 nt, Human
ggcucucccuugagagagc

SEQ ID NO: 421675 - RNA, 22 nt, Human
cgggcagauugggaagguucau

SEQ ID NO: 421676 - RNA, 21 nt, Human
ucuguacaucauugagucccc

SEQ ID NO: 421677 - RNA, 22 nt, Human
uaaggccaaacuauuauaguuc

SEQ ID NO: 421678 - RNA, 22 nt, Human
agcucccagaaggcccugcgcc

SEQ ID NO: 421679 - RNA, 22 nt, Human
ugggugcuucgucagcucugag

SEQ ID NO: 421680 - RNA, 22 nt, Human
ugcagaagugagucaugaggaa

SEQ ID NO: 421681 - RNA, 22 nt, Human
ccuaggccuuacuuuccugugc

SEQ ID NO: 421682 - RNA, 22 nt, Human
ucauuuguaccauuuuuuaaga

SEQ ID NO: 421683 - RNA, 19 nt, Human
gggcuccuugggccucucu

SEQ ID NO: 421684 - RNA, 22 nt, Human
aucauuccacauguaccacuag

SEQ ID NO: 421685 - RNA, 22 nt, Human
uccuuggcuuucuggagcuucu

SEQ ID NO: 421686 - RNA, 21 nt, Human
gggcagaggggccuccugggu

SEQ ID NO: 421687 - RNA, 22 nt, Human
agguggguaucaugagagauua

SEQ ID NO: 421688 - RNA, 22 nt, Human
auucuacaacccaauaauaauu

SEQ ID NO: 421689 - RNA, 22 nt, Human
aguuuauguaaaauuaguaaug

SEQ ID NO: 421690 - RNA, 21 nt, Human
aagaagcaauuuauuggaagg

SEQ ID NO: 421691 - RNA, 22 nt, Human
uuccucaucugugcaccucacu

SEQ ID NO: 421692 - RNA, 22 nt, Human
cucagagucugcauuucuguca

SEQ ID NO: 421693 - RNA, 22 nt, Human
gcaccaggaggcccuucucauc

SEQ ID NO: 421694 - RNA, 22 nt, Human
agcacccuccaacuucccugua

SEQ ID NO: 421695 - RNA, 22 nt, Human
ggaggcucugcuccguguguuc

SEQ ID NO: 421696 - RNA, 22 nt, Human
gauuucaccugaucuugucauc

SEQ ID NO: 421697 - RNA, 22 nt, Human
uaauuuaauuccauggauucua

SEQ ID NO: 421698 - RNA, 19 nt, Human
ugacaggcuguugccuuga

SEQ ID NO: 421699 - RNA, 22 nt, Human
uaaaauguguuucuguaugguu

SEQ ID NO: 421700 - RNA, 22 nt, Human
uccuggcccuguggccugcagu

SEQ ID NO: 421701 - RNA, 22 nt, Human
gcaugugucuccccaguggagg

SEQ ID NO: 421702 - RNA, 19 nt, Human
cacacccaugcuugccaag

SEQ ID NO: 421703 - RNA, 18 nt, Human
acauacauucugucugca

SEQ ID NO: 421704 - RNA, 22 nt, Human
gagcagcucugggugacccagu

SEQ ID NO: 421705 - RNA, 22 nt, Human
ucucaggcuaccuugcacaagg

SEQ ID NO: 421706 - RNA, 22 nt, Human
acugagcugugacaaugcuuaa

SEQ ID NO: 421707 - RNA, 22 nt, Human
ugucccaggcugaaguacagug

SEQ ID NO: 421708 - RNA, 22 nt, Human
gaauucugggagagaucugaca

SEQ ID NO: 421709 - RNA, 22 nt, Human
gcagagugccgagauggaagcg

SEQ ID NO: 421710 - RNA, 22 nt, Human
uguggcagaaccagaauucaaa

SEQ ID NO: 421711 - RNA, 22 nt, Human
ggcaggugaccuggccucccag

SEQ ID NO: 421712 - RNA, 22 nt, Human
uuucuacagcuggugcaacuuu

SEQ ID NO: 421713 - RNA, 22 nt, Human
ugccagaagauucucuaucaga

SEQ ID NO: 421714 - RNA, 22 nt, Human
gugucccagccccacaggccug

SEQ ID NO: 421715 - RNA, 23 nt, Human
augcucugggcugugggaccugc

SEQ ID NO: 421716 - RNA, 21 nt, Human
ucucuacacuuucacuaggcu

SEQ ID NO: 421717 - RNA, 22 nt, Human
cagggacugagauccagacugu

SEQ ID NO: 421718 - RNA, 17 nt, Human
cagggcugucugccuag

SEQ ID NO: 421719 - RNA, 22 nt, Human
acagauuugacugguaccuggc

SEQ ID NO: 421720 - RNA, 22 nt, Human
uaugcacauucacacaaaaaug

SEQ ID NO: 421721 - RNA, 15 nt, Human
ugggcagaucacuug

SEQ ID NO: 421722 - RNA, 22 nt, Human
gccuuggccaacaccuugcaaa

SEQ ID NO: 421723 - RNA, 22 nt, Human
uggccagaaccugcaguaggcc

SEQ ID NO: 421724 - RNA, 22 nt, Human
uucuggagagaaaccuuacaaa

SEQ ID NO: 421725 - RNA, 22 nt, Human
gggagccacagugaggugcaug

SEQ ID NO: 421726 - RNA, 22 nt, Human
gaggcagagugcaccccaggag

SEQ ID NO: 421727 - RNA, 22 nt, Human
uacuguacucaacaugugaguu

SEQ ID NO: 421728 - RNA, 21 nt, Human
ucaaagcacauauuugcacau

SEQ ID NO: 421729 - RNA, 22 nt, Human
auaaggcacacauagauagggu

SEQ ID NO: 421730 - RNA, 22 nt, Human
agcccuagagcuggaggucagu

SEQ ID NO: 421731 - RNA, 22 nt, Human
ccaaggagaaaugcugugcuuu

SEQ ID NO: 421732 - RNA, 22 nt, Human
ugcugggggugucucaccaggc

SEQ ID NO: 421733 - RNA, 22 nt, Human
gcugccugaagugucuacacug

SEQ ID NO: 421734 - RNA, 20 nt, Human
aacauugcuucaauguaacc

SEQ ID NO: 421735 - RNA, 22 nt, Human
aguuaacaaguuggcaaucaac

SEQ ID NO: 421736 - RNA, 22 nt, Human
ucucaguggacgugucugucuu

SEQ ID NO: 421737 - RNA, 22 nt, Human
cagcugccuaugaccuagccuc

SEQ ID NO: 421738 - RNA, 22 nt, Human
auuauuaggugcucucugacaa

SEQ ID NO: 421739 - RNA, 22 nt, Human
aacagugagaagguggacagga

SEQ ID NO: 421740 - RNA, 22 nt, Human
gcagggcacaaggacgcacagg

SEQ ID NO: 421741 - RNA, 22 nt, Human
cagggcaguuuuacuucucucu

SEQ ID NO: 421742 - RNA, 22 nt, Human
accaucagagcacaguccgugc

SEQ ID NO: 421743 - RNA, 22 nt, Human
uggagcaggacggggaguggua

SEQ ID NO: 421744 - RNA, 22 nt, Human
uugaagcauuucuuugagcuuc

SEQ ID NO: 421745 - RNA, 20 nt, Human
aauuuacucacagaaugaau

SEQ ID NO: 421746 - RNA, 22 nt, Human
aaaagucagucucuccuagcuc

SEQ ID NO: 421747 - RNA, 22 nt, Human
ucauggcacuuagcacaguccu

SEQ ID NO: 421748 - RNA, 22 nt, Human
guguccuuauaagaagagaugc

SEQ ID NO: 421749 - RNA, 22 nt, Human
caguuuauaugucagagcugua

SEQ ID NO: 421750 - RNA, 22 nt, Human
cuauuuuaagaggccauuaggu

SEQ ID NO: 421751 - RNA, 22 nt, Human
agccaggcgcaguggcuuaugc

SEQ ID NO: 421752 - RNA, 22 nt, Human
cuuagggaauugggaggaugcc

SEQ ID NO: 421753 - RNA, 22 nt, Human
ucuguucuauuggucuaugugu

SEQ ID NO: 421754 - RNA, 17 nt, Human
auccccagcaucuagaa

SEQ ID NO: 421755 - RNA, 22 nt, Human
gcugcccagcaggccccagggg

SEQ ID NO: 421756 - RNA, 22 nt, Human
acaguggagaaggcaugaggcu

SEQ ID NO: 421757 - RNA, 22 nt, Human
ucaggaguaaagacagaguucc

SEQ ID NO: 421758 - RNA, 22 nt, Human
uaucuuuaacuugcaguauuua

SEQ ID NO: 421759 - RNA, 20 nt, Human
agacccuguguccuguggcc

SEQ ID NO: 421760 - RNA, 22 nt, Human
ucaaugauagacaagaucuaag

SEQ ID NO: 421761 - RNA, 22 nt, Human
gaagaacaccugcugcccagug

SEQ ID NO: 421762 - RNA, 22 nt, Human
cuggcugcuggccugaggaugc

SEQ ID NO: 421763 - RNA, 22 nt, Human
uauuuauaaucugccaaagaga

SEQ ID NO: 421764 - RNA, 22 nt, Human
cugaggcacagugaacuucucc

SEQ ID NO: 421765 - RNA, 22 nt, Human
ucacaagacagaaaacauuuag

SEQ ID NO: 421766 - RNA, 22 nt, Human
ggagaggcuuggcccagccugg

SEQ ID NO: 421767 - RNA, 22 nt, Human
acuuccuguguuggucuugcug

SEQ ID NO: 421768 - RNA, 22 nt, Human
gcuccucuauuccccacauuuu

SEQ ID NO: 421769 - RNA, 22 nt, Human
auugacaagugagcugggcugc

SEQ ID NO: 421770 - RNA, 22 nt, Human
acccuuucuuacucacacgcuc

SEQ ID NO: 421771 - RNA, 22 nt, Human
uagcagagaggggacaguggca

SEQ ID NO: 421772 - RNA, 22 nt, Human
agcugcucaggagagccagguc

SEQ ID NO: 421773 - RNA, 22 nt, Human
gugugcagggaugagugcaggu

SEQ ID NO: 421774 - RNA, 20 nt, Human
gagggcaggcacccauuuca

SEQ ID NO: 421775 - RNA, 22 nt, Human
gcugccuccugaaagcgcucug

SEQ ID NO: 421776 - RNA, 22 nt, Human
uuuugaaagccagguuuguaug

SEQ ID NO: 421777 - RNA, 22 nt, Human
gggcagugucggggcccaggga

SEQ ID NO: 421778 - RNA, 22 nt, Human
caguucuaauuaauaggaguaa

SEQ ID NO: 421779 - RNA, 22 nt, Human
gcuguggcugaagaugcaggga

SEQ ID NO: 421780 - RNA, 22 nt, Human
ugcacacacucugcauauacuu

SEQ ID NO: 421781 - RNA, 22 nt, Human
gcccggcagucacacacccagg

SEQ ID NO: 421782 - RNA, 18 nt, Human
ugaggccucugcugggcc

SEQ ID NO: 421783 - RNA, 19 nt, Human
ucccgcccacugagcgugc

SEQ ID NO: 421784 - RNA, 22 nt, Human
uaaggcacccauguucauacag

SEQ ID NO: 421785 - RNA, 19 nt, Human
agcuuccauauucucuagu

SEQ ID NO: 421786 - RNA, 18 nt, Human
cagggccccagaauuauc

SEQ ID NO: 421787 - RNA, 22 nt, Human
ugaugaaauguugaggcaguga

SEQ ID NO: 421788 - RNA, 22 nt, Human
aggacagagggaccagagccca

SEQ ID NO: 421789 - RNA, 20 nt, Human
uguuccaugacuauuuggau

SEQ ID NO: 421790 - RNA, 22 nt, Human
uacauuuauaaggcuucucugu

SEQ ID NO: 421791 - RNA, 22 nt, Human
cagagaccccgcugcccuucug

SEQ ID NO: 421792 - RNA, 22 nt, Human
gucaggaucucccaguacauau

SEQ ID NO: 421793 - RNA, 22 nt, Human
uggcugaggcacagcugccgcc

SEQ ID NO: 421794 - RNA, 23 nt, Human
acacaauagaguacuauucagcc

SEQ ID NO: 421795 - RNA, 22 nt, Human
acuaagugauucuaagcaucuu

SEQ ID NO: 421796 - RNA, 22 nt, Human
aaguuugagaagcuuauagaua

SEQ ID NO: 421797 - RNA, 22 nt, Human
cuguacagaguucugaguguac

SEQ ID NO: 421798 - RNA, 22 nt, Human
uaggugugggcucaggaaugug

SEQ ID NO: 421799 - RNA, 22 nt, Human
augccuggacugacaugcacug

SEQ ID NO: 421800 - RNA, 22 nt, Human
uuuccucugggcccugccaccc

SEQ ID NO: 421801 - RNA, 20 nt, Human
accauaauguuaauuacaaa

SEQ ID NO: 421802 - RNA, 22 nt, Human
gucagcaccucuuuggggagcu

SEQ ID NO: 421803 - RNA, 22 nt, Human
cucugagaggugagaagcagca

SEQ ID NO: 421804 - RNA, 22 nt, Human
caggacauugauccauuggcac

SEQ ID NO: 421805 - RNA, 22 nt, Human
cagaggcagacccuccagggcg

SEQ ID NO: 421806 - RNA, 22 nt, Human
accacugcccauggugaaaacu

SEQ ID NO: 421807 - RNA, 22 nt, Human
agggacccauagagagaccagu

SEQ ID NO: 421808 - RNA, 22 nt, Human
ucucuguaguugggcagcugcu

SEQ ID NO: 421809 - RNA, 22 nt, Human
aggugcaguggcucaugccugu

SEQ ID NO: 421810 - RNA, 22 nt, Human
ucccagagugugggcaucaagg

SEQ ID NO: 421811 - RNA, 19 nt, Human
gcuuuaguuuacucaucua

SEQ ID NO: 421812 - RNA, 22 nt, Human
cacauuucuaggaaauuaaaug

SEQ ID NO: 421813 - RNA, 20 nt, Human
guguuucaugugauacaaug

SEQ ID NO: 421814 - RNA, 22 nt, Human
uuugcaaauaccaugaaacuug

SEQ ID NO: 421815 - RNA, 22 nt, Human
gagugaaaaaggaagggccaua

SEQ ID NO: 421816 - RNA, 22 nt, Human
gccaccagugggggccugggca

SEQ ID NO: 421817 - RNA, 22 nt, Human
cuccaguaucuguaggaaaagg

SEQ ID NO: 421818 - RNA, 22 nt, Human
gcauuccugagaaugcagagug

SEQ ID NO: 421819 - RNA, 22 nt, Human
uuucagaucauuuuuuaaguac

SEQ ID NO: 421820 - RNA, 22 nt, Human
gccuucugauaucucuuggcau

SEQ ID NO: 421821 - RNA, 22 nt, Human
uauuucaugugcaccauaauuc

SEQ ID NO: 421822 - RNA, 22 nt, Human
agagggaucacccuguuucugg

SEQ ID NO: 421823 - RNA, 22 nt, Human
ugcucugucaagaaaagaugcc

SEQ ID NO: 421824 - RNA, 22 nt, Human
ucaguuuugauuccugguucuc

SEQ ID NO: 421825 - RNA, 22 nt, Human
uggccuggggaagaccaugggc

SEQ ID NO: 421826 - RNA, 22 nt, Human
uggcccugucccuggagccugg

SEQ ID NO: 421827 - RNA, 22 nt, Human
uggcugcagacaccuauggcag

SEQ ID NO: 421828 - RNA, 22 nt, Human
ccucuguccuggggaguggagc

SEQ ID NO: 421829 - RNA, 18 nt, Human
agcuggggccucuggucc

SEQ ID NO: 421830 - RNA, 22 nt, Human
uauuauguagaguaaggguuaa

SEQ ID NO: 421831 - RNA, 22 nt, Human
ugguccaggguguaguacagag

SEQ ID NO: 421832 - RNA, 22 nt, Human
cagcuuuguggccuugaccucg

SEQ ID NO: 421833 - RNA, 22 nt, Human
agucucugcaugccugcugugc

SEQ ID NO: 421834 - RNA, 19 nt, Human
ucauuguugguuugucggg

SEQ ID NO: 421835 - RNA, 22 nt, Human
agcucccaauugacuugaacua

SEQ ID NO: 421836 - RNA, 22 nt, Human
gagcucccaggccccagcaagg

SEQ ID NO: 421837 - RNA, 22 nt, Human
uagcauuuggacauugucaccu

SEQ ID NO: 421838 - RNA, 22 nt, Human
uccucugcuggaagggcaagag

SEQ ID NO: 421839 - RNA, 22 nt, Human
guaaaauucuagcaucugaaag

SEQ ID NO: 421840 - RNA, 22 nt, Human
cagagguagccgagugcaaucg

SEQ ID NO: 421841 - RNA, 22 nt, Human
cucaggauauugggcuggagca

SEQ ID NO: 421842 - RNA, 22 nt, Human
uaguuauuauuguuacuaucag

SEQ ID NO: 421843 - RNA, 22 nt, Human
ugcagcugcuggcccaggugcu

SEQ ID NO: 421844 - RNA, 22 nt, Human
agaggcuccaccuucucugucc

SEQ ID NO: 421845 - RNA, 22 nt, Human
ccagcagacacacaggcguggg

SEQ ID NO: 421846 - RNA, 22 nt, Human
agcuuaggaggaugaugaacau

SEQ ID NO: 421847 - RNA, 22 nt, Human
gcucccacaaccuucuugcucc

SEQ ID NO: 421848 - RNA, 22 nt, Human
cagaggcucaccagccuuucac

SEQ ID NO: 421849 - RNA, 22 nt, Human
uggagcuggaauuugagcugga

SEQ ID NO: 421850 - RNA, 22 nt, Human
aauuagggaggacaaagguaca

SEQ ID NO: 421851 - RNA, 22 nt, Human
ggccugagaaccauggggccaa

SEQ ID NO: 421852 - RNA, 22 nt, Human
caggguccggcugccuggcugu

SEQ ID NO: 421853 - RNA, 22 nt, Human
cucaugauguagcgaaugagaa

SEQ ID NO: 421854 - RNA, 22 nt, Human
caggaaaggugugucaugaugg

SEQ ID NO: 421855 - RNA, 22 nt, Human
aauguuacgaucaacaacacau

SEQ ID NO: 421856 - RNA, 22 nt, Human
uggcucagccagcccuaggaac

SEQ ID NO: 421857 - RNA, 22 nt, Human
aaggcucccucuucucgagugu

SEQ ID NO: 421858 - RNA, 22 nt, Human
caggugggagccacagcguaca

SEQ ID NO: 421859 - RNA, 22 nt, Human
ucucauguauugcccuggugug

SEQ ID NO: 421860 - RNA, 22 nt, Human
aagaugcgguugaccauggugu

SEQ ID NO: 421861 - RNA, 22 nt, Human
uuugugaagggaacagaagugu

SEQ ID NO: 421862 - RNA, 23 nt, Human
uccaagggcuacaaacacagacc

SEQ ID NO: 421863 - RNA, 22 nt, Human
ucuccugguuuguuaaauaauu

SEQ ID NO: 421864 - RNA, 22 nt, Human
agcagugaugcaugacagccua

SEQ ID NO: 421865 - RNA, 22 nt, Human
uuuuaucuaccuaugcucauuu

SEQ ID NO: 421866 - RNA, 22 nt, Human
uuaucguacgcuucagaaauuu

SEQ ID NO: 421867 - RNA, 22 nt, Human
aucaauucuuaggaaaauagcu

SEQ ID NO: 421868 - RNA, 22 nt, Human
ugugucagagguagagauggca

SEQ ID NO: 421869 - RNA, 22 nt, Human
aauggccagcaacaggagugaa

SEQ ID NO: 421870 - RNA, 22 nt, Human
ucucaggaaauaggauuugagu

SEQ ID NO: 421871 - RNA, 23 nt, Human
agcuggguggccugcgugaagcu

SEQ ID NO: 421872 - RNA, 22 nt, Human
ugggagcucagaaagggagguc

SEQ ID NO: 421873 - RNA, 22 nt, Human
uucacagaugccugaugugugg

SEQ ID NO: 421874 - RNA, 22 nt, Human
ugggggaagagcuuguuaaagu

SEQ ID NO: 421875 - RNA, 22 nt, Human
ggcagccuccagggcacuggug

SEQ ID NO: 421876 - RNA, 22 nt, Human
guuauguaaucuaacacucagu

SEQ ID NO: 421877 - RNA, 22 nt, Human
cuggcuuccucaggagcagugg

SEQ ID NO: 421878 - RNA, 22 nt, Human
aagaaaagaaaccugaggcuuu

SEQ ID NO: 421879 - RNA, 22 nt, Human
agggcagcagcuccuccuagcu

SEQ ID NO: 421880 - RNA, 22 nt, Human
cccucugccucugaguaggaca

SEQ ID NO: 421881 - RNA, 22 nt, Human
ugcaugcauaaauguacacaca

SEQ ID NO: 421882 - RNA, 22 nt, Human
uucacaauaggagcaugcaaau

SEQ ID NO: 421883 - RNA, 22 nt, Human
cugccuggagcauucugaaggu

SEQ ID NO: 421884 - RNA, 22 nt, Human
ccugugcauccgguggucauug

SEQ ID NO: 421885 - RNA, 22 nt, Human
agcauuuauuucuuagaaauug

SEQ ID NO: 421886 - RNA, 22 nt, Human
ucuguggccuguguccaagugc

SEQ ID NO: 421887 - RNA, 22 nt, Human
aagugagauuauauguacggga

SEQ ID NO: 421888 - RNA, 22 nt, Human
ggccugcuauuggugggcagac

SEQ ID NO: 421889 - RNA, 22 nt, Human
cagagcauaauugacaugaggu

SEQ ID NO: 421890 - RNA, 22 nt, Human
uuuauguaaguggaaugaugcc

SEQ ID NO: 421891 - RNA, 22 nt, Human
uccagcuuauagguagauuuaa

SEQ ID NO: 421892 - RNA, 22 nt, Human
aguccaguguguucuggcagca

SEQ ID NO: 421893 - RNA, 22 nt, Human
ggcucaguguuuguggaacaua

SEQ ID NO: 421894 - RNA, 22 nt, Human
ggguggcacaggugcagagggu

SEQ ID NO: 421895 - RNA, 22 nt, Human
uguauauucugccuaaaagcuu

SEQ ID NO: 421896 - RNA, 19 nt, Human
gaucagagugucagcuugu

SEQ ID NO: 421897 - RNA, 22 nt, Human
gaaaacugugauuagaaugccu

SEQ ID NO: 421898 - RNA, 22 nt, Human
caggaugagguagaggcagaua

SEQ ID NO: 421899 - RNA, 22 nt, Human
gcagccaccucccauggcgggg

SEQ ID NO: 421900 - RNA, 22 nt, Human
cagagcuguccaaacccugaca

SEQ ID NO: 421901 - RNA, 22 nt, Human
cagcuggcgggcagagccgcca

SEQ ID NO: 421902 - RNA, 22 nt, Human
cugcucucuguuccccuggauc

SEQ ID NO: 421903 - RNA, 22 nt, Human
agugggaccggugcuauuccag

SEQ ID NO: 421904 - RNA, 22 nt, Human
cacaugaugguggaagccauag

SEQ ID NO: 421905 - RNA, 22 nt, Human
uucccucuccuacucaggaaag

SEQ ID NO: 421906 - RNA, 22 nt, Human
aguccagucucacucuuggcag

SEQ ID NO: 421907 - RNA, 19 nt, Human
uggaagaggaagggaaaua

SEQ ID NO: 421908 - RNA, 22 nt, Human
agccaggcuaaaugagccauga

SEQ ID NO: 421909 - RNA, 22 nt, Human
guguaauuauauaaagaucuac

SEQ ID NO: 421910 - RNA, 22 nt, Human
agcagcugagccccagcuguga

SEQ ID NO: 421911 - RNA, 22 nt, Human
agcauggggcaaugcaugugcu

SEQ ID NO: 421912 - RNA, 22 nt, Human
guggcuucugcggugugcgcag

SEQ ID NO: 421913 - RNA, 22 nt, Human
agcaggagcugugggaagaugg

SEQ ID NO: 421914 - RNA, 22 nt, Human
ccucugccaccucccacgaggc

SEQ ID NO: 421915 - RNA, 21 nt, Human
cucuugucuuugcucaguagc

SEQ ID NO: 421916 - RNA, 22 nt, Human
uuauuugcccauguuuagcaga

SEQ ID NO: 421917 - RNA, 20 nt, Human
gggagaagggcugaugagag

SEQ ID NO: 421918 - RNA, 22 nt, Human
agagcuggggccagagucaagg

SEQ ID NO: 421919 - RNA, 22 nt, Human
cacagcuucugagugaggauuu

SEQ ID NO: 421920 - RNA, 17 nt, Human
acacagccagguucucc

SEQ ID NO: 421921 - RNA, 22 nt, Human
ugcagaccucccauggcugccu

SEQ ID NO: 421922 - RNA, 22 nt, Human
caaugugguggcagaugucagu

SEQ ID NO: 421923 - RNA, 22 nt, Human
ugagagagccugaaucucuuac

SEQ ID NO: 421924 - RNA, 22 nt, Human
gcagaggcucuuuaaugcuuag

SEQ ID NO: 421925 - RNA, 22 nt, Human
cuggugggaggcaagguggaag

SEQ ID NO: 421926 - RNA, 22 nt, Human
ccucauggccuugagcugaggg

SEQ ID NO: 421927 - RNA, 19 nt, Human
cugugcuuuaaacuccuau

SEQ ID NO: 421928 - RNA, 22 nt, Human
cugggagcccgcguccuggugg

SEQ ID NO: 421929 - RNA, 22 nt, Human
gggcuguggagccgcgagggcu

SEQ ID NO: 421930 - RNA, 22 nt, Human
gaucaaaagcuggguucuaaaa

SEQ ID NO: 421931 - RNA, 22 nt, Human
aauauguuccacuuaaagcugg

SEQ ID NO: 421932 - RNA, 22 nt, Human
uucauaguguuuccuuccagug

SEQ ID NO: 421933 - RNA, 22 nt, Human
uuugacagcuuguuacaaaguu

SEQ ID NO: 421934 - RNA, 22 nt, Human
gucucuggguuaagcagugcau

SEQ ID NO: 421935 - RNA, 22 nt, Human
guuuauuauucaacuucauguu

SEQ ID NO: 421936 - RNA, 22 nt, Human
uaugcauauagaugcacacaca

SEQ ID NO: 421937 - RNA, 21 nt, Human
acagcagagaucaagacuaag

SEQ ID NO: 421938 - RNA, 22 nt, Human
ugcuuuauaaccauuucugugg

SEQ ID NO: 421939 - RNA, 22 nt, Human
gcacccagggacuuggcuggcc

SEQ ID NO: 421940 - RNA, 22 nt, Human
ggggccugcgagguucaacuuc

SEQ ID NO: 421941 - RNA, 17 nt, Human
ucuggccuuccugaacu

SEQ ID NO: 421942 - RNA, 22 nt, Human
uguuaucugagcaacgucgacg

SEQ ID NO: 421943 - RNA, 22 nt, Human
caggaggagcauuagcgucuca

SEQ ID NO: 421944 - RNA, 22 nt, Human
aggcagcaagauuauuuaaucc

SEQ ID NO: 421945 - RNA, 22 nt, Human
gcccagcaccucucucaggguu

SEQ ID NO: 421946 - RNA, 19 nt, Human
aauucuguuucagcagauc

SEQ ID NO: 421947 - RNA, 20 nt, Human
cuccagggaacagacuggag

SEQ ID NO: 421948 - RNA, 22 nt, Human
ucugggagacguguguugucag

SEQ ID NO: 421949 - RNA, 22 nt, Human
cuacugaguccuucagcugcca

SEQ ID NO: 421950 - RNA, 22 nt, Human
cagagccccccuucugaucaca

SEQ ID NO: 421951 - RNA, 21 nt, Human
uugaaggaucacuucuguacc

SEQ ID NO: 421952 - RNA, 22 nt, Human
gagccagcuacauggucugcaa

SEQ ID NO: 421953 - RNA, 22 nt, Human
uucauaaugagguccuagaggc

SEQ ID NO: 421954 - RNA, 22 nt, Human
gagcugccugaacaagcagcag

SEQ ID NO: 421955 - RNA, 19 nt, Human
agccagggugagaaggagc

SEQ ID NO: 421956 - RNA, 21 nt, Human
gccugcaguuuugaagcccuu

SEQ ID NO: 421957 - RNA, 22 nt, Human
agagcagcacguuguccccaca

SEQ ID NO: 421958 - RNA, 22 nt, Human
ucuuagaaugucaacugauguu

SEQ ID NO: 421959 - RNA, 22 nt, Human
ccugucagcugauggcuaugua

SEQ ID NO: 421960 - RNA, 22 nt, Human
ccucccuuggccauagccagcc

SEQ ID NO: 421961 - RNA, 22 nt, Human
uguaugcaccauuguauuaccu

SEQ ID NO: 421962 - RNA, 20 nt, Human
uuaagaaaagcacauccugc

SEQ ID NO: 421963 - RNA, 22 nt, Human
gcugccaguguggcaugaugca

SEQ ID NO: 421964 - RNA, 21 nt, Human
aucccagcacccaggagugca

SEQ ID NO: 421965 - RNA, 22 nt, Human
guuucgucaggcuuauucuauc

SEQ ID NO: 421966 - RNA, 20 nt, Human
ucagccagcuaacaugggga

SEQ ID NO: 421967 - RNA, 22 nt, Human
cugggccuuggauugacacugu

SEQ ID NO: 421968 - RNA, 22 nt, Human
ccuggcuguggcggugcucuca

SEQ ID NO: 421969 - RNA, 22 nt, Human
cagaggacaauagaauggaaag

SEQ ID NO: 421970 - RNA, 22 nt, Human
aguggcagagccaagauaugau

SEQ ID NO: 421971 - RNA, 22 nt, Human
cagcugugcuagaagccacgaa

SEQ ID NO: 421972 - RNA, 22 nt, Human
auuugauuagcuguguaauuuu

SEQ ID NO: 421973 - RNA, 23 nt, Human
agcacagacuagaaaggucuuuc

SEQ ID NO: 421974 - RNA, 22 nt, Human
uaaggcacuucaauguuuagaa

SEQ ID NO: 421975 - RNA, 22 nt, Human
agggcugacaaauggcagugac

SEQ ID NO: 421976 - RNA, 22 nt, Human
cugcuguguaucauuuuagaug

SEQ ID NO: 421977 - RNA, 23 nt, Human
ucucagugaaucucagaauucgc

SEQ ID NO: 421978 - RNA, 22 nt, Human
uggcuuccacugugugcccccu

SEQ ID NO: 421979 - RNA, 22 nt, Human
agaaaugcauuagcacauauag

SEQ ID NO: 421980 - RNA, 20 nt, Human
acuggacacugaggugagcu

SEQ ID NO: 421981 - RNA, 22 nt, Human
cagcuggguuuaguggggugug

SEQ ID NO: 421982 - RNA, 22 nt, Human
auguaacuguuauauuuuguug

SEQ ID NO: 421983 - RNA, 22 nt, Human
acagagcuuaauucaggagcuu

SEQ ID NO: 421984 - RNA, 22 nt, Human
ucuuacaccauucaaauauuuu

SEQ ID NO: 421985 - RNA, 20 nt, Human
acugccuugguucaguaggu

SEQ ID NO: 421986 - RNA, 22 nt, Human
aggcugcuucagcugcagggag

SEQ ID NO: 421987 - RNA, 20 nt, Human
ccuuuauuauuuguaugaug

SEQ ID NO: 421988 - RNA, 22 nt, Human
gaaaugcauaaucuuaguagau

SEQ ID NO: 421989 - RNA, 22 nt, Human
ccugccagggccuuggaagaaa

SEQ ID NO: 421990 - RNA, 22 nt, Human
uugacacagaucaauauucaac

SEQ ID NO: 421991 - RNA, 22 nt, Human
ugcuccauucucuagccagugc

SEQ ID NO: 421992 - RNA, 22 nt, Human
ggaccugcccuggcucagaugc

SEQ ID NO: 421993 - RNA, 23 nt, Human
ccugggcauuggcugcagcuucu

SEQ ID NO: 421994 - RNA, 22 nt, Human
acucaggaaauugagauaaugg

SEQ ID NO: 421995 - RNA, 21 nt, Human
cagcuuugucugucuucgggg

SEQ ID NO: 421996 - RNA, 22 nt, Human
accugccuucucaaggacauga

SEQ ID NO: 421997 - RNA, 22 nt, Human
uugaacaguuuugucagguuca

SEQ ID NO: 421998 - RNA, 22 nt, Human
uugaggagcaggaugggaggcu

SEQ ID NO: 421999 - RNA, 22 nt, Human
cagugggcugugauggauucac

SEQ ID NO: 422000 - RNA, 22 nt, Human
aggagcugagucagcccgacag

SEQ ID NO: 422001 - RNA, 22 nt, Human
aggcucaguucuguggugagcc

SEQ ID NO: 422002 - RNA, 22 nt, Human
augucuuucucacagccaguuc

SEQ ID NO: 422003 - RNA, 21 nt, Human
gcugagagguugggaaguuca

SEQ ID NO: 422004 - RNA, 23 nt, Human
uccuggugacaugccugagcauc

SEQ ID NO: 422005 - RNA, 22 nt, Human
aucaguuuugggggacauacug

SEQ ID NO: 422006 - RNA, 22 nt, Human
ggaaccaguggaaugauaugcu

SEQ ID NO: 422007 - RNA, 22 nt, Human
ucucuggaguauaaccagggau

SEQ ID NO: 422008 - RNA, 22 nt, Human
cuucccacagaauucaaucagu

SEQ ID NO: 422009 - RNA, 22 nt, Human
ucuucacagaugcauauacuuc

SEQ ID NO: 422010 - RNA, 22 nt, Human
aggugcuggaguagaagaaaaa

SEQ ID NO: 422011 - RNA, 22 nt, Human
ugguaucagagccaucuguauu

SEQ ID NO: 422012 - RNA, 22 nt, Human
guaaacaucgacccaacagggg

SEQ ID NO: 422013 - RNA, 22 nt, Human
ggcuccugggaugggacugagc

SEQ ID NO: 422014 - RNA, 22 nt, Human
cuggcagcucuacucagagccu

SEQ ID NO: 422015 - RNA, 22 nt, Human
cuuucucuguguuucacaugcu

SEQ ID NO: 422016 - RNA, 22 nt, Human
ccuggcucuucagagguuccua

SEQ ID NO: 422017 - RNA, 22 nt, Human
caguccugcccaggcugacaga

SEQ ID NO: 422018 - RNA, 22 nt, Human
gauuucaaguaucuugggcgag

SEQ ID NO: 422019 - RNA, 22 nt, Human
gagggucccgagcccugucaga

SEQ ID NO: 422020 - RNA, 22 nt, Human
ccugggaggcuguuuccagccu

SEQ ID NO: 422021 - RNA, 22 nt, Human
ucucaccauggugcuugcuuau

SEQ ID NO: 422022 - RNA, 22 nt, Human
ggacaggguaaguacuagugug

SEQ ID NO: 422023 - RNA, 22 nt, Human
aagcccagcaucccugcaccag

SEQ ID NO: 422024 - RNA, 22 nt, Human
ccaggagcagggcuggcugcac

SEQ ID NO: 422025 - RNA, 22 nt, Human
ugguggcaauguccuggagaag

SEQ ID NO: 422026 - RNA, 22 nt, Human
caguggguggcuaaguggcuga

SEQ ID NO: 422027 - RNA, 22 nt, Human
ccuagagcucugcuuuaucuaa

SEQ ID NO: 422028 - RNA, 22 nt, Human
agugccaggagcaaggagcucc

SEQ ID NO: 422029 - RNA, 23 nt, Human
uggccugcagaguuucugcuggg

SEQ ID NO: 422030 - RNA, 22 nt, Human
uggcucagcuuuccccaucugg

SEQ ID NO: 422031 - RNA, 22 nt, Human
caccagggacaaugcuaggggu

SEQ ID NO: 422032 - RNA, 22 nt, Human
ggcugccugcucaggugcggcg

SEQ ID NO: 422033 - RNA, 22 nt, Human
uagcagcuuccagagagggcag

SEQ ID NO: 422034 - RNA, 22 nt, Human
caaggccauaagagauacaaaa

SEQ ID NO: 422035 - RNA, 21 nt, Human
agaauaaugguaucauuugcu

SEQ ID NO: 422036 - RNA, 22 nt, Human
ugccucugaggaagauuguguu

SEQ ID NO: 422037 - RNA, 22 nt, Human
acagcugugaagcaagcacucu

SEQ ID NO: 422038 - RNA, 22 nt, Human
gagcagcucgagaaggaagcag

SEQ ID NO: 422039 - RNA, 22 nt, Human
cuuccagucuagagcuaucugu

SEQ ID NO: 422040 - RNA, 17 nt, Human
aaggccauuuccaccca

SEQ ID NO: 422041 - RNA, 22 nt, Human
aaggcacugaacuuaaauucug

SEQ ID NO: 422042 - RNA, 22 nt, Human
aagagcuggaguuugcagcccu

SEQ ID NO: 422043 - RNA, 18 nt, Human
ccugagcccugcuuacuu

SEQ ID NO: 422044 - RNA, 22 nt, Human
acccuggggguggccagugcca

SEQ ID NO: 422045 - RNA, 22 nt, Human
cagugcaggcugggggcccugc

SEQ ID NO: 422046 - RNA, 22 nt, Human
guggcugcagagccagcaagcu

SEQ ID NO: 422047 - RNA, 22 nt, Human
ggcuggcacugaggagagcucu

SEQ ID NO: 422048 - RNA, 22 nt, Human
uauccaaagagauucauguucu

SEQ ID NO: 422049 - RNA, 22 nt, Human
ccccuuccacagugcuuccuaa

SEQ ID NO: 422050 - RNA, 22 nt, Human
cugccuggggaaugugaggauu

SEQ ID NO: 422051 - RNA, 20 nt, Human
ucugugugccaucaccuaac

SEQ ID NO: 422052 - RNA, 21 nt, Human
gccagagcaguacaaugaggu

SEQ ID NO: 422053 - RNA, 22 nt, Human
agcacagguacggagaugcuac

SEQ ID NO: 422054 - RNA, 22 nt, Human
cccuuccuccucgccugucaga

SEQ ID NO: 422055 - RNA, 22 nt, Human
ugguaaauauguccauucucuu

SEQ ID NO: 422056 - RNA, 22 nt, Human
guauccuuugcggaaauuucua

SEQ ID NO: 422057 - RNA, 22 nt, Human
gagggcugugaaggagcggguu

SEQ ID NO: 422058 - RNA, 22 nt, Human
guaggaaagggagugaagggaa

SEQ ID NO: 422059 - RNA, 22 nt, Human
gcugccucugcacagcucacuc

SEQ ID NO: 422060 - RNA, 22 nt, Human
aaggcugagggcuguaccuggc

SEQ ID NO: 422061 - RNA, 22 nt, Human
gaggcacaucacuuggugcauu

SEQ ID NO: 422062 - RNA, 22 nt, Human
uaguggagaggauguggagaaa

SEQ ID NO: 422063 - RNA, 22 nt, Human
aauuugauuuucuuaaaccaua

SEQ ID NO: 422064 - RNA, 22 nt, Human
uacaugcaugucacagaaugaa

SEQ ID NO: 422065 - RNA, 18 nt, Human
uucaccagugugaugggu

SEQ ID NO: 422066 - RNA, 22 nt, Human
ccagcuccucuucccaguguca

SEQ ID NO: 422067 - RNA, 22 nt, Human
aaucuggcauguaagcuuagag

SEQ ID NO: 422068 - RNA, 22 nt, Human
ccagcucuuuuggcugagugag

SEQ ID NO: 422069 - RNA, 22 nt, Human
agcagcucuuaacaaagcaugg

SEQ ID NO: 422070 - RNA, 22 nt, Human
aguggacucuucccagugcuug

SEQ ID NO: 422071 - RNA, 22 nt, Human
gggaccugggccagaggacagu

SEQ ID NO: 422072 - RNA, 22 nt, Human
aaguaugacauuuaagacaauu

SEQ ID NO: 422073 - RNA, 22 nt, Human
ugggcagaaaucaguaucagau

SEQ ID NO: 422074 - RNA, 22 nt, Human
uacauauagacaguuacucuag

SEQ ID NO: 422075 - RNA, 22 nt, Human
ugcugccuuugggaccuggccu

SEQ ID NO: 422076 - RNA, 19 nt, Human
gaaggcugaaaugaagcac

SEQ ID NO: 422077 - RNA, 21 nt, Human
aaauguguuccauaaugcuuu

SEQ ID NO: 422078 - RNA, 22 nt, Human
acucugaggcaggucagggcag

SEQ ID NO: 422079 - RNA, 22 nt, Human
agugcaauguguacagaaaaau

SEQ ID NO: 422080 - RNA, 22 nt, Human
caguggaggcucaagugugcuu

SEQ ID NO: 422081 - RNA, 22 nt, Human
uggcugaggagggucuucuggu

SEQ ID NO: 422082 - RNA, 22 nt, Human
acagggcagcaacuuugugccu

SEQ ID NO: 422083 - RNA, 22 nt, Human
acccuguaugcuauaucccuaa

SEQ ID NO: 422084 - RNA, 22 nt, Human
uggggacacagagccaaacuau

SEQ ID NO: 422085 - RNA, 22 nt, Human
agugggcagcccaggaggucuu

SEQ ID NO: 422086 - RNA, 23 nt, Human
aggaaagcauucauuuuuaccau

SEQ ID NO: 422087 - RNA, 22 nt, Human
gccaggcagacaggucaucagg

SEQ ID NO: 422088 - RNA, 22 nt, Human
ggggcagaguagcuggggugug

SEQ ID NO: 422089 - RNA, 22 nt, Human
ucuggcucuaacuaggcaucag

SEQ ID NO: 422090 - RNA, 22 nt, Human
aggcugaggcaagaggaucacu

SEQ ID NO: 422091 - RNA, 22 nt, Human
ucccuagucgcaucuguggaga

SEQ ID NO: 422092 - RNA, 22 nt, Human
aaagccagcucugagcugcacc

SEQ ID NO: 422093 - RNA, 22 nt, Human
ccagcuugaagaugugcugguu

SEQ ID NO: 422094 - RNA, 22 nt, Human
gaaggccacaagagaaguuaag

SEQ ID NO: 422095 - RNA, 22 nt, Human
ucccagcagagccagcaagccg

SEQ ID NO: 422096 - RNA, 22 nt, Human
cacuuaagcaguuaauuuaucu

SEQ ID NO: 422097 - RNA, 22 nt, Human
uaagacaauucuucagucacaa

SEQ ID NO: 422098 - RNA, 22 nt, Human
ugcugcacucaccaacagauaa

SEQ ID NO: 422099 - RNA, 22 nt, Human
auguguaggugaaucgaggcug

SEQ ID NO: 422100 - RNA, 22 nt, Human
cccaaggcauggcaugguggca

SEQ ID NO: 422101 - RNA, 17 nt, Human
cugucugcgcaugaggu

SEQ ID NO: 422102 - RNA, 22 nt, Human
uuuguucaugccuauauucuca

SEQ ID NO: 422103 - RNA, 22 nt, Human
ccucugagaccagcucugcacc

SEQ ID NO: 422104 - RNA, 22 nt, Human
ggcugcuugcuguuucuuggau

SEQ ID NO: 422105 - RNA, 22 nt, Human
uuugggaagaggaaucucugga

SEQ ID NO: 422106 - RNA, 19 nt, Human
gcagccaccgcggcggccg

SEQ ID NO: 422107 - RNA, 21 nt, Human
aucagcaaaugccugucuccc

SEQ ID NO: 422108 - RNA, 22 nt, Human
cugccuuccaaccccagacucc

SEQ ID NO: 422109 - RNA, 22 nt, Human
cggagccugcuuguugcagcug

SEQ ID NO: 422110 - RNA, 22 nt, Human
gacugucauucuagugcccaug

SEQ ID NO: 422111 - RNA, 22 nt, Human
guggccaggccgacugccaggc

SEQ ID NO: 422112 - RNA, 21 nt, Human
uaaggccaagucuauuucugu

SEQ ID NO: 422113 - RNA, 22 nt, Human
acccaggagcaggcugggcagu

SEQ ID NO: 422114 - RNA, 22 nt, Human
gaagagcuuagacagaaucaaa

SEQ ID NO: 422115 - RNA, 22 nt, Human
cccagcucucucaguucugcuu

SEQ ID NO: 422116 - RNA, 22 nt, Human
aaauacaguguguguucuuuga

SEQ ID NO: 422117 - RNA, 22 nt, Human
caggggcucugggugaugugag

SEQ ID NO: 422118 - RNA, 22 nt, Human
caggccucaggggcucaggcug

SEQ ID NO: 422119 - RNA, 20 nt, Human
uccuugaaagugggguauau

SEQ ID NO: 422120 - RNA, 22 nt, Human
uggcaggaaaaagggccagagg

SEQ ID NO: 422121 - RNA, 20 nt, Human
guauuaggagguaaauguaa

SEQ ID NO: 422122 - RNA, 22 nt, Human
ugugaaggcagcagcucugucc

SEQ ID NO: 422123 - RNA, 22 nt, Human
aucacaggugguaggaaaagaa

SEQ ID NO: 422124 - RNA, 22 nt, Human
gagccuggauugaagugggugg

SEQ ID NO: 422125 - RNA, 20 nt, Human
aaaagcagccagagauggua

SEQ ID NO: 422126 - RNA, 22 nt, Human
uggcagaggaggcucagauuga

SEQ ID NO: 422127 - RNA, 22 nt, Human
uacauaaugagcuaguuaaguu

SEQ ID NO: 422128 - RNA, 22 nt, Human
ugcucuguauucuauggcaguu

SEQ ID NO: 422129 - RNA, 22 nt, Human
accccagaggcggaggcugcag

SEQ ID NO: 422130 - RNA, 17 nt, Human
accaggcaacacgccca

SEQ ID NO: 422131 - RNA, 19 nt, Human
augauggucccauucaccu

SEQ ID NO: 422132 - RNA, 22 nt, Human
agagccaggaucuguuuugggg

SEQ ID NO: 422133 - RNA, 22 nt, Human
agcagggcaguuaaaggguccu

SEQ ID NO: 422134 - RNA, 22 nt, Human
gggacuucauagcuaggcacuu

SEQ ID NO: 422135 - RNA, 22 nt, Human
cuugggagacacaagaagacau

SEQ ID NO: 422136 - RNA, 22 nt, Human
gcagcuuuaaacauuggaaaua

SEQ ID NO: 422137 - RNA, 22 nt, Human
gucucagagagcuacucucuua

SEQ ID NO: 422138 - RNA, 22 nt, Human
agacccugucaguguuaggaaa

SEQ ID NO: 422139 - RNA, 22 nt, Human
ccagcuuuuagugggcuuauua

SEQ ID NO: 422140 - RNA, 22 nt, Human
gcagacagacugcagugauuuu

SEQ ID NO: 422141 - RNA, 22 nt, Human
uggcagagguauauugggagga

SEQ ID NO: 422142 - RNA, 22 nt, Human
caggggcaggugugagaucauc

SEQ ID NO: 422143 - RNA, 17 nt, Human
ggugaguguccaggugg

SEQ ID NO: 422144 - RNA, 22 nt, Human
uaaaguuuggcagacaauaaca

SEQ ID NO: 422145 - RNA, 22 nt, Human
aacaugaaacccaaacagaaua

SEQ ID NO: 422146 - RNA, 22 nt, Human
ugggcaggggcccugcuuccgu

SEQ ID NO: 422147 - RNA, 22 nt, Human
auuuaguguguauugcuauuau

SEQ ID NO: 422148 - RNA, 22 nt, Human
cugggcagcuguaucagggagu

SEQ ID NO: 422149 - RNA, 22 nt, Human
uaguggaggccuguugugugca

SEQ ID NO: 422150 - RNA, 22 nt, Human
agccaccaccacugaaagguua

SEQ ID NO: 422151 - RNA, 22 nt, Human
ugcuuuauuggaaccucauccu

SEQ ID NO: 422152 - RNA, 19 nt, Human
agugcagggagcacccuca

SEQ ID NO: 422153 - RNA, 22 nt, Human
caggcaccccaggugagcacug

SEQ ID NO: 422154 - RNA, 22 nt, Human
uggcagggccugaaucuuauac

SEQ ID NO: 422155 - RNA, 22 nt, Human
cuucauuaaugucuauaaguuu

SEQ ID NO: 422156 - RNA, 22 nt, Human
uucuaucauacuugaauacauu

SEQ ID NO: 422157 - RNA, 22 nt, Human
ugggcagggucucuguuaucag

SEQ ID NO: 422158 - RNA, 22 nt, Human
gagcacagaaucuucccaugca

SEQ ID NO: 422159 - RNA, 22 nt, Human
gugcuuucugcugcauuccucu

SEQ ID NO: 422160 - RNA, 22 nt, Human
gcuucauuacugacagucugug

SEQ ID NO: 422161 - RNA, 22 nt, Human
ccagggugggaggcugaaggcg

SEQ ID NO: 422162 - RNA, 22 nt, Human
uccauuuucuaaguaucacuua

SEQ ID NO: 422163 - RNA, 22 nt, Human
agagccugugggagaugcagcu

SEQ ID NO: 422164 - RNA, 22 nt, Human
cagaggccucacuuccagccag

SEQ ID NO: 422165 - RNA, 19 nt, Human
cccuggcaggcaagccugg

SEQ ID NO: 422166 - RNA, 22 nt, Human
gaaggccacuuuguguugagaa

SEQ ID NO: 422167 - RNA, 22 nt, Human
cugacucagcagcugaugaucc

SEQ ID NO: 422168 - RNA, 22 nt, Human
aucagcaagauugugucuugua

SEQ ID NO: 422169 - RNA, 22 nt, Human
cugcaggauucucccaguugga

SEQ ID NO: 422170 - RNA, 22 nt, Human
uugcuuccaguccaagucuguu

SEQ ID NO: 422171 - RNA, 22 nt, Human
ugacaggcagugcugggcaugu

SEQ ID NO: 422172 - RNA, 22 nt, Human
uggcagagcccagacuccaguc

SEQ ID NO: 422173 - RNA, 22 nt, Human
gcccucugcuggccucaccucg

SEQ ID NO: 422174 - RNA, 22 nt, Human
ccagcuggcacuguggcugccc

SEQ ID NO: 422175 - RNA, 22 nt, Human
guggagccaggaucuccgcaca

SEQ ID NO: 422176 - RNA, 22 nt, Human
aggguccugggugcaguugcuu

SEQ ID NO: 422177 - RNA, 22 nt, Human
ucugucugcaccuaagcacagu

SEQ ID NO: 422178 - RNA, 22 nt, Human
cauuuagagucuugcaauuuua

SEQ ID NO: 422179 - RNA, 22 nt, Human
uuuaaaaaacuagucugagucu

SEQ ID NO: 422180 - RNA, 22 nt, Human
caugagaaguggccuucaaaaa

SEQ ID NO: 422181 - RNA, 21 nt, Human
uggcagagugcagucuauaca

SEQ ID NO: 422182 - RNA, 17 nt, Human
ggccuguguggcugcag

SEQ ID NO: 422183 - RNA, 22 nt, Human
acagagagggagugauaaaucc

SEQ ID NO: 422184 - RNA, 18 nt, Human
ggcucaggcuauccuaac

SEQ ID NO: 422185 - RNA, 22 nt, Human
uccuuuccagccucaccucagc

SEQ ID NO: 422186 - RNA, 22 nt, Human
ggcaaaaaccgcaauaacuucu

SEQ ID NO: 422187 - RNA, 22 nt, Human
ucccaaagcuacucuucugacu

SEQ ID NO: 422188 - RNA, 16 nt, Human
gagggcagaggcggaa

SEQ ID NO: 422189 - RNA, 21 nt, Human
uccugcaggaggccugagagg

SEQ ID NO: 422190 - RNA, 22 nt, Human
ccaccagcuuugccacccugcu

SEQ ID NO: 422191 - RNA, 22 nt, Human
gacaaaacacauuaguuuaaaa

SEQ ID NO: 422192 - RNA, 22 nt, Human
cacugaguucccugacauuuca

SEQ ID NO: 422193 - RNA, 17 nt, Human
uucucuuccuggauagu

SEQ ID NO: 422194 - RNA, 22 nt, Human
gagggccagcagccucagcaug

SEQ ID NO: 422195 - RNA, 22 nt, Human
ggcagaggugacagugucuuuu

SEQ ID NO: 422196 - RNA, 22 nt, Human
uguguugugacauucuuggaug

SEQ ID NO: 422197 - RNA, 22 nt, Human
cuguagcagugugcucuuuuuc

SEQ ID NO: 422198 - RNA, 22 nt, Human
cugaggcugggcauggggucca

SEQ ID NO: 422199 - RNA, 22 nt, Human
ucucaagaucucaagauggccc

SEQ ID NO: 422200 - RNA, 22 nt, Human
uguugagacugagggagucagc

SEQ ID NO: 422201 - RNA, 22 nt, Human
ugggcagauguggcucuccuug

SEQ ID NO: 422202 - RNA, 22 nt, Human
uuugugcagauguauauuugug

SEQ ID NO: 422203 - RNA, 22 nt, Human
uuaaaaccaucagcuguaagau

SEQ ID NO: 422204 - RNA, 20 nt, Human
uggcaggaggcagcagugga

SEQ ID NO: 422205 - RNA, 22 nt, Human
uggaauggaaacaaacugagga

SEQ ID NO: 422206 - RNA, 22 nt, Human
gcuuuauguaaguccaaaggca

SEQ ID NO: 422207 - RNA, 22 nt, Human
ccagucuggcaggagggggaac

SEQ ID NO: 422208 - RNA, 22 nt, Human
ggagccuuccagacugcccaca

SEQ ID NO: 422209 - RNA, 22 nt, Human
ucacaggacccugaggguggcg

SEQ ID NO: 422210 - RNA, 22 nt, Human
uugucugugaaauggaaauagu

SEQ ID NO: 422211 - RNA, 20 nt, Human
ucugcccaccccggcuccca

SEQ ID NO: 422212 - RNA, 22 nt, Human
gaaggagcuaaagggagcccug

SEQ ID NO: 422213 - RNA, 22 nt, Human
agcagggcagguaaggaucaga

SEQ ID NO: 422214 - RNA, 22 nt, Human
augauggugggagaugacccag

SEQ ID NO: 422215 - RNA, 22 nt, Human
ucucagagaagugaugagcaau

SEQ ID NO: 422216 - RNA, 22 nt, Human
ucagggcauucaagaggccugg

SEQ ID NO: 422217 - RNA, 22 nt, Human
gcaggagcugcucuccugacga

SEQ ID NO: 422218 - RNA, 22 nt, Human
uuaagaauggaaugaggaauuu

SEQ ID NO: 422219 - RNA, 20 nt, Human
cccagccccuaccuguugcc

SEQ ID NO: 422220 - RNA, 17 nt, Human
gcaagggaugggagauu

SEQ ID NO: 422221 - RNA, 22 nt, Human
gcaguggcuaggagucuggcgu

SEQ ID NO: 422222 - RNA, 23 nt, Human
ugcugggcagagcuggugcugag

SEQ ID NO: 422223 - RNA, 22 nt, Human
aacagaauugcugcugccaaug

SEQ ID NO: 422224 - RNA, 22 nt, Human
agcaccugcuuaaugugcagug

SEQ ID NO: 422225 - RNA, 22 nt, Human
ucagcaguuuuauaugcagcuu

SEQ ID NO: 422226 - RNA, 22 nt, Human
uuuuccucugagcuuugaauaa

SEQ ID NO: 422227 - RNA, 20 nt, Human
gucaggauuaguaaacucug

SEQ ID NO: 422228 - RNA, 22 nt, Human
augggugugaaaauggucaucu

SEQ ID NO: 422229 - RNA, 22 nt, Human
guccuggguccccgcaggucag

SEQ ID NO: 422230 - RNA, 22 nt, Human
gaagcagcuagcccacuaguca

SEQ ID NO: 422231 - RNA, 22 nt, Human
uugauagguuuuauguauaguu

SEQ ID NO: 422232 - RNA, 22 nt, Human
cagugagggcccccuuccaggu

SEQ ID NO: 422233 - RNA, 22 nt, Human
cucugaacucuugggcagcaug

SEQ ID NO: 422234 - RNA, 22 nt, Human
uugcauuguugcaaugaaguau

SEQ ID NO: 422235 - RNA, 22 nt, Human
ucuaguucuagaucccugagga

SEQ ID NO: 422236 - RNA, 22 nt, Human
aucagagaccggucaagucaug

SEQ ID NO: 422237 - RNA, 22 nt, Human
ugggccugccccaggcuucagc

SEQ ID NO: 422238 - RNA, 22 nt, Human
uucaaagugcauguuccucaga

SEQ ID NO: 422239 - RNA, 22 nt, Human
aucccuggacggcgccucccca

SEQ ID NO: 422240 - RNA, 18 nt, Human
cugaaggauccaggugua

SEQ ID NO: 422241 - RNA, 22 nt, Human
ggcaaaaaccacaauuacuuuu

SEQ ID NO: 422242 - RNA, 22 nt, Human
gagagggccagggugagaacua

SEQ ID NO: 422243 - RNA, 22 nt, Human
aggaaggguucuuugugaaaga

SEQ ID NO: 422244 - RNA, 23 nt, Human
ucugcucugaaguucggcugagc

SEQ ID NO: 422245 - RNA, 18 nt, Human
cccagcuggugggucagu

SEQ ID NO: 422246 - RNA, 22 nt, Human
ugaggcuugucucagauggggg

SEQ ID NO: 422247 - RNA, 22 nt, Human
cccagggcccuggacagcuaca

SEQ ID NO: 422248 - RNA, 22 nt, Human
gcagcuuuaaucugaauaagua

SEQ ID NO: 422249 - RNA, 22 nt, Human
cugggcagagcuaacaccugag

SEQ ID NO: 422250 - RNA, 22 nt, Human
agauacaucuugaacuucuaga

SEQ ID NO: 422251 - RNA, 19 nt, Human
cacagggcaggucucaugu

SEQ ID NO: 422252 - RNA, 22 nt, Human
gggauggacuuggggacuccag

SEQ ID NO: 422253 - RNA, 22 nt, Human
augcaagauguauagaagacuu

SEQ ID NO: 422254 - RNA, 22 nt, Human
uagaaaagaauuuuauuugaua

SEQ ID NO: 422255 - RNA, 22 nt, Human
ccugcaguuuguugugaccccg

SEQ ID NO: 422256 - RNA, 22 nt, Human
ugagacaguucugcagcugggu

SEQ ID NO: 422257 - RNA, 22 nt, Human
aaugaaugaaccacauauaaca

SEQ ID NO: 422258 - RNA, 22 nt, Human
cagcaucuaaucuucaugccgg

SEQ ID NO: 422259 - RNA, 22 nt, Human
acagaacuuccugcuggagugg

SEQ ID NO: 422260 - RNA, 22 nt, Human
aggaccuggaucacagagaucu

SEQ ID NO: 422261 - RNA, 22 nt, Human
gagcuuaggccagggacaggga

SEQ ID NO: 422262 - RNA, 22 nt, Human
uccuugaacagagggccugggu

SEQ ID NO: 422263 - RNA, 22 nt, Human
ucagggcauggcugcacuuggc

SEQ ID NO: 422264 - RNA, 18 nt, Human
agaaggagcuaugggcag

SEQ ID NO: 422265 - RNA, 22 nt, Human
agggcugccugacuccagagcc

SEQ ID NO: 422266 - RNA, 22 nt, Human
gccagccuucuguggccugcaa

SEQ ID NO: 422267 - RNA, 17 nt, Human
agccaggcauaugaagu

SEQ ID NO: 422268 - RNA, 22 nt, Human
gcaggaagccuuaccaagccca

SEQ ID NO: 422269 - RNA, 22 nt, Human
auuauaaagaacaugugugugg

SEQ ID NO: 422270 - RNA, 22 nt, Human
uguuccauaaguggugcuuugu

SEQ ID NO: 422271 - RNA, 22 nt, Human
gaaggaagucauuagugcagac

SEQ ID NO: 422272 - RNA, 22 nt, Human
ccucagaugucuuaaggcacug

SEQ ID NO: 422273 - RNA, 22 nt, Human
cagaggcugaugugggaugggc

SEQ ID NO: 422274 - RNA, 22 nt, Human
gaacauuuccagaaaggaacua

SEQ ID NO: 422275 - RNA, 22 nt, Human
guccucugggcuuugagcaguc

SEQ ID NO: 422276 - RNA, 22 nt, Human
ccuggaaggcaggcauggauug

SEQ ID NO: 422277 - RNA, 19 nt, Human
ucucccagcugagaagggc

SEQ ID NO: 422278 - RNA, 22 nt, Human
ucuuaaaaguaugccaauugga

SEQ ID NO: 422279 - RNA, 22 nt, Human
ggcaggcuggcuuuguuccagg

SEQ ID NO: 422280 - RNA, 22 nt, Human
aaaugucuuucaauagagaaau

SEQ ID NO: 422281 - RNA, 22 nt, Human
ugggcagaguagcucagaagaa

SEQ ID NO: 422282 - RNA, 22 nt, Human
guacauuucauuuaaaugaugu

SEQ ID NO: 422283 - RNA, 22 nt, Human
cauugcacgggcgucugucugu

SEQ ID NO: 422284 - RNA, 22 nt, Human
ggcuggcauccagggaaaucca

SEQ ID NO: 422285 - RNA, 22 nt, Human
acagauuuguucuuuugggcua

SEQ ID NO: 422286 - RNA, 22 nt, Human
cucucugaggaaggagcaucug

SEQ ID NO: 422287 - RNA, 22 nt, Human
ucacauucucagcaucuauaca

SEQ ID NO: 422288 - RNA, 22 nt, Human
gcccagcugucuggcagggaug

SEQ ID NO: 422289 - RNA, 22 nt, Human
ugcuaaauaaguggaauagaca

SEQ ID NO: 422290 - RNA, 22 nt, Human
cuggaaugagcagggcuuaugg

SEQ ID NO: 422291 - RNA, 22 nt, Human
acagcuuuuuacuaauagauug

SEQ ID NO: 422292 - RNA, 22 nt, Human
uugcaccauuucacuuccauua

SEQ ID NO: 422293 - RNA, 22 nt, Human
ccaaaguccacaguuuacauua

SEQ ID NO: 422294 - RNA, 22 nt, Human
cccacaggcuagggguagggca

SEQ ID NO: 422295 - RNA, 22 nt, Human
cucgcaggacagugcuaggacu

SEQ ID NO: 422296 - RNA, 21 nt, Human
ugagccaggcugacggcugug

SEQ ID NO: 422297 - RNA, 22 nt, Human
uauuuuguuaauaauccagucc

SEQ ID NO: 422298 - RNA, 22 nt, Human
agaguucugcucuucucaguga

SEQ ID NO: 422299 - RNA, 22 nt, Human
cgcuggggcuuuuugcuugaga

SEQ ID NO: 422300 - RNA, 17 nt, Human
ugagacagggcaggccc

SEQ ID NO: 422301 - RNA, 22 nt, Human
caagauggacauaaggagagaa

SEQ ID NO: 422302 - RNA, 21 nt, Human
gggccuggcugcgcaggacgg

SEQ ID NO: 422303 - RNA, 22 nt, Human
uaucuugagagacaacacagca

SEQ ID NO: 422304 - RNA, 20 nt, Human
ucucugcuguccacauuugc

SEQ ID NO: 422305 - RNA, 22 nt, Human
cauucugugauucuaaaucccu

SEQ ID NO: 422306 - RNA, 22 nt, Human
uaugaagaaguucugugaaaug

SEQ ID NO: 422307 - RNA, 22 nt, Human
ugaaaaaacaaguuggcccauu

SEQ ID NO: 422308 - RNA, 22 nt, Human
gcugagguaggagguugcagug

SEQ ID NO: 422309 - RNA, 22 nt, Human
ugaaacaaauuuggaaaaucua

SEQ ID NO: 422310 - RNA, 22 nt, Human
gcagagcucaagguguucagcu

SEQ ID NO: 422311 - RNA, 22 nt, Human
uucacauugugcagauuauggu

SEQ ID NO: 422312 - RNA, 22 nt, Human
cagggacauugguggccagguu

SEQ ID NO: 422313 - RNA, 22 nt, Human
agggaauguagcaagaugccaa

SEQ ID NO: 422314 - RNA, 22 nt, Human
ccagggcucaggcucccagugg

SEQ ID NO: 422315 - RNA, 22 nt, Human
uuacucagucucccauacauug

SEQ ID NO: 422316 - RNA, 22 nt, Human
gcagcuuugaagacuuauuugc

SEQ ID NO: 422317 - RNA, 18 nt, Human
ucucugaauauuuuaugu

SEQ ID NO: 422318 - RNA, 22 nt, Human
cagagccugccucuggcugugg

SEQ ID NO: 422319 - RNA, 22 nt, Human
gccuggagggcucuagagaggc

SEQ ID NO: 422320 - RNA, 22 nt, Human
auuuuccagccuuucuagaacu

SEQ ID NO: 422321 - RNA, 22 nt, Human
aggcugagaaagugggaagaug

SEQ ID NO: 422322 - RNA, 22 nt, Human
gcugugcuggaaggggaccugc

SEQ ID NO: 422323 - RNA, 22 nt, Human
ucaaaugcacguagagaaaaua

SEQ ID NO: 422324 - RNA, 22 nt, Human
gaagccucaacaucucugcguc

SEQ ID NO: 422325 - RNA, 21 nt, Human
acagaugggaugagcacacug

SEQ ID NO: 422326 - RNA, 22 nt, Human
cuguagcaaguuauucaauaaa

SEQ ID NO: 422327 - RNA, 22 nt, Human
ccuguguggaaaccgcaugacg

SEQ ID NO: 422328 - RNA, 22 nt, Human
aaagguuaguucuuagaagugc

SEQ ID NO: 422329 - RNA, 22 nt, Human
accuuucacgguaucagacauc

SEQ ID NO: 422330 - RNA, 22 nt, Human
agcugccauccuguucagcacc

SEQ ID NO: 422331 - RNA, 22 nt, Human
aggggaggagcuuuucuugccu

SEQ ID NO: 422332 - RNA, 22 nt, Human
agaaauguacgauguuaugcag

SEQ ID NO: 422333 - RNA, 22 nt, Human
auaaggcagucccuuaacaagg

SEQ ID NO: 422334 - RNA, 22 nt, Human
cuggguggcagagccugcagug

SEQ ID NO: 422335 - RNA, 22 nt, Human
uccucaggcggugaggaggggc

SEQ ID NO: 422336 - RNA, 22 nt, Human
cacaugcaucugucauguuugg

SEQ ID NO: 422337 - RNA, 22 nt, Human
augaaggcuguguagauggaug

SEQ ID NO: 422338 - RNA, 22 nt, Human
uucauauauaugcacuacguac

SEQ ID NO: 422339 - RNA, 21 nt, Human
agagucugcauuucugacaag

SEQ ID NO: 422340 - RNA, 22 nt, Human
gaacagcccuguuaagucuguu

SEQ ID NO: 422341 - RNA, 22 nt, Human
uuuccaaaggaggaaccaguuu

SEQ ID NO: 422342 - RNA, 22 nt, Human
uuccuccacgugacaggagcca

SEQ ID NO: 422343 - RNA, 22 nt, Human
gccaggcugacucccccggccu

SEQ ID NO: 422344 - RNA, 23 nt, Human
cccuggccuuggggcacaggcug

SEQ ID NO: 422345 - RNA, 22 nt, Human
ucucucagucagaugcuaaaga

SEQ ID NO: 422346 - RNA, 22 nt, Human
uucauucauuacgugccaggca

SEQ ID NO: 422347 - RNA, 22 nt, Human
uacaguaaccagucuacuuaga

SEQ ID NO: 422348 - RNA, 22 nt, Human
aagucauugguagcuugauagg

SEQ ID NO: 422349 - RNA, 22 nt, Human
ugggaggaucgcuugagcccag

SEQ ID NO: 422350 - RNA, 22 nt, Human
cuggagccacugggucuuguau

SEQ ID NO: 422351 - RNA, 22 nt, Human
auagucuuagaucagauaaagu

SEQ ID NO: 422352 - RNA, 23 nt, Human
aggcagugggggccacuuugcuu

SEQ ID NO: 422353 - RNA, 22 nt, Human
aggcagaggagaaugaucuucc

SEQ ID NO: 422354 - RNA, 21 nt, Human
uuugagaauuggucagagugc

SEQ ID NO: 422355 - RNA, 19 nt, Human
guggccugcgcugggugcg

SEQ ID NO: 422356 - RNA, 22 nt, Human
guuuauuaacugucaagugauu

SEQ ID NO: 422357 - RNA, 22 nt, Human
gggcucucgauuagacccuggg

SEQ ID NO: 422358 - RNA, 22 nt, Human
gggaaauugucaacacucucaa

SEQ ID NO: 422359 - RNA, 17 nt, Human
uuucuccuuccaucuca

SEQ ID NO: 422360 - RNA, 22 nt, Human
guacuuccagccaagugagaca

SEQ ID NO: 422361 - RNA, 22 nt, Human
auguagcaugaggcacugugcc

SEQ ID NO: 422362 - RNA, 22 nt, Human
cugagagccuccuguuggcuag

SEQ ID NO: 422363 - RNA, 22 nt, Human
aaguuucaaauauaaaauuaca

SEQ ID NO: 422364 - RNA, 22 nt, Human
agggagcugcucugcuuccgug

SEQ ID NO: 422365 - RNA, 18 nt, Human
ccgggcuuuggugacaca

SEQ ID NO: 422366 - RNA, 21 nt, Human
uccacaaguuagaaggaaauu

SEQ ID NO: 422367 - RNA, 22 nt, Human
guaagggauuugaacauagguu

SEQ ID NO: 422368 - RNA, 21 nt, Human
aguucauacugaguaacaaaa

SEQ ID NO: 422369 - RNA, 22 nt, Human
gcucucugaggugcuggcagag

SEQ ID NO: 422370 - RNA, 22 nt, Human
accugcagcuaaagauguaggg

SEQ ID NO: 422371 - RNA, 22 nt, Human
ggccuugggauguggcugcagc

SEQ ID NO: 422372 - RNA, 23 nt, Human
aaccagauaaauggcuccagggc

SEQ ID NO: 422373 - RNA, 22 nt, Human
ccaaguacucucaccaaagcuu

SEQ ID NO: 422374 - RNA, 22 nt, Human
aguugcagacgcagagauguug

SEQ ID NO: 422375 - RNA, 22 nt, Human
auguacaguuucuagacucaaa

SEQ ID NO: 422376 - RNA, 20 nt, Human
aagagaagaagucuuugaaa

SEQ ID NO: 422377 - RNA, 22 nt, Human
ucauuucuauugcuacugucug

SEQ ID NO: 422378 - RNA, 22 nt, Human
augccaggccccacgcugggca

SEQ ID NO: 422379 - RNA, 22 nt, Human
cugagccaaggggacagugaca

SEQ ID NO: 422380 - RNA, 17 nt, Human
uugggagagaaagguau

SEQ ID NO: 422381 - RNA, 22 nt, Human
acugcaucugaaacauggguca

SEQ ID NO: 422382 - RNA, 22 nt, Human
cugggagcggcugucacugguu

SEQ ID NO: 422383 - RNA, 22 nt, Human
uuuguaaaaggaggaagcaugg

SEQ ID NO: 422384 - RNA, 22 nt, Human
ugaggcagugauguuuaagcac

SEQ ID NO: 422385 - RNA, 22 nt, Human
guuuggggucugcagagcggcg

SEQ ID NO: 422386 - RNA, 22 nt, Human
aaagccuugagauccuauaguu

SEQ ID NO: 422387 - RNA, 22 nt, Human
agguauagaauugaaaggguuu

SEQ ID NO: 422388 - RNA, 22 nt, Human
ggcacugacugugcagcgcacc

SEQ ID NO: 422389 - RNA, 22 nt, Human
uuuccucuuugugacacagcug

SEQ ID NO: 422390 - RNA, 22 nt, Human
ugccagcaguagcaguaggcca

SEQ ID NO: 422391 - RNA, 22 nt, Human
ggagucaccaaguaggagucuu

SEQ ID NO: 422392 - RNA, 22 nt, Human
gcaguggcuaagcucgcaugca

SEQ ID NO: 422393 - RNA, 22 nt, Human
ugaaggcuguuggauggggaag

SEQ ID NO: 422394 - RNA, 22 nt, Human
agcaggugcauggcgagcgcgg

SEQ ID NO: 422395 - RNA, 22 nt, Human
ucaugcaaggcugaaacauggu

SEQ ID NO: 422396 - RNA, 22 nt, Human
ggcugggcuccgggagcaugcg

SEQ ID NO: 422397 - RNA, 23 nt, Human
ucccagccucuucucuugcauac

SEQ ID NO: 422398 - RNA, 22 nt, Human
cugaggcuggggaagggaagug

SEQ ID NO: 422399 - RNA, 22 nt, Human
ugugcauguauugauuuguacc

SEQ ID NO: 422400 - RNA, 22 nt, Human
aggcacuggguaauuaguagcu

SEQ ID NO: 422401 - RNA, 22 nt, Human
ucauugcagugauguuguaugu

SEQ ID NO: 422402 - RNA, 22 nt, Human
ucauccuuuugcaugggaaggc

SEQ ID NO: 422403 - RNA, 22 nt, Human
cucccucugucuuguccagaaa

SEQ ID NO: 422404 - RNA, 22 nt, Human
uccagcucaggguuggcucaag

SEQ ID NO: 422405 - RNA, 22 nt, Human
uggguggaauaaaucaguucug

SEQ ID NO: 422406 - RNA, 22 nt, Human
ucccugcacagccgagccaugc

SEQ ID NO: 422407 - RNA, 21 nt, Human
ggccugaguauaggacaggcc

SEQ ID NO: 422408 - RNA, 22 nt, Human
cagaggaggccaccgcauaggc

SEQ ID NO: 422409 - RNA, 22 nt, Human
ugaggccugaagccugaaguga

SEQ ID NO: 422410 - RNA, 22 nt, Human
ucagagagugcaaaauauagcu

SEQ ID NO: 422411 - RNA, 22 nt, Human
uuauugccugauugaggucauu

SEQ ID NO: 422412 - RNA, 22 nt, Human
gagggcugaagauuguggcccc

SEQ ID NO: 422413 - RNA, 22 nt, Human
uguccugcaacugaaggagaag

SEQ ID NO: 422414 - RNA, 22 nt, Human
agccuucaaccuagcuagagca

SEQ ID NO: 422415 - RNA, 22 nt, Human
gaaaaagugaccuugguagcua

SEQ ID NO: 422416 - RNA, 22 nt, Human
guggagcccugccuugcucaug

SEQ ID NO: 422417 - RNA, 22 nt, Human
agagccuggggauuggcaaggg

SEQ ID NO: 422418 - RNA, 22 nt, Human
uggacagcgaaagugccuggga

SEQ ID NO: 422419 - RNA, 22 nt, Human
ucuaccacuaagugugcuuuga

SEQ ID NO: 422420 - RNA, 22 nt, Human
ugaggcaggacauggacaacug

SEQ ID NO: 422421 - RNA, 18 nt, Human
ccuggaccugucuccuuu

SEQ ID NO: 422422 - RNA, 22 nt, Human
ugagcugggaguggugaugagg

SEQ ID NO: 422423 - RNA, 22 nt, Human
ugcuguuauacuuagcugguua

SEQ ID NO: 422424 - RNA, 22 nt, Human
cagagcuggcggugagaagaca

SEQ ID NO: 422425 - RNA, 23 nt, Human
ucugggcaccuuguugacaugau

SEQ ID NO: 422426 - RNA, 22 nt, Human
agaacagaggccuuauguuuca

SEQ ID NO: 422427 - RNA, 22 nt, Human
uauugaguuacagaaaauacuu

SEQ ID NO: 422428 - RNA, 19 nt, Human
acuuugcaugugugucuaa

SEQ ID NO: 422429 - RNA, 22 nt, Human
ucagggacuuacaaaccagaag

SEQ ID NO: 422430 - RNA, 22 nt, Human
aaguucaaucagaugaaaaagc

SEQ ID NO: 422431 - RNA, 22 nt, Human
uccugagauguggagcuccaug

SEQ ID NO: 422432 - RNA, 22 nt, Human
ccagacuguggaguuccuggug

SEQ ID NO: 422433 - RNA, 18 nt, Human
gugagcagagagcaucac

SEQ ID NO: 422434 - RNA, 21 nt, Human
cuguuucuugugaagugacac

SEQ ID NO: 422435 - RNA, 22 nt, Human
cugagcuggucuauggacuugg

SEQ ID NO: 422436 - RNA, 17 nt, Human
aggaagggcaaguuucu

SEQ ID NO: 422437 - RNA, 22 nt, Human
agccaggccagcugucuugagu

SEQ ID NO: 422438 - RNA, 22 nt, Human
aucuagaaaguguugaagauca

SEQ ID NO: 422439 - RNA, 22 nt, Human
uugcuauuuugagagucauagu

SEQ ID NO: 422440 - RNA, 22 nt, Human
uaaaugugucuuuuuaaggccu

SEQ ID NO: 422441 - RNA, 22 nt, Human
gaggaggcacuugagcagaugu

SEQ ID NO: 422442 - RNA, 22 nt, Human
ucuggcucugacacuacuguua

SEQ ID NO: 422443 - RNA, 22 nt, Human
ucauuuaauagcuuuugucuuu

SEQ ID NO: 422444 - RNA, 22 nt, Human
ggagaugcuauguaguuugguu

SEQ ID NO: 422445 - RNA, 22 nt, Human
ccugggagugucagacuugcuu

SEQ ID NO: 422446 - RNA, 22 nt, Human
aaguggagcuauaggcucagau

SEQ ID NO: 422447 - RNA, 22 nt, Human
gugcugaguagaaugaaugccu

SEQ ID NO: 422448 - RNA, 22 nt, Human
cagcaucuuucucuucuggagu

SEQ ID NO: 422449 - RNA, 22 nt, Human
cagcucugggugacaggagggc

SEQ ID NO: 422450 - RNA, 22 nt, Human
caauguguuugcauauuaaaau

SEQ ID NO: 422451 - RNA, 22 nt, Human
gcagccugaggcccuuucuggc

SEQ ID NO: 422452 - RNA, 22 nt, Human
accuggccauccagcuggcauc

SEQ ID NO: 422453 - RNA, 22 nt, Human
gaggcagcaggcugaggaggau

SEQ ID NO: 422454 - RNA, 21 nt, Human
gauuucacuuaccuucauuua

SEQ ID NO: 422455 - RNA, 20 nt, Human
agcuggccuguccuaggccu

SEQ ID NO: 422456 - RNA, 22 nt, Human
auaucuuuguuuuugccaagau

SEQ ID NO: 422457 - RNA, 22 nt, Human
agauuucccaaauacuuguuau

SEQ ID NO: 422458 - RNA, 23 nt, Human
uggcucugugucacauacaggau

SEQ ID NO: 422459 - RNA, 18 nt, Human
ggcugccuguuccugaag

SEQ ID NO: 422460 - RNA, 22 nt, Human
gcuggggcugggcugaggaaga

SEQ ID NO: 422461 - RNA, 22 nt, Human
cucagaguggggcucccugagg

SEQ ID NO: 422462 - RNA, 22 nt, Human
auuuuucucuuuccacugagau

SEQ ID NO: 422463 - RNA, 22 nt, Human
ucuggcucacuucaggcuucac

SEQ ID NO: 422464 - RNA, 22 nt, Human
ccuuucucauuuuaagcauuag

SEQ ID NO: 422465 - RNA, 22 nt, Human
aagagcuggauugugcugcaga

SEQ ID NO: 422466 - RNA, 22 nt, Human
uuucuggcagcgggacaggggu

SEQ ID NO: 422467 - RNA, 22 nt, Human
acacagggcugcgccugacccc

SEQ ID NO: 422468 - RNA, 20 nt, Human
gauuacaaaaugaaaugcau

SEQ ID NO: 422469 - RNA, 22 nt, Human
ccaaggagcaaguuuacaccug

SEQ ID NO: 422470 - RNA, 22 nt, Human
cccuguccuuggcugugaggcu

SEQ ID NO: 422471 - RNA, 22 nt, Human
cuuaaauucuuaaugcccucau

SEQ ID NO: 422472 - RNA, 22 nt, Human
gggaggucagggugccugcugg

SEQ ID NO: 422473 - RNA, 22 nt, Human
ggccagagagcagccaggauuc

SEQ ID NO: 422474 - RNA, 22 nt, Human
ugucagagcaaugagguucagc

SEQ ID NO: 422475 - RNA, 20 nt, Human
cagaggcauuuucagacucu

SEQ ID NO: 422476 - RNA, 22 nt, Human
cugccgaguacagccauagaaa

SEQ ID NO: 422477 - RNA, 22 nt, Human
ucagccucucugaguccagacc

SEQ ID NO: 422478 - RNA, 22 nt, Human
augugaggcagcacggagauua

SEQ ID NO: 422479 - RNA, 22 nt, Human
ggccucugccccagccacaccu

SEQ ID NO: 422480 - RNA, 22 nt, Human
gcugucaggaacaugccuuggu

SEQ ID NO: 422481 - RNA, 22 nt, Human
ucccagaguuuccuguguccca

SEQ ID NO: 422482 - RNA, 22 nt, Human
uucauguauuuaucauguaaau

SEQ ID NO: 422483 - RNA, 22 nt, Human
caaggagaaaacggcuucugaa

SEQ ID NO: 422484 - RNA, 22 nt, Human
gcugccuuuugcuccucccacc

SEQ ID NO: 422485 - RNA, 22 nt, Human
cccucagcuccacccucagcag

SEQ ID NO: 422486 - RNA, 20 nt, Human
ccugucuggagacaaagaga

SEQ ID NO: 422487 - RNA, 22 nt, Human
ucaggggcuugaggugcauguc

SEQ ID NO: 422488 - RNA, 22 nt, Human
agaaugcaguuugaaauaaggu

SEQ ID NO: 422489 - RNA, 22 nt, Human
gcagggucugaggccacagagg

SEQ ID NO: 422490 - RNA, 22 nt, Human
aggccugagcagaggaguggac

SEQ ID NO: 422491 - RNA, 22 nt, Human
acauuucugcuagaauagguga

SEQ ID NO: 422492 - RNA, 22 nt, Human
agcugccaaguuucucaguuua

SEQ ID NO: 422493 - RNA, 22 nt, Human
gugcuuucugcaugguuccuac

SEQ ID NO: 422494 - RNA, 22 nt, Human
gagcugggacauggguccucuc

SEQ ID NO: 422495 - RNA, 22 nt, Human
guuguauagagggcaugaaucu

SEQ ID NO: 422496 - RNA, 22 nt, Human
uagggcuguuuaaaagugaggu

SEQ ID NO: 422497 - RNA, 22 nt, Human
aggcucagagagcuguguccau

SEQ ID NO: 422498 - RNA, 22 nt, Human
aacuguacgauaauaaauuugu

SEQ ID NO: 422499 - RNA, 22 nt, Human
ucccagcagucagagcuaugug

SEQ ID NO: 422500 - RNA, 22 nt, Human
ugcaggagacauaauagggacu

SEQ ID NO: 422501 - RNA, 22 nt, Human
gcugucacucaccaggccugca

SEQ ID NO: 422502 - RNA, 22 nt, Human
aagugacaaaaggguauccaaa

SEQ ID NO: 422503 - RNA, 22 nt, Human
accaggcugugaagugagacua

SEQ ID NO: 422504 - RNA, 22 nt, Human
cacugaagcuuucauucucuug

SEQ ID NO: 422505 - RNA, 22 nt, Human
uucaagaugucuucacaauagu

SEQ ID NO: 422506 - RNA, 22 nt, Human
guccacauaggaacccagcuuc

SEQ ID NO: 422507 - RNA, 22 nt, Human
cugagcugagccaaaucugucu

SEQ ID NO: 422508 - RNA, 22 nt, Human
auuccaaacagugcugcagacu

SEQ ID NO: 422509 - RNA, 22 nt, Human
gggcaagcucuucagaagcucu

SEQ ID NO: 422510 - RNA, 22 nt, Human
cuggugugauugagcccaggug

SEQ ID NO: 422511 - RNA, 22 nt, Human
ggggacccucaggacugcgucu

SEQ ID NO: 422512 - RNA, 22 nt, Human
ucucugucugagccuggcagac

SEQ ID NO: 422513 - RNA, 22 nt, Human
cuggaaguauaggggagaugau

SEQ ID NO: 422514 - RNA, 22 nt, Human
gggggaagaaagaacauggcau

SEQ ID NO: 422515 - RNA, 22 nt, Human
ucuuuuuauauugacaaaaggu

SEQ ID NO: 422516 - RNA, 22 nt, Human
cagaggaagagauacaagcccu

SEQ ID NO: 422517 - RNA, 23 nt, Human
aggcacugaaugugucagugagu

SEQ ID NO: 422518 - RNA, 22 nt, Human
ggaggcugagaaguccaagauc

SEQ ID NO: 422519 - RNA, 22 nt, Human
uccugccucacaguugaaguuu

SEQ ID NO: 422520 - RNA, 22 nt, Human
cuccucuggaaauuccucugcc

SEQ ID NO: 422521 - RNA, 22 nt, Human
uacuuagagcgauaauuuauac

SEQ ID NO: 422522 - RNA, 22 nt, Human
cugggcaggagggcucuaugga

SEQ ID NO: 422523 - RNA, 22 nt, Human
uaguuacagcaggcaggauaua

SEQ ID NO: 422524 - RNA, 22 nt, Human
agcccccaaaagugcuuaugau

SEQ ID NO: 422525 - RNA, 19 nt, Human
ccauggcaaugaucugaug

SEQ ID NO: 422526 - RNA, 22 nt, Human
aaaucaguuagugguaggauug

SEQ ID NO: 422527 - RNA, 22 nt, Human
agaagugcuccagugaguuggg

SEQ ID NO: 422528 - RNA, 22 nt, Human
ugagcaguaacagcucacaggg

SEQ ID NO: 422529 - RNA, 22 nt, Human
gcauguguggaggagaugugcu

SEQ ID NO: 422530 - RNA, 22 nt, Human
ggcuucugguaaagaccacacc

SEQ ID NO: 422531 - RNA, 22 nt, Human
gcagccaggaaagcuggacccu

SEQ ID NO: 422532 - RNA, 22 nt, Human
gcuccugggcucuaccuugcua

SEQ ID NO: 422533 - RNA, 18 nt, Human
caggucagccuggccuca

SEQ ID NO: 422534 - RNA, 22 nt, Human
ucaaaggcccauugucccguug

SEQ ID NO: 422535 - RNA, 22 nt, Human
gucuuucuuaauucaagugcuu

SEQ ID NO: 422536 - RNA, 22 nt, Human
cuacauggagaagaaaauucuu

SEQ ID NO: 422537 - RNA, 16 nt, Human
cagccugcagugguca

SEQ ID NO: 422538 - RNA, 22 nt, Human
ccuggagcccaaggcagugaga

SEQ ID NO: 422539 - RNA, 20 nt, Human
guggccuguccuguuguggg

SEQ ID NO: 422540 - RNA, 22 nt, Human
ugagccugggagauggaggcug

SEQ ID NO: 422541 - RNA, 22 nt, Human
cugaggccucuguucaccagaa

SEQ ID NO: 422542 - RNA, 22 nt, Human
aggcuggcuuggcucuccugug

SEQ ID NO: 422543 - RNA, 19 nt, Human
cauaauacaguggaucuga

SEQ ID NO: 422544 - RNA, 22 nt, Human
aaagcuuuucaguauguucaug

SEQ ID NO: 422545 - RNA, 22 nt, Human
aaaaugaggucaauauccuuuu

SEQ ID NO: 422546 - RNA, 22 nt, Human
gccugccucaaaaucccaguuc

SEQ ID NO: 422547 - RNA, 22 nt, Human
uugggaaggcguggaagcagaa

SEQ ID NO: 422548 - RNA, 22 nt, Human
ucagggacuaggugcugccuga

SEQ ID NO: 422549 - RNA, 22 nt, Human
ggccucuguuuggagccaggau

SEQ ID NO: 422550 - RNA, 22 nt, Human
agggaaggaaaagcugucgcuu

SEQ ID NO: 422551 - RNA, 21 nt, Human
cagaggcagguccugggacgg

SEQ ID NO: 422552 - RNA, 22 nt, Human
ucaguggagagcuuccaggauu

SEQ ID NO: 422553 - RNA, 22 nt, Human
ggcugagcaauuuugaugacau

SEQ ID NO: 422554 - RNA, 22 nt, Human
gggagggaaggaccuuaugaau

SEQ ID NO: 422555 - RNA, 22 nt, Human
caguggguaggaaaggcucuuc

SEQ ID NO: 422556 - RNA, 22 nt, Human
gagggauggugugagaggcuca

SEQ ID NO: 422557 - RNA, 22 nt, Human
uccuggagggaggcggugcuac

SEQ ID NO: 422558 - RNA, 19 nt, Human
aggaaagguggccuuagca

SEQ ID NO: 422559 - RNA, 21 nt, Human
augaagucuaugcuucugugu

SEQ ID NO: 422560 - RNA, 22 nt, Human
auucuagaugcuguaaguagca

SEQ ID NO: 422561 - RNA, 22 nt, Human
acucaggaaaugagaggcucuc

SEQ ID NO: 422562 - RNA, 22 nt, Human
uucauucaucucuaaaaugccu

SEQ ID NO: 422563 - RNA, 22 nt, Human
aggucauuaaaguuaaaugagg

SEQ ID NO: 422564 - RNA, 22 nt, Human
cagaaaaccugacucuagaacu

SEQ ID NO: 422565 - RNA, 22 nt, Human
cagcuuugauucuuucugccau

SEQ ID NO: 422566 - RNA, 22 nt, Human
auuccaaagacagaagcagcug

SEQ ID NO: 422567 - RNA, 22 nt, Human
agccucugucaagcuuuucaaa

SEQ ID NO: 422568 - RNA, 19 nt, Human
uggcucugucgaaggcaca

SEQ ID NO: 422569 - RNA, 23 nt, Human
ugggcaucuccucugugccaggc

SEQ ID NO: 422570 - RNA, 22 nt, Human
aagggcagggaguuugugucua

SEQ ID NO: 422571 - RNA, 22 nt, Human
ucacguuuuacugagugagaua

SEQ ID NO: 422572 - RNA, 22 nt, Human
uaaaugugaccuucauuuuaua

SEQ ID NO: 422573 - RNA, 22 nt, Human
guuuucauuacugcugugauuu

SEQ ID NO: 422574 - RNA, 22 nt, Human
aggcugugauuccaccacucuc

SEQ ID NO: 422575 - RNA, 20 nt, Human
aggccaggaaauguaguucu

SEQ ID NO: 422576 - RNA, 22 nt, Human
gcugccaugccacagcacucac

SEQ ID NO: 422577 - RNA, 22 nt, Human
agcugacuucuugauccaauga

SEQ ID NO: 422578 - RNA, 22 nt, Human
augaugguuguccuaggugcau

SEQ ID NO: 422579 - RNA, 22 nt, Human
cugcugugggcaggguagcugg

SEQ ID NO: 422580 - RNA, 22 nt, Human
cagaaagaccugggcucaagag

SEQ ID NO: 422581 - RNA, 22 nt, Human
ugacaauacagagagagcaaaa

SEQ ID NO: 422582 - RNA, 22 nt, Human
agcagagcugcaguggccugcu

SEQ ID NO: 422583 - RNA, 22 nt, Human
cuguacaggucaaugauaagau

SEQ ID NO: 422584 - RNA, 22 nt, Human
cagggcucuucaucacacagua

SEQ ID NO: 422585 - RNA, 22 nt, Human
acacuuuguuguggcauauacg

SEQ ID NO: 422586 - RNA, 22 nt, Human
ucucagagggaaacaugaguga

SEQ ID NO: 422587 - RNA, 22 nt, Human
aaccauuugcaguuacugagac

SEQ ID NO: 422588 - RNA, 20 nt, Human
ccuggcuuugcaucugugau

SEQ ID NO: 422589 - RNA, 22 nt, Human
ugaggcucagaaauguaaguuu

SEQ ID NO: 422590 - RNA, 22 nt, Human
cugcugggcuccucaugugacu

SEQ ID NO: 422591 - RNA, 22 nt, Human
ccugaagggacuccagagagca

SEQ ID NO: 422592 - RNA, 22 nt, Human
gcaggauggugcccuuucugcc

SEQ ID NO: 422593 - RNA, 22 nt, Human
augaggcagaaaaaagucggag

SEQ ID NO: 422594 - RNA, 22 nt, Human
agaugcuucaguguuuaauuua

SEQ ID NO: 422595 - RNA, 22 nt, Human
ggccaccucugcccuacugagu

SEQ ID NO: 422596 - RNA, 22 nt, Human
gcagacuggucuucagccuugg

SEQ ID NO: 422597 - RNA, 22 nt, Human
uaccuugggcuauuaucuuuga

SEQ ID NO: 422598 - RNA, 22 nt, Human
gccaggugggagacagacagca

SEQ ID NO: 422599 - RNA, 22 nt, Human
aguuuuauuccaaugugcagca

SEQ ID NO: 422600 - RNA, 22 nt, Human
cugaggugcuauggaggauacg

SEQ ID NO: 422601 - RNA, 22 nt, Human
uuuuucaugagacuagaaguca

SEQ ID NO: 422602 - RNA, 22 nt, Human
uucaagaugacccagucacacg

SEQ ID NO: 422603 - RNA, 22 nt, Human
agagcugcaccuaugcagaccu

SEQ ID NO: 422604 - RNA, 22 nt, Human
agcagcuggugagcaagcucag

SEQ ID NO: 422605 - RNA, 22 nt, Human
cuacagacccaccuuggaagaa

SEQ ID NO: 422606 - RNA, 18 nt, Human
aagcugcccucaggcagg

SEQ ID NO: 422607 - RNA, 21 nt, Human
agagaauugccuuagauguuc

SEQ ID NO: 422608 - RNA, 22 nt, Human
aggaagcccuugucauuucugu

SEQ ID NO: 422609 - RNA, 22 nt, Human
uucaauucaauucuaaauauau

SEQ ID NO: 422610 - RNA, 21 nt, Human
accaucuuccaugcauuauau

SEQ ID NO: 422611 - RNA, 22 nt, Human
ugugugcauucacaugcaugcc

SEQ ID NO: 422612 - RNA, 22 nt, Human
uggagccaaggccaguucucag

SEQ ID NO: 422613 - RNA, 21 nt, Human
cagaaguaaggguaacuucuc

SEQ ID NO: 422614 - RNA, 22 nt, Human
auggccuggggagcaugggaag

SEQ ID NO: 422615 - RNA, 22 nt, Human
uggagggcaugcuguccauggg

SEQ ID NO: 422616 - RNA, 22 nt, Human
cagagcuggacuuaaauauauu

SEQ ID NO: 422617 - RNA, 22 nt, Human
ugcccacaggaagacaccagcg

SEQ ID NO: 422618 - RNA, 22 nt, Human
uccaggcaggguuaaggguccu

SEQ ID NO: 422619 - RNA, 22 nt, Human
ccagagagagaggucaauggca

SEQ ID NO: 422620 - RNA, 22 nt, Human
uagagcugcuggacuguaacag

SEQ ID NO: 422621 - RNA, 22 nt, Human
augcacagcagugaguucagug

SEQ ID NO: 422622 - RNA, 23 nt, Human
caggacaugggaggaaguauggc

SEQ ID NO: 422623 - RNA, 20 nt, Human
ugaugguucuuuccggguug

SEQ ID NO: 422624 - RNA, 20 nt, Human
ggaagccagcauccuugagg

SEQ ID NO: 422625 - RNA, 22 nt, Human
aagggcaggagaagacggauau

SEQ ID NO: 422626 - RNA, 21 nt, Human
ugcagaggcacaaacaagccc

SEQ ID NO: 422627 - RNA, 21 nt, Human
ugccagcauuaaacagucauu

SEQ ID NO: 422628 - RNA, 22 nt, Human
aggcccuguuaugagccacugu

SEQ ID NO: 422629 - RNA, 22 nt, Human
cugcuuugcauagcugccagag

SEQ ID NO: 422630 - RNA, 22 nt, Human
aggguaggguaaaugaugcauc

SEQ ID NO: 422631 - RNA, 17 nt, Human
agcagaagucagaggga

SEQ ID NO: 422632 - RNA, 22 nt, Human
ccuggccuuaagggcagggagc

SEQ ID NO: 422633 - RNA, 22 nt, Human
uccuggaggcaaaugagcacau

SEQ ID NO: 422634 - RNA, 22 nt, Human
aggggcucaaagugugcaggga

SEQ ID NO: 422635 - RNA, 22 nt, Human
gcugucagaaggugaaggguaa

SEQ ID NO: 422636 - RNA, 22 nt, Human
aggaagugcuaagagaacauca

SEQ ID NO: 422637 - RNA, 21 nt, Human
accagcaggagaucagaagga

SEQ ID NO: 422638 - RNA, 21 nt, Human
ugggggagaauugguugcuuu

SEQ ID NO: 422639 - RNA, 22 nt, Human
uccuguaguugcuaaguuuguu

SEQ ID NO: 422640 - RNA, 21 nt, Human
uggcagaguugaguaguuaug

SEQ ID NO: 422641 - RNA, 22 nt, Human
ggucugagcuugagcccaugcu

SEQ ID NO: 422642 - RNA, 22 nt, Human
auuuuaauaagauucccaagua

SEQ ID NO: 422643 - RNA, 23 nt, Human
uccaggcacgcauuucuucuagc

SEQ ID NO: 422644 - RNA, 22 nt, Human
gccagagcaugcacugccugca

SEQ ID NO: 422645 - RNA, 22 nt, Human
ugcugcucuucaccauggccuc

SEQ ID NO: 422646 - RNA, 22 nt, Human
aaugugguuaacccauuuaaga

SEQ ID NO: 422647 - RNA, 22 nt, Human
ugggacaguuguccuccacucu

SEQ ID NO: 422648 - RNA, 22 nt, Human
ucugucacucuagagauggcag

SEQ ID NO: 422649 - RNA, 22 nt, Human
gagaaguuucugguuugcauag

SEQ ID NO: 422650 - RNA, 22 nt, Human
cgggcagugcccagcggggcag

SEQ ID NO: 422651 - RNA, 22 nt, Human
auaugugugccauuucagcagu

SEQ ID NO: 422652 - RNA, 22 nt, Human
aagcagaaguugaucuaccaua

SEQ ID NO: 422653 - RNA, 23 nt, Human
aagaauaaaugacauuaaaggug

SEQ ID NO: 422654 - RNA, 22 nt, Human
uagacacauccguggaagcuuc

SEQ ID NO: 422655 - RNA, 22 nt, Human
ugaacauauucaccucuaaaua

SEQ ID NO: 422656 - RNA, 21 nt, Human
ggcccugguuacgccuccucu

SEQ ID NO: 422657 - RNA, 22 nt, Human
agccacagcccacaggacucuu

SEQ ID NO: 422658 - RNA, 22 nt, Human
gggcacuguguucagagugcag

SEQ ID NO: 422659 - RNA, 22 nt, Human
ggcagcugggucacaccgaucu

SEQ ID NO: 422660 - RNA, 22 nt, Human
agccucuguagaaagcagugug

SEQ ID NO: 422661 - RNA, 19 nt, Human
guccaguguuuuccaguca

SEQ ID NO: 422662 - RNA, 22 nt, Human
agggggaggcugugcugcgucu

SEQ ID NO: 422663 - RNA, 22 nt, Human
agcugccuguccuaggccauca

SEQ ID NO: 422664 - RNA, 22 nt, Human
guccagggaaauagcgacaggg

SEQ ID NO: 422665 - RNA, 22 nt, Human
ggccugugagcccuugcaugua

SEQ ID NO: 422666 - RNA, 22 nt, Human
caggcuggaguuaccuuuaggg

SEQ ID NO: 422667 - RNA, 23 nt, Human
cugaggccugcugcguucagguu

SEQ ID NO: 422668 - RNA, 18 nt, Human
ggcugagguugacuagaa

SEQ ID NO: 422669 - RNA, 21 nt, Human
gccagccuguuuaccuguggu

SEQ ID NO: 422670 - RNA, 22 nt, Human
caauuucuaacauuccauggau

SEQ ID NO: 422671 - RNA, 22 nt, Human
uggcagcugucuguggggucuc

SEQ ID NO: 422672 - RNA, 22 nt, Human
aggagggugauccgggcugguc

SEQ ID NO: 422673 - RNA, 22 nt, Human
aguguugucaaacggcucagca

SEQ ID NO: 422674 - RNA, 22 nt, Human
aggcucagagaugaguaagcac

SEQ ID NO: 422675 - RNA, 22 nt, Human
ccagaggugccacagaaagagc

SEQ ID NO: 422676 - RNA, 22 nt, Human
uucccaguuagucauuuuuaca

SEQ ID NO: 422677 - RNA, 22 nt, Human
uguguacacaaugauugcagag

SEQ ID NO: 422678 - RNA, 21 nt, Human
uccauaagagaccaucuccua

SEQ ID NO: 422679 - RNA, 22 nt, Human
cuggccuggagccucugggugg

SEQ ID NO: 422680 - RNA, 22 nt, Human
aauguguauaugaacauacagg

SEQ ID NO: 422681 - RNA, 22 nt, Human
ugcagggaaaacccaggaugcu

SEQ ID NO: 422682 - RNA, 22 nt, Human
aggcccuggguuagggcccacu

SEQ ID NO: 422683 - RNA, 22 nt, Human
ugcuuuauucagucucugccau

SEQ ID NO: 422684 - RNA, 22 nt, Human
uaaaugugggggccacgggcuu

SEQ ID NO: 422685 - RNA, 22 nt, Human
uuacaucauugagacauacaua

SEQ ID NO: 422686 - RNA, 22 nt, Human
ccugggcuuucaaaaccagccu

SEQ ID NO: 422687 - RNA, 22 nt, Human
agcugagcucaggcugauguaa

SEQ ID NO: 422688 - RNA, 22 nt, Human
ccuggagcuuggucacgcugcg

SEQ ID NO: 422689 - RNA, 22 nt, Human
cccccagccagcagugcucagc

SEQ ID NO: 422690 - RNA, 22 nt, Human
cccugggcagucugcacuucag

SEQ ID NO: 422691 - RNA, 22 nt, Human
cagcauuggguuaccuuuguuu

SEQ ID NO: 422692 - RNA, 22 nt, Human
uuugggcaauucagugggaccu

SEQ ID NO: 422693 - RNA, 22 nt, Human
auaugcacacucugcccacaga

SEQ ID NO: 422694 - RNA, 22 nt, Human
aagauuuccauuucuagcucau

SEQ ID NO: 422695 - RNA, 22 nt, Human
ugcucugcaagcaggagcaaga

SEQ ID NO: 422696 - RNA, 17 nt, Human
agugaaauuuacauugc

SEQ ID NO: 422697 - RNA, 22 nt, Human
agcuuuauuaacucuccaggug

SEQ ID NO: 422698 - RNA, 22 nt, Human
caggcccugggcaggaucagcc

SEQ ID NO: 422699 - RNA, 22 nt, Human
ugggcuccucgucacucgcugu

SEQ ID NO: 422700 - RNA, 22 nt, Human
uuuugcuuuuguaacacagugu

SEQ ID NO: 422701 - RNA, 20 nt, Human
auuuggcaugaaguauugau

SEQ ID NO: 422702 - RNA, 19 nt, Human
aucugccuuagugcugcug

SEQ ID NO: 422703 - RNA, 22 nt, Human
agcugccugcuuaugagcucca

SEQ ID NO: 422704 - RNA, 22 nt, Human
ucugaagggcugaguggaggag

SEQ ID NO: 422705 - RNA, 18 nt, Human
guccugagcucugcugua

SEQ ID NO: 422706 - RNA, 22 nt, Human
ugaguccaccuuaguauauggg

SEQ ID NO: 422707 - RNA, 22 nt, Human
gcagggcagccacaggcccccu

SEQ ID NO: 422708 - RNA, 22 nt, Human
uucaggagcuggcugcgaagga

SEQ ID NO: 422709 - RNA, 22 nt, Human
uguccaggucagcagcagggac

SEQ ID NO: 422710 - RNA, 22 nt, Human
agaauucucuuccauugaaaca

SEQ ID NO: 422711 - RNA, 22 nt, Human
ugugaggagaggcccagcuccc

SEQ ID NO: 422712 - RNA, 23 nt, Human
gcugggcuuacucuuucagugag

SEQ ID NO: 422713 - RNA, 17 nt, Human
uagagcugguucaggag

SEQ ID NO: 422714 - RNA, 22 nt, Human
aucaggauggguuuggcuuagg

SEQ ID NO: 422715 - RNA, 22 nt, Human
acagaguacauucagagacuau

SEQ ID NO: 422716 - RNA, 22 nt, Human
agccuccuguagcccucaccca

SEQ ID NO: 422717 - RNA, 22 nt, Human
uagcacaucuggcgcuuauagg

SEQ ID NO: 422718 - RNA, 22 nt, Human
agucaguguagaaagcccaggc

SEQ ID NO: 422719 - RNA, 22 nt, Human
uuguuuguaugcugagaagaau

SEQ ID NO: 422720 - RNA, 22 nt, Human
agcaggaaggucugugugaguc

SEQ ID NO: 422721 - RNA, 22 nt, Human
gaaagcaguaaaugggucccau

SEQ ID NO: 422722 - RNA, 22 nt, Human
ccaggccuuucuucuuggucug

SEQ ID NO: 422723 - RNA, 22 nt, Human
cuuuacaaagcaauuuugucuc

SEQ ID NO: 422724 - RNA, 22 nt, Human
ggaggagcacuucugagcucag

SEQ ID NO: 422725 - RNA, 22 nt, Human
ggcugcuggggacgugggagag

SEQ ID NO: 422726 - RNA, 22 nt, Human
agccacaggaaacagagacagc

SEQ ID NO: 422727 - RNA, 22 nt, Human
ugacuuccugcacucaggugau

SEQ ID NO: 422728 - RNA, 22 nt, Human
gaagaacacuucaugauucauu

SEQ ID NO: 422729 - RNA, 22 nt, Human
uucuuugaguuaguacagucca

SEQ ID NO: 422730 - RNA, 22 nt, Human
ugagcaguaggucugaauagug

SEQ ID NO: 422731 - RNA, 22 nt, Human
cuaguccagucucaaaaugcua

SEQ ID NO: 422732 - RNA, 22 nt, Human
uugagaagaggcuuuguaggaa

SEQ ID NO: 422733 - RNA, 22 nt, Human
aucuggcucccuuggaauccgu

SEQ ID NO: 422734 - RNA, 22 nt, Human
gcuggcuguguuucaucucuga

SEQ ID NO: 422735 - RNA, 22 nt, Human
cagcuggacuuuugauagaagu

SEQ ID NO: 422736 - RNA, 22 nt, Human
guggcagcggcccaggccgucu

SEQ ID NO: 422737 - RNA, 22 nt, Human
ucugcuguaaagaauuucugcc

SEQ ID NO: 422738 - RNA, 22 nt, Human
ugcagucuuccagcugcacaaa

SEQ ID NO: 422739 - RNA, 20 nt, Human
uuacucaguuccugccaugc

SEQ ID NO: 422740 - RNA, 22 nt, Human
gaagccagccuugucugccucu

SEQ ID NO: 422741 - RNA, 23 nt, Human
agcaggaaaccgagggugauguu

SEQ ID NO: 422742 - RNA, 22 nt, Human
ucccaggacaggccacauggaa

SEQ ID NO: 422743 - RNA, 22 nt, Human
auauaaaguguuuagaaagcug

SEQ ID NO: 422744 - RNA, 22 nt, Human
gcacccaguuugucucaggguu

SEQ ID NO: 422745 - RNA, 22 nt, Human
aggagcugcauggauaccuggu

SEQ ID NO: 422746 - RNA, 22 nt, Human
auuuucauuuugcagggugaga

SEQ ID NO: 422747 - RNA, 22 nt, Human
cuguauuuaguuaaaaugcuaa

SEQ ID NO: 422748 - RNA, 22 nt, Human
guuuuauaggcuguugcuauau

SEQ ID NO: 422749 - RNA, 22 nt, Human
caacuuuaugauugguuuguca

SEQ ID NO: 422750 - RNA, 21 nt, Human
ucaggggcuguguuuuccauc

SEQ ID NO: 422751 - RNA, 22 nt, Human
ugagcccaggaguuggaggcug

SEQ ID NO: 422752 - RNA, 22 nt, Human
guacucucuugaaggccuuucu

SEQ ID NO: 422753 - RNA, 22 nt, Human
cugggcagugguggcccuuccc

SEQ ID NO: 422754 - RNA, 22 nt, Human
ccaaaauguuugaaugcaugug

SEQ ID NO: 422755 - RNA, 22 nt, Human
agggaaauuaaugugagcaaug

SEQ ID NO: 422756 - RNA, 22 nt, Human
ccucugggagacugcuacugag

SEQ ID NO: 422757 - RNA, 22 nt, Human
ucccuggccauuccucuaggcc

SEQ ID NO: 422758 - RNA, 19 nt, Human
aacuagaaagguuuugaga

SEQ ID NO: 422759 - RNA, 20 nt, Human
aggagccauugacugcagca

SEQ ID NO: 422760 - RNA, 22 nt, Human
ccagcuggucugugcucauguu

SEQ ID NO: 422761 - RNA, 22 nt, Human
cucuccucugaaguggugaccc

SEQ ID NO: 422762 - RNA, 22 nt, Human
aaggcauagucuuuaaguucug

SEQ ID NO: 422763 - RNA, 22 nt, Human
uuugcuauaaaagggucacacg

SEQ ID NO: 422764 - RNA, 22 nt, Human
cuguccugauggugccacuggu

SEQ ID NO: 422765 - RNA, 22 nt, Human
cucaagacugaucgcaguggaa

SEQ ID NO: 422766 - RNA, 22 nt, Human
uuuccaaaaugaaucuaaugca

SEQ ID NO: 422767 - RNA, 19 nt, Human
ggucucagugcagcugcag

SEQ ID NO: 422768 - RNA, 22 nt, Human
uaagaacaagauguuccuguuu

SEQ ID NO: 422769 - RNA, 22 nt, Human
uggaaagaugaagauguuuaag

SEQ ID NO: 422770 - RNA, 22 nt, Human
accaggcagcaccaaagccggu

SEQ ID NO: 422771 - RNA, 22 nt, Human
gugaggugggcuggccagagac

SEQ ID NO: 422772 - RNA, 22 nt, Human
cucccagguuccgacgccucuu

SEQ ID NO: 422773 - RNA, 22 nt, Human
cuucuuuaauguauacaaaaga

SEQ ID NO: 422774 - RNA, 22 nt, Human
aguauguauuuuauacuuacag

SEQ ID NO: 422775 - RNA, 22 nt, Human
uccaggaggguuuucugccuuc

SEQ ID NO: 422776 - RNA, 22 nt, Human
ccuuuccuuuuuagugugggag

SEQ ID NO: 422777 - RNA, 22 nt, Human
caggcugucugaauggaggccc

SEQ ID NO: 422778 - RNA, 22 nt, Human
uuguacaaaggauuuggaagag

SEQ ID NO: 422779 - RNA, 22 nt, Human
agaaaugggccuugggacacaa

SEQ ID NO: 422780 - RNA, 21 nt, Human
uccaggaguggcugggcaggg

SEQ ID NO: 422781 - RNA, 22 nt, Human
gcagaaggauccgcaggugcaa

SEQ ID NO: 422782 - RNA, 22 nt, Human
uccagcagaaaagagguaggga

SEQ ID NO: 422783 - RNA, 22 nt, Human
aggacugacuuuugccaugaaa

SEQ ID NO: 422784 - RNA, 22 nt, Human
uuaaagaugcagcuuuagagaa

SEQ ID NO: 422785 - RNA, 20 nt, Human
cagcccuccaguggaggcag

SEQ ID NO: 422786 - RNA, 22 nt, Human
uccagucauuuccauuguuccc

SEQ ID NO: 422787 - RNA, 22 nt, Human
agagggcuuugauucucaguuc

SEQ ID NO: 422788 - RNA, 22 nt, Human
ugaaccaggaggcagccagcac

SEQ ID NO: 422789 - RNA, 22 nt, Human
ggccucucauguccugggcuuc

SEQ ID NO: 422790 - RNA, 21 nt, Human
gcugugcacauaguagaagug

SEQ ID NO: 422791 - RNA, 22 nt, Human
uuuugcuugagugcacaaaaug

SEQ ID NO: 422792 - RNA, 22 nt, Human
caguuucucucaauaagcaucg

SEQ ID NO: 422793 - RNA, 22 nt, Human
acuuccugcuaugagcuucugu

SEQ ID NO: 422794 - RNA, 22 nt, Human
uacaaagugagcaaccucuuuu

SEQ ID NO: 422795 - RNA, 22 nt, Human
aauaauuauuugagagcagacc

SEQ ID NO: 422796 - RNA, 22 nt, Human
acacacaauuaguuuuaugcuu

SEQ ID NO: 422797 - RNA, 22 nt, Human
aggcccaguagugcugccuuua

SEQ ID NO: 422798 - RNA, 22 nt, Human
cauugcacugcagcccgggcaa

SEQ ID NO: 422799 - RNA, 22 nt, Human
aaucagaauuuauugaaucuuu

SEQ ID NO: 422800 - RNA, 22 nt, Human
ggcugggccagggccuguggac

SEQ ID NO: 422801 - RNA, 22 nt, Human
agccuggaguucccaggagaag

SEQ ID NO: 422802 - RNA, 22 nt, Human
gacaauuucucaauauagaaac

SEQ ID NO: 422803 - RNA, 22 nt, Human
cuucccacuaguaucacagagc

SEQ ID NO: 422804 - RNA, 22 nt, Human
guuuuuccugcugacuuggguc

SEQ ID NO: 422805 - RNA, 22 nt, Human
agcauuuaugacuaauguaaaa

SEQ ID NO: 422806 - RNA, 23 nt, Human
aguuuuucugcaugguucuguau

SEQ ID NO: 422807 - RNA, 17 nt, Human
agcuccugcccauggcu

SEQ ID NO: 422808 - RNA, 22 nt, Human
cccuggaguccggagcucaccu

SEQ ID NO: 422809 - RNA, 22 nt, Human
aauguacaaggguuccaguuuu

SEQ ID NO: 422810 - RNA, 22 nt, Human
cacccagcagcacuuaagacua

SEQ ID NO: 422811 - RNA, 22 nt, Human
uucuuuaaaauagugagaaaga

SEQ ID NO: 422812 - RNA, 17 nt, Human
gaauuucuuggucaaaa

SEQ ID NO: 422813 - RNA, 22 nt, Human
ggcacugaauuucuuggcaucu

SEQ ID NO: 422814 - RNA, 22 nt, Human
ugcacacaaaugugaacgugcc

SEQ ID NO: 422815 - RNA, 22 nt, Human
gugcagguguuuuggcugccag

SEQ ID NO: 422816 - RNA, 22 nt, Human
ugggcagguuguuauuugacau

SEQ ID NO: 422817 - RNA, 22 nt, Human
gcaaauacauguugagcaccua

SEQ ID NO: 422818 - RNA, 22 nt, Human
ucagccagguaauguggagaug

SEQ ID NO: 422819 - RNA, 22 nt, Human
uugauuuauagaauguucaagc

SEQ ID NO: 422820 - RNA, 22 nt, Human
agaauuguaagcaauuugauua

SEQ ID NO: 422821 - RNA, 22 nt, Human
ggucagagggugggcugccugu

SEQ ID NO: 422822 - RNA, 23 nt, Human
aggcugagcucucccagcuucag

SEQ ID NO: 422823 - RNA, 19 nt, Human
agacagagcucaguggguu

SEQ ID NO: 422824 - RNA, 22 nt, Human
cagugguggaaugaggaauugu

SEQ ID NO: 422825 - RNA, 22 nt, Human
gcagcagcccagggcucucaga

SEQ ID NO: 422826 - RNA, 22 nt, Human
ucugguaaccuuuaucccuccu

SEQ ID NO: 422827 - RNA, 20 nt, Human
uuccuguauacaaagaguuc

SEQ ID NO: 422828 - RNA, 20 nt, Human
gcaugaggaaucauugcagc

SEQ ID NO: 422829 - RNA, 22 nt, Human
gcccucuggcagccuuggcugg

SEQ ID NO: 422830 - RNA, 22 nt, Human
aggcacugggaauaugcugagg

SEQ ID NO: 422831 - RNA, 20 nt, Human
ugggagcuggugaggucuca

SEQ ID NO: 422832 - RNA, 22 nt, Human
acagccaggagccaugggcagg

SEQ ID NO: 422833 - RNA, 22 nt, Human
gcaaaauuuacacuccuucuuc

SEQ ID NO: 422834 - RNA, 22 nt, Human
guggcugcuguccucucugguu

SEQ ID NO: 422835 - RNA, 22 nt, Human
gcagcugggccccagccucucc

SEQ ID NO: 422836 - RNA, 22 nt, Human
cacacacaguuuuguauucugu

SEQ ID NO: 422837 - RNA, 22 nt, Human
cagagugagggccugcaccugc

SEQ ID NO: 422838 - RNA, 22 nt, Human
guggggcaguggccugggagca

SEQ ID NO: 422839 - RNA, 19 nt, Human
gagcagcugcacccauuga

SEQ ID NO: 422840 - RNA, 22 nt, Human
cagaagaguagcugaacaaguu

SEQ ID NO: 422841 - RNA, 22 nt, Human
cagauggaacacagaaaggaga

SEQ ID NO: 422842 - RNA, 22 nt, Human
cgcccagggcaggaggccgcuc

SEQ ID NO: 422843 - RNA, 22 nt, Human
ccuggcagcgugccgagcugcg

SEQ ID NO: 422844 - RNA, 22 nt, Human
gggaccuggucuagcacugagc

SEQ ID NO: 422845 - RNA, 22 nt, Human
gcacacaguauaugcucauuaa

SEQ ID NO: 422846 - RNA, 22 nt, Human
ucccagccauuccuuuaggugu

SEQ ID NO: 422847 - RNA, 22 nt, Human
uuucugaauaacucuaugauau

SEQ ID NO: 422848 - RNA, 22 nt, Human
ggaggugguggcagugacaauu

SEQ ID NO: 422849 - RNA, 22 nt, Human
acagggcagagggcaguuggua

SEQ ID NO: 422850 - RNA, 18 nt, Human
gggcauggaugcagcauc

SEQ ID NO: 422851 - RNA, 20 nt, Human
aggcacuguugucuguaucc

SEQ ID NO: 422852 - RNA, 22 nt, Human
ugcuccagugagcuggccaucc

SEQ ID NO: 422853 - RNA, 22 nt, Human
ucagaggaugcuguucuuuaau

SEQ ID NO: 422854 - RNA, 22 nt, Human
cagcuggggcagccacgugcgg

SEQ ID NO: 422855 - RNA, 22 nt, Human
cagagccuaaaacgacuccacu

SEQ ID NO: 422856 - RNA, 22 nt, Human
cccuggagcuagucugagcaga

SEQ ID NO: 422857 - RNA, 22 nt, Human
agcugccaucagccuuuggaug

SEQ ID NO: 422858 - RNA, 22 nt, Human
auuuccaaucucugcauauggg

SEQ ID NO: 422859 - RNA, 22 nt, Human
uccagggacacagaguccuucu

SEQ ID NO: 422860 - RNA, 22 nt, Human
gccacguugccacccgggugac

SEQ ID NO: 422861 - RNA, 22 nt, Human
gagauggggaauaggagcaagc

SEQ ID NO: 422862 - RNA, 22 nt, Human
agucaccaucuguggcagccug

SEQ ID NO: 422863 - RNA, 22 nt, Human
aaacuguaagagaauaaacuac

SEQ ID NO: 422864 - RNA, 22 nt, Human
gagguauguaugcuacauucuu

SEQ ID NO: 422865 - RNA, 19 nt, Human
ggccaccucucuucccagg

SEQ ID NO: 422866 - RNA, 22 nt, Human
auugaaagcacaaagaacaagu

SEQ ID NO: 422867 - RNA, 22 nt, Human
cuccucacacccacugcaacca

SEQ ID NO: 422868 - RNA, 22 nt, Human
cccauucauccucgcuuccuuc

SEQ ID NO: 422869 - RNA, 22 nt, Human
agggcuccaggggcugggugac

SEQ ID NO: 422870 - RNA, 22 nt, Human
uuccaaugacuaguggcauccu

SEQ ID NO: 422871 - RNA, 22 nt, Human
ccacagggauaggaauggggcu

SEQ ID NO: 422872 - RNA, 22 nt, Human
aagacccacaaggcugaauguu

SEQ ID NO: 422873 - RNA, 22 nt, Human
acuuucuaggucucaguccuuu

SEQ ID NO: 422874 - RNA, 22 nt, Human
uuaaacagucccagaggcugac

SEQ ID NO: 422875 - RNA, 22 nt, Human
gagagcugcauucucagacaca

SEQ ID NO: 422876 - RNA, 22 nt, Human
cacugaagccacuggaagagga

SEQ ID NO: 422877 - RNA, 19 nt, Human
ggcugccuggagcgagggc

SEQ ID NO: 422878 - RNA, 22 nt, Human
ccucagggaggccucuguggcu

SEQ ID NO: 422879 - RNA, 22 nt, Human
uucagauguggcuuugucaggc

SEQ ID NO: 422880 - RNA, 22 nt, Human
uuuacagucucuauagucaaaa

SEQ ID NO: 422881 - RNA, 22 nt, Human
cccagcaucccagugggcagca

SEQ ID NO: 422882 - RNA, 22 nt, Human
ccucagagaaagguauggcuga

SEQ ID NO: 422883 - RNA, 22 nt, Human
caggccaggcugcauuugcccc

SEQ ID NO: 422884 - RNA, 22 nt, Human
gacauuucaaucucauuauggg

SEQ ID NO: 422885 - RNA, 22 nt, Human
cagagccacuuggagaugagaa

SEQ ID NO: 422886 - RNA, 20 nt, Human
ugccaugguaacagagugug

SEQ ID NO: 422887 - RNA, 22 nt, Human
uggcaugauaggaggugcagaa

SEQ ID NO: 422888 - RNA, 22 nt, Human
acagguggggaggcugagguuc

SEQ ID NO: 422889 - RNA, 22 nt, Human
agcagggcucuguggagggugg

SEQ ID NO: 422890 - RNA, 22 nt, Human
ccuuugggugaauuccucucuu

SEQ ID NO: 422891 - RNA, 22 nt, Human
uccaucuguuuacuauaaagau

SEQ ID NO: 422892 - RNA, 22 nt, Human
cacccaggacaggccagaugug

SEQ ID NO: 422893 - RNA, 22 nt, Human
agguuuaugccuuggagcuggg

SEQ ID NO: 422894 - RNA, 22 nt, Human
cauuuagacauuugauuugggg

SEQ ID NO: 422895 - RNA, 22 nt, Human
uuugaaagucaaccuuccaguu

SEQ ID NO: 422896 - RNA, 22 nt, Human
ucagcuuugccaccagcuguaa

SEQ ID NO: 422897 - RNA, 22 nt, Human
accagccugucugagucguggg

SEQ ID NO: 422898 - RNA, 22 nt, Human
ggcuccuggggaggugagcuug

SEQ ID NO: 422899 - RNA, 22 nt, Human
aagauacauaaagguagagucu

SEQ ID NO: 422900 - RNA, 22 nt, Human
ggaggccaaggcgggcggauca

SEQ ID NO: 422901 - RNA, 20 nt, Human
aggcacuggauuucuuauau

SEQ ID NO: 422902 - RNA, 22 nt, Human
ggcaccuggauguagcagugaa

SEQ ID NO: 422903 - RNA, 22 nt, Human
gaggcucagggaguauaugaau

SEQ ID NO: 422904 - RNA, 22 nt, Human
agggacuauuuacccaucucac

SEQ ID NO: 422905 - RNA, 22 nt, Human
ggcgcucaguguugccccagag

SEQ ID NO: 422906 - RNA, 22 nt, Human
agacuguaauugacaugucagc

SEQ ID NO: 422907 - RNA, 17 nt, Human
cagugaggccuuuccuc

SEQ ID NO: 422908 - RNA, 20 nt, Human
gccuggcacccggggcuggc

SEQ ID NO: 422909 - RNA, 22 nt, Human
ccuguacauggccaucuuuacc

SEQ ID NO: 422910 - RNA, 22 nt, Human
ggcugccugaacuuuggggaaa

SEQ ID NO: 422911 - RNA, 23 nt, Human
cccuguagcccaggacaggcuuu

SEQ ID NO: 422912 - RNA, 22 nt, Human
uuugauuuacuggauauucuca

SEQ ID NO: 422913 - RNA, 22 nt, Human
caagagcuacccugugccauau

SEQ ID NO: 422914 - RNA, 22 nt, Human
ccaggugugcucugcaguggau

SEQ ID NO: 422915 - RNA, 22 nt, Human
ucugaaaguaucuggaucuuuu

SEQ ID NO: 422916 - RNA, 22 nt, Human
aguaaugugccugaaauacuug

SEQ ID NO: 422917 - RNA, 22 nt, Human
caagaacauugugaucacuuca

SEQ ID NO: 422918 - RNA, 20 nt, Human
uccaguuuuggagacauucu

SEQ ID NO: 422919 - RNA, 22 nt, Human
augggcaguaacaguggcaguc

SEQ ID NO: 422920 - RNA, 22 nt, Human
ggcauauguagcguguguucug

SEQ ID NO: 422921 - RNA, 22 nt, Human
ccugagagcgaguggccucaug

SEQ ID NO: 422922 - RNA, 22 nt, Human
caguggcacccacgggcugggc

SEQ ID NO: 422923 - RNA, 22 nt, Human
gggugcagggucuccagcagcu

SEQ ID NO: 422924 - RNA, 22 nt, Human
ccaggaagcggugagggcugcc

SEQ ID NO: 422925 - RNA, 22 nt, Human
agcagagguuuguuggaaaccu

SEQ ID NO: 422926 - RNA, 22 nt, Human
cagcugagaagugauagcugca

SEQ ID NO: 422927 - RNA, 22 nt, Human
ucucaguggcuuccucacuuuu

SEQ ID NO: 422928 - RNA, 22 nt, Human
cagccaggagcucccccugcuc

SEQ ID NO: 422929 - RNA, 22 nt, Human
cagcagcuuugccaagucagcc

SEQ ID NO: 422930 - RNA, 22 nt, Human
uagaaaguaaaucaguuuuauu

SEQ ID NO: 422931 - RNA, 22 nt, Human
ugcuggaggccugacuguguuu

SEQ ID NO: 422932 - RNA, 23 nt, Human
gggcagguuuuuauaggcuucag

SEQ ID NO: 422933 - RNA, 23 nt, Human
ucagagagcuguugagagcugcc

SEQ ID NO: 422934 - RNA, 22 nt, Human
augccacugacauggacaauuu

SEQ ID NO: 422935 - RNA, 22 nt, Human
cagucuggaggucagcuggcuu

SEQ ID NO: 422936 - RNA, 22 nt, Human
cagagcuggagggaacccuggc

SEQ ID NO: 422937 - RNA, 22 nt, Human
cagcuuuauuaaugauugucuu

SEQ ID NO: 422938 - RNA, 22 nt, Human
uuagaaaaaggcuguggucuua

SEQ ID NO: 422939 - RNA, 22 nt, Human
acaggcuucucacagaaaaggg

SEQ ID NO: 422940 - RNA, 19 nt, Human
ccagucccauacaggagau

SEQ ID NO: 422941 - RNA, 22 nt, Human
cugggcacauuuugacuagugu

SEQ ID NO: 422942 - RNA, 22 nt, Human
cucaggauuuacuaauuucaag

SEQ ID NO: 422943 - RNA, 22 nt, Human
agggccagcacuccuggcagga

SEQ ID NO: 422944 - RNA, 22 nt, Human
gcagugggaagguuggcacaug

SEQ ID NO: 422945 - RNA, 22 nt, Human
ugggaggaaugucacugagcca

SEQ ID NO: 422946 - RNA, 22 nt, Human
cuggagcugucuucacaggccu

SEQ ID NO: 422947 - RNA, 22 nt, Human
gagggucccugcucagggccag

SEQ ID NO: 422948 - RNA, 22 nt, Human
uuucuguaauuaaaagggcagg

SEQ ID NO: 422949 - RNA, 22 nt, Human
ugcagggacaggcucuggggau

SEQ ID NO: 422950 - RNA, 22 nt, Human
aagucuggaagucucaguuuuc

SEQ ID NO: 422951 - RNA, 22 nt, Human
uguauuuuuagaccuuuagacc

SEQ ID NO: 422952 - RNA, 22 nt, Human
auggaaagcuaagccauuuacc

SEQ ID NO: 422953 - RNA, 22 nt, Human
acuccagggcuccaucccuugu

SEQ ID NO: 422954 - RNA, 22 nt, Human
uucagucuccucauuuuacaaa

SEQ ID NO: 422955 - RNA, 22 nt, Human
gaagcccacguuuggugaugua

SEQ ID NO: 422956 - RNA, 22 nt, Human
aucaggaagaagaauguguugg

SEQ ID NO: 422957 - RNA, 21 nt, Human
ccuccaggugauuccgugcuc

SEQ ID NO: 422958 - RNA, 22 nt, Human
ucaaagucauggcaggcucaga

SEQ ID NO: 422959 - RNA, 22 nt, Human
gacagggcauggugcagaguuc

SEQ ID NO: 422960 - RNA, 19 nt, Human
acccucucagugccugagg

SEQ ID NO: 422961 - RNA, 22 nt, Human
aauguguguauuucuaggcgag

SEQ ID NO: 422962 - RNA, 22 nt, Human
gaggcugcccaacuggagugga

SEQ ID NO: 422963 - RNA, 22 nt, Human
uggccugggccggcagauauac

SEQ ID NO: 422964 - RNA, 22 nt, Human
cauugaaaaacguugacugagu

SEQ ID NO: 422965 - RNA, 22 nt, Human
agagcuggcugguagcccugau

SEQ ID NO: 422966 - RNA, 22 nt, Human
aggaccaguaugagagcaucug

SEQ ID NO: 422967 - RNA, 22 nt, Human
aguuuuuccguggcuacgauaa

SEQ ID NO: 422968 - RNA, 22 nt, Human
guccugggcccaggggcugccu

SEQ ID NO: 422969 - RNA, 20 nt, Human
ccaggccugggccugcucua

SEQ ID NO: 422970 - RNA, 22 nt, Human
gaaugugucacccugucccaug

SEQ ID NO: 422971 - RNA, 22 nt, Human
agcccagcagaaaguccagccu

SEQ ID NO: 422972 - RNA, 22 nt, Human
aaguguguugacugaauugggg

SEQ ID NO: 422973 - RNA, 22 nt, Human
cugagcuuccaguuccuccagg

SEQ ID NO: 422974 - RNA, 22 nt, Human
caggcagagcaacugguccaga

SEQ ID NO: 422975 - RNA, 22 nt, Human
gagcccucucuguaggcaagua

SEQ ID NO: 422976 - RNA, 22 nt, Human
acagugaaugcccaagaaaagu

SEQ ID NO: 422977 - RNA, 17 nt, Human
ccaggugggaggugggg

SEQ ID NO: 422978 - RNA, 22 nt, Human
aaauguucccaauaugaagcug

SEQ ID NO: 422979 - RNA, 22 nt, Human
ucugucuccucugaggugccag

SEQ ID NO: 422980 - RNA, 22 nt, Human
ggggcagagagaaggaagcuug

SEQ ID NO: 422981 - RNA, 22 nt, Human
agggcugaccuaagcuccacuu

SEQ ID NO: 422982 - RNA, 22 nt, Human
ugggcagacgcuguuggaaggc

SEQ ID NO: 422983 - RNA, 22 nt, Human
gcuggagauaguaggauccaua

SEQ ID NO: 422984 - RNA, 22 nt, Human
ggaccagagcucgggcuucuca

SEQ ID NO: 422985 - RNA, 22 nt, Human
aacauacagugagcaguggacu

SEQ ID NO: 422986 - RNA, 22 nt, Human
uuugggaacucuaucauggaaa

SEQ ID NO: 422987 - RNA, 20 nt, Human
agggcagcuugaggagccgg

SEQ ID NO: 422988 - RNA, 22 nt, Human
caggagccccaggcugacaaua

SEQ ID NO: 422989 - RNA, 17 nt, Human
acacagggagagggagc

SEQ ID NO: 422990 - RNA, 22 nt, Human
uggcucagaacuacuucuaguu

SEQ ID NO: 422991 - RNA, 22 nt, Human
gggcuuggcacaugggcucagc

SEQ ID NO: 422992 - RNA, 23 nt, Human
aaacaugcagcacaugaaugcua

SEQ ID NO: 422993 - RNA, 20 nt, Human
gauuucaaagcagaguggcc

SEQ ID NO: 422994 - RNA, 22 nt, Human
cacugcuuuaaggcugaguaac

SEQ ID NO: 422995 - RNA, 22 nt, Human
uguggcuuaagaaugccuuuaa

SEQ ID NO: 422996 - RNA, 22 nt, Human
accaggcaacugugaaugggcu

SEQ ID NO: 422997 - RNA, 22 nt, Human
ggcuccuggcaucuggugggua

SEQ ID NO: 422998 - RNA, 19 nt, Human
gccugccuggguuucugag

SEQ ID NO: 422999 - RNA, 22 nt, Human
guccucaguaagagggccucug

SEQ ID NO: 423000 - RNA, 22 nt, Human
ucuagaaauuuugccuuguauu

SEQ ID NO: 423001 - RNA, 22 nt, Human
ugaaagcucugucaucauuccu

SEQ ID NO: 423002 - RNA, 21 nt, Human
gccaccucgucucggagcagc

SEQ ID NO: 423003 - RNA, 22 nt, Human
uagcuuuacaaagugcugcacc

SEQ ID NO: 423004 - RNA, 22 nt, Human
gucugucaucugagauggagug

SEQ ID NO: 423005 - RNA, 22 nt, Human
aaaaaugaaacggcugguuggc

SEQ ID NO: 423006 - RNA, 22 nt, Human
cccagccucuggauucugcccu

SEQ ID NO: 423007 - RNA, 22 nt, Human
gcagcuguggguuccaagucua

SEQ ID NO: 423008 - RNA, 22 nt, Human
ucuuugcaacucccauuuccau

SEQ ID NO: 423009 - RNA, 20 nt, Human
gugggcagaugugugcaugg

SEQ ID NO: 423010 - RNA, 22 nt, Human
ggaggccuugaggccaggagcu

SEQ ID NO: 423011 - RNA, 22 nt, Human
uaacagcucuguguggcuguaa

SEQ ID NO: 423012 - RNA, 22 nt, Human
ccucaggaaccacauugcugcu

SEQ ID NO: 423013 - RNA, 22 nt, Human
ucaguuaagaggccacggcagu

SEQ ID NO: 423014 - RNA, 22 nt, Human
cucugggcaaguuucuucauga

SEQ ID NO: 423015 - RNA, 22 nt, Human
cugggcaguuuuacaucauugc

SEQ ID NO: 423016 - RNA, 22 nt, Human
augucuuuauaaauguauaaug

SEQ ID NO: 423017 - RNA, 22 nt, Human
gggcugagcuaagcuggguuga

SEQ ID NO: 423018 - RNA, 22 nt, Human
cagcagcucccauccgcugagc

SEQ ID NO: 423019 - RNA, 22 nt, Human
aaagguaguacuucuagaaggg

SEQ ID NO: 423020 - RNA, 22 nt, Human
cuggcucucugagauauugagu

SEQ ID NO: 423021 - RNA, 22 nt, Human
aaguucaaggugauaguggcag

SEQ ID NO: 423022 - RNA, 22 nt, Human
uggcucaguuuagcagcucagu

SEQ ID NO: 423023 - RNA, 22 nt, Human
cacugcuuuuuuggcuauguac

SEQ ID NO: 423024 - RNA, 23 nt, Human
aggugccaacugagagcugagag

SEQ ID NO: 423025 - RNA, 22 nt, Human
cccagccugugacagccguccu

SEQ ID NO: 423026 - RNA, 22 nt, Human
aaaugcaugagaaaguauucug

SEQ ID NO: 423027 - RNA, 22 nt, Human
uucaggauuguguuuuuccuga

SEQ ID NO: 423028 - RNA, 23 nt, Human
aggcagugucucuuauccugucc

SEQ ID NO: 423029 - RNA, 22 nt, Human
uuauuuauggcacuguuggugg

SEQ ID NO: 423030 - RNA, 22 nt, Human
ucuggccagugaaaugcagaau

SEQ ID NO: 423031 - RNA, 22 nt, Human
ucagucucaucaacucuauucc

SEQ ID NO: 423032 - RNA, 22 nt, Human
gccuggugaaaggcagagagcg

SEQ ID NO: 423033 - RNA, 22 nt, Human
ugaggccucauaaugagauuuc

SEQ ID NO: 423034 - RNA, 22 nt, Human
ccccaggcagggccuaacagag

SEQ ID NO: 423035 - RNA, 22 nt, Human
agaagcugccuacaugaccagc

SEQ ID NO: 423036 - RNA, 22 nt, Human
agggcugcaggcaagauauggc

SEQ ID NO: 423037 - RNA, 22 nt, Human
agggcagcucucaccucuggcc

SEQ ID NO: 423038 - RNA, 22 nt, Human
gccucugcugcaagccugguug

SEQ ID NO: 423039 - RNA, 20 nt, Human
cacaggcuauaugagagcca

SEQ ID NO: 423040 - RNA, 22 nt, Human
gccugagcaggcguggaccaug

SEQ ID NO: 423041 - RNA, 21 nt, Human
agaagccaugugguggagaac

SEQ ID NO: 423042 - RNA, 22 nt, Human
gcaaaugcuaaaguguagagac

SEQ ID NO: 423043 - RNA, 20 nt, Human
caggcagaggaugcugacca

SEQ ID NO: 423044 - RNA, 22 nt, Human
uuuguacauauauaaaaucugu

SEQ ID NO: 423045 - RNA, 22 nt, Human
caagagcucccagaccugggca

SEQ ID NO: 423046 - RNA, 22 nt, Human
ggcagaaggccucccagcuccu

SEQ ID NO: 423047 - RNA, 19 nt, Human
cugccuguuauggagagaa

SEQ ID NO: 423048 - RNA, 22 nt, Human
cugcagaggguuugagcauccu

SEQ ID NO: 423049 - RNA, 23 nt, Human
ucguugaauagcaauagcacaac

SEQ ID NO: 423050 - RNA, 22 nt, Human
uuuaaugugagucccuuucaag

SEQ ID NO: 423051 - RNA, 22 nt, Human
cugugugugucugcagcauacu

SEQ ID NO: 423052 - RNA, 22 nt, Human
cacagaggaaaggcaguuggua

SEQ ID NO: 423053 - RNA, 22 nt, Human
gaaacaugucugacaauuuacc

SEQ ID NO: 423054 - RNA, 22 nt, Human
ggcagaggaagcuggaaguggg

SEQ ID NO: 423055 - RNA, 22 nt, Human
ggcagggcaggaaagucaggaa

SEQ ID NO: 423056 - RNA, 22 nt, Human
cugcagaguggagccucggcug

SEQ ID NO: 423057 - RNA, 22 nt, Human
ugggcaggcaagugaauaccuu

SEQ ID NO: 423058 - RNA, 20 nt, Human
cagggccacgcuccaaggca

SEQ ID NO: 423059 - RNA, 22 nt, Human
cuguggaguggggaguacuggu

SEQ ID NO: 423060 - RNA, 22 nt, Human
ccuccugggcuccugucugcac

SEQ ID NO: 423061 - RNA, 22 nt, Human
ucacaaaagcuuuugaauuugg

SEQ ID NO: 423062 - RNA, 21 nt, Human
acagcagggcuggcaugacag

SEQ ID NO: 423063 - RNA, 22 nt, Human
agagccuguacuuuucugugaa

SEQ ID NO: 423064 - RNA, 21 nt, Human
uccuguaagcuuggguggcuc

SEQ ID NO: 423065 - RNA, 22 nt, Human
ccaggugugccagcagggacug

SEQ ID NO: 423066 - RNA, 22 nt, Human
ccuaggcccuaggcuuccauca

SEQ ID NO: 423067 - RNA, 22 nt, Human
aaaugugugcacaaagacagcu

SEQ ID NO: 423068 - RNA, 22 nt, Human
ugccuggguguaaagggccaac

SEQ ID NO: 423069 - RNA, 22 nt, Human
aauugcuaaagauuauguuuuc

SEQ ID NO: 423070 - RNA, 20 nt, Human
ugcagggcugccucccagcu

SEQ ID NO: 423071 - RNA, 22 nt, Human
uggcucagagagggagugugga

SEQ ID NO: 423072 - RNA, 19 nt, Human
acauuuaaauucagaucuc

SEQ ID NO: 423073 - RNA, 22 nt, Human
guggccucaugucuauaaagag

SEQ ID NO: 423074 - RNA, 22 nt, Human
cugaagaggacgcagcagcaag

SEQ ID NO: 423075 - RNA, 22 nt, Human
uugaaaggcacaggcaccuggg

SEQ ID NO: 423076 - RNA, 22 nt, Human
uuucuguauuuaaaagaucugg

SEQ ID NO: 423077 - RNA, 22 nt, Human
accagggcaaauguuuguacuc

SEQ ID NO: 423078 - RNA, 21 nt, Human
ggagaaggacaauguugagua

SEQ ID NO: 423079 - RNA, 22 nt, Human
auggcucauuuaucuugcagcc

SEQ ID NO: 423080 - RNA, 22 nt, Human
cucaggauccaucuccugcccu

SEQ ID NO: 423081 - RNA, 22 nt, Human
aagagcaucuauuucacagugg

SEQ ID NO: 423082 - RNA, 22 nt, Human
cacugugucaguuugguuagac

SEQ ID NO: 423083 - RNA, 22 nt, Human
uacaaaaguaauuacgguuuuu

SEQ ID NO: 423084 - RNA, 22 nt, Human
agcagggguaacagaaggaaag

SEQ ID NO: 423085 - RNA, 22 nt, Human
aucaggauagugguuaccuggg

SEQ ID NO: 423086 - RNA, 22 nt, Human
caggcagcaucagucugcugua

SEQ ID NO: 423087 - RNA, 22 nt, Human
aguuauuucaguaacauaauag

SEQ ID NO: 423088 - RNA, 22 nt, Human
uccugcagaucaaagccuuuga

SEQ ID NO: 423089 - RNA, 21 nt, Human
aaugugugcuauuuaucuuuu

SEQ ID NO: 423090 - RNA, 22 nt, Human
ugguuucccauuaucugcagga

SEQ ID NO: 423091 - RNA, 22 nt, Human
uggugguuaugcgcuuuguggg

SEQ ID NO: 423092 - RNA, 22 nt, Human
aggguggccaugagggagagau

SEQ ID NO: 423093 - RNA, 22 nt, Human
aacagcaugcuggguaacauug

SEQ ID NO: 423094 - RNA, 22 nt, Human
uccagggaagagcagaggcuac

SEQ ID NO: 423095 - RNA, 20 nt, Human
cucuggcuccgcgugaccgc

SEQ ID NO: 423096 - RNA, 22 nt, Human
acacauuuacauguuuacguau

SEQ ID NO: 423097 - RNA, 22 nt, Human
ugcaccauguaaguggccacgu

SEQ ID NO: 423098 - RNA, 22 nt, Human
uaagaacaagcuggggguucca

SEQ ID NO: 423099 - RNA, 22 nt, Human
uauaucaccaaaaacaguucug

SEQ ID NO: 423100 - RNA, 22 nt, Human
uagggcucugagaguucagccu

SEQ ID NO: 423101 - RNA, 22 nt, Human
uuugcauuucuaaugagcuccg

SEQ ID NO: 423102 - RNA, 22 nt, Human
cccaggcacucuuggucauuuu

SEQ ID NO: 423103 - RNA, 22 nt, Human
aagugccugaccuagccuggag

SEQ ID NO: 423104 - RNA, 22 nt, Human
caggggacauuaaagcuccaua

SEQ ID NO: 423105 - RNA, 22 nt, Human
cagaguguauucugcaguugca

SEQ ID NO: 423106 - RNA, 22 nt, Human
aggcagguccccuggaaggcac

SEQ ID NO: 423107 - RNA, 22 nt, Human
caugaguucaucugcuucucuu

SEQ ID NO: 423108 - RNA, 22 nt, Human
gggagggaaggaggcgccgugu

SEQ ID NO: 423109 - RNA, 22 nt, Human
cauuuacagugagaguuuuuac

SEQ ID NO: 423110 - RNA, 19 nt, Human
cugaggugcaguaagaggc

SEQ ID NO: 423111 - RNA, 22 nt, Human
ugccaggcuuagagcaggggcu

SEQ ID NO: 423112 - RNA, 23 nt, Human
cccugcagucagggugagauggu

SEQ ID NO: 423113 - RNA, 22 nt, Human
ucaggcuggaaugcaguggggc

SEQ ID NO: 423114 - RNA, 22 nt, Human
uacaguauuaugagugauugaa

SEQ ID NO: 423115 - RNA, 22 nt, Human
gcuggcagagagcuggugagga

SEQ ID NO: 423116 - RNA, 22 nt, Human
agugugaccuuauuuggaaaca

SEQ ID NO: 423117 - RNA, 22 nt, Human
ucaggcaguagaauugcuugaa

SEQ ID NO: 423118 - RNA, 22 nt, Human
aacuguaauuuuuacauaguaa

SEQ ID NO: 423119 - RNA, 22 nt, Human
augggaggcaggcucagaaccg

SEQ ID NO: 423120 - RNA, 22 nt, Human
cuuucagagguuacucaggaaa

SEQ ID NO: 423121 - RNA, 22 nt, Human
aacaggcaacaguugacucuga

SEQ ID NO: 423122 - RNA, 22 nt, Human
gcugucacauuuggagcacugg

SEQ ID NO: 423123 - RNA, 23 nt, Human
ggagccuggcauaugagacgcau

SEQ ID NO: 423124 - RNA, 22 nt, Human
gcacccaggccggcgacugcag

SEQ ID NO: 423125 - RNA, 22 nt, Human
uguggcaggaagagcuucugag

SEQ ID NO: 423126 - RNA, 22 nt, Human
guucuuaagaccacaauaaaaa

SEQ ID NO: 423127 - RNA, 17 nt, Human
ugagcaguagaagaugc

SEQ ID NO: 423128 - RNA, 22 nt, Human
cuccuuccccuacucagcaucc

SEQ ID NO: 423129 - RNA, 22 nt, Human
gagggcagagucuaaugaugca

SEQ ID NO: 423130 - RNA, 21 nt, Human
ugcccacagcaaaugcagagg

SEQ ID NO: 423131 - RNA, 22 nt, Human
uagaggcacccuggaggagacu

SEQ ID NO: 423132 - RNA, 23 nt, Human
cuggggcuuucaaaucugggcag

SEQ ID NO: 423133 - RNA, 22 nt, Human
ucagcuuuggucacauugaguu

SEQ ID NO: 423134 - RNA, 22 nt, Human
ugcuuuauaggggauugcaggc

SEQ ID NO: 423135 - RNA, 22 nt, Human
gcucccagguucuugggccuug

SEQ ID NO: 423136 - RNA, 22 nt, Human
acgugcaggaucugguuggcga

SEQ ID NO: 423137 - RNA, 22 nt, Human
agcagugggugacagagcugag

SEQ ID NO: 423138 - RNA, 22 nt, Human
ucucuguacaguacaugccgug

SEQ ID NO: 423139 - RNA, 22 nt, Human
augcuguguccuagugaaagaa

SEQ ID NO: 423140 - RNA, 22 nt, Human
uugaauucauuucucauugagu

SEQ ID NO: 423141 - RNA, 22 nt, Human
ccaguggacaauuucugaggaa

SEQ ID NO: 423142 - RNA, 22 nt, Human
uucaggauucucucccauuuac

SEQ ID NO: 423143 - RNA, 22 nt, Human
ugggccugauucuugaauccug

SEQ ID NO: 423144 - RNA, 21 nt, Human
aaagaacaggcagauguucuu

SEQ ID NO: 423145 - RNA, 22 nt, Human
cucuugggagugcucuggagaa

SEQ ID NO: 423146 - RNA, 22 nt, Human
uauacagaaccgccugaagucu

SEQ ID NO: 423147 - RNA, 22 nt, Human
guuuauuagaguuuucugucug

SEQ ID NO: 423148 - RNA, 22 nt, Human
uacagggguaacaguggggaau

SEQ ID NO: 423149 - RNA, 22 nt, Human
gagcugaguuaccuccagauca

SEQ ID NO: 423150 - RNA, 22 nt, Human
cuggagcauccaugcccagggu

SEQ ID NO: 423151 - RNA, 22 nt, Human
gggcuggcaggaccugggcuga

SEQ ID NO: 423152 - RNA, 22 nt, Human
agucugucagucauucuaacaa

SEQ ID NO: 423153 - RNA, 22 nt, Human
cagcugccacaggacuuucuga

SEQ ID NO: 423154 - RNA, 18 nt, Human
ucugucuguacaaguauc

SEQ ID NO: 423155 - RNA, 22 nt, Human
ccucagggucugaggagaccgu

SEQ ID NO: 423156 - RNA, 22 nt, Human
gcuuccugagaaacaaucugau

SEQ ID NO: 423157 - RNA, 22 nt, Human
acaggcugcugggcuccgugcu

SEQ ID NO: 423158 - RNA, 22 nt, Human
ccacugggggcugcaggcacuc

SEQ ID NO: 423159 - RNA, 20 nt, Human
aaggcacuaugucugcuagc

SEQ ID NO: 423160 - RNA, 22 nt, Human
acaugcuuucuagguccuucug

SEQ ID NO: 423161 - RNA, 22 nt, Human
guugaaagcuuuucauuuaguu

SEQ ID NO: 423162 - RNA, 22 nt, Human
aguggaccagaagacugaagcu

SEQ ID NO: 423163 - RNA, 22 nt, Human
agcagaggacaguucuuaggaa

SEQ ID NO: 423164 - RNA, 22 nt, Human
cuuaacagauacaucugugguu

SEQ ID NO: 423165 - RNA, 22 nt, Human
gcagagcccuggggguauggug

SEQ ID NO: 423166 - RNA, 22 nt, Human
ccagagaguaggaggcauuauu

SEQ ID NO: 423167 - RNA, 22 nt, Human
ucuggccaggauggcaagacca

SEQ ID NO: 423168 - RNA, 22 nt, Human
uccaguggguugcugagggagg

SEQ ID NO: 423169 - RNA, 22 nt, Human
ggaaggagggcggcaaugauga

SEQ ID NO: 423170 - RNA, 20 nt, Human
cagucccaauccagggccag

SEQ ID NO: 423171 - RNA, 22 nt, Human
auaacagaguugggaagugaaa

SEQ ID NO: 423172 - RNA, 22 nt, Human
agaugguuuugucuuuaugauu

SEQ ID NO: 423173 - RNA, 22 nt, Human
ggaggccaguccuggccgggcu

SEQ ID NO: 423174 - RNA, 22 nt, Human
cuccucuggcuuccuggaggca

SEQ ID NO: 423175 - RNA, 22 nt, Human
ugagccugaguucaaggcugca

SEQ ID NO: 423176 - RNA, 22 nt, Human
uacaugcucaguaacuuucagu

SEQ ID NO: 423177 - RNA, 22 nt, Human
auucagcaguuccugcuucagu

SEQ ID NO: 423178 - RNA, 22 nt, Human
gcucagagcuugaaguuccacu

SEQ ID NO: 423179 - RNA, 22 nt, Human
agcugcagcguucauuuuucca

SEQ ID NO: 423180 - RNA, 22 nt, Human
gggcagugacaaaggggaugaa

SEQ ID NO: 423181 - RNA, 22 nt, Human
cuuccucacggugcaacaggaa

SEQ ID NO: 423182 - RNA, 22 nt, Human
gcaaggcagcgcggaguagcua

SEQ ID NO: 423183 - RNA, 19 nt, Human
gggcuuggggcugaagccu

SEQ ID NO: 423184 - RNA, 22 nt, Human
ugcucccagggacucuggcugg

SEQ ID NO: 423185 - RNA, 22 nt, Human
acacugaagagcacuuucaaag

SEQ ID NO: 423186 - RNA, 22 nt, Human
caaaggcuucaucucagagcag

SEQ ID NO: 423187 - RNA, 22 nt, Human
auaauguagguauguguauuua

SEQ ID NO: 423188 - RNA, 22 nt, Human
accaguccgcggagcuccgggg

SEQ ID NO: 423189 - RNA, 22 nt, Human
agcagggccugagugaccuaac

SEQ ID NO: 423190 - RNA, 22 nt, Human
agggagcuuccgaacuacagcu

SEQ ID NO: 423191 - RNA, 22 nt, Human
aggcaguuuauccccagagccu

SEQ ID NO: 423192 - RNA, 22 nt, Human
ugcagggaaaguguuggcagca

SEQ ID NO: 423193 - RNA, 22 nt, Human
guuagggaucaggaacaagagc

SEQ ID NO: 423194 - RNA, 22 nt, Human
ccagcccuguaaggaugaggca

SEQ ID NO: 423195 - RNA, 22 nt, Human
ugccagagaagacccagucacu

SEQ ID NO: 423196 - RNA, 22 nt, Human
ccugcucugguuuagucagucu

SEQ ID NO: 423197 - RNA, 22 nt, Human
acuuggagagcauugcugggga

SEQ ID NO: 423198 - RNA, 22 nt, Human
uguucuuucaguuagacacagu

SEQ ID NO: 423199 - RNA, 22 nt, Human
ggaggcccagagaggugaagug

SEQ ID NO: 423200 - RNA, 20 nt, Human
ccugccuguguuugugauga

SEQ ID NO: 423201 - RNA, 22 nt, Human
agaauucuccuucagggcagga

SEQ ID NO: 423202 - RNA, 22 nt, Human
cuggccuggcagggagggcaug

SEQ ID NO: 423203 - RNA, 22 nt, Human
agguggggaaaccagcgauccc

SEQ ID NO: 423204 - RNA, 22 nt, Human
gcagggacaccuuugugaagcu

SEQ ID NO: 423205 - RNA, 22 nt, Human
guguccagggccguguugucuu

SEQ ID NO: 423206 - RNA, 22 nt, Human
cagcccaaagccccaggcuaga

SEQ ID NO: 423207 - RNA, 22 nt, Human
ucggggucuuugacacgcucug

SEQ ID NO: 423208 - RNA, 22 nt, Human
uaaaaaguagugagaauggcgc

SEQ ID NO: 423209 - RNA, 20 nt, Human
ccuggagccuggaaggaguc

SEQ ID NO: 423210 - RNA, 22 nt, Human
uuucauguuuucuuaaauggca

SEQ ID NO: 423211 - RNA, 22 nt, Human
cugggugguucuaacuguugau

SEQ ID NO: 423212 - RNA, 22 nt, Human
uaauuucuagggacuaaggugc

SEQ ID NO: 423213 - RNA, 22 nt, Human
aaaugcuagggagaaacucucc

SEQ ID NO: 423214 - RNA, 22 nt, Human
ucuuugcaugugcuucuuggcc

SEQ ID NO: 423215 - RNA, 22 nt, Human
ugcagggccuugggaugugucc

SEQ ID NO: 423216 - RNA, 19 nt, Human
gggcucuggccucaguggg

SEQ ID NO: 423217 - RNA, 19 nt, Human
guuucauuaagauaggaaa

SEQ ID NO: 423218 - RNA, 22 nt, Human
cuuggggcugucacucuggcau

SEQ ID NO: 423219 - RNA, 23 nt, Human
ugagcaucacaggagaaccaggc

SEQ ID NO: 423220 - RNA, 22 nt, Human
ccucacucugcacccugcagca

SEQ ID NO: 423221 - RNA, 22 nt, Human
acaaagguggaccauguggcuu

SEQ ID NO: 423222 - RNA, 22 nt, Human
cagcugccuucugcgggaaguc

SEQ ID NO: 423223 - RNA, 22 nt, Human
uggagcaggugggaugucguga

SEQ ID NO: 423224 - RNA, 22 nt, Human
uuugcauuuauaaguuggugga

SEQ ID NO: 423225 - RNA, 22 nt, Human
cacacagaugguaagggaggga

SEQ ID NO: 423226 - RNA, 22 nt, Human
aaugggagagaacacaaagucc

SEQ ID NO: 423227 - RNA, 22 nt, Human
cagcccagcagucuuagccugc

SEQ ID NO: 423228 - RNA, 22 nt, Human
ucucacuggguauaaaugagua

SEQ ID NO: 423229 - RNA, 22 nt, Human
uggcagaguucgcugugccuuu

SEQ ID NO: 423230 - RNA, 22 nt, Human
cugggccauggaagucucugcc

SEQ ID NO: 423231 - RNA, 22 nt, Human
auuuccuauagauauggugagu

SEQ ID NO: 423232 - RNA, 22 nt, Human
agggcagacuaggauggaagug

SEQ ID NO: 423233 - RNA, 22 nt, Human
cagcuccugccugggcagcugu

SEQ ID NO: 423234 - RNA, 22 nt, Human
ugcuggggagugauugaccauc

SEQ ID NO: 423235 - RNA, 22 nt, Human
cuccucccucuuugccacacau

SEQ ID NO: 423236 - RNA, 22 nt, Human
aacuuaaacccacucauguaga

SEQ ID NO: 423237 - RNA, 22 nt, Human
aaggaaccuggaguagagggag

SEQ ID NO: 423238 - RNA, 22 nt, Human
ugaggaagggugugacggcacc

SEQ ID NO: 423239 - RNA, 22 nt, Human
caggauggagggagggcuguua

SEQ ID NO: 423240 - RNA, 22 nt, Human
uuauccaaacuggugaaucauu

SEQ ID NO: 423241 - RNA, 22 nt, Human
aggaggugacagccugcaucug

SEQ ID NO: 423242 - RNA, 22 nt, Human
gcagcuuugucacggagugucg

SEQ ID NO: 423243 - RNA, 22 nt, Human
agucuucagagaaauuaacucu

SEQ ID NO: 423244 - RNA, 17 nt, Human
gagccacccugugcgag

SEQ ID NO: 423245 - RNA, 22 nt, Human
augcaguacugauacaugccac

SEQ ID NO: 423246 - RNA, 22 nt, Human
ucucaggggccuggaguccugg

SEQ ID NO: 423247 - RNA, 22 nt, Human
gaaacuguauguaguuuuuggg

SEQ ID NO: 423248 - RNA, 22 nt, Human
uggcagaaguacacaagcaugc

SEQ ID NO: 423249 - RNA, 18 nt, Human
agaguguucucagugaaa

SEQ ID NO: 423250 - RNA, 22 nt, Human
cuuugaaagcucccaggacuua

SEQ ID NO: 423251 - RNA, 22 nt, Human
caagggcagaggcagggccccg

SEQ ID NO: 423252 - RNA, 22 nt, Human
caggcagcauuuacucugauga

SEQ ID NO: 423253 - RNA, 22 nt, Human
gccacugcacuccagcccaggc

SEQ ID NO: 423254 - RNA, 22 nt, Human
gcacagggaggcuggccuggcc

SEQ ID NO: 423255 - RNA, 22 nt, Human
aaaaauguuaucuacuguccga

SEQ ID NO: 423256 - RNA, 22 nt, Human
ugguggcagcugagugucaggu

SEQ ID NO: 423257 - RNA, 22 nt, Human
ccacagggucagccacucugca

SEQ ID NO: 423258 - RNA, 23 nt, Human
gcugcagcuguggauguucucag

SEQ ID NO: 423259 - RNA, 22 nt, Human
ugaucaguguugguucuaucua

SEQ ID NO: 423260 - RNA, 22 nt, Human
aggcugagacugugcauuagug

SEQ ID NO: 423261 - RNA, 22 nt, Human
ggaggccauaguuugggaguca

SEQ ID NO: 423262 - RNA, 22 nt, Human
gacucagugauuugacaugccu

SEQ ID NO: 423263 - RNA, 22 nt, Human
agcuuuauuugucauucacggc

SEQ ID NO: 423264 - RNA, 22 nt, Human
caggugggagcggagacugauu

SEQ ID NO: 423265 - RNA, 22 nt, Human
ccagcuccaggacugggagcug

SEQ ID NO: 423266 - RNA, 22 nt, Human
acagagguaggacaugagauau

SEQ ID NO: 423267 - RNA, 23 nt, Human
ugcugggguaguuuguggcacag

SEQ ID NO: 423268 - RNA, 22 nt, Human
acagagcacugcccugugccgc

SEQ ID NO: 423269 - RNA, 22 nt, Human
aucuaagauguauugagcacuu

SEQ ID NO: 423270 - RNA, 22 nt, Human
cacaucuucuuaacuccaaagu

SEQ ID NO: 423271 - RNA, 22 nt, Human
ccucacuuuccuuucuccuggg

SEQ ID NO: 423272 - RNA, 22 nt, Human
gaaagccauagcccagcuuuac

SEQ ID NO: 423273 - RNA, 22 nt, Human
ucagcaggcgguuccuuguggg

SEQ ID NO: 423274 - RNA, 22 nt, Human
gguggguauugaauacaggugu

SEQ ID NO: 423275 - RNA, 22 nt, Human
cugggccugggaggccaggucu

SEQ ID NO: 423276 - RNA, 22 nt, Human
cccaggcaucccauuaaggagc

SEQ ID NO: 423277 - RNA, 22 nt, Human
uggggugggcaugcgcuguccu

SEQ ID NO: 423278 - RNA, 22 nt, Human
uccugcagugugucuccugcac

SEQ ID NO: 423279 - RNA, 22 nt, Human
ggugcagaaggaagggagcugg

SEQ ID NO: 423280 - RNA, 22 nt, Human
agccaucauuucugucacuggc

SEQ ID NO: 423281 - RNA, 22 nt, Human
caccugagugucaguauucuca

SEQ ID NO: 423282 - RNA, 19 nt, Human
agagaaggauccuaugguu

SEQ ID NO: 423283 - RNA, 22 nt, Human
ucauuuccucaaauucaagguu

SEQ ID NO: 423284 - RNA, 22 nt, Human
caguguuccaggcggcagugaa

SEQ ID NO: 423285 - RNA, 22 nt, Human
acaagauuuuaugacucuuuuu

SEQ ID NO: 423286 - RNA, 22 nt, Human
gaaggaagugcucauacuaguu

SEQ ID NO: 423287 - RNA, 17 nt, Human
uagcugccccgaaugcu

SEQ ID NO: 423288 - RNA, 22 nt, Human
acauugaugaaaagguaucauu

SEQ ID NO: 423289 - RNA, 22 nt, Human
ucaucuaagagucuuacauuua

SEQ ID NO: 423290 - RNA, 22 nt, Human
aaaugcacagguuuuaaauccu

SEQ ID NO: 423291 - RNA, 22 nt, Human
augcuguguuugagaaccuagg

SEQ ID NO: 423292 - RNA, 22 nt, Human
ucucccacagucucccauggcu

SEQ ID NO: 423293 - RNA, 22 nt, Human
auguuacauaguccuuauuugu

SEQ ID NO: 423294 - RNA, 22 nt, Human
agggucagagucaggugcagua

SEQ ID NO: 423295 - RNA, 22 nt, Human
auacaguauuaccuguucagga

SEQ ID NO: 423296 - RNA, 22 nt, Human
cagaaccaggaacugauggaga

SEQ ID NO: 423297 - RNA, 22 nt, Human
augugcaugcacuuacaugugu

SEQ ID NO: 423298 - RNA, 22 nt, Human
caggccugcaggaaaggcuccc

SEQ ID NO: 423299 - RNA, 22 nt, Human
gagaaagauggaaucuuacagg

SEQ ID NO: 423300 - RNA, 22 nt, Human
aucaguuucacuugcuugcaaa

SEQ ID NO: 423301 - RNA, 19 nt, Human
gaaaggcugcugcuaccug

SEQ ID NO: 423302 - RNA, 22 nt, Human
ggugggcacauucagucucugu

SEQ ID NO: 423303 - RNA, 22 nt, Human
ugucccaguucccaggguugcu

SEQ ID NO: 423304 - RNA, 22 nt, Human
aggaaagggguagguguggacg

SEQ ID NO: 423305 - RNA, 22 nt, Human
cucucugguuucagcgaagggg

SEQ ID NO: 423306 - RNA, 22 nt, Human
gcugucugacuccaaguuggag

SEQ ID NO: 423307 - RNA, 22 nt, Human
gagaaggacuacacaucuggcc

SEQ ID NO: 423308 - RNA, 22 nt, Human
ucaggcaggcucagaggaaaac

SEQ ID NO: 423309 - RNA, 20 nt, Human
gcacugaaauucaauguuug

SEQ ID NO: 423310 - RNA, 22 nt, Human
aaauguguuccuuugcuacaga

SEQ ID NO: 423311 - RNA, 22 nt, Human
agcaggguuccaggaguugcag

SEQ ID NO: 423312 - RNA, 22 nt, Human
agggcugcccagugugagagcu

SEQ ID NO: 423313 - RNA, 22 nt, Human
ucccaggcugggggccugaagu

SEQ ID NO: 423314 - RNA, 22 nt, Human
ugucacuucaggaaugcaggga

SEQ ID NO: 423315 - RNA, 22 nt, Human
gcagacagccagacugcacugg

SEQ ID NO: 423316 - RNA, 18 nt, Human
gggcacuggggacuggag

SEQ ID NO: 423317 - RNA, 22 nt, Human
cucagaguucuccugggaggug

SEQ ID NO: 423318 - RNA, 22 nt, Human
uccugugccuccaccugcuccg

SEQ ID NO: 423319 - RNA, 22 nt, Human
uggcugagggggcaguucagga

SEQ ID NO: 423320 - RNA, 20 nt, Human
ucccaagggcugagaggauc

SEQ ID NO: 423321 - RNA, 22 nt, Human
uuaugggagcaauuggggaggu

SEQ ID NO: 423322 - RNA, 21 nt, Human
ugcaggcaggcagagaugcug

SEQ ID NO: 423323 - RNA, 22 nt, Human
acacugugucuagcauuuuaca

SEQ ID NO: 423324 - RNA, 22 nt, Human
aggcaaaauuacaaaguuauua

SEQ ID NO: 423325 - RNA, 18 nt, Human
cugugcagcaaacugagc

SEQ ID NO: 423326 - RNA, 22 nt, Human
ugacacaggcagcucccagcac

SEQ ID NO: 423327 - RNA, 22 nt, Human
cggggcuguagcacagcugagc

SEQ ID NO: 423328 - RNA, 22 nt, Human
gccagcucagugccaggccccu

SEQ ID NO: 423329 - RNA, 18 nt, Human
ugaauagggguuugcaga

SEQ ID NO: 423330 - RNA, 22 nt, Human
cuggagccugcaguuuucacuu

SEQ ID NO: 423331 - RNA, 22 nt, Human
cucagaguccccaguggguuug

SEQ ID NO: 423332 - RNA, 22 nt, Human
uucuuucccuuccagcagcucc

SEQ ID NO: 423333 - RNA, 22 nt, Human
auaaaaaugagggcgguagcua

SEQ ID NO: 423334 - RNA, 22 nt, Human
gugggcuggacccuccugcucc

SEQ ID NO: 423335 - RNA, 22 nt, Human
uuuugaaagaguccugcuacag

SEQ ID NO: 423336 - RNA, 22 nt, Human
caauguguguguuuuucucaac

SEQ ID NO: 423337 - RNA, 22 nt, Human
agccacagcauguguguaugua

SEQ ID NO: 423338 - RNA, 22 nt, Human
cuggagcagcagguggccaggg

SEQ ID NO: 423339 - RNA, 22 nt, Human
aggcugccaaagcuucugucuc

SEQ ID NO: 423340 - RNA, 19 nt, Human
cuguccuuggcugcacugu

SEQ ID NO: 423341 - RNA, 22 nt, Human
ggcaccaggcugggcauaggcc

SEQ ID NO: 423342 - RNA, 22 nt, Human
ucugggagcacacgcagugauc

SEQ ID NO: 423343 - RNA, 22 nt, Human
cugggccagucucggccgcucu

SEQ ID NO: 423344 - RNA, 22 nt, Human
gcauuuguguucuuccuagagc

SEQ ID NO: 423345 - RNA, 22 nt, Human
uccuugaaaaucuugguuuaga

SEQ ID NO: 423346 - RNA, 22 nt, Human
gggcugagcacauacugacagc

SEQ ID NO: 423347 - RNA, 22 nt, Human
ugaggcagaaauuccuguuuuc

SEQ ID NO: 423348 - RNA, 22 nt, Human
aauuccugucuuaacaguucug

SEQ ID NO: 423349 - RNA, 22 nt, Human
acagggcagguggcuacugguc

SEQ ID NO: 423350 - RNA, 20 nt, Human
aagcagaagcugcucucagc

SEQ ID NO: 423351 - RNA, 22 nt, Human
cuuuauguccaccagacugcaa

SEQ ID NO: 423352 - RNA, 22 nt, Human
uugggacagaaaaggagaagau

SEQ ID NO: 423353 - RNA, 20 nt, Human
agaaucugacccagagagac

SEQ ID NO: 423354 - RNA, 23 nt, Human
ugcagggcaaguuagagacccca

SEQ ID NO: 423355 - RNA, 22 nt, Human
uuuggaaaguugucacuuuaga

SEQ ID NO: 423356 - RNA, 22 nt, Human
cagagcuggccugugauuuuug

SEQ ID NO: 423357 - RNA, 22 nt, Human
cugguccuccuugccuucagau

SEQ ID NO: 423358 - RNA, 22 nt, Human
ggcucaggccuguaauccuagc

SEQ ID NO: 423359 - RNA, 22 nt, Human
gagugggcaccgugggcacacu

SEQ ID NO: 423360 - RNA, 22 nt, Human
gagccagccuucuucugagguc

SEQ ID NO: 423361 - RNA, 22 nt, Human
cuaugaccccagcaugaauaag

SEQ ID NO: 423362 - RNA, 21 nt, Human
gcuccuggugcugcguggcgc

SEQ ID NO: 423363 - RNA, 22 nt, Human
ucagcagggagaggagaaugca

SEQ ID NO: 423364 - RNA, 22 nt, Human
ggugauuuucgaguuucauguu

SEQ ID NO: 423365 - RNA, 22 nt, Human
uaaguggaagguuauaugcuaa

SEQ ID NO: 423366 - RNA, 22 nt, Human
gaugaagccugacuucucggug

SEQ ID NO: 423367 - RNA, 22 nt, Human
ucccagagacaucauuucuccg

SEQ ID NO: 423368 - RNA, 22 nt, Human
cugcuggggucagagcacuggg

SEQ ID NO: 423369 - RNA, 22 nt, Human
cagcaugguggagcugcucuuu

SEQ ID NO: 423370 - RNA, 20 nt, Human
accuuucaaaugauucagca

SEQ ID NO: 423371 - RNA, 22 nt, Human
uccaggagaggccugaccaggu

SEQ ID NO: 423372 - RNA, 22 nt, Human
ugucucagaggcaggaagagcc

SEQ ID NO: 423373 - RNA, 22 nt, Human
uacuuacagagcuuauaaguua

SEQ ID NO: 423374 - RNA, 18 nt, Human
uccuccuuuggccuuuuc

SEQ ID NO: 423375 - RNA, 22 nt, Human
ccagcugaggcagccacacagg

SEQ ID NO: 423376 - RNA, 22 nt, Human
uccuguguuacugccuggagcg

SEQ ID NO: 423377 - RNA, 22 nt, Human
gggacugggagauccuccuggc

SEQ ID NO: 423378 - RNA, 22 nt, Human
ucucaggguuuguacaagugua

SEQ ID NO: 423379 - RNA, 22 nt, Human
cuuguagaauugaaauggucuc

SEQ ID NO: 423380 - RNA, 22 nt, Human
ccaaggagcaaggcucaacaag

SEQ ID NO: 423381 - RNA, 22 nt, Human
cagguaggauggaagggcucaa

SEQ ID NO: 423382 - RNA, 22 nt, Human
ucucagggagggcgagucagcg

SEQ ID NO: 423383 - RNA, 22 nt, Human
agagcugcccacacagcagauu

SEQ ID NO: 423384 - RNA, 22 nt, Human
gaaaucugcuucuugcauagua

SEQ ID NO: 423385 - RNA, 22 nt, Human
cagaauuuuucgaauguacugu

SEQ ID NO: 423386 - RNA, 22 nt, Human
cccagcucucgcacuuacuagc

SEQ ID NO: 423387 - RNA, 22 nt, Human
ugcagggagggcccagcaaucu

SEQ ID NO: 423388 - RNA, 22 nt, Human
gccugagaguugaaguucagug

SEQ ID NO: 423389 - RNA, 22 nt, Human
uggccacagccucugccaguuc

SEQ ID NO: 423390 - RNA, 22 nt, Human
auagauacauuagguaacuugu

SEQ ID NO: 423391 - RNA, 22 nt, Human
gcaguggcaugaugugggcuca

SEQ ID NO: 423392 - RNA, 22 nt, Human
cauggcaggaggcugcuggcag

SEQ ID NO: 423393 - RNA, 22 nt, Human
cauucauuuaugaaauaucuau

SEQ ID NO: 423394 - RNA, 17 nt, Human
gccaaaggguuccaauc

SEQ ID NO: 423395 - RNA, 22 nt, Human
auggagugggccaauuuuagug

SEQ ID NO: 423396 - RNA, 22 nt, Human
uucuggagaucugccuauggga

SEQ ID NO: 423397 - RNA, 22 nt, Human
agggcuccugaggcccuucugg

SEQ ID NO: 423398 - RNA, 22 nt, Human
uuuuuaagcuccuuugauguca

SEQ ID NO: 423399 - RNA, 22 nt, Human
aaggcacugacugugcagggga

SEQ ID NO: 423400 - RNA, 22 nt, Human
aggcacuguucccaguuauccu

SEQ ID NO: 423401 - RNA, 22 nt, Human
aagcuuccugaaugcucauuua

SEQ ID NO: 423402 - RNA, 22 nt, Human
ugcuggggguucagaugaguaa

SEQ ID NO: 423403 - RNA, 22 nt, Human
uggcugaguguuccaaggagca

SEQ ID NO: 423404 - RNA, 22 nt, Human
uuuuggucagguuggucucgaa

SEQ ID NO: 423405 - RNA, 22 nt, Human
cacauguaguaagcaggcaaug

SEQ ID NO: 423406 - RNA, 22 nt, Human
uggggaagggcacccuggagac

SEQ ID NO: 423407 - RNA, 22 nt, Human
uacccaggaggaaacugaggcu

SEQ ID NO: 423408 - RNA, 22 nt, Human
uuauguaauuuguuugcucuuc

SEQ ID NO: 423409 - RNA, 22 nt, Human
aaaauccuuagccgagugaggu

SEQ ID NO: 423410 - RNA, 22 nt, Human
uuaauaaaguaugaauuggaaa

SEQ ID NO: 423411 - RNA, 22 nt, Human
uggcuucugggacuugugagca

SEQ ID NO: 423412 - RNA, 22 nt, Human
uucaggaugcucagaguagucu

SEQ ID NO: 423413 - RNA, 22 nt, Human
gagcugagaucgugccauugca

SEQ ID NO: 423414 - RNA, 22 nt, Human
gagcuuccugaugccgaccagu

SEQ ID NO: 423415 - RNA, 22 nt, Human
ucuggccaacaaaaacuaaguc

SEQ ID NO: 423416 - RNA, 22 nt, Human
aggccugacuugaauuuagggc

SEQ ID NO: 423417 - RNA, 22 nt, Human
uguagcauguaaauugguuauu

SEQ ID NO: 423418 - RNA, 22 nt, Human
acugaaggcuuaacucuuucau

SEQ ID NO: 423419 - RNA, 22 nt, Human
gcagacagcauguugggcuauu

SEQ ID NO: 423420 - RNA, 22 nt, Human
cugggaggcacuauucaggagg

SEQ ID NO: 423421 - RNA, 22 nt, Human
ccauggagcgggugagugagug

SEQ ID NO: 423422 - RNA, 22 nt, Human
aaugggaaagagacuagaugcu

SEQ ID NO: 423423 - RNA, 22 nt, Human
agagccaggugcugcuguuuga

SEQ ID NO: 423424 - RNA, 22 nt, Human
uacuacauuaauaaaacauuca

SEQ ID NO: 423425 - RNA, 22 nt, Human
caggaggcagagguugcaguga

SEQ ID NO: 423426 - RNA, 22 nt, Human
ucugaagaacugaguaaacaug

SEQ ID NO: 423427 - RNA, 22 nt, Human
gacacagggggauguguggacg

SEQ ID NO: 423428 - RNA, 22 nt, Human
agcugguguccuccuggagcug

SEQ ID NO: 423429 - RNA, 22 nt, Human
ugccaggcaggacccuagaacc

SEQ ID NO: 423430 - RNA, 22 nt, Human
ugaggugaccgcagaugggaag

SEQ ID NO: 423431 - RNA, 22 nt, Human
ugcugcacgauaaauaauuucu

SEQ ID NO: 423432 - RNA, 20 nt, Human
gugcuucagaagccauugcu

SEQ ID NO: 423433 - RNA, 22 nt, Human
caggggacaguaugguggauga

SEQ ID NO: 423434 - RNA, 22 nt, Human
ugucaugccaccguuucccaga

SEQ ID NO: 423435 - RNA, 22 nt, Human
aaaaaucacuuuuauaggcagc

SEQ ID NO: 423436 - RNA, 22 nt, Human
guggagacgggacagaagcuaa

SEQ ID NO: 423437 - RNA, 22 nt, Human
uucauugugaacacauucugcc

SEQ ID NO: 423438 - RNA, 22 nt, Human
aagccagcauuuucccauuccu

SEQ ID NO: 423439 - RNA, 22 nt, Human
cugucacacugauaucaggcuu

SEQ ID NO: 423440 - RNA, 22 nt, Human
gucccagaugucuggaacuccc

SEQ ID NO: 423441 - RNA, 22 nt, Human
uuacacaaacacauuccagaua

SEQ ID NO: 423442 - RNA, 22 nt, Human
aggcucagccugggccuagagc

SEQ ID NO: 423443 - RNA, 22 nt, Human
cugcucuggcuguguacuucag

SEQ ID NO: 423444 - RNA, 22 nt, Human
cugccuggaaggagcaagggga

SEQ ID NO: 423445 - RNA, 22 nt, Human
cccaggucuaugccagcucuga

SEQ ID NO: 423446 - RNA, 22 nt, Human
agcucagggcgaucugucucgg

SEQ ID NO: 423447 - RNA, 22 nt, Human
gagaagccgagucagcugagcc

SEQ ID NO: 423448 - RNA, 22 nt, Human
cagugcaguggcugagcuggag

SEQ ID NO: 423449 - RNA, 22 nt, Human
gcuggaaggcuaggcucaguug

SEQ ID NO: 423450 - RNA, 22 nt, Human
cagggcucaggaaaucagacgu

SEQ ID NO: 423451 - RNA, 22 nt, Human
aauuauauugaaguugaauguc

SEQ ID NO: 423452 - RNA, 22 nt, Human
ucucagaguuuagagcugagcc

SEQ ID NO: 423453 - RNA, 22 nt, Human
uucaggagaauuccaagaagua

SEQ ID NO: 423454 - RNA, 22 nt, Human
ugcuuuaucugugagaaccuga

SEQ ID NO: 423455 - RNA, 22 nt, Human
cccugggcaagcccuauuuucc

SEQ ID NO: 423456 - RNA, 22 nt, Human
acugaaggaagcgggcaggggu

SEQ ID NO: 423457 - RNA, 22 nt, Human
gcugcugugugggagacaggcg

SEQ ID NO: 423458 - RNA, 22 nt, Human
gcauuucuuccuggugugagcc

SEQ ID NO: 423459 - RNA, 22 nt, Human
uggcagcuggagggcaauggcc

SEQ ID NO: 423460 - RNA, 22 nt, Human
ugaagugaccuggggcagugua

SEQ ID NO: 423461 - RNA, 21 nt, Human
auuauuauuucuguguccagc

SEQ ID NO: 423462 - RNA, 22 nt, Human
cuucccagacgggguggcagcc

SEQ ID NO: 423463 - RNA, 22 nt, Human
aaaggccacuugaaggauuuuu

SEQ ID NO: 423464 - RNA, 20 nt, Human
agccagaagaaggcuggaga

SEQ ID NO: 423465 - RNA, 22 nt, Human
aacauuaauuacagucaaacau

SEQ ID NO: 423466 - RNA, 22 nt, Human
gcccagcuuuucacuuccacac

SEQ ID NO: 423467 - RNA, 22 nt, Human
gcuuucucuucacugauguuca

SEQ ID NO: 423468 - RNA, 22 nt, Human
aaugucugcucuacucaggagg

SEQ ID NO: 423469 - RNA, 22 nt, Human
uuugggaaacuuaggggucaga

SEQ ID NO: 423470 - RNA, 22 nt, Human
ucaggcagguggcuggcuaugg

SEQ ID NO: 423471 - RNA, 22 nt, Human
ucagcuggcaguucagaggcug

SEQ ID NO: 423472 - RNA, 22 nt, Human
augucccagcugagagacaacu

SEQ ID NO: 423473 - RNA, 22 nt, Human
ggauggcauguugggcucuguu

SEQ ID NO: 423474 - RNA, 22 nt, Human
uuccauaauaaccugagagaaa

SEQ ID NO: 423475 - RNA, 22 nt, Human
auuuuucucucacacuuaccag

SEQ ID NO: 423476 - RNA, 22 nt, Human
uccagggauguccuguagcacu

SEQ ID NO: 423477 - RNA, 22 nt, Human
ucuuuuggaaaugaugugcagg

SEQ ID NO: 423478 - RNA, 22 nt, Human
cauguaaaacacucagaacagu

SEQ ID NO: 423479 - RNA, 22 nt, Human
cugugcuugacagugggaagca

SEQ ID NO: 423480 - RNA, 22 nt, Human
ucauuuguugaacuuuagugcg

SEQ ID NO: 423481 - RNA, 22 nt, Human
agaguccaugaagacagcugag

SEQ ID NO: 423482 - RNA, 22 nt, Human
agugccuugugugugggcagcc

SEQ ID NO: 423483 - RNA, 22 nt, Human
gugcaugugcauccauguguac

SEQ ID NO: 423484 - RNA, 22 nt, Human
cauuagggccaccauaacaaaa

SEQ ID NO: 423485 - RNA, 22 nt, Human
cuggcuuucucugugguguuca

SEQ ID NO: 423486 - RNA, 22 nt, Human
ggugcuggacacguggcacucc

SEQ ID NO: 423487 - RNA, 22 nt, Human
cauccugguuaccccauaguca

SEQ ID NO: 423488 - RNA, 22 nt, Human
uuuccuaugauauucuaugugu

SEQ ID NO: 423489 - RNA, 22 nt, Human
uuagaaagcuuuccauagucaa

SEQ ID NO: 423490 - RNA, 22 nt, Human
ggaggaagagguuguucucuca

SEQ ID NO: 423491 - RNA, 22 nt, Human
augcagcuucaggauuaugaug

SEQ ID NO: 423492 - RNA, 22 nt, Human
gcugccaugguccaggcuccag

SEQ ID NO: 423493 - RNA, 22 nt, Human
agucccagccuaggcugugcug

SEQ ID NO: 423494 - RNA, 22 nt, Human
agugacagcugggaaggugaaa

SEQ ID NO: 423495 - RNA, 22 nt, Human
gcagcuuucuugcccuaaucuu

SEQ ID NO: 423496 - RNA, 22 nt, Human
gggagggauuaguucugccugg

SEQ ID NO: 423497 - RNA, 22 nt, Human
ggaggccaaggcaggcggauca

SEQ ID NO: 423498 - RNA, 22 nt, Human
agagcagccugugaugaugcac

SEQ ID NO: 423499 - RNA, 22 nt, Human
gaugcacagugacccugccagu

SEQ ID NO: 423500 - RNA, 23 nt, Human
auaaggcauaaagguacauugga

SEQ ID NO: 423501 - RNA, 21 nt, Human
cuccugggcuaagauauagug

SEQ ID NO: 423502 - RNA, 22 nt, Human
cagaggcugcucuggguggcau

SEQ ID NO: 423503 - RNA, 22 nt, Human
ccagagaguaucauggagagua

SEQ ID NO: 423504 - RNA, 22 nt, Human
ccaguggguaggccauggugag

SEQ ID NO: 423505 - RNA, 22 nt, Human
guuucuuuugugaucaccaacc

SEQ ID NO: 423506 - RNA, 22 nt, Human
gcuggcugggucccugagaggc

SEQ ID NO: 423507 - RNA, 22 nt, Human
ccagcuccccucagcagguaau

SEQ ID NO: 423508 - RNA, 22 nt, Human
ggucccagcugcucaagaggcu

SEQ ID NO: 423509 - RNA, 22 nt, Human
ugcucccaggcauucucuguug

SEQ ID NO: 423510 - RNA, 20 nt, Human
uuucauugucagaaucuuau

SEQ ID NO: 423511 - RNA, 23 nt, Human
gcagaggagcaagcuggacacca

SEQ ID NO: 423512 - RNA, 22 nt, Human
ccucuccuugcacccgucccgc

SEQ ID NO: 423513 - RNA, 22 nt, Human
uugcauugaucccagcuugggc

SEQ ID NO: 423514 - RNA, 23 nt, Human
ugcaggggaggcuuaaagcaggu

SEQ ID NO: 423515 - RNA, 22 nt, Human
uauuuguugcgggaauugcuau

SEQ ID NO: 423516 - RNA, 22 nt, Human
uucuaccagcuacucacugaua

SEQ ID NO: 423517 - RNA, 22 nt, Human
augugugccccuuuuacucuuu

SEQ ID NO: 423518 - RNA, 22 nt, Human
aucuggcucauucagggaacgg

SEQ ID NO: 423519 - RNA, 22 nt, Human
aggcccuggcacugccugggag

SEQ ID NO: 423520 - RNA, 18 nt, Human
gagcagaggcucaacugg

SEQ ID NO: 423521 - RNA, 22 nt, Human
agggcuguuuuuggcaccuggg

SEQ ID NO: 423522 - RNA, 22 nt, Human
cugggagagaagcgaagcuggg

SEQ ID NO: 423523 - RNA, 22 nt, Human
ugacauuucgguguaugugaug

SEQ ID NO: 423524 - RNA, 22 nt, Human
ccugacucuggccaggccagcu

SEQ ID NO: 423525 - RNA, 22 nt, Human
uguggcugacuccuggucccca

SEQ ID NO: 423526 - RNA, 19 nt, Human
ucuaacagaagugucgucc

SEQ ID NO: 423527 - RNA, 22 nt, Human
uagagcugauaaugaggccaag

SEQ ID NO: 423528 - RNA, 17 nt, Human
agcagcugaagcagcca

SEQ ID NO: 423529 - RNA, 22 nt, Human
ucaggcugagaaaaucuggacc

SEQ ID NO: 423530 - RNA, 22 nt, Human
ugugccagaaaauaugcugagg

SEQ ID NO: 423531 - RNA, 22 nt, Human
uggcucugggaaucuguugcuu

SEQ ID NO: 423532 - RNA, 22 nt, Human
ggcaugggguguauguggcacg

SEQ ID NO: 423533 - RNA, 22 nt, Human
gaggcacaccagggagucuugu

SEQ ID NO: 423534 - RNA, 17 nt, Human
gccugcaggcccgcaga

SEQ ID NO: 423535 - RNA, 22 nt, Human
ugccaggccucaggagucucca

SEQ ID NO: 423536 - RNA, 22 nt, Human
acagccagaggugguccugggu

SEQ ID NO: 423537 - RNA, 22 nt, Human
aaacaaguguaaacuagucugu

SEQ ID NO: 423538 - RNA, 22 nt, Human
ccaggaggcagagguuacagug

SEQ ID NO: 423539 - RNA, 21 nt, Human
ucugucugguuuuagaguggc

SEQ ID NO: 423540 - RNA, 22 nt, Human
agccugcuggaccaagcucaug

SEQ ID NO: 423541 - RNA, 22 nt, Human
ugcauuuuuaacaaggcuaauu

SEQ ID NO: 423542 - RNA, 22 nt, Human
ccagcuggagcucgcagauagg

SEQ ID NO: 423543 - RNA, 22 nt, Human
ccaaaggcggaacugagucucu

SEQ ID NO: 423544 - RNA, 20 nt, Human
uagggcucauuaugaucucc

SEQ ID NO: 423545 - RNA, 22 nt, Human
aaugcacagcguuccaugcuug

SEQ ID NO: 423546 - RNA, 22 nt, Human
ccuggccuggcacucccucugc

SEQ ID NO: 423547 - RNA, 22 nt, Human
cuugucagccaauuguggauuu

SEQ ID NO: 423548 - RNA, 22 nt, Human
ugcagccuugccuccucccagc

SEQ ID NO: 423549 - RNA, 23 nt, Human
ucuuuacauacugaugaguucuc

SEQ ID NO: 423550 - RNA, 22 nt, Human
ccuccucugggaagauucagag

SEQ ID NO: 423551 - RNA, 22 nt, Human
agagccugucugccuuucuacc

SEQ ID NO: 423552 - RNA, 22 nt, Human
ggcugagcucaggggcagcagg

SEQ ID NO: 423553 - RNA, 22 nt, Human
augggcagagcuggugggaggc

SEQ ID NO: 423554 - RNA, 22 nt, Human
ggguacuuaauauuuacggggu

SEQ ID NO: 423555 - RNA, 22 nt, Human
caaauguguaaggaaguguuag

SEQ ID NO: 423556 - RNA, 22 nt, Human
ugguggcaucacucagccuccc

SEQ ID NO: 423557 - RNA, 22 nt, Human
aaucgguugaacccaggaagug

SEQ ID NO: 423558 - RNA, 22 nt, Human
cagcagcugggaaggaggcuga

SEQ ID NO: 423559 - RNA, 21 nt, Human
aaggaaaagcuuggucucuga

SEQ ID NO: 423560 - RNA, 22 nt, Human
gcauuauuaauagcugcaugag

SEQ ID NO: 423561 - RNA, 22 nt, Human
agcagaugagccucaugacugg

SEQ ID NO: 423562 - RNA, 22 nt, Human
ucacagggcauuauggcuccag

SEQ ID NO: 423563 - RNA, 22 nt, Human
aaggcagauauaaagacuagag

SEQ ID NO: 423564 - RNA, 22 nt, Human
cuguacaaguccuucaucaggg

SEQ ID NO: 423565 - RNA, 22 nt, Human
gaggcagagucacaaagagucu

SEQ ID NO: 423566 - RNA, 22 nt, Human
uagcuuuaagaugagaugugga

SEQ ID NO: 423567 - RNA, 22 nt, Human
cagccugcagggcugccuguug

SEQ ID NO: 423568 - RNA, 22 nt, Human
aggagccaagauggggcaagua

SEQ ID NO: 423569 - RNA, 22 nt, Human
gcugucuguggugucagcugac

SEQ ID NO: 423570 - RNA, 22 nt, Human
aggugucuuugcggcccgccgc

SEQ ID NO: 423571 - RNA, 22 nt, Human
uaaggcacccgugagcugccag

SEQ ID NO: 423572 - RNA, 22 nt, Human
gcugucacacaugggaucucag

SEQ ID NO: 423573 - RNA, 22 nt, Human
gccucuggucccucaugcugug

SEQ ID NO: 423574 - RNA, 22 nt, Human
ccugaggacacacgcugcagga

SEQ ID NO: 423575 - RNA, 22 nt, Human
uaaaugugcacuuuacuuuuca

SEQ ID NO: 423576 - RNA, 22 nt, Human
ggagcugggacccugucaucug

SEQ ID NO: 423577 - RNA, 22 nt, Human
cuggugagacgguugacaggag

SEQ ID NO: 423578 - RNA, 22 nt, Human
ccuggguggcagagguugcagu

SEQ ID NO: 423579 - RNA, 22 nt, Human
agagcucaagacgcucacagua

SEQ ID NO: 423580 - RNA, 22 nt, Human
cauuuucaugaguuucuguuca

SEQ ID NO: 423581 - RNA, 22 nt, Human
ccauggaguuccucuggucuau

SEQ ID NO: 423582 - RNA, 22 nt, Human
cagagguacaagcuaaguuggg

SEQ ID NO: 423583 - RNA, 22 nt, Human
cccuucagcugagugggacagc

SEQ ID NO: 423584 - RNA, 22 nt, Human
acuuuggggaacuuuucuccuc

SEQ ID NO: 423585 - RNA, 22 nt, Human
acaaaugcaaguuuuaugucaa

SEQ ID NO: 423586 - RNA, 22 nt, Human
agaagccagauuguagugggac

SEQ ID NO: 423587 - RNA, 22 nt, Human
auuuguuccacacauauuuacu

SEQ ID NO: 423588 - RNA, 22 nt, Human
caggaggcaguuucagaaguca

SEQ ID NO: 423589 - RNA, 22 nt, Human
ucuccucuauuucuguauguau

SEQ ID NO: 423590 - RNA, 22 nt, Human
cagggccagccgcagcauccac

SEQ ID NO: 423591 - RNA, 22 nt, Human
auguacaguggaaacuaacaaa

SEQ ID NO: 423592 - RNA, 22 nt, Human
gacccagcuuaagucacauguu

SEQ ID NO: 423593 - RNA, 22 nt, Human
gggaagggagggccuccaguca

SEQ ID NO: 423594 - RNA, 22 nt, Human
ucucuggaauuuugagagugac

SEQ ID NO: 423595 - RNA, 22 nt, Human
ccugccuggcugucagcagagc

SEQ ID NO: 423596 - RNA, 22 nt, Human
uugcuuuguggugguucuucca

SEQ ID NO: 423597 - RNA, 22 nt, Human
cagggcugcuggccgugcccuc

SEQ ID NO: 423598 - RNA, 22 nt, Human
caggccugugacaccgugucug

SEQ ID NO: 423599 - RNA, 22 nt, Human
ggugaggcuaagugacacaggg

SEQ ID NO: 423600 - RNA, 22 nt, Human
aggcugagcaaagggccuuacc

SEQ ID NO: 423601 - RNA, 22 nt, Human
auacuuuggucacuauuauugg

SEQ ID NO: 423602 - RNA, 21 nt, Human
gaguggaacgcucuucacacc

SEQ ID NO: 423603 - RNA, 22 nt, Human
cagacaggcuagccagacucac

SEQ ID NO: 423604 - RNA, 22 nt, Human
ggcucugcgcgguaaagugacu

SEQ ID NO: 423605 - RNA, 22 nt, Human
gggcuucucuuuagugagcuga

SEQ ID NO: 423606 - RNA, 22 nt, Human
caguggguccuaaguacaguuc

SEQ ID NO: 423607 - RNA, 22 nt, Human
uacuuucuagcucuccccaguu

SEQ ID NO: 423608 - RNA, 22 nt, Human
aagggagguaaagcuauuuaaa

SEQ ID NO: 423609 - RNA, 20 nt, Human
cagcaggaaaagugccucag

SEQ ID NO: 423610 - RNA, 22 nt, Human
cauuuuauccucugggaagcua

SEQ ID NO: 423611 - RNA, 22 nt, Human
uauugacaauuugugaaacuau

SEQ ID NO: 423612 - RNA, 22 nt, Human
cagugcuguuguaagcucauug

SEQ ID NO: 423613 - RNA, 22 nt, Human
acuuccugcagcuucucagccc

SEQ ID NO: 423614 - RNA, 22 nt, Human
uuacaagugucagguacuggca

SEQ ID NO: 423615 - RNA, 22 nt, Human
ucccagaggcaguugguaacuu

SEQ ID NO: 423616 - RNA, 22 nt, Human
cugggcugcagcgggagcgacg

SEQ ID NO: 423617 - RNA, 22 nt, Human
acaggcauugggauggagguug

SEQ ID NO: 423618 - RNA, 22 nt, Human
acauuucucccugcaugccugc

SEQ ID NO: 423619 - RNA, 22 nt, Human
gaggggcugcccuggugucagg

SEQ ID NO: 423620 - RNA, 22 nt, Human
ccuggaggagcgcugaccagcu

SEQ ID NO: 423621 - RNA, 22 nt, Human
accucugcaaugcaaugucaug

SEQ ID NO: 423622 - RNA, 22 nt, Human
ggaggaguguggggcacucugc

SEQ ID NO: 423623 - RNA, 22 nt, Human
ugucagugaguuaguugcaagu

SEQ ID NO: 423624 - RNA, 22 nt, Human
gcugccugucccaggaugagga

SEQ ID NO: 423625 - RNA, 22 nt, Human
cuuuggaauaauuuccuggagu

SEQ ID NO: 423626 - RNA, 22 nt, Human
ugaccuauuagauuuccuugcc

SEQ ID NO: 423627 - RNA, 22 nt, Human
gcagggcucauucuaguacaau

SEQ ID NO: 423628 - RNA, 22 nt, Human
ucuggcuccacaccucacugca

SEQ ID NO: 423629 - RNA, 22 nt, Human
ucuucagauugcacugagcaag

SEQ ID NO: 423630 - RNA, 22 nt, Human
gcacccagccagcaucucagag

SEQ ID NO: 423631 - RNA, 22 nt, Human
ccuggcagucaggggaguccuu

SEQ ID NO: 423632 - RNA, 22 nt, Human
aguguauugauuggaacagccu

SEQ ID NO: 423633 - RNA, 22 nt, Human
uugcauuguaggauguuagaag

SEQ ID NO: 423634 - RNA, 22 nt, Human
gcuuuaaauggcuugcccaagu

SEQ ID NO: 423635 - RNA, 22 nt, Human
aagggcuggccacauucugggu

SEQ ID NO: 423636 - RNA, 22 nt, Human
acagagcaauaacagggagagg

SEQ ID NO: 423637 - RNA, 22 nt, Human
uucagagaugacaccugguguu

SEQ ID NO: 423638 - RNA, 22 nt, Human
ugagccaggaguuugaggcugu

SEQ ID NO: 423639 - RNA, 22 nt, Human
agggcacccucucugcaguacc

SEQ ID NO: 423640 - RNA, 23 nt, Human
gccuggagaaaagcugcaguuca

SEQ ID NO: 423641 - RNA, 22 nt, Human
ugaggcagaaaauagcaguuca

SEQ ID NO: 423642 - RNA, 22 nt, Human
cugcuuuguguggucccuccag

SEQ ID NO: 423643 - RNA, 22 nt, Human
ggguguguuccuaaggaaacca

SEQ ID NO: 423644 - RNA, 20 nt, Human
cacaagagaauacacacugg

SEQ ID NO: 423645 - RNA, 19 nt, Human
ucuggcuccugccaggcug

SEQ ID NO: 423646 - RNA, 22 nt, Human
uaacagaauccuguuauugcca

SEQ ID NO: 423647 - RNA, 22 nt, Human
gaggucaggggagaggcugaug

SEQ ID NO: 423648 - RNA, 22 nt, Human
cucugggcaaguaugauagaaa

SEQ ID NO: 423649 - RNA, 22 nt, Human
aggcuggcgacaucuggcgggc

SEQ ID NO: 423650 - RNA, 22 nt, Human
uggcagcaguggagguagaaag

SEQ ID NO: 423651 - RNA, 22 nt, Human
ugcauuguugaauauuucauag

SEQ ID NO: 423652 - RNA, 22 nt, Human
augaaaaguucgaucuagaagg

SEQ ID NO: 423653 - RNA, 22 nt, Human
ggccucugaggacagccuuggc

SEQ ID NO: 423654 - RNA, 22 nt, Human
aagggcaggcagagaucauaua

SEQ ID NO: 423655 - RNA, 22 nt, Human
aggaugggccugggauaugcuu

SEQ ID NO: 423656 - RNA, 22 nt, Human
gugaggugguacaauauuaacu

SEQ ID NO: 423657 - RNA, 22 nt, Human
gggcagguggagggcccagcca

SEQ ID NO: 423658 - RNA, 22 nt, Human
cuggcuccuccaaggccuggag

SEQ ID NO: 423659 - RNA, 22 nt, Human
ugggcagacgggagcuugccuu

SEQ ID NO: 423660 - RNA, 22 nt, Human
ucagcugccccaguggccccag

SEQ ID NO: 423661 - RNA, 22 nt, Human
uaugcacacaucgcagcaggaa

SEQ ID NO: 423662 - RNA, 22 nt, Human
agcagccauccuuagagaaaga

SEQ ID NO: 423663 - RNA, 20 nt, Human
uucaggauucuagaccacac

SEQ ID NO: 423664 - RNA, 22 nt, Human
agaagccagcuucagcugcccg

SEQ ID NO: 423665 - RNA, 22 nt, Human
aagggaaaucauauggugcagu

SEQ ID NO: 423666 - RNA, 22 nt, Human
caagcagacaguaggccuagaa

SEQ ID NO: 423667 - RNA, 23 nt, Human
aggaacugaggccuagggaggua

SEQ ID NO: 423668 - RNA, 22 nt, Human
aagccgggccugagaaaugaca

SEQ ID NO: 423669 - RNA, 20 nt, Human
uuugucuguuaaguguuucu

SEQ ID NO: 423670 - RNA, 22 nt, Human
auuacaaaagaagggagaaggu

SEQ ID NO: 423671 - RNA, 22 nt, Human
aagggccauaacuugcaguguu

SEQ ID NO: 423672 - RNA, 22 nt, Human
aagaauguucauuaaacuguug

SEQ ID NO: 423673 - RNA, 22 nt, Human
agggcagaccacgugcaaggau

SEQ ID NO: 423674 - RNA, 22 nt, Human
ugcagcucauugcuggggucug

SEQ ID NO: 423675 - RNA, 22 nt, Human
gagcagugggaaggaacagggu

SEQ ID NO: 423676 - RNA, 20 nt, Human
gggcagccucgggagugggu

SEQ ID NO: 423677 - RNA, 22 nt, Human
agccacagagagggagcugcaa

SEQ ID NO: 423678 - RNA, 22 nt, Human
ccuaugccugucacucugcgcu

SEQ ID NO: 423679 - RNA, 22 nt, Human
gcugucacaaauauuucucagc

SEQ ID NO: 423680 - RNA, 22 nt, Human
ccagucugugugccagccugcg

SEQ ID NO: 423681 - RNA, 22 nt, Human
cugcaggguuuuucaaggacaa

SEQ ID NO: 423682 - RNA, 22 nt, Human
gagggcuguggggcaugaccag

SEQ ID NO: 423683 - RNA, 22 nt, Human
ucaggcagaugcagggauggau

SEQ ID NO: 423684 - RNA, 22 nt, Human
ccugccagauccccugagcuga

SEQ ID NO: 423685 - RNA, 22 nt, Human
aaaacuguaggaauugggugcc

SEQ ID NO: 423686 - RNA, 16 nt, Human
uggcugagagaggguu

SEQ ID NO: 423687 - RNA, 22 nt, Human
ccagcuuuucagaaucugccug

SEQ ID NO: 423688 - RNA, 22 nt, Human
agauuguagaaacuguagcauu

SEQ ID NO: 423689 - RNA, 22 nt, Human
guuuuuaucuaauagcaguuau

SEQ ID NO: 423690 - RNA, 22 nt, Human
aggcugcaggucugggucaugu

SEQ ID NO: 423691 - RNA, 22 nt, Human
ugauuuccacagucaggggugc

SEQ ID NO: 423692 - RNA, 22 nt, Human
cagcucugaggaacacuccuuu

SEQ ID NO: 423693 - RNA, 22 nt, Human
cuggagccccagacagggagag

SEQ ID NO: 423694 - RNA, 22 nt, Human
ucuggcucuauaacuccuagcu

SEQ ID NO: 423695 - RNA, 22 nt, Human
uagacacaucaaguauaguuaa

SEQ ID NO: 423696 - RNA, 22 nt, Human
uggcccugcuaugauccugcaa

SEQ ID NO: 423697 - RNA, 22 nt, Human
gcaggagcuggaaagugauguu

SEQ ID NO: 423698 - RNA, 22 nt, Human
ugaaugauguauaauauugaga

SEQ ID NO: 423699 - RNA, 21 nt, Human
uuucugaaggcaacaucuauc

SEQ ID NO: 423700 - RNA, 17 nt, Human
guccuacccauggucua

SEQ ID NO: 423701 - RNA, 20 nt, Human
ggagaugcagcccaggugcc

SEQ ID NO: 423702 - RNA, 22 nt, Human
uugggcuggcagagguggucuu

SEQ ID NO: 423703 - RNA, 22 nt, Human
ccucuggucccagcucugcugc

SEQ ID NO: 423704 - RNA, 22 nt, Human
agcagcauguugggaugugaaa

SEQ ID NO: 423705 - RNA, 22 nt, Human
ggccccaggaccuccacggucc

SEQ ID NO: 423706 - RNA, 22 nt, Human
uacaguagacaauguuaguaug

SEQ ID NO: 423707 - RNA, 22 nt, Human
aguuuuucugcuggucucacua

SEQ ID NO: 423708 - RNA, 22 nt, Human
uccucugcuccaggcuggacuu

SEQ ID NO: 423709 - RNA, 22 nt, Human
agggucaguucugugagguguu

SEQ ID NO: 423710 - RNA, 22 nt, Human
acccugccgugggcugcuugug

SEQ ID NO: 423711 - RNA, 22 nt, Human
cacaugcauaaggauaauuacu

SEQ ID NO: 423712 - RNA, 22 nt, Human
ugugccuggaucucugugacaa

SEQ ID NO: 423713 - RNA, 21 nt, Human
aacauuucaggauccaaauug

SEQ ID NO: 423714 - RNA, 22 nt, Human
ccuguacacggucuaugccucc

SEQ ID NO: 423715 - RNA, 22 nt, Human
aucuggcugagcgaggcccaca

SEQ ID NO: 423716 - RNA, 19 nt, Human
cucagcuguagcucaugug

SEQ ID NO: 423717 - RNA, 22 nt, Human
acaccauacucauguugguucc

SEQ ID NO: 423718 - RNA, 22 nt, Human
ugagccuggagucguggagggg

SEQ ID NO: 423719 - RNA, 22 nt, Human
agaagccagaggcaguggguac

SEQ ID NO: 423720 - RNA, 22 nt, Human
cagucucucugaaguauuaaga

SEQ ID NO: 423721 - RNA, 20 nt, Human
agaagccaagugacauguuu

SEQ ID NO: 423722 - RNA, 22 nt, Human
ugcagcuccucuggcugccuga

SEQ ID NO: 423723 - RNA, 22 nt, Human
aaccaggacaauuugaauagaa

SEQ ID NO: 423724 - RNA, 22 nt, Human
gucuucuguaagaugagguccc

SEQ ID NO: 423725 - RNA, 22 nt, Human
cacuggugacuucugagcugga

SEQ ID NO: 423726 - RNA, 22 nt, Human
uggcucuguuuuaugaguacca

SEQ ID NO: 423727 - RNA, 22 nt, Human
uccacugcagcuucugauggaa

SEQ ID NO: 423728 - RNA, 22 nt, Human
agaagcagacucugaggcaagg

SEQ ID NO: 423729 - RNA, 20 nt, Human
agcugguuaucuuaauucuu

SEQ ID NO: 423730 - RNA, 22 nt, Human
uuacaugguuguuggaaaugcu

SEQ ID NO: 423731 - RNA, 21 nt, Human
ugaaaguuggagucaaaugua

SEQ ID NO: 423732 - RNA, 22 nt, Human
agaggaugauuuuaaggacacu

SEQ ID NO: 423733 - RNA, 22 nt, Human
guaguucugcagugucaccuga

SEQ ID NO: 423734 - RNA, 22 nt, Human
ggcagggugccuggcuccuguu

SEQ ID NO: 423735 - RNA, 22 nt, Human
cucuggagggaggcugagcugg

SEQ ID NO: 423736 - RNA, 22 nt, Human
cugugcaguggcagcguguggg

SEQ ID NO: 423737 - RNA, 22 nt, Human
ucaggaugguccuuuaugagaa

SEQ ID NO: 423738 - RNA, 22 nt, Human
gcucccacugcagcccugagcc

SEQ ID NO: 423739 - RNA, 22 nt, Human
uaaggaaacaacuuguauuuuu

SEQ ID NO: 423740 - RNA, 22 nt, Human
uauuucuuguuauucucguuga

SEQ ID NO: 423741 - RNA, 22 nt, Human
aaaaguguucaggaagaauaau

SEQ ID NO: 423742 - RNA, 22 nt, Human
acagagagaggcccgaggcugc

SEQ ID NO: 423743 - RNA, 22 nt, Human
aaguaaaacacacaguccaccg

SEQ ID NO: 423744 - RNA, 22 nt, Human
auuuaacaagacagagaacugg

SEQ ID NO: 423745 - RNA, 22 nt, Human
acagauuuaggacuguagcgau

SEQ ID NO: 423746 - RNA, 22 nt, Human
ucucccaggcuggagugcagug

SEQ ID NO: 423747 - RNA, 22 nt, Human
ggagugaaucacuagaugcaga

SEQ ID NO: 423748 - RNA, 22 nt, Human
ccacagaggacaacugccuggc

SEQ ID NO: 423749 - RNA, 22 nt, Human
ggagagagaugccgccuugcuc

SEQ ID NO: 423750 - RNA, 20 nt, Human
uggcuccugcgguggaacca

SEQ ID NO: 423751 - RNA, 22 nt, Human
agugcaugccuuccuguggaug

SEQ ID NO: 423752 - RNA, 22 nt, Human
gcucugucuucagcacacagua

SEQ ID NO: 423753 - RNA, 22 nt, Human
cuggagcaggcuugucccagcu

SEQ ID NO: 423754 - RNA, 22 nt, Human
agccagaggccagccugccuca

SEQ ID NO: 423755 - RNA, 22 nt, Human
aaggggaaaaaguguuaggagu

SEQ ID NO: 423756 - RNA, 19 nt, Human
auaaggcaggaggaaauuu

SEQ ID NO: 423757 - RNA, 22 nt, Human
agccuggaauuaaggaaaugca

SEQ ID NO: 423758 - RNA, 23 nt, Human
uugcuuagagaccuccucaucag

SEQ ID NO: 423759 - RNA, 22 nt, Human
gcugagguggcugccuuaguaa

SEQ ID NO: 423760 - RNA, 21 nt, Human
accaggcuugugggagggagc

SEQ ID NO: 423761 - RNA, 22 nt, Human
uuugcauuaucucacuuauaua

SEQ ID NO: 423762 - RNA, 22 nt, Human
aaaagacaucuauuucaggcag

SEQ ID NO: 423763 - RNA, 22 nt, Human
aagcugccugccacgcuagaua

SEQ ID NO: 423764 - RNA, 22 nt, Human
aaaagcucuuucugcuguagau

SEQ ID NO: 423765 - RNA, 22 nt, Human
agguccagcuguugcagccucc

SEQ ID NO: 423766 - RNA, 22 nt, Human
auaaggcagaaaugauucuagu

SEQ ID NO: 423767 - RNA, 22 nt, Human
gcagcuggagcaucuucucauc

SEQ ID NO: 423768 - RNA, 22 nt, Human
gcagcuggcccugacacgcaga

SEQ ID NO: 423769 - RNA, 22 nt, Human
ugguccugccccgugcacagag

SEQ ID NO: 423770 - RNA, 22 nt, Human
ucuuagcauuucauaacaacug

SEQ ID NO: 423771 - RNA, 22 nt, Human
caaaagcaguucuaucugaguu

SEQ ID NO: 423772 - RNA, 22 nt, Human
gaggagguuccggguggagaag

SEQ ID NO: 423773 - RNA, 22 nt, Human
acagggcccuugccagcacaag

SEQ ID NO: 423774 - RNA, 22 nt, Human
gauuuagagaauguuuuguaag

SEQ ID NO: 423775 - RNA, 22 nt, Human
ucccuggagauaacuucuggga

SEQ ID NO: 423776 - RNA, 22 nt, Human
ucauuucuccgaccugcugucc

SEQ ID NO: 423777 - RNA, 22 nt, Human
gaagccaguacugugcucugca

SEQ ID NO: 423778 - RNA, 22 nt, Human
gucccuggaauggacucugcgc

SEQ ID NO: 423779 - RNA, 22 nt, Human
caggcagcugggucaccguccc

SEQ ID NO: 423780 - RNA, 22 nt, Human
uccugggcuugcuccuccagcu

SEQ ID NO: 423781 - RNA, 22 nt, Human
guggauggauuuugaggaaugg

SEQ ID NO: 423782 - RNA, 22 nt, Human
cuacauuuggagaguauaggaa

SEQ ID NO: 423783 - RNA, 22 nt, Human
aaaugugucaguuucauucucu

SEQ ID NO: 423784 - RNA, 22 nt, Human
ccuuucagaugggcauggaccg

SEQ ID NO: 423785 - RNA, 22 nt, Human
ucaguuuuuguuugccagauag

SEQ ID NO: 423786 - RNA, 22 nt, Human
uuauuuuuaaaaguucacacag

SEQ ID NO: 423787 - RNA, 22 nt, Human
agggcagaaauauugauacugu

SEQ ID NO: 423788 - RNA, 22 nt, Human
cagcauggggaucacuguaggc

SEQ ID NO: 423789 - RNA, 22 nt, Human
caugaagcacagcucucuuuuu

SEQ ID NO: 423790 - RNA, 22 nt, Human
ccuccuggugggcgcuucuggc

SEQ ID NO: 423791 - RNA, 22 nt, Human
uucucaggugaggcugaggcug

SEQ ID NO: 423792 - RNA, 18 nt, Human
ucacagugcucuugccua

SEQ ID NO: 423793 - RNA, 22 nt, Human
cugcucuguuucuuagcugggu

SEQ ID NO: 423794 - RNA, 22 nt, Human
gaggcagaggaagguggucucu

SEQ ID NO: 423795 - RNA, 22 nt, Human
aggcugaugcuggcugaggcug

SEQ ID NO: 423796 - RNA, 22 nt, Human
aggcugggcuccgcccaacucc

SEQ ID NO: 423797 - RNA, 22 nt, Human
agagccaggaugucuucugggg

SEQ ID NO: 423798 - RNA, 22 nt, Human
ccagcagcccucuuccaagacu

SEQ ID NO: 423799 - RNA, 22 nt, Human
ucuauacaugugcacacacauc

SEQ ID NO: 423800 - RNA, 22 nt, Human
cucagaagaacccaggguccca

SEQ ID NO: 423801 - RNA, 22 nt, Human
caauaguaaauuacggaggaga

SEQ ID NO: 423802 - RNA, 22 nt, Human
gcugucaggccaugugggccuu

SEQ ID NO: 423803 - RNA, 22 nt, Human
uugccuugauucuucucaugug

SEQ ID NO: 423804 - RNA, 22 nt, Human
uucacaggcuuggagguggggg

SEQ ID NO: 423805 - RNA, 22 nt, Human
uaagugcaauguuuuacuuaaa

SEQ ID NO: 423806 - RNA, 22 nt, Human
ggcaccugcucaucuggacuca

SEQ ID NO: 423807 - RNA, 22 nt, Human
gucucccaaccccugugcccag

SEQ ID NO: 423808 - RNA, 22 nt, Human
cagggcuggcuguggcaaucuc

SEQ ID NO: 423809 - RNA, 22 nt, Human
auuauguagguuaggugguugu

SEQ ID NO: 423810 - RNA, 22 nt, Human
uggcaucucaaacaggcagauu

SEQ ID NO: 423811 - RNA, 22 nt, Human
guggagaccuccuaggaugugu

SEQ ID NO: 423812 - RNA, 22 nt, Human
ugggaccugcucuuggaaugag

SEQ ID NO: 423813 - RNA, 22 nt, Human
ucagucuccuuuccucuagaca

SEQ ID NO: 423814 - RNA, 22 nt, Human
uggagagcgugcuuagcacucu

SEQ ID NO: 423815 - RNA, 22 nt, Human
aaucaguuguucacucugaaaa

SEQ ID NO: 423816 - RNA, 22 nt, Human
ggcaaaguuuucaucucauaac

SEQ ID NO: 423817 - RNA, 22 nt, Human
cugcuuuagacaacugcuggga

SEQ ID NO: 423818 - RNA, 22 nt, Human
augggcagaguggggacaggaa

SEQ ID NO: 423819 - RNA, 22 nt, Human
uagucucuggagacucuagggg

SEQ ID NO: 423820 - RNA, 22 nt, Human
accaggcacucuuguggcagug

SEQ ID NO: 423821 - RNA, 22 nt, Human
ugaaagguuauuuaggucugcu

SEQ ID NO: 423822 - RNA, 22 nt, Human
caggaccuggaaugcuugugaa

SEQ ID NO: 423823 - RNA, 18 nt, Human
cagucccaaaccuuagga

SEQ ID NO: 423824 - RNA, 22 nt, Human
ugggcagaaugugggauccaga

SEQ ID NO: 423825 - RNA, 22 nt, Human
ucucuuaauaaguaaauacuga

SEQ ID NO: 423826 - RNA, 22 nt, Human
aaaauaucagcaaagggugaca

SEQ ID NO: 423827 - RNA, 22 nt, Human
cucaggagaugacagaagguau

SEQ ID NO: 423828 - RNA, 22 nt, Human
acaaguaccaaaugcucaagua

SEQ ID NO: 423829 - RNA, 22 nt, Human
ugaaagggguugaguuacagcu

SEQ ID NO: 423830 - RNA, 22 nt, Human
acucugccccgaguucugggaa

SEQ ID NO: 423831 - RNA, 22 nt, Human
gcacagggcccugugcguaggu

SEQ ID NO: 423832 - RNA, 21 nt, Human
gagugucuaauccaggcuguc

SEQ ID NO: 423833 - RNA, 22 nt, Human
uuucuucucacccaggacagag

SEQ ID NO: 423834 - RNA, 22 nt, Human
accuuuuuguucuguucucagc

SEQ ID NO: 423835 - RNA, 22 nt, Human
ggagagcugguagcuggcucca

SEQ ID NO: 423836 - RNA, 22 nt, Human
ggugcagaucuuucucuucagg

SEQ ID NO: 423837 - RNA, 21 nt, Human
gcaggcuggucaaaccucagu

SEQ ID NO: 423838 - RNA, 22 nt, Human
gcucuggcuacuguggcuaccg

SEQ ID NO: 423839 - RNA, 22 nt, Human
aagcuccccgaaacccaccucu

SEQ ID NO: 423840 - RNA, 22 nt, Human
cagcagggaagcugugcuguuu

SEQ ID NO: 423841 - RNA, 22 nt, Human
accaggcagucaccguccagga

SEQ ID NO: 423842 - RNA, 22 nt, Human
ggagccaguauuuaguggucuu

SEQ ID NO: 423843 - RNA, 22 nt, Human
ggaggccaaggcagguggaucg

SEQ ID NO: 423844 - RNA, 22 nt, Human
uaaggcacacaguugcugcaug

SEQ ID NO: 423845 - RNA, 22 nt, Human
agggcaugaagcaguggacagc

SEQ ID NO: 423846 - RNA, 22 nt, Human
ugccuugguucucuacuuggag

SEQ ID NO: 423847 - RNA, 22 nt, Human
ucugaaggugcuagagaaagcu

SEQ ID NO: 423848 - RNA, 22 nt, Human
ugaggccacuuccccacagccc

SEQ ID NO: 423849 - RNA, 22 nt, Human
agaauucuggaguugggaggaa

SEQ ID NO: 423850 - RNA, 22 nt, Human
uggguagagacacagucugggg

SEQ ID NO: 423851 - RNA, 20 nt, Human
cugcccagccacugagggau

SEQ ID NO: 423852 - RNA, 23 nt, Human
gccucuggagccccagugcucag

SEQ ID NO: 423853 - RNA, 22 nt, Human
ucagagaguuuucacuagggug

SEQ ID NO: 423854 - RNA, 22 nt, Human
acacugaauaauugagaguuga

SEQ ID NO: 423855 - RNA, 22 nt, Human
cuggccagguuuugaacaguug

SEQ ID NO: 423856 - RNA, 22 nt, Human
aauuaggaauaaaugaguacuu

SEQ ID NO: 423857 - RNA, 22 nt, Human
acagguggaaacaugguguugg

SEQ ID NO: 423858 - RNA, 23 nt, Human
guuuucaacacaauaaauguaac

SEQ ID NO: 423859 - RNA, 21 nt, Human
ccuggcuucagggugcacugg

SEQ ID NO: 423860 - RNA, 22 nt, Human
ucaggcagaccaccgugggcag

SEQ ID NO: 423861 - RNA, 22 nt, Human
cugcugcucgaccagucccagg

SEQ ID NO: 423862 - RNA, 22 nt, Human
aggcaagggggcgccaccuucc

SEQ ID NO: 423863 - RNA, 22 nt, Human
ccucacagcuuuucaaagugga

SEQ ID NO: 423864 - RNA, 23 nt, Human
aggaggccugaaacugaggcuga

SEQ ID NO: 423865 - RNA, 22 nt, Human
acccaggacucucuuccaguag

SEQ ID NO: 423866 - RNA, 22 nt, Human
ugaggcagcaauuguauuguau

SEQ ID NO: 423867 - RNA, 22 nt, Human
caguacuuaguucucaugguuu

SEQ ID NO: 423868 - RNA, 22 nt, Human
ccggcucggcgaccaggcugaa

SEQ ID NO: 423869 - RNA, 22 nt, Human
cugcccuggucccauggcugau

SEQ ID NO: 423870 - RNA, 22 nt, Human
caggcagcagaggaguguggga

SEQ ID NO: 423871 - RNA, 22 nt, Human
aucaggauuacacggggaugcu

SEQ ID NO: 423872 - RNA, 16 nt, Human
cuacccagugagaagg

SEQ ID NO: 423873 - RNA, 22 nt, Human
cacuucaauuaacuucagcauu

SEQ ID NO: 423874 - RNA, 22 nt, Human
uccagagccuauauguucaacu

SEQ ID NO: 423875 - RNA, 23 nt, Human
ggcacugaagcuacaauggugag

SEQ ID NO: 423876 - RNA, 22 nt, Human
gcuucucucucagacugcaagc

SEQ ID NO: 423877 - RNA, 22 nt, Human
cugcucuggcguacucggcauc

SEQ ID NO: 423878 - RNA, 23 nt, Human
gccuucagcucgggaaggcuccc

SEQ ID NO: 423879 - RNA, 22 nt, Human
caggcuugauuauucagacaau

SEQ ID NO: 423880 - RNA, 22 nt, Human
uucagagcaucucuaaagccag

SEQ ID NO: 423881 - RNA, 22 nt, Human
aagcuggacucugccauuuacu

SEQ ID NO: 423882 - RNA, 22 nt, Human
ggaggccaaggcagguggauca

SEQ ID NO: 423883 - RNA, 22 nt, Human
cuggcucacaggugagaugcau

SEQ ID NO: 423884 - RNA, 22 nt, Human
uccaagggcagccauagaacuu

SEQ ID NO: 423885 - RNA, 22 nt, Human
gcucccagacugaccagaggug

SEQ ID NO: 423886 - RNA, 22 nt, Human
uucaauucugcucugaucuuag

SEQ ID NO: 423887 - RNA, 22 nt, Human
uaaugcacaugacugaacuauu

SEQ ID NO: 423888 - RNA, 22 nt, Human
uguuuuguuuaugagagcacag

SEQ ID NO: 423889 - RNA, 22 nt, Human
gcugccucuguagcuuuggacc

SEQ ID NO: 423890 - RNA, 22 nt, Human
cagaggccccagaacuagcucu

SEQ ID NO: 423891 - RNA, 22 nt, Human
ucaucuuuccucaaaagaucca

SEQ ID NO: 423892 - RNA, 22 nt, Human
gauuucaagcccccagagauuc

SEQ ID NO: 423893 - RNA, 22 nt, Human
ucucagagauucagggagaagu

SEQ ID NO: 423894 - RNA, 22 nt, Human
acguuuucagccuuaauguaga

SEQ ID NO: 423895 - RNA, 22 nt, Human
augucuuuggcuuugacauggc

SEQ ID NO: 423896 - RNA, 22 nt, Human
cugggacuuuacccuguggccc

SEQ ID NO: 423897 - RNA, 22 nt, Human
ugaaauguuugaagaccacuga

SEQ ID NO: 423898 - RNA, 22 nt, Human
auugcagcuggucaggguaauu

SEQ ID NO: 423899 - RNA, 20 nt, Human
gucugaggagcagugggaaa

SEQ ID NO: 423900 - RNA, 22 nt, Human
uguuacacagcagaauagcaag

SEQ ID NO: 423901 - RNA, 22 nt, Human
cgggcagaucacacagggcuug

SEQ ID NO: 423902 - RNA, 22 nt, Human
accugcagcugagaaaaugacu

SEQ ID NO: 423903 - RNA, 22 nt, Human
aagcugccugggaggaagggcu

SEQ ID NO: 423904 - RNA, 22 nt, Human
ccccaccugugcgucugccgca

SEQ ID NO: 423905 - RNA, 22 nt, Human
ggaggccaaggagggcggauca

SEQ ID NO: 423906 - RNA, 22 nt, Human
cacugggcguguccugggugag

SEQ ID NO: 423907 - RNA, 22 nt, Human
agggauguaaauucuucuucuu

SEQ ID NO: 423908 - RNA, 22 nt, Human
cucccaagauaaauaaggcagu

SEQ ID NO: 423909 - RNA, 17 nt, Human
uggacccuugggccucc

SEQ ID NO: 423910 - RNA, 18 nt, Human
uggaggcagaguucuggc

SEQ ID NO: 423911 - RNA, 22 nt, Human
gaggccaaucaauagggcaaua

SEQ ID NO: 423912 - RNA, 22 nt, Human
uuggcugaagguuaagugcugg

SEQ ID NO: 423913 - RNA, 22 nt, Human
gccuggguccacugaucaugcu

SEQ ID NO: 423914 - RNA, 22 nt, Human
aggcugagugcuccccuagaug

SEQ ID NO: 423915 - RNA, 22 nt, Human
cagaaggcuggcagauugagau

SEQ ID NO: 423916 - RNA, 22 nt, Human
acugccuugucucuugccuguu

SEQ ID NO: 423917 - RNA, 22 nt, Human
caucugcuguuccuuggacuca

SEQ ID NO: 423918 - RNA, 22 nt, Human
ccaaugauggugcccacgauga

SEQ ID NO: 423919 - RNA, 22 nt, Human
gagaaagggauaauuugaagag

SEQ ID NO: 423920 - RNA, 22 nt, Human
cuaaaugcccuacaaugacugg

SEQ ID NO: 423921 - RNA, 22 nt, Human
uuuccauauuuggucuuuggga

SEQ ID NO: 423922 - RNA, 22 nt, Human
ugggacuuguguggcaguauuu

SEQ ID NO: 423923 - RNA, 22 nt, Human
uagcuguguagacacucagagc

SEQ ID NO: 423924 - RNA, 22 nt, Human
ugagaguauuuuggcauuauca

SEQ ID NO: 423925 - RNA, 22 nt, Human
agacucaagcagauaggaauua

SEQ ID NO: 423926 - RNA, 22 nt, Human
gggagcaggagccugccugcca

SEQ ID NO: 423927 - RNA, 22 nt, Human
agaugguguuuccccaggugga

SEQ ID NO: 423928 - RNA, 22 nt, Human
agcagccacacgccuccuucuc

SEQ ID NO: 423929 - RNA, 23 nt, Human
gcagagcugcccuauugccuugg

SEQ ID NO: 423930 - RNA, 22 nt, Human
gggcucuguccauuccuucaua

SEQ ID NO: 423931 - RNA, 22 nt, Human
ucucugcucugugccucaguuu

SEQ ID NO: 423932 - RNA, 18 nt, Human
aaggcuucaaagaguaga

SEQ ID NO: 423933 - RNA, 22 nt, Human
gaaaagagaacaucugaggauc

SEQ ID NO: 423934 - RNA, 22 nt, Human
cuguccagaaagggggcaacaa

SEQ ID NO: 423935 - RNA, 22 nt, Human
aauauguucaaaauagaucacu

SEQ ID NO: 423936 - RNA, 22 nt, Human
ggagaggugaauggcugcucua

SEQ ID NO: 423937 - RNA, 22 nt, Human
ugcuggcuggccuggccuggac

SEQ ID NO: 423938 - RNA, 22 nt, Human
ggcaaaaaccauaauuacuuuu

SEQ ID NO: 423939 - RNA, 22 nt, Human
ggagugaaguggcgcgaucucg

SEQ ID NO: 423940 - RNA, 22 nt, Human
ugaacagaucaauagaacugac

SEQ ID NO: 423941 - RNA, 22 nt, Human
aggcacaggccucagcacccag

SEQ ID NO: 423942 - RNA, 22 nt, Human
cuuauuagaguuguguucuguu

SEQ ID NO: 423943 - RNA, 22 nt, Human
acuguacacacuucucugucuu

SEQ ID NO: 423944 - RNA, 22 nt, Human
gugcucaggaagcuguuccugc

SEQ ID NO: 423945 - RNA, 21 nt, Human
agaagccuggguggagguggg

SEQ ID NO: 423946 - RNA, 22 nt, Human
aagcugccacacggugaguacu

SEQ ID NO: 423947 - RNA, 22 nt, Human
guucaagguuuuacagagugua

SEQ ID NO: 423948 - RNA, 22 nt, Human
aagccaguccucuacugggcac

SEQ ID NO: 423949 - RNA, 22 nt, Human
auuugucuuugagugcccugcu

SEQ ID NO: 423950 - RNA, 22 nt, Human
gaaggaaaggucucaugccuuu

SEQ ID NO: 423951 - RNA, 22 nt, Human
aaaugcauuuuuaauuagaccc

SEQ ID NO: 423952 - RNA, 22 nt, Human
ccuccugggacaggcuggcaca

SEQ ID NO: 423953 - RNA, 22 nt, Human
uggcuucugcuuucaguggagg

SEQ ID NO: 423954 - RNA, 22 nt, Human
gagccagccgcaagagcuguga

SEQ ID NO: 423955 - RNA, 22 nt, Human
gaggggcugggcagucccugga

SEQ ID NO: 423956 - RNA, 19 nt, Human
ugagaggcuuaaggcagcu

SEQ ID NO: 423957 - RNA, 22 nt, Human
cuggcuccauccuugagcucug

SEQ ID NO: 423958 - RNA, 22 nt, Human
cccaggcugaugggaugggcca

SEQ ID NO: 423959 - RNA, 22 nt, Human
uagucaaaccucagaauacccc

SEQ ID NO: 423960 - RNA, 22 nt, Human
guaucuuuugguggaaaaauaa

SEQ ID NO: 423961 - RNA, 22 nt, Human
gauuucaauccagcuuucuucu

SEQ ID NO: 423962 - RNA, 22 nt, Human
agguggagaagagaugggcagu

SEQ ID NO: 423963 - RNA, 22 nt, Human
gaccauuucuaggaaucagacu

SEQ ID NO: 423964 - RNA, 22 nt, Human
gcagaacauuucacaguaucuu

SEQ ID NO: 423965 - RNA, 22 nt, Human
cgucuuccucuuacgaugcgcu

SEQ ID NO: 423966 - RNA, 22 nt, Human
cccugcugucaggugcugggag

SEQ ID NO: 423967 - RNA, 22 nt, Human
uggcugaaucugcagcaggaag

SEQ ID NO: 423968 - RNA, 22 nt, Human
ccugggucuugguucaugcucu

SEQ ID NO: 423969 - RNA, 22 nt, Human
gcagaggcauuucugacgcugc

SEQ ID NO: 423970 - RNA, 22 nt, Human
caggagcccguugcuccggcgg

SEQ ID NO: 423971 - RNA, 22 nt, Human
cccugcagagccagcccugacc

SEQ ID NO: 423972 - RNA, 22 nt, Human
ugcucagugagucugugacagg

SEQ ID NO: 423973 - RNA, 22 nt, Human
ccauaagguugaaaacuguaca

SEQ ID NO: 423974 - RNA, 22 nt, Human
augaggcaaucaugguccaguu

SEQ ID NO: 423975 - RNA, 22 nt, Human
uuguauuagcuguaaauuuucu

SEQ ID NO: 423976 - RNA, 22 nt, Human
ucuuugcagaauuuaacuuugc

SEQ ID NO: 423977 - RNA, 22 nt, Human
auagauauuugaguuguuucca

SEQ ID NO: 423978 - RNA, 22 nt, Human
ugugucagaaggcaauggggau

SEQ ID NO: 423979 - RNA, 21 nt, Human
ccaggcagagcugugaguucu

SEQ ID NO: 423980 - RNA, 22 nt, Human
cgcagagggcaggcagugcugg

SEQ ID NO: 423981 - RNA, 22 nt, Human
ggcuccugauaggagaaugcgg

SEQ ID NO: 423982 - RNA, 22 nt, Human
uuucuucucgacaccuuauccc

SEQ ID NO: 423983 - RNA, 22 nt, Human
ccacaggaccagaggagaucac

SEQ ID NO: 423984 - RNA, 22 nt, Human
agucucagaaaauaugcuuuuu

SEQ ID NO: 423985 - RNA, 22 nt, Human
uagaggcauuaaugaauaaaca

SEQ ID NO: 423986 - RNA, 22 nt, Human
uucucagugaaguuuagaacau

SEQ ID NO: 423987 - RNA, 23 nt, Human
ccuggcuggauucucugcauuca

SEQ ID NO: 423988 - RNA, 22 nt, Human
cuccagcugccaccagauguuu

SEQ ID NO: 423989 - RNA, 22 nt, Human
auuauuuuaugugcggccugau

SEQ ID NO: 423990 - RNA, 22 nt, Human
agcaaaguagcugcuguucuua

SEQ ID NO: 423991 - RNA, 22 nt, Human
agcaguggugugaggagggcuc

SEQ ID NO: 423992 - RNA, 22 nt, Human
ggcacugauuccauucaugaag

SEQ ID NO: 423993 - RNA, 22 nt, Human
uugucuguccaggcaccccaag

SEQ ID NO: 423994 - RNA, 22 nt, Human
gcuggugccuuguuguuguuac

SEQ ID NO: 423995 - RNA, 22 nt, Human
uguggcugcucaggugcagacc

SEQ ID NO: 423996 - RNA, 20 nt, Human
ggccuuggguuucgccuguu

SEQ ID NO: 423997 - RNA, 22 nt, Human
cagaagucacccucagaauaac

SEQ ID NO: 423998 - RNA, 22 nt, Human
cccugcaguccuuucuuggcuc

SEQ ID NO: 423999 - RNA, 19 nt, Human
aagcagcccuggcaagagc

SEQ ID NO: 424000 - RNA, 22 nt, Human
auaugcacauacauacauaggu

SEQ ID NO: 424001 - RNA, 22 nt, Human
agaggccuuucuguugagugaa

SEQ ID NO: 424002 - RNA, 22 nt, Human
agaucaaagccaugagagauuu

SEQ ID NO: 424003 - RNA, 22 nt, Human
cucuccucagaacaggcccucu

SEQ ID NO: 424004 - RNA, 22 nt, Human
aagagguugucugugaugaguu

SEQ ID NO: 424005 - RNA, 22 nt, Human
ucagggcacguuucugcaaugc

SEQ ID NO: 424006 - RNA, 22 nt, Human
agagccuggagguucugcugaa

SEQ ID NO: 424007 - RNA, 22 nt, Human
cagccaggacagggaaacuagu

SEQ ID NO: 424008 - RNA, 22 nt, Human
aaguccagugcuuuagauucca

SEQ ID NO: 424009 - RNA, 22 nt, Human
uagugaaauuuaugcacagcua

SEQ ID NO: 424010 - RNA, 22 nt, Human
caguuucuacgacuuaagcaca

SEQ ID NO: 424011 - RNA, 22 nt, Human
aagcagccagccaucaugcccg

SEQ ID NO: 424012 - RNA, 22 nt, Human
uguuaacaucuuggacucguga

SEQ ID NO: 424013 - RNA, 22 nt, Human
gagcagugguugaacagaggca

SEQ ID NO: 424014 - RNA, 22 nt, Human
guaggcagauaggagugcagcc

SEQ ID NO: 424015 - RNA, 22 nt, Human
gcuguggccuggcgcagagcug

SEQ ID NO: 424016 - RNA, 22 nt, Human
agagggcugccucagucagcua

SEQ ID NO: 424017 - RNA, 19 nt, Human
ucaggaguuaguugugcuc

SEQ ID NO: 424018 - RNA, 23 nt, Human
auuuccuacuauaaaagagguaa

SEQ ID NO: 424019 - RNA, 22 nt, Human
ugcaggagaaaguacggagcgu

SEQ ID NO: 424020 - RNA, 20 nt, Human
agggcagagggauuacaggc

SEQ ID NO: 424021 - RNA, 22 nt, Human
caugggcuacagaagcaugcug

SEQ ID NO: 424022 - RNA, 22 nt, Human
cagacacagauaugcauauggc

SEQ ID NO: 424023 - RNA, 22 nt, Human
gacuguacgucauugaaggcca

SEQ ID NO: 424024 - RNA, 22 nt, Human
uccaagaucuacagcaguuuag

SEQ ID NO: 424025 - RNA, 22 nt, Human
aauuucuucagcucuaaaaugg

SEQ ID NO: 424026 - RNA, 18 nt, Human
ccagagcuggcuccucgc

SEQ ID NO: 424027 - RNA, 22 nt, Human
acaguggaaagaacauggauuu

SEQ ID NO: 424028 - RNA, 18 nt, Human
gcagagugcgucucugug

SEQ ID NO: 424029 - RNA, 21 nt, Human
ugcuuuaugggaaaaauguca

SEQ ID NO: 424030 - RNA, 22 nt, Human
gugaggggaguaaagccauguu

SEQ ID NO: 424031 - RNA, 22 nt, Human
cugagccagcgggcucacuuuu

SEQ ID NO: 424032 - RNA, 22 nt, Human
uagagcuggaauuugcagcaag

SEQ ID NO: 424033 - RNA, 22 nt, Human
aggcacugguccauuuucugca

SEQ ID NO: 424034 - RNA, 20 nt, Human
agcaggaaaagugccagucu

SEQ ID NO: 424035 - RNA, 22 nt, Human
ggcugccugaggcugaggcccg

SEQ ID NO: 424036 - RNA, 22 nt, Human
cccagcauuucugggcugcacu

SEQ ID NO: 424037 - RNA, 22 nt, Human
aaagauuucagaagccugugcc

SEQ ID NO: 424038 - RNA, 22 nt, Human
augggcugugagguccggcagg

SEQ ID NO: 424039 - RNA, 22 nt, Human
agggcagcuaaggugcugacug

SEQ ID NO: 424040 - RNA, 22 nt, Human
uggcucagaagaaaagguaaac

SEQ ID NO: 424041 - RNA, 22 nt, Human
ucuuuauuuuaugcuugugcaa

SEQ ID NO: 424042 - RNA, 22 nt, Human
cugugaccuccaggaaggggug

SEQ ID NO: 424043 - RNA, 22 nt, Human
gagugguaggcaguguuaggaa

SEQ ID NO: 424044 - RNA, 22 nt, Human
aaagaucagucugaagcaacau

SEQ ID NO: 424045 - RNA, 20 nt, Human
gccaggcacuguucucaaua

SEQ ID NO: 424046 - RNA, 22 nt, Human
ugccaggcugcccuccagucug

SEQ ID NO: 424047 - RNA, 22 nt, Human
gcagcuuuggagguggaacucu

SEQ ID NO: 424048 - RNA, 22 nt, Human
cagugcagccaaggacaggcac

SEQ ID NO: 424049 - RNA, 22 nt, Human
acaguggaaaugugggagggga

SEQ ID NO: 424050 - RNA, 18 nt, Human
ucauuuguuuugcaugaa

SEQ ID NO: 424051 - RNA, 22 nt, Human
gucccaggaguugcugggccuu

SEQ ID NO: 424052 - RNA, 22 nt, Human
cacagggcaggccccaggccuc

SEQ ID NO: 424053 - RNA, 22 nt, Human
agagguagagguugcagugagc

SEQ ID NO: 424054 - RNA, 22 nt, Human
agcaagcuaccuagauagucua

SEQ ID NO: 424055 - RNA, 22 nt, Human
uuagaaaacauaagugguaaag

SEQ ID NO: 424056 - RNA, 22 nt, Human
ucaaaauuagugaccaaaggca

SEQ ID NO: 424057 - RNA, 18 nt, Human
cagcugugcccuguuugg

SEQ ID NO: 424058 - RNA, 22 nt, Human
uccagaggcuccaaagggagau

SEQ ID NO: 424059 - RNA, 22 nt, Human
cagaggguugaugugaggcuua

SEQ ID NO: 424060 - RNA, 21 nt, Human
ccucugcucgggcaugcguuu

SEQ ID NO: 424061 - RNA, 22 nt, Human
guuccuauauagccuuaaggau

SEQ ID NO: 424062 - RNA, 22 nt, Human
cugccucuauucacugaggcag

SEQ ID NO: 424063 - RNA, 22 nt, Human
aacauaauguggccaaagucac

SEQ ID NO: 424064 - RNA, 22 nt, Human
acccaggaugauaauguucaca

SEQ ID NO: 424065 - RNA, 22 nt, Human
ugaugguuuuauuaauaggacc

SEQ ID NO: 424066 - RNA, 22 nt, Human
ccagcccuugagauggaaggga

SEQ ID NO: 424067 - RNA, 21 nt, Human
agcaggaggcagucacagcuc

SEQ ID NO: 424068 - RNA, 17 nt, Human
gguucaguucugcauuc

SEQ ID NO: 424069 - RNA, 20 nt, Human
cagggcacacugcagccucg

SEQ ID NO: 424070 - RNA, 20 nt, Human
cucugcugcccgccggcugc

SEQ ID NO: 424071 - RNA, 22 nt, Human
gggcagccucggugccugcugc

SEQ ID NO: 424072 - RNA, 22 nt, Human
gaggggcuggcuguggucccau

SEQ ID NO: 424073 - RNA, 22 nt, Human
acagauccugguuacagccauu

SEQ ID NO: 424074 - RNA, 22 nt, Human
gcuggccugaccugaggcuggg

SEQ ID NO: 424075 - RNA, 22 nt, Human
agucagcagccuggccaggaga

SEQ ID NO: 424076 - RNA, 22 nt, Human
cacaggagauugaucuauuggu

SEQ ID NO: 424077 - RNA, 22 nt, Human
agagccuguaacaucuuucuua

SEQ ID NO: 424078 - RNA, 22 nt, Human
ccagggugcucuguggcgucgc

SEQ ID NO: 424079 - RNA, 22 nt, Human
auuguguaauuuucagcucaua

SEQ ID NO: 424080 - RNA, 17 nt, Human
uauacacagacagacug

SEQ ID NO: 424081 - RNA, 17 nt, Human
gucugggcuuuagagac

SEQ ID NO: 424082 - RNA, 22 nt, Human
gucaggauuauaauccccaugg

SEQ ID NO: 424083 - RNA, 22 nt, Human
aucagcaaggcaaucacugcag

SEQ ID NO: 424084 - RNA, 20 nt, Human
aggcagagcgcacuuuuaga

SEQ ID NO: 424085 - RNA, 19 nt, Human
cucuccagcuccaguagcu

SEQ ID NO: 424086 - RNA, 19 nt, Human
cugaggcccauguaccaug

SEQ ID NO: 424087 - RNA, 22 nt, Human
gccuuccugcagcucugagcgu

SEQ ID NO: 424088 - RNA, 22 nt, Human
gcagaagggaauaaggagcuuu

SEQ ID NO: 424089 - RNA, 22 nt, Human
guguggcugccagccaagaggc

SEQ ID NO: 424090 - RNA, 20 nt, Human
cagcuuuagaucuuugauua

SEQ ID NO: 424091 - RNA, 22 nt, Human
auacauauaugguacuuccugg

SEQ ID NO: 424092 - RNA, 19 nt, Human
aguagcagaaagugcagug

SEQ ID NO: 424093 - RNA, 22 nt, Human
cuuggcugucuauaggaaagag

SEQ ID NO: 424094 - RNA, 22 nt, Human
ugucccauggauaccaggcuau

SEQ ID NO: 424095 - RNA, 22 nt, Human
cugaagcacagcauauaaauaa

SEQ ID NO: 424096 - RNA, 22 nt, Human
ggcucugcaugugagugggugg

SEQ ID NO: 424097 - RNA, 23 nt, Human
ucaugcccaggcuccagauguca

SEQ ID NO: 424098 - RNA, 22 nt, Human
aguuggagugaacaugagauug

SEQ ID NO: 424099 - RNA, 22 nt, Human
uggcugaguaaguugugauaug

SEQ ID NO: 424100 - RNA, 22 nt, Human
ugggcugcugagaaugagagag

SEQ ID NO: 424101 - RNA, 22 nt, Human
uugaaaguuuauggagucugca

SEQ ID NO: 424102 - RNA, 22 nt, Human
aauuaggggaggacguaucaua

SEQ ID NO: 424103 - RNA, 22 nt, Human
ccucagcucuucccugugcaca

SEQ ID NO: 424104 - RNA, 18 nt, Human
caguuuuuauaucuggca

SEQ ID NO: 424105 - RNA, 20 nt, Human
agugggagagggcagacugc

SEQ ID NO: 424106 - RNA, 22 nt, Human
ugagcugggcugggcugagcug

SEQ ID NO: 424107 - RNA, 21 nt, Human
aaagagguuaauauuguaagu

SEQ ID NO: 424108 - RNA, 22 nt, Human
ucugaggcauacccaggccccc

SEQ ID NO: 424109 - RNA, 22 nt, Human
gagaagcaaucgugacaucucc

SEQ ID NO: 424110 - RNA, 22 nt, Human
cccucugccugcgcccuggugu

SEQ ID NO: 424111 - RNA, 22 nt, Human
ucagagguaagggcugagagga

SEQ ID NO: 424112 - RNA, 20 nt, Human
gcugaccccugcugucaugc

SEQ ID NO: 424113 - RNA, 22 nt, Human
ggaaagaggauaguggguaggu

SEQ ID NO: 424114 - RNA, 22 nt, Human
ccagggccucguguucugagug

SEQ ID NO: 424115 - RNA, 22 nt, Human
ucauuuuucacacagggucacc

SEQ ID NO: 424116 - RNA, 22 nt, Human
uuucccaaguguaaacauggca

SEQ ID NO: 424117 - RNA, 22 nt, Human
cucuccagaucugcugagccag

SEQ ID NO: 424118 - RNA, 22 nt, Human
gagugcaguuggggugagggga

SEQ ID NO: 424119 - RNA, 22 nt, Human
agaugcugugucuguucccuug

SEQ ID NO: 424120 - RNA, 22 nt, Human
ggaggcugcugccucacguggg

SEQ ID NO: 424121 - RNA, 18 nt, Human
accugccuguucuucucu

SEQ ID NO: 424122 - RNA, 22 nt, Human
acuguggccugcuguaugggcu

SEQ ID NO: 424123 - RNA, 22 nt, Human
ucucuggaauuggcugaggcaa

SEQ ID NO: 424124 - RNA, 16 nt, Human
gcaggcagaucacaug

SEQ ID NO: 424125 - RNA, 22 nt, Human
gagccuggagcuggaacgaagc

SEQ ID NO: 424126 - RNA, 22 nt, Human
agggcuagaguugagaugggga

SEQ ID NO: 424127 - RNA, 22 nt, Human
caucacagauguuguguggagu

SEQ ID NO: 424128 - RNA, 22 nt, Human
ccagcuuuaucaagucugagcu

SEQ ID NO: 424129 - RNA, 22 nt, Human
aacauuuaugguagucauugca

SEQ ID NO: 424130 - RNA, 21 nt, Human
ccagccucagaucagggagcu

SEQ ID NO: 424131 - RNA, 22 nt, Human
agccuggacagcuacggagaac

SEQ ID NO: 424132 - RNA, 22 nt, Human
ugcauaaacagauacuucaugu

SEQ ID NO: 424133 - RNA, 22 nt, Human
ucuuugcauggacauguguuuu

SEQ ID NO: 424134 - RNA, 19 nt, Human
caguggccuggaggucucu

SEQ ID NO: 424135 - RNA, 22 nt, Human
cugaagaugucugagaugcuca

SEQ ID NO: 424136 - RNA, 22 nt, Human
caccaggugcuggaggacauca

SEQ ID NO: 424137 - RNA, 22 nt, Human
ggcugcaguuugucuuuugcuu

SEQ ID NO: 424138 - RNA, 21 nt, Human
cugguguagcacucaggugcu

SEQ ID NO: 424139 - RNA, 22 nt, Human
ccucccagugccuccagagcag

SEQ ID NO: 424140 - RNA, 22 nt, Human
cugagcugacaucuuccucuuu

SEQ ID NO: 424141 - RNA, 22 nt, Human
cagggcuguaaauuagugcuga

SEQ ID NO: 424142 - RNA, 22 nt, Human
uccaggagagguguggggacug

SEQ ID NO: 424143 - RNA, 22 nt, Human
acccaggggcagccuugcugug

SEQ ID NO: 424144 - RNA, 22 nt, Human
caggagccgccaggcacguugg

SEQ ID NO: 424145 - RNA, 22 nt, Human
cugcagcuccccugagaucaag

SEQ ID NO: 424146 - RNA, 22 nt, Human
ucuuuauugcuacugguuuguc

SEQ ID NO: 424147 - RNA, 19 nt, Human
acaaacugaguacacuugu

SEQ ID NO: 424148 - RNA, 21 nt, Human
ugacauuuccaauauaaagcc

SEQ ID NO: 424149 - RNA, 22 nt, Human
agcaguccaacugagguggcau

SEQ ID NO: 424150 - RNA, 22 nt, Human
aagauuuacuagcauaauagcu

SEQ ID NO: 424151 - RNA, 22 nt, Human
ugccuggcaaugccagaagcca

SEQ ID NO: 424152 - RNA, 22 nt, Human
aagacugucugggacaagauga

SEQ ID NO: 424153 - RNA, 22 nt, Human
ucacaggcuccagggccuggau

SEQ ID NO: 424154 - RNA, 22 nt, Human
uugauacauagcacaguuuagg

SEQ ID NO: 424155 - RNA, 22 nt, Human
uaaugcacauagaaguacuuag

SEQ ID NO: 424156 - RNA, 22 nt, Human
agcuguggaguaggggguugga

SEQ ID NO: 424157 - RNA, 22 nt, Human
ggugggugagcccugggagcug

SEQ ID NO: 424158 - RNA, 22 nt, Human
ucaagcaggguagcaagcuggu

SEQ ID NO: 424159 - RNA, 22 nt, Human
cauugcacagcccuguggugau

SEQ ID NO: 424160 - RNA, 22 nt, Human
accagagcuggcucugagcacc

SEQ ID NO: 424161 - RNA, 22 nt, Human
uccaguucuaggucacucucug

SEQ ID NO: 424162 - RNA, 22 nt, Human
uggcucuggauuaaucuaggaa

SEQ ID NO: 424163 - RNA, 22 nt, Human
cccuccagccauggacccaggu

SEQ ID NO: 424164 - RNA, 22 nt, Human
agucccagaucuacaggaggga

SEQ ID NO: 424165 - RNA, 22 nt, Human
guggcugcucgggcuccggccc

SEQ ID NO: 424166 - RNA, 21 nt, Human
uguuuauggaaaagagacaaa

SEQ ID NO: 424167 - RNA, 22 nt, Human
guugaaaguggagaaccugguu

SEQ ID NO: 424168 - RNA, 22 nt, Human
uggagggaacccaggcugcucu

SEQ ID NO: 424169 - RNA, 22 nt, Human
ugggauggcauccugggccuug

SEQ ID NO: 424170 - RNA, 22 nt, Human
acaugauuuuaguaucauaaua

SEQ ID NO: 424171 - RNA, 20 nt, Human
gcauugaguauagacagaug

SEQ ID NO: 424172 - RNA, 22 nt, Human
ucagagagguuaaauaucuugu

SEQ ID NO: 424173 - RNA, 22 nt, Human
ugugaaggagcaugcagagggg

SEQ ID NO: 424174 - RNA, 22 nt, Human
gccauuuagggaggcaagguga

SEQ ID NO: 424175 - RNA, 22 nt, Human
gcagagcugggucuguauccaa

SEQ ID NO: 424176 - RNA, 22 nt, Human
uagaaaugcccagauucugcua

SEQ ID NO: 424177 - RNA, 22 nt, Human
cacugagaggucucauuuccaa

SEQ ID NO: 424178 - RNA, 20 nt, Human
ugcuguaagauuagagagcu

SEQ ID NO: 424179 - RNA, 22 nt, Human
ggaggggccggcugccugccac

SEQ ID NO: 424180 - RNA, 22 nt, Human
cacaggcugcccgcagcuggga

SEQ ID NO: 424181 - RNA, 22 nt, Human
acugaaggaaagccuuugcaug

SEQ ID NO: 424182 - RNA, 22 nt, Human
aaacuguaaauacuaguaagug

SEQ ID NO: 424183 - RNA, 22 nt, Human
gcacagaacagagaaauagcca

SEQ ID NO: 424184 - RNA, 22 nt, Human
caggggcuagcacuuaauguuu

SEQ ID NO: 424185 - RNA, 23 nt, Human
aggcccugccugucccucuuuuu

SEQ ID NO: 424186 - RNA, 22 nt, Human
uaaauguguaaaccuccauuac

SEQ ID NO: 424187 - RNA, 22 nt, Human
caaaagaagcucuuggggcuag

SEQ ID NO: 424188 - RNA, 22 nt, Human
aguguccccuccaagggccugg

SEQ ID NO: 424189 - RNA, 22 nt, Human
ggccaggcugcugggaccccgc

SEQ ID NO: 424190 - RNA, 22 nt, Human
ggcacugggagaggugagacgg

SEQ ID NO: 424191 - RNA, 19 nt, Human
ugaagcaggcagagaagau

SEQ ID NO: 424192 - RNA, 22 nt, Human
caauguaucaaccagaaaguuc

SEQ ID NO: 424193 - RNA, 19 nt, Human
ccaggccugcgggcguugg

SEQ ID NO: 424194 - RNA, 22 nt, Human
cugucagguuggucucagagcu

SEQ ID NO: 424195 - RNA, 20 nt, Human
ugggcugaggaucaggugcc

SEQ ID NO: 424196 - RNA, 22 nt, Human
ucucagagaucuuucugcaugu

SEQ ID NO: 424197 - RNA, 22 nt, Human
aggcucaggugccucauucaca

SEQ ID NO: 424198 - RNA, 22 nt, Human
cacguuuuaugacagaagaagc

SEQ ID NO: 424199 - RNA, 22 nt, Human
ugucucaucucuuaaccccacu

SEQ ID NO: 424200 - RNA, 22 nt, Human
cagcucccgccaucgggaggca

SEQ ID NO: 424201 - RNA, 22 nt, Human
ccugccagucacuaugucaccu

SEQ ID NO: 424202 - RNA, 22 nt, Human
aggcaguguguagcuggaagag

SEQ ID NO: 424203 - RNA, 22 nt, Human
uucucacuauguauguagauug

SEQ ID NO: 424204 - RNA, 22 nt, Human
ugcaggugugguuccucagcca

SEQ ID NO: 424205 - RNA, 22 nt, Human
ggaggcucgcuggucgcacagc

SEQ ID NO: 424206 - RNA, 22 nt, Human
ucacuuauugcucaucucaugc

SEQ ID NO: 424207 - RNA, 22 nt, Human
cagggccuccuaaggcaucuaa

SEQ ID NO: 424208 - RNA, 22 nt, Human
gagccagcgccuugccucuggg

SEQ ID NO: 424209 - RNA, 23 nt, Human
agaugaaagcuucccaucacagu

SEQ ID NO: 424210 - RNA, 18 nt, Human
uucacaggaaaugucuuu

SEQ ID NO: 424211 - RNA, 22 nt, Human
ugacauuuaucuucuacaauga

SEQ ID NO: 424212 - RNA, 22 nt, Human
gagugagggcagcaggggcugc

SEQ ID NO: 424213 - RNA, 22 nt, Human
gggcugaaaggccgccucagau

SEQ ID NO: 424214 - RNA, 22 nt, Human
aggcaggugcuuaugacuugcu

SEQ ID NO: 424215 - RNA, 22 nt, Human
uacauuccacuagugacuggcg

SEQ ID NO: 424216 - RNA, 21 nt, Human
ccacaggggcuccccugucag

SEQ ID NO: 424217 - RNA, 22 nt, Human
uucaagaucuggguuuucagcu

SEQ ID NO: 424218 - RNA, 22 nt, Human
cagcugcccaagccccagaugu

SEQ ID NO: 424219 - RNA, 20 nt, Human
accagguggcugaugacacc

SEQ ID NO: 424220 - RNA, 22 nt, Human
aaggccugcucagcugucugug

SEQ ID NO: 424221 - RNA, 22 nt, Human
uagaggugucacuuugggaagu

SEQ ID NO: 424222 - RNA, 22 nt, Human
cccaccccuggacaggugagug

SEQ ID NO: 424223 - RNA, 22 nt, Human
gccuuugccugcgacguggcug

SEQ ID NO: 424224 - RNA, 22 nt, Human
gagcacagggaauagacagaua

SEQ ID NO: 424225 - RNA, 22 nt, Human
ccugggcaauauagugaggccc

SEQ ID NO: 424226 - RNA, 22 nt, Human
agagccuggaccugagcuacaa

SEQ ID NO: 424227 - RNA, 22 nt, Human
gaaggagagggucaaggauaau

SEQ ID NO: 424228 - RNA, 21 nt, Human
uccagggaacuucucaggaau

SEQ ID NO: 424229 - RNA, 22 nt, Human
ucaucucaaaacccaaggggca

SEQ ID NO: 424230 - RNA, 22 nt, Human
aagccacuauggugauucucaa

SEQ ID NO: 424231 - RNA, 22 nt, Human
gaagggugcauggagggaaguc

SEQ ID NO: 424232 - RNA, 22 nt, Human
agaggccuaauugcuacccuuu

SEQ ID NO: 424233 - RNA, 22 nt, Human
aacuuucuuucacagaaguauc

SEQ ID NO: 424234 - RNA, 22 nt, Human
aaggcagaaagggaugugagug

SEQ ID NO: 424235 - RNA, 22 nt, Human
acuuugcugcagguuuaaagag

SEQ ID NO: 424236 - RNA, 21 nt, Human
auccuugaucagaagagugcu

SEQ ID NO: 424237 - RNA, 22 nt, Human
aagagcugcacauauuuauauc

SEQ ID NO: 424238 - RNA, 22 nt, Human
guaacugaggcagcuuuuaaga

SEQ ID NO: 424239 - RNA, 22 nt, Human
ggcgugggaaguggggcuucug

SEQ ID NO: 424240 - RNA, 22 nt, Human
ccagguguagcacugcucacag

SEQ ID NO: 424241 - RNA, 22 nt, Human
aaggguugaagauaaauaaggu

SEQ ID NO: 424242 - RNA, 22 nt, Human
cugccuugaggagguuguggga

SEQ ID NO: 424243 - RNA, 22 nt, Human
cuggcucaggguggucuggguc

SEQ ID NO: 424244 - RNA, 22 nt, Human
agagcuuagaauuucagaugau

SEQ ID NO: 424245 - RNA, 23 nt, Human
aguuuguaaagaaauauuugcac

SEQ ID NO: 424246 - RNA, 22 nt, Human
gacaagacauugguaaagauau

SEQ ID NO: 424247 - RNA, 22 nt, Human
guacucaguaauauaacauauu

SEQ ID NO: 424248 - RNA, 22 nt, Human
uugcauaaaugcuuaaaauuug

SEQ ID NO: 424249 - RNA, 21 nt, Human
ugugucacuaacuagaggcua

SEQ ID NO: 424250 - RNA, 20 nt, Human
ucucaggguucagcaaagua

SEQ ID NO: 424251 - RNA, 22 nt, Human
gaggcugcugagagcccuguuu

SEQ ID NO: 424252 - RNA, 22 nt, Human
aaaauuuccaccaucuuugugu

SEQ ID NO: 424253 - RNA, 22 nt, Human
uuuacauggaauauugucuugu

SEQ ID NO: 424254 - RNA, 22 nt, Human
gggccaugagagguucaucaac

SEQ ID NO: 424255 - RNA, 22 nt, Human
agggaccugcucacugccuggc

SEQ ID NO: 424256 - RNA, 22 nt, Human
aagucagcacuccaggaagcca

SEQ ID NO: 424257 - RNA, 21 nt, Human
augggcagaggcagagaggcu

SEQ ID NO: 424258 - RNA, 22 nt, Human
acagauugaucuugagaauuau

SEQ ID NO: 424259 - RNA, 21 nt, Human
ucagagagucacagugaacug

SEQ ID NO: 424260 - RNA, 22 nt, Human
ucagggcagaauccaaagaauu

SEQ ID NO: 424261 - RNA, 22 nt, Human
acuguacaugcaucuugucuau

SEQ ID NO: 424262 - RNA, 20 nt, Human
ucucccaggcucagggaaga

SEQ ID NO: 424263 - RNA, 22 nt, Human
cugccugcuucugagccagagg

SEQ ID NO: 424264 - RNA, 22 nt, Human
uguacaaugccagggaacacca

SEQ ID NO: 424265 - RNA, 23 nt, Human
acagacaacacugaugagagaaa

SEQ ID NO: 424266 - RNA, 22 nt, Human
ccugucugaaggcagggggaug

SEQ ID NO: 424267 - RNA, 22 nt, Human
uaguccagccuuggguguagcc

SEQ ID NO: 424268 - RNA, 22 nt, Human
gagggcagugaauuuugaagcu

SEQ ID NO: 424269 - RNA, 22 nt, Human
aagaggucauaccagauaaggg

SEQ ID NO: 424270 - RNA, 20 nt, Human
cuccaggggaagagccuucc

SEQ ID NO: 424271 - RNA, 22 nt, Human
auccugggcagugugucacucu

SEQ ID NO: 424272 - RNA, 22 nt, Human
ucacuugccuagcccaguucag

SEQ ID NO: 424273 - RNA, 22 nt, Human
gauccuugcaacucugugaggu

SEQ ID NO: 424274 - RNA, 19 nt, Human
cccagagcauccugaacuu

SEQ ID NO: 424275 - RNA, 21 nt, Human
ucuccaguauccuucucugag

SEQ ID NO: 424276 - RNA, 19 nt, Human
ugcauaaauuauauacuuu

SEQ ID NO: 424277 - RNA, 22 nt, Human
acacugaaugcuguuuagaaau

SEQ ID NO: 424278 - RNA, 20 nt, Human
aacacugugcgugguaggug

SEQ ID NO: 424279 - RNA, 17 nt, Human
ugaaggaaggaugaugu

SEQ ID NO: 424280 - RNA, 22 nt, Human
uccugccucuccaugcuaacua

SEQ ID NO: 424281 - RNA, 22 nt, Human
agaagccauucccuguaggcuc

SEQ ID NO: 424282 - RNA, 22 nt, Human
ucacauuugcaauugcauuguu

SEQ ID NO: 424283 - RNA, 19 nt, Human
agggcugcucuggccuggg

SEQ ID NO: 424284 - RNA, 22 nt, Human
uggcugagccuuuggggcuuuc

SEQ ID NO: 424285 - RNA, 22 nt, Human
gggaaggagguggcuugaagug

SEQ ID NO: 424286 - RNA, 22 nt, Human
cacagaggcaaccuucuggggu

SEQ ID NO: 424287 - RNA, 21 nt, Human
aacauuucugggagaacucac

SEQ ID NO: 424288 - RNA, 22 nt, Human
ggggcaggagcccuucuucagc

SEQ ID NO: 424289 - RNA, 22 nt, Human
uggcucagugaagagauaacuu

SEQ ID NO: 424290 - RNA, 18 nt, Human
aggcccuggccucgaaca

SEQ ID NO: 424291 - RNA, 22 nt, Human
uauuccuauuucuaaacauaug

SEQ ID NO: 424292 - RNA, 22 nt, Human
agugaggcuaauaggcaauggu

SEQ ID NO: 424293 - RNA, 19 nt, Human
ccuuccuccccagggccau

SEQ ID NO: 424294 - RNA, 21 nt, Human
ggauggauagggaagagauuu

SEQ ID NO: 424295 - RNA, 22 nt, Human
aaauauguaagauuagcacuag

SEQ ID NO: 424296 - RNA, 20 nt, Human
gcagcugaaaguaugacacc

SEQ ID NO: 424297 - RNA, 22 nt, Human
agcuuuauauguuguuucucca

SEQ ID NO: 424298 - RNA, 22 nt, Human
aacucaguguguuucuuaguau

SEQ ID NO: 424299 - RNA, 22 nt, Human
gaaucucaguggaagcaggaag

SEQ ID NO: 424300 - RNA, 23 nt, Human
uggcagugaucaaaagcuuacau

SEQ ID NO: 424301 - RNA, 22 nt, Human
gagaggcuaugagguucugugu

SEQ ID NO: 424302 - RNA, 23 nt, Human
ucacaggggccagcgcucugugg

SEQ ID NO: 424303 - RNA, 22 nt, Human
gaggccagcgcgcagcacuuuu

SEQ ID NO: 424304 - RNA, 22 nt, Human
gagccuucaucgcagccuuguu

SEQ ID NO: 424305 - RNA, 22 nt, Human
gccaccagcagaaaaggggcca

SEQ ID NO: 424306 - RNA, 22 nt, Human
agggaagaagcugguaguaggu

SEQ ID NO: 424307 - RNA, 22 nt, Human
ugcaauaaagugcuauaaaucc

SEQ ID NO: 424308 - RNA, 22 nt, Human
gcauggcauuaacaagauggaa

SEQ ID NO: 424309 - RNA, 22 nt, Human
agccaggcagggcucucgcucu

SEQ ID NO: 424310 - RNA, 21 nt, Human
guccagagagccggcuccuga

SEQ ID NO: 424311 - RNA, 18 nt, Human
gugccaggaggcgcagcc

SEQ ID NO: 424312 - RNA, 22 nt, Human
aaguuauugcagcaauccaagu

SEQ ID NO: 424313 - RNA, 18 nt, Human
gaaaugugauucuagggc

SEQ ID NO: 424314 - RNA, 22 nt, Human
aagggcugaaugaaggguugaa

SEQ ID NO: 424315 - RNA, 22 nt, Human
ccucaggauccgcaggugcagu

SEQ ID NO: 424316 - RNA, 22 nt, Human
uuauuaggaacucaggauuuuu

SEQ ID NO: 424317 - RNA, 22 nt, Human
ggcugccugccuccaagccggg

SEQ ID NO: 424318 - RNA, 22 nt, Human
uggcagagagagugcagucgac

SEQ ID NO: 424319 - RNA, 22 nt, Human
cuguuuauuacacuggauagca

SEQ ID NO: 424320 - RNA, 22 nt, Human
gugcuuaauacaugucaauaac

SEQ ID NO: 424321 - RNA, 22 nt, Human
agauuucucuuucccuggcuga

SEQ ID NO: 424322 - RNA, 22 nt, Human
acuguccaagcaugccuggcuu

SEQ ID NO: 424323 - RNA, 22 nt, Human
uaccugcacagccagccaugug

SEQ ID NO: 424324 - RNA, 19 nt, Human
acaggcagaauugggugug

SEQ ID NO: 424325 - RNA, 22 nt, Human
cccagcccugaccuauuggaaa

SEQ ID NO: 424326 - RNA, 22 nt, Human
cagggccagcgucucgggcuau

SEQ ID NO: 424327 - RNA, 22 nt, Human
agccacagugcaagagagaaaa

SEQ ID NO: 424328 - RNA, 22 nt, Human
uuuuccuuucaucaggacaaag

SEQ ID NO: 424329 - RNA, 22 nt, Human
agucauauguggcauuuucuaa

SEQ ID NO: 424330 - RNA, 22 nt, Human
aaaaguucccugguuagaaaag

SEQ ID NO: 424331 - RNA, 22 nt, Human
ucagagcuuuggagaccaggaa

SEQ ID NO: 424332 - RNA, 22 nt, Human
cugggagcuagcucugagcuga

SEQ ID NO: 424333 - RNA, 20 nt, Human
aguagcagugugacauugac

SEQ ID NO: 424334 - RNA, 22 nt, Human
uugcucaggcuuagagcuacua

SEQ ID NO: 424335 - RNA, 22 nt, Human
accaggggaugguuggcacugu

SEQ ID NO: 424336 - RNA, 22 nt, Human
agaguggagagaaacaacucug

SEQ ID NO: 424337 - RNA, 22 nt, Human
ucugggcugggagcguguggac

SEQ ID NO: 424338 - RNA, 20 nt, Human
cucucuggaaggugggagcc

SEQ ID NO: 424339 - RNA, 22 nt, Human
cugugcuugcggguguggagcc

SEQ ID NO: 424340 - RNA, 22 nt, Human
cucugaagggagggccaagccc

SEQ ID NO: 424341 - RNA, 22 nt, Human
ccaggccugugcaaggagggag

SEQ ID NO: 424342 - RNA, 22 nt, Human
augaagcugaccuugucuugcu

SEQ ID NO: 424343 - RNA, 22 nt, Human
cugagauggaguuucgcucuuc

SEQ ID NO: 424344 - RNA, 22 nt, Human
cugggcagcuaccaccacugcu

SEQ ID NO: 424345 - RNA, 22 nt, Human
acaggcugacuuccugccaugu

SEQ ID NO: 424346 - RNA, 22 nt, Human
cauuacauuucaaaauguuucc

SEQ ID NO: 424347 - RNA, 22 nt, Human
guugaaagagcauggacuugaa

SEQ ID NO: 424348 - RNA, 22 nt, Human
gagagcugugguuugaccaggc

SEQ ID NO: 424349 - RNA, 22 nt, Human
caccagggcucugagcucugaa

SEQ ID NO: 424350 - RNA, 22 nt, Human
uacccaggagaaacagcagggc

SEQ ID NO: 424351 - RNA, 22 nt, Human
agaggaugguugaggaagaccu

SEQ ID NO: 424352 - RNA, 22 nt, Human
uagauuucgcugcaucucaauc

SEQ ID NO: 424353 - RNA, 22 nt, Human
agagaaaagaguucaggcuuug

SEQ ID NO: 424354 - RNA, 21 nt, Human
ggucuuccaaauaaggagaaa

SEQ ID NO: 424355 - RNA, 22 nt, Human
ccagcugauucgguggugguug

SEQ ID NO: 424356 - RNA, 22 nt, Human
cagcucccagagugaccagcag

SEQ ID NO: 424357 - RNA, 22 nt, Human
uggggcuguccuuagucugaga

SEQ ID NO: 424358 - RNA, 22 nt, Human
gacauucacagguaaacauucc

SEQ ID NO: 424359 - RNA, 22 nt, Human
aaauguguuucgaaaacuggug

SEQ ID NO: 424360 - RNA, 22 nt, Human
acagauuuauugaagcugcugc

SEQ ID NO: 424361 - RNA, 22 nt, Human
auauauuugagaauauucauga

SEQ ID NO: 424362 - RNA, 22 nt, Human
ugggcagacuaaggucaaagcu

SEQ ID NO: 424363 - RNA, 22 nt, Human
uagaggcagaagaaauugacaa

SEQ ID NO: 424364 - RNA, 22 nt, Human
gagcuggcuaauacugacuuau

SEQ ID NO: 424365 - RNA, 22 nt, Human
uccugucagugaggcagaugaa

SEQ ID NO: 424366 - RNA, 22 nt, Human
cuugaaagcacuccuuugacug

SEQ ID NO: 424367 - RNA, 22 nt, Human
gccaguggcuugccaggcagga

SEQ ID NO: 424368 - RNA, 22 nt, Human
uccuuugguuguagacaggaau

SEQ ID NO: 424369 - RNA, 22 nt, Human
gggcacugaaugccaagcuagg

SEQ ID NO: 424370 - RNA, 22 nt, Human
aaggagcuuguucgccuuccuc

SEQ ID NO: 424371 - RNA, 21 nt, Human
agggccugugcucuccagguc

SEQ ID NO: 424372 - RNA, 22 nt, Human
cagagccaacgccaccugccca

SEQ ID NO: 424373 - RNA, 22 nt, Human
caccagguggaaaugucacagc

SEQ ID NO: 424374 - RNA, 22 nt, Human
ugucccagacauaaguggacau

SEQ ID NO: 424375 - RNA, 20 nt, Human
gcuuuuucuaauagcagucc

SEQ ID NO: 424376 - RNA, 22 nt, Human
agggccagaggcaccuugcagc

SEQ ID NO: 424377 - RNA, 22 nt, Human
uuugcauugcauacaaggaacu

SEQ ID NO: 424378 - RNA, 20 nt, Human
aagaaacuugaaaguacaag

SEQ ID NO: 424379 - RNA, 22 nt, Human
caguuucuguuuuaaauagcag

SEQ ID NO: 424380 - RNA, 22 nt, Human
cucugcauuuuaacagaugauu

SEQ ID NO: 424381 - RNA, 23 nt, Human
cauguacagaguuugauaaagug

SEQ ID NO: 424382 - RNA, 22 nt, Human
uggcugagguuaugcugguugu

SEQ ID NO: 424383 - RNA, 22 nt, Human
ccugcccagcuucccgagugca

SEQ ID NO: 424384 - RNA, 22 nt, Human
gccuggagaauuaaaaggaagg

SEQ ID NO: 424385 - RNA, 22 nt, Human
cagcugaguguuggcauguuca

SEQ ID NO: 424386 - RNA, 22 nt, Human
uaggggaacuggcacagggcag

SEQ ID NO: 424387 - RNA, 22 nt, Human
cagugauguuucugcaucagag

SEQ ID NO: 424388 - RNA, 22 nt, Human
cacauugaaaugacccaauaau

SEQ ID NO: 424389 - RNA, 22 nt, Human
ucccuccuggugagcaggggcu

SEQ ID NO: 424390 - RNA, 21 nt, Human
uggagcugccacuuguccucc

SEQ ID NO: 424391 - RNA, 22 nt, Human
gcacacacuguuuuccucacau

SEQ ID NO: 424392 - RNA, 22 nt, Human
gaagccaagugcaaaugccuua

SEQ ID NO: 424393 - RNA, 22 nt, Human
gcugaguguaaugauggcagag

SEQ ID NO: 424394 - RNA, 19 nt, Human
ucacaggcaucuccccaga

SEQ ID NO: 424395 - RNA, 22 nt, Human
gaggccugaaaggggaccuaug

SEQ ID NO: 424396 - RNA, 22 nt, Human
augggcuguccuaguccagccc

SEQ ID NO: 424397 - RNA, 22 nt, Human
acccaggccugagagacaggag

SEQ ID NO: 424398 - RNA, 22 nt, Human
gccaggcacugcucuaagcccu

SEQ ID NO: 424399 - RNA, 22 nt, Human
agugaaauugcuguaagaggaa

SEQ ID NO: 424400 - RNA, 22 nt, Human
gaagccagcaguggagaaagga

SEQ ID NO: 424401 - RNA, 22 nt, Human
gagcacccuuugcacaucaguc

SEQ ID NO: 424402 - RNA, 22 nt, Human
acagagagaaacaaucagcagc

SEQ ID NO: 424403 - RNA, 22 nt, Human
gaggaagcagggcuuggcugag

SEQ ID NO: 424404 - RNA, 22 nt, Human
uccuguggucuggaaggaaugg

SEQ ID NO: 424405 - RNA, 22 nt, Human
ggggauggaauguaguagugau

SEQ ID NO: 424406 - RNA, 22 nt, Human
ugcugugcuggcggcagaggcc

SEQ ID NO: 424407 - RNA, 22 nt, Human
gagaggcauggaacagauucuu

SEQ ID NO: 424408 - RNA, 22 nt, Human
aaguguuuacuuaaagucaugg

SEQ ID NO: 424409 - RNA, 22 nt, Human
acaaagucucuaauaaucuucu

SEQ ID NO: 424410 - RNA, 22 nt, Human
gucagcagugucagcucugggg

SEQ ID NO: 424411 - RNA, 22 nt, Human
ggccugagcuugggcagcguau

SEQ ID NO: 424412 - RNA, 22 nt, Human
uagaacagaggguugcccagau

SEQ ID NO: 424413 - RNA, 22 nt, Human
agugaaaugacugaaucagaua

SEQ ID NO: 424414 - RNA, 22 nt, Human
uccugcagagccgcccucaggu

SEQ ID NO: 424415 - RNA, 22 nt, Human
agcagggcucugccaugggccc

SEQ ID NO: 424416 - RNA, 22 nt, Human
gcugccagcucacucuccugag

SEQ ID NO: 424417 - RNA, 22 nt, Human
uccuuuguuaaggagguuuguu

SEQ ID NO: 424418 - RNA, 22 nt, Human
uccagggagauacuggcugcca

SEQ ID NO: 424419 - RNA, 22 nt, Human
acagccagguaaaggcauggca

SEQ ID NO: 424420 - RNA, 22 nt, Human
ucuggagauaagacagacagau

SEQ ID NO: 424421 - RNA, 22 nt, Human
gcuggcaucacuggcuucggug

SEQ ID NO: 424422 - RNA, 22 nt, Human
agcauugccugccuauugcuaa

SEQ ID NO: 424423 - RNA, 19 nt, Human
gcuggcagauguggccgug

SEQ ID NO: 424424 - RNA, 22 nt, Human
aaaaguauaggguuuggaguca

SEQ ID NO: 424425 - RNA, 22 nt, Human
gagcagcuggacaggccucccu

SEQ ID NO: 424426 - RNA, 22 nt, Human
cccaggucugugccagcucuga

SEQ ID NO: 424427 - RNA, 22 nt, Human
guuuuauaauugcuucauaaga

SEQ ID NO: 424428 - RNA, 22 nt, Human
agaaauuccuaagguacacaag

SEQ ID NO: 424429 - RNA, 22 nt, Human
gaaggcuggcuuucugagagca

SEQ ID NO: 424430 - RNA, 22 nt, Human
uaaaucacuccuaauaaucagu

SEQ ID NO: 424431 - RNA, 22 nt, Human
gacccaggcccaaggcugccag

SEQ ID NO: 424432 - RNA, 22 nt, Human
uuauuuaggagaaggaacccug

SEQ ID NO: 424433 - RNA, 22 nt, Human
ggggcagagcauagcuccaauu

SEQ ID NO: 424434 - RNA, 23 nt, Human
aaggccagaauuucaauggugcc

SEQ ID NO: 424435 - RNA, 22 nt, Human
cauaucauaggucuuggauaau

SEQ ID NO: 424436 - RNA, 22 nt, Human
ggagcugcauuuagggagccuu

SEQ ID NO: 424437 - RNA, 22 nt, Human
ggcuccagggaguggagagaag

SEQ ID NO: 424438 - RNA, 22 nt, Human
cacugggcaauucugagccuaa

SEQ ID NO: 424439 - RNA, 22 nt, Human
cauuauggcagccaggauauug

SEQ ID NO: 424440 - RNA, 22 nt, Human
caggugccgggaaugcagcaau

SEQ ID NO: 424441 - RNA, 22 nt, Human
ucuggcuccugaguccaugcuc

SEQ ID NO: 424442 - RNA, 22 nt, Human
cagcuguggagauggggugcau

SEQ ID NO: 424443 - RNA, 22 nt, Human
gccaggcagcugggagggugcc

SEQ ID NO: 424444 - RNA, 20 nt, Human
uccaggcagcucagaguguc

SEQ ID NO: 424445 - RNA, 22 nt, Human
ugugccuucucaguccugcuca

SEQ ID NO: 424446 - RNA, 22 nt, Human
aucagaagcuuguagucucucu

SEQ ID NO: 424447 - RNA, 22 nt, Human
ugggcacuguagcuggugcugg

SEQ ID NO: 424448 - RNA, 22 nt, Human
caggagacuauggcccaaggcc

SEQ ID NO: 424449 - RNA, 22 nt, Human
cagucccagcugcucagaaggc

SEQ ID NO: 424450 - RNA, 22 nt, Human
cugcugcauuccucuuuaugag

SEQ ID NO: 424451 - RNA, 22 nt, Human
cuuucuuauaccugucagggcc

SEQ ID NO: 424452 - RNA, 22 nt, Human
cuggcugcaggaugaggcugcc

SEQ ID NO: 424453 - RNA, 21 nt, Human
agugaaauugcaucagaggga

SEQ ID NO: 424454 - RNA, 22 nt, Human
caagagcugcaaauagcgugac

SEQ ID NO: 424455 - RNA, 22 nt, Human
uuugcauuugcaaauaaugaaa

SEQ ID NO: 424456 - RNA, 20 nt, Human
ggcucugcuugugagcagcc

SEQ ID NO: 424457 - RNA, 22 nt, Human
cucagagucccuucccucgugg

SEQ ID NO: 424458 - RNA, 22 nt, Human
cuuggcagauccaaaaaugaca

SEQ ID NO: 424459 - RNA, 22 nt, Human
acaguggauauauuaaaugaga

SEQ ID NO: 424460 - RNA, 22 nt, Human
aaguucaaggaagccuccaguu

SEQ ID NO: 424461 - RNA, 22 nt, Human
guccucuuagccacuuaauuau

SEQ ID NO: 424462 - RNA, 22 nt, Human
gcuucuauuauuuggagcugag

SEQ ID NO: 424463 - RNA, 22 nt, Human
ccugccugucaucgccugcgcc

SEQ ID NO: 424464 - RNA, 22 nt, Human
uggccaccccuuucucugcacu

SEQ ID NO: 424465 - RNA, 22 nt, Human
guggagcaaucagagggucagu

SEQ ID NO: 424466 - RNA, 22 nt, Human
aggccaggaccauuagcccaga

SEQ ID NO: 424467 - RNA, 20 nt, Human
gcuguugccaguacagaugg

SEQ ID NO: 424468 - RNA, 22 nt, Human
uuuuccucugcaauaaaagcag

SEQ ID NO: 424469 - RNA, 22 nt, Human
agcagccauuuaaaaugaauug

SEQ ID NO: 424470 - RNA, 22 nt, Human
uugugaaacauucauggauuug

SEQ ID NO: 424471 - RNA, 22 nt, Human
uucaaaacagcuagauauugga

SEQ ID NO: 424472 - RNA, 22 nt, Human
gcccugagacugagcauggguu

SEQ ID NO: 424473 - RNA, 23 nt, Human
ucucaggacacacaugucuauca

SEQ ID NO: 424474 - RNA, 22 nt, Human
caagggcuucaaguggccaaga

SEQ ID NO: 424475 - RNA, 22 nt, Human
caaagggcucuagacucagcag

SEQ ID NO: 424476 - RNA, 22 nt, Human
uuucugcucgcucucaaucagg

SEQ ID NO: 424477 - RNA, 22 nt, Human
gcuggcuuugcacugggugcau

SEQ ID NO: 424478 - RNA, 22 nt, Human
gcucccagggcagcgcagaaga

SEQ ID NO: 424479 - RNA, 22 nt, Human
cauuuaaucuggcucaugagca

SEQ ID NO: 424480 - RNA, 22 nt, Human
gcuuuuauugucuuuacgacga

SEQ ID NO: 424481 - RNA, 22 nt, Human
cugaaggauucaaaauggcagg

SEQ ID NO: 424482 - RNA, 22 nt, Human
ugaggcagggaguuuaauuguc

SEQ ID NO: 424483 - RNA, 22 nt, Human
ccugggcucaagugauccuccu

SEQ ID NO: 424484 - RNA, 22 nt, Human
acacaguaccccaaggcugggc

SEQ ID NO: 424485 - RNA, 22 nt, Human
gcagccacugggagugcuuaua

SEQ ID NO: 424486 - RNA, 19 nt, Human
auagucuuuccaauuauac

SEQ ID NO: 424487 - RNA, 22 nt, Human
uuaugacauaugaguacaagua

SEQ ID NO: 424488 - RNA, 19 nt, Human
aggcagucauuggaauaua

SEQ ID NO: 424489 - RNA, 22 nt, Human
augaagcuaaacccugcagcca

SEQ ID NO: 424490 - RNA, 22 nt, Human
caucagagugguggccuggugu

SEQ ID NO: 424491 - RNA, 22 nt, Human
uggccugcagaggcuguggggc

SEQ ID NO: 424492 - RNA, 20 nt, Human
cucaggauacugcaaaguug

SEQ ID NO: 424493 - RNA, 19 nt, Human
cuggugcuugagugaguca

SEQ ID NO: 424494 - RNA, 22 nt, Human
cauuucuacagcuucuucagaa

SEQ ID NO: 424495 - RNA, 22 nt, Human
uuguuuucacagcuuugcccgg

SEQ ID NO: 424496 - RNA, 22 nt, Human
gcugaguugaaagcagaggaua

SEQ ID NO: 424497 - RNA, 22 nt, Human
cucaggauucucgacacucaca

SEQ ID NO: 424498 - RNA, 22 nt, Human
cucccugggccucaguuucucu

SEQ ID NO: 424499 - RNA, 22 nt, Human
agcugccuccauggucaaagau

SEQ ID NO: 424500 - RNA, 22 nt, Human
agaagcagcuuucaaggugauu

SEQ ID NO: 424501 - RNA, 22 nt, Human
gaggccuggcugggaggaggug

SEQ ID NO: 424502 - RNA, 22 nt, Human
uuugaaagcaggugugggaggg

SEQ ID NO: 424503 - RNA, 22 nt, Human
aagagcuggaagugaagauaac

SEQ ID NO: 424504 - RNA, 22 nt, Human
uuaaacaguguuucaugugggg

SEQ ID NO: 424505 - RNA, 22 nt, Human
uucaaguucauguguagucagu

SEQ ID NO: 424506 - RNA, 22 nt, Human
caaaguucucggcucaaguccu

SEQ ID NO: 424507 - RNA, 23 nt, Human
agaggcaggaguggcuugcccgg

SEQ ID NO: 424508 - RNA, 22 nt, Human
uacauaguauucacauuguuuu

SEQ ID NO: 424509 - RNA, 22 nt, Human
aggcagguguuaacccucugag

SEQ ID NO: 424510 - RNA, 22 nt, Human
acauuucuaucauccuguaaug

SEQ ID NO: 424511 - RNA, 17 nt, Human
aguguuuccuuaucauu

SEQ ID NO: 424512 - RNA, 22 nt, Human
aggcuucagaugaccuuagcau

SEQ ID NO: 424513 - RNA, 22 nt, Human
gcagacuguaucaaugucagua

SEQ ID NO: 424514 - RNA, 22 nt, Human
guggccuggaguuugauguagg

SEQ ID NO: 424515 - RNA, 22 nt, Human
ggcugggagcuggacaggccgg

SEQ ID NO: 424516 - RNA, 22 nt, Human
ggcagcuguaagaugagugaau

SEQ ID NO: 424517 - RNA, 22 nt, Human
aggagccaguuccaccccagga

SEQ ID NO: 424518 - RNA, 22 nt, Human
agggcagcacagcugugcuccu

SEQ ID NO: 424519 - RNA, 22 nt, Human
uuuccaaagguggcaggaacaa

SEQ ID NO: 424520 - RNA, 22 nt, Human
ccagggcauguccaagacuuag

SEQ ID NO: 424521 - RNA, 22 nt, Human
acagaguauuggaaaggcagug

SEQ ID NO: 424522 - RNA, 22 nt, Human
augaaacugggauaacuauagc

SEQ ID NO: 424523 - RNA, 22 nt, Human
gcagggaccugccacugcuguc

SEQ ID NO: 424524 - RNA, 22 nt, Human
gcaggaagaugagcucagguaa

SEQ ID NO: 424525 - RNA, 19 nt, Human
acagagcucucugcuucug

SEQ ID NO: 424526 - RNA, 22 nt, Human
auguccagaguaaagcacauuc

SEQ ID NO: 424527 - RNA, 21 nt, Human
uuucacaaaaguaugugacaa

SEQ ID NO: 424528 - RNA, 19 nt, Human
agcuggggcgguguguguu

SEQ ID NO: 424529 - RNA, 22 nt, Human
auuguacagaugagguaaguga

SEQ ID NO: 424530 - RNA, 22 nt, Human
gguggggucacgacagagggaa

SEQ ID NO: 424531 - RNA, 20 nt, Human
uccuuuggccuuagagcugu

SEQ ID NO: 424532 - RNA, 22 nt, Human
uuauuuucagcuaggaaagcca

SEQ ID NO: 424533 - RNA, 21 nt, Human
cagugcucaaucugacagugg

SEQ ID NO: 424534 - RNA, 22 nt, Human
uaaguaaauuuauaaugugauu

SEQ ID NO: 424535 - RNA, 22 nt, Human
gccuuccuuacaccugcucagc

SEQ ID NO: 424536 - RNA, 22 nt, Human
uggccucugcaauggauucacc

SEQ ID NO: 424537 - RNA, 22 nt, Human
cuguauuuguccucuauuuauu

SEQ ID NO: 424538 - RNA, 22 nt, Human
ugggcuggcguggagaguuuag

SEQ ID NO: 424539 - RNA, 22 nt, Human
aaggccauuauucugauauauu

SEQ ID NO: 424540 - RNA, 22 nt, Human
ccaucccuccuccaccagcuag

SEQ ID NO: 424541 - RNA, 22 nt, Human
aaaaguuuaagacucauucuag

SEQ ID NO: 424542 - RNA, 22 nt, Human
cucucugagugagggacaagcu

SEQ ID NO: 424543 - RNA, 22 nt, Human
aauauaauuuuauuccuagagu

SEQ ID NO: 424544 - RNA, 22 nt, Human
aaguccaucucugccccacaca

SEQ ID NO: 424545 - RNA, 22 nt, Human
ucggagcuguagaugaaacccu

SEQ ID NO: 424546 - RNA, 22 nt, Human
cccuggccagcucaugucugag

SEQ ID NO: 424547 - RNA, 22 nt, Human
ccucaggcuuacgggcaaugga

SEQ ID NO: 424548 - RNA, 19 nt, Human
ucugucacuggggguauuc

SEQ ID NO: 424549 - RNA, 22 nt, Human
gaagagcugacagugucauccu

SEQ ID NO: 424550 - RNA, 22 nt, Human
gggcaguggguggcugcagccu

SEQ ID NO: 424551 - RNA, 22 nt, Human
aaagucugagcagaauuucuca

SEQ ID NO: 424552 - RNA, 22 nt, Human
ucucagugacacucuucauaca

SEQ ID NO: 424553 - RNA, 22 nt, Human
agggaguguaaauggugcucag

SEQ ID NO: 424554 - RNA, 22 nt, Human
ugggcagauguccucugaagug

SEQ ID NO: 424555 - RNA, 21 nt, Human
ugcaggagucugugagucagg

SEQ ID NO: 424556 - RNA, 22 nt, Human
gauggcacacagacauccccgc

SEQ ID NO: 424557 - RNA, 22 nt, Human
agcugaagaaaugggaagcauu

SEQ ID NO: 424558 - RNA, 22 nt, Human
ucccagccuuccuuguggugaa

SEQ ID NO: 424559 - RNA, 22 nt, Human
cuuccaaagcacuuuauggacc

SEQ ID NO: 424560 - RNA, 21 nt, Human
ugggcagauggcaguguggcu

SEQ ID NO: 424561 - RNA, 21 nt, Human
uggcccuggccacggcugcca

SEQ ID NO: 424562 - RNA, 22 nt, Human
gcagaggacagggauuuagauu

SEQ ID NO: 424563 - RNA, 22 nt, Human
uaauguguccugaaagcuucug

SEQ ID NO: 424564 - RNA, 22 nt, Human
aaaguggucaccuucucauuuc

SEQ ID NO: 424565 - RNA, 22 nt, Human
uuaguaauguguuaauaugaau

SEQ ID NO: 424566 - RNA, 22 nt, Human
aagcaggcauuccagagacaau

SEQ ID NO: 424567 - RNA, 22 nt, Human
gccaccuguuucgcuugcccag

SEQ ID NO: 424568 - RNA, 22 nt, Human
uaaaggcucacuggcuuggggu

SEQ ID NO: 424569 - RNA, 22 nt, Human
uagagcugggcagugcucugag

SEQ ID NO: 424570 - RNA, 22 nt, Human
ccagggcaauaggaacacuuuu

SEQ ID NO: 424571 - RNA, 22 nt, Human
cuccagugggggugagccuaga

SEQ ID NO: 424572 - RNA, 22 nt, Human
agcaggugacccaagcaggcug

SEQ ID NO: 424573 - RNA, 22 nt, Human
gggagggaggugaugcuuggcu

SEQ ID NO: 424574 - RNA, 22 nt, Human
aaguccagacuccuuugcgugg

SEQ ID NO: 424575 - RNA, 22 nt, Human
uucuaccagaccccagacuugu

SEQ ID NO: 424576 - RNA, 22 nt, Human
ugcaauaaggaguaauaguaaa

SEQ ID NO: 424577 - RNA, 22 nt, Human
uggcugaggcuggagugcagug

SEQ ID NO: 424578 - RNA, 22 nt, Human
gccugaagaacagcugugagga

SEQ ID NO: 424579 - RNA, 22 nt, Human
augaaggcuguguggagccccc

SEQ ID NO: 424580 - RNA, 22 nt, Human
aagcugcccaagacugaagcau

SEQ ID NO: 424581 - RNA, 19 nt, Human
ccagguggaacugagguag

SEQ ID NO: 424582 - RNA, 22 nt, Human
aauuagagaucaguucuuugac

SEQ ID NO: 424583 - RNA, 22 nt, Human
gccugcuggcuguccauugcag

SEQ ID NO: 424584 - RNA, 22 nt, Human
uacagaguggugagaucuuuug

SEQ ID NO: 424585 - RNA, 22 nt, Human
uggcugaguucuccaggaguag

SEQ ID NO: 424586 - RNA, 22 nt, Human
gggcucucaaggcagggcccca

SEQ ID NO: 424587 - RNA, 22 nt, Human
ucaggagcagcaugggugagag

SEQ ID NO: 424588 - RNA, 22 nt, Human
gcucugaggcugugaggugcug

SEQ ID NO: 424589 - RNA, 22 nt, Human
uccaugggaagauuuugagugg

SEQ ID NO: 424590 - RNA, 22 nt, Human
ucaaucacguguuccauguucu

SEQ ID NO: 424591 - RNA, 22 nt, Human
agaagccaaucagcucucugcu

SEQ ID NO: 424592 - RNA, 22 nt, Human
cuaguggaaacuaacuggaauu

SEQ ID NO: 424593 - RNA, 22 nt, Human
auuaauuuuaccuuuguaaaca

SEQ ID NO: 424594 - RNA, 22 nt, Human
aagaaauauugggccuuauaaa

SEQ ID NO: 424595 - RNA, 22 nt, Human
caugagcugcugggagccuguc

SEQ ID NO: 424596 - RNA, 22 nt, Human
gggugggagucuggcccucaaa

SEQ ID NO: 424597 - RNA, 22 nt, Human
uuccaggggcagcagugauggu

SEQ ID NO: 424598 - RNA, 22 nt, Human
auaguacacauccuacaauguu

SEQ ID NO: 424599 - RNA, 22 nt, Human
ggauggagguucucagaugcuc

SEQ ID NO: 424600 - RNA, 22 nt, Human
caggaggccaacugugggacuu

SEQ ID NO: 424601 - RNA, 22 nt, Human
gaggagcacaugaggcugaggg

SEQ ID NO: 424602 - RNA, 21 nt, Human
uuacuuuugcagcaaccuaau

SEQ ID NO: 424603 - RNA, 22 nt, Human
uauuugaagggagaaagugcca

SEQ ID NO: 424604 - RNA, 22 nt, Human
gccuggccgcuccgagcuccgc

SEQ ID NO: 424605 - RNA, 22 nt, Human
aggcgcagaaggccaggggccu

SEQ ID NO: 424606 - RNA, 22 nt, Human
ugugccagccucuggcuguguc

SEQ ID NO: 424607 - RNA, 22 nt, Human
acaucacagagcccagauaaag

SEQ ID NO: 424608 - RNA, 22 nt, Human
guggaggagaggcgccuugcgg

SEQ ID NO: 424609 - RNA, 20 nt, Human
gcugaggucauuaugccuca

SEQ ID NO: 424610 - RNA, 22 nt, Human
uuauuauugugaccugagaaug

SEQ ID NO: 424611 - RNA, 21 nt, Human
uacaagaccggauucgggccc

SEQ ID NO: 424612 - RNA, 22 nt, Human
ugaggcaggacugagcgggaug

SEQ ID NO: 424613 - RNA, 22 nt, Human
cuccaggcucguccaagaucga

SEQ ID NO: 424614 - RNA, 22 nt, Human
cagcauuuucuuaauguaggug

SEQ ID NO: 424615 - RNA, 22 nt, Human
auggcagccugagcagaggaau

SEQ ID NO: 424616 - RNA, 22 nt, Human
gcuggccauauauuuugcuguu

SEQ ID NO: 424617 - RNA, 22 nt, Human
cucugguucagggcucccuggc

SEQ ID NO: 424618 - RNA, 22 nt, Human
ggcugcagagcugggugggccu

SEQ ID NO: 424619 - RNA, 22 nt, Human
gaaguggaauuacugggucaua

SEQ ID NO: 424620 - RNA, 22 nt, Human
ggcugagccuggagcaucuggu

SEQ ID NO: 424621 - RNA, 22 nt, Human
gugccugguuuggggaguguuc

SEQ ID NO: 424622 - RNA, 22 nt, Human
caagggcagcagccucaagcgg

SEQ ID NO: 424623 - RNA, 22 nt, Human
agagcaggcauaaagcuuugaa

SEQ ID NO: 424624 - RNA, 22 nt, Human
uuugacaaaggaaaaaugcaca

SEQ ID NO: 424625 - RNA, 22 nt, Human
ccugggugaugugcugcccucg

SEQ ID NO: 424626 - RNA, 22 nt, Human
aggggcugcuggguccgccccu

SEQ ID NO: 424627 - RNA, 18 nt, Human
gccugccuagagcuugcc

SEQ ID NO: 424628 - RNA, 22 nt, Human
aaugaacaggugaaugucagau

SEQ ID NO: 424629 - RNA, 22 nt, Human
cagcagggggcagcgcagauca

SEQ ID NO: 424630 - RNA, 22 nt, Human
cuggaagaggaagccagcugga

SEQ ID NO: 424631 - RNA, 22 nt, Human
cuuuggaacauacugcugagcu

SEQ ID NO: 424632 - RNA, 21 nt, Human
ugaggccucuccugggcuggc

SEQ ID NO: 424633 - RNA, 22 nt, Human
cccugcagaucagugagaacuu

SEQ ID NO: 424634 - RNA, 22 nt, Human
cuggccagacuacacaugugug

SEQ ID NO: 424635 - RNA, 22 nt, Human
aagccagguguuuaggccagcg

SEQ ID NO: 424636 - RNA, 22 nt, Human
ggcaggagauaaaauauuaguu

SEQ ID NO: 424637 - RNA, 22 nt, Human
uaguuucauaugcaaaauagua

SEQ ID NO: 424638 - RNA, 22 nt, Human
aaugggaggauuuucucucuug

SEQ ID NO: 424639 - RNA, 22 nt, Human
aaggcacuugcccagagcugca

SEQ ID NO: 424640 - RNA, 22 nt, Human
agcagcuccugccaugagugcu

SEQ ID NO: 424641 - RNA, 22 nt, Human
ucagcauaucuugagcuucaug

SEQ ID NO: 424642 - RNA, 22 nt, Human
ggcagcaaauauugucagcugu

SEQ ID NO: 424643 - RNA, 22 nt, Human
gagcuuuaggagaaggagguca

SEQ ID NO: 424644 - RNA, 22 nt, Human
uggggacauagccagucuggcu

SEQ ID NO: 424645 - RNA, 22 nt, Human
ccuggcugggccugauuucuca

SEQ ID NO: 424646 - RNA, 22 nt, Human
agaggcaguauacaauccgagc

SEQ ID NO: 424647 - RNA, 22 nt, Human
auuauuagugauguuguuacug

SEQ ID NO: 424648 - RNA, 22 nt, Human
cagcucuggcgucagggagcga

SEQ ID NO: 424649 - RNA, 22 nt, Human
gacagccucaugaggagcaaaa

SEQ ID NO: 424650 - RNA, 22 nt, Human
ccugaggggcugcaggccagcu

SEQ ID NO: 424651 - RNA, 22 nt, Human
caggugcuguccugcacauguc

SEQ ID NO: 424652 - RNA, 22 nt, Human
guauuuuacuuacgcaugacuu

SEQ ID NO: 424653 - RNA, 22 nt, Human
cuggggcugcggacgggagccc

SEQ ID NO: 424654 - RNA, 22 nt, Human
ccagcagaggggcggagugcag

SEQ ID NO: 424655 - RNA, 22 nt, Human
uuuaaauucugucugccgcuua

SEQ ID NO: 424656 - RNA, 18 nt, Human
aggccagcccugcuacug

SEQ ID NO: 424657 - RNA, 22 nt, Human
gggcugcuuccuggggaaugcu

SEQ ID NO: 424658 - RNA, 22 nt, Human
gaaggccuagggaugcucugcg

SEQ ID NO: 424659 - RNA, 22 nt, Human
gugcugagcugcagaugcgcuc

SEQ ID NO: 424660 - RNA, 22 nt, Human
ucacauuuuaucuauuuuaagu

SEQ ID NO: 424661 - RNA, 22 nt, Human
uggcuucuugggaugggucauu

SEQ ID NO: 424662 - RNA, 22 nt, Human
caggguggcacucagcgcaucu

SEQ ID NO: 424663 - RNA, 22 nt, Human
cugucuuugguccugucuguua

SEQ ID NO: 424664 - RNA, 18 nt, Human
cuuucagauggauaugcu

SEQ ID NO: 424665 - RNA, 22 nt, Human
augcaguaaauguucuaguuug

SEQ ID NO: 424666 - RNA, 22 nt, Human
ccaggcucugucuggucagaag

SEQ ID NO: 424667 - RNA, 22 nt, Human
ucaaugauaucagcaggaugug

SEQ ID NO: 424668 - RNA, 22 nt, Human
caucacugacgcugagauucca

SEQ ID NO: 424669 - RNA, 22 nt, Human
uguuaaauguuccuuuacugga

SEQ ID NO: 424670 - RNA, 22 nt, Human
gaggcugaggguuagagaguca

SEQ ID NO: 424671 - RNA, 22 nt, Human
gaggucagucagaccaggguuu

SEQ ID NO: 424672 - RNA, 22 nt, Human
cagggcccaagacacaaugagg

SEQ ID NO: 424673 - RNA, 22 nt, Human
ggaagccagaaagugagaauau

SEQ ID NO: 424674 - RNA, 22 nt, Human
ggagccaggcaaucuguacuuu

SEQ ID NO: 424675 - RNA, 21 nt, Human
uggcugagccaggugugugga

SEQ ID NO: 424676 - RNA, 22 nt, Human
uccuucaguuaaagaucucaca

SEQ ID NO: 424677 - RNA, 19 nt, Human
acagaagcauagaaaagga

SEQ ID NO: 424678 - RNA, 19 nt, Human
ucccuggcgccucucgggc

SEQ ID NO: 424679 - RNA, 22 nt, Human
gcagaggcuccauuuuacagau

SEQ ID NO: 424680 - RNA, 22 nt, Human
gcagugguggagcuuacauauc

SEQ ID NO: 424681 - RNA, 22 nt, Human
gggcagcagcaggaggucucug

SEQ ID NO: 424682 - RNA, 22 nt, Human
ucucagugcagagaggcuaucu

SEQ ID NO: 424683 - RNA, 22 nt, Human
cagguccuggcaucaggcaggu

SEQ ID NO: 424684 - RNA, 22 nt, Human
gggucccaggaaggagcagugu

SEQ ID NO: 424685 - RNA, 22 nt, Human
ggauccuuaacuaucacaguga

SEQ ID NO: 424686 - RNA, 22 nt, Human
uaggcaggcugaauguagauuu

SEQ ID NO: 424687 - RNA, 22 nt, Human
ugggcagagaucuggaucaaac

SEQ ID NO: 424688 - RNA, 22 nt, Human
acaaacuucccagacaagcucc

SEQ ID NO: 424689 - RNA, 22 nt, Human
aagccaguguccagaaugggca

SEQ ID NO: 424690 - RNA, 22 nt, Human
cagcaggguagguuguaucagu

SEQ ID NO: 424691 - RNA, 22 nt, Human
uagggcucugcucaucaguugu

SEQ ID NO: 424692 - RNA, 22 nt, Human
acuccugguuuguguccuggcu

SEQ ID NO: 424693 - RNA, 22 nt, Human
aaacagaaggguagguaaacau

SEQ ID NO: 424694 - RNA, 22 nt, Human
ugucuguaagguguuuauguua

SEQ ID NO: 424695 - RNA, 22 nt, Human
ucagcagggccuccuugugcag

SEQ ID NO: 424696 - RNA, 22 nt, Human
gcugucugagaacaugguggaa

SEQ ID NO: 424697 - RNA, 22 nt, Human
ccaguccuggccaguaacauga

SEQ ID NO: 424698 - RNA, 23 nt, Human
acagcaagaggaccagaugugag

SEQ ID NO: 424699 - RNA, 22 nt, Human
uacauguuuacuccaagucagg

SEQ ID NO: 424700 - RNA, 22 nt, Human
augagcugugggauuccagagg

SEQ ID NO: 424701 - RNA, 22 nt, Human
uaggcugggaagaaagauucuc

SEQ ID NO: 424702 - RNA, 22 nt, Human
guguuuccucacuucucugacu

SEQ ID NO: 424703 - RNA, 22 nt, Human
uagucucugcuuugcccuuggc

SEQ ID NO: 424704 - RNA, 22 nt, Human
ucuccucaccaccagcagcaga

SEQ ID NO: 424705 - RNA, 22 nt, Human
cuguaaaacugcuuaaguaugc

SEQ ID NO: 424706 - RNA, 20 nt, Human
cacugaagacuucuugcuca

SEQ ID NO: 424707 - RNA, 22 nt, Human
gguggggccugcuccagcggcc

SEQ ID NO: 424708 - RNA, 22 nt, Human
aacuguaaugaauuguucauga

SEQ ID NO: 424709 - RNA, 22 nt, Human
ucacuguaucauguugcacuua

SEQ ID NO: 424710 - RNA, 22 nt, Human
uuuuccucugcagagcaguuag

SEQ ID NO: 424711 - RNA, 22 nt, Human
aggcucagucccggcccgcgcc

SEQ ID NO: 424712 - RNA, 22 nt, Human
acacagggggcauucuaggagu

SEQ ID NO: 424713 - RNA, 19 nt, Human
ugcagaggguaggaaggcc

SEQ ID NO: 424714 - RNA, 22 nt, Human
ugcugccaaaugcgagcucugu

SEQ ID NO: 424715 - RNA, 21 nt, Human
uaagccaccaugugaaaccag

SEQ ID NO: 424716 - RNA, 22 nt, Human
ugggacugcucuugcugggguc

SEQ ID NO: 424717 - RNA, 22 nt, Human
ucuuuugagggccagaggaaga

SEQ ID NO: 424718 - RNA, 22 nt, Human
ugugcaguuucuauguugucca

SEQ ID NO: 424719 - RNA, 22 nt, Human
gaagaaggugcuacacagggca

SEQ ID NO: 424720 - RNA, 22 nt, Human
aaugaugguuucaucacuugaa

SEQ ID NO: 424721 - RNA, 22 nt, Human
acacaugcugauaagaauauaa

SEQ ID NO: 424722 - RNA, 22 nt, Human
cacugaagccugggaguaagac

SEQ ID NO: 424723 - RNA, 22 nt, Human
cucacugcaaguuccaccuacc

SEQ ID NO: 424724 - RNA, 22 nt, Human
agaggccuaaccaagauguccu

SEQ ID NO: 424725 - RNA, 22 nt, Human
gccagcaguauguccuggcagu

SEQ ID NO: 424726 - RNA, 22 nt, Human
gcaggcaguuugcuuuucccuc

SEQ ID NO: 424727 - RNA, 22 nt, Human
gagaaggggugauguggguaau

SEQ ID NO: 424728 - RNA, 22 nt, Human
gcuguggccgucagggaaaugg

SEQ ID NO: 424729 - RNA, 22 nt, Human
ucacagcaaaagugugcagagc

SEQ ID NO: 424730 - RNA, 22 nt, Human
gagcucugggaaacaaagugua

SEQ ID NO: 424731 - RNA, 22 nt, Human
augugucaauuuucaaaugcuu

SEQ ID NO: 424732 - RNA, 22 nt, Human
uacaggaagcacucaagaaaug

SEQ ID NO: 424733 - RNA, 17 nt, Human
auuucacuuagcaugag

SEQ ID NO: 424734 - RNA, 22 nt, Human
gugucauguagaaauugaugaa

SEQ ID NO: 424735 - RNA, 20 nt, Human
aaaauauguauaacucuucu

SEQ ID NO: 424736 - RNA, 22 nt, Human
ccugccagcccgcguucaugcc

SEQ ID NO: 424737 - RNA, 22 nt, Human
guuguacaaaauaucagugagg

SEQ ID NO: 424738 - RNA, 22 nt, Human
ugcugaggucaccuugcugcua

SEQ ID NO: 424739 - RNA, 22 nt, Human
gccugggugucgaucacuagug

SEQ ID NO: 424740 - RNA, 22 nt, Human
uggccugcccagagcagcucug

SEQ ID NO: 424741 - RNA, 22 nt, Human
aggguggagggagucccugagc

SEQ ID NO: 424742 - RNA, 22 nt, Human
auuauguauuugguauaguuug

SEQ ID NO: 424743 - RNA, 22 nt, Human
augaaaacuuuagccucauuag

SEQ ID NO: 424744 - RNA, 22 nt, Human
uuugacagauccuuaacucagc

SEQ ID NO: 424745 - RNA, 22 nt, Human
aaagaacaaauuagcuguuuua

SEQ ID NO: 424746 - RNA, 23 nt, Human
cacuccuguuucuaagccagcau

SEQ ID NO: 424747 - RNA, 23 nt, Human
ugcuucucugcuugacaguucug

SEQ ID NO: 424748 - RNA, 22 nt, Human
uuguauuugauugucauaucgu

SEQ ID NO: 424749 - RNA, 22 nt, Human
gccugguggugugcucaagugg

SEQ ID NO: 424750 - RNA, 22 nt, Human
cccaggcauuuucaacuuuagu

SEQ ID NO: 424751 - RNA, 22 nt, Human
agagugauucuaguuagggaau

SEQ ID NO: 424752 - RNA, 22 nt, Human
gggccccuuguaucucuggcuc

SEQ ID NO: 424753 - RNA, 22 nt, Human
gugauuucagguuuuucauacu

SEQ ID NO: 424754 - RNA, 22 nt, Human
aggcugagccugggcguggugg

SEQ ID NO: 424755 - RNA, 22 nt, Human
gaggaaccacucugagaagcca

SEQ ID NO: 424756 - RNA, 22 nt, Human
ggaggccaucagggagggcauu

SEQ ID NO: 424757 - RNA, 22 nt, Human
ggcugccucuggaagcuggaga

SEQ ID NO: 424758 - RNA, 22 nt, Human
cucaggauuuaaaggggcacuc

SEQ ID NO: 424759 - RNA, 22 nt, Human
auucaaguccagcuucucuaca

SEQ ID NO: 424760 - RNA, 22 nt, Human
aguauacauauauuagccuucg

SEQ ID NO: 424761 - RNA, 22 nt, Human
cugugucccuugucccagagcc

SEQ ID NO: 424762 - RNA, 23 nt, Human
uggggccaagugaggaagggucu

SEQ ID NO: 424763 - RNA, 21 nt, Human
guauucuuuaugaagugaaaa

SEQ ID NO: 424764 - RNA, 22 nt, Human
gagagugucgggggccccagga

SEQ ID NO: 424765 - RNA, 22 nt, Human
uagaaaagauaacauucugugc

SEQ ID NO: 424766 - RNA, 22 nt, Human
ccucagggccaucucugucccu

SEQ ID NO: 424767 - RNA, 22 nt, Human
uauguagaagcugcucaaagaa

SEQ ID NO: 424768 - RNA, 22 nt, Human
uggcucaguuucaguccugguu

SEQ ID NO: 424769 - RNA, 22 nt, Human
aucacuguguauguauaugcag

SEQ ID NO: 424770 - RNA, 22 nt, Human
agucccagagaggucggggcca

SEQ ID NO: 424771 - RNA, 22 nt, Human
ugcauuugucuugucucaugaa

SEQ ID NO: 424772 - RNA, 22 nt, Human
ggcagauggagaagcagcaggu

SEQ ID NO: 424773 - RNA, 22 nt, Human
agucucuuggcauucugaaaca

SEQ ID NO: 424774 - RNA, 22 nt, Human
auguaguauuuggaaauguaaa

SEQ ID NO: 424775 - RNA, 22 nt, Human
uacuuuuagccuauuugauucu

SEQ ID NO: 424776 - RNA, 22 nt, Human
acacugaauauacaaugaauau

SEQ ID NO: 424777 - RNA, 22 nt, Human
cuucuuaaucccuuauauauuu

SEQ ID NO: 424778 - RNA, 22 nt, Human
agggcucugagcuggaccaccu

SEQ ID NO: 424779 - RNA, 22 nt, Human
ucccaggguuacagccagggca

SEQ ID NO: 424780 - RNA, 22 nt, Human
cuuccaguaguaucauucucau

SEQ ID NO: 424781 - RNA, 22 nt, Human
aggcuuccuggaggaagaggua

SEQ ID NO: 424782 - RNA, 22 nt, Human
acauccagaucucagcauggcu

SEQ ID NO: 424783 - RNA, 20 nt, Human
cccugagacaaaggaggggc

SEQ ID NO: 424784 - RNA, 22 nt, Human
agaaguaggcagggcuguauca

SEQ ID NO: 424785 - RNA, 22 nt, Human
uagggcuccacucccagagauu

SEQ ID NO: 424786 - RNA, 21 nt, Human
ggcuuuaugcucacccagccu

SEQ ID NO: 424787 - RNA, 22 nt, Human
agagcuggauggucaagauggc

SEQ ID NO: 424788 - RNA, 22 nt, Human
ugagcagggacuuugaguguag

SEQ ID NO: 424789 - RNA, 22 nt, Human
uacagauugagguuuuuaauau

SEQ ID NO: 424790 - RNA, 23 nt, Human
uggcagcagaucuuaaagugacc

SEQ ID NO: 424791 - RNA, 22 nt, Human
aacaugaaguuuucuauaguga

SEQ ID NO: 424792 - RNA, 22 nt, Human
agucuucccugugccagagugu

SEQ ID NO: 424793 - RNA, 22 nt, Human
gacuucuauuaauaccucuacu

SEQ ID NO: 424794 - RNA, 22 nt, Human
ucuccugugcacccucccugug

SEQ ID NO: 424795 - RNA, 22 nt, Human
ucugucaggagauuggcagcug

SEQ ID NO: 424796 - RNA, 22 nt, Human
ggccugucucacccccgggugc

SEQ ID NO: 424797 - RNA, 22 nt, Human
aaauguuccauuauuguguaau

SEQ ID NO: 424798 - RNA, 22 nt, Human
ccugagugccaugagagcaccc

SEQ ID NO: 424799 - RNA, 22 nt, Human
uguguuccugccuggcucuggu

SEQ ID NO: 424800 - RNA, 19 nt, Human
agggaguuuauauuugcac

SEQ ID NO: 424801 - RNA, 22 nt, Human
ccagcugcuugggaaaaugucu

SEQ ID NO: 424802 - RNA, 22 nt, Human
uccucaugccgggucucacgcu

SEQ ID NO: 424803 - RNA, 22 nt, Human
ugggaccugcccuggccccauc

SEQ ID NO: 424804 - RNA, 22 nt, Human
cuggugucugcucccucacagc

SEQ ID NO: 424805 - RNA, 21 nt, Human
ggcuguggagccaugacucac

SEQ ID NO: 424806 - RNA, 22 nt, Human
uggagcuggcuuguggaaguug

SEQ ID NO: 424807 - RNA, 22 nt, Human
aauuuuaucucuaagcaggcuu

SEQ ID NO: 424808 - RNA, 22 nt, Human
cagggccucuccuccaggaacu

SEQ ID NO: 424809 - RNA, 22 nt, Human
cccaggagagaggccaguuggc

SEQ ID NO: 424810 - RNA, 22 nt, Human
aaggcuuuuguuccuauuuagu

SEQ ID NO: 424811 - RNA, 22 nt, Human
ugccugaguuuaacccucagag

SEQ ID NO: 424812 - RNA, 22 nt, Human
agcagcucuggcacuguagcau

SEQ ID NO: 424813 - RNA, 22 nt, Human
caccaggcuggagugcagaggu

SEQ ID NO: 424814 - RNA, 22 nt, Human
gucagaggggcagcugccaggc

SEQ ID NO: 424815 - RNA, 22 nt, Human
aaccccgcucaggcugggugag

SEQ ID NO: 424816 - RNA, 22 nt, Human
gugaaaucugaggcccaugaug

SEQ ID NO: 424817 - RNA, 22 nt, Human
ucagaggaauaaugcugcauuu

SEQ ID NO: 424818 - RNA, 22 nt, Human
guguaauugaaauugagaacca

SEQ ID NO: 424819 - RNA, 22 nt, Human
aggacuucuccgauaagucaga

SEQ ID NO: 424820 - RNA, 22 nt, Human
ucccugggccacagcugugagc

SEQ ID NO: 424821 - RNA, 22 nt, Human
acuacuuugggccauuuguuua

SEQ ID NO: 424822 - RNA, 22 nt, Human
ugcaggcaggggaugagcagcc

SEQ ID NO: 424823 - RNA, 22 nt, Human
uagucuuuugagaaguauaucu

SEQ ID NO: 424824 - RNA, 22 nt, Human
uacuuuaaaaacugauaauuca

SEQ ID NO: 424825 - RNA, 22 nt, Human
uuucucaucuggaaacagugcu

SEQ ID NO: 424826 - RNA, 22 nt, Human
uggccuugggcagguggccugc

SEQ ID NO: 424827 - RNA, 22 nt, Human
gggcuucucuuaugcuaacugg

SEQ ID NO: 424828 - RNA, 22 nt, Human
uaagauaugguaggaaguuugg

SEQ ID NO: 424829 - RNA, 22 nt, Human
aaugucugagucucuguauccc

SEQ ID NO: 424830 - RNA, 22 nt, Human
uuagucuucuuccuuauauguu

SEQ ID NO: 424831 - RNA, 22 nt, Human
uaacagaaauauuuccagguga

SEQ ID NO: 424832 - RNA, 22 nt, Human
agcagcuguacuuucaucuguu

SEQ ID NO: 424833 - RNA, 22 nt, Human
ucugggcagcagcagcuaguag

SEQ ID NO: 424834 - RNA, 22 nt, Human
gcagggcacagacagugccaag

SEQ ID NO: 424835 - RNA, 22 nt, Human
uguguacauaucuauccuagau

SEQ ID NO: 424836 - RNA, 22 nt, Human
cagugucuccagaugcuccaau

SEQ ID NO: 424837 - RNA, 22 nt, Human
uucuaugccauguucagcuacu

SEQ ID NO: 424838 - RNA, 22 nt, Human
caggcagcucgaugccuuguug

SEQ ID NO: 424839 - RNA, 22 nt, Human
gugcagggagcccagaaggucc

SEQ ID NO: 424840 - RNA, 22 nt, Human
aaugcacaaaaauuguauguaa

SEQ ID NO: 424841 - RNA, 22 nt, Human
cagcugucuaaguugagcagga

SEQ ID NO: 424842 - RNA, 22 nt, Human
cacagggcagugcugcccacuc

SEQ ID NO: 424843 - RNA, 22 nt, Human
gagauucuguagucaggcaucu

SEQ ID NO: 424844 - RNA, 19 nt, Human
uaaaaacugaaggaagcag

SEQ ID NO: 424845 - RNA, 22 nt, Human
acagccugcugccugcuucuug

SEQ ID NO: 424846 - RNA, 22 nt, Human
gugugcagugagcaaaagaucu

SEQ ID NO: 424847 - RNA, 22 nt, Human
gugccagggaguggaggagcuu

SEQ ID NO: 424848 - RNA, 22 nt, Human
ccugccucaucaacuugucgug

SEQ ID NO: 424849 - RNA, 22 nt, Human
gccaggcuggaaagaacagaca

SEQ ID NO: 424850 - RNA, 22 nt, Human
ucugaggcccugcaggcagugu

SEQ ID NO: 424851 - RNA, 22 nt, Human
aguggcaguggcugggcagagc

SEQ ID NO: 424852 - RNA, 22 nt, Human
gccugugguuugauuaagcauu

SEQ ID NO: 424853 - RNA, 22 nt, Human
gcaguaggagaagaggaugcuu

SEQ ID NO: 424854 - RNA, 22 nt, Human
auacaucucauguaagagauaa

SEQ ID NO: 424855 - RNA, 22 nt, Human
acuaaaaacuacugccaauagc

SEQ ID NO: 424856 - RNA, 22 nt, Human
agcugcucuugggugacuucaa

SEQ ID NO: 424857 - RNA, 22 nt, Human
cagcaggcguugggagaaagac

SEQ ID NO: 424858 - RNA, 22 nt, Human
ugggcuccagcaccugugcucu

SEQ ID NO: 424859 - RNA, 22 nt, Human
uaaaauagcaugugcagugaaa

SEQ ID NO: 424860 - RNA, 22 nt, Human
aaaugaccagaauacaggcuuc

SEQ ID NO: 424861 - RNA, 22 nt, Human
cagugcaguuucccagaugcug

SEQ ID NO: 424862 - RNA, 22 nt, Human
ggagugacucucggggccacua

SEQ ID NO: 424863 - RNA, 22 nt, Human
aguggcaguggggcagggcccu

SEQ ID NO: 424864 - RNA, 22 nt, Human
agccuggcuaaauucucccaug

SEQ ID NO: 424865 - RNA, 22 nt, Human
guauucuugguuaucaaaauac

SEQ ID NO: 424866 - RNA, 22 nt, Human
agaaaaggcuugaagagguuuu

SEQ ID NO: 424867 - RNA, 22 nt, Human
aggcaggaacccugugugcgcc

SEQ ID NO: 424868 - RNA, 22 nt, Human
gcuguggaugcuauggaucauc

SEQ ID NO: 424869 - RNA, 22 nt, Human
ucagaaauguaagcugaugacu

SEQ ID NO: 424870 - RNA, 22 nt, Human
cugcaagauuggaagaugcaau

SEQ ID NO: 424871 - RNA, 22 nt, Human
aaggcacuagcagaauuaguga

SEQ ID NO: 424872 - RNA, 22 nt, Human
agcacaggaccaaggaagcugu

SEQ ID NO: 424873 - RNA, 22 nt, Human
cugccucuggccucaggcccag

SEQ ID NO: 424874 - RNA, 22 nt, Human
caaaauuagggagugagcugga

SEQ ID NO: 424875 - RNA, 22 nt, Human
ugugccuuaugaauucuuucug

SEQ ID NO: 424876 - RNA, 21 nt, Human
acagccugucaucucaugguc

SEQ ID NO: 424877 - RNA, 22 nt, Human
uggcagugccccuugaccagug

SEQ ID NO: 424878 - RNA, 23 nt, Human
agacagaggcugaggcuggccgc

SEQ ID NO: 424879 - RNA, 22 nt, Human
ccucugcagcagagagccagag

SEQ ID NO: 424880 - RNA, 22 nt, Human
cugguuccaggauggaucuuuc

SEQ ID NO: 424881 - RNA, 22 nt, Human
ugcagcuguaacagaggccuca

SEQ ID NO: 424882 - RNA, 22 nt, Human
agggaggaaggauguuccaaag

SEQ ID NO: 424883 - RNA, 22 nt, Human
cugucaccuguucacugcagca

SEQ ID NO: 424884 - RNA, 22 nt, Human
ucccagcauuaaugccugucag

SEQ ID NO: 424885 - RNA, 22 nt, Human
gcugucugucuucacaucucgc

SEQ ID NO: 424886 - RNA, 22 nt, Human
ugaggcuggcaaggcugguauu

SEQ ID NO: 424887 - RNA, 22 nt, Human
cagggcagagggaaacuccuuu

SEQ ID NO: 424888 - RNA, 22 nt, Human
ugucccaguuuaucugggacug

SEQ ID NO: 424889 - RNA, 22 nt, Human
ggcucaggacugcagcguagag

SEQ ID NO: 424890 - RNA, 22 nt, Human
gucccagggagguucagggcuu

SEQ ID NO: 424891 - RNA, 22 nt, Human
agauacaugucaagagacuuau

SEQ ID NO: 424892 - RNA, 22 nt, Human
aauuagggagagguagcuaggu

SEQ ID NO: 424893 - RNA, 22 nt, Human
agaagccauagucugggaggca

SEQ ID NO: 424894 - RNA, 22 nt, Human
guuugcauguguacuuaauugg

SEQ ID NO: 424895 - RNA, 21 nt, Human
ucccugcuuucuggcccaguc

SEQ ID NO: 424896 - RNA, 22 nt, Human
augaggcaugugaggagaaggg

SEQ ID NO: 424897 - RNA, 22 nt, Human
aaaguucagauuagacucaaga

SEQ ID NO: 424898 - RNA, 22 nt, Human
auucuuggagcagucaaagaag

SEQ ID NO: 424899 - RNA, 22 nt, Human
cugucccagauguucucagcac

SEQ ID NO: 424900 - RNA, 22 nt, Human
ugaaggagggaagaaggcucug

SEQ ID NO: 424901 - RNA, 22 nt, Human
ccucagcugcuucccuggagcc

SEQ ID NO: 424902 - RNA, 22 nt, Human
uuugcuauuuuucugugcagcu

SEQ ID NO: 424903 - RNA, 22 nt, Human
ggcugugcgggcagccguggga

SEQ ID NO: 424904 - RNA, 22 nt, Human
aaucaguuaggguguuaaugag

SEQ ID NO: 424905 - RNA, 22 nt, Human
ugcauuccuccaccuccugcac

SEQ ID NO: 424906 - RNA, 22 nt, Human
acuggcugaaguuuacuuuuug

SEQ ID NO: 424907 - RNA, 22 nt, Human
agcuggccuguuagagcugagu

SEQ ID NO: 424908 - RNA, 22 nt, Human
uggcucagagccuugagagcug

SEQ ID NO: 424909 - RNA, 23 nt, Human
ggcucugugcugggccugcagga

SEQ ID NO: 424910 - RNA, 22 nt, Human
ucaggauggcuucugcaucaaa

SEQ ID NO: 424911 - RNA, 20 nt, Human
ccugaggguuuguguucuuu

SEQ ID NO: 424912 - RNA, 22 nt, Human
ugguugccucucagagauuccg

SEQ ID NO: 424913 - RNA, 22 nt, Human
aaacuguauauuuauggcaugu

SEQ ID NO: 424914 - RNA, 22 nt, Human
augaagcugguuuuggcuuggg

SEQ ID NO: 424915 - RNA, 22 nt, Human
agaaggaguguacaggucaugc

SEQ ID NO: 424916 - RNA, 23 nt, Human
ugagcccaggaggucaaggcugc

SEQ ID NO: 424917 - RNA, 22 nt, Human
aggcucugcagugcuggaggac

SEQ ID NO: 424918 - RNA, 22 nt, Human
ccagcagcgauagggugagugc

SEQ ID NO: 424919 - RNA, 22 nt, Human
agguuauaugucauacugaagu

SEQ ID NO: 424920 - RNA, 22 nt, Human
aggugcagcugguggagucugg

SEQ ID NO: 424921 - RNA, 19 nt, Human
aggugcaggucacagggga

SEQ ID NO: 424922 - RNA, 22 nt, Human
cugggacagcugagacaggaga

SEQ ID NO: 424923 - RNA, 22 nt, Human
ugaagccacacuagcuuguccu

SEQ ID NO: 424924 - RNA, 22 nt, Human
cccaaggccucuccuuggcuug

SEQ ID NO: 424925 - RNA, 22 nt, Human
gggcacuguggggcccaugcug

SEQ ID NO: 424926 - RNA, 22 nt, Human
cagcucugcugggaggaugcag

SEQ ID NO: 424927 - RNA, 23 nt, Human
aucaaacuggugagaaugucagu

SEQ ID NO: 424928 - RNA, 22 nt, Human
gcucugcuguguuuguucagca

SEQ ID NO: 424929 - RNA, 22 nt, Human
uuucuuauauucugucauuguu

SEQ ID NO: 424930 - RNA, 23 nt, Human
cuguggcugaguccuguuggagu

SEQ ID NO: 424931 - RNA, 20 nt, Human
gcugccuuguccugcuuggu

SEQ ID NO: 424932 - RNA, 22 nt, Human
guucacaucacuucacugaacc

SEQ ID NO: 424933 - RNA, 21 nt, Human
cauuagggcagaagcaggaag

SEQ ID NO: 424934 - RNA, 19 nt, Human
cagaguacaccagauagga

SEQ ID NO: 424935 - RNA, 22 nt, Human
guuacaaaggaagcuucacugc

SEQ ID NO: 424936 - RNA, 22 nt, Human
acuuuugguucuguaacuguga

SEQ ID NO: 424937 - RNA, 22 nt, Human
cauccugcggggagcagagggc

SEQ ID NO: 424938 - RNA, 23 nt, Human
aggagaagagauuuccacaugca

SEQ ID NO: 424939 - RNA, 22 nt, Human
ccucccugcgcuccugcggcgg

SEQ ID NO: 424940 - RNA, 22 nt, Human
auucacagggacaaugggagag

SEQ ID NO: 424941 - RNA, 22 nt, Human
uggcuggcgccgggcuagccac

SEQ ID NO: 424942 - RNA, 22 nt, Human
ucaucugucccaggcuuuuuuc

SEQ ID NO: 424943 - RNA, 22 nt, Human
aagggcucucugcauugaaauu

SEQ ID NO: 424944 - RNA, 22 nt, Human
auggaaagccaguguuccauca

SEQ ID NO: 424945 - RNA, 22 nt, Human
ugaguccaagagccagugggaa

SEQ ID NO: 424946 - RNA, 22 nt, Human
ugagguggcuagggaggcacuc

SEQ ID NO: 424947 - RNA, 22 nt, Human
uguagcacagagcuuugacacu

SEQ ID NO: 424948 - RNA, 22 nt, Human
cuauuacauuucuggacauuca

SEQ ID NO: 424949 - RNA, 22 nt, Human
ggcaguagccagggacuggcag

SEQ ID NO: 424950 - RNA, 22 nt, Human
gucaccagugcuaagaggugga

SEQ ID NO: 424951 - RNA, 22 nt, Human
accagcucagaagccagaaaga

SEQ ID NO: 424952 - RNA, 20 nt, Human
agccugccagcuggcccaga

SEQ ID NO: 424953 - RNA, 22 nt, Human
ucagggcaagucucagaagguu

SEQ ID NO: 424954 - RNA, 20 nt, Human
ccucaggaugagggugagca

SEQ ID NO: 424955 - RNA, 22 nt, Human
aguaggaggcgggagcaugaag

SEQ ID NO: 424956 - RNA, 22 nt, Human
uacuguacauuccguuuguugc

SEQ ID NO: 424957 - RNA, 22 nt, Human
ucccacucccaggcaggccucu

SEQ ID NO: 424958 - RNA, 22 nt, Human
acucaggaauggggcugggacu

SEQ ID NO: 424959 - RNA, 22 nt, Human
uggcagagguaauucaaauccc

SEQ ID NO: 424960 - RNA, 22 nt, Human
cacagcugugagaagggagccu

SEQ ID NO: 424961 - RNA, 21 nt, Human
agcagcagaucuggugagggc

SEQ ID NO: 424962 - RNA, 22 nt, Human
gccuggucucuuucaugucagu

SEQ ID NO: 424963 - RNA, 22 nt, Human
cagcucugaagaaaggugucua

SEQ ID NO: 424964 - RNA, 22 nt, Human
cucagcagcagggaagagguca

SEQ ID NO: 424965 - RNA, 21 nt, Human
ugcaggaaagugcugcgaccc

SEQ ID NO: 424966 - RNA, 22 nt, Human
cucugagaaagcugugagcuaa

SEQ ID NO: 424967 - RNA, 22 nt, Human
aggcucaggcaggaauggcgga

SEQ ID NO: 424968 - RNA, 22 nt, Human
auuccauuguguaaggauaucg

SEQ ID NO: 424969 - RNA, 22 nt, Human
cugggcugcaggaguggggcaa

SEQ ID NO: 424970 - RNA, 21 nt, Human
uuguucuuccagaagcaaagu

SEQ ID NO: 424971 - RNA, 22 nt, Human
gagggggcgugcaaggcuccgc

SEQ ID NO: 424972 - RNA, 22 nt, Human
cuugaaagucagcagaguggau

SEQ ID NO: 424973 - RNA, 22 nt, Human
uacaggcauguagcauggugau

SEQ ID NO: 424974 - RNA, 22 nt, Human
gccuuccuuuuaccaccagcca

SEQ ID NO: 424975 - RNA, 22 nt, Human
gcuggcugcgucaucacagggc

SEQ ID NO: 424976 - RNA, 22 nt, Human
auagcagaaaccaagcuucuuc

SEQ ID NO: 424977 - RNA, 22 nt, Human
agagccuugaagaucuggaaaa

SEQ ID NO: 424978 - RNA, 22 nt, Human
cugcccugggauggucugugcg

SEQ ID NO: 424979 - RNA, 22 nt, Human
caggucagagucccccuguccu

SEQ ID NO: 424980 - RNA, 22 nt, Human
uggcagcacaagguggcccaug

SEQ ID NO: 424981 - RNA, 22 nt, Human
gggaguggagagcaauggauga

SEQ ID NO: 424982 - RNA, 22 nt, Human
agcugugggauuugggugugcc

SEQ ID NO: 424983 - RNA, 22 nt, Human
cacccagggcugugccugccca

SEQ ID NO: 424984 - RNA, 22 nt, Human
ucugucauaaacacacacaagc

SEQ ID NO: 424985 - RNA, 22 nt, Human
gcagggcuaauggggcaaguag

SEQ ID NO: 424986 - RNA, 22 nt, Human
auucuggccuuggcucugucac

SEQ ID NO: 424987 - RNA, 22 nt, Human
cagugcccuuccaggacugcag

SEQ ID NO: 424988 - RNA, 22 nt, Human
ggcucagacucccaggcccucu

SEQ ID NO: 424989 - RNA, 22 nt, Human
aggcaugugacccuggacucag

SEQ ID NO: 424990 - RNA, 22 nt, Human
gcuuugcauuguuuaaucagga

SEQ ID NO: 424991 - RNA, 22 nt, Human
acagggcagugucuugaaaaau

SEQ ID NO: 424992 - RNA, 22 nt, Human
gaagcagcugccagagaugucu

SEQ ID NO: 424993 - RNA, 22 nt, Human
cucuccagaauaugccgccgug

SEQ ID NO: 424994 - RNA, 22 nt, Human
gggggcuguccugugcauugua

SEQ ID NO: 424995 - RNA, 20 nt, Human
acagaaagagagaaugucag

SEQ ID NO: 424996 - RNA, 22 nt, Human
ucuuaaaccacaaaauucagag

SEQ ID NO: 424997 - RNA, 21 nt, Human
gccaaggggguagcuauuccu

SEQ ID NO: 424998 - RNA, 22 nt, Human
acuuucucaggaauucacagac

SEQ ID NO: 424999 - RNA, 21 nt, Human
gcaaguacuaucaucauuauc

SEQ ID NO: 425000 - RNA, 22 nt, Human
gcucaggacuggaggagcgggg

SEQ ID NO: 425001 - RNA, 22 nt, Human
auugucugaauccaaagcucug

SEQ ID NO: 425002 - RNA, 22 nt, Human
ucaggcugcagcugucagcagc

SEQ ID NO: 425003 - RNA, 22 nt, Human
ugcauuguaggauguuuagcag

SEQ ID NO: 425004 - RNA, 22 nt, Human
aaaucugggagcagcucggcca

SEQ ID NO: 425005 - RNA, 22 nt, Human
auuuucuauucugcugguuuag

SEQ ID NO: 425006 - RNA, 22 nt, Human
uuauuuaauuuucucacucaga

SEQ ID NO: 425007 - RNA, 22 nt, Human
aagacaaagggguccuuggaug

SEQ ID NO: 425008 - RNA, 22 nt, Human
uugagaagaaauaguuugcaau

SEQ ID NO: 425009 - RNA, 22 nt, Human
ucaggauguuaauauagcauua

SEQ ID NO: 425010 - RNA, 22 nt, Human
ugauggcuaucccuggaagggc

SEQ ID NO: 425011 - RNA, 22 nt, Human
cagcuugggucaggugccugcu

SEQ ID NO: 425012 - RNA, 22 nt, Human
uuuaccaagcuuuaauuacaua

SEQ ID NO: 425013 - RNA, 22 nt, Human
cagagcuguauuuaucuuucca

SEQ ID NO: 425014 - RNA, 22 nt, Human
augcuuuuccuaaaaugaugcc

SEQ ID NO: 425015 - RNA, 22 nt, Human
accaggcagcugggggugaugu

SEQ ID NO: 425016 - RNA, 22 nt, Human
gcuggggaggcagcagagaaca

SEQ ID NO: 425017 - RNA, 22 nt, Human
cagagccagcaguggggacagg

SEQ ID NO: 425018 - RNA, 22 nt, Human
agggcccuccccgcucagggca

SEQ ID NO: 425019 - RNA, 22 nt, Human
ccacugcccccugaagaccagg

SEQ ID NO: 425020 - RNA, 22 nt, Human
agcuggggcugcagagaacagg

SEQ ID NO: 425021 - RNA, 22 nt, Human
uagggcaguuucauguuaucuu

SEQ ID NO: 425022 - RNA, 22 nt, Human
ggcuucauggaggaggugaguc

SEQ ID NO: 425023 - RNA, 22 nt, Human
uuuaccauccucuuuuagaauu

SEQ ID NO: 425024 - RNA, 22 nt, Human
agcagggcugugcuccuuccga

SEQ ID NO: 425025 - RNA, 22 nt, Human
ucagccagugccuugaucuugc

SEQ ID NO: 425026 - RNA, 22 nt, Human
cagcuggcagcccuggcccugc

SEQ ID NO: 425027 - RNA, 22 nt, Human
uacuguacugucuuuuuugcug

SEQ ID NO: 425028 - RNA, 20 nt, Human
ucuuacaaucguuacaucca

SEQ ID NO: 425029 - RNA, 22 nt, Human
gggugcugacuggggccugaaa

SEQ ID NO: 425030 - RNA, 22 nt, Human
ugggacacccucacgccugcac

SEQ ID NO: 425031 - RNA, 17 nt, Human
cauuuguugaucaguug

SEQ ID NO: 425032 - RNA, 22 nt, Human
uggaguucucaggugagggcuu

SEQ ID NO: 425033 - RNA, 22 nt, Human
acacaucucaggggacacucuc

SEQ ID NO: 425034 - RNA, 22 nt, Human
aagagggcugcaaucuuauugc

SEQ ID NO: 425035 - RNA, 22 nt, Human
cuucaagauccauagauauugc

SEQ ID NO: 425036 - RNA, 22 nt, Human
ucaguuuuucuauacuuuguag

SEQ ID NO: 425037 - RNA, 22 nt, Human
aggcugcuuccuuacguggcug

SEQ ID NO: 425038 - RNA, 22 nt, Human
aguguuucuggcaaaugaaagu

SEQ ID NO: 425039 - RNA, 22 nt, Human
acuuuuaugauaaucaauguuc

SEQ ID NO: 425040 - RNA, 22 nt, Human
uuuauauagagauuugugcaug

SEQ ID NO: 425041 - RNA, 22 nt, Human
cugaaggacuuggugauaguug

SEQ ID NO: 425042 - RNA, 23 nt, Human
aaaaaaccauguaggcacucagu

SEQ ID NO: 425043 - RNA, 22 nt, Human
gggccccaaaaugccaggcucu

SEQ ID NO: 425044 - RNA, 22 nt, Human
gcugccugccuugccuggagga

SEQ ID NO: 425045 - RNA, 22 nt, Human
cuauuagguaugugguugcuau

SEQ ID NO: 425046 - RNA, 22 nt, Human
uggcaguggcucagagugcaga

SEQ ID NO: 425047 - RNA, 22 nt, Human
gaaaggcaguacagcugagccu

SEQ ID NO: 425048 - RNA, 22 nt, Human
cugggccagcaacugcaaugga

SEQ ID NO: 425049 - RNA, 19 nt, Human
gcaugcuugguggcuucug

SEQ ID NO: 425050 - RNA, 22 nt, Human
ucugagagcuguagaagccuau

SEQ ID NO: 425051 - RNA, 22 nt, Human
cccuggcaugcaugucccuggc

SEQ ID NO: 425052 - RNA, 22 nt, Human
gcagcuuucuuuuugcaugucu

SEQ ID NO: 425053 - RNA, 22 nt, Human
uccugccuaccuugcggaggug

SEQ ID NO: 425054 - RNA, 22 nt, Human
agugcuccuauggaucaguugu

SEQ ID NO: 425055 - RNA, 22 nt, Human
ugccaggcucaggaugucccug

SEQ ID NO: 425056 - RNA, 22 nt, Human
gucccuuggcucacaaacagcu

SEQ ID NO: 425057 - RNA, 22 nt, Human
gccaggcauuuguuaggugcug

SEQ ID NO: 425058 - RNA, 22 nt, Human
auguuuuauauuuugcagcagu

SEQ ID NO: 425059 - RNA, 22 nt, Human
gggugggccacugagcagcgug

SEQ ID NO: 425060 - RNA, 22 nt, Human
gggagcugagcuggaagagaau

SEQ ID NO: 425061 - RNA, 22 nt, Human
caggggcagucugugugcgugg

SEQ ID NO: 425062 - RNA, 22 nt, Human
agccagugggauuagagccucu

SEQ ID NO: 425063 - RNA, 22 nt, Human
gaggcucaaaccuggacagagc

SEQ ID NO: 425064 - RNA, 22 nt, Human
gcagcaggagaguuuguccugc

SEQ ID NO: 425065 - RNA, 22 nt, Human
acauuucuuagccuaguuccag

SEQ ID NO: 425066 - RNA, 22 nt, Human
agagcuguggauaguccuggau

SEQ ID NO: 425067 - RNA, 22 nt, Human
ucuacugugguccuuguaacca

SEQ ID NO: 425068 - RNA, 18 nt, Human
cagcugccagcucaugga

SEQ ID NO: 425069 - RNA, 22 nt, Human
gucaaguuuauccgcucauuca

SEQ ID NO: 425070 - RNA, 22 nt, Human
agcugaguuaauucaucacuua

SEQ ID NO: 425071 - RNA, 22 nt, Human
ucaugacaucuguuuaucucaa

SEQ ID NO: 425072 - RNA, 22 nt, Human
ggcugcuguuucagagacuguu

SEQ ID NO: 425073 - RNA, 20 nt, Human
aagagcauaguacaggaaga

SEQ ID NO: 425074 - RNA, 22 nt, Human
gggcacugugcuaggugcugag

SEQ ID NO: 425075 - RNA, 22 nt, Human
ugagccuggggccugggcagcg

SEQ ID NO: 425076 - RNA, 19 nt, Human
ggagaagcaucuagaaaua

SEQ ID NO: 425077 - RNA, 22 nt, Human
aaaggugacacucugccagcug

SEQ ID NO: 425078 - RNA, 22 nt, Human
ggcugugagcaggcagaaugcu

SEQ ID NO: 425079 - RNA, 22 nt, Human
aaguuugacagaaguuucuaau

SEQ ID NO: 425080 - RNA, 22 nt, Human
cagcuuuagagaaaacauauuu

SEQ ID NO: 425081 - RNA, 22 nt, Human
ucaggcagaggauggggagcgu

SEQ ID NO: 425082 - RNA, 22 nt, Human
aaauguguauaugaaacaugau

SEQ ID NO: 425083 - RNA, 22 nt, Human
gcaggugauucacccugggccu

SEQ ID NO: 425084 - RNA, 22 nt, Human
gccuccugagaagccacaggcu

SEQ ID NO: 425085 - RNA, 22 nt, Human
gggguggauuccuacaggucca

SEQ ID NO: 425086 - RNA, 22 nt, Human
cuggcugcaggaaggagugggc

SEQ ID NO: 425087 - RNA, 22 nt, Human
uuugaaaggaaguuaauacuuu

SEQ ID NO: 425088 - RNA, 22 nt, Human
uaaaugcaguuaguacuugcca

SEQ ID NO: 425089 - RNA, 21 nt, Human
uuacaaagcaagugcuguguc

SEQ ID NO: 425090 - RNA, 22 nt, Human
accagcuguguccuggcugcag

SEQ ID NO: 425091 - RNA, 22 nt, Human
gcccagaguucaaggcugcagu

SEQ ID NO: 425092 - RNA, 22 nt, Human
aaagcagggaugaggcuagagg

SEQ ID NO: 425093 - RNA, 22 nt, Human
ggaggugggagacauaggcggc

SEQ ID NO: 425094 - RNA, 22 nt, Human
cuggggaggcagggcugccccu

SEQ ID NO: 425095 - RNA, 22 nt, Human
agggcagccugagugcuggccc

SEQ ID NO: 425096 - RNA, 22 nt, Human
ccugggagguggagguugcagu

SEQ ID NO: 425097 - RNA, 19 nt, Human
agggagaauuccaagagga

SEQ ID NO: 425098 - RNA, 22 nt, Human
ugggcaaguaucggacucugag

SEQ ID NO: 425099 - RNA, 22 nt, Human
gccaggcagagccccgugcagc

SEQ ID NO: 425100 - RNA, 22 nt, Human
guuuacaaauauuuuaaauggu

SEQ ID NO: 425101 - RNA, 22 nt, Human
aagugagugguaaggagcaugg

SEQ ID NO: 425102 - RNA, 22 nt, Human
cagggagcuggugccagccgac

SEQ ID NO: 425103 - RNA, 22 nt, Human
ucacauuuguuccucugcacuu

SEQ ID NO: 425104 - RNA, 22 nt, Human
aaucaagaaaaugaggauucuu

SEQ ID NO: 425105 - RNA, 22 nt, Human
ccaggaaugaaauguagauaaa

SEQ ID NO: 425106 - RNA, 22 nt, Human
gcucagagcaucccagugaaug

SEQ ID NO: 425107 - RNA, 22 nt, Human
ugggugagugggaaaagcccag

SEQ ID NO: 425108 - RNA, 22 nt, Human
uaugugaauacagcaguggaug

SEQ ID NO: 425109 - RNA, 22 nt, Human
ggagcagggaauuacagcgcag

SEQ ID NO: 425110 - RNA, 18 nt, Human
uuucacaaccuccagagg

SEQ ID NO: 425111 - RNA, 22 nt, Human
caguggccugagccaggcuucc

SEQ ID NO: 425112 - RNA, 22 nt, Human
caaggccaagguuuugugaacu

SEQ ID NO: 425113 - RNA, 18 nt, Human
uggccuggagacaacucu

SEQ ID NO: 425114 - RNA, 21 nt, Human
uucagcaguccucuagagaua

SEQ ID NO: 425115 - RNA, 22 nt, Human
cagaggaaggcucugggaaugu

SEQ ID NO: 425116 - RNA, 22 nt, Human
acaggcuguugggguccagggu

SEQ ID NO: 425117 - RNA, 22 nt, Human
cuccagggaggagcacggguuc

SEQ ID NO: 425118 - RNA, 22 nt, Human
gcucccaccuccagccugaguu

SEQ ID NO: 425119 - RNA, 22 nt, Human
cugcugugcagacagacucucu

SEQ ID NO: 425120 - RNA, 22 nt, Human
cugggaggauucauugagguga

SEQ ID NO: 425121 - RNA, 22 nt, Human
aucugguuuggggauccuugug

SEQ ID NO: 425122 - RNA, 22 nt, Human
ugcagggcccuugggguugaac

SEQ ID NO: 425123 - RNA, 22 nt, Human
agggcuacugccugccuucagg

SEQ ID NO: 425124 - RNA, 22 nt, Human
agcccaagcuaugaggugaccu

SEQ ID NO: 425125 - RNA, 22 nt, Human
gggugacauuucccaaugagcc

SEQ ID NO: 425126 - RNA, 22 nt, Human
gagcucuggcagggcaggucug

SEQ ID NO: 425127 - RNA, 22 nt, Human
uucaagauggccccagugagcc

SEQ ID NO: 425128 - RNA, 22 nt, Human
aggcugcguuagccucacuccc

SEQ ID NO: 425129 - RNA, 21 nt, Human
agcagaggcagaauguaugca

SEQ ID NO: 425130 - RNA, 22 nt, Human
uuaacagagugccuggcaugua

SEQ ID NO: 425131 - RNA, 22 nt, Human
agugaaauggaugcugcuacug

SEQ ID NO: 425132 - RNA, 22 nt, Human
acccagcaaagauaaacuuaug

SEQ ID NO: 425133 - RNA, 22 nt, Human
ggcaggguggcagaggcucaga

SEQ ID NO: 425134 - RNA, 22 nt, Human
cagcugcaggaacaaaaaugug

SEQ ID NO: 425135 - RNA, 22 nt, Human
agcagaggaggauuuaguuagg

SEQ ID NO: 425136 - RNA, 19 nt, Human
agcaccugugagagccugg

SEQ ID NO: 425137 - RNA, 22 nt, Human
acccagaggugucuagcaagcu

SEQ ID NO: 425138 - RNA, 22 nt, Human
uauuugcaacauaaaacucuga

SEQ ID NO: 425139 - RNA, 22 nt, Human
cuacccaggcuggagugcagua

SEQ ID NO: 425140 - RNA, 22 nt, Human
caagagcauuuaguuagcuggu

SEQ ID NO: 425141 - RNA, 22 nt, Human
accccagcucugagccacacca

SEQ ID NO: 425142 - RNA, 19 nt, Human
cagauguuuucaguucauu

SEQ ID NO: 425143 - RNA, 22 nt, Human
aagcugccaaugguaagcugcu

SEQ ID NO: 425144 - RNA, 22 nt, Human
gggcaguuuauucuagaugguu

SEQ ID NO: 425145 - RNA, 21 nt, Human
guuuuaagggagaaaaccuag

SEQ ID NO: 425146 - RNA, 22 nt, Human
gaagcagcaaguauaggacagg

SEQ ID NO: 425147 - RNA, 22 nt, Human
gccuucugaucgcuggacugac

SEQ ID NO: 425148 - RNA, 22 nt, Human
cugucaucacaguugagcagcc

SEQ ID NO: 425149 - RNA, 22 nt, Human
uguccuuuuggcugucuauggu

SEQ ID NO: 425150 - RNA, 22 nt, Human
auuuuagagaaacaaacguagg

SEQ ID NO: 425151 - RNA, 22 nt, Human
ggucccugguucccucugagcu

SEQ ID NO: 425152 - RNA, 22 nt, Human
gcccucagaugggaaaggaggg

SEQ ID NO: 425153 - RNA, 22 nt, Human
cuguucucuggcgguggcuguu

SEQ ID NO: 425154 - RNA, 22 nt, Human
aauaauuuugagagccuggaaa

SEQ ID NO: 425155 - RNA, 22 nt, Human
uauuacaguucgaguuucuagg

SEQ ID NO: 425156 - RNA, 22 nt, Human
gcugugcagguccccacugccu

SEQ ID NO: 425157 - RNA, 22 nt, Human
uuccuguaugucagugaagagc

SEQ ID NO: 425158 - RNA, 22 nt, Human
guccucagucaguuuggugggg

SEQ ID NO: 425159 - RNA, 22 nt, Human
accccagcccugcuucugggag

SEQ ID NO: 425160 - RNA, 22 nt, Human
caagcuccuuacauccacaggg

SEQ ID NO: 425161 - RNA, 22 nt, Human
uccuguggaagacaguguuggg

SEQ ID NO: 425162 - RNA, 21 nt, Human
aagaacuauugagguacacag

SEQ ID NO: 425163 - RNA, 22 nt, Human
cacugcuuauaaauucuaggca

SEQ ID NO: 425164 - RNA, 22 nt, Human
gaggcagcaucuauggugggaa

SEQ ID NO: 425165 - RNA, 22 nt, Human
augagacuaccuguaauguggc

SEQ ID NO: 425166 - RNA, 22 nt, Human
ucagaggucacacagcaaguuu

SEQ ID NO: 425167 - RNA, 22 nt, Human
gagggaccccaggcuggcccuu

SEQ ID NO: 425168 - RNA, 22 nt, Human
ccugggcaaaugccagagacaa

SEQ ID NO: 425169 - RNA, 22 nt, Human
ccuggagcacucucccuggcug

SEQ ID NO: 425170 - RNA, 22 nt, Human
uuaugcuaagugcaacaagcca

SEQ ID NO: 425171 - RNA, 22 nt, Human
agagcugugaaaaugagguuug

SEQ ID NO: 425172 - RNA, 22 nt, Human
ggcagagguagcuggaaccagg

SEQ ID NO: 425173 - RNA, 21 nt, Human
ccagacuggccuaugugguag

SEQ ID NO: 425174 - RNA, 22 nt, Human
acagcaagccagcuugucacug

SEQ ID NO: 425175 - RNA, 22 nt, Human
cagcuucugagcaagccagggg

SEQ ID NO: 425176 - RNA, 22 nt, Human
cccucuacagggaagcgcuuuc

SEQ ID NO: 425177 - RNA, 19 nt, Human
ccucuccgcccaccagccc

SEQ ID NO: 425178 - RNA, 22 nt, Human
cuguggcuaggaagcuguggga

SEQ ID NO: 425179 - RNA, 22 nt, Human
ugaggcucaaggucugguggag

SEQ ID NO: 425180 - RNA, 22 nt, Human
gcccugugccagucacgcugug

SEQ ID NO: 425181 - RNA, 22 nt, Human
ccuggcugccgagugugcagcg

SEQ ID NO: 425182 - RNA, 23 nt, Human
agugagcagcuguagggcaagga

SEQ ID NO: 425183 - RNA, 22 nt, Human
cagcaguggccaucuguguggu

SEQ ID NO: 425184 - RNA, 21 nt, Human
accucaagcaacaaccaaggu

SEQ ID NO: 425185 - RNA, 22 nt, Human
agaaagcacucugucuuuuacc

SEQ ID NO: 425186 - RNA, 22 nt, Human
gagggagugccagagggccagc

SEQ ID NO: 425187 - RNA, 22 nt, Human
uuuccucuuuguaccuugacua

SEQ ID NO: 425188 - RNA, 22 nt, Human
gugcagugaaaaaagaaugucc

SEQ ID NO: 425189 - RNA, 22 nt, Human
uuugaaguccaucuggcccagu

SEQ ID NO: 425190 - RNA, 22 nt, Human
gccagagcacaggcugguagua

SEQ ID NO: 425191 - RNA, 22 nt, Human
uugcauugaaaauauauuuuaa

SEQ ID NO: 425192 - RNA, 22 nt, Human
agccuggagaagauguguauug

SEQ ID NO: 425193 - RNA, 22 nt, Human
aggcugagucgggaggaucacu

SEQ ID NO: 425194 - RNA, 22 nt, Human
ggcuggucacaccacugcaggg

SEQ ID NO: 425195 - RNA, 22 nt, Human
uccuccaggucuaggguggcuu

SEQ ID NO: 425196 - RNA, 22 nt, Human
cucagggccaaggaugcuguug

SEQ ID NO: 425197 - RNA, 20 nt, Human
auaaaauaacugccacaaga

SEQ ID NO: 425198 - RNA, 22 nt, Human
acuguaaauuuugguugcaggu

SEQ ID NO: 425199 - RNA, 22 nt, Human
aaguuuuaacaaguacuuacua

SEQ ID NO: 425200 - RNA, 22 nt, Human
cccaggcacaccccgaacggaa

SEQ ID NO: 425201 - RNA, 22 nt, Human
ugaccaaaggugguuuauuugg

SEQ ID NO: 425202 - RNA, 22 nt, Human
aggccagguuccucaaucuuga

SEQ ID NO: 425203 - RNA, 22 nt, Human
gugucauuaaccaccaugcaaa

SEQ ID NO: 425204 - RNA, 22 nt, Human
uggagcaggaagucuauggcug

SEQ ID NO: 425205 - RNA, 20 nt, Human
uuuuuccuucucuacaggca

SEQ ID NO: 425206 - RNA, 22 nt, Human
aggagugaguguccucagcaga

SEQ ID NO: 425207 - RNA, 20 nt, Human
auugucagccuucagaggag

SEQ ID NO: 425208 - RNA, 22 nt, Human
aaauccuaccaagaaauucccu

SEQ ID NO: 425209 - RNA, 22 nt, Human
gaugggggccagggccugcuuu

SEQ ID NO: 425210 - RNA, 22 nt, Human
aggcuuccgaguagcugggacu

SEQ ID NO: 425211 - RNA, 21 nt, Human
ucugucucuccacugcccugc

SEQ ID NO: 425212 - RNA, 20 nt, Human
caggcacacucauuccugcu

SEQ ID NO: 425213 - RNA, 22 nt, Human
uguuuuucaaauauugcucugu

SEQ ID NO: 425214 - RNA, 22 nt, Human
ggcuucugaaaucucugugcgu

SEQ ID NO: 425215 - RNA, 22 nt, Human
ggcuuccuggagaaggucugag

SEQ ID NO: 425216 - RNA, 22 nt, Human
ugggugggagcacccugucugg

SEQ ID NO: 425217 - RNA, 22 nt, Human
gugugccaccagucaaggugaa

SEQ ID NO: 425218 - RNA, 22 nt, Human
guggcagagggugagcuggacu

SEQ ID NO: 425219 - RNA, 22 nt, Human
ccuuggagcggucagcacuggu

SEQ ID NO: 425220 - RNA, 21 nt, Human
agagaagaggacuuucucaca

SEQ ID NO: 425221 - RNA, 18 nt, Human
uggcagccagcugcuccu

SEQ ID NO: 425222 - RNA, 21 nt, Human
agagaagggacucuuccaguc

SEQ ID NO: 425223 - RNA, 22 nt, Human
cauuucugauuacagaauacua

SEQ ID NO: 425224 - RNA, 23 nt, Human
acaaaugcccauacaucuaguuc

SEQ ID NO: 425225 - RNA, 22 nt, Human
uggguacuccuauuaguucagu

SEQ ID NO: 425226 - RNA, 22 nt, Human
ucagggcacugucaccugauau

SEQ ID NO: 425227 - RNA, 22 nt, Human
aggccugggucucgugccuacc

SEQ ID NO: 425228 - RNA, 22 nt, Human
cugcuguguuggcauuggauag

SEQ ID NO: 425229 - RNA, 22 nt, Human
ucuccuucgaggcccagcuccc

SEQ ID NO: 425230 - RNA, 21 nt, Human
agcugagcccagaagacuggu

SEQ ID NO: 425231 - RNA, 22 nt, Human
uggagcucaaaggccuguggga

SEQ ID NO: 425232 - RNA, 22 nt, Human
cagaagcacuaggaggaaacgu

SEQ ID NO: 425233 - RNA, 22 nt, Human
aauugugcuaugauuaugaaag

SEQ ID NO: 425234 - RNA, 22 nt, Human
gaaugaauucagcacauggaau

SEQ ID NO: 425235 - RNA, 20 nt, Human
gugaccagaagacagugggu

SEQ ID NO: 425236 - RNA, 22 nt, Human
guguuuccuaguuuaaugaaug

SEQ ID NO: 425237 - RNA, 22 nt, Human
ucugagagguuaagcaauuuga

SEQ ID NO: 425238 - RNA, 22 nt, Human
cugcuuuggcucagugacauca

SEQ ID NO: 425239 - RNA, 23 nt, Human
uuuauuuauuuaggcugagggau

SEQ ID NO: 425240 - RNA, 17 nt, Human
gugcagggaugaaggau

SEQ ID NO: 425241 - RNA, 22 nt, Human
uccaggcacagaguuggucagu

SEQ ID NO: 425242 - RNA, 20 nt, Human
cugcagggugagugggcgau

SEQ ID NO: 425243 - RNA, 18 nt, Human
cugaggcuuagagagguu

SEQ ID NO: 425244 - RNA, 22 nt, Human
accuuuuuucagaacucuaaag

SEQ ID NO: 425245 - RNA, 22 nt, Human
ucucugauguauaucagagaac

SEQ ID NO: 425246 - RNA, 22 nt, Human
ucagcccugggacccagggaug

SEQ ID NO: 425247 - RNA, 22 nt, Human
uguggccaccagagcugcuauu

SEQ ID NO: 425248 - RNA, 22 nt, Human
uccugccucuuuucuuauucca

SEQ ID NO: 425249 - RNA, 22 nt, Human
ugacaaaacugcaauuacuuuu

SEQ ID NO: 425250 - RNA, 22 nt, Human
agaagccaugguaugcaacuac

SEQ ID NO: 425251 - RNA, 22 nt, Human
uggagaaggacagccugagaaa

SEQ ID NO: 425252 - RNA, 22 nt, Human
gcaggagccacuucagggaugc

SEQ ID NO: 425253 - RNA, 22 nt, Human
cuggggugucucgucugccauu

SEQ ID NO: 425254 - RNA, 22 nt, Human
gcagggcaugggcccugucugc

SEQ ID NO: 425255 - RNA, 22 nt, Human
ccacagagacagagcccagggu

SEQ ID NO: 425256 - RNA, 20 nt, Human
ccagagaguagguuagugau

SEQ ID NO: 425257 - RNA, 22 nt, Human
ugggaggcuuccagaccuugcu

SEQ ID NO: 425258 - RNA, 22 nt, Human
ggcuggccucaggguccucgcu

SEQ ID NO: 425259 - RNA, 22 nt, Human
agccuggccaggccugcccagg

SEQ ID NO: 425260 - RNA, 22 nt, Human
gcuggcuccucuguccucacgg

SEQ ID NO: 425261 - RNA, 22 nt, Human
agccuucaguaaauccacugug

SEQ ID NO: 425262 - RNA, 22 nt, Human
caguggaggccuugggaccuuu

SEQ ID NO: 425263 - RNA, 22 nt, Human
acagcagccugcagcccugugu

SEQ ID NO: 425264 - RNA, 22 nt, Human
gcagcuggggaggucgugggga

SEQ ID NO: 425265 - RNA, 22 nt, Human
ucccagagcucuggagguugga

SEQ ID NO: 425266 - RNA, 22 nt, Human
gucccaggcagagucaggaggg

SEQ ID NO: 425267 - RNA, 22 nt, Human
ggccagaggccacagcuguguc

SEQ ID NO: 425268 - RNA, 22 nt, Human
ucacauuuauuucaaaguuacu

SEQ ID NO: 425269 - RNA, 22 nt, Human
aauggcugccagggcaggaggu

SEQ ID NO: 425270 - RNA, 22 nt, Human
agagaagggccuguauguaauc

SEQ ID NO: 425271 - RNA, 22 nt, Human
cugccaucugagccaaaagugc

SEQ ID NO: 425272 - RNA, 22 nt, Human
acucugaaugugcauguaaauc

SEQ ID NO: 425273 - RNA, 22 nt, Human
ugcagcauugcaaagcagucuu

SEQ ID NO: 425274 - RNA, 22 nt, Human
auggggcucugcggcugcuccc

SEQ ID NO: 425275 - RNA, 22 nt, Human
uuuuauuaucuuugaaugggac

SEQ ID NO: 425276 - RNA, 22 nt, Human
uuucagaugugugucucugaag

SEQ ID NO: 425277 - RNA, 22 nt, Human
uagagcuggaaaacugcaggua

SEQ ID NO: 425278 - RNA, 22 nt, Human
gcagucaguaaggcagccagaa

SEQ ID NO: 425279 - RNA, 22 nt, Human
uggcuuccugcauggauccucu

SEQ ID NO: 425280 - RNA, 22 nt, Human
auggggagagaagggcugagcu

SEQ ID NO: 425281 - RNA, 22 nt, Human
ccagcagcccacaggcgucccu

SEQ ID NO: 425282 - RNA, 22 nt, Human
gaaaucugaacucuguauccuu

SEQ ID NO: 425283 - RNA, 22 nt, Human
augaggcuaugaauggggagau

SEQ ID NO: 425284 - RNA, 22 nt, Human
ucaaaugcucuuugcagagagg

SEQ ID NO: 425285 - RNA, 22 nt, Human
aaguucaaggcucuagaguucc

SEQ ID NO: 425286 - RNA, 22 nt, Human
ggccugugucugugccuguccu

SEQ ID NO: 425287 - RNA, 22 nt, Human
gcccaugcucucaggcgggccu

SEQ ID NO: 425288 - RNA, 18 nt, Human
uccauuguucuacuguga

SEQ ID NO: 425289 - RNA, 22 nt, Human
gcccagcacauugcugaggacc

SEQ ID NO: 425290 - RNA, 22 nt, Human
gcccagagagaugcuguagacc

SEQ ID NO: 425291 - RNA, 22 nt, Human
aaugcugcucucauaauuauag

SEQ ID NO: 425292 - RNA, 22 nt, Human
accaaggaagaaucuauuugag

SEQ ID NO: 425293 - RNA, 22 nt, Human
caaaugaagaaccuucucaccu

SEQ ID NO: 425294 - RNA, 22 nt, Human
agucacuguucugucaugucaa

SEQ ID NO: 425295 - RNA, 22 nt, Human
uucacaauagcuggcaucaucu

SEQ ID NO: 425296 - RNA, 22 nt, Human
ucagauggcacacagagccugc

SEQ ID NO: 425297 - RNA, 22 nt, Human
ugaaggaauggaggaucagagc

SEQ ID NO: 425298 - RNA, 20 nt, Human
ggaccagguggggcgguggc

SEQ ID NO: 425299 - RNA, 22 nt, Human
cagucccacaagaucuccacaa

SEQ ID NO: 425300 - RNA, 22 nt, Human
gauuuauuuuuaaucagcaggg

SEQ ID NO: 425301 - RNA, 22 nt, Human
acuaagaccuagauacuagggg

SEQ ID NO: 425302 - RNA, 22 nt, Human
gcagggcucaacaggacacccc

SEQ ID NO: 425303 - RNA, 22 nt, Human
uggaccugagccuggcccugcc

SEQ ID NO: 425304 - RNA, 22 nt, Human
gaggcugggaaguccaagacca

SEQ ID NO: 425305 - RNA, 19 nt, Human
aucugaaguaggugcagcu

SEQ ID NO: 425306 - RNA, 22 nt, Human
cucaggagcuuccucagcccau

SEQ ID NO: 425307 - RNA, 22 nt, Human
aauuaacaaauguagcugugau

SEQ ID NO: 425308 - RNA, 22 nt, Human
ggcugccaggagggaggccagu

SEQ ID NO: 425309 - RNA, 22 nt, Human
gagagguccauuccccugucag

SEQ ID NO: 425310 - RNA, 17 nt, Human
acaggcagaucaccuga

SEQ ID NO: 425311 - RNA, 22 nt, Human
caaagcucaugcucuuagccau

SEQ ID NO: 425312 - RNA, 22 nt, Human
caggagaagguuuggagugcag

SEQ ID NO: 425313 - RNA, 22 nt, Human
cacagguggcuccaaguuagag

SEQ ID NO: 425314 - RNA, 22 nt, Human
cagaguggcagucccaggccca

SEQ ID NO: 425315 - RNA, 22 nt, Human
agccuccacagaugcaaagggc

SEQ ID NO: 425316 - RNA, 22 nt, Human
uccauggggcccaggaugagag

SEQ ID NO: 425317 - RNA, 22 nt, Human
gggcaggugcccagggccagag

SEQ ID NO: 425318 - RNA, 22 nt, Human
accaaagggcagaacaugagca

SEQ ID NO: 425319 - RNA, 23 nt, Human
uggugccucagaagcagugggcu

SEQ ID NO: 425320 - RNA, 22 nt, Human
ccagaggacuugggggcugaau

SEQ ID NO: 425321 - RNA, 20 nt, Human
uuggcucugaucaguggagc

SEQ ID NO: 425322 - RNA, 20 nt, Human
ccugucuccucuuaccuggc

SEQ ID NO: 425323 - RNA, 22 nt, Human
cuguggugagcaacugacugaa

SEQ ID NO: 425324 - RNA, 22 nt, Human
uuugaaaauuuaagugcuacac

SEQ ID NO: 425325 - RNA, 22 nt, Human
agggggcccuugcaggugagcg

SEQ ID NO: 425326 - RNA, 22 nt, Human
caccaggcugcccaggacaggg

SEQ ID NO: 425327 - RNA, 22 nt, Human
gagccaggcccguacuugcugu

SEQ ID NO: 425328 - RNA, 22 nt, Human
uggccuggggaccugugagacc

SEQ ID NO: 425329 - RNA, 22 nt, Human
ccauaagguuuggggccaugca

SEQ ID NO: 425330 - RNA, 20 nt, Human
ucugcucagcccucaguggc

SEQ ID NO: 425331 - RNA, 22 nt, Human
agcaucuggucaugagugagaa

SEQ ID NO: 425332 - RNA, 22 nt, Human
ggccagagagccgcuguuagga

SEQ ID NO: 425333 - RNA, 22 nt, Human
ccacucugauuuuggcuccacu

SEQ ID NO: 425334 - RNA, 20 nt, Human
gcagagccucacugcaaggg

SEQ ID NO: 425335 - RNA, 22 nt, Human
caucagcagucacaugaugcug

SEQ ID NO: 425336 - RNA, 22 nt, Human
caggaagcugugaaggagacgg

SEQ ID NO: 425337 - RNA, 22 nt, Human
gucagaggaggcugaguaggaa

SEQ ID NO: 425338 - RNA, 20 nt, Human
caccaggcgcucugagaaca

SEQ ID NO: 425339 - RNA, 22 nt, Human
ccauuugucaccucugcacucc

SEQ ID NO: 425340 - RNA, 22 nt, Human
gaaucauuggaaccacauccaa

SEQ ID NO: 425341 - RNA, 20 nt, Human
aauaaaagaagccuucaccc

SEQ ID NO: 425342 - RNA, 22 nt, Human
aggcucaguucacgucaacuuu

SEQ ID NO: 425343 - RNA, 22 nt, Human
ggcucccugccuguccucaguc

SEQ ID NO: 425344 - RNA, 22 nt, Human
gcagaggacacaggagggcaag

SEQ ID NO: 425345 - RNA, 22 nt, Human
gcacagagggcagugagccucu

SEQ ID NO: 425346 - RNA, 22 nt, Human
uccaggaggccucauuuccugu

SEQ ID NO: 425347 - RNA, 22 nt, Human
gccucgaggcugagaaggcaca

SEQ ID NO: 425348 - RNA, 22 nt, Human
uuuaacuugaucaguagagcau

SEQ ID NO: 425349 - RNA, 22 nt, Human
auccacagucuuagccaucaaa

SEQ ID NO: 425350 - RNA, 22 nt, Human
gcaagcaagcagguagagcuga

SEQ ID NO: 425351 - RNA, 22 nt, Human
ggcugccugaggcagugagaga

SEQ ID NO: 425352 - RNA, 22 nt, Human
gugcgccagcucaaggggaggc

SEQ ID NO: 425353 - RNA, 20 nt, Human
cccugagaccagagagcagc

SEQ ID NO: 425354 - RNA, 22 nt, Human
gaagcaaagagcuagugccgcu

SEQ ID NO: 425355 - RNA, 22 nt, Human
ccugacgaaaggcgugcuggag

SEQ ID NO: 425356 - RNA, 22 nt, Human
caggugggagcgaggagcuacu

SEQ ID NO: 425357 - RNA, 22 nt, Human
uuuucauuguuccucgagcauu

SEQ ID NO: 425358 - RNA, 22 nt, Human
agagucugaggcagcugcagcc

SEQ ID NO: 425359 - RNA, 22 nt, Human
gggcuggugaggcugcccugca

SEQ ID NO: 425360 - RNA, 22 nt, Human
ugccagcuccgaggagcugcag

SEQ ID NO: 425361 - RNA, 22 nt, Human
uccaggcaaagugcugggcugc

SEQ ID NO: 425362 - RNA, 22 nt, Human
cuacaagauuuuuaaaacugua

SEQ ID NO: 425363 - RNA, 22 nt, Human
agagcccugaagcagagcuaaa

SEQ ID NO: 425364 - RNA, 22 nt, Human
ucagaggaacacuguuucaugc

SEQ ID NO: 425365 - RNA, 22 nt, Human
caggagcuacucagguuggguu

SEQ ID NO: 425366 - RNA, 19 nt, Human
uuggaaggagccagagugg

SEQ ID NO: 425367 - RNA, 22 nt, Human
augcaacaaaugcuacgaaucg

SEQ ID NO: 425368 - RNA, 22 nt, Human
ucaccagggcuccagccagccu

SEQ ID NO: 425369 - RNA, 22 nt, Human
ugcuggcucaguuugcagacuc

SEQ ID NO: 425370 - RNA, 22 nt, Human
uucacauuagugguucuauaua

SEQ ID NO: 425371 - RNA, 22 nt, Human
caguacuugggaaugcugggga

SEQ ID NO: 425372 - RNA, 22 nt, Human
uagcauuuggcaccaguuauuu

SEQ ID NO: 425373 - RNA, 22 nt, Human
uuucccaagaaaaauaauugga

SEQ ID NO: 425374 - RNA, 22 nt, Human
guggguggaucaccugagguca

SEQ ID NO: 425375 - RNA, 22 nt, Human
cugggccucaaucucagaguuu

SEQ ID NO: 425376 - RNA, 22 nt, Human
uccagccuuucuacucacugag

SEQ ID NO: 425377 - RNA, 22 nt, Human
ggcuucaccgcgggguugcagg

SEQ ID NO: 425378 - RNA, 22 nt, Human
ugugaugguucacugggcauga

SEQ ID NO: 425379 - RNA, 22 nt, Human
ccugggcagugcuggaguugaa

SEQ ID NO: 425380 - RNA, 22 nt, Human
uauucacagcugccgcacucag

SEQ ID NO: 425381 - RNA, 21 nt, Human
ucucuggaguuagcagagaga

SEQ ID NO: 425382 - RNA, 22 nt, Human
gccagcagccacagaagucacu

SEQ ID NO: 425383 - RNA, 22 nt, Human
uguacauagaucuugaaaauua

SEQ ID NO: 425384 - RNA, 22 nt, Human
aaguggagagcccuggaggucu

SEQ ID NO: 425385 - RNA, 22 nt, Human
ugaaaaggagccuuagguaggu

SEQ ID NO: 425386 - RNA, 22 nt, Human
cugguccuugacgcgugggagg

SEQ ID NO: 425387 - RNA, 22 nt, Human
acacaguaugaaaagucuaguu

SEQ ID NO: 425388 - RNA, 22 nt, Human
ugaggcagccugcauuaaagag

SEQ ID NO: 425389 - RNA, 18 nt, Human
uggagcagguaggcauga

SEQ ID NO: 425390 - RNA, 22 nt, Human
gugcagagaaaugagaagucga

SEQ ID NO: 425391 - RNA, 22 nt, Human
aggagaaguaaggcuagaugau

SEQ ID NO: 425392 - RNA, 22 nt, Human
gaggaggcacuaguuagugaca

SEQ ID NO: 425393 - RNA, 22 nt, Human
aggagcagaccguaguccugca

SEQ ID NO: 425394 - RNA, 22 nt, Human
cccagcccagcguucgaggggu

SEQ ID NO: 425395 - RNA, 22 nt, Human
ugucccagauacuggacauaga

SEQ ID NO: 425396 - RNA, 20 nt, Human
guaaaauauggucuuugggu

SEQ ID NO: 425397 - RNA, 22 nt, Human
gcugcccugucugcagcaggac

SEQ ID NO: 425398 - RNA, 22 nt, Human
gccgaagcugccgucugguccu

SEQ ID NO: 425399 - RNA, 22 nt, Human
gaaggccacggaauggagcugg

SEQ ID NO: 425400 - RNA, 22 nt, Human
ggaggcacuucccgucucagcc

SEQ ID NO: 425401 - RNA, 22 nt, Human
ucaguggauugacaugaaaaag

SEQ ID NO: 425402 - RNA, 22 nt, Human
uauacuuuccugcaacuuugau

SEQ ID NO: 425403 - RNA, 22 nt, Human
cucagggggaaucaggucacag

SEQ ID NO: 425404 - RNA, 22 nt, Human
agaacagaagggaggaaggccu

SEQ ID NO: 425405 - RNA, 22 nt, Human
ugggccugggcuccuguccucu

SEQ ID NO: 425406 - RNA, 22 nt, Human
agcuccuccugugccaggccag

SEQ ID NO: 425407 - RNA, 22 nt, Human
aaugcacaugucuuggccucac

SEQ ID NO: 425408 - RNA, 23 nt, Human
gcaggugguucgaacagaaguuu

SEQ ID NO: 425409 - RNA, 22 nt, Human
gggcccacuggcugucugaccc

SEQ ID NO: 425410 - RNA, 22 nt, Human
ugaugggaaaaugaggccuggg

SEQ ID NO: 425411 - RNA, 22 nt, Human
agcaccuguggcucaugcucgu

SEQ ID NO: 425412 - RNA, 22 nt, Human
caggcugggaacgccacccgcu

SEQ ID NO: 425413 - RNA, 22 nt, Human
uugaagcaaggcgaaucuugug

SEQ ID NO: 425414 - RNA, 22 nt, Human
auuuugaaaccaaguuauuucc

SEQ ID NO: 425415 - RNA, 22 nt, Human
agcauaaaggucaacguuuuag

SEQ ID NO: 425416 - RNA, 22 nt, Human
aguauuucugcucaugaaagag

SEQ ID NO: 425417 - RNA, 22 nt, Human
acagguggaggcuuuaggaggu

SEQ ID NO: 425418 - RNA, 22 nt, Human
aaaugcuguguuuuaacauaga

SEQ ID NO: 425419 - RNA, 22 nt, Human
ccaaagagcuagaauuauaggc

SEQ ID NO: 425420 - RNA, 20 nt, Human
ugggcagcacugcuggcugg

SEQ ID NO: 425421 - RNA, 23 nt, Human
agccuucaggcaaugucaguaga

SEQ ID NO: 425422 - RNA, 22 nt, Human
gcacugcagguggguggagagg

SEQ ID NO: 425423 - RNA, 22 nt, Human
agguggagugaaggaaaggcag

SEQ ID NO: 425424 - RNA, 22 nt, Human
ugcagaggagucagccugggca

SEQ ID NO: 425425 - RNA, 20 nt, Human
gggugagauguaggagaggg

SEQ ID NO: 425426 - RNA, 22 nt, Human
cauaucccauuggccaggacau

SEQ ID NO: 425427 - RNA, 22 nt, Human
agggacuugaugucagggagau

SEQ ID NO: 425428 - RNA, 22 nt, Human
ggccugggcccacugucaagag

SEQ ID NO: 425429 - RNA, 21 nt, Human
gcaggggauagaaauggucug

SEQ ID NO: 425430 - RNA, 22 nt, Human
uacaggcacugaaaugcuuauu

SEQ ID NO: 425431 - RNA, 22 nt, Human
cagaggcuaagaugagugggug

SEQ ID NO: 425432 - RNA, 22 nt, Human
gcugcucugcuguguaagcagg

SEQ ID NO: 425433 - RNA, 22 nt, Human
cuggagcuaauaauccaucuga

SEQ ID NO: 425434 - RNA, 22 nt, Human
aucagucuguguuagaaaagag

SEQ ID NO: 425435 - RNA, 22 nt, Human
aggccuggcuuugguuugcuga

SEQ ID NO: 425436 - RNA, 22 nt, Human
gcuguauuuaacaacuggcuca

SEQ ID NO: 425437 - RNA, 22 nt, Human
gucaggaugcuauuguuauuaa

SEQ ID NO: 425438 - RNA, 22 nt, Human
cauuuauuggcauguaguaggu

SEQ ID NO: 425439 - RNA, 22 nt, Human
ucauccaguuguggagagggaa

SEQ ID NO: 425440 - RNA, 22 nt, Human
uaacagaaacagauaaguguaa

SEQ ID NO: 425441 - RNA, 22 nt, Human
ggcauggcuggguucuggugag

SEQ ID NO: 425442 - RNA, 22 nt, Human
ucaaagucauggcuaguaauga

SEQ ID NO: 425443 - RNA, 22 nt, Human
ucaggcugaggucaucugcauc

SEQ ID NO: 425444 - RNA, 22 nt, Human
ggagcagccacgucucagggca

SEQ ID NO: 425445 - RNA, 23 nt, Human
cccagagcacagccuccagaugc

SEQ ID NO: 425446 - RNA, 22 nt, Human
gccaccagccccaugcgcugug

SEQ ID NO: 425447 - RNA, 22 nt, Human
cacuguacugugaauaaggagg

SEQ ID NO: 425448 - RNA, 22 nt, Human
gauuucaaccuaacaguaugac

SEQ ID NO: 425449 - RNA, 22 nt, Human
cauuuacuuaaaucuuuacaag

SEQ ID NO: 425450 - RNA, 22 nt, Human
gagaggagucccuaucacaguu

SEQ ID NO: 425451 - RNA, 22 nt, Human
guuauaaauaccuaauaggauu

SEQ ID NO: 425452 - RNA, 22 nt, Human
aggcccagagagccaguuagug

SEQ ID NO: 425453 - RNA, 22 nt, Human
agaaaucaauaucuauauguug

SEQ ID NO: 425454 - RNA, 22 nt, Human
gagccuggauagccuuguucca

SEQ ID NO: 425455 - RNA, 22 nt, Human
ugcagggcuaagucagagccug

SEQ ID NO: 425456 - RNA, 22 nt, Human
ugcaggccucacaccuggcacc

SEQ ID NO: 425457 - RNA, 22 nt, Human
ucucugggauaaacugggccag

SEQ ID NO: 425458 - RNA, 22 nt, Human
uacaaagauaguguuagaguaa

SEQ ID NO: 425459 - RNA, 19 nt, Human
acagaaauuaguuauuuuc

SEQ ID NO: 425460 - RNA, 19 nt, Human
ucugaaguccagggcauac

SEQ ID NO: 425461 - RNA, 22 nt, Human
uagaaaggauauugagaugaau

SEQ ID NO: 425462 - RNA, 22 nt, Human
acacuacaaucucagaacuaua

SEQ ID NO: 425463 - RNA, 22 nt, Human
cuuuccaacucuagugaaauuu

SEQ ID NO: 425464 - RNA, 22 nt, Human
ucugguuagccaauaaugccaa

SEQ ID NO: 425465 - RNA, 22 nt, Human
gggagcugaauggcaauggaga

SEQ ID NO: 425466 - RNA, 19 nt, Human
uccugcagguggcuugcag

SEQ ID NO: 425467 - RNA, 22 nt, Human
augcuuuacaguuuuccaaaca

SEQ ID NO: 425468 - RNA, 22 nt, Human
uccuuuuuaagucguuguggua

SEQ ID NO: 425469 - RNA, 22 nt, Human
ugaagcaacuggacaaguuggc

SEQ ID NO: 425470 - RNA, 22 nt, Human
uggcugcagaucaagggcaggc

SEQ ID NO: 425471 - RNA, 22 nt, Human
uccuugaaaggggcugcagggc

SEQ ID NO: 425472 - RNA, 22 nt, Human
ucugggcucugucagcaccucu

SEQ ID NO: 425473 - RNA, 22 nt, Human
agcuguguguuuccacugagcu

SEQ ID NO: 425474 - RNA, 22 nt, Human
cucuggaguucuucaagcuacu

SEQ ID NO: 425475 - RNA, 22 nt, Human
acacagaaccucauagccucuc

SEQ ID NO: 425476 - RNA, 22 nt, Human
uuuagggaaauugaggguuaag

SEQ ID NO: 425477 - RNA, 19 nt, Human
cagagccucagagcuagaa

SEQ ID NO: 425478 - RNA, 20 nt, Human
uccugcaguuccuaggaggg

SEQ ID NO: 425479 - RNA, 22 nt, Human
aaaguuugcaauuuauguuaau

SEQ ID NO: 425480 - RNA, 22 nt, Human
cucaggcuugggaggaggccca

SEQ ID NO: 425481 - RNA, 21 nt, Human
ugucagagcuuguaggacauu

SEQ ID NO: 425482 - RNA, 22 nt, Human
cagggccagcgcccaggcccag

SEQ ID NO: 425483 - RNA, 22 nt, Human
uacaaaugaguuguaugaacca

SEQ ID NO: 425484 - RNA, 22 nt, Human
ugucucugguauuaggugaaaa

SEQ ID NO: 425485 - RNA, 22 nt, Human
gcagcugguuaaugggagaauu

SEQ ID NO: 425486 - RNA, 22 nt, Human
cuguugucuucauugucauauc

SEQ ID NO: 425487 - RNA, 22 nt, Human
agcugucugucuccugaggaga

SEQ ID NO: 425488 - RNA, 22 nt, Human
ucucagucuuugcaaggaugcu

SEQ ID NO: 425489 - RNA, 22 nt, Human
ugauugaagaggugaggaaguu

SEQ ID NO: 425490 - RNA, 22 nt, Human
agggcagagggugccucaccug

SEQ ID NO: 425491 - RNA, 22 nt, Human
uaggcucagggcugggugacgg

SEQ ID NO: 425492 - RNA, 22 nt, Human
augcaguaaauguuaagaaaaa

SEQ ID NO: 425493 - RNA, 22 nt, Human
gacccugccaugagugacaggg

SEQ ID NO: 425494 - RNA, 19 nt, Human
acauuuagaauguacuugc

SEQ ID NO: 425495 - RNA, 22 nt, Human
ggagcugggaauuggaucaucu

SEQ ID NO: 425496 - RNA, 22 nt, Human
uucacauuugcccuuaugugug

SEQ ID NO: 425497 - RNA, 22 nt, Human
ucauaaaacacaccagguaguu

SEQ ID NO: 425498 - RNA, 22 nt, Human
cgcugggcgccgaccugcuggc

SEQ ID NO: 425499 - RNA, 22 nt, Human
acaggagugaaucuggcacuua

SEQ ID NO: 425500 - RNA, 22 nt, Human
aagaaauguagagccuaguaaa

SEQ ID NO: 425501 - RNA, 22 nt, Human
gggcuagaaauucugcagugga

SEQ ID NO: 425502 - RNA, 18 nt, Human
gugacagcugcuagcuca

SEQ ID NO: 425503 - RNA, 22 nt, Human
agcuguucccucacugcaguca

SEQ ID NO: 425504 - RNA, 21 nt, Human
gggugcuguggucaugcagga

SEQ ID NO: 425505 - RNA, 22 nt, Human
uugaagcaugguacuuguucaa

SEQ ID NO: 425506 - RNA, 22 nt, Human
gcucuccaaacccuguggcuuu

SEQ ID NO: 425507 - RNA, 22 nt, Human
acagagcuguacuacuuacuga

SEQ ID NO: 425508 - RNA, 20 nt, Human
cagagaccaggccagguguc

SEQ ID NO: 425509 - RNA, 22 nt, Human
ugggagaagcagcagccaagug

SEQ ID NO: 425510 - RNA, 22 nt, Human
uugggggaagaggauagacagu

SEQ ID NO: 425511 - RNA, 22 nt, Human
auacaaaauauauacuggagac

SEQ ID NO: 425512 - RNA, 22 nt, Human
aguaucaaggaucuccagcacc

SEQ ID NO: 425513 - RNA, 22 nt, Human
ggccucugggguccugagccca

SEQ ID NO: 425514 - RNA, 22 nt, Human
aggcaagcauugggaacagggc

SEQ ID NO: 425515 - RNA, 22 nt, Human
cccagcucugcagaccugcccu

SEQ ID NO: 425516 - RNA, 22 nt, Human
aagggcucugggcuacgcacug

SEQ ID NO: 425517 - RNA, 22 nt, Human
ucuggcucuuugggugauugua

SEQ ID NO: 425518 - RNA, 22 nt, Human
guuugcauaucugugaaaugga

SEQ ID NO: 425519 - RNA, 22 nt, Human
gggcuggaggaccggccucgga

SEQ ID NO: 425520 - RNA, 22 nt, Human
ucccugcucagcucaccuggca

SEQ ID NO: 425521 - RNA, 22 nt, Human
ugccaggccaauucuauuugac

SEQ ID NO: 425522 - RNA, 20 nt, Human
auacacauauucuugcaacu

SEQ ID NO: 425523 - RNA, 22 nt, Human
aaaugucuuucuucugcuacgu

SEQ ID NO: 425524 - RNA, 22 nt, Human
aggacccugagcgggcaugccg

SEQ ID NO: 425525 - RNA, 23 nt, Human
ucagcugcuuccuccugccugcc

SEQ ID NO: 425526 - RNA, 22 nt, Human
uaaauguaccuucugccuuacu

SEQ ID NO: 425527 - RNA, 20 nt, Human
gucuccacuggggguuaacc

SEQ ID NO: 425528 - RNA, 22 nt, Human
uagauuuccucuuccucauucc

SEQ ID NO: 425529 - RNA, 22 nt, Human
ucacaugcuugaggaaagaaaa

SEQ ID NO: 425530 - RNA, 22 nt, Human
gcuggcaggguucucacugaaa

SEQ ID NO: 425531 - RNA, 22 nt, Human
uuuccucugagugagcugggag

SEQ ID NO: 425532 - RNA, 22 nt, Human
cuuacagagaagaaaauguagu

SEQ ID NO: 425533 - RNA, 23 nt, Human
uccuuugucuuugcauagauggu

SEQ ID NO: 425534 - RNA, 18 nt, Human
gggcaagcggcugucacc

SEQ ID NO: 425535 - RNA, 22 nt, Human
gaaaugcaaauucucucucgcu

SEQ ID NO: 425536 - RNA, 22 nt, Human
gaccaaggaagaggggagccag

SEQ ID NO: 425537 - RNA, 22 nt, Human
uaauaaaugaaagugcuggcau

SEQ ID NO: 425538 - RNA, 22 nt, Human
aggcccugggcaguucuguagc

SEQ ID NO: 425539 - RNA, 22 nt, Human
uccugccucuugccuucuucac

SEQ ID NO: 425540 - RNA, 22 nt, Human
gcagcuggggccacacuuaggc

SEQ ID NO: 425541 - RNA, 19 nt, Human
ugucucugaaagaugagcu

SEQ ID NO: 425542 - RNA, 22 nt, Human
ccugauggagcccugcugcaug

SEQ ID NO: 425543 - RNA, 22 nt, Human
auauacuuggagacuaucauug

SEQ ID NO: 425544 - RNA, 22 nt, Human
ggccagaaguuggaaaagagcc

SEQ ID NO: 425545 - RNA, 22 nt, Human
gccuggagugcaguggcgugau

SEQ ID NO: 425546 - RNA, 22 nt, Human
auucuucauguugaagcuguca

SEQ ID NO: 425547 - RNA, 22 nt, Human
uuccucaggcuucccuuugucc

SEQ ID NO: 425548 - RNA, 22 nt, Human
aggcuucccagcugagcucagc

SEQ ID NO: 425549 - RNA, 22 nt, Human
aaguggugguaugaaccgaggg

SEQ ID NO: 425550 - RNA, 20 nt, Human
agcaccagugggggcagccc

SEQ ID NO: 425551 - RNA, 22 nt, Human
acucacauuucaucaggccaag

SEQ ID NO: 425552 - RNA, 22 nt, Human
gacauucacaguuuccgauggu

SEQ ID NO: 425553 - RNA, 22 nt, Human
ucccagauuguugauggcuuaa

SEQ ID NO: 425554 - RNA, 22 nt, Human
cagaacauuccaugugcccugc

SEQ ID NO: 425555 - RNA, 22 nt, Human
ccugucagaugaaguaauugug

SEQ ID NO: 425556 - RNA, 22 nt, Human
ucugagaguagagcugccucuu

SEQ ID NO: 425557 - RNA, 22 nt, Human
uccaggacuagcauuucugaua

SEQ ID NO: 425558 - RNA, 22 nt, Human
cuaucuuuuguucauuuugagu

SEQ ID NO: 425559 - RNA, 17 nt, Human
cucacggaggaugaauc

SEQ ID NO: 425560 - RNA, 20 nt, Human
ugugaaagcaguagaaugac

SEQ ID NO: 425561 - RNA, 22 nt, Human
agcagggcagugaucagaaagg

SEQ ID NO: 425562 - RNA, 18 nt, Human
caggagcaggaguugaac

SEQ ID NO: 425563 - RNA, 22 nt, Human
guuuaauuuuagguugucaagc

SEQ ID NO: 425564 - RNA, 22 nt, Human
gcuggcucccauugguccuucc

SEQ ID NO: 425565 - RNA, 22 nt, Human
gccucccugagucacccaagca

SEQ ID NO: 425566 - RNA, 22 nt, Human
agcaaucaccaccucuauauuu

SEQ ID NO: 425567 - RNA, 18 nt, Human
ggcuuugcugggguuucu

SEQ ID NO: 425568 - RNA, 22 nt, Human
ccaucccuucaccacagcagua

SEQ ID NO: 425569 - RNA, 22 nt, Human
aaaaaugcuuggacuuaauaaa

SEQ ID NO: 425570 - RNA, 22 nt, Human
ggcagcacgacaggaguggaag

SEQ ID NO: 425571 - RNA, 22 nt, Human
uucuuuccacagaggggaugau

SEQ ID NO: 425572 - RNA, 22 nt, Human
aggccagagaggggaccagccu

SEQ ID NO: 425573 - RNA, 22 nt, Human
uuccucugaaauggcuuggaaa

SEQ ID NO: 425574 - RNA, 22 nt, Human
gagcucaggagcaucagaagaa

SEQ ID NO: 425575 - RNA, 22 nt, Human
acauuucucaucuaguagagua

SEQ ID NO: 425576 - RNA, 22 nt, Human
caugagauaauuuuucuccagu

SEQ ID NO: 425577 - RNA, 22 nt, Human
uggcaggaggaugaggcggcua

SEQ ID NO: 425578 - RNA, 18 nt, Human
aggaaagaaaggcaggug

SEQ ID NO: 425579 - RNA, 22 nt, Human
gcacagggagcaggucucuggu

SEQ ID NO: 425580 - RNA, 22 nt, Human
aaaguguaaaagcauguuaggg

SEQ ID NO: 425581 - RNA, 22 nt, Human
uggccuggaaccuggcagggac

SEQ ID NO: 425582 - RNA, 22 nt, Human
ccuggccucgugcucacggcuc

SEQ ID NO: 425583 - RNA, 22 nt, Human
guaggaagcucugaggcuaguu

SEQ ID NO: 425584 - RNA, 22 nt, Human
gacaagacaccucucuccaucc

SEQ ID NO: 425585 - RNA, 22 nt, Human
uuucuauuuacagugcuaggua

SEQ ID NO: 425586 - RNA, 19 nt, Human
ucaggacugacuugaaguc

SEQ ID NO: 425587 - RNA, 22 nt, Human
guagggacaauauguuauuaga

SEQ ID NO: 425588 - RNA, 22 nt, Human
uggcacugagcagccgcggcag

SEQ ID NO: 425589 - RNA, 22 nt, Human
gugucccaggagaggagacaau

SEQ ID NO: 425590 - RNA, 22 nt, Human
aauuagggaaguauuuaguagu

SEQ ID NO: 425591 - RNA, 22 nt, Human
aaguccaguuuuuccagguggu

SEQ ID NO: 425592 - RNA, 18 nt, Human
ugaccugcgcuucacggu

SEQ ID NO: 425593 - RNA, 22 nt, Human
uuagccauggacugaauugacu

SEQ ID NO: 425594 - RNA, 22 nt, Human
ugccugucuuggaguccuggcc

SEQ ID NO: 425595 - RNA, 22 nt, Human
aagcugaggcccauggcaaggu

SEQ ID NO: 425596 - RNA, 22 nt, Human
aggcugagauagguggaucauu

SEQ ID NO: 425597 - RNA, 22 nt, Human
acugggaggcaucuggagcuga

SEQ ID NO: 425598 - RNA, 19 nt, Human
cuggcucuuggguggagga

SEQ ID NO: 425599 - RNA, 22 nt, Human
uacauuguuuuuucuugccauc

SEQ ID NO: 425600 - RNA, 22 nt, Human
gcaggccuuggcaaugagccug

SEQ ID NO: 425601 - RNA, 22 nt, Human
uggaggaaaaaaccaggcagag

SEQ ID NO: 425602 - RNA, 22 nt, Human
aucagcaagcauuuauugagug

SEQ ID NO: 425603 - RNA, 22 nt, Human
ugcuaucucuauauccauuuau

SEQ ID NO: 425604 - RNA, 22 nt, Human
uggggacaggagacuuacagcu

SEQ ID NO: 425605 - RNA, 22 nt, Human
ugccagcccaccuuggggccuc

SEQ ID NO: 425606 - RNA, 22 nt, Human
caggaggcagagguugcagcga

SEQ ID NO: 425607 - RNA, 22 nt, Human
aagggcagaauagagaagaugg

SEQ ID NO: 425608 - RNA, 22 nt, Human
uggcagcuugaaugcagucuuu

SEQ ID NO: 425609 - RNA, 22 nt, Human
cucuggccgcagcucagcucug

SEQ ID NO: 425610 - RNA, 22 nt, Human
uuucuauucuggaucuguggca

SEQ ID NO: 425611 - RNA, 22 nt, Human
ugggcacuauggcucugugcac

SEQ ID NO: 425612 - RNA, 22 nt, Human
cuggagcugcuguccuugggug

SEQ ID NO: 425613 - RNA, 22 nt, Human
cuccaggccagggaaguggaca

SEQ ID NO: 425614 - RNA, 22 nt, Human
ccacauuuuugauacucucacu

SEQ ID NO: 425615 - RNA, 19 nt, Human
uacauuuguguacacuugu

SEQ ID NO: 425616 - RNA, 22 nt, Human
cagcugugagcagccaguugcc

SEQ ID NO: 425617 - RNA, 22 nt, Human
uccuggaguugugcagugcaca

SEQ ID NO: 425618 - RNA, 22 nt, Human
acaguaauuaaaauggaucugc

SEQ ID NO: 425619 - RNA, 22 nt, Human
ggugcagugguguggcaaaggg

SEQ ID NO: 425620 - RNA, 18 nt, Human
cucugcuaaugggcagcu

SEQ ID NO: 425621 - RNA, 22 nt, Human
auuauguagcuaaaaauugugu

SEQ ID NO: 425622 - RNA, 22 nt, Human
ugcagggaacuuggacagcuag

SEQ ID NO: 425623 - RNA, 19 nt, Human
aguggcagaucuggaagua

SEQ ID NO: 425624 - RNA, 22 nt, Human
aacaguaaugugguguuggguu

SEQ ID NO: 425625 - RNA, 22 nt, Human
ccaggacucaguggggaaaggg

SEQ ID NO: 425626 - RNA, 22 nt, Human
ugcucugguccucccucggcgc

SEQ ID NO: 425627 - RNA, 22 nt, Human
gaagccaacauuccaaguagaa

SEQ ID NO: 425628 - RNA, 22 nt, Human
ugggcugcugucugcacaugcu

SEQ ID NO: 425629 - RNA, 22 nt, Human
ccagaccacccuggccaugcac

SEQ ID NO: 425630 - RNA, 22 nt, Human
cagacuggccacaucugcacug

SEQ ID NO: 425631 - RNA, 22 nt, Human
aguggcagggcuggcugcugca

SEQ ID NO: 425632 - RNA, 20 nt, Human
gugcaauggcucagucucag

SEQ ID NO: 425633 - RNA, 22 nt, Human
ucacugcaaccucugccuuccg

SEQ ID NO: 425634 - RNA, 19 nt, Human
ggccaggcugacugugguc

SEQ ID NO: 425635 - RNA, 22 nt, Human
uuucacacuagucagaauacca

SEQ ID NO: 425636 - RNA, 22 nt, Human
accagagauggggcuucucugu

SEQ ID NO: 425637 - RNA, 18 nt, Human
gggcuguguucaugccca

SEQ ID NO: 425638 - RNA, 22 nt, Human
acaaggaggucuggggggcccu

SEQ ID NO: 425639 - RNA, 22 nt, Human
gcuucuaucccuccacugcacu

SEQ ID NO: 425640 - RNA, 22 nt, Human
uccuggugucgccuggucaguu

SEQ ID NO: 425641 - RNA, 22 nt, Human
uccauucuaugcuuacauuuau

SEQ ID NO: 425642 - RNA, 23 nt, Human
aagcuuccuucacgucuccuggg

SEQ ID NO: 425643 - RNA, 22 nt, Human
augcaguauaaaucauuucugg

SEQ ID NO: 425644 - RNA, 21 nt, Human
gagcugggcgaggcuccgggg

SEQ ID NO: 425645 - RNA, 22 nt, Human
uaaguucauuagacuacagaua

SEQ ID NO: 425646 - RNA, 22 nt, Human
gccaggcagcuagcaaccccug

SEQ ID NO: 425647 - RNA, 22 nt, Human
ugcccagggauaagccuagaga

SEQ ID NO: 425648 - RNA, 22 nt, Human
uaaaacugcuugguauggucua

SEQ ID NO: 425649 - RNA, 22 nt, Human
gccucugcugacaagauggaca

SEQ ID NO: 425650 - RNA, 22 nt, Human
gcaggcugugaggcucagaugg

SEQ ID NO: 425651 - RNA, 22 nt, Human
aaaugcacagaaaggaugugga

SEQ ID NO: 425652 - RNA, 22 nt, Human
accaucagucauugucaguggg

SEQ ID NO: 425653 - RNA, 22 nt, Human
cagggcuguggaaaacuggugc

SEQ ID NO: 425654 - RNA, 22 nt, Human
cuggcaggucucgcugacgugu

SEQ ID NO: 425655 - RNA, 22 nt, Human
aaaacucugcaguuaguuucua

SEQ ID NO: 425656 - RNA, 22 nt, Human
caggagcaguuagaagcccacu

SEQ ID NO: 425657 - RNA, 22 nt, Human
cuccagcuuuuucccaguuggc

SEQ ID NO: 425658 - RNA, 22 nt, Human
cccagcugcaccucuauggccu

SEQ ID NO: 425659 - RNA, 22 nt, Human
cccagacucaucccugggagcu

SEQ ID NO: 425660 - RNA, 19 nt, Human
aaaguuuuauucucauuug

SEQ ID NO: 425661 - RNA, 22 nt, Human
ugguggcuguugcagaacugag

SEQ ID NO: 425662 - RNA, 22 nt, Human
cucacuguccaacaggcuuuac

SEQ ID NO: 425663 - RNA, 22 nt, Human
aggccaaguagcuagcauugaa

SEQ ID NO: 425664 - RNA, 22 nt, Human
ugggaggacuugugggcuucau

SEQ ID NO: 425665 - RNA, 22 nt, Human
ugcucccaggcucuguggucug

SEQ ID NO: 425666 - RNA, 21 nt, Human
agaaauguaucauucuuuucc

SEQ ID NO: 425667 - RNA, 22 nt, Human
aguaaacauaauuuaccuguag

SEQ ID NO: 425668 - RNA, 22 nt, Human
gaauuucuggacccuuugagaa

SEQ ID NO: 425669 - RNA, 21 nt, Human
uggagcugaauuuuuggcauc

SEQ ID NO: 425670 - RNA, 22 nt, Human
agcaggcuuucaagagucuucu

SEQ ID NO: 425671 - RNA, 19 nt, Human
ugaggggcucacagucuca

SEQ ID NO: 425672 - RNA, 22 nt, Human
gcccagcuccucugcagacccu

SEQ ID NO: 425673 - RNA, 18 nt, Human
uguagagccagguuugcc

SEQ ID NO: 425674 - RNA, 22 nt, Human
agggcugcuauguugauucaga

SEQ ID NO: 425675 - RNA, 22 nt, Human
aaggcagcaccgccuccugaaa

SEQ ID NO: 425676 - RNA, 22 nt, Human
ccaggguuuaaauucugacuau

SEQ ID NO: 425677 - RNA, 22 nt, Human
gggcugacaccacccaggcgca

SEQ ID NO: 425678 - RNA, 22 nt, Human
cugucuccagggcaggugcagg

SEQ ID NO: 425679 - RNA, 22 nt, Human
agaggccacuuugccugugaug

SEQ ID NO: 425680 - RNA, 22 nt, Human
aggcuuccucgugccuuagaua

SEQ ID NO: 425681 - RNA, 22 nt, Human
agggucagcuggcugucagggg

SEQ ID NO: 425682 - RNA, 22 nt, Human
aaaaagguugauccagauuagg

SEQ ID NO: 425683 - RNA, 21 nt, Human
gcugccaccgcgugcuccagg

SEQ ID NO: 425684 - RNA, 20 nt, Human
gcagggcaucuuggccccca

SEQ ID NO: 425685 - RNA, 22 nt, Human
uguacuugaacuugacuguaga

SEQ ID NO: 425686 - RNA, 22 nt, Human
uggggcugugagacuacaggau

SEQ ID NO: 425687 - RNA, 22 nt, Human
aggggugaaagagggcccucaa

SEQ ID NO: 425688 - RNA, 22 nt, Human
cuuauguacacacauauauugu

SEQ ID NO: 425689 - RNA, 22 nt, Human
agggcugggcugcuuguuguca

SEQ ID NO: 425690 - RNA, 22 nt, Human
aggagggcuaggaaaaccagga

SEQ ID NO: 425691 - RNA, 22 nt, Human
gggcugcugccaccagguggau

SEQ ID NO: 425692 - RNA, 22 nt, Human
ugcuggccgugagcucucggga

SEQ ID NO: 425693 - RNA, 22 nt, Human
uggcuccaucauccaugcaaga

SEQ ID NO: 425694 - RNA, 20 nt, Human
uccaugaguuagagacuaua

SEQ ID NO: 425695 - RNA, 22 nt, Human
uugauacaggccuucuagauga

SEQ ID NO: 425696 - RNA, 20 nt, Human
cagagccaagagcagcaucu

SEQ ID NO: 425697 - RNA, 22 nt, Human
agggcugagugggagagaguug

SEQ ID NO: 425698 - RNA, 22 nt, Human
uaagcuauuccugaagaagguu

SEQ ID NO: 425699 - RNA, 22 nt, Human
uucaaugaggauagaacuggau

SEQ ID NO: 425700 - RNA, 22 nt, Human
aagaacaguugggaggugagcc

SEQ ID NO: 425701 - RNA, 22 nt, Human
cccugccuuguuggagccuaug

SEQ ID NO: 425702 - RNA, 22 nt, Human
ccugggcuugcaucugugcugg

SEQ ID NO: 425703 - RNA, 22 nt, Human
agccacagggggugagggacaa

SEQ ID NO: 425704 - RNA, 22 nt, Human
uucuucaauuauuggaaagaaa

SEQ ID NO: 425705 - RNA, 22 nt, Human
ugccagugggugugcagagacu

SEQ ID NO: 425706 - RNA, 18 nt, Human
agcagggcauuuugccau

SEQ ID NO: 425707 - RNA, 22 nt, Human
aaggcuuuuaacuacuguuuua

SEQ ID NO: 425708 - RNA, 22 nt, Human
gaggaggcuaagugggcucugg

SEQ ID NO: 425709 - RNA, 22 nt, Human
ggggauggaggcgugugguccu

SEQ ID NO: 425710 - RNA, 22 nt, Human
ggggagugacgcagggccauag

SEQ ID NO: 425711 - RNA, 22 nt, Human
uggcugggcccccaccugccuc

SEQ ID NO: 425712 - RNA, 22 nt, Human
aauguguacuuuuucaugcuca

SEQ ID NO: 425713 - RNA, 22 nt, Human
ucaccugggagggcugugguag

SEQ ID NO: 425714 - RNA, 22 nt, Human
ggccugaggcgucccagcugug

SEQ ID NO: 425715 - RNA, 22 nt, Human
ugcaauaacccaguaucuguga

SEQ ID NO: 425716 - RNA, 20 nt, Human
agugacagagacuguguggc

SEQ ID NO: 425717 - RNA, 21 nt, Human
gcagaggaaugguauacauaa

SEQ ID NO: 425718 - RNA, 22 nt, Human
ucuuauuauuguuguaaaagca

SEQ ID NO: 425719 - RNA, 22 nt, Human
ggcugccauaacagaguaccac

SEQ ID NO: 425720 - RNA, 22 nt, Human
ucagaggagaccaaggggaaua

SEQ ID NO: 425721 - RNA, 22 nt, Human
ucagauggguuuugaaggaugu

SEQ ID NO: 425722 - RNA, 22 nt, Human
ugaaccagagucuccagugguu

SEQ ID NO: 425723 - RNA, 22 nt, Human
cauggcagagaaggggaacugg

SEQ ID NO: 425724 - RNA, 22 nt, Human
uccuguggagaggacuggaggu

SEQ ID NO: 425725 - RNA, 22 nt, Human
gcagagcacccugcagugguau

SEQ ID NO: 425726 - RNA, 22 nt, Human
cucccacuccuggcucaccaca

SEQ ID NO: 425727 - RNA, 22 nt, Human
gagcagcuagauaaagcccuuc

SEQ ID NO: 425728 - RNA, 22 nt, Human
gccacaggcacuuaagggcugg

SEQ ID NO: 425729 - RNA, 22 nt, Human
ugaacagauggcccagcagagg

SEQ ID NO: 425730 - RNA, 22 nt, Human
aaaagcaguuaucugggaggaa

SEQ ID NO: 425731 - RNA, 21 nt, Human
aauaaaacaguuggugucaau

SEQ ID NO: 425732 - RNA, 22 nt, Human
auaaagauuucuuuuucucuac

SEQ ID NO: 425733 - RNA, 22 nt, Human
uggaggaaaauuacuggggucu

SEQ ID NO: 425734 - RNA, 22 nt, Human
aaagccacguggccuggggagc

SEQ ID NO: 425735 - RNA, 22 nt, Human
uccaggcuccccugcgugcucc

SEQ ID NO: 425736 - RNA, 18 nt, Human
gccugcaggcacgggggu

SEQ ID NO: 425737 - RNA, 22 nt, Human
ggggaccugggcuucaaggguu

SEQ ID NO: 425738 - RNA, 22 nt, Human
caauuucucgaacucuaaucca

SEQ ID NO: 425739 - RNA, 22 nt, Human
ggaggccaucuggcuggaggcu

SEQ ID NO: 425740 - RNA, 20 nt, Human
cagccuccacucacucagcu

SEQ ID NO: 425741 - RNA, 22 nt, Human
agagcuguucaacguagcaaug

SEQ ID NO: 425742 - RNA, 22 nt, Human
gcaaggcugugcacuuugcauu

SEQ ID NO: 425743 - RNA, 22 nt, Human
ugaaaucuuauacuuugguagu

SEQ ID NO: 425744 - RNA, 22 nt, Human
ugugggcaggcccgggucugag

SEQ ID NO: 425745 - RNA, 22 nt, Human
agugcagagagcaauacucuac

SEQ ID NO: 425746 - RNA, 22 nt, Human
augaugguaaauucaguauccg

SEQ ID NO: 425747 - RNA, 22 nt, Human
uggcucagaugcucuuccagug

SEQ ID NO: 425748 - RNA, 22 nt, Human
uccugccuguuuaccuguacuu

SEQ ID NO: 425749 - RNA, 22 nt, Human
caaaguuuaaaguagauuucag

SEQ ID NO: 425750 - RNA, 22 nt, Human
agcaggcuaagggaccuguuua

SEQ ID NO: 425751 - RNA, 22 nt, Human
auuauauugaguauaaccagag

SEQ ID NO: 425752 - RNA, 22 nt, Human
gcuggagcugaguucccugggc

SEQ ID NO: 425753 - RNA, 22 nt, Human
caguagcauguaauaaagacag

SEQ ID NO: 425754 - RNA, 22 nt, Human
agccaggaaugcaugcucugcu

SEQ ID NO: 425755 - RNA, 22 nt, Human
ugucucugcuuuccuugcaggg

SEQ ID NO: 425756 - RNA, 22 nt, Human
ugcuuuauuuuaaauaugccau

SEQ ID NO: 425757 - RNA, 22 nt, Human
aggucacacaacugucagaggc

SEQ ID NO: 425758 - RNA, 22 nt, Human
aaggcacuuuuccugagaugau

SEQ ID NO: 425759 - RNA, 22 nt, Human
uggcugaggcuuuucuuaaaga

SEQ ID NO: 425760 - RNA, 22 nt, Human
aguuacaaacacuaucaguucu

SEQ ID NO: 425761 - RNA, 22 nt, Human
ccuguauuagguagacaacuau

SEQ ID NO: 425762 - RNA, 22 nt, Human
auggcagauggcuggagcaggu

SEQ ID NO: 425763 - RNA, 19 nt, Human
agaaucaggucaggugaca

SEQ ID NO: 425764 - RNA, 22 nt, Human
uccugcagcugaagcucaugug

SEQ ID NO: 425765 - RNA, 22 nt, Human
uucagagccacuucaagucuaa

SEQ ID NO: 425766 - RNA, 22 nt, Human
ggcuguggccagcggggcugag

SEQ ID NO: 425767 - RNA, 22 nt, Human
agccucugcuggcccuggcacu

SEQ ID NO: 425768 - RNA, 22 nt, Human
ccucgcggcacucgggccggau

SEQ ID NO: 425769 - RNA, 22 nt, Human
gccaguuccuguggagucagag

SEQ ID NO: 425770 - RNA, 22 nt, Human
uagaaacauguucuguucuguu

SEQ ID NO: 425771 - RNA, 22 nt, Human
aguguuucccaguaggaugaaa

SEQ ID NO: 425772 - RNA, 22 nt, Human
ggccaagauggaaggagagaug

SEQ ID NO: 425773 - RNA, 22 nt, Human
cugagcacugggcacauagcug

SEQ ID NO: 425774 - RNA, 23 nt, Human
ccagcuccgugagccucgggcuc

SEQ ID NO: 425775 - RNA, 22 nt, Human
gccaggggacgcggagcgacga

SEQ ID NO: 425776 - RNA, 22 nt, Human
ugaccaaagaguugcuuguauu

SEQ ID NO: 425777 - RNA, 22 nt, Human
aaguucaagagugacauauuag

SEQ ID NO: 425778 - RNA, 22 nt, Human
agguaaagacugcaaggagaau

SEQ ID NO: 425779 - RNA, 22 nt, Human
ugggggagccuucacaguagcu

SEQ ID NO: 425780 - RNA, 22 nt, Human
guuauaaaggugauaaugguca

SEQ ID NO: 425781 - RNA, 22 nt, Human
caguacuuaacuuauaggagag

SEQ ID NO: 425782 - RNA, 22 nt, Human
cugggagcccugacuagccugg

SEQ ID NO: 425783 - RNA, 22 nt, Human
caggcccagcccagcccuucga

SEQ ID NO: 425784 - RNA, 22 nt, Human
acaugauucuugauaggcauug

SEQ ID NO: 425785 - RNA, 22 nt, Human
guggugaagccccaucucugcu

SEQ ID NO: 425786 - RNA, 22 nt, Human
gugcaugucggggugcauguca

SEQ ID NO: 425787 - RNA, 19 nt, Human
agcauuuggaauucuacac

SEQ ID NO: 425788 - RNA, 22 nt, Human
cccauuuagauaacaguucaaa

SEQ ID NO: 425789 - RNA, 22 nt, Human
ugagcuggucacuccuucugaa

SEQ ID NO: 425790 - RNA, 22 nt, Human
agggucagugaugagggagccc

SEQ ID NO: 425791 - RNA, 22 nt, Human
ggccagagucuauaugcagaca

SEQ ID NO: 425792 - RNA, 22 nt, Human
ugccuucaaucaggauggucuc

SEQ ID NO: 425793 - RNA, 22 nt, Human
aaaugucuuuaucucauguaac

SEQ ID NO: 425794 - RNA, 20 nt, Human
uaggcagagcugugcagccu

SEQ ID NO: 425795 - RNA, 19 nt, Human
ggcuggcaagugacagugu

SEQ ID NO: 425796 - RNA, 22 nt, Human
auaaggcaagcugucaguuugu

SEQ ID NO: 425797 - RNA, 21 nt, Human
guuauuuuaagugagcuuugc

SEQ ID NO: 425798 - RNA, 22 nt, Human
ggagggcucaauugacuccuga

SEQ ID NO: 425799 - RNA, 19 nt, Human
ucuggcuccgccucuuagu

SEQ ID NO: 425800 - RNA, 22 nt, Human
ucagaggugguaaaggacagca

SEQ ID NO: 425801 - RNA, 22 nt, Human
aggagcuggguuccuuuggugg

SEQ ID NO: 425802 - RNA, 22 nt, Human
gugcaggggaucagguugcagc

SEQ ID NO: 425803 - RNA, 22 nt, Human
ugaagccaaucugccaggcaga

SEQ ID NO: 425804 - RNA, 18 nt, Human
aucuuuccauagcauguu

SEQ ID NO: 425805 - RNA, 22 nt, Human
aagaugauagaucugucaaugu

SEQ ID NO: 425806 - RNA, 22 nt, Human
gaggcccuccagcugucagcug

SEQ ID NO: 425807 - RNA, 22 nt, Human
uucuaguguccuuggacuugcu

SEQ ID NO: 425808 - RNA, 22 nt, Human
uuacaguauuguuaaacucuuu

SEQ ID NO: 425809 - RNA, 22 nt, Human
ugcuguggcaguuuauguauag

SEQ ID NO: 425810 - RNA, 22 nt, Human
agcccaagcauaggagggaggc

SEQ ID NO: 425811 - RNA, 22 nt, Human
gaaugaauagguguccagaugg

SEQ ID NO: 425812 - RNA, 22 nt, Human
gccaugcuugguaugcugugag

SEQ ID NO: 425813 - RNA, 23 nt, Human
gggagaauaugaggaugauggug

SEQ ID NO: 425814 - RNA, 22 nt, Human
gugggccuugcagggugcaggg

SEQ ID NO: 425815 - RNA, 17 nt, Human
gacaagacagaauucau

SEQ ID NO: 425816 - RNA, 19 nt, Human
gaguuauugccagggcaug

SEQ ID NO: 425817 - RNA, 22 nt, Human
gcaggguaggugacagguaguc

SEQ ID NO: 425818 - RNA, 22 nt, Human
uggagcccagggugagaaggag

SEQ ID NO: 425819 - RNA, 22 nt, Human
ugaagcugugggcaguggagcc

SEQ ID NO: 425820 - RNA, 22 nt, Human
auuaaauuagcaaacugugaaa

SEQ ID NO: 425821 - RNA, 22 nt, Human
cuuaaauuggaugaguuaaguu

SEQ ID NO: 425822 - RNA, 22 nt, Human
gcagccagggagagaaccaggg

SEQ ID NO: 425823 - RNA, 20 nt, Human
gacaucauguacacauugcc

SEQ ID NO: 425824 - RNA, 22 nt, Human
ccuccagcugccucagucucuu

SEQ ID NO: 425825 - RNA, 22 nt, Human
ucaggcugugggcacuggccau

SEQ ID NO: 425826 - RNA, 22 nt, Human
ugaaacaaaccaguaauuuugu

SEQ ID NO: 425827 - RNA, 22 nt, Human
aguggcagagguugacugcagu

SEQ ID NO: 425828 - RNA, 22 nt, Human
uauuuucuguggaggaccagau

SEQ ID NO: 425829 - RNA, 22 nt, Human
uagagcuauuuagagcauuuua

SEQ ID NO: 425830 - RNA, 22 nt, Human
aaagaacaucggagugggcggg

SEQ ID NO: 425831 - RNA, 22 nt, Human
ucaaugauuagaguuuagugug

SEQ ID NO: 425832 - RNA, 22 nt, Human
cuggcccauggugagcucuggg

SEQ ID NO: 425833 - RNA, 22 nt, Human
uuuagggaugucagaacaggga

SEQ ID NO: 425834 - RNA, 22 nt, Human
caguacuuuucaaccaguauga

SEQ ID NO: 425835 - RNA, 22 nt, Human
gcuccucugucaaaugagagug

SEQ ID NO: 425836 - RNA, 22 nt, Human
augucuuuuaugauuacgggau

SEQ ID NO: 425837 - RNA, 22 nt, Human
uugaauaguguuuucaguauac

SEQ ID NO: 425838 - RNA, 19 nt, Human
uccugggcugggccagguc

SEQ ID NO: 425839 - RNA, 22 nt, Human
aaaaguauuuugagcacuuuau

SEQ ID NO: 425840 - RNA, 22 nt, Human
ucugagcauugaauuuucuucc

SEQ ID NO: 425841 - RNA, 22 nt, Human
aagacauuuauuugaaucaauu

SEQ ID NO: 425842 - RNA, 22 nt, Human
uucucauggugucuuuauacau

SEQ ID NO: 425843 - RNA, 22 nt, Human
auuauuucucacucacauaaua

SEQ ID NO: 425844 - RNA, 22 nt, Human
ggagccuguggcugcuugaagc

SEQ ID NO: 425845 - RNA, 22 nt, Human
gcagccacuaguuuuccuguuu

SEQ ID NO: 425846 - RNA, 22 nt, Human
gcagggcaggauuugaacccag

SEQ ID NO: 425847 - RNA, 22 nt, Human
acagcuguggucuccuuagugu

SEQ ID NO: 425848 - RNA, 22 nt, Human
ccagagccucaacacagguccu

SEQ ID NO: 425849 - RNA, 22 nt, Human
ccuggcugaaccaaugaagugg

SEQ ID NO: 425850 - RNA, 22 nt, Human
cagcuggcguggagugauugca

SEQ ID NO: 425851 - RNA, 22 nt, Human
agaggggcucaagcaguggucu

SEQ ID NO: 425852 - RNA, 20 nt, Human
caccacagaauuggggacag

SEQ ID NO: 425853 - RNA, 22 nt, Human
ugcagggcauaggguccaguuu

SEQ ID NO: 425854 - RNA, 22 nt, Human
agacagggucuugaucagagcu

SEQ ID NO: 425855 - RNA, 22 nt, Human
cagcagagcugugugggaaggg

SEQ ID NO: 425856 - RNA, 22 nt, Human
agaaaugugagccccuuaucaa

SEQ ID NO: 425857 - RNA, 22 nt, Human
aguccaaagcagaugagggcca

SEQ ID NO: 425858 - RNA, 22 nt, Human
ugcugagcgcauccggcggccg

SEQ ID NO: 425859 - RNA, 22 nt, Human
uuuuaauccucuugguaucuua

SEQ ID NO: 425860 - RNA, 22 nt, Human
cuggccacaugugugcugagca

SEQ ID NO: 425861 - RNA, 22 nt, Human
cacugaagguaggaccaaggcu

SEQ ID NO: 425862 - RNA, 22 nt, Human
acaguguccuuguggucccugu

SEQ ID NO: 425863 - RNA, 22 nt, Human
ugagcuggaaucuucuugacug

SEQ ID NO: 425864 - RNA, 22 nt, Human
aggcgcagacauacagggucug

SEQ ID NO: 425865 - RNA, 22 nt, Human
gggcuggcucccagguguugaa

SEQ ID NO: 425866 - RNA, 22 nt, Human
gcaaaaaccacaauuacuuuua

SEQ ID NO: 425867 - RNA, 22 nt, Human
uguaauggaagugggauugcau

SEQ ID NO: 425868 - RNA, 22 nt, Human
agauguggccggcuagggagag

SEQ ID NO: 425869 - RNA, 22 nt, Human
ggugaggaaagauggugacagu

SEQ ID NO: 425870 - RNA, 22 nt, Human
cugaggcauguuacaggacaua

SEQ ID NO: 425871 - RNA, 20 nt, Human
gagccuuccccucaccacug

SEQ ID NO: 425872 - RNA, 22 nt, Human
ucuucauuccguagauauuuau

SEQ ID NO: 425873 - RNA, 22 nt, Human
aagagcaucgguggagccccca

SEQ ID NO: 425874 - RNA, 21 nt, Human
ggcaggauggcaguggacccc

SEQ ID NO: 425875 - RNA, 22 nt, Human
cacccaggcuagagugcagugg

SEQ ID NO: 425876 - RNA, 22 nt, Human
agcugcagucaagcugggccac

SEQ ID NO: 425877 - RNA, 22 nt, Human
cugccuguuuucugauagauuu

SEQ ID NO: 425878 - RNA, 22 nt, Human
acaaaugccauauauaaauucu

SEQ ID NO: 425879 - RNA, 17 nt, Human
aaaauucuguaaagagg

SEQ ID NO: 425880 - RNA, 18 nt, Human
gcagugaagaaagagcuu

SEQ ID NO: 425881 - RNA, 22 nt, Human
ccugccaggccagugagcuucc

SEQ ID NO: 425882 - RNA, 22 nt, Human
cagcuuuggcccagucgggagg

SEQ ID NO: 425883 - RNA, 22 nt, Human
ucucugagcccaauguagcaau

SEQ ID NO: 425884 - RNA, 18 nt, Human
aggcagcagcaucuucuc

SEQ ID NO: 425885 - RNA, 22 nt, Human
uagacagauuucuuguuagaca

SEQ ID NO: 425886 - RNA, 22 nt, Human
ccucaggauacaggagccacag

SEQ ID NO: 425887 - RNA, 19 nt, Human
cugcagggaugugcagagu

SEQ ID NO: 425888 - RNA, 22 nt, Human
acugggccuggauuggcguguc

SEQ ID NO: 425889 - RNA, 22 nt, Human
ucuggagcaacagagcaggaca

SEQ ID NO: 425890 - RNA, 20 nt, Human
auuccauaguuggcacuuuu

SEQ ID NO: 425891 - RNA, 22 nt, Human
uuucucauagucaugccucuua

SEQ ID NO: 425892 - RNA, 22 nt, Human
cuggagagauccuccugaaaaa

SEQ ID NO: 425893 - RNA, 22 nt, Human
ggagcugaaggggugggcucag

SEQ ID NO: 425894 - RNA, 22 nt, Human
ggcauggcucggagucagaaca

SEQ ID NO: 425895 - RNA, 19 nt, Human
aggcucugagcuccuggag

SEQ ID NO: 425896 - RNA, 22 nt, Human
cagugaaguuuaaaguguagau

SEQ ID NO: 425897 - RNA, 22 nt, Human
gggggcucugacucccucagcu

SEQ ID NO: 425898 - RNA, 21 nt, Human
auuuucauuaauucagugugg

SEQ ID NO: 425899 - RNA, 22 nt, Human
caccagguuccgggcagagcug

SEQ ID NO: 425900 - RNA, 22 nt, Human
gcagauggacuguaugaccuga

SEQ ID NO: 425901 - RNA, 22 nt, Human
uggggacacagagguucguugg

SEQ ID NO: 425902 - RNA, 22 nt, Human
cuggcaggaagaggaaagguca

SEQ ID NO: 425903 - RNA, 17 nt, Human
cucugcagugcauggcu

SEQ ID NO: 425904 - RNA, 22 nt, Human
acacagggcagagagcuggcuc

SEQ ID NO: 425905 - RNA, 22 nt, Human
ggcuccuguccccucagcugcu

SEQ ID NO: 425906 - RNA, 22 nt, Human
cagguggaucucuaaggacuga

SEQ ID NO: 425907 - RNA, 22 nt, Human
gaguucaguguuucuaguagug

SEQ ID NO: 425908 - RNA, 22 nt, Human
ccagagccuggcaucugcauaa

SEQ ID NO: 425909 - RNA, 22 nt, Human
ugcccaaguguuuggcugaguc

SEQ ID NO: 425910 - RNA, 18 nt, Human
ugcccagaaaagcaggga

SEQ ID NO: 425911 - RNA, 22 nt, Human
aggucagaagugccagggaauu

SEQ ID NO: 425912 - RNA, 22 nt, Human
agcgugaaggcgggcagucggc

SEQ ID NO: 425913 - RNA, 20 nt, Human
ccagaagagaugaucaucca

SEQ ID NO: 425914 - RNA, 22 nt, Human
cugcuuuguaaaauagacauaa

SEQ ID NO: 425915 - RNA, 22 nt, Human
aaacucuuuccacgauuacuuu

SEQ ID NO: 425916 - RNA, 22 nt, Human
ggcugagcccccucugcguagg

SEQ ID NO: 425917 - RNA, 22 nt, Human
ugcagugggccggaggccaggg

SEQ ID NO: 425918 - RNA, 22 nt, Human
ugaggccaaugacccugggcag

SEQ ID NO: 425919 - RNA, 22 nt, Human
guggauggacaugggcaagagg

SEQ ID NO: 425920 - RNA, 22 nt, Human
aacagcagggggaccugcuggu

SEQ ID NO: 425921 - RNA, 20 nt, Human
aucagcaacugccacucagu

SEQ ID NO: 425922 - RNA, 22 nt, Human
cauguacaaaaggcaaaugccu

SEQ ID NO: 425923 - RNA, 22 nt, Human
aaguuuaagguggaaguggugg

SEQ ID NO: 425924 - RNA, 22 nt, Human
ucagugcuucggcgagcaccua

SEQ ID NO: 425925 - RNA, 22 nt, Human
uuccagagaaaagguuuauuuc

SEQ ID NO: 425926 - RNA, 22 nt, Human
aggagcuggaguccaggcaagu

SEQ ID NO: 425927 - RNA, 22 nt, Human
auuuucauggcuucugcucagu

SEQ ID NO: 425928 - RNA, 22 nt, Human
ugccaggcacgugagaguggcc

SEQ ID NO: 425929 - RNA, 22 nt, Human
gaaaaaugagcugaugucaggg

SEQ ID NO: 425930 - RNA, 22 nt, Human
ugcauuaugcuugugcuguaua

SEQ ID NO: 425931 - RNA, 22 nt, Human
ucacauuuguguuuuauuagag

SEQ ID NO: 425932 - RNA, 19 nt, Human
ucccagagucuagagguug

SEQ ID NO: 425933 - RNA, 19 nt, Human
guuuuucccagacgaggca

SEQ ID NO: 425934 - RNA, 22 nt, Human
ccugggagagccaucuguggcc

SEQ ID NO: 425935 - RNA, 18 nt, Human
aggcacuggaauuaaggg

SEQ ID NO: 425936 - RNA, 22 nt, Human
agccuggcccugcugaacucug

SEQ ID NO: 425937 - RNA, 21 nt, Human
ucacuagugccuucugucauu

SEQ ID NO: 425938 - RNA, 22 nt, Human
ucugaaggucugagaaccagga

SEQ ID NO: 425939 - RNA, 21 nt, Human
uaaauaauaaguugcugagau

SEQ ID NO: 425940 - RNA, 22 nt, Human
aggacugggugcagagggcauc

SEQ ID NO: 425941 - RNA, 22 nt, Human
uuccagaauuuuguucugcuug

SEQ ID NO: 425942 - RNA, 20 nt, Human
cagagcugggauuugaacac

SEQ ID NO: 425943 - RNA, 22 nt, Human
uugaggagucaggggcacggaa

SEQ ID NO: 425944 - RNA, 23 nt, Human
aaauuauugcucuucaauugccu

SEQ ID NO: 425945 - RNA, 22 nt, Human
ggccucugcaacuggcuguggc

SEQ ID NO: 425946 - RNA, 22 nt, Human
ggcacugagaacaggcugacuu

SEQ ID NO: 425947 - RNA, 22 nt, Human
gcugggagcaaguacucaucuu

SEQ ID NO: 425948 - RNA, 22 nt, Human
gcucccagcauugcuucccagg

SEQ ID NO: 425949 - RNA, 22 nt, Human
ggcccacacugacagcugagcu

SEQ ID NO: 425950 - RNA, 22 nt, Human
cugguucauccccuuccaggaa

SEQ ID NO: 425951 - RNA, 22 nt, Human
agcuuuaucccuugcccaucga

SEQ ID NO: 425952 - RNA, 22 nt, Human
gacccuguuucuacaaauaauu

SEQ ID NO: 425953 - RNA, 22 nt, Human
aaucagucauuagcucugaccu

SEQ ID NO: 425954 - RNA, 22 nt, Human
uggaagagggagcuggguggcc

SEQ ID NO: 425955 - RNA, 22 nt, Human
gccuaauaacuagcuguguaac

SEQ ID NO: 425956 - RNA, 22 nt, Human
agggauggaagcucgucugcaa

SEQ ID NO: 425957 - RNA, 22 nt, Human
gcaggcagagucaauuugaucc

SEQ ID NO: 425958 - RNA, 22 nt, Human
ugccucugggugaccaaggagc

SEQ ID NO: 425959 - RNA, 22 nt, Human
uuauuguuuacuaguuugcaga

SEQ ID NO: 425960 - RNA, 21 nt, Human
acucaggagacuaacuauguc

SEQ ID NO: 425961 - RNA, 22 nt, Human
aguaaaaucuuaagcacagugg

SEQ ID NO: 425962 - RNA, 22 nt, Human
uucuggagcuaaaguccacucu

SEQ ID NO: 425963 - RNA, 22 nt, Human
ccagcuccagguagaugggcag

SEQ ID NO: 425964 - RNA, 18 nt, Human
ugggauggagaguaacug

SEQ ID NO: 425965 - RNA, 22 nt, Human
gcaaaaaccacaauuacuuuug

SEQ ID NO: 425966 - RNA, 22 nt, Human
acagcuuuaucucagggaucag

SEQ ID NO: 425967 - RNA, 22 nt, Human
gaggcugggaaguccaagauca

SEQ ID NO: 425968 - RNA, 22 nt, Human
agcagagcuauucuugugcaau

SEQ ID NO: 425969 - RNA, 22 nt, Human
agggcacaagacucugagcccc

SEQ ID NO: 425970 - RNA, 22 nt, Human
gcuggccugcaaagcccggcug

SEQ ID NO: 425971 - RNA, 22 nt, Human
agaaggcagaugggacggagca

SEQ ID NO: 425972 - RNA, 22 nt, Human
gcagaugguggggcaggaaaau

SEQ ID NO: 425973 - RNA, 22 nt, Human
aucugccugagucuagguuuuc

SEQ ID NO: 425974 - RNA, 19 nt, Human
uguuuuguuaaagcagucc

SEQ ID NO: 425975 - RNA, 22 nt, Human
cuuaggaacgcucugccuagug

SEQ ID NO: 425976 - RNA, 22 nt, Human
cccagacugcagagcgggcaga

SEQ ID NO: 425977 - RNA, 22 nt, Human
cagcuggcuccaccucugggcu

SEQ ID NO: 425978 - RNA, 22 nt, Human
ugggccaggauuucaagacccu

SEQ ID NO: 425979 - RNA, 22 nt, Human
ugcaggugcguuuucaagccuc

SEQ ID NO: 425980 - RNA, 22 nt, Human
ugggccaggcaugugaucagca

SEQ ID NO: 425981 - RNA, 22 nt, Human
uggggcagaguaggauuuuggc

SEQ ID NO: 425982 - RNA, 22 nt, Human
cuguggcuaugguguacauacu

SEQ ID NO: 425983 - RNA, 22 nt, Human
uacauguuugguaaaugauggc

SEQ ID NO: 425984 - RNA, 22 nt, Human
ugauuuuuagcuauucugaaga

SEQ ID NO: 425985 - RNA, 22 nt, Human
gggagaaggagcuaguucuuga

SEQ ID NO: 425986 - RNA, 22 nt, Human
aaaagcagagacucuggagcua

SEQ ID NO: 425987 - RNA, 22 nt, Human
cauuugcaagagauaaauguuu

SEQ ID NO: 425988 - RNA, 22 nt, Human
gggagagagaaaacguggcgca

SEQ ID NO: 425989 - RNA, 22 nt, Human
ugggcucucuggcaggaaggcu

SEQ ID NO: 425990 - RNA, 22 nt, Human
ugcagggcaguuuguuucggca

SEQ ID NO: 425991 - RNA, 22 nt, Human
auagucuuagucuauaguuuug

SEQ ID NO: 425992 - RNA, 22 nt, Human
gccuucaguagugucagcugua

SEQ ID NO: 425993 - RNA, 22 nt, Human
agccaggauggucucgaucggc

SEQ ID NO: 425994 - RNA, 22 nt, Human
agacuguagggauagaggucuu

SEQ ID NO: 425995 - RNA, 23 nt, Human
ugaguucucaucuuggcuucuau

SEQ ID NO: 425996 - RNA, 22 nt, Human
uaggggugaggccaggcaucag

SEQ ID NO: 425997 - RNA, 20 nt, Human
gcugccuguuucuguaagua

SEQ ID NO: 425998 - RNA, 22 nt, Human
aaacagcugucauuguuuuaaa

SEQ ID NO: 425999 - RNA, 22 nt, Human
ucuguacauuuggggaccccag

SEQ ID NO: 426000 - RNA, 22 nt, Human
guacauguugguuguuuccagu

SEQ ID NO: 426001 - RNA, 22 nt, Human
ugauuucccucaucauaacaga

SEQ ID NO: 426002 - RNA, 22 nt, Human
gcccucugcacagcucugagca

SEQ ID NO: 426003 - RNA, 22 nt, Human
guuugcauauuugcacaggaau

SEQ ID NO: 426004 - RNA, 22 nt, Human
cugccuguuagucuagcaguua

SEQ ID NO: 426005 - RNA, 22 nt, Human
uauuagguaaaggacuugcagg

SEQ ID NO: 426006 - RNA, 22 nt, Human
aaaugaacucuuccugcauccc

SEQ ID NO: 426007 - RNA, 22 nt, Human
gcuggggagcaagaguagugag

SEQ ID NO: 426008 - RNA, 22 nt, Human
cgagaguuagcuaggagucaca

SEQ ID NO: 426009 - RNA, 22 nt, Human
ccaggccuagccccugagggua

SEQ ID NO: 426010 - RNA, 22 nt, Human
cugaagagcucuccuguccccu

SEQ ID NO: 426011 - RNA, 22 nt, Human
gcuaccugagcaagagcuucaa

SEQ ID NO: 426012 - RNA, 22 nt, Human
aguacuuuacuucuuacaguuu

SEQ ID NO: 426013 - RNA, 22 nt, Human
gcagugaagccagaucugaaau

SEQ ID NO: 426014 - RNA, 22 nt, Human
ugucucugagaugacucccacc

SEQ ID NO: 426015 - RNA, 22 nt, Human
uugcagagcaguaggaauauag

SEQ ID NO: 426016 - RNA, 22 nt, Human
agcuggccuccgggugccuggg

SEQ ID NO: 426017 - RNA, 22 nt, Human
agccucucuuuauucccagcua

SEQ ID NO: 426018 - RNA, 22 nt, Human
ccacagaaaguugucuagagua

SEQ ID NO: 426019 - RNA, 22 nt, Human
agccagcagggcuuagaggaca

SEQ ID NO: 426020 - RNA, 22 nt, Human
uguacuuccccaaugacagcac

SEQ ID NO: 426021 - RNA, 22 nt, Human
cugcagcugucucuacugggca

SEQ ID NO: 426022 - RNA, 22 nt, Human
auuagggaaggauuuggccuga

SEQ ID NO: 426023 - RNA, 22 nt, Human
acagaggccccgugggagagcc

SEQ ID NO: 426024 - RNA, 22 nt, Human
ggccugagucacaucaggagag

SEQ ID NO: 426025 - RNA, 20 nt, Human
gcaggcagggaaugggggug

SEQ ID NO: 426026 - RNA, 22 nt, Human
ggaagggccucgggcgugggac

SEQ ID NO: 426027 - RNA, 22 nt, Human
ggacucagcagccaggaguggc

SEQ ID NO: 426028 - RNA, 22 nt, Human
cugagaauuacucugaugagua

SEQ ID NO: 426029 - RNA, 22 nt, Human
gaaaaaugcuccaaaucugugg

SEQ ID NO: 426030 - RNA, 20 nt, Human
uguuaaaggacacuugcuuu

SEQ ID NO: 426031 - RNA, 22 nt, Human
uauagagguggaaacugagguu

SEQ ID NO: 426032 - RNA, 22 nt, Human
ucucaagagggaggcaaucaug

SEQ ID NO: 426033 - RNA, 22 nt, Human
ggucacaggggagaagagugau

SEQ ID NO: 426034 - RNA, 22 nt, Human
gggagaaggaggacugugcugu

SEQ ID NO: 426035 - RNA, 22 nt, Human
ugccaggcaacugcccagccau

SEQ ID NO: 426036 - RNA, 22 nt, Human
caacagaaggaagcagggucag

SEQ ID NO: 426037 - RNA, 22 nt, Human
ucuggagaacuugcaagaggau

SEQ ID NO: 426038 - RNA, 20 nt, Human
uccaguggccugaaucugga

SEQ ID NO: 426039 - RNA, 22 nt, Human
cugggcugugguguggcccaaa

SEQ ID NO: 426040 - RNA, 22 nt, Human
gcaggugaaugauggacuagga

SEQ ID NO: 426041 - RNA, 22 nt, Human
agcugccacaugcccaagggca

SEQ ID NO: 426042 - RNA, 22 nt, Human
ccugccuguaagauggguacaa

SEQ ID NO: 426043 - RNA, 22 nt, Human
ggcccugugguuuugcaaaguc

SEQ ID NO: 426044 - RNA, 22 nt, Human
caggcagcgcucguggccuggc

SEQ ID NO: 426045 - RNA, 22 nt, Human
gggcugcugcccaggaggcacc

SEQ ID NO: 426046 - RNA, 22 nt, Human
guuguacagcauccagugcaga

SEQ ID NO: 426047 - RNA, 22 nt, Human
uugguuuagagagugugguuac

SEQ ID NO: 426048 - RNA, 22 nt, Human
cagagcugguguuacaagucca

SEQ ID NO: 426049 - RNA, 22 nt, Human
ccuggccagccagggcuggggu

SEQ ID NO: 426050 - RNA, 22 nt, Human
ucacagacaauuguuuuggugu

SEQ ID NO: 426051 - RNA, 22 nt, Human
gcggcaggaagagcgcagcccc

SEQ ID NO: 426052 - RNA, 22 nt, Human
ugcagaagcagagaguugccaa

SEQ ID NO: 426053 - RNA, 22 nt, Human
uuuuuaagagauucuccagucu

SEQ ID NO: 426054 - RNA, 22 nt, Human
ccggggacuuaaagugaaggaa

SEQ ID NO: 426055 - RNA, 22 nt, Human
gucuccugagacugcagucacc

SEQ ID NO: 426056 - RNA, 19 nt, Human
ggccuggauuuagggcucc

SEQ ID NO: 426057 - RNA, 22 nt, Human
gcucuggacccuggaguggcug

SEQ ID NO: 426058 - RNA, 22 nt, Human
gguggaaggccuggaaggaggc

SEQ ID NO: 426059 - RNA, 22 nt, Human
aagaauuuuccagcaugucagu

SEQ ID NO: 426060 - RNA, 22 nt, Human
aacuguaaagguugagugguaa

SEQ ID NO: 426061 - RNA, 21 nt, Human
ugcuggccucaagggugacuu

SEQ ID NO: 426062 - RNA, 22 nt, Human
cauugaaauauggaaacugaug

SEQ ID NO: 426063 - RNA, 22 nt, Human
aaaugcacucugcuucugugac

SEQ ID NO: 426064 - RNA, 22 nt, Human
guuugaaaaaagcaguauguaa

SEQ ID NO: 426065 - RNA, 22 nt, Human
cuggacuuuggcccaucugcca

SEQ ID NO: 426066 - RNA, 21 nt, Human
ugaggcuguuguaccagggag

SEQ ID NO: 426067 - RNA, 22 nt, Human
ugacagaaauaguucuuaauuu

SEQ ID NO: 426068 - RNA, 22 nt, Human
gggcugcugccaaucacagccu

SEQ ID NO: 426069 - RNA, 22 nt, Human
agauacaucauuuauaccuuca

SEQ ID NO: 426070 - RNA, 22 nt, Human
gcagaagcugggcagcgaggug

SEQ ID NO: 426071 - RNA, 22 nt, Human
aaacauugcuaaauaaugcugc

SEQ ID NO: 426072 - RNA, 22 nt, Human
acuuuguauaagacaauaaaga

SEQ ID NO: 426073 - RNA, 22 nt, Human
uggcugaguuacgaacagagca

SEQ ID NO: 426074 - RNA, 22 nt, Human
uccagugguacauggagacacu

SEQ ID NO: 426075 - RNA, 22 nt, Human
ucuuuacaguccucugucaauc

SEQ ID NO: 426076 - RNA, 22 nt, Human
gucaggaucaaauugaaguuau

SEQ ID NO: 426077 - RNA, 22 nt, Human
acugcagccuagggaccacagu

SEQ ID NO: 426078 - RNA, 22 nt, Human
cuucuugcugggggccucagug

SEQ ID NO: 426079 - RNA, 22 nt, Human
ucauuucucugagucugauaau

SEQ ID NO: 426080 - RNA, 22 nt, Human
uccaggcacuauauauacuuuu

SEQ ID NO: 426081 - RNA, 20 nt, Human
ugccaggcacggagugcaug

SEQ ID NO: 426082 - RNA, 22 nt, Human
gcucucagguacaaagcugugu

SEQ ID NO: 426083 - RNA, 22 nt, Human
ugcugucuguuuacuggcuaua

SEQ ID NO: 426084 - RNA, 22 nt, Human
aaaucaguucacguucugaggu

SEQ ID NO: 426085 - RNA, 22 nt, Human
ucauguaaguauagaaagcagu

SEQ ID NO: 426086 - RNA, 22 nt, Human
uuugucauaucacacaauuuug

SEQ ID NO: 426087 - RNA, 22 nt, Human
cccagcuccuuggaugggcagg

SEQ ID NO: 426088 - RNA, 22 nt, Human
cccaaggccuucaagccagcuc

SEQ ID NO: 426089 - RNA, 23 nt, Human
agagcuuagggaauucacaugag

SEQ ID NO: 426090 - RNA, 22 nt, Human
acuccugggugcugaccagcgu

SEQ ID NO: 426091 - RNA, 23 nt, Human
gaguguucauagcaggcucuugc

SEQ ID NO: 426092 - RNA, 22 nt, Human
ggcugagggccagggcuagucu

SEQ ID NO: 426093 - RNA, 22 nt, Human
uggggagugaugccucggauaa

SEQ ID NO: 426094 - RNA, 22 nt, Human
cgagcaugaugacggcuguggc

SEQ ID NO: 426095 - RNA, 22 nt, Human
agccccaguaagggagggccug

SEQ ID NO: 426096 - RNA, 22 nt, Human
ggcugggcaaacaagacucuuc

SEQ ID NO: 426097 - RNA, 20 nt, Human
ucccaggcuccacccuagac

SEQ ID NO: 426098 - RNA, 22 nt, Human
ucugaaauguucucuuguuuug

SEQ ID NO: 426099 - RNA, 22 nt, Human
ucuuccagcaaugugaaaucac

SEQ ID NO: 426100 - RNA, 22 nt, Human
ugcauuauuugcaugugccugu

SEQ ID NO: 426101 - RNA, 22 nt, Human
cugugggcugaaagugcucccg

SEQ ID NO: 426102 - RNA, 22 nt, Human
auugaaagauaggcuacugugg

SEQ ID NO: 426103 - RNA, 22 nt, Human
aggcugaaaacgagauggcaau

SEQ ID NO: 426104 - RNA, 22 nt, Human
guggcugguuuccugcaugcaa

SEQ ID NO: 426105 - RNA, 22 nt, Human
augguuuguaacccaauacucc

SEQ ID NO: 426106 - RNA, 22 nt, Human
cucucugcuguauccuuaggcu

SEQ ID NO: 426107 - RNA, 22 nt, Human
ugagcagaacacgggauccaug

SEQ ID NO: 426108 - RNA, 22 nt, Human
uugcacuccagcccgagcaaca

SEQ ID NO: 426109 - RNA, 22 nt, Human
accugcaggggugcucucuggg

SEQ ID NO: 426110 - RNA, 16 nt, Human
ggcaccagugaacaca

SEQ ID NO: 426111 - RNA, 22 nt, Human
acuguggcgucaggaagaaauu

SEQ ID NO: 426112 - RNA, 22 nt, Human
gugcauuugacgaauacucacu

SEQ ID NO: 426113 - RNA, 22 nt, Human
gagucacaaagccuuucuuauu

SEQ ID NO: 426114 - RNA, 22 nt, Human
ucaggaaagaguguauccauca

SEQ ID NO: 426115 - RNA, 22 nt, Human
ugcauugcaguuaacucaguau

SEQ ID NO: 426116 - RNA, 22 nt, Human
uccuuccuggggucucugcugc

SEQ ID NO: 426117 - RNA, 22 nt, Human
uagcacauaacuuagaauaguu

SEQ ID NO: 426118 - RNA, 22 nt, Human
cccugcagccggccagcucauu

SEQ ID NO: 426119 - RNA, 22 nt, Human
aggagaguaccauugggccgca

SEQ ID NO: 426120 - RNA, 22 nt, Human
gcccugggauuggguggaggcu

SEQ ID NO: 426121 - RNA, 22 nt, Human
aaagauucgagcgauguauaaa

SEQ ID NO: 426122 - RNA, 22 nt, Human
uccucaggaugugggguagaau

SEQ ID NO: 426123 - RNA, 21 nt, Human
aggagcuguguuagcuggucg

SEQ ID NO: 426124 - RNA, 22 nt, Human
acuguacuuuucuuggcuagau

SEQ ID NO: 426125 - RNA, 22 nt, Human
acgcagaagggccuggcgugcc

SEQ ID NO: 426126 - RNA, 22 nt, Human
ugcuuuauggagcccaucucau

SEQ ID NO: 426127 - RNA, 22 nt, Human
ugggcuggagcuuguugcuucc

SEQ ID NO: 426128 - RNA, 22 nt, Human
uggcccucagucuugcuccugc

SEQ ID NO: 426129 - RNA, 22 nt, Human
aguuucuauuuucaugucuguu

SEQ ID NO: 426130 - RNA, 22 nt, Human
gagccugaaauacaggucacug

SEQ ID NO: 426131 - RNA, 22 nt, Human
aguauggggcugugugugcaca

SEQ ID NO: 426132 - RNA, 22 nt, Human
agaagugccauacuguggucca

SEQ ID NO: 426133 - RNA, 22 nt, Human
aagaacauguuaaaagauucac

SEQ ID NO: 426134 - RNA, 22 nt, Human
cauuagggacugaggaauaagg

SEQ ID NO: 426135 - RNA, 22 nt, Human
uggaaguggcagaaaaugaaca

SEQ ID NO: 426136 - RNA, 22 nt, Human
cacauuuaauccuuuauaagua

SEQ ID NO: 426137 - RNA, 22 nt, Human
cuucaucaacucuaacaaaugu

SEQ ID NO: 426138 - RNA, 22 nt, Human
caggccuggcugcagcucgccu

SEQ ID NO: 426139 - RNA, 22 nt, Human
gaaggccuaggaaggaagccuu

SEQ ID NO: 426140 - RNA, 22 nt, Human
uauauguguggauucuuguaga

SEQ ID NO: 426141 - RNA, 22 nt, Human
caggaaggcgcggcugugccug

SEQ ID NO: 426142 - RNA, 22 nt, Human
ccagcaugagacgaugaugaag

SEQ ID NO: 426143 - RNA, 22 nt, Human
gcucacuggccugaagaggacg

SEQ ID NO: 426144 - RNA, 22 nt, Human
uccaggcaugguguaauuuugc

SEQ ID NO: 426145 - RNA, 22 nt, Human
ccucaggggucacugugaggag

SEQ ID NO: 426146 - RNA, 22 nt, Human
cagcuggaggagcagcuuccag

SEQ ID NO: 426147 - RNA, 22 nt, Human
agauggggcucaguguggaggc

SEQ ID NO: 426148 - RNA, 22 nt, Human
aaagaagguagggcuggugacu

SEQ ID NO: 426149 - RNA, 22 nt, Human
ugcuagaaaucugaaacuagca

SEQ ID NO: 426150 - RNA, 22 nt, Human
ggcucugcuucagaaggcucau

SEQ ID NO: 426151 - RNA, 22 nt, Human
auauuugucaauucacuguuca

SEQ ID NO: 426152 - RNA, 22 nt, Human
auacaaaguauuaauccuggau

SEQ ID NO: 426153 - RNA, 22 nt, Human
agucugcacucagguggagguc

SEQ ID NO: 426154 - RNA, 22 nt, Human
gcucugugcaguucagggacac

SEQ ID NO: 426155 - RNA, 22 nt, Human
aaaguucaugguguuauagaaa

SEQ ID NO: 426156 - RNA, 22 nt, Human
ggagaaggaagaaagcuacuau

SEQ ID NO: 426157 - RNA, 22 nt, Human
agggacuggcucucugagcagg

SEQ ID NO: 426158 - RNA, 22 nt, Human
uagcagugccaggauuuugcug

SEQ ID NO: 426159 - RNA, 22 nt, Human
agaguuaagacguacaugagug

SEQ ID NO: 426160 - RNA, 21 nt, Human
agccuggcccagggggaggcu

SEQ ID NO: 426161 - RNA, 22 nt, Human
cagggacaugacuggucucugu

SEQ ID NO: 426162 - RNA, 22 nt, Human
cagccagguaugggcgugcggg

SEQ ID NO: 426163 - RNA, 22 nt, Human
cuguccuugcuggccagguaug

SEQ ID NO: 426164 - RNA, 22 nt, Human
ucacacacauuugcugucugau

SEQ ID NO: 426165 - RNA, 22 nt, Human
gcaggcuccaggccggccccuu

SEQ ID NO: 426166 - RNA, 22 nt, Human
aggugagguuugggagguguca

SEQ ID NO: 426167 - RNA, 22 nt, Human
uaaugcaguacugauauaaaca

SEQ ID NO: 426168 - RNA, 22 nt, Human
uuccaggacaagauguuucagg

SEQ ID NO: 426169 - RNA, 22 nt, Human
ugcugccacaaauucagcugcc

SEQ ID NO: 426170 - RNA, 22 nt, Human
gcagggcugcugaaacuuguuu

SEQ ID NO: 426171 - RNA, 22 nt, Human
ucuuggagaauggcagagaagc

SEQ ID NO: 426172 - RNA, 22 nt, Human
aucaggauccaccuugagccug

SEQ ID NO: 426173 - RNA, 22 nt, Human
agcaggugacagggcuguggug

SEQ ID NO: 426174 - RNA, 22 nt, Human
acaggcaggcuucggccagagc

SEQ ID NO: 426175 - RNA, 22 nt, Human
gggcugagacgauggggucuuc

SEQ ID NO: 426176 - RNA, 22 nt, Human
aguugaagguuggcugauccau

SEQ ID NO: 426177 - RNA, 22 nt, Human
ucuuugcaggagcccuuugaac

SEQ ID NO: 426178 - RNA, 22 nt, Human
agccuucagcaguucaggugcc

SEQ ID NO: 426179 - RNA, 22 nt, Human
ucucuggaagcgcagaucuguu

SEQ ID NO: 426180 - RNA, 22 nt, Human
ggcagcucacugauuagcaauu

SEQ ID NO: 426181 - RNA, 22 nt, Human
cagccaggagccucugcaacua

SEQ ID NO: 426182 - RNA, 22 nt, Human
gcagagcucaugccugcaccuc

SEQ ID NO: 426183 - RNA, 22 nt, Human
gugcugcucacaucuggaggua

SEQ ID NO: 426184 - RNA, 23 nt, Human
cccagcagagaugaggagggguc

SEQ ID NO: 426185 - RNA, 22 nt, Human
ggguggaggagaacaggcccca

SEQ ID NO: 426186 - RNA, 22 nt, Human
cauccaggcaccacaaccagcu

SEQ ID NO: 426187 - RNA, 19 nt, Human
ggaaacaggggccagagga

SEQ ID NO: 426188 - RNA, 22 nt, Human
caacauuucaaggucuuuagga

SEQ ID NO: 426189 - RNA, 22 nt, Human
cccugcagccuugcaugccuuc

SEQ ID NO: 426190 - RNA, 22 nt, Human
uuucuagaggcuccaggggagu

SEQ ID NO: 426191 - RNA, 22 nt, Human
gacccaggguuucugcacaggg

SEQ ID NO: 426192 - RNA, 19 nt, Human
acaaagcugugagcagcuu

SEQ ID NO: 426193 - RNA, 22 nt, Human
uccauugucuuugguccuagcc

SEQ ID NO: 426194 - RNA, 22 nt, Human
agggcuccgggcaggcgaugga

SEQ ID NO: 426195 - RNA, 22 nt, Human
gaggcuggcagaaaagcacagg

SEQ ID NO: 426196 - RNA, 22 nt, Human
cagucccaugagcccagaacau

SEQ ID NO: 426197 - RNA, 22 nt, Human
gggagccuugggagugccagcc

SEQ ID NO: 426198 - RNA, 22 nt, Human
caaagccaggcuuucuaaugua

SEQ ID NO: 426199 - RNA, 22 nt, Human
uccugcagccaagggucaucga

SEQ ID NO: 426200 - RNA, 22 nt, Human
gcugucuccauagcuguguguc

SEQ ID NO: 426201 - RNA, 22 nt, Human
aggagucacucagggcuucauc

SEQ ID NO: 426202 - RNA, 22 nt, Human
agcuggguggagggcccacggu

SEQ ID NO: 426203 - RNA, 22 nt, Human
uagaaacacagaucugguguca

SEQ ID NO: 426204 - RNA, 22 nt, Human
gcucucuguuauuaagaucuuu

SEQ ID NO: 426205 - RNA, 22 nt, Human
gcagcuuucugcaaugucaucc

SEQ ID NO: 426206 - RNA, 22 nt, Human
agggccuggcuucacuuucuca

SEQ ID NO: 426207 - RNA, 22 nt, Human
gcugcagcuguaggacacaauu

SEQ ID NO: 426208 - RNA, 22 nt, Human
aggugcagcaugaguccaacgg

SEQ ID NO: 426209 - RNA, 22 nt, Human
gcaagcaguuguggcuucugag

SEQ ID NO: 426210 - RNA, 22 nt, Human
aaaaugaacagaacaaugggga

SEQ ID NO: 426211 - RNA, 22 nt, Human
auuucacaucuaucucagauuu

SEQ ID NO: 426212 - RNA, 22 nt, Human
agagcuguuuggacaucugagu

SEQ ID NO: 426213 - RNA, 22 nt, Human
gucaaacaaauuaacauaucca

SEQ ID NO: 426214 - RNA, 17 nt, Human
uuugaaaggaugucagu

SEQ ID NO: 426215 - RNA, 22 nt, Human
cagggcagaacauauagauagu

SEQ ID NO: 426216 - RNA, 22 nt, Human
gacccagaaggagugcccuaga

SEQ ID NO: 426217 - RNA, 22 nt, Human
gaggcccaguccugcaagcacg

SEQ ID NO: 426218 - RNA, 22 nt, Human
aagggaggccagagguuuugca

SEQ ID NO: 426219 - RNA, 22 nt, Human
gaaaucugucuuuguuugaaua

SEQ ID NO: 426220 - RNA, 22 nt, Human
cagguggggcagcugugggagc

SEQ ID NO: 426221 - RNA, 22 nt, Human
uagaaauguuagauguauugag

SEQ ID NO: 426222 - RNA, 22 nt, Human
gaucauuugcaggaaacauuaa

SEQ ID NO: 426223 - RNA, 20 nt, Human
cagaggcaaggagacuugga

SEQ ID NO: 426224 - RNA, 21 nt, Human
cauuucuauugaugagaaaag

SEQ ID NO: 426225 - RNA, 22 nt, Human
auguguagaacuguaaugccca

SEQ ID NO: 426226 - RNA, 22 nt, Human
cuggagccccaggcugugcaga

SEQ ID NO: 426227 - RNA, 22 nt, Human
cacccagccuucacacaggagu

SEQ ID NO: 426228 - RNA, 22 nt, Human
aaaaguguccagauuaugaaga

SEQ ID NO: 426229 - RNA, 20 nt, Human
ccuggcugcauucaggacgg

SEQ ID NO: 426230 - RNA, 22 nt, Human
uaaggcaccauaauauauuuaa

SEQ ID NO: 426231 - RNA, 22 nt, Human
ucucuuccaguaagagucuuua

SEQ ID NO: 426232 - RNA, 22 nt, Human
gccaggcauuauuccgaucccu

SEQ ID NO: 426233 - RNA, 22 nt, Human
cuggugcaggaaggagcuggca

SEQ ID NO: 426234 - RNA, 22 nt, Human
uccuuucccuuuccauccuggc

SEQ ID NO: 426235 - RNA, 22 nt, Human
gaaaggucaguuccacuuccau

SEQ ID NO: 426236 - RNA, 22 nt, Human
ggguccagaguugaagagguua

SEQ ID NO: 426237 - RNA, 22 nt, Human
uggcaccugaacuuagaggugu

SEQ ID NO: 426238 - RNA, 22 nt, Human
ccagggcuccauugcucauccu

SEQ ID NO: 426239 - RNA, 22 nt, Human
ccagugcccagcugcccaggca

SEQ ID NO: 426240 - RNA, 22 nt, Human
cccaggccccagggcuugucag

SEQ ID NO: 426241 - RNA, 22 nt, Human
agggugcauguuugcaagagug

SEQ ID NO: 426242 - RNA, 22 nt, Human
acaaagucuuuuacaacaguca

SEQ ID NO: 426243 - RNA, 21 nt, Human
aucaccagcagaagcugcaga

SEQ ID NO: 426244 - RNA, 22 nt, Human
ggcuuccuggggccuccugcaa

SEQ ID NO: 426245 - RNA, 22 nt, Human
ucucugagacaguagccucugc

SEQ ID NO: 426246 - RNA, 22 nt, Human
guauuaggaggaacacaggccu

SEQ ID NO: 426247 - RNA, 19 nt, Human
gacucacaccuuccgcugu

SEQ ID NO: 426248 - RNA, 22 nt, Human
cuccucacuuuccagacugggc

SEQ ID NO: 426249 - RNA, 22 nt, Human
ggaaggaggaugcucuggccuu

SEQ ID NO: 426250 - RNA, 22 nt, Human
gacagggcgcccagccuguuuc

SEQ ID NO: 426251 - RNA, 22 nt, Human
auauguguacgugcaguauaua

SEQ ID NO: 426252 - RNA, 22 nt, Human
cacagcugaaguagccaugugg

SEQ ID NO: 426253 - RNA, 22 nt, Human
ucagccugcuccaagugcugcc

SEQ ID NO: 426254 - RNA, 22 nt, Human
uggcugagaccuucccaaauuc

SEQ ID NO: 426255 - RNA, 22 nt, Human
cauuuguagcuauuuacuguau

SEQ ID NO: 426256 - RNA, 22 nt, Human
uggcaagagggaugcaagguuu

SEQ ID NO: 426257 - RNA, 22 nt, Human
agaaaaaucuuggcgcuugucu

SEQ ID NO: 426258 - RNA, 22 nt, Human
ucuggauggucagcucuuccug

SEQ ID NO: 426259 - RNA, 22 nt, Human
gcagagccaugggagguuuuug

SEQ ID NO: 426260 - RNA, 22 nt, Human
uggcacauagcagguacucagu

SEQ ID NO: 426261 - RNA, 22 nt, Human
aagccaggggcugcuuaggaga

SEQ ID NO: 426262 - RNA, 22 nt, Human
gcucugugccacaugcaguguu

SEQ ID NO: 426263 - RNA, 18 nt, Human
aaaaugcaggcgacaugg

SEQ ID NO: 426264 - RNA, 18 nt, Human
ggaaaaggagugucuagc

SEQ ID NO: 426265 - RNA, 22 nt, Human
uagggcaggggaggaaucugaa

SEQ ID NO: 426266 - RNA, 22 nt, Human
ggagugucagaaacaguguccu

SEQ ID NO: 426267 - RNA, 22 nt, Human
aaucuguucuacucuauucaga

SEQ ID NO: 426268 - RNA, 22 nt, Human
cuggccucauagccaagcugug

SEQ ID NO: 426269 - RNA, 22 nt, Human
ugggaauggaugcuaagugcua

SEQ ID NO: 426270 - RNA, 22 nt, Human
accugccuauggagccacaugg

SEQ ID NO: 426271 - RNA, 22 nt, Human
aauguacaaaagucagccaacu

SEQ ID NO: 426272 - RNA, 22 nt, Human
gggcugacaaccaucugacaag

SEQ ID NO: 426273 - RNA, 22 nt, Human
aagggcucugcugucucucccc

SEQ ID NO: 426274 - RNA, 20 nt, Human
uggagcuguaaucuugucug

SEQ ID NO: 426275 - RNA, 22 nt, Human
cuucccagaccuuagagugcag

SEQ ID NO: 426276 - RNA, 22 nt, Human
aaugucugccugaacuuuauau

SEQ ID NO: 426277 - RNA, 18 nt, Human
ucugucucuguccuugcu

SEQ ID NO: 426278 - RNA, 22 nt, Human
aggaccagccuccaggucucuu

SEQ ID NO: 426279 - RNA, 22 nt, Human
gccaggcuguuuuuauuacugu

SEQ ID NO: 426280 - RNA, 22 nt, Human
ggccuugggaggagggucagaa

SEQ ID NO: 426281 - RNA, 22 nt, Human
agagcugccgagcuggggccau

SEQ ID NO: 426282 - RNA, 22 nt, Human
aaggccaacuaggaugagcuag

SEQ ID NO: 426283 - RNA, 22 nt, Human
ugcugggggcuuucuggauacc

SEQ ID NO: 426284 - RNA, 22 nt, Human
gcagcuggacccacacggcuua

SEQ ID NO: 426285 - RNA, 22 nt, Human
acuguacacagugguguacugu

SEQ ID NO: 426286 - RNA, 22 nt, Human
uggggguguccuggugcacaca

SEQ ID NO: 426287 - RNA, 22 nt, Human
gugccucagcaccgccugcagc

SEQ ID NO: 426288 - RNA, 22 nt, Human
gagggcaguagccucguacccu

SEQ ID NO: 426289 - RNA, 22 nt, Human
ugaguagcggcuauguguaacu

SEQ ID NO: 426290 - RNA, 22 nt, Human
ucacauuuuaucugagauugac

SEQ ID NO: 426291 - RNA, 22 nt, Human
gcugucagugaggugagacaug

SEQ ID NO: 426292 - RNA, 22 nt, Human
ggagcugugcugggugaucagg

SEQ ID NO: 426293 - RNA, 22 nt, Human
agggccagcccauaaugccaaa

SEQ ID NO: 426294 - RNA, 22 nt, Human
gccugcagccucaagggcugag

SEQ ID NO: 426295 - RNA, 22 nt, Human
acaaaguccugguguauggcca

SEQ ID NO: 426296 - RNA, 22 nt, Human
guccucugcccaggucaagguu

SEQ ID NO: 426297 - RNA, 22 nt, Human
uugaagcagcucaggaggcuua

SEQ ID NO: 426298 - RNA, 20 nt, Human
cugugcuuuggaaccuggaa

SEQ ID NO: 426299 - RNA, 22 nt, Human
agacuuugagcucuuagagaag

SEQ ID NO: 426300 - RNA, 21 nt, Human
agaaaaguagaguuuucagag

SEQ ID NO: 426301 - RNA, 22 nt, Human
agccacagcuccuugguggaga

SEQ ID NO: 426302 - RNA, 22 nt, Human
uaaagguagugugacauauugu

SEQ ID NO: 426303 - RNA, 22 nt, Human
gcuggcucuucaguggagauag

SEQ ID NO: 426304 - RNA, 22 nt, Human
gggcugaggaacauauuuuguu

SEQ ID NO: 426305 - RNA, 23 nt, Human
cuuucauugugguuucacagagc

SEQ ID NO: 426306 - RNA, 22 nt, Human
ccugggcaacauagugagaccc

SEQ ID NO: 426307 - RNA, 22 nt, Human
gagccugccucuagucucuaga

SEQ ID NO: 426308 - RNA, 22 nt, Human
ggcauguuucaucacaucaaga

SEQ ID NO: 426309 - RNA, 22 nt, Human
ccugucuguaucgguucagagu

SEQ ID NO: 426310 - RNA, 22 nt, Human
ucaaaggcaccaaggucacugc

SEQ ID NO: 426311 - RNA, 22 nt, Human
ggcugccugcuccuccugcacg

SEQ ID NO: 426312 - RNA, 22 nt, Human
auucucugaagucaauggaaau

SEQ ID NO: 426313 - RNA, 22 nt, Human
cuuguaauuauaauguacuguu

SEQ ID NO: 426314 - RNA, 22 nt, Human
cagcaggcucugaguggcugcc

SEQ ID NO: 426315 - RNA, 22 nt, Human
gcagcuggugcaaaugucacuc

SEQ ID NO: 426316 - RNA, 22 nt, Human
uucaagauggcaccagugagug

SEQ ID NO: 426317 - RNA, 22 nt, Human
agcagccagaaauccagaggug

SEQ ID NO: 426318 - RNA, 22 nt, Human
ugagggaguuggguguauagga

SEQ ID NO: 426319 - RNA, 22 nt, Human
uugcagagagguuaggaacuca

SEQ ID NO: 426320 - RNA, 22 nt, Human
ccaguggaauuaaaaauaagug

SEQ ID NO: 426321 - RNA, 22 nt, Human
ucugccuuggcaaccacagcuu

SEQ ID NO: 426322 - RNA, 23 nt, Human
gggagccaggaccucgcgcccca

SEQ ID NO: 426323 - RNA, 22 nt, Human
uuuauugcauacacaaauguca

SEQ ID NO: 426324 - RNA, 22 nt, Human
aggaccauccuaagguaggcaa

SEQ ID NO: 426325 - RNA, 22 nt, Human
gagcacaggcuuugguggacac

SEQ ID NO: 426326 - RNA, 22 nt, Human
gggugggccugucuggccaugu

SEQ ID NO: 426327 - RNA, 22 nt, Human
auuuccaaaaccacuuauugcc

SEQ ID NO: 426328 - RNA, 22 nt, Human
cuugaaagaagggucuuuuaau

SEQ ID NO: 426329 - RNA, 22 nt, Human
acuucucuucauagguggcaau

SEQ ID NO: 426330 - RNA, 22 nt, Human
uggccagguguggguucucaga

SEQ ID NO: 426331 - RNA, 22 nt, Human
gauuuccucacuaacauccauc

SEQ ID NO: 426332 - RNA, 22 nt, Human
ugacucuguaccugucugccuu

SEQ ID NO: 426333 - RNA, 22 nt, Human
gaagcagcuuucuggugaggag

SEQ ID NO: 426334 - RNA, 22 nt, Human
gguucacacuuucaugauuuca

SEQ ID NO: 426335 - RNA, 22 nt, Human
gaggucaauaauaugugcuuua

SEQ ID NO: 426336 - RNA, 22 nt, Human
aggcacugacagauucuguguc

SEQ ID NO: 426337 - RNA, 22 nt, Human
ucucugagcccagugucccccu

SEQ ID NO: 426338 - RNA, 19 nt, Human
cagcugccuuuucuuugca

SEQ ID NO: 426339 - RNA, 22 nt, Human
aagagcugugggugguaguccu

SEQ ID NO: 426340 - RNA, 22 nt, Human
ugaggcucuccaagcagaugag

SEQ ID NO: 426341 - RNA, 22 nt, Human
agaggccuccgaaaggugggcu

SEQ ID NO: 426342 - RNA, 22 nt, Human
gaugauggacaaagcauuggug

SEQ ID NO: 426343 - RNA, 22 nt, Human
ugcucuggguccugggccuccu

SEQ ID NO: 426344 - RNA, 22 nt, Human
aagugaguggccuggagaggug

SEQ ID NO: 426345 - RNA, 22 nt, Human
agcuggaggggccagcaggugu

SEQ ID NO: 426346 - RNA, 22 nt, Human
ggugggcaggucacucugccuc

SEQ ID NO: 426347 - RNA, 22 nt, Human
uaguuaggguucugcagagaca

SEQ ID NO: 426348 - RNA, 22 nt, Human
uguacaguguagucaugagguu

SEQ ID NO: 426349 - RNA, 22 nt, Human
cauaacuagagugaaauguuga

SEQ ID NO: 426350 - RNA, 22 nt, Human
agacuguacuuucugcagcucu

SEQ ID NO: 426351 - RNA, 22 nt, Human
cagcccuggcuagggcgagggc

SEQ ID NO: 426352 - RNA, 22 nt, Human
gcugaaggcccggaggacaggg

SEQ ID NO: 426353 - RNA, 22 nt, Human
uauuagggaacugcaagacuaa

SEQ ID NO: 426354 - RNA, 22 nt, Human
uucuuucagaacacaagugauu

SEQ ID NO: 426355 - RNA, 22 nt, Human
uuucuaguucucugccaaaaaa

SEQ ID NO: 426356 - RNA, 22 nt, Human
uuagagaaauucugguaaugua

SEQ ID NO: 426357 - RNA, 22 nt, Human
guggcagcugguaugcagacag

SEQ ID NO: 426358 - RNA, 19 nt, Human
agcuccugggcucugggcc

SEQ ID NO: 426359 - RNA, 22 nt, Human
uuaaauuagucaagcuucucug

SEQ ID NO: 426360 - RNA, 22 nt, Human
gccagagccggcuucacaggau

SEQ ID NO: 426361 - RNA, 21 nt, Human
agcuuccugcagugggagguc

SEQ ID NO: 426362 - RNA, 17 nt, Human
gagugcugguggagcuc

SEQ ID NO: 426363 - RNA, 18 nt, Human
cccacggugcuguagggc

SEQ ID NO: 426364 - RNA, 22 nt, Human
aaaaugugaucuacaaaugcaa

SEQ ID NO: 426365 - RNA, 22 nt, Human
cagauccacccuuguagugaca

SEQ ID NO: 426366 - RNA, 22 nt, Human
auguauguuaguguauuaucua

SEQ ID NO: 426367 - RNA, 22 nt, Human
gauuuccuugcauauugguaau

SEQ ID NO: 426368 - RNA, 22 nt, Human
gaaggcugcgaggggagugccg

SEQ ID NO: 426369 - RNA, 22 nt, Human
cagagccucagaauccugugga

SEQ ID NO: 426370 - RNA, 22 nt, Human
aucaaaguuucccagaaguugu

SEQ ID NO: 426371 - RNA, 23 nt, Human
agcagccagagauccucggcccu

SEQ ID NO: 426372 - RNA, 22 nt, Human
uagcuuuagaaauauucucaga

SEQ ID NO: 426373 - RNA, 22 nt, Human
gguggcagcgucuaucugacau

SEQ ID NO: 426374 - RNA, 22 nt, Human
uuggaaagcaagcuggacauac

SEQ ID NO: 426375 - RNA, 22 nt, Human
uggagccagcccaggccccucu

SEQ ID NO: 426376 - RNA, 22 nt, Human
gauuucuguaacacuucagaua

SEQ ID NO: 426377 - RNA, 22 nt, Human
gcugucugcaucucuagagcuu

SEQ ID NO: 426378 - RNA, 22 nt, Human
ccugagugcuuccagagucaug

SEQ ID NO: 426379 - RNA, 22 nt, Human
ugaggccugcccuggggaaguu

SEQ ID NO: 426380 - RNA, 22 nt, Human
ugcagugguguccagguguacu

SEQ ID NO: 426381 - RNA, 22 nt, Human
aucuggcugacuuugugggaca

SEQ ID NO: 426382 - RNA, 18 nt, Human
gagcugccauauuuaguu

SEQ ID NO: 426383 - RNA, 22 nt, Human
ucagcuuuuaaaaacaagaagu

SEQ ID NO: 426384 - RNA, 22 nt, Human
acacagccgugaaucugcuucu

SEQ ID NO: 426385 - RNA, 23 nt, Human
uggcugagauccuacuguuugcu

SEQ ID NO: 426386 - RNA, 22 nt, Human
uucuaguuaaaguauguauuag

SEQ ID NO: 426387 - RNA, 22 nt, Human
ggcuggaaguccaagaucaaga

SEQ ID NO: 426388 - RNA, 22 nt, Human
cucaggaggaugacugccuugg

SEQ ID NO: 426389 - RNA, 22 nt, Human
uuuagaguugaguauucauugg

SEQ ID NO: 426390 - RNA, 22 nt, Human
gucuugaucuccugaccuugug

SEQ ID NO: 426391 - RNA, 22 nt, Human
aguaaaauuucugcugaggaga

SEQ ID NO: 426392 - RNA, 22 nt, Human
aguggcagagcaggugcuggaa

SEQ ID NO: 426393 - RNA, 22 nt, Human
agcagugagugggaggaccaug

SEQ ID NO: 426394 - RNA, 22 nt, Human
gcagguggcagaggugggaucu

SEQ ID NO: 426395 - RNA, 22 nt, Human
cucuccaggacuuuggcccaau

SEQ ID NO: 426396 - RNA, 22 nt, Human
aggaagcucggagagggcaaau

SEQ ID NO: 426397 - RNA, 22 nt, Human
ugagguaggugguaagagauac

SEQ ID NO: 426398 - RNA, 22 nt, Human
cucuuaaauaacaucauugcuu

SEQ ID NO: 426399 - RNA, 19 nt, Human
ucaaggcucccugagggau

SEQ ID NO: 426400 - RNA, 22 nt, Human
auucuccaucaccacuggcacu

SEQ ID NO: 426401 - RNA, 22 nt, Human
ccugccugcaccuucucugggg

SEQ ID NO: 426402 - RNA, 22 nt, Human
cccaguuguugccggcucugga

SEQ ID NO: 426403 - RNA, 19 nt, Human
agacacacuugauaugugu

SEQ ID NO: 426404 - RNA, 22 nt, Human
cagaaguggccucagagggagu

SEQ ID NO: 426405 - RNA, 21 nt, Human
ucaggcagugcaaauacaugg

SEQ ID NO: 426406 - RNA, 22 nt, Human
ccagccagcugcccuuggggcc

SEQ ID NO: 426407 - RNA, 22 nt, Human
ggcucaggcuggagugcagugg

SEQ ID NO: 426408 - RNA, 22 nt, Human
ucgccagggaugcuguaaggaa

SEQ ID NO: 426409 - RNA, 20 nt, Human
ggccugagcauggcuggcag

SEQ ID NO: 426410 - RNA, 22 nt, Human
cugccacuuucacccagugcuc

SEQ ID NO: 426411 - RNA, 22 nt, Human
ccugucugaggaggugcucuuu

SEQ ID NO: 426412 - RNA, 22 nt, Human
cuggggugagcagaaacagggg

SEQ ID NO: 426413 - RNA, 22 nt, Human
uccucccacauaggacaauggg

SEQ ID NO: 426414 - RNA, 22 nt, Human
gcagugggcaacaagagcugga

SEQ ID NO: 426415 - RNA, 22 nt, Human
ucaggcagcauuaaacuucagc

SEQ ID NO: 426416 - RNA, 19 nt, Human
gcagccaggugcucuaccu

SEQ ID NO: 426417 - RNA, 22 nt, Human
cucuggccagagccugcgggaa

SEQ ID NO: 426418 - RNA, 22 nt, Human
aggcagagagcaguggccgucu

SEQ ID NO: 426419 - RNA, 22 nt, Human
agggagcuguggucagcucagu

SEQ ID NO: 426420 - RNA, 19 nt, Human
agaaaucucgagauuuguu

SEQ ID NO: 426421 - RNA, 22 nt, Human
acauuuguaugcguuuuuacug

SEQ ID NO: 426422 - RNA, 20 nt, Human
agaaggcuccuuuugccaag

SEQ ID NO: 426423 - RNA, 22 nt, Human
cuggagcucuguguguuccuga

SEQ ID NO: 426424 - RNA, 22 nt, Human
uaagaacaguagaacaguaggu

SEQ ID NO: 426425 - RNA, 22 nt, Human
gaaagccaucuggcugcuggga

SEQ ID NO: 426426 - RNA, 19 nt, Human
cucuuaaauugucucuugc

SEQ ID NO: 426427 - RNA, 22 nt, Human
ugcuuuggccacuagaauucag

SEQ ID NO: 426428 - RNA, 22 nt, Human
ccucucuguguggccucuccau

SEQ ID NO: 426429 - RNA, 22 nt, Human
guaacaaaguuucuaggugcug

SEQ ID NO: 426430 - RNA, 22 nt, Human
cucagggcaguauggcugagag

SEQ ID NO: 426431 - RNA, 22 nt, Human
agggucagguuaagggagucau

SEQ ID NO: 426432 - RNA, 22 nt, Human
ugagagugauugguucgaaugu

SEQ ID NO: 426433 - RNA, 19 nt, Human
gcauaaaaugucaaugugu

SEQ ID NO: 426434 - RNA, 22 nt, Human
uuuacuuugugucaagucaaga

SEQ ID NO: 426435 - RNA, 22 nt, Human
ugcaggaauuuuuugcagaaag

SEQ ID NO: 426436 - RNA, 22 nt, Human
aucccugcccucauggagcuua

SEQ ID NO: 426437 - RNA, 22 nt, Human
uccuggagagugggcgagcaca

SEQ ID NO: 426438 - RNA, 22 nt, Human
gauuuucauuauagcuaguuuc

SEQ ID NO: 426439 - RNA, 22 nt, Human
aguucuagaagacuuuuccauu

SEQ ID NO: 426440 - RNA, 22 nt, Human
cugggcagugguggcaucuuug

SEQ ID NO: 426441 - RNA, 22 nt, Human
ugugccauuucuauucugcagc

SEQ ID NO: 426442 - RNA, 22 nt, Human
ugagcccaggaguaugaggcug

SEQ ID NO: 426443 - RNA, 22 nt, Human
cagaaauguuuauauguggugu

SEQ ID NO: 426444 - RNA, 22 nt, Human
uaaaugugcacagguuagaagg

SEQ ID NO: 426445 - RNA, 19 nt, Human
acacagggaucagaggguu

SEQ ID NO: 426446 - RNA, 22 nt, Human
uuacaguaugaucaacuuuuca

SEQ ID NO: 426447 - RNA, 22 nt, Human
agccucuggcccuagacugcuu

SEQ ID NO: 426448 - RNA, 22 nt, Human
ggcaguggugggaggcucgcuc

SEQ ID NO: 426449 - RNA, 22 nt, Human
cccaagggagugccuggucaac

SEQ ID NO: 426450 - RNA, 22 nt, Human
agggaguuccgaucugugcacc

SEQ ID NO: 426451 - RNA, 22 nt, Human
caggcacuagcagaaugaggcu

SEQ ID NO: 426452 - RNA, 22 nt, Human
auugacaaauggauguugacau

SEQ ID NO: 426453 - RNA, 22 nt, Human
cacagaaguuucauagucucga

SEQ ID NO: 426454 - RNA, 20 nt, Human
cuguggcaucugucauggug

SEQ ID NO: 426455 - RNA, 22 nt, Human
gcagaggagcaaguugcuacag

SEQ ID NO: 426456 - RNA, 22 nt, Human
aagauuuccuucaguagagcua

SEQ ID NO: 426457 - RNA, 22 nt, Human
uuuuauucucaagacaauggga

SEQ ID NO: 426458 - RNA, 22 nt, Human
ucagggcagccuaaggcaccuc

SEQ ID NO: 426459 - RNA, 22 nt, Human
ggccucucuggcauggcugccc

SEQ ID NO: 426460 - RNA, 22 nt, Human
uggagcugggaguccugggcug

SEQ ID NO: 426461 - RNA, 22 nt, Human
uggcacugggacagaugcucuc

SEQ ID NO: 426462 - RNA, 22 nt, Human
cugcucugagaggcucuuccua

SEQ ID NO: 426463 - RNA, 17 nt, Human
agggucaggugaaguuc

SEQ ID NO: 426464 - RNA, 22 nt, Human
agcugggagcagagccacagcc

SEQ ID NO: 426465 - RNA, 22 nt, Human
gcaaagcugggugugaaugcac

SEQ ID NO: 426466 - RNA, 20 nt, Human
cugcugugauucccuccucc

SEQ ID NO: 426467 - RNA, 22 nt, Human
cuccagggaugagacagaguag

SEQ ID NO: 426468 - RNA, 22 nt, Human
cauuucauaguugucacaauaa

SEQ ID NO: 426469 - RNA, 22 nt, Human
aggaauucaagaccagcugggc

SEQ ID NO: 426470 - RNA, 22 nt, Human
ugcuuuuaagaacaaugcugcu

SEQ ID NO: 426471 - RNA, 22 nt, Human
gguacaaggagugaagguuugg

SEQ ID NO: 426472 - RNA, 22 nt, Human
gggugggaacaggaugccagga

SEQ ID NO: 426473 - RNA, 22 nt, Human
uggcagaguuauggguauuuau

SEQ ID NO: 426474 - RNA, 22 nt, Human
ucacaugcccuguauuuaccag

SEQ ID NO: 426475 - RNA, 20 nt, Human
gcccaagguccagaaggggg

SEQ ID NO: 426476 - RNA, 22 nt, Human
augugguugaagaauuacaucu

SEQ ID NO: 426477 - RNA, 22 nt, Human
agagaauuuuaaaagccuugaa

SEQ ID NO: 426478 - RNA, 22 nt, Human
gaguguuccagaaacuggcccu

SEQ ID NO: 426479 - RNA, 22 nt, Human
cuggccuuggugcuugcagaca

SEQ ID NO: 426480 - RNA, 22 nt, Human
acaggcugcugagccauuugcu

SEQ ID NO: 426481 - RNA, 22 nt, Human
auaaagaggauguauuuacagc

SEQ ID NO: 426482 - RNA, 22 nt, Human
ucagaacauugacauucuuauu

SEQ ID NO: 426483 - RNA, 22 nt, Human
uagcugccagaccauucuuacu

SEQ ID NO: 426484 - RNA, 17 nt, Human
ugaaggccaugaccacg

SEQ ID NO: 426485 - RNA, 22 nt, Human
ugaguccaucgcagggaagugg

SEQ ID NO: 426486 - RNA, 22 nt, Human
gagcaggccagcaauggaaggg

SEQ ID NO: 426487 - RNA, 23 nt, Human
gguggcaggaguggaugcugagc

SEQ ID NO: 426488 - RNA, 22 nt, Human
uguuuuauuucuccaagaggga

SEQ ID NO: 426489 - RNA, 17 nt, Human
ccagagaguaguuagga

SEQ ID NO: 426490 - RNA, 22 nt, Human
aaggcugagagucacaguccua

SEQ ID NO: 426491 - RNA, 22 nt, Human
aucagugcuaaagcaaaugccc

SEQ ID NO: 426492 - RNA, 19 nt, Human
gguaaaagugagcuucagg

SEQ ID NO: 426493 - RNA, 22 nt, Human
aaagaacaaaugauauaugguu

SEQ ID NO: 426494 - RNA, 22 nt, Human
gcugcucuacccaugcaucugu

SEQ ID NO: 426495 - RNA, 22 nt, Human
aggaggggcauagaaauguaau

SEQ ID NO: 426496 - RNA, 22 nt, Human
gccucccuguucuuccacaaua

SEQ ID NO: 426497 - RNA, 22 nt, Human
acagaauauugguuacuguugc

SEQ ID NO: 426498 - RNA, 22 nt, Human
uugaagcacaaugucuuuuauc

SEQ ID NO: 426499 - RNA, 22 nt, Human
gagcuuccauggacgccaucug

SEQ ID NO: 426500 - RNA, 22 nt, Human
ugaggcucaagaauagacagua

SEQ ID NO: 426501 - RNA, 22 nt, Human
agcagggcuuugcagacuuggg

SEQ ID NO: 426502 - RNA, 22 nt, Human
aaaucaguuaagaugaggccau

SEQ ID NO: 426503 - RNA, 22 nt, Human
ggugaaggcacaagagggcaag

SEQ ID NO: 426504 - RNA, 22 nt, Human
ucagaggacuaccuucuccagu

SEQ ID NO: 426505 - RNA, 22 nt, Human
ugcucuggggagcuccucugcg

SEQ ID NO: 426506 - RNA, 22 nt, Human
gggcugacucaaccuugcaaag

SEQ ID NO: 426507 - RNA, 15 nt, Human
uccaggcauucauuc

SEQ ID NO: 426508 - RNA, 22 nt, Human
aaggcccuggccccagcuucuu

SEQ ID NO: 426509 - RNA, 22 nt, Human
ugccaggcuccggaacgacagu

SEQ ID NO: 426510 - RNA, 22 nt, Human
aguuuagaguucaaauuaguuc

SEQ ID NO: 426511 - RNA, 22 nt, Human
caucagcacuaugauuaaagua

SEQ ID NO: 426512 - RNA, 22 nt, Human
uuugaaagggaaauaaacuccu

SEQ ID NO: 426513 - RNA, 22 nt, Human
gagagucacugucugcauuucc

SEQ ID NO: 426514 - RNA, 22 nt, Human
cccagagcugagucugauauau

SEQ ID NO: 426515 - RNA, 22 nt, Human
aggccagaaauuuggaguaugu

SEQ ID NO: 426516 - RNA, 22 nt, Human
uagggcuauaagagaauaagac

SEQ ID NO: 426517 - RNA, 22 nt, Human
aguggcagccgagcaggagaug

SEQ ID NO: 426518 - RNA, 22 nt, Human
caggauccccaggucgccgucc

SEQ ID NO: 426519 - RNA, 22 nt, Human
ugggccacggggguggagagcu

SEQ ID NO: 426520 - RNA, 22 nt, Human
cacuguguaagaagaugggcuu

SEQ ID NO: 426521 - RNA, 22 nt, Human
ucuggcccagccccugagguca

SEQ ID NO: 426522 - RNA, 22 nt, Human
guccugucccccaaggcugugg

SEQ ID NO: 426523 - RNA, 22 nt, Human
uucuggaggccccuuccuucuc

SEQ ID NO: 426524 - RNA, 22 nt, Human
cacaaaaucuuucucgauuauu

SEQ ID NO: 426525 - RNA, 22 nt, Human
cugggagauugcuagagaugca

SEQ ID NO: 426526 - RNA, 22 nt, Human
cugugcuucgcaacuccaaggu

SEQ ID NO: 426527 - RNA, 22 nt, Human
acugccauuggucaaaugagug

SEQ ID NO: 426528 - RNA, 22 nt, Human
ggagcugcuccuucagccaagu

SEQ ID NO: 426529 - RNA, 22 nt, Human
gggaguguugagcgcccugcca

SEQ ID NO: 426530 - RNA, 22 nt, Human
uuccaguuaaggaagcuauucu

SEQ ID NO: 426531 - RNA, 22 nt, Human
uggcagcagggaggccaguguu

SEQ ID NO: 426532 - RNA, 22 nt, Human
gaggaaccaaucugugauauuc

SEQ ID NO: 426533 - RNA, 22 nt, Human
uaaaaguuuuaguuguacauaa

SEQ ID NO: 426534 - RNA, 22 nt, Human
acagagaaagugggcugaagau

SEQ ID NO: 426535 - RNA, 20 nt, Human
ugugcccaauguccagguuc

SEQ ID NO: 426536 - RNA, 22 nt, Human
aggccaggcaacauucugaagu

SEQ ID NO: 426537 - RNA, 22 nt, Human
guccucuggccuuucccaggac

SEQ ID NO: 426538 - RNA, 22 nt, Human
cugaaggaagcagguggccugu

SEQ ID NO: 426539 - RNA, 22 nt, Human
uuaaauuuuagaaacagacucu

SEQ ID NO: 426540 - RNA, 22 nt, Human
uggagccugagucagcggaggc

SEQ ID NO: 426541 - RNA, 22 nt, Human
uuuauucugugcuacaugaaga

SEQ ID NO: 426542 - RNA, 22 nt, Human
gagcuuuagcugagaccugcuu

SEQ ID NO: 426543 - RNA, 22 nt, Human
gagccagggcugugagcugagc

SEQ ID NO: 426544 - RNA, 22 nt, Human
cagucccaccaggaucgcucuu

SEQ ID NO: 426545 - RNA, 22 nt, Human
aaugauuggcacuagauacaca

SEQ ID NO: 426546 - RNA, 22 nt, Human
uuagccauuaauguccugugca

SEQ ID NO: 426547 - RNA, 22 nt, Human
agcuuuauauaaaagaguacau

SEQ ID NO: 426548 - RNA, 22 nt, Human
ggagauggcucugcaaggucua

SEQ ID NO: 426549 - RNA, 22 nt, Human
cuccugggaauuuaguugugag

SEQ ID NO: 426550 - RNA, 22 nt, Human
uuagaaacccagacucuuaggu

SEQ ID NO: 426551 - RNA, 22 nt, Human
agccuggccacucagggccuga

SEQ ID NO: 426552 - RNA, 22 nt, Human
ccuuuauucaauuaguccuaau

SEQ ID NO: 426553 - RNA, 22 nt, Human
uaugacaagguggaguaugagu

SEQ ID NO: 426554 - RNA, 22 nt, Human
ugccugucuuaauaucuggaaa

SEQ ID NO: 426555 - RNA, 22 nt, Human
uccgccaggacugagggcccau

SEQ ID NO: 426556 - RNA, 22 nt, Human
cagagccaggguugcaccccug

SEQ ID NO: 426557 - RNA, 22 nt, Human
gcccccucuuuggagccagcca

SEQ ID NO: 426558 - RNA, 22 nt, Human
gagagaagaauguuccgaggcc

SEQ ID NO: 426559 - RNA, 22 nt, Human
gcagcugaaagggaucucuaca

SEQ ID NO: 426560 - RNA, 22 nt, Human
acagagccuccaggagugcugg

SEQ ID NO: 426561 - RNA, 22 nt, Human
uucagucagugacuaagcaguu

SEQ ID NO: 426562 - RNA, 22 nt, Human
agggagguccaucccugcagag

SEQ ID NO: 426563 - RNA, 22 nt, Human
gcagggucuugagaggcagcca

SEQ ID NO: 426564 - RNA, 16 nt, Human
ugggaccuguggccaa

SEQ ID NO: 426565 - RNA, 22 nt, Human
augauacaucuucaugucagug

SEQ ID NO: 426566 - RNA, 22 nt, Human
gcugccucaggcaccuccuggc

SEQ ID NO: 426567 - RNA, 22 nt, Human
ucugucacuauuggccagaaca

SEQ ID NO: 426568 - RNA, 22 nt, Human
ugcuuuauguuaucagaagggu

SEQ ID NO: 426569 - RNA, 22 nt, Human
augggagugacagggccacugg

SEQ ID NO: 426570 - RNA, 22 nt, Human
aaaucaguaaauguucauuaac

SEQ ID NO: 426571 - RNA, 22 nt, Human
uaaaugugucuauggacccgcc

SEQ ID NO: 426572 - RNA, 19 nt, Human
gcugcucugggucucaucu

SEQ ID NO: 426573 - RNA, 22 nt, Human
caguggaauauauaggggauuu

SEQ ID NO: 426574 - RNA, 22 nt, Human
aaggugucaccagauuggcagg

SEQ ID NO: 426575 - RNA, 22 nt, Human
uggugcugauaauggcaggauu

SEQ ID NO: 426576 - RNA, 22 nt, Human
ucugcagaauucgaggaagaaa

SEQ ID NO: 426577 - RNA, 22 nt, Human
ggcagggcagcgcugauuaggg

SEQ ID NO: 426578 - RNA, 22 nt, Human
gauuucaaggauguuagaggug

SEQ ID NO: 426579 - RNA, 17 nt, Human
agguggguggaucaccu

SEQ ID NO: 426580 - RNA, 22 nt, Human
cagagccuuccuagcagacucu

SEQ ID NO: 426581 - RNA, 22 nt, Human
agggccagaaucccucagucua

SEQ ID NO: 426582 - RNA, 22 nt, Human
agccuggaccaggggccucaga

SEQ ID NO: 426583 - RNA, 22 nt, Human
ggcuuuauuuugcaugaaugcu

SEQ ID NO: 426584 - RNA, 21 nt, Human
aggugcaggccucaagcccca

SEQ ID NO: 426585 - RNA, 17 nt, Human
cugcuuugugcaacgcu

SEQ ID NO: 426586 - RNA, 22 nt, Human
gaaaguuucuucauuaagaugu

SEQ ID NO: 426587 - RNA, 22 nt, Human
aucagcaaaaaugccuucagaa

SEQ ID NO: 426588 - RNA, 22 nt, Human
agcccagccggauucccaguuc

SEQ ID NO: 426589 - RNA, 22 nt, Human
uggcucagcgcggccuggucuu

SEQ ID NO: 426590 - RNA, 22 nt, Human
ucacugcaaucucugccuucca

SEQ ID NO: 426591 - RNA, 22 nt, Human
ucaggcugcaucuguaagggug

SEQ ID NO: 426592 - RNA, 22 nt, Human
ucugucucaaguucuugcacuc

SEQ ID NO: 426593 - RNA, 22 nt, Human
acucugagcaucccaagucuua

SEQ ID NO: 426594 - RNA, 22 nt, Human
cuggcuuucauuucaagcacgu

SEQ ID NO: 426595 - RNA, 22 nt, Human
auaaaagaaguuuugguacuug

SEQ ID NO: 426596 - RNA, 22 nt, Human
cccuccagcucaaagcaaccgg

SEQ ID NO: 426597 - RNA, 22 nt, Human
cccaggaccgcgcggcugagcg

SEQ ID NO: 426598 - RNA, 22 nt, Human
cuacauuuugugauuaugaaau

SEQ ID NO: 426599 - RNA, 22 nt, Human
ggcuuuauauuguuugagcaga

SEQ ID NO: 426600 - RNA, 22 nt, Human
gggcagguuauuggaguaggga

SEQ ID NO: 426601 - RNA, 20 nt, Human
cagagacccaggcuucagcu

SEQ ID NO: 426602 - RNA, 22 nt, Human
cauuagggucucucagcugaau

SEQ ID NO: 426603 - RNA, 22 nt, Human
aagaaauuaaggaaugcaacga

SEQ ID NO: 426604 - RNA, 22 nt, Human
agcagcuuacauguggccuauc

SEQ ID NO: 426605 - RNA, 22 nt, Human
caagccugucucaccagugcua

SEQ ID NO: 426606 - RNA, 22 nt, Human
uacaaagagguaauugcauaua

SEQ ID NO: 426607 - RNA, 22 nt, Human
cuccuugguguaguacugagca

SEQ ID NO: 426608 - RNA, 22 nt, Human
cuauugaauagcccaaaucauu

SEQ ID NO: 426609 - RNA, 22 nt, Human
auguaucaugcaggguccauga

SEQ ID NO: 426610 - RNA, 22 nt, Human
gccugggugaauuugauccuaa

SEQ ID NO: 426611 - RNA, 22 nt, Human
ggguaccaagcugcuugggggc

SEQ ID NO: 426612 - RNA, 22 nt, Human
aaggcucuuggagugaaugcag

SEQ ID NO: 426613 - RNA, 22 nt, Human
uggcucagcgguggcagcagac

SEQ ID NO: 426614 - RNA, 22 nt, Human
ucuccaagcagggcugcaaggc

SEQ ID NO: 426615 - RNA, 22 nt, Human
aagggcaggcacccacccucac

SEQ ID NO: 426616 - RNA, 22 nt, Human
guuacaaauguaaauucugggg

SEQ ID NO: 426617 - RNA, 19 nt, Human
gcugugggacagcagggug

SEQ ID NO: 426618 - RNA, 22 nt, Human
cagacagacagccguggccacc

SEQ ID NO: 426619 - RNA, 22 nt, Human
aggcagcaaagaaaugaugcug

SEQ ID NO: 426620 - RNA, 22 nt, Human
uucuuuccaaccagauauuggu

SEQ ID NO: 426621 - RNA, 22 nt, Human
agagcugaaaaagcugacccgg

SEQ ID NO: 426622 - RNA, 22 nt, Human
caccugcaaggagcuuucauuu

SEQ ID NO: 426623 - RNA, 22 nt, Human
gccuuaggggucagacagagcu

SEQ ID NO: 426624 - RNA, 22 nt, Human
aucaggauguuuggcugucaua

SEQ ID NO: 426625 - RNA, 22 nt, Human
aaggcacugagccagccgucuc

SEQ ID NO: 426626 - RNA, 22 nt, Human
aaguuauaucaucucauugacg

SEQ ID NO: 426627 - RNA, 22 nt, Human
acuuccaaauaccaucacauug

SEQ ID NO: 426628 - RNA, 22 nt, Human
agagauguucauucagcauguu

SEQ ID NO: 426629 - RNA, 22 nt, Human
gaaaauguuuguccggagcuga

SEQ ID NO: 426630 - RNA, 22 nt, Human
aggcucagcugguggugaucgc

SEQ ID NO: 426631 - RNA, 22 nt, Human
guuuuauaggugaaauauuacu

SEQ ID NO: 426632 - RNA, 20 nt, Human
ggggcagguuuuuauggcua

SEQ ID NO: 426633 - RNA, 22 nt, Human
gagggguguggagccaucaguu

SEQ ID NO: 426634 - RNA, 22 nt, Human
agcauuuaguuaguaaauguuu

SEQ ID NO: 426635 - RNA, 22 nt, Human
uugggcugaacccugcagcuga

SEQ ID NO: 426636 - RNA, 22 nt, Human
augaguaagaccauaauuuuug

SEQ ID NO: 426637 - RNA, 22 nt, Human
ggccagaggugguacauagcuu

SEQ ID NO: 426638 - RNA, 22 nt, Human
agggaggugguuccccagugga

SEQ ID NO: 426639 - RNA, 22 nt, Human
aggaccugacauuguguuuucu

SEQ ID NO: 426640 - RNA, 18 nt, Human
gcugucugaggucugagg

SEQ ID NO: 426641 - RNA, 22 nt, Human
agcugcaggcccaugcucaguc

SEQ ID NO: 426642 - RNA, 22 nt, Human
ugagagucucagaccuccuggu

SEQ ID NO: 426643 - RNA, 22 nt, Human
ucccuggcugggggcugccuug

SEQ ID NO: 426644 - RNA, 22 nt, Human
uuauuuuaccuuccucugagcu

SEQ ID NO: 426645 - RNA, 22 nt, Human
cagagcaguaaaucuggggcac

SEQ ID NO: 426646 - RNA, 22 nt, Human
aggcucugugacaaucaagcug

SEQ ID NO: 426647 - RNA, 22 nt, Human
caguuuauuuccaagaugacaa

SEQ ID NO: 426648 - RNA, 22 nt, Human
cccaggcagcccuucugacgca

SEQ ID NO: 426649 - RNA, 22 nt, Human
uuugcauucuagaaaaauuucu

SEQ ID NO: 426650 - RNA, 22 nt, Human
ugcaguggaaucuggagagcag

SEQ ID NO: 426651 - RNA, 21 nt, Human
uuuaauuugcauguaugacgc

SEQ ID NO: 426652 - RNA, 22 nt, Human
gucccuggaucugggacagcug

SEQ ID NO: 426653 - RNA, 22 nt, Human
gagcugccuacauugccaagag

SEQ ID NO: 426654 - RNA, 18 nt, Human
ugagagugugugcucuug

SEQ ID NO: 426655 - RNA, 22 nt, Human
agucucuuuugcgaagaguguu

SEQ ID NO: 426656 - RNA, 22 nt, Human
guauuuuauggcaugcaguggc

SEQ ID NO: 426657 - RNA, 22 nt, Human
acagggcagaaauguugcaucu

SEQ ID NO: 426658 - RNA, 22 nt, Human
ggauggagaugaccauggugac

SEQ ID NO: 426659 - RNA, 22 nt, Human
guggccugccagcagauggcgc

SEQ ID NO: 426660 - RNA, 22 nt, Human
caggauggugugagugugagga

SEQ ID NO: 426661 - RNA, 22 nt, Human
uuagaaaucugcugccaugcaa

SEQ ID NO: 426662 - RNA, 22 nt, Human
gguggagcuggaccaggagagg

SEQ ID NO: 426663 - RNA, 22 nt, Human
ggcuucccaaggagccaggaug

SEQ ID NO: 426664 - RNA, 22 nt, Human
uugacagcaaagauugugccua

SEQ ID NO: 426665 - RNA, 22 nt, Human
aggcacuguggguguggccgga

SEQ ID NO: 426666 - RNA, 22 nt, Human
gagggcucuacucaccacccug

SEQ ID NO: 426667 - RNA, 22 nt, Human
uucugucugauggugccagaac

SEQ ID NO: 426668 - RNA, 22 nt, Human
gaagccaggggccugacaggca

SEQ ID NO: 426669 - RNA, 22 nt, Human
augcuuuuaugucacaugguca

SEQ ID NO: 426670 - RNA, 22 nt, Human
aaaggccauuacuugcuuuuag

SEQ ID NO: 426671 - RNA, 20 nt, Human
gccagcacagggagcaguuc

SEQ ID NO: 426672 - RNA, 22 nt, Human
auuuaucaccaguuagcugacu

SEQ ID NO: 426673 - RNA, 22 nt, Human
gggaccugaggcccugcuccac

SEQ ID NO: 426674 - RNA, 22 nt, Human
gaguuguucaacgugugugaaa

SEQ ID NO: 426675 - RNA, 20 nt, Human
agcagcuguguuuucauccu

SEQ ID NO: 426676 - RNA, 22 nt, Human
cacugcaggucugagauggggg

SEQ ID NO: 426677 - RNA, 22 nt, Human
agucaguggcuccgagccuggu

SEQ ID NO: 426678 - RNA, 18 nt, Human
aaguaacagaagagcaca

SEQ ID NO: 426679 - RNA, 22 nt, Human
aggaagcccaagucucaucuuc

SEQ ID NO: 426680 - RNA, 22 nt, Human
caggaggcaucauggagcggac

SEQ ID NO: 426681 - RNA, 22 nt, Human
auauuaggugcucaauacaugc

SEQ ID NO: 426682 - RNA, 22 nt, Human
aucuucaacuugaucauuugaa

SEQ ID NO: 426683 - RNA, 22 nt, Human
ugaagcaguucucagaaguggg

SEQ ID NO: 426684 - RNA, 22 nt, Human
gucaggaugggcagccaaacua

SEQ ID NO: 426685 - RNA, 22 nt, Human
gugcuuuccauccucccugcug

SEQ ID NO: 426686 - RNA, 22 nt, Human
uauaucuuauaugugcagguac

SEQ ID NO: 426687 - RNA, 22 nt, Human
aaugaugggaaggagaaaagca

SEQ ID NO: 426688 - RNA, 22 nt, Human
ccugugucagccccugccucca

SEQ ID NO: 426689 - RNA, 22 nt, Human
cuggccagcauuuuugcuuuag

SEQ ID NO: 426690 - RNA, 22 nt, Human
aaguuucauguggagguagacu

SEQ ID NO: 426691 - RNA, 22 nt, Human
cuaauacucauuucuguaacuc

SEQ ID NO: 426692 - RNA, 22 nt, Human
ccagggugugagaaggaaguag

SEQ ID NO: 426693 - RNA, 23 nt, Human
ggggccugcaccggucugcgcgg

SEQ ID NO: 426694 - RNA, 22 nt, Human
uuuccucugucaugacagcuga

SEQ ID NO: 426695 - RNA, 22 nt, Human
acacauuucucuuuuuguaagu

SEQ ID NO: 426696 - RNA, 22 nt, Human
ccagaggaugcuggucagccuc

SEQ ID NO: 426697 - RNA, 22 nt, Human
guuguauucuucaauaucagag

SEQ ID NO: 426698 - RNA, 22 nt, Human
uagggcuauucugaguaauaau

SEQ ID NO: 426699 - RNA, 22 nt, Human
uucaagaugccagggacgcggc

SEQ ID NO: 426700 - RNA, 22 nt, Human
agcuucucaggagucugaggca

SEQ ID NO: 426701 - RNA, 22 nt, Human
uauauuaacacccacuugccuc

SEQ ID NO: 426702 - RNA, 22 nt, Human
cagcuguggagggaggaaaugc

SEQ ID NO: 426703 - RNA, 21 nt, Human
agaggccuuacaggauagacc

SEQ ID NO: 426704 - RNA, 22 nt, Human
agugugggugagggaggcccuc

SEQ ID NO: 426705 - RNA, 22 nt, Human
uauuuccugcauggugauguaa

SEQ ID NO: 426706 - RNA, 22 nt, Human
ucugucuuuagaggccugugcu

SEQ ID NO: 426707 - RNA, 22 nt, Human
caaaugcagauucaggaguucu

SEQ ID NO: 426708 - RNA, 22 nt, Human
ggagugacucacagcugggaca

SEQ ID NO: 426709 - RNA, 22 nt, Human
ggaggguuagcaaaggcacaga

SEQ ID NO: 426710 - RNA, 19 nt, Human
agcagcuggagguggagug

SEQ ID NO: 426711 - RNA, 22 nt, Human
ccacucugcugugcuccaugau

SEQ ID NO: 426712 - RNA, 22 nt, Human
ccacccuggacaggccucugag

SEQ ID NO: 426713 - RNA, 22 nt, Human
ccugggaggcggagguugcagu

SEQ ID NO: 426714 - RNA, 21 nt, Human
gggcaggucucugaugucaac

SEQ ID NO: 426715 - RNA, 22 nt, Human
ggcuggcaagugucugcucaug

SEQ ID NO: 426716 - RNA, 21 nt, Human
ggagggcagcccagacuggcu

SEQ ID NO: 426717 - RNA, 22 nt, Human
uugcauguguaauuuuucuaaa

SEQ ID NO: 426718 - RNA, 17 nt, Human
agaggcagauacuugga

SEQ ID NO: 426719 - RNA, 22 nt, Human
gcucagagaugucugcugccuu

SEQ ID NO: 426720 - RNA, 20 nt, Human
ugugugcacacaugacauuc

SEQ ID NO: 426721 - RNA, 22 nt, Human
uggaggcauaggccugggcccu

SEQ ID NO: 426722 - RNA, 22 nt, Human
agccauccuacuaccucagcau

SEQ ID NO: 426723 - RNA, 22 nt, Human
ucucagagaggggccgggccuu

SEQ ID NO: 426724 - RNA, 22 nt, Human
ggacacaagcuccggggcugca

SEQ ID NO: 426725 - RNA, 22 nt, Human
cagucccacuagugccaauacc

SEQ ID NO: 426726 - RNA, 22 nt, Human
uguaaguaguaauggaaggaca

SEQ ID NO: 426727 - RNA, 22 nt, Human
gccugggagugcacagugaggu

SEQ ID NO: 426728 - RNA, 22 nt, Human
cuacccagcaccuaggcugccu

SEQ ID NO: 426729 - RNA, 20 nt, Human
cagcaguggaugagaguuuu

SEQ ID NO: 426730 - RNA, 22 nt, Human
gccuaggagacaagcgugaaag

SEQ ID NO: 426731 - RNA, 22 nt, Human
gcaggcugauagaggauuccau

SEQ ID NO: 426732 - RNA, 22 nt, Human
cugccaggcacgugcagcauca

SEQ ID NO: 426733 - RNA, 22 nt, Human
uuuaccaaauagauuaugucag

SEQ ID NO: 426734 - RNA, 22 nt, Human
aaucaguuguccaaaguucaca

SEQ ID NO: 426735 - RNA, 22 nt, Human
aagacauugucauuuuauaauu

SEQ ID NO: 426736 - RNA, 22 nt, Human
agcagccaggaaucugcagagc

SEQ ID NO: 426737 - RNA, 22 nt, Human
ugguacuuggaggcagaaaaau

SEQ ID NO: 426738 - RNA, 22 nt, Human
aagggcagaaagggacgcuuug

SEQ ID NO: 426739 - RNA, 22 nt, Human
gcuugaaaauucauagguauuu

SEQ ID NO: 426740 - RNA, 22 nt, Human
ugggccuggacaaggccacuag

SEQ ID NO: 426741 - RNA, 22 nt, Human
ucagggaccccucugaguggag

SEQ ID NO: 426742 - RNA, 22 nt, Human
cuugcugggguaagucugugcu

SEQ ID NO: 426743 - RNA, 18 nt, Human
ccauuucaugauuauuac

SEQ ID NO: 426744 - RNA, 22 nt, Human
caggcacagaguuauucauuua

SEQ ID NO: 426745 - RNA, 22 nt, Human
caagccucagaaucuucuccau

SEQ ID NO: 426746 - RNA, 22 nt, Human
cugcccugcccaggccuugggc

SEQ ID NO: 426747 - RNA, 22 nt, Human
guccugggccugcugaggcuga

SEQ ID NO: 426748 - RNA, 22 nt, Human
gaaauucacuguauuucuuggg

SEQ ID NO: 426749 - RNA, 22 nt, Human
ugcauacacaugugcacauacg

SEQ ID NO: 426750 - RNA, 22 nt, Human
agcagccaagguaaccugugcu

SEQ ID NO: 426751 - RNA, 22 nt, Human
cagcaggcagccauuucacugu

SEQ ID NO: 426752 - RNA, 22 nt, Human
ugaaggcagcaugcacacuagu

SEQ ID NO: 426753 - RNA, 22 nt, Human
agugggaggcggcugacgggcg

SEQ ID NO: 426754 - RNA, 22 nt, Human
ucauacaucuuguauaucuauc

SEQ ID NO: 426755 - RNA, 22 nt, Human
caugggaggucugcaaggugcu

SEQ ID NO: 426756 - RNA, 22 nt, Human
uguucuugggaaucuuacaguu

SEQ ID NO: 426757 - RNA, 22 nt, Human
agugaaauuccuggucuuuguu

SEQ ID NO: 426758 - RNA, 22 nt, Human
ucucugcugagaagggcuggca

SEQ ID NO: 426759 - RNA, 22 nt, Human
aaacuguaaagcaggugaguag

SEQ ID NO: 426760 - RNA, 22 nt, Human
gcugccugguuucucagcugca

SEQ ID NO: 426761 - RNA, 22 nt, Human
uaaaggcuuuuagugaugguaa

SEQ ID NO: 426762 - RNA, 22 nt, Human
aaaugcacacaccaggaaacua

SEQ ID NO: 426763 - RNA, 22 nt, Human
cccagccagccucuucccauau

SEQ ID NO: 426764 - RNA, 22 nt, Human
uccauuuuagaagaaaauccac

SEQ ID NO: 426765 - RNA, 22 nt, Human
ucugaacagaaaagaugcacaa

SEQ ID NO: 426766 - RNA, 22 nt, Human
acauuugagaugccuuuuaggu

SEQ ID NO: 426767 - RNA, 22 nt, Human
guagccauuggcaaugaagccu

SEQ ID NO: 426768 - RNA, 22 nt, Human
ggccuuggggaggauggugucc

SEQ ID NO: 426769 - RNA, 22 nt, Human
gaaugcacucacccaucacuca

SEQ ID NO: 426770 - RNA, 22 nt, Human
auuugucugcuugcugccuucc

SEQ ID NO: 426771 - RNA, 22 nt, Human
cugggggcaagcagacagcugu

SEQ ID NO: 426772 - RNA, 22 nt, Human
agcagugggggaguguuaguuu

SEQ ID NO: 426773 - RNA, 22 nt, Human
uucuaacucuguuauguguuuc

SEQ ID NO: 426774 - RNA, 22 nt, Human
cagggcugaaaucaagguguag

SEQ ID NO: 426775 - RNA, 22 nt, Human
agcagcugaccagugaguccug

SEQ ID NO: 426776 - RNA, 21 nt, Human
gcaggaugcaucuuggugucu

SEQ ID NO: 426777 - RNA, 22 nt, Human
gaaggccucacucugcagcaua

SEQ ID NO: 426778 - RNA, 22 nt, Human
auacuuuggggguuaguguaga

SEQ ID NO: 426779 - RNA, 22 nt, Human
caggguggggaaauagcgcccu

SEQ ID NO: 426780 - RNA, 22 nt, Human
ccagagcuucggggcggcugua

SEQ ID NO: 426781 - RNA, 22 nt, Human
uuuaauuugaaaugaguaaccc

SEQ ID NO: 426782 - RNA, 22 nt, Human
ccuugcaggggaacaggcagug

SEQ ID NO: 426783 - RNA, 22 nt, Human
aaaggagacuucagaucuccuu

SEQ ID NO: 426784 - RNA, 22 nt, Human
uggccuguggcuuaaggucugu

SEQ ID NO: 426785 - RNA, 22 nt, Human
ucugucugcgcuugcccuggug

SEQ ID NO: 426786 - RNA, 22 nt, Human
uuauucagucugucuagggagu

SEQ ID NO: 426787 - RNA, 22 nt, Human
aggcugcuuucauggccgcccc

SEQ ID NO: 426788 - RNA, 22 nt, Human
aacucaguuacauauuagaaua

SEQ ID NO: 426789 - RNA, 22 nt, Human
aagagcuggcccaaucugagca

SEQ ID NO: 426790 - RNA, 20 nt, Human
ugcagcuucaccugugucau

SEQ ID NO: 426791 - RNA, 19 nt, Human
uccaaaggacccaccucca

SEQ ID NO: 426792 - RNA, 22 nt, Human
gagacugauggggcucccagaa

SEQ ID NO: 426793 - RNA, 22 nt, Human
gaaggcuugcagcucuguggca

SEQ ID NO: 426794 - RNA, 22 nt, Human
gcugcagcuuuaggauccagug

SEQ ID NO: 426795 - RNA, 22 nt, Human
gucaggauguuuauucuccagu

SEQ ID NO: 426796 - RNA, 22 nt, Human
gcagggaccuugcccacccucc

SEQ ID NO: 426797 - RNA, 22 nt, Human
cauuccuuaacguggggagucu

SEQ ID NO: 426798 - RNA, 22 nt, Human
uaguggagguggucugugaacu

SEQ ID NO: 426799 - RNA, 22 nt, Human
cagcaggcccaggugcugguga

SEQ ID NO: 426800 - RNA, 22 nt, Human
agaagcaguuauuuuuugcaca

SEQ ID NO: 426801 - RNA, 21 nt, Human
aguguccuugaucuugccuug

SEQ ID NO: 426802 - RNA, 22 nt, Human
uuuuccuauaugcaaagaaugc

SEQ ID NO: 426803 - RNA, 22 nt, Human
ucagugucuugaccugggugug

SEQ ID NO: 426804 - RNA, 22 nt, Human
ugccucuguugagccuuggcug

SEQ ID NO: 426805 - RNA, 22 nt, Human
gcucaggaucagccaccucuuu

SEQ ID NO: 426806 - RNA, 22 nt, Human
cccugcagagggaugggggcag

SEQ ID NO: 426807 - RNA, 22 nt, Human
cuaggaggcgggggcugcagua

SEQ ID NO: 426808 - RNA, 21 nt, Human
gggugggaggacacagcaggc

SEQ ID NO: 426809 - RNA, 22 nt, Human
aggucacauggauaaugaucag

SEQ ID NO: 426810 - RNA, 22 nt, Human
caguggauuagccagagcugga

SEQ ID NO: 426811 - RNA, 22 nt, Human
cagugcagguggcagaggacag

SEQ ID NO: 426812 - RNA, 22 nt, Human
aauacagauauucagugguacu

SEQ ID NO: 426813 - RNA, 22 nt, Human
uucaaucauuagaaucucaggc

SEQ ID NO: 426814 - RNA, 22 nt, Human
uggccugccccgagauccuggc

SEQ ID NO: 426815 - RNA, 22 nt, Human
gugagcaggauuucauggugua

SEQ ID NO: 426816 - RNA, 22 nt, Human
gaggaaggcuaaggggcuuaga

SEQ ID NO: 426817 - RNA, 22 nt, Human
ugauuuccaguugcugggugcu

SEQ ID NO: 426818 - RNA, 22 nt, Human
acccucccauuuccauguagca

SEQ ID NO: 426819 - RNA, 22 nt, Human
ugaaugaguuuggcugcuguuc

SEQ ID NO: 426820 - RNA, 22 nt, Human
uugcagggaccugcagaaagcu

SEQ ID NO: 426821 - RNA, 22 nt, Human
cuggcuggccggagcgaggcgg

SEQ ID NO: 426822 - RNA, 22 nt, Human
gggcaugagagggcagcuggca

SEQ ID NO: 426823 - RNA, 22 nt, Human
augaagauaagaccaggcugga

SEQ ID NO: 426824 - RNA, 22 nt, Human
cucucuggaagggggagcugau

SEQ ID NO: 426825 - RNA, 22 nt, Human
ggcugcugaguuggccaggaga

SEQ ID NO: 426826 - RNA, 22 nt, Human
gcccaugcacuuucugugaugg

SEQ ID NO: 426827 - RNA, 22 nt, Human
gcuggagcugcagccugggccu

SEQ ID NO: 426828 - RNA, 22 nt, Human
cuggcucauagagcagcuccaa

SEQ ID NO: 426829 - RNA, 22 nt, Human
gccaccaggagcccaguccaaa

SEQ ID NO: 426830 - RNA, 22 nt, Human
uuuaguaaguucacugcaaagc

SEQ ID NO: 426831 - RNA, 22 nt, Human
aauuagggaaaauuuacuugua

SEQ ID NO: 426832 - RNA, 22 nt, Human
agugggcaugaucuggugucug

SEQ ID NO: 426833 - RNA, 22 nt, Human
guggcccugucccaggccuccu

SEQ ID NO: 426834 - RNA, 22 nt, Human
uggcugcucaagggaggaggcu

SEQ ID NO: 426835 - RNA, 22 nt, Human
cuuggcagagggcugggcucag

SEQ ID NO: 426836 - RNA, 22 nt, Human
ggggaccuggccacccauccuu

SEQ ID NO: 426837 - RNA, 22 nt, Human
uuaguaaauaaagucuacuuuc

SEQ ID NO: 426838 - RNA, 22 nt, Human
augugacaauauuuggucuuau

SEQ ID NO: 426839 - RNA, 22 nt, Human
uguuuucauuugauguaacaaa

SEQ ID NO: 426840 - RNA, 22 nt, Human
gcaggcagguggcaucuuguga

SEQ ID NO: 426841 - RNA, 22 nt, Human
uggccugccuucgcugagcuga

SEQ ID NO: 426842 - RNA, 22 nt, Human
gcccucagaggacagcugacuu

SEQ ID NO: 426843 - RNA, 22 nt, Human
uuuuaucagcagggauaacaag

SEQ ID NO: 426844 - RNA, 22 nt, Human
ccagcagagcauggggaggaag

SEQ ID NO: 426845 - RNA, 22 nt, Human
gccucugcucggacuuugccuc

SEQ ID NO: 426846 - RNA, 22 nt, Human
ggggcagauggaacagagcaca

SEQ ID NO: 426847 - RNA, 22 nt, Human
aucuggcuggauucuuagcguu

SEQ ID NO: 426848 - RNA, 23 nt, Human
aucaagauaauccagaugaccua

SEQ ID NO: 426849 - RNA, 22 nt, Human
ccucucucuccugcacacacac

SEQ ID NO: 426850 - RNA, 19 nt, Human
accaggccucagaggcccu

SEQ ID NO: 426851 - RNA, 22 nt, Human
ucagagugcagggaguagcagc

SEQ ID NO: 426852 - RNA, 21 nt, Human
ugcagagauaucugaagcaga

SEQ ID NO: 426853 - RNA, 19 nt, Human
auaaggcaauuggauuugg

SEQ ID NO: 426854 - RNA, 22 nt, Human
gcaguaaaaaaggauaugugca

SEQ ID NO: 426855 - RNA, 22 nt, Human
gaggcugcaggcaaugcugccc

SEQ ID NO: 426856 - RNA, 22 nt, Human
gggggcaguaaccucaaagugu

SEQ ID NO: 426857 - RNA, 22 nt, Human
uuguuuuggagaugagcuaaaa

SEQ ID NO: 426858 - RNA, 18 nt, Human
ugagaggcuauuuuuugc

SEQ ID NO: 426859 - RNA, 18 nt, Human
gaagggagcuggaaugca

SEQ ID NO: 426860 - RNA, 22 nt, Human
gugugcagucugcuaggcaggg

SEQ ID NO: 426861 - RNA, 22 nt, Human
ggcugccucaaagcucaagcuc

SEQ ID NO: 426862 - RNA, 22 nt, Human
uccuuggcagcagggagcauga

SEQ ID NO: 426863 - RNA, 22 nt, Human
augcuguguuuuaaauggaaau

SEQ ID NO: 426864 - RNA, 22 nt, Human
guuagguagaaguuuacuuuga

SEQ ID NO: 426865 - RNA, 20 nt, Human
agugucuggugcagggccuc

SEQ ID NO: 426866 - RNA, 22 nt, Human
ccuggcagcagcacaugccuuc

SEQ ID NO: 426867 - RNA, 22 nt, Human
cauugcacuuuggguccaggac

SEQ ID NO: 426868 - RNA, 22 nt, Human
cagaagcaaaugccuugcugag

SEQ ID NO: 426869 - RNA, 20 nt, Human
agccaggcucaagcuccccc

SEQ ID NO: 426870 - RNA, 22 nt, Human
gcuccagaugaaaggccagagg

SEQ ID NO: 426871 - RNA, 22 nt, Human
uggcuggacagugggcagugga

SEQ ID NO: 426872 - RNA, 22 nt, Human
uuuaugagcaaugcugagggga

SEQ ID NO: 426873 - RNA, 22 nt, Human
ccacuugugaaauaaucaaaua

SEQ ID NO: 426874 - RNA, 22 nt, Human
aucagagaaauggagggcgcuu

SEQ ID NO: 426875 - RNA, 22 nt, Human
uaguggaggguguagcugcugg

SEQ ID NO: 426876 - RNA, 22 nt, Human
aguguuccacacaucuggggaa

SEQ ID NO: 426877 - RNA, 22 nt, Human
cagucccaguuugagacucugg

SEQ ID NO: 426878 - RNA, 22 nt, Human
ggucucagcccucgccagcagc

SEQ ID NO: 426879 - RNA, 22 nt, Human
gcuggcccagggucaccuagga

SEQ ID NO: 426880 - RNA, 22 nt, Human
ucacuuauaaaaugcaagaucu

SEQ ID NO: 426881 - RNA, 16 nt, Human
gagccaggugccuuga

SEQ ID NO: 426882 - RNA, 22 nt, Human
cagcugccccauaaaucacagu

SEQ ID NO: 426883 - RNA, 22 nt, Human
ucuagaaacaugacauugaucu

SEQ ID NO: 426884 - RNA, 22 nt, Human
cagcuccagcccaggcagcucc

SEQ ID NO: 426885 - RNA, 22 nt, Human
uggcagcacuagguacugagcu

SEQ ID NO: 426886 - RNA, 22 nt, Human
gccuggagcucuccacuugggg

SEQ ID NO: 426887 - RNA, 19 nt, Human
ugcaggaggacugagcaga

SEQ ID NO: 426888 - RNA, 22 nt, Human
acaguggaauuuguagaugugu

SEQ ID NO: 426889 - RNA, 22 nt, Human
ucagaggauagaaauacuuauu

SEQ ID NO: 426890 - RNA, 22 nt, Human
gccaggcagcaggaagccagug

SEQ ID NO: 426891 - RNA, 22 nt, Human
gcagcagaguuugggagauggu

SEQ ID NO: 426892 - RNA, 22 nt, Human
ugggcagacauugaguuuguuc

SEQ ID NO: 426893 - RNA, 22 nt, Human
gaggggcagaaugugaucaggg

SEQ ID NO: 426894 - RNA, 22 nt, Human
gccagguguaguggccacaccu

SEQ ID NO: 426895 - RNA, 21 nt, Human
auggagucaggggaaugggcc

SEQ ID NO: 426896 - RNA, 21 nt, Human
cacaggugggucagugaggcc

SEQ ID NO: 426897 - RNA, 22 nt, Human
acaaaauuuuuagacaaggcuu

SEQ ID NO: 426898 - RNA, 22 nt, Human
gcuggccucgcaggcaggaugu

SEQ ID NO: 426899 - RNA, 22 nt, Human
acagaggccgccucucucacgg

SEQ ID NO: 426900 - RNA, 23 nt, Human
aucagucuugguagcugugccca

SEQ ID NO: 426901 - RNA, 22 nt, Human
ucaccaggcaacuauguacucc

SEQ ID NO: 426902 - RNA, 22 nt, Human
ccugaggcccuggcugugcuga

SEQ ID NO: 426903 - RNA, 22 nt, Human
aagcuuuaugaucucucagcua

SEQ ID NO: 426904 - RNA, 23 nt, Human
uuucuguuggguauauauccaag

SEQ ID NO: 426905 - RNA, 22 nt, Human
ggcucugccugcccagcagcac

SEQ ID NO: 426906 - RNA, 22 nt, Human
ucuguuccauguuuuguuccau

SEQ ID NO: 426907 - RNA, 22 nt, Human
guuuacaugcagaaaaucaaug

SEQ ID NO: 426908 - RNA, 22 nt, Human
gaaggccacaaaaaaugucaua

SEQ ID NO: 426909 - RNA, 22 nt, Human
caagcagagacuagauagcugu

SEQ ID NO: 426910 - RNA, 22 nt, Human
gagcugucucuauaugaaugcu

SEQ ID NO: 426911 - RNA, 22 nt, Human
aagggcugcaauccaaaacacu

SEQ ID NO: 426912 - RNA, 19 nt, Human
aggcagcauucuggggcuu

SEQ ID NO: 426913 - RNA, 22 nt, Human
cccuggaggaaaaucugaggcu

SEQ ID NO: 426914 - RNA, 22 nt, Human
agcuggagaugcccagcaccgg

SEQ ID NO: 426915 - RNA, 22 nt, Human
ggcuguggcagcuggaaguggu

SEQ ID NO: 426916 - RNA, 22 nt, Human
ucuggcucucucaucacccaau

SEQ ID NO: 426917 - RNA, 22 nt, Human
gcugucacacauggccccagcu

SEQ ID NO: 426918 - RNA, 22 nt, Human
cauuucuguucucuuccuguac

SEQ ID NO: 426919 - RNA, 22 nt, Human
auuuguacaaauuuauguuagu

SEQ ID NO: 426920 - RNA, 21 nt, Human
auacuuugaauuacagccuug

SEQ ID NO: 426921 - RNA, 22 nt, Human
uggagcagggcaucacugugcg

SEQ ID NO: 426922 - RNA, 22 nt, Human
ccaaaguccauaguuuacuuua

SEQ ID NO: 426923 - RNA, 22 nt, Human
uugaagaggacuuugcagcugu

SEQ ID NO: 426924 - RNA, 22 nt, Human
uuugaaaggguuaugagacuga

SEQ ID NO: 426925 - RNA, 22 nt, Human
uggagcauauucuggagcuugg

SEQ ID NO: 426926 - RNA, 22 nt, Human
cagggagaagucuggucagucc

SEQ ID NO: 426927 - RNA, 22 nt, Human
agggcagagacaugcuuccuga

SEQ ID NO: 426928 - RNA, 22 nt, Human
gguuuauuaaugugaacuguau

SEQ ID NO: 426929 - RNA, 22 nt, Human
gaaggagggugcggaucugagc

SEQ ID NO: 426930 - RNA, 22 nt, Human
uacaucuuugucuaugaccagc

SEQ ID NO: 426931 - RNA, 21 nt, Human
uucuccccagcgaauccucgg

SEQ ID NO: 426932 - RNA, 21 nt, Human
cucacaggaugcaguguuacu

SEQ ID NO: 426933 - RNA, 22 nt, Human
cuuccugguuugaagcucgccg

SEQ ID NO: 426934 - RNA, 22 nt, Human
uccugucugucuuuggucccuu

SEQ ID NO: 426935 - RNA, 22 nt, Human
accaugaugcauccuuaaggaa

SEQ ID NO: 426936 - RNA, 19 nt, Human
agcaaauauaauaguguuc

SEQ ID NO: 426937 - RNA, 22 nt, Human
uaucuauuccaaauaucagcgu

SEQ ID NO: 426938 - RNA, 22 nt, Human
ugauuucccuguagccucugaa

SEQ ID NO: 426939 - RNA, 22 nt, Human
cugcccugagggccuguguguu

SEQ ID NO: 426940 - RNA, 22 nt, Human
gcagccuguuguaccagccugu

SEQ ID NO: 426941 - RNA, 22 nt, Human
acagaagagcacauuuaguaug

SEQ ID NO: 426942 - RNA, 22 nt, Human
ggagaaggaauauuggaguagg

SEQ ID NO: 426943 - RNA, 22 nt, Human
aggauccuccuuagaaaagacc

SEQ ID NO: 426944 - RNA, 22 nt, Human
ccuggggagaagagcuuccccc

SEQ ID NO: 426945 - RNA, 22 nt, Human
ucaguuuuguauguuguaaguc

SEQ ID NO: 426946 - RNA, 22 nt, Human
gaggagcuggcagcgucuccgc

SEQ ID NO: 426947 - RNA, 22 nt, Human
uccucagacacccugcuggcuu

SEQ ID NO: 426948 - RNA, 22 nt, Human
acuucauuguaauauuauagca

SEQ ID NO: 426949 - RNA, 21 nt, Human
ucacagacuggucagugaggc

SEQ ID NO: 426950 - RNA, 22 nt, Human
gcucucugggugugucuagaua

SEQ ID NO: 426951 - RNA, 22 nt, Human
cugagccaaaaagcagagcuug

SEQ ID NO: 426952 - RNA, 22 nt, Human
ugugaagguaaggaggggcaag

SEQ ID NO: 426953 - RNA, 22 nt, Human
uugaaaguagcagcugcauaug

SEQ ID NO: 426954 - RNA, 22 nt, Human
agcuugauuucucugcagugug

SEQ ID NO: 426955 - RNA, 22 nt, Human
gucaggauuuuaaaaucccagu

SEQ ID NO: 426956 - RNA, 22 nt, Human
uacauguaggugacauuuuaau

SEQ ID NO: 426957 - RNA, 22 nt, Human
cauugcacuucugcuuuuccuc

SEQ ID NO: 426958 - RNA, 22 nt, Human
ccaggagcaacuugaaggcaag

SEQ ID NO: 426959 - RNA, 22 nt, Human
uuuccuuccaaaugcccgggag

SEQ ID NO: 426960 - RNA, 22 nt, Human
augucacagucugacucaguga

SEQ ID NO: 426961 - RNA, 22 nt, Human
uuugcauuuguuuagaaccuga

SEQ ID NO: 426962 - RNA, 22 nt, Human
agggacaguuacaucaucagac

SEQ ID NO: 426963 - RNA, 22 nt, Human
ccagggugugggcgucggcacg

SEQ ID NO: 426964 - RNA, 22 nt, Human
cugaaugaggaaaagagugagg

SEQ ID NO: 426965 - RNA, 22 nt, Human
ugugcuucagguugucgccacg

SEQ ID NO: 426966 - RNA, 21 nt, Human
agugaaaugaaguguaugcuc

SEQ ID NO: 426967 - RNA, 22 nt, Human
agugacucacuagcucucagug

SEQ ID NO: 426968 - RNA, 22 nt, Human
ugaggcucagugagcccugcag

SEQ ID NO: 426969 - RNA, 22 nt, Human
uuguuucagcuguaugcuaugu

SEQ ID NO: 426970 - RNA, 22 nt, Human
uucugucacuuaggaggucaua

SEQ ID NO: 426971 - RNA, 22 nt, Human
cuugccuguggcuaguuggcuc

SEQ ID NO: 426972 - RNA, 22 nt, Human
acauguguggacaugaaucuac

SEQ ID NO: 426973 - RNA, 22 nt, Human
gagccauacaaccuauaaagug

SEQ ID NO: 426974 - RNA, 22 nt, Human
ugcugccaccccucaccagagc

SEQ ID NO: 426975 - RNA, 22 nt, Human
agggcugaugcaccauguagcc

SEQ ID NO: 426976 - RNA, 22 nt, Human
caugcuccaaaaacaagagaau

SEQ ID NO: 426977 - RNA, 22 nt, Human
cccaggagguggagcuugcagu

SEQ ID NO: 426978 - RNA, 22 nt, Human
ccagagucuuuauauuccugaa

SEQ ID NO: 426979 - RNA, 22 nt, Human
guuaauaaagguauagaaucag

SEQ ID NO: 426980 - RNA, 18 nt, Human
ucaaagucuggcuccacu

SEQ ID NO: 426981 - RNA, 22 nt, Human
uuugaaaggugucgagaugugu

SEQ ID NO: 426982 - RNA, 17 nt, Human
ucaggauguagcaguag

SEQ ID NO: 426983 - RNA, 22 nt, Human
agggccugcaucaggagcuugg

SEQ ID NO: 426984 - RNA, 22 nt, Human
gcagccugaugaucuggguugu

SEQ ID NO: 426985 - RNA, 22 nt, Human
auuucacucucccugccacuua

SEQ ID NO: 426986 - RNA, 22 nt, Human
accagcagaguugaggaggaca

SEQ ID NO: 426987 - RNA, 22 nt, Human
cucaggcccacagcagacccac

SEQ ID NO: 426988 - RNA, 22 nt, Human
aucuauuucugcuaauaacaau

SEQ ID NO: 426989 - RNA, 22 nt, Human
uuugugaaaugaagucacaacu

SEQ ID NO: 426990 - RNA, 22 nt, Human
gggagcuguaguccagauaccg

SEQ ID NO: 426991 - RNA, 17 nt, Human
gccuggcccagccuggc

SEQ ID NO: 426992 - RNA, 20 nt, Human
gcaaauggaucccacaagcc

SEQ ID NO: 426993 - RNA, 22 nt, Human
uuucuuagcgaugcuugauaaa

SEQ ID NO: 426994 - RNA, 22 nt, Human
ucaguggaacugucugggugag

SEQ ID NO: 426995 - RNA, 22 nt, Human
gccaguggucacugaggaagaa

SEQ ID NO: 426996 - RNA, 19 nt, Human
gggcaguggcacuagggag

SEQ ID NO: 426997 - RNA, 22 nt, Human
cuucagaggggacucaaaguca

SEQ ID NO: 426998 - RNA, 21 nt, Human
cucaaagaccaaaaguguaga

SEQ ID NO: 426999 - RNA, 22 nt, Human
ggucccagguugacagggagac

SEQ ID NO: 427000 - RNA, 22 nt, Human
cagcagagguuggaacaguucu

SEQ ID NO: 427001 - RNA, 22 nt, Human
ucaugcccagagcaguaaauua

SEQ ID NO: 427002 - RNA, 22 nt, Human
caggcugcagugcaguggcuau

SEQ ID NO: 427003 - RNA, 22 nt, Human
cugcugugugaccauggacagg

SEQ ID NO: 427004 - RNA, 22 nt, Human
ucccggcgcugggagguggguc

SEQ ID NO: 427005 - RNA, 22 nt, Human
aaguucaaguaguguuacaugg

SEQ ID NO: 427006 - RNA, 22 nt, Human
agccccucuguggcucugccuc

SEQ ID NO: 427007 - RNA, 22 nt, Human
gcuccuggucuggagcuucaag

SEQ ID NO: 427008 - RNA, 22 nt, Human
cagauaaaggcuuacuaguagu

SEQ ID NO: 427009 - RNA, 22 nt, Human
gcugucugucucugugacuuaa

SEQ ID NO: 427010 - RNA, 22 nt, Human
uggagcugaacuuugaggccag

SEQ ID NO: 427011 - RNA, 22 nt, Human
cacagguguucuugcagugaaa

SEQ ID NO: 427012 - RNA, 22 nt, Human
ccagggcaucacauccaguguu

SEQ ID NO: 427013 - RNA, 22 nt, Human
cuguacaggugaggagggggcu

SEQ ID NO: 427014 - RNA, 22 nt, Human
ugcaucuuacguuuugaaaggg

SEQ ID NO: 427015 - RNA, 22 nt, Human
aaaaaccuuucccauacuaaga

SEQ ID NO: 427016 - RNA, 22 nt, Human
aucaguuuuguucacuacuaua

SEQ ID NO: 427017 - RNA, 22 nt, Human
auccaguuuaugucauauucuu

SEQ ID NO: 427018 - RNA, 22 nt, Human
agcccagguugaggcugcagug

SEQ ID NO: 427019 - RNA, 22 nt, Human
aggcacugaccugcuuccuuga

SEQ ID NO: 427020 - RNA, 22 nt, Human
cuggagccacuuuuuauccuuu

SEQ ID NO: 427021 - RNA, 22 nt, Human
guucccauacaguaucagugcu

SEQ ID NO: 427022 - RNA, 21 nt, Human
uguaugcacgcacaugcacac

SEQ ID NO: 427023 - RNA, 22 nt, Human
cugccucuguugggcauggucu

SEQ ID NO: 427024 - RNA, 22 nt, Human
uuaguuaguggggcugucaguc

SEQ ID NO: 427025 - RNA, 22 nt, Human
cagugcuccugauguacccuug

SEQ ID NO: 427026 - RNA, 18 nt, Human
uggagcugagugcugugc

SEQ ID NO: 427027 - RNA, 23 nt, Human
aggcagcagguuguccaggguga

SEQ ID NO: 427028 - RNA, 20 nt, Human
uccagccacuuccgcugguc

SEQ ID NO: 427029 - RNA, 22 nt, Human
cuuaauuuaaaauaguucaggc

SEQ ID NO: 427030 - RNA, 22 nt, Human
uucacaaaacacuauuuucugg

SEQ ID NO: 427031 - RNA, 22 nt, Human
auuauaggcuugagccaccgug

SEQ ID NO: 427032 - RNA, 22 nt, Human
uaaggcacccuucugaguagag

SEQ ID NO: 427033 - RNA, 22 nt, Human
cugucucucuaggacacugggg

SEQ ID NO: 427034 - RNA, 22 nt, Human
uuacaaagagaaguuguagaau

SEQ ID NO: 427035 - RNA, 22 nt, Human
aaaugcauugguuucuacuugu

SEQ ID NO: 427036 - RNA, 22 nt, Human
ugcacacacgcggcacaucugu

SEQ ID NO: 427037 - RNA, 18 nt, Human
ccugccagucuggagcag

SEQ ID NO: 427038 - RNA, 22 nt, Human
ucuccuuuaagauuuccucagg

SEQ ID NO: 427039 - RNA, 22 nt, Human
acaaaguuaacaguuggauagu

SEQ ID NO: 427040 - RNA, 22 nt, Human
cgcugggggaacagcgagggug

SEQ ID NO: 427041 - RNA, 22 nt, Human
cuuauucuacuccacaagcucu

SEQ ID NO: 427042 - RNA, 22 nt, Human
augggaguuuucucugaugcuc

SEQ ID NO: 427043 - RNA, 22 nt, Human
cuggcagcuucaggacacucgg

SEQ ID NO: 427044 - RNA, 22 nt, Human
auauuagguuggugcaaaagua

SEQ ID NO: 427045 - RNA, 22 nt, Human
caguaugucuacuggacaaagu

SEQ ID NO: 427046 - RNA, 19 nt, Human
guaagggcuaauggacuau

SEQ ID NO: 427047 - RNA, 22 nt, Human
ccagagaggccaaggucguggu

SEQ ID NO: 427048 - RNA, 22 nt, Human
agaaaauuagauuuuacugugu

SEQ ID NO: 427049 - RNA, 22 nt, Human
uuuucucuacaaaauaaccagc

SEQ ID NO: 427050 - RNA, 22 nt, Human
aagggcuccauccuuauaaaug

SEQ ID NO: 427051 - RNA, 22 nt, Human
aaugucugccagaacugaucau

SEQ ID NO: 427052 - RNA, 22 nt, Human
agugagggaugaagaacugcgg

SEQ ID NO: 427053 - RNA, 22 nt, Human
ccaggaggcagaaguugcagug

SEQ ID NO: 427054 - RNA, 22 nt, Human
ccagccugaaaugccucauccu

SEQ ID NO: 427055 - RNA, 22 nt, Human
gccagagguucaacaacugucu

SEQ ID NO: 427056 - RNA, 22 nt, Human
agucucugucguagaucagcgu

SEQ ID NO: 427057 - RNA, 22 nt, Human
cugcagcuuuggaaaccuguuu

SEQ ID NO: 427058 - RNA, 22 nt, Human
gcugccugauuuacauagugaa

SEQ ID NO: 427059 - RNA, 22 nt, Human
agaaaugugaauuucauuuccu

SEQ ID NO: 427060 - RNA, 22 nt, Human
cuagaaaugcucaagagaaagu

SEQ ID NO: 427061 - RNA, 22 nt, Human
uuucauaaacaguagaagacua

SEQ ID NO: 427062 - RNA, 22 nt, Human
gcuuggaaguaggauugggaga

SEQ ID NO: 427063 - RNA, 22 nt, Human
uuuuuguagucauuagaagagg

SEQ ID NO: 427064 - RNA, 18 nt, Human
acagacaaaauggaaaug

SEQ ID NO: 427065 - RNA, 22 nt, Human
uggugcugacaguucugagugc

SEQ ID NO: 427066 - RNA, 21 nt, Human
gggcgaggccugauguggcuc

SEQ ID NO: 427067 - RNA, 22 nt, Human
uuguuuugcuaaagggucauca

SEQ ID NO: 427068 - RNA, 22 nt, Human
agugaaauaaagcugccuaugg

SEQ ID NO: 427069 - RNA, 22 nt, Human
agguauuauuagcaucucuauu

SEQ ID NO: 427070 - RNA, 22 nt, Human
auguccagaguguccuggaaag

SEQ ID NO: 427071 - RNA, 22 nt, Human
cuuauuauaaaauccuguuuga

SEQ ID NO: 427072 - RNA, 22 nt, Human
ccaggcaggcagcguucucagg

SEQ ID NO: 427073 - RNA, 22 nt, Human
gcuggccugggcagaggcuaug

SEQ ID NO: 427074 - RNA, 22 nt, Human
cuggcaggagcauucacagagg

SEQ ID NO: 427075 - RNA, 22 nt, Human
uuccauaacugaccgaaugcau

SEQ ID NO: 427076 - RNA, 22 nt, Human
auugauaucaguuugcugauug

SEQ ID NO: 427077 - RNA, 22 nt, Human
agucaguuaaccucacagcauc

SEQ ID NO: 427078 - RNA, 22 nt, Human
uagaacagaguuccagugauca

SEQ ID NO: 427079 - RNA, 22 nt, Human
caggaccccauauucacugaac

SEQ ID NO: 427080 - RNA, 22 nt, Human
uccaggcaaaaggaacugcuug

SEQ ID NO: 427081 - RNA, 22 nt, Human
uacauaauuaaucuuuaaguuc

SEQ ID NO: 427082 - RNA, 22 nt, Human
gcagggcaaauguggaaaggag

SEQ ID NO: 427083 - RNA, 22 nt, Human
cagcaaaauuugaggauugccu

SEQ ID NO: 427084 - RNA, 22 nt, Human
cagggcucaccacugggauccu

SEQ ID NO: 427085 - RNA, 22 nt, Human
ccugaagaugcuguggccuggu

SEQ ID NO: 427086 - RNA, 22 nt, Human
uucagcagucguccaggaaaag

SEQ ID NO: 427087 - RNA, 22 nt, Human
cagugcccaagaugugccaugc

SEQ ID NO: 427088 - RNA, 22 nt, Human
aggcucugcagaccccagcugu

SEQ ID NO: 427089 - RNA, 22 nt, Human
guuauuuuaacuucucaguaau

SEQ ID NO: 427090 - RNA, 22 nt, Human
uggcacugccaaccugcuaggu

SEQ ID NO: 427091 - RNA, 22 nt, Human
aagccaagaguuaacuauuugu

SEQ ID NO: 427092 - RNA, 18 nt, Human
ugucucaggcugaaacag

SEQ ID NO: 427093 - RNA, 22 nt, Human
uuccauuguuucugucuucacu

SEQ ID NO: 427094 - RNA, 22 nt, Human
gagucaguaauggauaugucau

SEQ ID NO: 427095 - RNA, 22 nt, Human
ccagaggucuccugcacgggau

SEQ ID NO: 427096 - RNA, 22 nt, Human
uucugucucccugauguagagc

SEQ ID NO: 427097 - RNA, 22 nt, Human
aauuaaaagauaacccaugagu

SEQ ID NO: 427098 - RNA, 22 nt, Human
aggcagugcagaguccucuucu

SEQ ID NO: 427099 - RNA, 20 nt, Human
agacccucuggacugggccc

SEQ ID NO: 427100 - RNA, 22 nt, Human
caggcacugugcuagauccuug

SEQ ID NO: 427101 - RNA, 22 nt, Human
ugucucaggggcauugaaauaa

SEQ ID NO: 427102 - RNA, 22 nt, Human
agcagggcagcugaugcgcacg

SEQ ID NO: 427103 - RNA, 22 nt, Human
cucaaguaagaaacagaauugg

SEQ ID NO: 427104 - RNA, 22 nt, Human
uguguacaggccuugcuagacu

SEQ ID NO: 427105 - RNA, 22 nt, Human
ggcucugguugaccaugauggc

SEQ ID NO: 427106 - RNA, 18 nt, Human
agugugugcccuuucagg

SEQ ID NO: 427107 - RNA, 22 nt, Human
uaggccaguggcagguugugug

SEQ ID NO: 427108 - RNA, 19 nt, Human
ccaguagagacagcugcag

SEQ ID NO: 427109 - RNA, 22 nt, Human
gcagcuuucugggacagaaagg

SEQ ID NO: 427110 - RNA, 22 nt, Human
ugaagcaaacgcuucuguuccu

SEQ ID NO: 427111 - RNA, 22 nt, Human
acaguucccgucuugcacagcu

SEQ ID NO: 427112 - RNA, 22 nt, Human
aggugcuggagucugggcagga

SEQ ID NO: 427113 - RNA, 19 nt, Human
ggccccucucacaggaguu

SEQ ID NO: 427114 - RNA, 22 nt, Human
uuuauucuugagagugagaaga

SEQ ID NO: 427115 - RNA, 22 nt, Human
ugcuuaaaauaguucauuuuug

SEQ ID NO: 427116 - RNA, 22 nt, Human
gcugagagugggugcagugcuu

SEQ ID NO: 427117 - RNA, 22 nt, Human
caggagaaacauaauuuucugg

SEQ ID NO: 427118 - RNA, 22 nt, Human
uugcuuccucgaggccagcgug

SEQ ID NO: 427119 - RNA, 22 nt, Human
cuguccuggagggcauaggacg

SEQ ID NO: 427120 - RNA, 22 nt, Human
uggaccugcuggaugggcaggu

SEQ ID NO: 427121 - RNA, 22 nt, Human
gauuuccuaauguggaucucug

SEQ ID NO: 427122 - RNA, 20 nt, Human
gagccugggaagucuaaggu

SEQ ID NO: 427123 - RNA, 22 nt, Human
uaccugagcccagugcagcaua

SEQ ID NO: 427124 - RNA, 22 nt, Human
ucacugcugcugccaugaugga

SEQ ID NO: 427125 - RNA, 22 nt, Human
aaagagcccuuccaugacucuu

SEQ ID NO: 427126 - RNA, 22 nt, Human
gggagucugggcuagacuccuu

SEQ ID NO: 427127 - RNA, 19 nt, Human
acacugaauguagaauugg

SEQ ID NO: 427128 - RNA, 22 nt, Human
ucauuucuguugugcaucacug

SEQ ID NO: 427129 - RNA, 22 nt, Human
uaugcacauugguuuccucauu

SEQ ID NO: 427130 - RNA, 22 nt, Human
caggcaggagccagggauucca

SEQ ID NO: 427131 - RNA, 20 nt, Human
uucacagaggacucagguca

SEQ ID NO: 427132 - RNA, 22 nt, Human
uguccuuuucuuuagugcagcu

SEQ ID NO: 427133 - RNA, 22 nt, Human
ggggcugguggugguuucucca

SEQ ID NO: 427134 - RNA, 22 nt, Human
cagagacagggcagggagugug

SEQ ID NO: 427135 - RNA, 22 nt, Human
cucucuguuaugcuuucaugaa

SEQ ID NO: 427136 - RNA, 22 nt, Human
gcacccaggcuugggcagcaac

SEQ ID NO: 427137 - RNA, 22 nt, Human
agggaccucauguaaguggauu

SEQ ID NO: 427138 - RNA, 22 nt, Human
ccagccuggguguuagaagaca

SEQ ID NO: 427139 - RNA, 22 nt, Human
agguacagaugaaagucuaguu

SEQ ID NO: 427140 - RNA, 22 nt, Human
aggggagcuaacaccagagccc

SEQ ID NO: 427141 - RNA, 22 nt, Human
agagagcauggcacagaggggu

SEQ ID NO: 427142 - RNA, 18 nt, Human
gagaggcccggcugugcc

SEQ ID NO: 427143 - RNA, 22 nt, Human
gcugucugcugggucgcucagg

SEQ ID NO: 427144 - RNA, 17 nt, Human
aggaaacauuuucuuuc

SEQ ID NO: 427145 - RNA, 22 nt, Human
acugccuugaaagauuguugag

SEQ ID NO: 427146 - RNA, 22 nt, Human
ccugcuuaacauugccaugaca

SEQ ID NO: 427147 - RNA, 22 nt, Human
aggagcuguuuuguucagcaaa

SEQ ID NO: 427148 - RNA, 20 nt, Human
gcagcugcccccagucccug

SEQ ID NO: 427149 - RNA, 22 nt, Human
uccagucaggcugaauucaagg

SEQ ID NO: 427150 - RNA, 21 nt, Human
ucacuuauaauguauuugcug

SEQ ID NO: 427151 - RNA, 22 nt, Human
gcagggcauagaggcacggagg

SEQ ID NO: 427152 - RNA, 22 nt, Human
uagaaaucagguuuuuagaaag

SEQ ID NO: 427153 - RNA, 22 nt, Human
ccugccugggcucacuugccag

SEQ ID NO: 427154 - RNA, 21 nt, Human
ucauuugugaucugauuucca

SEQ ID NO: 427155 - RNA, 22 nt, Human
uuuauuagauuaucaaagaggu

SEQ ID NO: 427156 - RNA, 17 nt, Human
uggcaagaauggaaaug

SEQ ID NO: 427157 - RNA, 22 nt, Human
ugaaguccuagaacuccuggua

SEQ ID NO: 427158 - RNA, 22 nt, Human
gcucuccacugaccacggggca

SEQ ID NO: 427159 - RNA, 23 nt, Human
agagcaucaugaugcuaagucug

SEQ ID NO: 427160 - RNA, 22 nt, Human
uggugccuugggccuacagcgc

SEQ ID NO: 427161 - RNA, 17 nt, Human
ccugucuuguuucugcc

SEQ ID NO: 427162 - RNA, 22 nt, Human
ccagcgcuucccaucagggagg

SEQ ID NO: 427163 - RNA, 22 nt, Human
cuggccugaucucaugcugucc

SEQ ID NO: 427164 - RNA, 22 nt, Human
acauuucuaauuuaauguaaca

SEQ ID NO: 427165 - RNA, 23 nt, Human
acagggcauugcuggccucgagg

SEQ ID NO: 427166 - RNA, 17 nt, Human
cccugccaccaggaagc

SEQ ID NO: 427167 - RNA, 22 nt, Human
uaauuucuucaucucugcagcu

SEQ ID NO: 427168 - RNA, 22 nt, Human
gggcucucaugaguguguggua

SEQ ID NO: 427169 - RNA, 21 nt, Human
ugcugccauagaccugaggga

SEQ ID NO: 427170 - RNA, 22 nt, Human
gaagagcuccaaaaacagugag

SEQ ID NO: 427171 - RNA, 22 nt, Human
ugaggcaguugagcuuccugag

SEQ ID NO: 427172 - RNA, 22 nt, Human
ugucuccuacugccuguggauc

SEQ ID NO: 427173 - RNA, 22 nt, Human
agaugcugucacacacacuguu

SEQ ID NO: 427174 - RNA, 22 nt, Human
guccagagauggacgagcagau

SEQ ID NO: 427175 - RNA, 22 nt, Human
ugugcuucugcagagacuauuu

SEQ ID NO: 427176 - RNA, 22 nt, Human
gccagguggucuggcuccagag

SEQ ID NO: 427177 - RNA, 22 nt, Human
ccugugugucugucacugcaca

SEQ ID NO: 427178 - RNA, 22 nt, Human
ccagagacgucggucagggcgc

SEQ ID NO: 427179 - RNA, 22 nt, Human
uacaguuuguuacauuguuagu

SEQ ID NO: 427180 - RNA, 22 nt, Human
ggcagcugauuagcaucaagga

SEQ ID NO: 427181 - RNA, 21 nt, Human
ggagucauuagucauuuccuu

SEQ ID NO: 427182 - RNA, 22 nt, Human
ccugugaggucaucugugguaa

SEQ ID NO: 427183 - RNA, 22 nt, Human
acagcagcuggguucccaccau

SEQ ID NO: 427184 - RNA, 22 nt, Human
ucccagagaaagucaaggucuu

SEQ ID NO: 427185 - RNA, 22 nt, Human
caguggucugugcuucuguaca

SEQ ID NO: 427186 - RNA, 22 nt, Human
ugggcagaguugugaugaacug

SEQ ID NO: 427187 - RNA, 22 nt, Human
ccugagaggcccucucacuguc

SEQ ID NO: 427188 - RNA, 22 nt, Human
agcagccaguucucugugguag

SEQ ID NO: 427189 - RNA, 22 nt, Human
augaggcagcugcuggagaacg

SEQ ID NO: 427190 - RNA, 21 nt, Human
ccuggccaaucugauaggguu

SEQ ID NO: 427191 - RNA, 22 nt, Human
gcaaaggccacuggggcgaugg

SEQ ID NO: 427192 - RNA, 22 nt, Human
agucagcagugaaagcacagcc

SEQ ID NO: 427193 - RNA, 22 nt, Human
cacagggcagagaccugggugc

SEQ ID NO: 427194 - RNA, 22 nt, Human
auguuucaucaguaagguuuug

SEQ ID NO: 427195 - RNA, 19 nt, Human
ucaaaggcaaggaggaacu

SEQ ID NO: 427196 - RNA, 22 nt, Human
gcccaggcuggagugcaguagc

SEQ ID NO: 427197 - RNA, 22 nt, Human
ugggcagcauccuccacaguca

SEQ ID NO: 427198 - RNA, 22 nt, Human
augauacaagcaaaacuaauca

SEQ ID NO: 427199 - RNA, 19 nt, Human
cagcugcaccgugaccauc

SEQ ID NO: 427200 - RNA, 22 nt, Human
ucccagaguucaaugggaaggu

SEQ ID NO: 427201 - RNA, 21 nt, Human
ucagcagcaucugccuagagu

SEQ ID NO: 427202 - RNA, 22 nt, Human
caggcuggagugcaguugugca

SEQ ID NO: 427203 - RNA, 22 nt, Human
agcaggagcccuuaucaccagg

SEQ ID NO: 427204 - RNA, 22 nt, Human
ucaggcagaauuaucaaaagau

SEQ ID NO: 427205 - RNA, 22 nt, Human
aaggcacuagcaagcugccugg

SEQ ID NO: 427206 - RNA, 22 nt, Human
auaacagauacucucugugagg

SEQ ID NO: 427207 - RNA, 22 nt, Human
cugcugugugcuuacuuggguu

SEQ ID NO: 427208 - RNA, 22 nt, Human
acaucucaugaaugauaaauca

SEQ ID NO: 427209 - RNA, 19 nt, Human
gcacacccugcaccaccau

SEQ ID NO: 427210 - RNA, 22 nt, Human
gagaccaggaaguacagcagcc

SEQ ID NO: 427211 - RNA, 22 nt, Human
ccaggagguggagauugcagug

SEQ ID NO: 427212 - RNA, 23 nt, Human
uugaaagguagcuggcagcuaga

SEQ ID NO: 427213 - RNA, 22 nt, Human
cacuguacccauuuaaauaaau

SEQ ID NO: 427214 - RNA, 22 nt, Human
guccucuguuagaaaugugcuu

SEQ ID NO: 427215 - RNA, 22 nt, Human
ucucccacuggccuuguaugau

SEQ ID NO: 427216 - RNA, 22 nt, Human
ucaggaguccugccugcagccu

SEQ ID NO: 427217 - RNA, 22 nt, Human
augcugagacuggagcagcugg

SEQ ID NO: 427218 - RNA, 22 nt, Human
uauaauccauucauugauuucu

SEQ ID NO: 427219 - RNA, 22 nt, Human
gccugagauucccggagccgug

SEQ ID NO: 427220 - RNA, 22 nt, Human
gccagaaagaggaggaccuggg

SEQ ID NO: 427221 - RNA, 22 nt, Human
uccuucagugucccgcucaggu

SEQ ID NO: 427222 - RNA, 22 nt, Human
ugaaaaggguagaucccuaagu

SEQ ID NO: 427223 - RNA, 22 nt, Human
ccagaagggcuauugcagugac

SEQ ID NO: 427224 - RNA, 22 nt, Human
ggcagggcuugucucugugaug

SEQ ID NO: 427225 - RNA, 20 nt, Human
cucaguguggccugaguguu

SEQ ID NO: 427226 - RNA, 22 nt, Human
gggccuggugcuucugacuccu

SEQ ID NO: 427227 - RNA, 22 nt, Human
cauuuauugguuaggccagcag

SEQ ID NO: 427228 - RNA, 22 nt, Human
uccugagggcgauucagcaggu

SEQ ID NO: 427229 - RNA, 22 nt, Human
uggucaguugcaucagagaagu

SEQ ID NO: 427230 - RNA, 22 nt, Human
agaggcaggagguugacuugag

SEQ ID NO: 427231 - RNA, 22 nt, Human
ccagucagccaagcugcagcgg

SEQ ID NO: 427232 - RNA, 22 nt, Human
uggccucugugggagcugagca

SEQ ID NO: 427233 - RNA, 22 nt, Human
aaaaguaauugaugcaaucgua

SEQ ID NO: 427234 - RNA, 19 nt, Human
aagggcugggcaccucacu

SEQ ID NO: 427235 - RNA, 20 nt, Human
ugucagugccugaggcacag

SEQ ID NO: 427236 - RNA, 22 nt, Human
aucuacaggauuuuacagaguu

SEQ ID NO: 427237 - RNA, 22 nt, Human
uuuauuauucucuggagaaugu

SEQ ID NO: 427238 - RNA, 18 nt, Human
gaaaggagagacaguagg

SEQ ID NO: 427239 - RNA, 18 nt, Human
agcagcugugccacacug

SEQ ID NO: 427240 - RNA, 22 nt, Human
aucaaaguaggcauauguuuuu

SEQ ID NO: 427241 - RNA, 22 nt, Human
auuucucaucaagugccaacuc

SEQ ID NO: 427242 - RNA, 22 nt, Human
aggagcugaagucucugcacuc

SEQ ID NO: 427243 - RNA, 22 nt, Human
uuuucauuuuuguagaugcaag

SEQ ID NO: 427244 - RNA, 22 nt, Human
acauguguauagccuguauaga

SEQ ID NO: 427245 - RNA, 22 nt, Human
ggcugcuguacugaugucaguu

SEQ ID NO: 427246 - RNA, 22 nt, Human
cuuacauuuaaucaugugucau

SEQ ID NO: 427247 - RNA, 22 nt, Human
cuggagccaugucuugacugcu

SEQ ID NO: 427248 - RNA, 22 nt, Human
ggagccagagggaugcaguuga

SEQ ID NO: 427249 - RNA, 22 nt, Human
cuuucacagcugugcuuaugau

SEQ ID NO: 427250 - RNA, 21 nt, Human
uuuuuucuugcgugaggccug

SEQ ID NO: 427251 - RNA, 22 nt, Human
aguccaggaguugggugacauu

SEQ ID NO: 427252 - RNA, 22 nt, Human
ucacaggagggagagacaccca

SEQ ID NO: 427253 - RNA, 22 nt, Human
uaaaaucauucuggugucagua

SEQ ID NO: 427254 - RNA, 22 nt, Human
uucacaaagcuggagcauuucc

SEQ ID NO: 427255 - RNA, 22 nt, Human
agcuggagaucaugcugauacu

SEQ ID NO: 427256 - RNA, 23 nt, Human
augcaguauaugucaguaguuua

SEQ ID NO: 427257 - RNA, 22 nt, Human
gaggcuccccaugaggccccag

SEQ ID NO: 427258 - RNA, 22 nt, Human
gugccugcagcaauccauggca

SEQ ID NO: 427259 - RNA, 22 nt, Human
ucagcugccucucccuggaaga

SEQ ID NO: 427260 - RNA, 22 nt, Human
aucaggauagucuguaaauugu

SEQ ID NO: 427261 - RNA, 22 nt, Human
uggcugaauaaaauaugguguu

SEQ ID NO: 427262 - RNA, 22 nt, Human
uuuguggcaggagcggagaccg

SEQ ID NO: 427263 - RNA, 21 nt, Human
uuuagggaccaggucauaggc

SEQ ID NO: 427264 - RNA, 22 nt, Human
cagcuuugccaaguaaggucuu

SEQ ID NO: 427265 - RNA, 22 nt, Human
cuucaagagaaugcagggaugu

SEQ ID NO: 427266 - RNA, 22 nt, Human
gucccagaggcuuuggccacag

SEQ ID NO: 427267 - RNA, 22 nt, Human
uucauguaauuccauaagguaa

SEQ ID NO: 427268 - RNA, 22 nt, Human
gaaaucugcggugaggccugag

SEQ ID NO: 427269 - RNA, 23 nt, Human
auucuucauuaucuucuagaaaa

SEQ ID NO: 427270 - RNA, 22 nt, Human
ugccagcacaaguuaagagauc

SEQ ID NO: 427271 - RNA, 22 nt, Human
ugcaugcagcuggugauaagaa

SEQ ID NO: 427272 - RNA, 22 nt, Human
ccugagagcagcuuccugcuua

SEQ ID NO: 427273 - RNA, 22 nt, Human
accugaggccuccccagcagac

SEQ ID NO: 427274 - RNA, 22 nt, Human
uuauuacacugaaagaauugcg

SEQ ID NO: 427275 - RNA, 22 nt, Human
accaucaguacuggaugcugac

SEQ ID NO: 427276 - RNA, 19 nt, Human
ucccuuccugucgggcucc

SEQ ID NO: 427277 - RNA, 22 nt, Human
agucccaggcagccgagccggu

SEQ ID NO: 427278 - RNA, 22 nt, Human
ugccucuguggaaauggugguc

SEQ ID NO: 427279 - RNA, 18 nt, Human
cuccagggaacucaguca

SEQ ID NO: 427280 - RNA, 21 nt, Human
aggaggaacccguggcugggc

SEQ ID NO: 427281 - RNA, 22 nt, Human
agggccuggugaccuggguccu

SEQ ID NO: 427282 - RNA, 22 nt, Human
agccauugaguuuuaugugcua

SEQ ID NO: 427283 - RNA, 22 nt, Human
gcaaaugaguuguaacauaaaa

SEQ ID NO: 427284 - RNA, 20 nt, Human
cugugccuaaaccuccgggu

SEQ ID NO: 427285 - RNA, 22 nt, Human
gggauggcucaaaggagucagg

SEQ ID NO: 427286 - RNA, 22 nt, Human
uccuggccgccgcguggggccg

SEQ ID NO: 427287 - RNA, 22 nt, Human
cugagcugcuuugcuuuugggg

SEQ ID NO: 427288 - RNA, 20 nt, Human
gagauggcuaagugcugaac

SEQ ID NO: 427289 - RNA, 22 nt, Human
cuccagaagacccauccucaug

SEQ ID NO: 427290 - RNA, 22 nt, Human
agucaccaacaugguucccagg

SEQ ID NO: 427291 - RNA, 22 nt, Human
gcucugagcacugugcggcugg

SEQ ID NO: 427292 - RNA, 22 nt, Human
ucccuggcuguguucaggugcg

SEQ ID NO: 427293 - RNA, 22 nt, Human
aaaaaugcugugguagcugugu

SEQ ID NO: 427294 - RNA, 22 nt, Human
aggucccaggcauagcuggucu

SEQ ID NO: 427295 - RNA, 22 nt, Human
ggaggagacggagugauuagug

SEQ ID NO: 427296 - RNA, 22 nt, Human
ugcccaggcuccucgcagccuu

SEQ ID NO: 427297 - RNA, 22 nt, Human
caaggcaguuccccagagggcu

SEQ ID NO: 427298 - RNA, 22 nt, Human
agaaauguuuauggcugccuau

SEQ ID NO: 427299 - RNA, 22 nt, Human
ggagccuguuaguugagugcuc

SEQ ID NO: 427300 - RNA, 22 nt, Human
ucuuaagcagagaagaaguuga

SEQ ID NO: 427301 - RNA, 22 nt, Human
gucucagauucagacaucuaca

SEQ ID NO: 427302 - RNA, 21 nt, Human
cucaggauggcggccuggugg

SEQ ID NO: 427303 - RNA, 22 nt, Human
cuggguggaaagugcugagaau

SEQ ID NO: 427304 - RNA, 22 nt, Human
ucuuuccuguaacugcuguuca

SEQ ID NO: 427305 - RNA, 22 nt, Human
agacagcaggggagucugguuu

SEQ ID NO: 427306 - RNA, 22 nt, Human
aaguucaauggaaaagcuuuag

SEQ ID NO: 427307 - RNA, 22 nt, Human
gccagccugugggggcucugug

SEQ ID NO: 427308 - RNA, 22 nt, Human
gcucaggagcucuugguggcgc

SEQ ID NO: 427309 - RNA, 23 nt, Human
agguucaggagauggaggaacaa

SEQ ID NO: 427310 - RNA, 18 nt, Human
cuucagugacagucuggc

SEQ ID NO: 427311 - RNA, 19 nt, Human
ucgagucaagacacuaggc

SEQ ID NO: 427312 - RNA, 22 nt, Human
cccaggaguaagugacauuguu

SEQ ID NO: 427313 - RNA, 22 nt, Human
uuccucucgcucuccggggccc

SEQ ID NO: 427314 - RNA, 22 nt, Human
cggcuggugucgggcacagcaa

SEQ ID NO: 427315 - RNA, 22 nt, Human
cuuuuaaugggagcaguauuug

SEQ ID NO: 427316 - RNA, 22 nt, Human
gucucuuuuauggugaguugau

SEQ ID NO: 427317 - RNA, 22 nt, Human
ucucugaguucuccuccagccc

SEQ ID NO: 427318 - RNA, 22 nt, Human
cagagcuggagcuugaauggag

SEQ ID NO: 427319 - RNA, 22 nt, Human
cagcuugcaguacuuguuuuug

SEQ ID NO: 427320 - RNA, 17 nt, Human
cugagcauccgugcucu

SEQ ID NO: 427321 - RNA, 22 nt, Human
acccagccacagcauugaggga

SEQ ID NO: 427322 - RNA, 22 nt, Human
ucuugcacuucaugaauauguu

SEQ ID NO: 427323 - RNA, 22 nt, Human
acaggggauugauuggaagucu

SEQ ID NO: 427324 - RNA, 20 nt, Human
auacaaagagauugauguau

SEQ ID NO: 427325 - RNA, 22 nt, Human
ugcagggcuauaacuccauucu

SEQ ID NO: 427326 - RNA, 22 nt, Human
ugcaauaacuacuuuaauguug

SEQ ID NO: 427327 - RNA, 22 nt, Human
auacuguaucacuugugaguga

SEQ ID NO: 427328 - RNA, 22 nt, Human
agggcgacaauggagagcguuu

SEQ ID NO: 427329 - RNA, 22 nt, Human
cuguuuucaaagagagagaaug

SEQ ID NO: 427330 - RNA, 22 nt, Human
cugcugccggcgagccucccuu

SEQ ID NO: 427331 - RNA, 18 nt, Human
uccugccugcgggcuccc

SEQ ID NO: 427332 - RNA, 19 nt, Human
accaggcuuauggucagug

SEQ ID NO: 427333 - RNA, 22 nt, Human
uggagcaggugcucaggguaau

SEQ ID NO: 427334 - RNA, 22 nt, Human
ugcagugccucggcagugcagc

SEQ ID NO: 427335 - RNA, 22 nt, Human
ugaaaggugacauuucuuggau

SEQ ID NO: 427336 - RNA, 22 nt, Human
gaggaaaauggaguguaauuaa

SEQ ID NO: 427337 - RNA, 22 nt, Human
aagggcagcuauuaucgucauc

SEQ ID NO: 427338 - RNA, 23 nt, Human
ucccagggaaggugagcgaggcu

SEQ ID NO: 427339 - RNA, 22 nt, Human
aucuggcuuggguguggguagc

SEQ ID NO: 427340 - RNA, 22 nt, Human
accauguuggccaagcuggucu

SEQ ID NO: 427341 - RNA, 22 nt, Human
gaggaagggcugccugccgggc

SEQ ID NO: 427342 - RNA, 22 nt, Human
uacccagggcuuuucugaugca

SEQ ID NO: 427343 - RNA, 22 nt, Human
acaaagugaauugcaucgaguu

SEQ ID NO: 427344 - RNA, 22 nt, Human
uauuacugagguuuuauggagu

SEQ ID NO: 427345 - RNA, 20 nt, Human
gcucccugguagaaauguuu

SEQ ID NO: 427346 - RNA, 22 nt, Human
cacagggccacuuucccaguaa

SEQ ID NO: 427347 - RNA, 22 nt, Human
aaaugugcuugugaucagcugu

SEQ ID NO: 427348 - RNA, 21 nt, Human
cgcagagcgaacuugcggcgc

SEQ ID NO: 427349 - RNA, 21 nt, Human
cugcuuuacuucagaggaucu

SEQ ID NO: 427350 - RNA, 22 nt, Human
guccagugucuucuacauaaca

SEQ ID NO: 427351 - RNA, 22 nt, Human
ccugccaggcuuugggcuucug

SEQ ID NO: 427352 - RNA, 22 nt, Human
acaaagcuagagaagagaauug

SEQ ID NO: 427353 - RNA, 20 nt, Human
ccagguggugccuggagagg

SEQ ID NO: 427354 - RNA, 22 nt, Human
cuguguccugcgucaagccaau

SEQ ID NO: 427355 - RNA, 22 nt, Human
ggcagggaguggagacucccua

SEQ ID NO: 427356 - RNA, 22 nt, Human
aagcagccuggcaugaugcuuu

SEQ ID NO: 427357 - RNA, 22 nt, Human
cuuccucccccacacacucacu

SEQ ID NO: 427358 - RNA, 22 nt, Human
ugcugccaccugguggcugaag

SEQ ID NO: 427359 - RNA, 19 nt, Human
auuuacugccuaaaaucuc

SEQ ID NO: 427360 - RNA, 22 nt, Human
aauuuuauuaacuggauguagc

SEQ ID NO: 427361 - RNA, 22 nt, Human
ccagggugagaaaaggcuggau

SEQ ID NO: 427362 - RNA, 22 nt, Human
ccuggcagcuccuccccggcgg

SEQ ID NO: 427363 - RNA, 22 nt, Human
uacaaaguuugggguccucaaa

SEQ ID NO: 427364 - RNA, 22 nt, Human
acacaucuuagacugaaauaug

SEQ ID NO: 427365 - RNA, 22 nt, Human
agcucccagcagagcuggccac

SEQ ID NO: 427366 - RNA, 22 nt, Human
uugcaaaggggaauaaagcaau

SEQ ID NO: 427367 - RNA, 22 nt, Human
acccaggguagagugcaguggc

SEQ ID NO: 427368 - RNA, 22 nt, Human
ggaaggucgagcugcaucuggc

SEQ ID NO: 427369 - RNA, 22 nt, Human
uagugcacacgcauguagcagu

SEQ ID NO: 427370 - RNA, 22 nt, Human
ucugcagcgugcaggcuggugc

SEQ ID NO: 427371 - RNA, 22 nt, Human
cggucaggugcagcguuggcac

SEQ ID NO: 427372 - RNA, 22 nt, Human
augcuauacauaugacaucaca

SEQ ID NO: 427373 - RNA, 22 nt, Human
aguguccaacucagcuugucaa

SEQ ID NO: 427374 - RNA, 22 nt, Human
cugggagucaccaggagcaagg

SEQ ID NO: 427375 - RNA, 22 nt, Human
acagaauucuaguauguggcuu

SEQ ID NO: 427376 - RNA, 22 nt, Human
uccaggcaugucccaagccgga

SEQ ID NO: 427377 - RNA, 22 nt, Human
aggcugaggagggauguugcuu

SEQ ID NO: 427378 - RNA, 22 nt, Human
caagaacaguuugccaaauugg

SEQ ID NO: 427379 - RNA, 22 nt, Human
auguacauuuagaucauuucug

SEQ ID NO: 427380 - RNA, 22 nt, Human
gggccuguguguucaggagccu

SEQ ID NO: 427381 - RNA, 23 nt, Human
guggccuccccggaaugccucgc

SEQ ID NO: 427382 - RNA, 21 nt, Human
ugccaggccugagcugggguc

SEQ ID NO: 427383 - RNA, 22 nt, Human
aggccagaaaugucagggagug

SEQ ID NO: 427384 - RNA, 21 nt, Human
agagagaaggccauauggucc

SEQ ID NO: 427385 - RNA, 22 nt, Human
agcugcuaugacaacaccagcc

SEQ ID NO: 427386 - RNA, 22 nt, Human
agccaggcugcaguuggcuggc

SEQ ID NO: 427387 - RNA, 19 nt, Human
auagaaaggguuaaagaca

SEQ ID NO: 427388 - RNA, 22 nt, Human
uuuucuaacaucuaguaauuug

SEQ ID NO: 427389 - RNA, 22 nt, Human
gagaggaguagacacuuugguu

SEQ ID NO: 427390 - RNA, 22 nt, Human
aucugccuccaaguccaugugu

SEQ ID NO: 427391 - RNA, 22 nt, Human
cuggaaggucuguccccacugc

SEQ ID NO: 427392 - RNA, 22 nt, Human
ggcuccuguggcaagacagcuu

SEQ ID NO: 427393 - RNA, 23 nt, Human
agaguccacaagauuuuccagug

SEQ ID NO: 427394 - RNA, 22 nt, Human
gaaaggugccccauaggcagga

SEQ ID NO: 427395 - RNA, 22 nt, Human
aagggcuggcccugggaagagu

SEQ ID NO: 427396 - RNA, 18 nt, Human
ggcugugcguggaggcug

SEQ ID NO: 427397 - RNA, 21 nt, Human
gcagaugggagucaucaggcu

SEQ ID NO: 427398 - RNA, 20 nt, Human
ugaaaggugggaauuguggg

SEQ ID NO: 427399 - RNA, 22 nt, Human
ucccagggugcgccugcccucg

SEQ ID NO: 427400 - RNA, 22 nt, Human
gcagagugaggaagagcuucca

SEQ ID NO: 427401 - RNA, 22 nt, Human
cucacugucuguacuagcugau

SEQ ID NO: 427402 - RNA, 22 nt, Human
ccugggcagguguggcuucccc

SEQ ID NO: 427403 - RNA, 22 nt, Human
cagcaguguacaaggugucaga

SEQ ID NO: 427404 - RNA, 22 nt, Human
cucuggcuuugcucaugcaucc

SEQ ID NO: 427405 - RNA, 20 nt, Human
ggaagcagagaacuguuuuc

SEQ ID NO: 427406 - RNA, 22 nt, Human
gcccacagcucguuccucuccu

SEQ ID NO: 427407 - RNA, 22 nt, Human
gcagcccaauggacugagacag

SEQ ID NO: 427408 - RNA, 22 nt, Human
cacauguuuggcaugucaccaa

SEQ ID NO: 427409 - RNA, 22 nt, Human
acaagaauuauuucuaguuaac

SEQ ID NO: 427410 - RNA, 22 nt, Human
cagucuucuaaccuagcagccu

SEQ ID NO: 427411 - RNA, 18 nt, Human
acaguaaagaaaggaauu

SEQ ID NO: 427412 - RNA, 22 nt, Human
cccaaggcugcagugagcauga

SEQ ID NO: 427413 - RNA, 22 nt, Human
augacagaaggccucccugaca

SEQ ID NO: 427414 - RNA, 22 nt, Human
auuagagguacaaaccuucacu

SEQ ID NO: 427415 - RNA, 21 nt, Human
gcaggguccuuuccauuccua

SEQ ID NO: 427416 - RNA, 22 nt, Human
aggcagcagggccacuggcuga

SEQ ID NO: 427417 - RNA, 22 nt, Human
ggcuuuaucaaaugagacccug

SEQ ID NO: 427418 - RNA, 21 nt, Human
ucccagagugcuugggacugc

SEQ ID NO: 427419 - RNA, 22 nt, Human
uguucauuuggcccuuuuguau

SEQ ID NO: 427420 - RNA, 22 nt, Human
aaguugaaugcguacgugacau

SEQ ID NO: 427421 - RNA, 22 nt, Human
acagaggaagcauauagcacaa

SEQ ID NO: 427422 - RNA, 16 nt, Human
cagaguguaaacagga

SEQ ID NO: 427423 - RNA, 22 nt, Human
auugaaaggcaaaguaggaagc

SEQ ID NO: 427424 - RNA, 22 nt, Human
acagggcagagaggcaggcuug

SEQ ID NO: 427425 - RNA, 22 nt, Human
uuucacaaguaaaguccuaagu

SEQ ID NO: 427426 - RNA, 22 nt, Human
uggccuuccuggugacucauga

SEQ ID NO: 427427 - RNA, 22 nt, Human
accaucuuaaggggacuucuua

SEQ ID NO: 427428 - RNA, 22 nt, Human
ugggccuguugggguugaguua

SEQ ID NO: 427429 - RNA, 22 nt, Human
aggcugagcuggcccuugaaau

SEQ ID NO: 427430 - RNA, 22 nt, Human
gugccuggagcuaauguguaua

SEQ ID NO: 427431 - RNA, 22 nt, Human
caaaguuaugaaugauaagauu

SEQ ID NO: 427432 - RNA, 22 nt, Human
ugaugaaaauaugauucugagg

SEQ ID NO: 427433 - RNA, 22 nt, Human
ugcuggcccaugaagacgcagu

SEQ ID NO: 427434 - RNA, 22 nt, Human
uuccucucaacaugccugccgg

SEQ ID NO: 427435 - RNA, 22 nt, Human
uccucccugaguggggacagcu

SEQ ID NO: 427436 - RNA, 22 nt, Human
ucuucaaacugaaaauuuagaa

SEQ ID NO: 427437 - RNA, 22 nt, Human
cuggagccauguauagccuaug

SEQ ID NO: 427438 - RNA, 22 nt, Human
agauuuccaucuuuuucaugug

SEQ ID NO: 427439 - RNA, 22 nt, Human
cuggagagaccgaaagaggcug

SEQ ID NO: 427440 - RNA, 22 nt, Human
agggcucugggguggcagagau

SEQ ID NO: 427441 - RNA, 22 nt, Human
uuucauaauagugcaguuuguu

SEQ ID NO: 427442 - RNA, 22 nt, Human
gaaaucugcccagugcacuggu

SEQ ID NO: 427443 - RNA, 22 nt, Human
caggaggcagaggaugcccagu

SEQ ID NO: 427444 - RNA, 22 nt, Human
cggcuggguagaggugccgggu

SEQ ID NO: 427445 - RNA, 22 nt, Human
ucccagggacucucugccuucc

SEQ ID NO: 427446 - RNA, 19 nt, Human
cugucaggggcuggauguu

SEQ ID NO: 427447 - RNA, 22 nt, Human
aucuggaauccuuguggacaau

SEQ ID NO: 427448 - RNA, 22 nt, Human
aggcugaguuucucauucucgc

SEQ ID NO: 427449 - RNA, 22 nt, Human
ggcugaaguguaguggcucacu

SEQ ID NO: 427450 - RNA, 22 nt, Human
cagggcucagaagacagaccuc

SEQ ID NO: 427451 - RNA, 22 nt, Human
gccucugcaccaguacugugcc

SEQ ID NO: 427452 - RNA, 22 nt, Human
guucagcccacagagggggccg

SEQ ID NO: 427453 - RNA, 22 nt, Human
uuauuagcugggcuucagggug

SEQ ID NO: 427454 - RNA, 22 nt, Human
ugcaguggaagagguggagauc

SEQ ID NO: 427455 - RNA, 22 nt, Human
acagaggcagugugagauacug

SEQ ID NO: 427456 - RNA, 22 nt, Human
cauuucugcagaauugcucuuc

SEQ ID NO: 427457 - RNA, 22 nt, Human
aagauuucuuacuuauugaugc

SEQ ID NO: 427458 - RNA, 22 nt, Human
ggucccugcugaagccuuggug

SEQ ID NO: 427459 - RNA, 22 nt, Human
caggccagguggcaggcaaaac

SEQ ID NO: 427460 - RNA, 23 nt, Human
cuccucguaacucuguggugggu

SEQ ID NO: 427461 - RNA, 22 nt, Human
caaggccauauugccuguaugu

SEQ ID NO: 427462 - RNA, 22 nt, Human
uagcugccuagacagcuauagc

SEQ ID NO: 427463 - RNA, 23 nt, Human
gaggcagcuccugcagugcccug

SEQ ID NO: 427464 - RNA, 22 nt, Human
acauucuguuuccccaaagaga

SEQ ID NO: 427465 - RNA, 22 nt, Human
agugucugaaccaccggggcau

SEQ ID NO: 427466 - RNA, 22 nt, Human
agcugaggcucugagagggaag

SEQ ID NO: 427467 - RNA, 22 nt, Human
gcagcuuuagaaacaagggcug

SEQ ID NO: 427468 - RNA, 22 nt, Human
cagucccagacccagaaggugg

SEQ ID NO: 427469 - RNA, 22 nt, Human
aggcugagcggggucccagagc

SEQ ID NO: 427470 - RNA, 22 nt, Human
auucauucugaccucaagagaa

SEQ ID NO: 427471 - RNA, 22 nt, Human
gagagggccgggggccagcucc

SEQ ID NO: 427472 - RNA, 22 nt, Human
caugggcuuuggaggcuggagg

SEQ ID NO: 427473 - RNA, 22 nt, Human
ugcauauuauguguaucugucu

SEQ ID NO: 427474 - RNA, 22 nt, Human
ccuuuuucccuggagggacagc

SEQ ID NO: 427475 - RNA, 22 nt, Human
cucuggacacuggcaugggguc

SEQ ID NO: 427476 - RNA, 22 nt, Human
caguuucuauggcugggcucug

SEQ ID NO: 427477 - RNA, 23 nt, Human
cuagggcaguauuucacagacac

SEQ ID NO: 427478 - RNA, 22 nt, Human
ugaguccacuuuaaaaugucag

SEQ ID NO: 427479 - RNA, 22 nt, Human
gcuggccagggcugcucgcgga

SEQ ID NO: 427480 - RNA, 22 nt, Human
uguaggccuauguccagcaauu

SEQ ID NO: 427481 - RNA, 22 nt, Human
agccccaguccgcugcgggcgg

SEQ ID NO: 427482 - RNA, 22 nt, Human
uuucuauuggcgucacuguugu

SEQ ID NO: 427483 - RNA, 22 nt, Human
ccacccagcagaggaggcaaga

SEQ ID NO: 427484 - RNA, 22 nt, Human
cuguuaaucugcuugcaugaug

SEQ ID NO: 427485 - RNA, 22 nt, Human
auuucuucaggucagaaauaga

SEQ ID NO: 427486 - RNA, 22 nt, Human
gguguccuugcagaaggcggcg

SEQ ID NO: 427487 - RNA, 22 nt, Human
ugaaagguuaaaaguaguauug

SEQ ID NO: 427488 - RNA, 22 nt, Human
uucuuguauguaugcaaaauca

SEQ ID NO: 427489 - RNA, 19 nt, Human
ucucaauguucagaaagcu

SEQ ID NO: 427490 - RNA, 22 nt, Human
ugagccaguggaagauggcagu

SEQ ID NO: 427491 - RNA, 22 nt, Human
agggagagguugaaaccucagu

SEQ ID NO: 427492 - RNA, 22 nt, Human
uacaguaacauguuguacaagc

SEQ ID NO: 427493 - RNA, 22 nt, Human
agcccuccucacaucagcgucc

SEQ ID NO: 427494 - RNA, 22 nt, Human
cuccucuuuacccgcauggucu

SEQ ID NO: 427495 - RNA, 22 nt, Human
gagggcuccacacgggcccagc

SEQ ID NO: 427496 - RNA, 23 nt, Human
agcuggaggcugucuacucccaa

SEQ ID NO: 427497 - RNA, 22 nt, Human
ugaagccagcuuuggaagacac

SEQ ID NO: 427498 - RNA, 19 nt, Human
aggcugugagggaggacuc

SEQ ID NO: 427499 - RNA, 22 nt, Human
agugcagugguuaggagccagg

SEQ ID NO: 427500 - RNA, 23 nt, Human
gaagcagaugucugaguaggcag

SEQ ID NO: 427501 - RNA, 22 nt, Human
uugaagcaaauucugugcagua

SEQ ID NO: 427502 - RNA, 21 nt, Human
cccaagggaggcaggauaagg

SEQ ID NO: 427503 - RNA, 22 nt, Human
agcagcaggagccgugggguga

SEQ ID NO: 427504 - RNA, 22 nt, Human
accacccucagcagagcugaaa

SEQ ID NO: 427505 - RNA, 22 nt, Human
gugcuuccaucuagagggucac

SEQ ID NO: 427506 - RNA, 22 nt, Human
cuccagugagcgcggggcaugg

SEQ ID NO: 427507 - RNA, 22 nt, Human
caguauuuauggcuugaguauu

SEQ ID NO: 427508 - RNA, 22 nt, Human
agaaaucuaagaugcucaagga

SEQ ID NO: 427509 - RNA, 22 nt, Human
gccuggagcccaguguggggcu

SEQ ID NO: 427510 - RNA, 22 nt, Human
uuuaaauuuguguuuagagggu

SEQ ID NO: 427511 - RNA, 22 nt, Human
ccagcugcccaagaggcauccu

SEQ ID NO: 427512 - RNA, 23 nt, Human
acacauuuuucccguucugaggu

SEQ ID NO: 427513 - RNA, 22 nt, Human
cagaaugcaaauuuuauaauau

SEQ ID NO: 427514 - RNA, 22 nt, Human
ccaggccuuccaguacgcagaa

SEQ ID NO: 427515 - RNA, 22 nt, Human
ugcacagcgggugucugucagg

SEQ ID NO: 427516 - RNA, 22 nt, Human
ucaggaauccagacagggcaca

SEQ ID NO: 427517 - RNA, 19 nt, Human
uggcuucuguuuucauguu

SEQ ID NO: 427518 - RNA, 22 nt, Human
uggcuggcaaggcuggagucag

SEQ ID NO: 427519 - RNA, 22 nt, Human
ugguccagaugccuuggcuuua

SEQ ID NO: 427520 - RNA, 22 nt, Human
gguggcagaggugcaucagccc

SEQ ID NO: 427521 - RNA, 22 nt, Human
cagcagcaaaucuagaagagga

SEQ ID NO: 427522 - RNA, 18 nt, Human
agacccucuaagggcagu

SEQ ID NO: 427523 - RNA, 22 nt, Human
ggcagccaugucccagggcuuc

SEQ ID NO: 427524 - RNA, 19 nt, Human
agcagagcagggccguggg

SEQ ID NO: 427525 - RNA, 22 nt, Human
aggcugaggcggguagaucacc

SEQ ID NO: 427526 - RNA, 22 nt, Human
aacaaauguaaaaugcagaugc

SEQ ID NO: 427527 - RNA, 22 nt, Human
uagauaaauuagaaaguuuacu

SEQ ID NO: 427528 - RNA, 22 nt, Human
guuauguacuuuuuaaaucuug

SEQ ID NO: 427529 - RNA, 22 nt, Human
cccaggaggcagaaguugcagu

SEQ ID NO: 427530 - RNA, 22 nt, Human
cccaggcagcggggucuccuug

SEQ ID NO: 427531 - RNA, 22 nt, Human
uucagagacagcaaccaggaca

SEQ ID NO: 427532 - RNA, 21 nt, Human
ugaggcucuguugugccugca

SEQ ID NO: 427533 - RNA, 22 nt, Human
uccucagaaaccccugugaggu

SEQ ID NO: 427534 - RNA, 22 nt, Human
ggcagggaaacagcugauccca

SEQ ID NO: 427535 - RNA, 22 nt, Human
aggaccugagaguuggaaaucc

SEQ ID NO: 427536 - RNA, 22 nt, Human
cucuggagguugagcccagcaa

SEQ ID NO: 427537 - RNA, 22 nt, Human
gcagugcuuuagucuguccuuu

SEQ ID NO: 427538 - RNA, 22 nt, Human
accucugcucaagaccccuccg

SEQ ID NO: 427539 - RNA, 22 nt, Human
accuuucauuaaagucuguagu

SEQ ID NO: 427540 - RNA, 20 nt, Human
cccaggcagagcuagcggca

SEQ ID NO: 427541 - RNA, 22 nt, Human
uuccauaaaggugauaguauac

SEQ ID NO: 427542 - RNA, 22 nt, Human
gcuggucacucugggagcugcu

SEQ ID NO: 427543 - RNA, 22 nt, Human
cugggcagcugugcaaacaaua

SEQ ID NO: 427544 - RNA, 22 nt, Human
cccaggucccgccccagcucua

SEQ ID NO: 427545 - RNA, 17 nt, Human
gagagcugcugcuuccg

SEQ ID NO: 427546 - RNA, 22 nt, Human
caugcuuugggucagaaaugcc

SEQ ID NO: 427547 - RNA, 22 nt, Human
guuuuauaugucucugcugaca

SEQ ID NO: 427548 - RNA, 22 nt, Human
ugcagcugcuugauucaucuug

SEQ ID NO: 427549 - RNA, 22 nt, Human
gcagugaaucuggcaagaauuu

SEQ ID NO: 427550 - RNA, 22 nt, Human
ucaggagcugcacugggcccac

SEQ ID NO: 427551 - RNA, 22 nt, Human
agagcugagcaccaagcauggu

SEQ ID NO: 427552 - RNA, 22 nt, Human
aaguugagaugucauaggagac

SEQ ID NO: 427553 - RNA, 22 nt, Human
gaggcagagacuccaccuucag

SEQ ID NO: 427554 - RNA, 20 nt, Human
acagccagaggaggcagaca

SEQ ID NO: 427555 - RNA, 22 nt, Human
aagaacugugcuccaggcucca

SEQ ID NO: 427556 - RNA, 22 nt, Human
gaugccugcauuucaggagagu

SEQ ID NO: 427557 - RNA, 22 nt, Human
cugggcucagcccaugcugucc

SEQ ID NO: 427558 - RNA, 22 nt, Human
gagcugccuguugcauagcaac

SEQ ID NO: 427559 - RNA, 22 nt, Human
guauuaggaaauaugaagaaag

SEQ ID NO: 427560 - RNA, 19 nt, Human
cucuggagcagacacugga

SEQ ID NO: 427561 - RNA, 22 nt, Human
agaggcaggaagagcugauuuu

SEQ ID NO: 427562 - RNA, 22 nt, Human
aggagguggcugaacuugaggg

SEQ ID NO: 427563 - RNA, 22 nt, Human
ugcaggugaaaauuaugaggau

SEQ ID NO: 427564 - RNA, 21 nt, Human
aggagggcacaaggccaggaa

SEQ ID NO: 427565 - RNA, 20 nt, Human
ccagcuuucccugcagcauc

SEQ ID NO: 427566 - RNA, 22 nt, Human
acagggccucagccagggcaga

SEQ ID NO: 427567 - RNA, 19 nt, Human
guggccagggcaggggcug

SEQ ID NO: 427568 - RNA, 22 nt, Human
ggaggaugagcuacgaggagcu

SEQ ID NO: 427569 - RNA, 22 nt, Human
agccaggaaccagcuacagucu

SEQ ID NO: 427570 - RNA, 22 nt, Human
aaggccaggacaccaggggacu

SEQ ID NO: 427571 - RNA, 22 nt, Human
uacauauuugucuuuguacugu

SEQ ID NO: 427572 - RNA, 22 nt, Human
acagucuugagcaucagccaga

SEQ ID NO: 427573 - RNA, 22 nt, Human
auguucaaacuuuuuacacacc

SEQ ID NO: 427574 - RNA, 22 nt, Human
caguguuuguauagaauaugca

SEQ ID NO: 427575 - RNA, 22 nt, Human
uuuuccuacugauaaacaguua

SEQ ID NO: 427576 - RNA, 22 nt, Human
ucccagcccagauuugugugac

SEQ ID NO: 427577 - RNA, 22 nt, Human
gaugguuuaugauagaugggaa

SEQ ID NO: 427578 - RNA, 22 nt, Human
auuucauugaaguuaauucuuc

SEQ ID NO: 427579 - RNA, 22 nt, Human
aucaggaaugaauacuuuugga

SEQ ID NO: 427580 - RNA, 22 nt, Human
cccaggaggcagagguugcagu

SEQ ID NO: 427581 - RNA, 22 nt, Human
ugucuacuugggcucuacagca

SEQ ID NO: 427582 - RNA, 22 nt, Human
aacaugaagguaggaugguuuu

SEQ ID NO: 427583 - RNA, 22 nt, Human
aagcaagacagaaguuacugcc

SEQ ID NO: 427584 - RNA, 22 nt, Human
guguacauagaauugugcuuug

SEQ ID NO: 427585 - RNA, 22 nt, Human
uccagccaugcaugacaaucac

SEQ ID NO: 427586 - RNA, 21 nt, Human
uuagcuuucuagaaucuuugu

SEQ ID NO: 427587 - RNA, 22 nt, Human
caguguuugcuuaaguuauaug

SEQ ID NO: 427588 - RNA, 22 nt, Human
cccccaggcucugacacaggag

SEQ ID NO: 427589 - RNA, 20 nt, Human
uacagucagggcacaggcag

SEQ ID NO: 427590 - RNA, 22 nt, Human
ugcuggcccuggcucagggaac

SEQ ID NO: 427591 - RNA, 21 nt, Human
ccagcagcucaaggaucucuu

SEQ ID NO: 427592 - RNA, 22 nt, Human
cucugugggggagaggcagcug

SEQ ID NO: 427593 - RNA, 22 nt, Human
gaggggcucuugggcaugaagg

SEQ ID NO: 427594 - RNA, 22 nt, Human
gugugcaggugucagugcagcu

SEQ ID NO: 427595 - RNA, 22 nt, Human
gcugucugucucugucccacca

SEQ ID NO: 427596 - RNA, 22 nt, Human
gcugugugaaaacugggccugg

SEQ ID NO: 427597 - RNA, 22 nt, Human
ccaggguaccccaagggcaggu

SEQ ID NO: 427598 - RNA, 19 nt, Human
cagucccaaauucuuguca

SEQ ID NO: 427599 - RNA, 22 nt, Human
ccagggcagugggagaaggugc

SEQ ID NO: 427600 - RNA, 22 nt, Human
gaccauuugcuaguaaauugca

SEQ ID NO: 427601 - RNA, 22 nt, Human
uggcugagguaacuaugaauaa

SEQ ID NO: 427602 - RNA, 22 nt, Human
uuagccauugucagcacauggc

SEQ ID NO: 427603 - RNA, 22 nt, Human
agaggccaugcuagaggccugg

SEQ ID NO: 427604 - RNA, 22 nt, Human
aaggccaugaccacuugcugug

SEQ ID NO: 427605 - RNA, 22 nt, Human
aggcugagcugaccugguuugg

SEQ ID NO: 427606 - RNA, 22 nt, Human
uuuaaauuuagaagaaacacug

SEQ ID NO: 427607 - RNA, 22 nt, Human
agcuuuaucagaggagucucua

SEQ ID NO: 427608 - RNA, 22 nt, Human
ucauggagacuuugagccuguu

SEQ ID NO: 427609 - RNA, 22 nt, Human
uuucauaaccucaagcuacagu

SEQ ID NO: 427610 - RNA, 22 nt, Human
gggugggaucuguggagccuca

SEQ ID NO: 427611 - RNA, 22 nt, Human
ucaggcagaaaaaucacuaauu

SEQ ID NO: 427612 - RNA, 22 nt, Human
uagggaccuuagaauuguaugu

SEQ ID NO: 427613 - RNA, 22 nt, Human
gccaggccugcaagugcuggug

SEQ ID NO: 427614 - RNA, 22 nt, Human
uuucacaucagagguagauuag

SEQ ID NO: 427615 - RNA, 22 nt, Human
gcaggguccauggaggcagccc

SEQ ID NO: 427616 - RNA, 22 nt, Human
acugggaggcaaagagcaagga

SEQ ID NO: 427617 - RNA, 22 nt, Human
aggaggcccuagagcucuagag

SEQ ID NO: 427618 - RNA, 22 nt, Human
gaggaagaaagcauaggugggg

SEQ ID NO: 427619 - RNA, 23 nt, Human
uagggcagcugggagggacaugc

SEQ ID NO: 427620 - RNA, 22 nt, Human
cccagcuaccucugcuaggaga

SEQ ID NO: 427621 - RNA, 22 nt, Human
cagacacagcaauucuguguug

SEQ ID NO: 427622 - RNA, 21 nt, Human
uccuucaguucugcacuuucu

SEQ ID NO: 427623 - RNA, 22 nt, Human
acugaaggaaacuuuuguguuu

SEQ ID NO: 427624 - RNA, 22 nt, Human
augaggcacaucacagccaaug

SEQ ID NO: 427625 - RNA, 22 nt, Human
ugaaagcacucacuucugcucu

SEQ ID NO: 427626 - RNA, 22 nt, Human
caggccugaguguggaagucuu

SEQ ID NO: 427627 - RNA, 22 nt, Human
ggagccugugggaugagaugug

SEQ ID NO: 427628 - RNA, 22 nt, Human
uuugaaagcuacuuucggguca

SEQ ID NO: 427629 - RNA, 22 nt, Human
uauuuguugaguuguuaugucu

SEQ ID NO: 427630 - RNA, 22 nt, Human
uaguuaggaauagcagcgacuc

SEQ ID NO: 427631 - RNA, 22 nt, Human
ggucccagcuggucacugucag

SEQ ID NO: 427632 - RNA, 20 nt, Human
gggcuagaccagggcagagg

SEQ ID NO: 427633 - RNA, 22 nt, Human
ccuggccuccuggccuucucau

SEQ ID NO: 427634 - RNA, 20 nt, Human
gccaacgcgcuggggcugcc

SEQ ID NO: 427635 - RNA, 22 nt, Human
caggcagaaauuuuguuucauu

SEQ ID NO: 427636 - RNA, 20 nt, Human
ucacaggggaccaggagcag

SEQ ID NO: 427637 - RNA, 22 nt, Human
ggaagagagggcugggccucaa

SEQ ID NO: 427638 - RNA, 21 nt, Human
aaaguucaugcuuuaauauuc

SEQ ID NO: 427639 - RNA, 22 nt, Human
ugucauugaggaaaacuaggug

SEQ ID NO: 427640 - RNA, 22 nt, Human
gagccaggguuugaaacuagac

SEQ ID NO: 427641 - RNA, 22 nt, Human
agccaggccuuagggagaggca

SEQ ID NO: 427642 - RNA, 22 nt, Human
uccucagggggccaacccagcc

SEQ ID NO: 427643 - RNA, 22 nt, Human
uugccaggagcucaucugaggg

SEQ ID NO: 427644 - RNA, 22 nt, Human
ugggcugcggauaggccucgga

SEQ ID NO: 427645 - RNA, 23 nt, Human
ucuuuccucagcacacaccaaga

SEQ ID NO: 427646 - RNA, 20 nt, Human
caguagcaauaauuagaagc

SEQ ID NO: 427647 - RNA, 22 nt, Human
gugcuucucuucacacccaacu

SEQ ID NO: 427648 - RNA, 22 nt, Human
auggcagggaccaagcugucau

SEQ ID NO: 427649 - RNA, 22 nt, Human
ucucccaguggugcagaaagca

SEQ ID NO: 427650 - RNA, 22 nt, Human
aauggacaggagagcauaguca

SEQ ID NO: 427651 - RNA, 22 nt, Human
ucuacaaagaagaauuaauguc

SEQ ID NO: 427652 - RNA, 21 nt, Human
ccagcuuucccaagucccuuu

SEQ ID NO: 427653 - RNA, 22 nt, Human
agaaacauuuagauuauauguc

SEQ ID NO: 427654 - RNA, 22 nt, Human
cugucugcuagaacaucuauac

SEQ ID NO: 427655 - RNA, 22 nt, Human
gcugccaauccagcugugggag

SEQ ID NO: 427656 - RNA, 22 nt, Human
uaauacuuuugccuuguauuca

SEQ ID NO: 427657 - RNA, 22 nt, Human
acagaaauauagaagguaggaa

SEQ ID NO: 427658 - RNA, 19 nt, Human
ugaggccaaggucacagau

SEQ ID NO: 427659 - RNA, 22 nt, Human
agggagguaggagcuucuagcu

SEQ ID NO: 427660 - RNA, 22 nt, Human
gaaggcugaguggguacggagg

SEQ ID NO: 427661 - RNA, 22 nt, Human
cuugugcauuucauuccucagg

SEQ ID NO: 427662 - RNA, 22 nt, Human
agcaccuucacaggcucucagg

SEQ ID NO: 427663 - RNA, 22 nt, Human
uucagugugugauaccugcugu

SEQ ID NO: 427664 - RNA, 22 nt, Human
ucaugaaaauagaucagaaauu

SEQ ID NO: 427665 - RNA, 22 nt, Human
ucagccugcgucauggugacac

SEQ ID NO: 427666 - RNA, 17 nt, Human
uguuccauuugaccacc

SEQ ID NO: 427667 - RNA, 22 nt, Human
agcagccacccagcugcucauu

SEQ ID NO: 427668 - RNA, 22 nt, Human
gcugggcaccggagagacccca

SEQ ID NO: 427669 - RNA, 22 nt, Human
aggaguguggccagggcucugg

SEQ ID NO: 427670 - RNA, 22 nt, Human
caucacuguccaaaguucaguu

SEQ ID NO: 427671 - RNA, 22 nt, Human
gaacccaggcuuuugaggcugu

SEQ ID NO: 427672 - RNA, 22 nt, Human
ugaaggcacuugccuaggggca

SEQ ID NO: 427673 - RNA, 22 nt, Human
ggccuagggaguggccaugccu

SEQ ID NO: 427674 - RNA, 22 nt, Human
ggccucggcccacugcugcggu

SEQ ID NO: 427675 - RNA, 22 nt, Human
cagggguguuuuuggccaggag

SEQ ID NO: 427676 - RNA, 22 nt, Human
aucuuucagagcuccaucaggg

SEQ ID NO: 427677 - RNA, 22 nt, Human
cagauuuaccuaacuccaaguu

SEQ ID NO: 427678 - RNA, 22 nt, Human
guccucugcuucaugcccugau

SEQ ID NO: 427679 - RNA, 22 nt, Human
cagccagggagcaaagaguuga

SEQ ID NO: 427680 - RNA, 22 nt, Human
ugcaggccggcccuaggccuca

SEQ ID NO: 427681 - RNA, 22 nt, Human
uugaggcugcacaguacaggcu

SEQ ID NO: 427682 - RNA, 22 nt, Human
cggcagcuccgcgccguaggac

SEQ ID NO: 427683 - RNA, 22 nt, Human
cuggcagguggauggggacucc

SEQ ID NO: 427684 - RNA, 22 nt, Human
aaauguguuugauaggaauauu

SEQ ID NO: 427685 - RNA, 22 nt, Human
cugcccugggaguaccuguccu

SEQ ID NO: 427686 - RNA, 17 nt, Human
uucaagauauugaaaug

SEQ ID NO: 427687 - RNA, 22 nt, Human
uggcugagagaagacggggaag

SEQ ID NO: 427688 - RNA, 22 nt, Human
uaaaugcaagugcuccugggag

SEQ ID NO: 427689 - RNA, 22 nt, Human
aguguuucucagaagggccuau

SEQ ID NO: 427690 - RNA, 16 nt, Human
gggcugggggauucug

SEQ ID NO: 427691 - RNA, 22 nt, Human
uucugcaucugaauuuaaguac

SEQ ID NO: 427692 - RNA, 22 nt, Human
agaggcagccguauuucaaagg

SEQ ID NO: 427693 - RNA, 22 nt, Human
ggcagauggaagaggcuggguc

SEQ ID NO: 427694 - RNA, 22 nt, Human
uuccauaauuaaguggagagaa

SEQ ID NO: 427695 - RNA, 22 nt, Human
gaggaaaagagacagguuauug

SEQ ID NO: 427696 - RNA, 22 nt, Human
cuccaggguuccccgauccacu

SEQ ID NO: 427697 - RNA, 22 nt, Human
aguggcagaucucuggucugga

SEQ ID NO: 427698 - RNA, 22 nt, Human
cccagcuugcgggcggcaggag

SEQ ID NO: 427699 - RNA, 22 nt, Human
ccaaaggccaggcacugagguu

SEQ ID NO: 427700 - RNA, 22 nt, Human
guuauauauaguauuucucuga

SEQ ID NO: 427701 - RNA, 20 nt, Human
uagaaaucuuauaaaagacu

SEQ ID NO: 427702 - RNA, 22 nt, Human
ucucucugccaacucacagcca

SEQ ID NO: 427703 - RNA, 22 nt, Human
agcuggcagagcauuuguggcc

SEQ ID NO: 427704 - RNA, 23 nt, Human
aaaguugauuugcaguuuaagag

SEQ ID NO: 427705 - RNA, 22 nt, Human
aagauuucucuccuggaaagca

SEQ ID NO: 427706 - RNA, 22 nt, Human
ccuggcugggguagaagugagg

SEQ ID NO: 427707 - RNA, 19 nt, Human
agcagccaucgaccaugga

SEQ ID NO: 427708 - RNA, 17 nt, Human
aagacagaagccaugag

SEQ ID NO: 427709 - RNA, 22 nt, Human
cagagcaucgcgcagagagccu

SEQ ID NO: 427710 - RNA, 22 nt, Human
ucagagugugacuuggucauga

SEQ ID NO: 427711 - RNA, 20 nt, Human
ggcugcugugggcagagagg

SEQ ID NO: 427712 - RNA, 22 nt, Human
ugggcagaggcagcagaaaccu

SEQ ID NO: 427713 - RNA, 21 nt, Human
gcacagugccaggcacacagu

SEQ ID NO: 427714 - RNA, 22 nt, Human
cugggagucuggccucuggucc

SEQ ID NO: 427715 - RNA, 22 nt, Human
aggggugauuugggacaggaca

SEQ ID NO: 427716 - RNA, 18 nt, Human
gagaggagccagaauuuu

SEQ ID NO: 427717 - RNA, 22 nt, Human
ccacugggcguuucuguccaau

SEQ ID NO: 427718 - RNA, 22 nt, Human
cacaaaugacugaaacgacugu

SEQ ID NO: 427719 - RNA, 22 nt, Human
aggcacaguggcucacaccugu

SEQ ID NO: 427720 - RNA, 22 nt, Human
gcugggcugagcuagacuuggc

SEQ ID NO: 427721 - RNA, 19 nt, Human
augagcuggcauuucaggu

SEQ ID NO: 427722 - RNA, 22 nt, Human
cagaggcaaaagagguggaggu

SEQ ID NO: 427723 - RNA, 22 nt, Human
uacaaaugaaccaacuuugaug

SEQ ID NO: 427724 - RNA, 21 nt, Human
aguuugaugcaauuucugaga

SEQ ID NO: 427725 - RNA, 22 nt, Human
caggaaagaaaugagaacacca

SEQ ID NO: 427726 - RNA, 22 nt, Human
cugucaggggcggguggagcgg

SEQ ID NO: 427727 - RNA, 19 nt, Human
agccagugagccucugggu

SEQ ID NO: 427728 - RNA, 22 nt, Human
gccagguguccucacagugagg

SEQ ID NO: 427729 - RNA, 22 nt, Human
aguggcagaagucacuggguag

SEQ ID NO: 427730 - RNA, 22 nt, Human
ccaggcuggauuuugcaguuca

SEQ ID NO: 427731 - RNA, 21 nt, Human
ucucugggaggacuugugaga

SEQ ID NO: 427732 - RNA, 22 nt, Human
ccuggcacgaagggcugagguu

SEQ ID NO: 427733 - RNA, 17 nt, Human
gaaagguccuagaaauc

SEQ ID NO: 427734 - RNA, 22 nt, Human
uggcuggcaguaggcuaguggc

SEQ ID NO: 427735 - RNA, 22 nt, Human
uagccaggcgaggucagugucg

SEQ ID NO: 427736 - RNA, 22 nt, Human
aaggccagcuuguagggcuggu

SEQ ID NO: 427737 - RNA, 16 nt, Human
uggaaggggucuccgg

SEQ ID NO: 427738 - RNA, 22 nt, Human
ccacacagggggaugaguuauu

SEQ ID NO: 427739 - RNA, 22 nt, Human
gcaccuggcugcccagguggag

SEQ ID NO: 427740 - RNA, 22 nt, Human
gugcaugugucuuuauaguaga

SEQ ID NO: 427741 - RNA, 23 nt, Human
ucagaggaucaucaaacguuuuc

SEQ ID NO: 427742 - RNA, 22 nt, Human
gggcugagggguaucucauggg

SEQ ID NO: 427743 - RNA, 22 nt, Human
ggggaccuaggcucugucucuu

SEQ ID NO: 427744 - RNA, 22 nt, Human
uacaaaugaccauagccacuua

SEQ ID NO: 427745 - RNA, 22 nt, Human
ucagccuggcaggauggccugg

SEQ ID NO: 427746 - RNA, 22 nt, Human
acuuuguuuggcuauuagaguc

SEQ ID NO: 427747 - RNA, 22 nt, Human
cugcugugagugguucuugccu

SEQ ID NO: 427748 - RNA, 22 nt, Human
caggacagagcccagacugugu

SEQ ID NO: 427749 - RNA, 22 nt, Human
uuuucauuguaaaucaggaaac

SEQ ID NO: 427750 - RNA, 22 nt, Human
aagcugccuuccaugugaggaa

SEQ ID NO: 427751 - RNA, 22 nt, Human
cuauuaggcuuccauuucaugc

SEQ ID NO: 427752 - RNA, 22 nt, Human
gaaaugcaggcuuggauucagc

SEQ ID NO: 427753 - RNA, 22 nt, Human
cugggccuagaggaagcugaca

SEQ ID NO: 427754 - RNA, 22 nt, Human
ugcaggggcuugucugggccug

SEQ ID NO: 427755 - RNA, 22 nt, Human
cugccuccugccgugcagcuuc

SEQ ID NO: 427756 - RNA, 22 nt, Human
cuagggacugggaccuuaguua

SEQ ID NO: 427757 - RNA, 22 nt, Human
caguuuuucaaaauuacaugau

SEQ ID NO: 427758 - RNA, 22 nt, Human
agaugaaaagauaagcagcaau

SEQ ID NO: 427759 - RNA, 22 nt, Human
cagcaggaccauugaggcauca

SEQ ID NO: 427760 - RNA, 22 nt, Human
aggcgugggaggaucugaggcc

SEQ ID NO: 427761 - RNA, 22 nt, Human
agugcagaguacauuuguggca

SEQ ID NO: 427762 - RNA, 22 nt, Human
uucuuucccaguagaugugaaa

SEQ ID NO: 427763 - RNA, 22 nt, Human
gcaggugguccccguggagugg

SEQ ID NO: 427764 - RNA, 22 nt, Human
ggucccaggaagugcggcggcg

SEQ ID NO: 427765 - RNA, 22 nt, Human
agguaggguuaauggagauaua

SEQ ID NO: 427766 - RNA, 22 nt, Human
uccugccuagcaggugaccuau

SEQ ID NO: 427767 - RNA, 22 nt, Human
ucucugagguuguuuccagcac

SEQ ID NO: 427768 - RNA, 17 nt, Human
ggccuuggggccucagu

SEQ ID NO: 427769 - RNA, 22 nt, Human
cuacauuuuaauaagcugcuua

SEQ ID NO: 427770 - RNA, 22 nt, Human
ccccagcugcauacuugccaag

SEQ ID NO: 427771 - RNA, 22 nt, Human
gaggcagaaguugcagugagca

SEQ ID NO: 427772 - RNA, 22 nt, Human
ggagaaggugcuggucacugug

SEQ ID NO: 427773 - RNA, 22 nt, Human
ucagaggacagcagcuaaauaa

SEQ ID NO: 427774 - RNA, 21 nt, Human
gugcucugggcagcagagggc

SEQ ID NO: 427775 - RNA, 22 nt, Human
uaagaacagugucugucucaca

SEQ ID NO: 427776 - RNA, 22 nt, Human
ggaagccaguugcuuggugugg

SEQ ID NO: 427777 - RNA, 22 nt, Human
cccaggagguggagguugcagc

SEQ ID NO: 427778 - RNA, 19 nt, Human
auuugaaagcugugcuugc

SEQ ID NO: 427779 - RNA, 19 nt, Human
uagcagcugccaaaggaga

SEQ ID NO: 427780 - RNA, 21 nt, Human
uuucugucucugccacuaguu

SEQ ID NO: 427781 - RNA, 22 nt, Human
uggcagagaacacacaugauuc

SEQ ID NO: 427782 - RNA, 22 nt, Human
uuuguacauccuaauucugagu

SEQ ID NO: 427783 - RNA, 22 nt, Human
aaguggagucccuacaaccagc

SEQ ID NO: 427784 - RNA, 22 nt, Human
ggacacaguggaagacagcuug

SEQ ID NO: 427785 - RNA, 22 nt, Human
agccucugauggcucccaagga

SEQ ID NO: 427786 - RNA, 18 nt, Human
acagaaauagcugugccu

SEQ ID NO: 427787 - RNA, 22 nt, Human
ucagagaguuagugucuuagcu

SEQ ID NO: 427788 - RNA, 22 nt, Human
ucaggggaaaucucucagcgaa

SEQ ID NO: 427789 - RNA, 22 nt, Human
ccaaggcuggagugcaguggcg

SEQ ID NO: 427790 - RNA, 22 nt, Human
agaagggccagcuggacaccug

SEQ ID NO: 427791 - RNA, 22 nt, Human
cucucugggggccaugccaaga

SEQ ID NO: 427792 - RNA, 22 nt, Human
gucaggggccaugggccaagga

SEQ ID NO: 427793 - RNA, 22 nt, Human
cuaguucuuaacuguuaugauu

SEQ ID NO: 427794 - RNA, 22 nt, Human
gcagggccagggcucaggcugu

SEQ ID NO: 427795 - RNA, 22 nt, Human
uggccuggaagagaggucgagg

SEQ ID NO: 427796 - RNA, 22 nt, Human
caugggagcuaucuccaucacu

SEQ ID NO: 427797 - RNA, 22 nt, Human
auucagugugagguuuucaagu

SEQ ID NO: 427798 - RNA, 16 nt, Human
uagggcugggaaggag

SEQ ID NO: 427799 - RNA, 22 nt, Human
auccugggaagcugacauugaa

SEQ ID NO: 427800 - RNA, 22 nt, Human
agccacagagcaggagaccuuu

SEQ ID NO: 427801 - RNA, 22 nt, Human
caggcagccugagggaucuggg

SEQ ID NO: 427802 - RNA, 22 nt, Human
gaagggagaagguugggugacg

SEQ ID NO: 427803 - RNA, 22 nt, Human
agcaggguauguuagagcugua

SEQ ID NO: 427804 - RNA, 22 nt, Human
uacagauacagaucuagauaca

SEQ ID NO: 427805 - RNA, 22 nt, Human
cccugcagacgucuugaugccu

SEQ ID NO: 427806 - RNA, 22 nt, Human
uuaaagggccgauuuccaggcc

SEQ ID NO: 427807 - RNA, 22 nt, Human
cugggccagauccagccucaca

SEQ ID NO: 427808 - RNA, 22 nt, Human
ucaguguaaguuauguagaugu

SEQ ID NO: 427809 - RNA, 22 nt, Human
aguggagacaggacagucgaua

SEQ ID NO: 427810 - RNA, 22 nt, Human
agaaugcauuuuguguagcuau

SEQ ID NO: 427811 - RNA, 22 nt, Human
uucuuucacucaagaaggaucu

SEQ ID NO: 427812 - RNA, 22 nt, Human
acaggugugagaacaugccuug

SEQ ID NO: 427813 - RNA, 22 nt, Human
ccagugcauaaucaauacagcc

SEQ ID NO: 427814 - RNA, 22 nt, Human
ccuguacaagcucuuggugaca

SEQ ID NO: 427815 - RNA, 22 nt, Human
aaagccuugcccgucacuggga

SEQ ID NO: 427816 - RNA, 23 nt, Human
guggagccacaucacaggcuccu

SEQ ID NO: 427817 - RNA, 22 nt, Human
ucucagagcaucauuuucuuag

SEQ ID NO: 427818 - RNA, 22 nt, Human
uguacauuuagagcucaauaga

SEQ ID NO: 427819 - RNA, 22 nt, Human
auaauuuaaauuaguaugugau

SEQ ID NO: 427820 - RNA, 22 nt, Human
agaagcugacagaugcagcagg

SEQ ID NO: 427821 - RNA, 22 nt, Human
gaggcucaguuaugucaucagg

SEQ ID NO: 427822 - RNA, 23 nt, Human
uugucugugcuuuuccaguugcu

SEQ ID NO: 427823 - RNA, 22 nt, Human
cagggaguuuuuguuccucuag

SEQ ID NO: 427824 - RNA, 22 nt, Human
cuacuucugugaugaaacuaca

SEQ ID NO: 427825 - RNA, 22 nt, Human
aucacauucuuucaaagcaguc

SEQ ID NO: 427826 - RNA, 22 nt, Human
auugacaagacaauggcucuua

SEQ ID NO: 427827 - RNA, 22 nt, Human
uucacagaauggcaaguuaugg

SEQ ID NO: 427828 - RNA, 22 nt, Human
gcagauggcucagacacugggg

SEQ ID NO: 427829 - RNA, 22 nt, Human
uggcagagagacucuccuugau

SEQ ID NO: 427830 - RNA, 22 nt, Human
cccaggcagucuggcucuaaag

SEQ ID NO: 427831 - RNA, 22 nt, Human
gaggcgagaagcuggagauggu

SEQ ID NO: 427832 - RNA, 22 nt, Human
aggagggcaggcuggcugccua

SEQ ID NO: 427833 - RNA, 23 nt, Human
agcagggccagaauacuugcugu

SEQ ID NO: 427834 - RNA, 22 nt, Human
ccaggccagcaggcacaccugc

SEQ ID NO: 427835 - RNA, 22 nt, Human
ugggcuggugagggaucauuua

SEQ ID NO: 427836 - RNA, 22 nt, Human
gccuucaguaguauccucauga

SEQ ID NO: 427837 - RNA, 22 nt, Human
caagagcuggguggcaagcuag

SEQ ID NO: 427838 - RNA, 22 nt, Human
cccucccaagcacucugacaua

SEQ ID NO: 427839 - RNA, 22 nt, Human
cugccacuagcuuucacaucuu

SEQ ID NO: 427840 - RNA, 22 nt, Human
uggaggagaauuuauggucgaa

SEQ ID NO: 427841 - RNA, 22 nt, Human
uugaaggacauccuauuucuag

SEQ ID NO: 427842 - RNA, 22 nt, Human
ucagaggagccaaaguucugag

SEQ ID NO: 427843 - RNA, 22 nt, Human
ugauuuccaauaaggagaaugu

SEQ ID NO: 427844 - RNA, 22 nt, Human
agagccugggcagcuccucugg

SEQ ID NO: 427845 - RNA, 22 nt, Human
auaaacaguagagaaagguggu

SEQ ID NO: 427846 - RNA, 22 nt, Human
guuugauucaagaacaaagagu

SEQ ID NO: 427847 - RNA, 21 nt, Human
ccugcagcaccagaaggagau

SEQ ID NO: 427848 - RNA, 22 nt, Human
cagcucaaguuucccaggucag

SEQ ID NO: 427849 - RNA, 17 nt, Human
aggcagcucagaacauc

SEQ ID NO: 427850 - RNA, 22 nt, Human
uccucagugcuagccaacugcc

SEQ ID NO: 427851 - RNA, 22 nt, Human
cuugucugugucggauaaaacu

SEQ ID NO: 427852 - RNA, 22 nt, Human
ucagcuggagaugagaaccgaa

SEQ ID NO: 427853 - RNA, 22 nt, Human
aagcagggugucuugacccaug

SEQ ID NO: 427854 - RNA, 22 nt, Human
ucuuuccuacuuuauugugaac

SEQ ID NO: 427855 - RNA, 22 nt, Human
ucacagaaggcaucacagaaga

SEQ ID NO: 427856 - RNA, 22 nt, Human
ucaggcagguuggcugcagguc

SEQ ID NO: 427857 - RNA, 22 nt, Human
ugaagcaggugaauggaugucg

SEQ ID NO: 427858 - RNA, 22 nt, Human
ggaggccaaggugggcggauca

SEQ ID NO: 427859 - RNA, 22 nt, Human
cuugccuucuuuuccuauagaa

SEQ ID NO: 427860 - RNA, 22 nt, Human
aucaaguuuucuuaguugacug

SEQ ID NO: 427861 - RNA, 22 nt, Human
uggcucaguaaucgagucuccu

SEQ ID NO: 427862 - RNA, 22 nt, Human
aggaccugcuaaugugccaagu

SEQ ID NO: 427863 - RNA, 21 nt, Human
gcagcaguguucuagaauacu

SEQ ID NO: 427864 - RNA, 22 nt, Human
uuagaaaggaaucuucauuuca

SEQ ID NO: 427865 - RNA, 22 nt, Human
ucugcagcuuuuugguggggug

SEQ ID NO: 427866 - RNA, 22 nt, Human
agugaaauuuguuuagauaggu

SEQ ID NO: 427867 - RNA, 22 nt, Human
gcagaagaccaugguggaaaga

SEQ ID NO: 427868 - RNA, 22 nt, Human
caggccugauacacugaacucu

SEQ ID NO: 427869 - RNA, 22 nt, Human
agccuccaguagcugaagagac

SEQ ID NO: 427870 - RNA, 22 nt, Human
cugagcgcaugguugcugggga

SEQ ID NO: 427871 - RNA, 22 nt, Human
aggcagcaugcucugcuucuac

SEQ ID NO: 427872 - RNA, 19 nt, Human
gcuucccaccagccagccc

SEQ ID NO: 427873 - RNA, 22 nt, Human
uacauuaucuuguuaucuuuca

SEQ ID NO: 427874 - RNA, 22 nt, Human
cauugcaccacauugcaucccu

SEQ ID NO: 427875 - RNA, 22 nt, Human
caggcacucauucagagaggug

SEQ ID NO: 427876 - RNA, 22 nt, Human
aggauccuuuuucugcuguuug

SEQ ID NO: 427877 - RNA, 22 nt, Human
auguuucagauacagaucaaau

SEQ ID NO: 427878 - RNA, 22 nt, Human
cacaccuguaauaccagcuacu

SEQ ID NO: 427879 - RNA, 22 nt, Human
uacauggugguggcacuugacu

SEQ ID NO: 427880 - RNA, 22 nt, Human
cucagcuggcaauucuggcucc

SEQ ID NO: 427881 - RNA, 23 nt, Human
gucagggcuggggucagagugac

SEQ ID NO: 427882 - RNA, 22 nt, Human
ccagggcaacgcugucucagag

SEQ ID NO: 427883 - RNA, 22 nt, Human
caugaagcauguuuugucauga

SEQ ID NO: 427884 - RNA, 22 nt, Human
agucccagugagaugaaccagg

SEQ ID NO: 427885 - RNA, 20 nt, Human
ccuccuggucaggugugcag

SEQ ID NO: 427886 - RNA, 22 nt, Human
cugcucugacccuuucaccuuc

SEQ ID NO: 427887 - RNA, 22 nt, Human
ucaguuuuaagguuugagaauu

SEQ ID NO: 427888 - RNA, 22 nt, Human
uaucuuugcaaauaucucuaag

SEQ ID NO: 427889 - RNA, 17 nt, Human
gguguauggggagggaa

SEQ ID NO: 427890 - RNA, 22 nt, Human
ggcagcucugugucugggaagc

SEQ ID NO: 427891 - RNA, 22 nt, Human
cugccaggccucaucccagcca

SEQ ID NO: 427892 - RNA, 22 nt, Human
acuuugcaauacuuaauacaaa

SEQ ID NO: 427893 - RNA, 22 nt, Human
cuuuucaugagucuguuauggg

SEQ ID NO: 427894 - RNA, 22 nt, Human
aggaaacagugaacuuggcagg

SEQ ID NO: 427895 - RNA, 22 nt, Human
gcagaagcuguucgaaggccgc

SEQ ID NO: 427896 - RNA, 22 nt, Human
cccagccucagcuuuacuucca

SEQ ID NO: 427897 - RNA, 22 nt, Human
gaagccacagagauuguggggg

SEQ ID NO: 427898 - RNA, 22 nt, Human
acauaccauacauggugagaug

SEQ ID NO: 427899 - RNA, 22 nt, Human
cuacuucuaaguacauggugau

SEQ ID NO: 427900 - RNA, 22 nt, Human
uccugcaggccagaggggugag

SEQ ID NO: 427901 - RNA, 22 nt, Human
gccaggcagauaugugagcuua

SEQ ID NO: 427902 - RNA, 22 nt, Human
aacagaauaguugauguacagu

SEQ ID NO: 427903 - RNA, 22 nt, Human
gaggggcuggcacgauggcugc

SEQ ID NO: 427904 - RNA, 21 nt, Human
uggcaggcagcuggaagcuug

SEQ ID NO: 427905 - RNA, 19 nt, Human
ugcaagugucuuggacaag

SEQ ID NO: 427906 - RNA, 22 nt, Human
cugccucuugacagaucguggc

SEQ ID NO: 427907 - RNA, 22 nt, Human
cucugggcaccaaagagcagcu

SEQ ID NO: 427908 - RNA, 22 nt, Human
uggcacuggaaucguagccuug

SEQ ID NO: 427909 - RNA, 22 nt, Human
guugacagcuggugagcugcua

SEQ ID NO: 427910 - RNA, 22 nt, Human
cccagcucucugcucuuagccu

SEQ ID NO: 427911 - RNA, 22 nt, Human
caagucaaagacuagaacuagu

SEQ ID NO: 427912 - RNA, 22 nt, Human
ccaaggagcucauauucuuguu

SEQ ID NO: 427913 - RNA, 20 nt, Human
auguagaugaaagcaaaggc

SEQ ID NO: 427914 - RNA, 22 nt, Human
aagagcuggucacagguccauu

SEQ ID NO: 427915 - RNA, 22 nt, Human
uccaggcagcccuuccugacuc

SEQ ID NO: 427916 - RNA, 22 nt, Human
ugcagccaccaccucugcugaa

SEQ ID NO: 427917 - RNA, 22 nt, Human
agugaccaaucaugguuagauu

SEQ ID NO: 427918 - RNA, 21 nt, Human
aggugggagaccauguagguc

SEQ ID NO: 427919 - RNA, 22 nt, Human
cucacaggcaucucaucaggcu

SEQ ID NO: 427920 - RNA, 20 nt, Human
uucauucauuccacaacuuc

SEQ ID NO: 427921 - RNA, 22 nt, Human
aauauaaauuccugggcccagc

SEQ ID NO: 427922 - RNA, 22 nt, Human
gaggcuggugguuaguuccauu

SEQ ID NO: 427923 - RNA, 22 nt, Human
ggcuggagugggcuccagaguu

SEQ ID NO: 427924 - RNA, 22 nt, Human
cuuuguuuauauuucuccucga

SEQ ID NO: 427925 - RNA, 22 nt, Human
ucaaagucuaucuguaauuacu

SEQ ID NO: 427926 - RNA, 22 nt, Human
uggagccaugccuggccuuucc

SEQ ID NO: 427927 - RNA, 22 nt, Human
uauccuuguacuauaguauuua

SEQ ID NO: 427928 - RNA, 22 nt, Human
ugcuggcuacugauggcaggcc

SEQ ID NO: 427929 - RNA, 22 nt, Human
acaggcagggaccuuggcuaag

SEQ ID NO: 427930 - RNA, 22 nt, Human
cugggcuguucugccccugggu

SEQ ID NO: 427931 - RNA, 22 nt, Human
aagaaaguggguaauaugauuu

SEQ ID NO: 427932 - RNA, 22 nt, Human
gcaaggacucccugggucauuc

SEQ ID NO: 427933 - RNA, 22 nt, Human
cugagccaguagucagggacaa

SEQ ID NO: 427934 - RNA, 22 nt, Human
acucaggaagaaagcagcuggu

SEQ ID NO: 427935 - RNA, 22 nt, Human
agcugcaggccucuccugggga

SEQ ID NO: 427936 - RNA, 22 nt, Human
aggcaggcaaccaccugggaag

SEQ ID NO: 427937 - RNA, 22 nt, Human
cugagaaggaagccuccacucu

SEQ ID NO: 427938 - RNA, 22 nt, Human
cauuacaugguccaggauauau

SEQ ID NO: 427939 - RNA, 22 nt, Human
ccuggaaguuggagguugcagu

SEQ ID NO: 427940 - RNA, 22 nt, Human
gaggccacagcuaucagggaca

SEQ ID NO: 427941 - RNA, 22 nt, Human
gcccucagcuccuggacacaug

SEQ ID NO: 427942 - RNA, 22 nt, Human
gagucugaugucccccaggcca

SEQ ID NO: 427943 - RNA, 20 nt, Human
acaugaaaggaaacaggaaa

SEQ ID NO: 427944 - RNA, 22 nt, Human
aggcaggggagcuggaagggua

SEQ ID NO: 427945 - RNA, 23 nt, Human
ggagugcaauggcgccaucucgg

SEQ ID NO: 427946 - RNA, 22 nt, Human
cagugagggcauucagugcugg

SEQ ID NO: 427947 - RNA, 22 nt, Human
uuuaaauaggacuccugggggu

SEQ ID NO: 427948 - RNA, 22 nt, Human
uaaggguucagaaugcaguggu

SEQ ID NO: 427949 - RNA, 22 nt, Human
cccaugccuucugacucacagg

SEQ ID NO: 427950 - RNA, 22 nt, Human
uaaugaauaaacuugagaguca

SEQ ID NO: 427951 - RNA, 22 nt, Human
gccaaagcagucuugccucugc

SEQ ID NO: 427952 - RNA, 22 nt, Human
ucuggcuccguguccgcuccca

SEQ ID NO: 427953 - RNA, 22 nt, Human
ugcagcagcagggaggaggcuc

SEQ ID NO: 427954 - RNA, 22 nt, Human
uccucugccaaagggaguugcc

SEQ ID NO: 427955 - RNA, 21 nt, Human
ugggaugggucugggaccagc

SEQ ID NO: 427956 - RNA, 22 nt, Human
ccagagagauugcuucuaaaga

SEQ ID NO: 427957 - RNA, 22 nt, Human
caugcuuuaccaaagcagugau

SEQ ID NO: 427958 - RNA, 22 nt, Human
ucagcaaugugauacugugcaa

SEQ ID NO: 427959 - RNA, 22 nt, Human
ugccaggcgugguggugcgcac

SEQ ID NO: 427960 - RNA, 22 nt, Human
gcaggguauaauacuuagguga

SEQ ID NO: 427961 - RNA, 22 nt, Human
uucaggauccccuugaugggcu

SEQ ID NO: 427962 - RNA, 22 nt, Human
cugggcuucucccccuggcaga

SEQ ID NO: 427963 - RNA, 22 nt, Human
acaaggcugaacagugaagccg

SEQ ID NO: 427964 - RNA, 22 nt, Human
uugcauugaugucuauacgcug

SEQ ID NO: 427965 - RNA, 22 nt, Human
agcugcucuuugaaggacacuu

SEQ ID NO: 427966 - RNA, 22 nt, Human
uggccugggucacaccaggguc

SEQ ID NO: 427967 - RNA, 18 nt, Human
ggagccagucugucucug

SEQ ID NO: 427968 - RNA, 22 nt, Human
guagcccaccuggggagggcga

SEQ ID NO: 427969 - RNA, 22 nt, Human
caagaugccccugguagggauc

SEQ ID NO: 427970 - RNA, 22 nt, Human
agagcugagaauguggcuuccu

SEQ ID NO: 427971 - RNA, 22 nt, Human
uggagcugagaaguggagcucu

SEQ ID NO: 427972 - RNA, 22 nt, Human
uuuccuuccagguuccuaaggc

SEQ ID NO: 427973 - RNA, 22 nt, Human
gcugggaggaucucucccuguc

SEQ ID NO: 427974 - RNA, 22 nt, Human
agccccugggaguagcugcugc

SEQ ID NO: 427975 - RNA, 22 nt, Human
ccuggcuggcaagaucgugaag

SEQ ID NO: 427976 - RNA, 22 nt, Human
cuggguggcgucuggggccagu

SEQ ID NO: 427977 - RNA, 22 nt, Human
ccauguggugggaaggagaaug

SEQ ID NO: 427978 - RNA, 22 nt, Human
cugcuucuaagaaccugcagcu

SEQ ID NO: 427979 - RNA, 22 nt, Human
cacagcuuccauuagaaugaga

SEQ ID NO: 427980 - RNA, 22 nt, Human
ccagggcuggugggagaugcug

SEQ ID NO: 427981 - RNA, 22 nt, Human
uuaauuuucucaucugugaaau

SEQ ID NO: 427982 - RNA, 22 nt, Human
guaucuuuccacaucuucagua

SEQ ID NO: 427983 - RNA, 22 nt, Human
uauguacacacacaugcaugua

SEQ ID NO: 427984 - RNA, 22 nt, Human
agggcagcacaaggcauggacu

SEQ ID NO: 427985 - RNA, 22 nt, Human
uguaggauuuucaccagaccuu

SEQ ID NO: 427986 - RNA, 22 nt, Human
agcacagaguugcagagagcgu

SEQ ID NO: 427987 - RNA, 22 nt, Human
aagagagagcauucuucuguua

SEQ ID NO: 427988 - RNA, 22 nt, Human
ugagccagauaagggcucacgc

SEQ ID NO: 427989 - RNA, 22 nt, Human
agcugcucugauaaaccuacuu

SEQ ID NO: 427990 - RNA, 22 nt, Human
gaaagaggaaggagauguauua

SEQ ID NO: 427991 - RNA, 22 nt, Human
ucuggcucugaauucacuucug

SEQ ID NO: 427992 - RNA, 22 nt, Human
gagacaaaaguuggagugcaag

SEQ ID NO: 427993 - RNA, 22 nt, Human
cagcuggccugaucccuguggc

SEQ ID NO: 427994 - RNA, 22 nt, Human
cucaguuucugacauuaaaauc

SEQ ID NO: 427995 - RNA, 22 nt, Human
aaaaaaucagaucuuugguuaa

SEQ ID NO: 427996 - RNA, 22 nt, Human
aggguauaaagagcaagcagaa

SEQ ID NO: 427997 - RNA, 22 nt, Human
accacuguaucuccagcacauu

SEQ ID NO: 427998 - RNA, 22 nt, Human
gugcucuguguauuaggauguc

SEQ ID NO: 427999 - RNA, 18 nt, Human
gccugggaggaggaaaug

SEQ ID NO: 428000 - RNA, 22 nt, Human
ucaggggacuuaggagagaagu

SEQ ID NO: 428001 - RNA, 22 nt, Human
cucaggaguuggaggcuacagu

SEQ ID NO: 428002 - RNA, 22 nt, Human
uaugaagauauaucugaucucu

SEQ ID NO: 428003 - RNA, 20 nt, Human
aagagcugacucacaguggu

SEQ ID NO: 428004 - RNA, 22 nt, Human
ggcaggaggaagaguuagcacc

SEQ ID NO: 428005 - RNA, 22 nt, Human
agggcagcagcggcccaggccu

SEQ ID NO: 428006 - RNA, 19 nt, Human
gcucagagggcccugugcu

SEQ ID NO: 428007 - RNA, 22 nt, Human
cagggagcuggcuggcgugagu

SEQ ID NO: 428008 - RNA, 22 nt, Human
ucagagugaggcgucaacauga

SEQ ID NO: 428009 - RNA, 22 nt, Human
gagacagcagggccagggccug

SEQ ID NO: 428010 - RNA, 22 nt, Human
uccugcagagucccacugauuu

SEQ ID NO: 428011 - RNA, 23 nt, Human
gcauugucuccccacuucugggc

SEQ ID NO: 428012 - RNA, 18 nt, Human
ggaaaccacaggguucug

SEQ ID NO: 428013 - RNA, 22 nt, Human
gggaagcagcauugugcuggcu

SEQ ID NO: 428014 - RNA, 22 nt, Human
cauacauuuugcauauuuacca

SEQ ID NO: 428015 - RNA, 22 nt, Human
uuauuaaugaguacaaguuauu

SEQ ID NO: 428016 - RNA, 22 nt, Human
ucaccccuacauuucccuugcu

SEQ ID NO: 428017 - RNA, 22 nt, Human
caguugaugggacucauguggg

SEQ ID NO: 428018 - RNA, 22 nt, Human
ucugggcccuaaaccagcucua

SEQ ID NO: 428019 - RNA, 22 nt, Human
uaaguucaguuggucgaaguag

SEQ ID NO: 428020 - RNA, 22 nt, Human
aagccaggaagagagccuucac

SEQ ID NO: 428021 - RNA, 22 nt, Human
uaacugauauugaaaaacauca

SEQ ID NO: 428022 - RNA, 22 nt, Human
ugaggcaggaauggggaaaagu

SEQ ID NO: 428023 - RNA, 22 nt, Human
uacuuuuugucucuuugaaugu

SEQ ID NO: 428024 - RNA, 22 nt, Human
caguauguuugggagacaugac

SEQ ID NO: 428025 - RNA, 22 nt, Human
gcaccacaucaaugaggggagc

SEQ ID NO: 428026 - RNA, 22 nt, Human
uauagaagagacaugugcauag

SEQ ID NO: 428027 - RNA, 21 nt, Human
aggcagccagucaugcucccu

SEQ ID NO: 428028 - RNA, 22 nt, Human
cagcauggcuugaguguuuccu

SEQ ID NO: 428029 - RNA, 22 nt, Human
ucugaggcuaagagacagaggc

SEQ ID NO: 428030 - RNA, 20 nt, Human
ucagguagaucuuugagguc

SEQ ID NO: 428031 - RNA, 22 nt, Human
ucagcuuuccugcagcuaaggg

SEQ ID NO: 428032 - RNA, 22 nt, Human
gcacagaacuucucuuaguagg

SEQ ID NO: 428033 - RNA, 22 nt, Human
cgaggcagggaagcugcaaaag

SEQ ID NO: 428034 - RNA, 22 nt, Human
uagacacaagagaaggguauaa

SEQ ID NO: 428035 - RNA, 22 nt, Human
ccuggauucaagucuuucuuuc

SEQ ID NO: 428036 - RNA, 23 nt, Human
aggaggaaaaguuaucugcugag

SEQ ID NO: 428037 - RNA, 22 nt, Human
aagccagccagugccagucuua

SEQ ID NO: 428038 - RNA, 22 nt, Human
uccucugcucagcauuccucac

SEQ ID NO: 428039 - RNA, 22 nt, Human
ccaggacuuuaaguccagcacu

SEQ ID NO: 428040 - RNA, 22 nt, Human
uuagcugcauuaucaaaguuau

SEQ ID NO: 428041 - RNA, 22 nt, Human
gaggacaggagacucacuguuu

SEQ ID NO: 428042 - RNA, 22 nt, Human
cugggcagugcagcuauagaac

SEQ ID NO: 428043 - RNA, 22 nt, Human
ucagaagcauguggggagccug

SEQ ID NO: 428044 - RNA, 22 nt, Human
ugggcucugaagucagucugcu

SEQ ID NO: 428045 - RNA, 22 nt, Human
ggcugagcacuuuaggcaggag

SEQ ID NO: 428046 - RNA, 22 nt, Human
cagcaguggaacuacccaggga

SEQ ID NO: 428047 - RNA, 22 nt, Human
uggagcccagacacuggcauug

SEQ ID NO: 428048 - RNA, 22 nt, Human
gauggcagguaguggucucauc

SEQ ID NO: 428049 - RNA, 22 nt, Human
ugcuuuauucccuucugaugug

SEQ ID NO: 428050 - RNA, 22 nt, Human
gggccagguggaccccagccuc

SEQ ID NO: 428051 - RNA, 19 nt, Human
uccugcagaccagaccugu

SEQ ID NO: 428052 - RNA, 22 nt, Human
gcccauggcagaacugugagca

SEQ ID NO: 428053 - RNA, 22 nt, Human
ggggcagcuaccggaaguaggg

SEQ ID NO: 428054 - RNA, 22 nt, Human
caguggaauacgagcagauguc

SEQ ID NO: 428055 - RNA, 20 nt, Human
aacuuuagacauaaucucuu

SEQ ID NO: 428056 - RNA, 22 nt, Human
agcuucuguucaucuuccaggc

SEQ ID NO: 428057 - RNA, 22 nt, Human
acaaaugcagcauaaagugaac

SEQ ID NO: 428058 - RNA, 22 nt, Human
cccaguggagauaggagugugg

SEQ ID NO: 428059 - RNA, 22 nt, Human
cugaggucuagacaccccaggg

SEQ ID NO: 428060 - RNA, 22 nt, Human
cucugugccucaguuuucuucu

SEQ ID NO: 428061 - RNA, 21 nt, Human
uuuucccacugaaagcuccca

SEQ ID NO: 428062 - RNA, 22 nt, Human
caaugauugcuauuuacauaaa

SEQ ID NO: 428063 - RNA, 22 nt, Human
ccuucccuaaagcgucgcuuag

SEQ ID NO: 428064 - RNA, 22 nt, Human
cugaagcaaaggaucgagcuaa

SEQ ID NO: 428065 - RNA, 22 nt, Human
uagauuucaggcuggcuugcgg

SEQ ID NO: 428066 - RNA, 22 nt, Human
uucuuuuacauuaagauuucag

SEQ ID NO: 428067 - RNA, 22 nt, Human
gaggccacgguuuuccuugggg

SEQ ID NO: 428068 - RNA, 22 nt, Human
ccagagagggcgccaccuggag

SEQ ID NO: 428069 - RNA, 22 nt, Human
ccacagggaacaugacagccuu

SEQ ID NO: 428070 - RNA, 22 nt, Human
ucuggccauggcaagccgagug

SEQ ID NO: 428071 - RNA, 22 nt, Human
cacugaaggcugcagcucagcc

SEQ ID NO: 428072 - RNA, 22 nt, Human
uccaggcugggcugaagggugc

SEQ ID NO: 428073 - RNA, 22 nt, Human
aaguuugagagccuuuaguaua

SEQ ID NO: 428074 - RNA, 22 nt, Human
agcgggugcugugucagcccuc

SEQ ID NO: 428075 - RNA, 22 nt, Human
ucuggcugcugcgugagugcuu

SEQ ID NO: 428076 - RNA, 22 nt, Human
uuucuacauucaaaaacuacca

SEQ ID NO: 428077 - RNA, 22 nt, Human
agggugccugcugcagguucag

SEQ ID NO: 428078 - RNA, 22 nt, Human
ccagagagguagcuuacccucu

SEQ ID NO: 428079 - RNA, 22 nt, Human
gcugcucuuuucagagaugaga

SEQ ID NO: 428080 - RNA, 22 nt, Human
uccagccaagccuugguagcug

SEQ ID NO: 428081 - RNA, 22 nt, Human
cagcaggcugcgauugcucauu

SEQ ID NO: 428082 - RNA, 22 nt, Human
uguacaugugucuguauaucuu

SEQ ID NO: 428083 - RNA, 22 nt, Human
cccaggaggucgaagcugcagu

SEQ ID NO: 428084 - RNA, 22 nt, Human
ccuccuagaggaaccccagggc

SEQ ID NO: 428085 - RNA, 22 nt, Human
cccagaaggucgaggcugcagu

SEQ ID NO: 428086 - RNA, 22 nt, Human
guggcagugugaggauccugcu

SEQ ID NO: 428087 - RNA, 22 nt, Human
gggcagcugccaagugcaucgc

SEQ ID NO: 428088 - RNA, 22 nt, Human
agcugcagagguuugugcaaca

SEQ ID NO: 428089 - RNA, 22 nt, Human
gcugggagugggcaagaugaga

SEQ ID NO: 428090 - RNA, 22 nt, Human
aggcugucucaccucaggaggg

SEQ ID NO: 428091 - RNA, 22 nt, Human
gggcaugccugcgcagugcaug

SEQ ID NO: 428092 - RNA, 22 nt, Human
cagggcugagaauuuagagaca

SEQ ID NO: 428093 - RNA, 22 nt, Human
cacauguacagaagcaggcugg

SEQ ID NO: 428094 - RNA, 22 nt, Human
ggcaggcaggucuucauggccc

SEQ ID NO: 428095 - RNA, 22 nt, Human
ccaggagcagauauggacauaa

SEQ ID NO: 428096 - RNA, 22 nt, Human
gcagccagaagacucagaacaa

SEQ ID NO: 428097 - RNA, 22 nt, Human
agcagcugccagagagaguucc

SEQ ID NO: 428098 - RNA, 22 nt, Human
aaaguucucuaugguguaaaaa

SEQ ID NO: 428099 - RNA, 22 nt, Human
cgcaccacugaauuccagccug

SEQ ID NO: 428100 - RNA, 22 nt, Human
uccagggcuuggcugggacggu

SEQ ID NO: 428101 - RNA, 21 nt, Human
gcucucugcaugguggcucag

SEQ ID NO: 428102 - RNA, 22 nt, Human
aucaaaguccaucagaagguag

SEQ ID NO: 428103 - RNA, 22 nt, Human
guagggacccacagucuauauu

SEQ ID NO: 428104 - RNA, 22 nt, Human
ggagcacuauaauagagauuuu

SEQ ID NO: 428105 - RNA, 20 nt, Human
uacauucaaaacaaacucug

SEQ ID NO: 428106 - RNA, 22 nt, Human
cagcaauaaugucuacaaaucu

SEQ ID NO: 428107 - RNA, 22 nt, Human
uguucccauuuucugcauaauc

SEQ ID NO: 428108 - RNA, 22 nt, Human
ucuaccacuuauuagcucugug

SEQ ID NO: 428109 - RNA, 22 nt, Human
uacaguaaccuuauuugucauu

SEQ ID NO: 428110 - RNA, 21 nt, Human
aacugcuggucuuuucugucu

SEQ ID NO: 428111 - RNA, 22 nt, Human
caagcuggaguuccucagagug

SEQ ID NO: 428112 - RNA, 22 nt, Human
uggcagcaguagccaccccagc

SEQ ID NO: 428113 - RNA, 22 nt, Human
gaggccaggagugcuguaaguu

SEQ ID NO: 428114 - RNA, 20 nt, Human
ccugggcuccaggagccccg

SEQ ID NO: 428115 - RNA, 22 nt, Human
ggcagcugaccuagcaccaucc

SEQ ID NO: 428116 - RNA, 22 nt, Human
gcuggccugggcagccugucgg

SEQ ID NO: 428117 - RNA, 22 nt, Human
guuagaaacacauucuuauuga

SEQ ID NO: 428118 - RNA, 22 nt, Human
ucagaggagaugguuaccaggg

SEQ ID NO: 428119 - RNA, 22 nt, Human
agggcugguauguccaugaaag

SEQ ID NO: 428120 - RNA, 22 nt, Human
ggcagaguugguggagucaguu

SEQ ID NO: 428121 - RNA, 22 nt, Human
guacauuggcaacucucuuaga

SEQ ID NO: 428122 - RNA, 22 nt, Human
gcucuugucaaaaauuaguuga

SEQ ID NO: 428123 - RNA, 22 nt, Human
gagaaccucuccacaagucugg

SEQ ID NO: 428124 - RNA, 22 nt, Human
uccagugguaguaaagaggucu

SEQ ID NO: 428125 - RNA, 20 nt, Human
ucagggcaugggacagcccc

SEQ ID NO: 428126 - RNA, 22 nt, Human
gcagggcagaaggugcugagga

SEQ ID NO: 428127 - RNA, 22 nt, Human
gagcugccugugugccaugaug

SEQ ID NO: 428128 - RNA, 19 nt, Human
ccaggccucuggggccugu

SEQ ID NO: 428129 - RNA, 17 nt, Human
ucugucuugacugucac

SEQ ID NO: 428130 - RNA, 22 nt, Human
uccucacauggugagccacaca

SEQ ID NO: 428131 - RNA, 20 nt, Human
uacuugaauguugcagcagu

SEQ ID NO: 428132 - RNA, 22 nt, Human
cugggcuguaauguggcacuga

SEQ ID NO: 428133 - RNA, 22 nt, Human
acaguaauaaguguuggugagg

SEQ ID NO: 428134 - RNA, 22 nt, Human
uagugaaacaguuaucaaucug

SEQ ID NO: 428135 - RNA, 22 nt, Human
ugagccagaggaggcugugugg

SEQ ID NO: 428136 - RNA, 22 nt, Human
cuagaaauauuuuacagucaag

SEQ ID NO: 428137 - RNA, 21 nt, Human
aaggagccuaggaggcucagg

SEQ ID NO: 428138 - RNA, 22 nt, Human
gccaggcaggccacgcuguguu

SEQ ID NO: 428139 - RNA, 22 nt, Human
auguacauuuguaguaauauca

SEQ ID NO: 428140 - RNA, 22 nt, Human
gaagcagcucagauugacugaa

SEQ ID NO: 428141 - RNA, 22 nt, Human
uggcugaauaauauucuguugu

SEQ ID NO: 428142 - RNA, 22 nt, Human
cugccagccaggccagguaggc

SEQ ID NO: 428143 - RNA, 22 nt, Human
agccccacacucucucugagaa

SEQ ID NO: 428144 - RNA, 22 nt, Human
gaggccugggagccuguccucc

SEQ ID NO: 428145 - RNA, 22 nt, Human
gcaggaaagguugagacuuugc

SEQ ID NO: 428146 - RNA, 22 nt, Human
cccaggcuggauuucgguggca

SEQ ID NO: 428147 - RNA, 22 nt, Human
cucucugguacauagaguuugg

SEQ ID NO: 428148 - RNA, 22 nt, Human
uguauacaggauuacucauagc

SEQ ID NO: 428149 - RNA, 22 nt, Human
ugggcagagaguagaggcaacg

SEQ ID NO: 428150 - RNA, 22 nt, Human
agcaguggagcgagauguuuaa

SEQ ID NO: 428151 - RNA, 22 nt, Human
aggucauuuccuuagaggcaga

SEQ ID NO: 428152 - RNA, 22 nt, Human
aucaggauucaguaucuccagc

SEQ ID NO: 428153 - RNA, 22 nt, Human
uacauuaacuuacguccacaug

SEQ ID NO: 428154 - RNA, 22 nt, Human
agcucugggccaggaacccuaa

SEQ ID NO: 428155 - RNA, 22 nt, Human
aucuuugaagaggacuugaagu

SEQ ID NO: 428156 - RNA, 22 nt, Human
cccaguccuaaagcagacgcca

SEQ ID NO: 428157 - RNA, 22 nt, Human
gcaggaugggagcuucacuuug

SEQ ID NO: 428158 - RNA, 22 nt, Human
cggcugagacggccauagacac

SEQ ID NO: 428159 - RNA, 22 nt, Human
caggguggaauggaaugcuggc

SEQ ID NO: 428160 - RNA, 20 nt, Human
agguggcuccugcugggggu

SEQ ID NO: 428161 - RNA, 22 nt, Human
cugcagcuauauuuucccacag

SEQ ID NO: 428162 - RNA, 22 nt, Human
uucuuguauauaaaaaucauuu

SEQ ID NO: 428163 - RNA, 22 nt, Human
agagaaaacucauugagguguc

SEQ ID NO: 428164 - RNA, 22 nt, Human
uccaugugccaaggggcagagg

SEQ ID NO: 428165 - RNA, 22 nt, Human
aggcaggcucaggcccaugcuu

SEQ ID NO: 428166 - RNA, 22 nt, Human
cagcaagauuuuuaaagcaagg

SEQ ID NO: 428167 - RNA, 22 nt, Human
uguggccuggaaggggcugcuc

SEQ ID NO: 428168 - RNA, 22 nt, Human
uucauucccuuauauuagcauu

SEQ ID NO: 428169 - RNA, 22 nt, Human
ugcauacacaagcauacaugua

SEQ ID NO: 428170 - RNA, 22 nt, Human
ccugccugcguccucugagggc

SEQ ID NO: 428171 - RNA, 20 nt, Human
ccagagcugauggcugcccg

SEQ ID NO: 428172 - RNA, 22 nt, Human
uggcacugaccccaggccugug

SEQ ID NO: 428173 - RNA, 22 nt, Human
gguagcagggcugugagucaga

SEQ ID NO: 428174 - RNA, 22 nt, Human
cccagggucccugcucucugug

SEQ ID NO: 428175 - RNA, 22 nt, Human
aagggcucccaacucaucuuuu

SEQ ID NO: 428176 - RNA, 22 nt, Human
ugcuuuauaacuuaguuuaugg

SEQ ID NO: 428177 - RNA, 22 nt, Human
aaaugugucauauucaaaguca

SEQ ID NO: 428178 - RNA, 22 nt, Human
uuaaugcagaaaucaaacugac

SEQ ID NO: 428179 - RNA, 22 nt, Human
agucaacaaaaauguggagccu

SEQ ID NO: 428180 - RNA, 22 nt, Human
ccacagggugucaucagcuuga

SEQ ID NO: 428181 - RNA, 22 nt, Human
auugaaaguccuaucuaaggga

SEQ ID NO: 428182 - RNA, 22 nt, Human
gggucucucucggcuccacgcg

SEQ ID NO: 428183 - RNA, 22 nt, Human
ggguguccugugccaagcuggg

SEQ ID NO: 428184 - RNA, 22 nt, Human
agcagagccagaauuggaccag

SEQ ID NO: 428185 - RNA, 22 nt, Human
acuuccugcaaucguccacucc

SEQ ID NO: 428186 - RNA, 22 nt, Human
acaggugauucaggcucuggga

SEQ ID NO: 428187 - RNA, 22 nt, Human
ggaugcugggagacagcaggca

SEQ ID NO: 428188 - RNA, 22 nt, Human
aauguguacaugacagauagaa

SEQ ID NO: 428189 - RNA, 22 nt, Human
ccuggccucagacagagggugg

SEQ ID NO: 428190 - RNA, 22 nt, Human
cugccucugcgucccacagagu

SEQ ID NO: 428191 - RNA, 21 nt, Human
aggcucagagaucaaacagua

SEQ ID NO: 428192 - RNA, 22 nt, Human
gcaaaaacugcaauuacuuuug

SEQ ID NO: 428193 - RNA, 22 nt, Human
gugugcaguagagaaagagcag

SEQ ID NO: 428194 - RNA, 22 nt, Human
ggcucagaccucccagcuccag

SEQ ID NO: 428195 - RNA, 22 nt, Human
cauauuucagucuaagaugugu

SEQ ID NO: 428196 - RNA, 22 nt, Human
ggggcagggagguuaucgccga

SEQ ID NO: 428197 - RNA, 22 nt, Human
ggcugccuugacccuggcuccg

SEQ ID NO: 428198 - RNA, 22 nt, Human
ugguuacacagcauguggacuu

SEQ ID NO: 428199 - RNA, 22 nt, Human
ggcaggagaauggcgugaacuc

SEQ ID NO: 428200 - RNA, 22 nt, Human
cauuuguuuagaagucuuuaua

SEQ ID NO: 428201 - RNA, 22 nt, Human
gcaccugggcaaggauucagag

SEQ ID NO: 428202 - RNA, 22 nt, Human
aaagaacagauguguggugcau

SEQ ID NO: 428203 - RNA, 22 nt, Human
gagggcugccacguugggcgag

SEQ ID NO: 428204 - RNA, 22 nt, Human
auguaacauugaauuauauagu

SEQ ID NO: 428205 - RNA, 22 nt, Human
uucccaugccuggccccuaucc

SEQ ID NO: 428206 - RNA, 22 nt, Human
aggcagcccacaggacacagga

SEQ ID NO: 428207 - RNA, 21 nt, Human
ucucacaauaugaugccagau

SEQ ID NO: 428208 - RNA, 21 nt, Human
ugcugccaucaugcagagaug

SEQ ID NO: 428209 - RNA, 22 nt, Human
uccagucaagcuugagaauuuc

SEQ ID NO: 428210 - RNA, 22 nt, Human
uggcagcaaaaccagaaucaga

SEQ ID NO: 428211 - RNA, 22 nt, Human
acaaaugcuuaguucaccaaaa

SEQ ID NO: 428212 - RNA, 22 nt, Human
ccagaagacaagaauguucuua

SEQ ID NO: 428213 - RNA, 22 nt, Human
gccuuugcaccaucagugcaau

SEQ ID NO: 428214 - RNA, 22 nt, Human
gcguccagggaaggcccagcug

SEQ ID NO: 428215 - RNA, 23 nt, Human
cagugugacgaggugaggcaggc

SEQ ID NO: 428216 - RNA, 22 nt, Human
ugaagcaggaaccagcagcauu

SEQ ID NO: 428217 - RNA, 22 nt, Human
uucuccgcuaaguucucugcag

SEQ ID NO: 428218 - RNA, 22 nt, Human
uauaauuuggggaaaguggugu

SEQ ID NO: 428219 - RNA, 22 nt, Human
cagggcacggagaagucacccc

SEQ ID NO: 428220 - RNA, 22 nt, Human
aagauucucagagugaaagaau

SEQ ID NO: 428221 - RNA, 22 nt, Human
aaguucaaggcagguccugagg

SEQ ID NO: 428222 - RNA, 22 nt, Human
uggggcucaccuaggcuggaag

SEQ ID NO: 428223 - RNA, 22 nt, Human
cccagcauccucagggagcggg

SEQ ID NO: 428224 - RNA, 20 nt, Human
gcugaagauucccaugcaag

SEQ ID NO: 428225 - RNA, 22 nt, Human
cuuuucauuguuuguacaugca

SEQ ID NO: 428226 - RNA, 22 nt, Human
gaggagaaauuuggggaccuga

SEQ ID NO: 428227 - RNA, 22 nt, Human
auaugaagucagacaaacuggg

SEQ ID NO: 428228 - RNA, 22 nt, Human
ccaaagucugcauuuuaacaug

SEQ ID NO: 428229 - RNA, 22 nt, Human
gggcugcuuuuuucuuagcaga

SEQ ID NO: 428230 - RNA, 22 nt, Human
cagggcugaagaaauucaaaag

SEQ ID NO: 428231 - RNA, 23 nt, Human
ggaaagagaggaguugugcauag

SEQ ID NO: 428232 - RNA, 22 nt, Human
cugccugugugugccugcagaa

SEQ ID NO: 428233 - RNA, 22 nt, Human
uugucccaggacuugcauagau

SEQ ID NO: 428234 - RNA, 22 nt, Human
uucuaguuuucaguccaccagg

SEQ ID NO: 428235 - RNA, 22 nt, Human
ggcuggcacucuguccaguguc

SEQ ID NO: 428236 - RNA, 22 nt, Human
caggagugagaugcgaucacuu

SEQ ID NO: 428237 - RNA, 22 nt, Human
aucaggaucugggagccugaaa

SEQ ID NO: 428238 - RNA, 22 nt, Human
aggcagcauuucugcuuaucca

SEQ ID NO: 428239 - RNA, 22 nt, Human
uggaagccaggcccgcuccuaa

SEQ ID NO: 428240 - RNA, 22 nt, Human
ggccuggccuccagaugugggc

SEQ ID NO: 428241 - RNA, 22 nt, Human
augucccaagauacagcuagag

SEQ ID NO: 428242 - RNA, 19 nt, Human
ccuggguccacucagacua

SEQ ID NO: 428243 - RNA, 22 nt, Human
gaaaauuauugaaaauggcucu

SEQ ID NO: 428244 - RNA, 22 nt, Human
agggccugucagcgguguccug

SEQ ID NO: 428245 - RNA, 22 nt, Human
uucuugcaggucacucacugag

SEQ ID NO: 428246 - RNA, 22 nt, Human
accccaagacaguagaagagaa

SEQ ID NO: 428247 - RNA, 22 nt, Human
uggagcuggaauuucugggccu

SEQ ID NO: 428248 - RNA, 22 nt, Human
acagugugugcuuucccuuacg

SEQ ID NO: 428249 - RNA, 22 nt, Human
ccagggugaccagcuggccuag

SEQ ID NO: 428250 - RNA, 22 nt, Human
gcagagaccccgcagugaggcc

SEQ ID NO: 428251 - RNA, 22 nt, Human
ugugaagcuggauccuggagcu

SEQ ID NO: 428252 - RNA, 22 nt, Human
ugaccugcagucaagaggggaa

SEQ ID NO: 428253 - RNA, 22 nt, Human
gccagcugcuggaacagcgcga

SEQ ID NO: 428254 - RNA, 22 nt, Human
auugucuucuggucuuaucuuu

SEQ ID NO: 428255 - RNA, 22 nt, Human
agaacagcaguuaugguucauu

SEQ ID NO: 428256 - RNA, 22 nt, Human
ccaggcagccaagugugugugu

SEQ ID NO: 428257 - RNA, 22 nt, Human
gaggaagccccauugaagccag

SEQ ID NO: 428258 - RNA, 22 nt, Human
agaagccaacagggcaggagag

SEQ ID NO: 428259 - RNA, 17 nt, Human
cagacagauauccuggg

SEQ ID NO: 428260 - RNA, 22 nt, Human
cucuucagauaaaagggauauu

SEQ ID NO: 428261 - RNA, 23 nt, Human
ccuccugggcacaggccugaugg

SEQ ID NO: 428262 - RNA, 22 nt, Human
uaauguguugaauauuuguaca

SEQ ID NO: 428263 - RNA, 22 nt, Human
aggaggggcaaugauagucugg

SEQ ID NO: 428264 - RNA, 22 nt, Human
ugggagcaagcuggugcuggag

SEQ ID NO: 428265 - RNA, 22 nt, Human
cuguaaauaugaagaauauaug

SEQ ID NO: 428266 - RNA, 22 nt, Human
uuucacaaacugaggagacaau

SEQ ID NO: 428267 - RNA, 23 nt, Human
agcagcaaaaauuuaucuuucug

SEQ ID NO: 428268 - RNA, 20 nt, Human
uauaacaguguugggugugu

SEQ ID NO: 428269 - RNA, 22 nt, Human
gcccagccuccaagcuccaagg

SEQ ID NO: 428270 - RNA, 22 nt, Human
auuagggcuggaugcaaggaaa

SEQ ID NO: 428271 - RNA, 22 nt, Human
aaggagaguacaggaguuggua

SEQ ID NO: 428272 - RNA, 22 nt, Human
accugcagccacuucucuccuu

SEQ ID NO: 428273 - RNA, 20 nt, Human
ucaggcaguggggaaaggca

SEQ ID NO: 428274 - RNA, 22 nt, Human
gguggccucugcaggccucgac

SEQ ID NO: 428275 - RNA, 22 nt, Human
cuaaaauuaucaagauaauucc

SEQ ID NO: 428276 - RNA, 22 nt, Human
ggcagugaacagaaaugcagaa

SEQ ID NO: 428277 - RNA, 19 nt, Human
uccaggcauccuucaggcu

SEQ ID NO: 428278 - RNA, 22 nt, Human
gcagccccaggagacgcccagg

SEQ ID NO: 428279 - RNA, 20 nt, Human
gaggcugcggacugcuggac

SEQ ID NO: 428280 - RNA, 22 nt, Human
uagaaaugcaguguacuguguc

SEQ ID NO: 428281 - RNA, 22 nt, Human
ugcaggcuuuagccccauggcu

SEQ ID NO: 428282 - RNA, 22 nt, Human
gguuggaggugggaauagcuag

SEQ ID NO: 428283 - RNA, 22 nt, Human
ggagcagacauaaccuuacaga

SEQ ID NO: 428284 - RNA, 22 nt, Human
cuggguggaucgcagccccagg

SEQ ID NO: 428285 - RNA, 22 nt, Human
aggagcagcccacuccuguccu

SEQ ID NO: 428286 - RNA, 22 nt, Human
auuauuaggacuacugggguug

SEQ ID NO: 428287 - RNA, 22 nt, Human
caucuggcuagcuaucauugug

SEQ ID NO: 428288 - RNA, 20 nt, Human
ccaccuggccaaggcugugc

SEQ ID NO: 428289 - RNA, 19 nt, Human
agccuggcuuugcucugcu

SEQ ID NO: 428290 - RNA, 22 nt, Human
uggcuucagacuucugcuacgu

SEQ ID NO: 428291 - RNA, 22 nt, Human
caggcagcugacugucagauau

SEQ ID NO: 428292 - RNA, 22 nt, Human
gcagauggugccaugucuugug

SEQ ID NO: 428293 - RNA, 20 nt, Human
ccacaggaguccagucgacc

SEQ ID NO: 428294 - RNA, 22 nt, Human
gggcugagucaucuggggccuc

SEQ ID NO: 428295 - RNA, 22 nt, Human
uuacuucuuacaaaagaaauau

SEQ ID NO: 428296 - RNA, 21 nt, Human
cgggcuggccgggcccucacc

SEQ ID NO: 428297 - RNA, 22 nt, Human
ggcuuuauuauguggccaugug

SEQ ID NO: 428298 - RNA, 22 nt, Human
ugcuggagaggaaggugggguc

SEQ ID NO: 428299 - RNA, 22 nt, Human
aauaguguuguucacucaggag

SEQ ID NO: 428300 - RNA, 22 nt, Human
cacagcuggugacagagcccag

SEQ ID NO: 428301 - RNA, 22 nt, Human
acugccaaugguaguuugaugg

SEQ ID NO: 428302 - RNA, 22 nt, Human
uccaguggugguuugaagggca

SEQ ID NO: 428303 - RNA, 22 nt, Human
cauacuuuugcccugacauucu

SEQ ID NO: 428304 - RNA, 22 nt, Human
uacaagaugacaggugcaugau

SEQ ID NO: 428305 - RNA, 22 nt, Human
cuguggcauugccgaggcuggc

SEQ ID NO: 428306 - RNA, 22 nt, Human
ugguggccuugauggcaucugc

SEQ ID NO: 428307 - RNA, 22 nt, Human
ugucccagaucacaggagggga

SEQ ID NO: 428308 - RNA, 22 nt, Human
acuccuggggcugccaucacag

SEQ ID NO: 428309 - RNA, 22 nt, Human
acugucuuccaggucuggaggu

SEQ ID NO: 428310 - RNA, 22 nt, Human
auuuuuccaauuaggauaaaga

SEQ ID NO: 428311 - RNA, 20 nt, Human
gggcuggcgcauggggaaag

SEQ ID NO: 428312 - RNA, 22 nt, Human
acaguggaggccauaugguccu

SEQ ID NO: 428313 - RNA, 22 nt, Human
aggcugaggcuuuccuuggaga

SEQ ID NO: 428314 - RNA, 22 nt, Human
aacuagaaaacaagaugcugau

SEQ ID NO: 428315 - RNA, 22 nt, Human
auuucuacaguacacaugcauu

SEQ ID NO: 428316 - RNA, 22 nt, Human
ucaucacauguguagucauccc

SEQ ID NO: 428317 - RNA, 22 nt, Human
uacacauguuuggcaaguaugu

SEQ ID NO: 428318 - RNA, 22 nt, Human
gggcugacucugcacugagcca

SEQ ID NO: 428319 - RNA, 22 nt, Human
agugugaguaauucagggaggg

SEQ ID NO: 428320 - RNA, 22 nt, Human
acuggcagccacaacuggcagg

SEQ ID NO: 428321 - RNA, 22 nt, Human
acugucuuguguuaaagaacca

SEQ ID NO: 428322 - RNA, 22 nt, Human
gggcugagugaccucaggccaa

SEQ ID NO: 428323 - RNA, 22 nt, Human
auacaucuuccuuuuaaaaugc

SEQ ID NO: 428324 - RNA, 22 nt, Human
ccagagccggauugugaagugc

SEQ ID NO: 428325 - RNA, 20 nt, Human
cccaggagugagcagcuuua

SEQ ID NO: 428326 - RNA, 22 nt, Human
ggugggcaggcgaggcccaggu

SEQ ID NO: 428327 - RNA, 22 nt, Human
ccaggccugcaucugcugcgca

SEQ ID NO: 428328 - RNA, 22 nt, Human
ugaguucuaguggcugcagauu

SEQ ID NO: 428329 - RNA, 22 nt, Human
gaaucucaaggcuugugaggau

SEQ ID NO: 428330 - RNA, 22 nt, Human
gacaagacuauguagaaaguau

SEQ ID NO: 428331 - RNA, 22 nt, Human
uugcaucuagggcaacccagag

SEQ ID NO: 428332 - RNA, 22 nt, Human
gccuuucaguuccaucaaagga

SEQ ID NO: 428333 - RNA, 23 nt, Human
uugauacagaagaaucaguuugu

SEQ ID NO: 428334 - RNA, 22 nt, Human
cagaccagaaggaagccgacaa

SEQ ID NO: 428335 - RNA, 22 nt, Human
ucuggccugaaaguccaugcuu

SEQ ID NO: 428336 - RNA, 22 nt, Human
cugagccacugcuuguucagug

SEQ ID NO: 428337 - RNA, 18 nt, Human
acauuucuaggugaaagc

SEQ ID NO: 428338 - RNA, 22 nt, Human
gcugugcaguaguagguacagu

SEQ ID NO: 428339 - RNA, 22 nt, Human
ugugugcagccucugucuuugg

SEQ ID NO: 428340 - RNA, 22 nt, Human
aagucauuaucucuucuaaucu

SEQ ID NO: 428341 - RNA, 22 nt, Human
aaaggucagcugccaucguucu

SEQ ID NO: 428342 - RNA, 22 nt, Human
guucucucugcuuccaagaugg

SEQ ID NO: 428343 - RNA, 17 nt, Human
accagccucuccugggg

SEQ ID NO: 428344 - RNA, 22 nt, Human
aguaauaauuuauauuagggag

SEQ ID NO: 428345 - RNA, 22 nt, Human
caggaacacaaugagucucaaa

SEQ ID NO: 428346 - RNA, 22 nt, Human
aaaugcagauugucauucagga

SEQ ID NO: 428347 - RNA, 20 nt, Human
gagauuuccaaucaugccca

SEQ ID NO: 428348 - RNA, 21 nt, Human
aagcaggacauaugaugcccu

SEQ ID NO: 428349 - RNA, 22 nt, Human
ugaggcaggaguucaggcugcg

SEQ ID NO: 428350 - RNA, 22 nt, Human
ugcugccucagcuuccugggcu

SEQ ID NO: 428351 - RNA, 19 nt, Human
uagucuuuauucuuaauuu

SEQ ID NO: 428352 - RNA, 22 nt, Human
aggggccucgcaggaccgcucc

SEQ ID NO: 428353 - RNA, 17 nt, Human
cccagagaugcugccuu

SEQ ID NO: 428354 - RNA, 22 nt, Human
uaagaacagugacagccaacau

SEQ ID NO: 428355 - RNA, 22 nt, Human
ugcagccaauucauucauucuu

SEQ ID NO: 428356 - RNA, 22 nt, Human
agcugagcuaguaguuccagug

SEQ ID NO: 428357 - RNA, 22 nt, Human
augcacccagugucuggacuau

SEQ ID NO: 428358 - RNA, 22 nt, Human
uacaugcuccacuuucuccugu

SEQ ID NO: 428359 - RNA, 22 nt, Human
caguggcgugaucucugcucac

SEQ ID NO: 428360 - RNA, 22 nt, Human
ggcagcucaccucugguccagg

SEQ ID NO: 428361 - RNA, 22 nt, Human
aaacuagagcaugugaguggga

SEQ ID NO: 428362 - RNA, 22 nt, Human
aaaaugaauaaguuaacccagg

SEQ ID NO: 428363 - RNA, 22 nt, Human
ucacugcagacaaccucaguca

SEQ ID NO: 428364 - RNA, 22 nt, Human
cccucugcugccuggcuggguc

SEQ ID NO: 428365 - RNA, 22 nt, Human
cugcagggcagggccuccuggc

SEQ ID NO: 428366 - RNA, 22 nt, Human
uuuuugaaggcugaugugauua

SEQ ID NO: 428367 - RNA, 22 nt, Human
gggauggggagcuggaaagggg

SEQ ID NO: 428368 - RNA, 22 nt, Human
cugcagagcuaggcugagugaa

SEQ ID NO: 428369 - RNA, 22 nt, Human
aaguccagcucuaaauaucuga

SEQ ID NO: 428370 - RNA, 22 nt, Human
ccuggcagguggcgcccucggc

SEQ ID NO: 428371 - RNA, 22 nt, Human
ugagccugguugcagugucugg

SEQ ID NO: 428372 - RNA, 18 nt, Human
ugcucuguuuaaugauuu

SEQ ID NO: 428373 - RNA, 22 nt, Human
aagacuguaugagacaauauaa

SEQ ID NO: 428374 - RNA, 22 nt, Human
aaaggccacugcaagggaaggu

SEQ ID NO: 428375 - RNA, 22 nt, Human
agggggcaucagguccuggcuc

SEQ ID NO: 428376 - RNA, 23 nt, Human
acuuaaaugguucuuuaucucag

SEQ ID NO: 428377 - RNA, 22 nt, Human
agcagggcaugaauaaggguuu

SEQ ID NO: 428378 - RNA, 19 nt, Human
caggccagugucagggggc

SEQ ID NO: 428379 - RNA, 23 nt, Human
ugucauugugacuacagaaccag

SEQ ID NO: 428380 - RNA, 22 nt, Human
cugcugggaaggucugcucagu

SEQ ID NO: 428381 - RNA, 22 nt, Human
ccaccagcuucagcagccgcgg

SEQ ID NO: 428382 - RNA, 22 nt, Human
ucagaggagggacucagaccca

SEQ ID NO: 428383 - RNA, 22 nt, Human
uuuuauuggagugauaccaagc

SEQ ID NO: 428384 - RNA, 22 nt, Human
uacauugugauguuucaauaca

SEQ ID NO: 428385 - RNA, 19 nt, Human
caaggccaccauuucuccg

SEQ ID NO: 428386 - RNA, 22 nt, Human
ggucucagacuggcaggcagug

SEQ ID NO: 428387 - RNA, 22 nt, Human
caggggcucugagauugucuaa

SEQ ID NO: 428388 - RNA, 22 nt, Human
caggagugucuccacacagcaa

SEQ ID NO: 428389 - RNA, 22 nt, Human
gcagugguccaguucacaccca

SEQ ID NO: 428390 - RNA, 22 nt, Human
ugucuccucauacugucauauu

SEQ ID NO: 428391 - RNA, 22 nt, Human
uauucacaguugauuuacaguu

SEQ ID NO: 428392 - RNA, 22 nt, Human
agggccugggccagcacccuuu

SEQ ID NO: 428393 - RNA, 22 nt, Human
cucccaggcacagggaggagcc

SEQ ID NO: 428394 - RNA, 22 nt, Human
cagggcucacucggcuggcguc

SEQ ID NO: 428395 - RNA, 22 nt, Human
aaaugucugagacuucugaacu

SEQ ID NO: 428396 - RNA, 22 nt, Human
cagcuuuccagagaccugcccc

SEQ ID NO: 428397 - RNA, 22 nt, Human
uuauacauguguuuugagauga

SEQ ID NO: 428398 - RNA, 22 nt, Human
ccagagugacgugaagugugaa

SEQ ID NO: 428399 - RNA, 22 nt, Human
ggucccaggcucccucuugucc

SEQ ID NO: 428400 - RNA, 19 nt, Human
gcgaggaagucacuguggu

SEQ ID NO: 428401 - RNA, 20 nt, Human
agaagcugauacugauggaa

SEQ ID NO: 428402 - RNA, 22 nt, Human
ggagcugaugacgucaccaugg

SEQ ID NO: 428403 - RNA, 22 nt, Human
ccaggcugggcuacaaguugag

SEQ ID NO: 428404 - RNA, 22 nt, Human
ucucacuuuccagacuuuucaa

SEQ ID NO: 428405 - RNA, 22 nt, Human
gaauucuuuucuuucugaaagu

SEQ ID NO: 428406 - RNA, 22 nt, Human
uuuaugaacuacagauauaacu

SEQ ID NO: 428407 - RNA, 22 nt, Human
gcugcucuugaggggcucacug

SEQ ID NO: 428408 - RNA, 22 nt, Human
acuuuuuuauaaggaagaagau

SEQ ID NO: 428409 - RNA, 22 nt, Human
agugugagcccuggaguggugc

SEQ ID NO: 428410 - RNA, 19 nt, Human
caggaugaucccaugacac

SEQ ID NO: 428411 - RNA, 22 nt, Human
auuuauuaagcaucugcuaugu

SEQ ID NO: 428412 - RNA, 22 nt, Human
acagagcacauagauuggaguu

SEQ ID NO: 428413 - RNA, 22 nt, Human
uggcccugacacgugguacugg

SEQ ID NO: 428414 - RNA, 22 nt, Human
gagcagagacaguacaacuggc

SEQ ID NO: 428415 - RNA, 22 nt, Human
agauacauagcugugagcacac

SEQ ID NO: 428416 - RNA, 22 nt, Human
uccaggcaaagccuuguagacg

SEQ ID NO: 428417 - RNA, 22 nt, Human
gcucagagauguucaguagcuu

SEQ ID NO: 428418 - RNA, 22 nt, Human
uggguggcacuucuggggucca

SEQ ID NO: 428419 - RNA, 22 nt, Human
agggcccuagggaaugagacau

SEQ ID NO: 428420 - RNA, 22 nt, Human
uuucauaugggcauuggcaaua

SEQ ID NO: 428421 - RNA, 22 nt, Human
acaggugguaaaauggacuguc

SEQ ID NO: 428422 - RNA, 20 nt, Human
aggagaaauucgggacaccu

SEQ ID NO: 428423 - RNA, 21 nt, Human
gccagggaagagaguuggcug

SEQ ID NO: 428424 - RNA, 22 nt, Human
gccugugcuuaacugacgugag

SEQ ID NO: 428425 - RNA, 22 nt, Human
agcugcugugugcucaggcagg

SEQ ID NO: 428426 - RNA, 22 nt, Human
caggguccaucuuucaucacug

SEQ ID NO: 428427 - RNA, 22 nt, Human
aagauuucugcuccugagagaa

SEQ ID NO: 428428 - RNA, 22 nt, Human
cauuguauugaggauacuuaag

SEQ ID NO: 428429 - RNA, 22 nt, Human
agccaugcaccuuacucuugcu

SEQ ID NO: 428430 - RNA, 22 nt, Human
aggucacacuuggaucauagaa

SEQ ID NO: 428431 - RNA, 22 nt, Human
cuggggccacaacggcgcacgc

SEQ ID NO: 428432 - RNA, 22 nt, Human
ggcugugaacccuggcagugug

SEQ ID NO: 428433 - RNA, 22 nt, Human
cuccucugucuggcccugagcc

SEQ ID NO: 428434 - RNA, 22 nt, Human
aaaucagugcucauuugaaagg

SEQ ID NO: 428435 - RNA, 22 nt, Human
ucccaggaucugagggcagaga

SEQ ID NO: 428436 - RNA, 22 nt, Human
uugaagauggaucgccacucuc

SEQ ID NO: 428437 - RNA, 22 nt, Human
agguauauauucugguccuuau

SEQ ID NO: 428438 - RNA, 22 nt, Human
gccuggagcuacuggacacuga

SEQ ID NO: 428439 - RNA, 22 nt, Human
ucucuucuugauuuucacugga

SEQ ID NO: 428440 - RNA, 22 nt, Human
gaugcagaaaguagacaccauc

SEQ ID NO: 428441 - RNA, 22 nt, Human
cagaagcauugacuccuugcuc

SEQ ID NO: 428442 - RNA, 22 nt, Human
ugaggcaggaguuaaugugcuc

SEQ ID NO: 428443 - RNA, 22 nt, Human
gucauugcaguggcaaaucaca

SEQ ID NO: 428444 - RNA, 22 nt, Human
gcugucaccaaagcaggcacug

SEQ ID NO: 428445 - RNA, 22 nt, Human
auuucucaguguacauuauguu

SEQ ID NO: 428446 - RNA, 22 nt, Human
gggcuggcucugucuagaaagg

SEQ ID NO: 428447 - RNA, 22 nt, Human
aagagcugcccaaggugaacag

SEQ ID NO: 428448 - RNA, 22 nt, Human
ccaggcugcuguugguguccgc

SEQ ID NO: 428449 - RNA, 22 nt, Human
agaguguuucagucuuccuaga

SEQ ID NO: 428450 - RNA, 20 nt, Human
guugaaaguaauaugaugcu

SEQ ID NO: 428451 - RNA, 22 nt, Human
ccagucccaggcagaaauccag

SEQ ID NO: 428452 - RNA, 22 nt, Human
cugcucugcagcuuggacuccc

SEQ ID NO: 428453 - RNA, 17 nt, Human
ugagaaguaggcaucau

SEQ ID NO: 428454 - RNA, 22 nt, Human
caagaugaucccugaaggcagc

SEQ ID NO: 428455 - RNA, 22 nt, Human
acagagagguaaaauauauagu

SEQ ID NO: 428456 - RNA, 15 nt, Human
ugauuuccuacuaac

SEQ ID NO: 428457 - RNA, 22 nt, Human
acauuaucccuggcacaacugc

SEQ ID NO: 428458 - RNA, 22 nt, Human
cucugcaugccuugcucagaca

SEQ ID NO: 428459 - RNA, 22 nt, Human
cguagguggcucagcaccuggg

SEQ ID NO: 428460 - RNA, 22 nt, Human
uuggcuucucuuaacccuaaag

SEQ ID NO: 428461 - RNA, 22 nt, Human
uuuccucuuccgagggggaggc

SEQ ID NO: 428462 - RNA, 22 nt, Human
uuaccaaaucccgugcacauuc

SEQ ID NO: 428463 - RNA, 22 nt, Human
uauuucuaagcuguaagucuga

SEQ ID NO: 428464 - RNA, 22 nt, Human
gggacuggaacuacuggugcag

SEQ ID NO: 428465 - RNA, 22 nt, Human
uaguuuuuucaacaaauggugc

SEQ ID NO: 428466 - RNA, 19 nt, Human
ugccuggcaccagcuccac

SEQ ID NO: 428467 - RNA, 22 nt, Human
cgaggcagaggcugaaacggcu

SEQ ID NO: 428468 - RNA, 22 nt, Human
acaaagucaaauugcagccgcc

SEQ ID NO: 428469 - RNA, 21 nt, Human
cagaggcugagagggcaaucu

SEQ ID NO: 428470 - RNA, 22 nt, Human
ugccaggagagugcaugcaggg

SEQ ID NO: 428471 - RNA, 22 nt, Human
agucccagcucagaaccacuag

SEQ ID NO: 428472 - RNA, 22 nt, Human
cuaucuuucgauucuagcuuaa

SEQ ID NO: 428473 - RNA, 22 nt, Human
ugaaggagcucaaugaugaugc

SEQ ID NO: 428474 - RNA, 22 nt, Human
ggcugcucuucuuggcgaccuc

SEQ ID NO: 428475 - RNA, 22 nt, Human
aagaugcuuauugcuccugcag

SEQ ID NO: 428476 - RNA, 22 nt, Human
ggucacugcucuaaacaaaagu

SEQ ID NO: 428477 - RNA, 22 nt, Human
ccagaggugcugggagaggucu

SEQ ID NO: 428478 - RNA, 22 nt, Human
auuaaauuggaucugcauaguu

SEQ ID NO: 428479 - RNA, 22 nt, Human
ccugccuggaucagccauccug

SEQ ID NO: 428480 - RNA, 22 nt, Human
ucagaggucccuagcaggagug

SEQ ID NO: 428481 - RNA, 22 nt, Human
ucugucugagggagugacauuu

SEQ ID NO: 428482 - RNA, 22 nt, Human
acagguggcauaggcaguuuga

SEQ ID NO: 428483 - RNA, 22 nt, Human
uuacuuuggauggucaagaaag

SEQ ID NO: 428484 - RNA, 22 nt, Human
gcacacagauuaggaaacagaa

SEQ ID NO: 428485 - RNA, 22 nt, Human
cccaagcagggugcagaggcau

SEQ ID NO: 428486 - RNA, 22 nt, Human
gggccagugaacaaugagggaa

SEQ ID NO: 428487 - RNA, 22 nt, Human
aggaagccuggggcugcccucg

SEQ ID NO: 428488 - RNA, 22 nt, Human
uucauuaguucugaagaugucu

SEQ ID NO: 428489 - RNA, 22 nt, Human
cugugcaagcccaagauaaaac

SEQ ID NO: 428490 - RNA, 22 nt, Human
uccaggcaugucugaguccuuc

SEQ ID NO: 428491 - RNA, 22 nt, Human
gcaaagguagccaaggagcuca

SEQ ID NO: 428492 - RNA, 22 nt, Human
aagcaaagaguuuaguggguga

SEQ ID NO: 428493 - RNA, 22 nt, Human
uggcugcugcuuggucuucuuc

SEQ ID NO: 428494 - RNA, 22 nt, Human
uguaggacauguacuuguaaca

SEQ ID NO: 428495 - RNA, 22 nt, Human
gcagagccaggagagacccuug

SEQ ID NO: 428496 - RNA, 19 nt, Human
ugaaacaaacuuaaaagga

SEQ ID NO: 428497 - RNA, 22 nt, Human
ucaggagagaaagaauacaauu

SEQ ID NO: 428498 - RNA, 17 nt, Human
cucuccuuccucugagg

SEQ ID NO: 428499 - RNA, 22 nt, Human
uagggcucagagaaguggggcc

SEQ ID NO: 428500 - RNA, 21 nt, Human
caugaagccgguucccuguuu

SEQ ID NO: 428501 - RNA, 18 nt, Human
cugcugugucgucugggc

SEQ ID NO: 428502 - RNA, 22 nt, Human
gccuucaggaaaucaguccuug

SEQ ID NO: 428503 - RNA, 22 nt, Human
ucucaccaaagccuugaccaua

SEQ ID NO: 428504 - RNA, 22 nt, Human
agagucugaaugcucagaguug

SEQ ID NO: 428505 - RNA, 22 nt, Human
ucuucuccagugcuucugcaca

SEQ ID NO: 428506 - RNA, 23 nt, Human
cugcagucgccggccugggugcc

SEQ ID NO: 428507 - RNA, 22 nt, Human
gguggccuuucaguggaucagg

SEQ ID NO: 428508 - RNA, 22 nt, Human
uggcagcaaguucuugggaggu

SEQ ID NO: 428509 - RNA, 22 nt, Human
ggccucucuccagucagugcag

SEQ ID NO: 428510 - RNA, 22 nt, Human
ucagcuccucaugcaggggaua

SEQ ID NO: 428511 - RNA, 22 nt, Human
auacauuagaaucugguacuca

SEQ ID NO: 428512 - RNA, 22 nt, Human
cacagacccagaagggaugaag

SEQ ID NO: 428513 - RNA, 22 nt, Human
agcugcagauucuaucuagaag

SEQ ID NO: 428514 - RNA, 22 nt, Human
auaucacaaacaagucuguacu

SEQ ID NO: 428515 - RNA, 22 nt, Human
cagguggggagaguguggagca

SEQ ID NO: 428516 - RNA, 22 nt, Human
ggcacugagaggcucuuccuaa

SEQ ID NO: 428517 - RNA, 22 nt, Human
ccagaagucaggaaugagucuu

SEQ ID NO: 428518 - RNA, 22 nt, Human
guugaaugaaucauucuaugua

SEQ ID NO: 428519 - RNA, 22 nt, Human
auucucuguuuccaagaugaaa

SEQ ID NO: 428520 - RNA, 19 nt, Human
augucccaccgccccugag

SEQ ID NO: 428521 - RNA, 22 nt, Human
uuuaauuuuccugguaggccug

SEQ ID NO: 428522 - RNA, 22 nt, Human
uggcacagacagaucaggaguc

SEQ ID NO: 428523 - RNA, 22 nt, Human
ugagccagucugucugggugaa

SEQ ID NO: 428524 - RNA, 22 nt, Human
ggucauugaaaucagaaggguu

SEQ ID NO: 428525 - RNA, 22 nt, Human
uagauuuuacuucugucauuac

SEQ ID NO: 428526 - RNA, 22 nt, Human
caggaugugaggaggccauuug

SEQ ID NO: 428527 - RNA, 20 nt, Human
caguccaaucagaggccacc

SEQ ID NO: 428528 - RNA, 22 nt, Human
ugcccuguuaucuuggaagagu

SEQ ID NO: 428529 - RNA, 22 nt, Human
ugccucugcugcuguggcauca

SEQ ID NO: 428530 - RNA, 22 nt, Human
ucuucauuuuauagcaucugug

SEQ ID NO: 428531 - RNA, 22 nt, Human
uggggugguaauacaccguucu

SEQ ID NO: 428532 - RNA, 22 nt, Human
guauuagguuggugcaaaagua

SEQ ID NO: 428533 - RNA, 22 nt, Human
auugaaagaguuuucugcugca

SEQ ID NO: 428534 - RNA, 22 nt, Human
gggagagaugcugauugccaau

SEQ ID NO: 428535 - RNA, 22 nt, Human
uggccugguuauauugcuauca

SEQ ID NO: 428536 - RNA, 22 nt, Human
uagaauaugugguaggaucugg

SEQ ID NO: 428537 - RNA, 22 nt, Human
acacacuucacccuugagcuaa

SEQ ID NO: 428538 - RNA, 22 nt, Human
uauugucuguccgggucaaagc

SEQ ID NO: 428539 - RNA, 22 nt, Human
uacauuugcuuugauuuucagc

SEQ ID NO: 428540 - RNA, 22 nt, Human
caagggccuccaccuugcucgu

SEQ ID NO: 428541 - RNA, 22 nt, Human
gacauaauccuccucaccuacu

SEQ ID NO: 428542 - RNA, 22 nt, Human
cagcaggguauacagggaauuu

SEQ ID NO: 428543 - RNA, 22 nt, Human
agagaacaaauuaaaggugguu

SEQ ID NO: 428544 - RNA, 22 nt, Human
aaagaguucuaugaucuuucca

SEQ ID NO: 428545 - RNA, 22 nt, Human
ugccucagcugaggccgcucca

SEQ ID NO: 428546 - RNA, 22 nt, Human
ucccagagacagagccuccucc

SEQ ID NO: 428547 - RNA, 18 nt, Human
gagcccugagucugcaca

SEQ ID NO: 428548 - RNA, 22 nt, Human
gggggcaguaaggauauggaaa

SEQ ID NO: 428549 - RNA, 22 nt, Human
gaugggcguggcgcguuuggug

SEQ ID NO: 428550 - RNA, 22 nt, Human
ggagacaguauggcuuguagcu

SEQ ID NO: 428551 - RNA, 22 nt, Human
aaaggcuaugagauagaagaua

SEQ ID NO: 428552 - RNA, 22 nt, Human
gaauuugaaaagugaugggaau

SEQ ID NO: 428553 - RNA, 22 nt, Human
agaggcugagaaacccucuucu

SEQ ID NO: 428554 - RNA, 22 nt, Human
uccuguggcguuaucaugugau

SEQ ID NO: 428555 - RNA, 22 nt, Human
uggcuggcuagugggcaggauu

SEQ ID NO: 428556 - RNA, 22 nt, Human
cagcagugcuucagugugagau

SEQ ID NO: 428557 - RNA, 22 nt, Human
gugccugccccacuccucagca

SEQ ID NO: 428558 - RNA, 22 nt, Human
ugcauuauacuuuuagaaauuu

SEQ ID NO: 428559 - RNA, 20 nt, Human
gucaucgccggcagcaaaga

SEQ ID NO: 428560 - RNA, 22 nt, Human
aagcugccaccagcccagggca

SEQ ID NO: 428561 - RNA, 22 nt, Human
agaggcagaaguguucaaaccc

SEQ ID NO: 428562 - RNA, 22 nt, Human
uuccaguugguagaauguaagg

SEQ ID NO: 428563 - RNA, 22 nt, Human
cccagcucuuuuagcggcaucu

SEQ ID NO: 428564 - RNA, 22 nt, Human
acauuucuccuugcaggaguca

SEQ ID NO: 428565 - RNA, 22 nt, Human
ucugagccaauuucugugucca

SEQ ID NO: 428566 - RNA, 22 nt, Human
ggccagaaaguuaagcuguggc

SEQ ID NO: 428567 - RNA, 22 nt, Human
uuuugucuaagaacuuugcaaa

SEQ ID NO: 428568 - RNA, 22 nt, Human
auucacaauuagaaguagauaa

SEQ ID NO: 428569 - RNA, 22 nt, Human
acagcagcuaaccccugggcca

SEQ ID NO: 428570 - RNA, 21 nt, Human
acaguucaugauaacuccauc

SEQ ID NO: 428571 - RNA, 19 nt, Human
ggaggccuggguauuugcc

SEQ ID NO: 428572 - RNA, 22 nt, Human
gcucccaccaggcagaccuacc

SEQ ID NO: 428573 - RNA, 22 nt, Human
ucagcaauccucccacaggugg

SEQ ID NO: 428574 - RNA, 20 nt, Human
ugucaugcauuagaugaaga

SEQ ID NO: 428575 - RNA, 22 nt, Human
gagagugaggccugggaaucua

SEQ ID NO: 428576 - RNA, 22 nt, Human
uagcagcuuaaguaauuagaau

SEQ ID NO: 428577 - RNA, 22 nt, Human
cagaagagaugaaauaguauua

SEQ ID NO: 428578 - RNA, 22 nt, Human
acagcacaaucugagucccaga

SEQ ID NO: 428579 - RNA, 22 nt, Human
uuuccacugggcacggggccag

SEQ ID NO: 428580 - RNA, 22 nt, Human
uagccuucucaagacaaaguug

SEQ ID NO: 428581 - RNA, 20 nt, Human
gccugagcuauugccaggau

SEQ ID NO: 428582 - RNA, 22 nt, Human
gugcauugcgaugcagacgacc

SEQ ID NO: 428583 - RNA, 22 nt, Human
gguuggggcgagcuggaggccc

SEQ ID NO: 428584 - RNA, 22 nt, Human
aggccugucuggggcucagcca

SEQ ID NO: 428585 - RNA, 22 nt, Human
auuugucucugcacuuuacuca

SEQ ID NO: 428586 - RNA, 22 nt, Human
acagauauaugauuguguaaau

SEQ ID NO: 428587 - RNA, 22 nt, Human
gccccuggcuggccagcuccuc

SEQ ID NO: 428588 - RNA, 22 nt, Human
ucauugaauuucacagcuuuau

SEQ ID NO: 428589 - RNA, 22 nt, Human
cuuccugaacaaugccaucaau

SEQ ID NO: 428590 - RNA, 22 nt, Human
agcugcuacugcucugccagag

SEQ ID NO: 428591 - RNA, 22 nt, Human
ugguaauuuacgcauuucugua

SEQ ID NO: 428592 - RNA, 17 nt, Human
uuucagauucacuuucu

SEQ ID NO: 428593 - RNA, 22 nt, Human
auguuucaugacugagcaaaau

SEQ ID NO: 428594 - RNA, 22 nt, Human
agcugaggcauggacaggcugc

SEQ ID NO: 428595 - RNA, 22 nt, Human
ccaggcuuucccagccucucca

SEQ ID NO: 428596 - RNA, 22 nt, Human
cagcugcccugccuugcccuua

SEQ ID NO: 428597 - RNA, 22 nt, Human
gaggcucagagugguuaaauaa

SEQ ID NO: 428598 - RNA, 22 nt, Human
ccaggcugggcggggaaccugg

SEQ ID NO: 428599 - RNA, 22 nt, Human
ucauugcagacuaacaaucuca

SEQ ID NO: 428600 - RNA, 22 nt, Human
cagggcagggagcuuagaauga

SEQ ID NO: 428601 - RNA, 22 nt, Human
agcagggcagcuuuuuucagaa

SEQ ID NO: 428602 - RNA, 22 nt, Human
aucaaaguucguaacugauaac

SEQ ID NO: 428603 - RNA, 22 nt, Human
cagcagcuggugagacacagcc

SEQ ID NO: 428604 - RNA, 22 nt, Human
caagcccaggauuccccaguua

SEQ ID NO: 428605 - RNA, 22 nt, Human
acaggacaggcugggcuagacu

SEQ ID NO: 428606 - RNA, 22 nt, Human
gaguccaguguuuaccaggggu

SEQ ID NO: 428607 - RNA, 22 nt, Human
gaauacaagccugccaccugga

SEQ ID NO: 428608 - RNA, 22 nt, Human
agccaggcggggcagguuuccu

SEQ ID NO: 428609 - RNA, 22 nt, Human
gcagagccccucaagccagccu

SEQ ID NO: 428610 - RNA, 23 nt, Human
gcccaugcuguugggcccgagca

SEQ ID NO: 428611 - RNA, 22 nt, Human
cagaaggcaaacaaaaggauuu

SEQ ID NO: 428612 - RNA, 18 nt, Human
uggcucugcagccagaug

SEQ ID NO: 428613 - RNA, 22 nt, Human
ggacucuguuuuccugaucacu

SEQ ID NO: 428614 - RNA, 22 nt, Human
uaacagaaaagaacugaguuug

SEQ ID NO: 428615 - RNA, 22 nt, Human
uggccuggugucugcgaggccu

SEQ ID NO: 428616 - RNA, 22 nt, Human
gagcagggccacuucuguaccu

SEQ ID NO: 428617 - RNA, 22 nt, Human
gggcagagagcuggaacuccuu

SEQ ID NO: 428618 - RNA, 22 nt, Human
gcacagaaguaaaauacaaguc

SEQ ID NO: 428619 - RNA, 22 nt, Human
cuuagggagaaugccucugcag

SEQ ID NO: 428620 - RNA, 19 nt, Human
ugcagggcugcgccugggg

SEQ ID NO: 428621 - RNA, 22 nt, Human
guuucauuuacaucuguaggua

SEQ ID NO: 428622 - RNA, 22 nt, Human
ucacagcuaagcuuggucacug

SEQ ID NO: 428623 - RNA, 22 nt, Human
auaauucagguuuucuggcaca

SEQ ID NO: 428624 - RNA, 22 nt, Human
cugggccugucagggcuuuuug

SEQ ID NO: 428625 - RNA, 23 nt, Human
agggcaugaagcagaggacgugg

SEQ ID NO: 428626 - RNA, 22 nt, Human
auucaguucuaaggucagugcc

SEQ ID NO: 428627 - RNA, 22 nt, Human
ggccugagcucuggggaggcaa

SEQ ID NO: 428628 - RNA, 22 nt, Human
ggccuggaaugcuuuccuacca

SEQ ID NO: 428629 - RNA, 22 nt, Human
gcccagcugcacccuggugggu

SEQ ID NO: 428630 - RNA, 22 nt, Human
cuuccugcauugugccagaguu

SEQ ID NO: 428631 - RNA, 22 nt, Human
ggccagggggcuucagacucca

SEQ ID NO: 428632 - RNA, 22 nt, Human
uuucauuacguguuugacuugu

SEQ ID NO: 428633 - RNA, 22 nt, Human
ugagcuucuuuauuuggccaga

SEQ ID NO: 428634 - RNA, 22 nt, Human
ugggggugaaagucuggacagu

SEQ ID NO: 428635 - RNA, 21 nt, Human
gcuuccaagauggcaccuuga

SEQ ID NO: 428636 - RNA, 22 nt, Human
ggcacagagcccagcuuccuag

SEQ ID NO: 428637 - RNA, 22 nt, Human
aggcucagugauguaaaauaua

SEQ ID NO: 428638 - RNA, 22 nt, Human
gaggggcagagguagagaacaa

SEQ ID NO: 428639 - RNA, 22 nt, Human
aguuucuguuaccauauuugac

SEQ ID NO: 428640 - RNA, 18 nt, Human
ugagaggcagguagagga

SEQ ID NO: 428641 - RNA, 23 nt, Human
ucucaagaggaagcagggcucau

SEQ ID NO: 428642 - RNA, 22 nt, Human
aaggaagauauaucaagcuuaa

SEQ ID NO: 428643 - RNA, 22 nt, Human
cccacacauuuuucacuuaccg

SEQ ID NO: 428644 - RNA, 22 nt, Human
cuguguccucccgcugcaccca

SEQ ID NO: 428645 - RNA, 22 nt, Human
cccagagcuccgguccugccca

SEQ ID NO: 428646 - RNA, 22 nt, Human
cagugcagaggugcaagcaugu

SEQ ID NO: 428647 - RNA, 22 nt, Human
uugcagcuucuaccacuguuuc

SEQ ID NO: 428648 - RNA, 22 nt, Human
gcuguucccauguggggcucag

SEQ ID NO: 428649 - RNA, 21 nt, Human
uaaaucucuguauucuucagu

SEQ ID NO: 428650 - RNA, 17 nt, Human
gccuuccuuccuccaca

SEQ ID NO: 428651 - RNA, 20 nt, Human
uacugggcaagcccacagac

SEQ ID NO: 428652 - RNA, 22 nt, Human
uguuuuuccaugugcagaacaa

SEQ ID NO: 428653 - RNA, 22 nt, Human
uaauuauaacaguuacaucuua

SEQ ID NO: 428654 - RNA, 22 nt, Human
gggcugcacagaucuucaaggg

SEQ ID NO: 428655 - RNA, 22 nt, Human
caggugggcuugggagaacacu

SEQ ID NO: 428656 - RNA, 22 nt, Human
gcuccugucuuggggcacuggc

SEQ ID NO: 428657 - RNA, 22 nt, Human
ggccaggagauggacaccacau

SEQ ID NO: 428658 - RNA, 22 nt, Human
agggcagagaaauguaguugag

SEQ ID NO: 428659 - RNA, 22 nt, Human
uggcagcauguuauguaaggaa

SEQ ID NO: 428660 - RNA, 22 nt, Human
gaagaagguggcccagggguag

SEQ ID NO: 428661 - RNA, 22 nt, Human
uccaggcagucauuaaucucua

SEQ ID NO: 428662 - RNA, 23 nt, Human
ugcugguguuuuugggaccaggg

SEQ ID NO: 428663 - RNA, 22 nt, Human
ggggacugccuuccacagacac

SEQ ID NO: 428664 - RNA, 22 nt, Human
augcugaggacaaagagaucaa

SEQ ID NO: 428665 - RNA, 22 nt, Human
auguuuaaucggcugccuuucc

SEQ ID NO: 428666 - RNA, 22 nt, Human
cauuuguuaaccaguguggauu

SEQ ID NO: 428667 - RNA, 22 nt, Human
gcagggcagcucacugugguuc

SEQ ID NO: 428668 - RNA, 22 nt, Human
aaugggaagucacuacuguuac

SEQ ID NO: 428669 - RNA, 22 nt, Human
agccagcuggagaccacuguuu

SEQ ID NO: 428670 - RNA, 22 nt, Human
cacauaauaaauguuccugaug

SEQ ID NO: 428671 - RNA, 22 nt, Human
uguucaauccccagguccugaa

SEQ ID NO: 428672 - RNA, 22 nt, Human
aagggaggggauguaagccugg

SEQ ID NO: 428673 - RNA, 22 nt, Human
ggccugcuucucagugagcuug

SEQ ID NO: 428674 - RNA, 22 nt, Human
gcagcccagagcgcaggacccc

SEQ ID NO: 428675 - RNA, 22 nt, Human
cucugagagcggucuguggcuu

SEQ ID NO: 428676 - RNA, 20 nt, Human
ggcaccaggcuaggauugga

SEQ ID NO: 428677 - RNA, 19 nt, Human
ggcucagggcgcugccgcc

SEQ ID NO: 428678 - RNA, 22 nt, Human
ugaugcugcugggaguggugcu

SEQ ID NO: 428679 - RNA, 22 nt, Human
agucaguguucuccggagaggc

SEQ ID NO: 428680 - RNA, 22 nt, Human
ggcugccucugaugugcagacg

SEQ ID NO: 428681 - RNA, 22 nt, Human
guacaguuuucaguguucacug

SEQ ID NO: 428682 - RNA, 22 nt, Human
agaugggcgcccuggacugagg

SEQ ID NO: 428683 - RNA, 20 nt, Human
acaauauguagaugaauagc

SEQ ID NO: 428684 - RNA, 22 nt, Human
ggcugccugugcccaggcacac

SEQ ID NO: 428685 - RNA, 22 nt, Human
cccagcaguuguuggugcacau

SEQ ID NO: 428686 - RNA, 22 nt, Human
uggcucaguagcagugugguca

SEQ ID NO: 428687 - RNA, 22 nt, Human
cugcagggaccacaagcagguu

SEQ ID NO: 428688 - RNA, 22 nt, Human
gaaaggagaggguuaaggagcu

SEQ ID NO: 428689 - RNA, 22 nt, Human
ucauugucuugauaugauuguc

SEQ ID NO: 428690 - RNA, 22 nt, Human
agaagugagugugacucagcag

SEQ ID NO: 428691 - RNA, 22 nt, Human
agucucagaguaccugagggac

SEQ ID NO: 428692 - RNA, 19 nt, Human
ccucugcgcuguccugcuc

SEQ ID NO: 428693 - RNA, 22 nt, Human
gcucccugaaaagaacaaaguc

SEQ ID NO: 428694 - RNA, 20 nt, Human
ugaaaaggucaggagacaug

SEQ ID NO: 428695 - RNA, 22 nt, Human
cagagcucagagcugccaggca

SEQ ID NO: 428696 - RNA, 22 nt, Human
gggcugagugggccucuuacuu

SEQ ID NO: 428697 - RNA, 21 nt, Human
gcagcuggucucagagcuugc

SEQ ID NO: 428698 - RNA, 19 nt, Human
aggagaagacucucucccc

SEQ ID NO: 428699 - RNA, 22 nt, Human
ggugcagaggagccagcugggg

SEQ ID NO: 428700 - RNA, 22 nt, Human
agggagaaugaccaagguauau

SEQ ID NO: 428701 - RNA, 22 nt, Human
acagcagagacacucaggaggc

SEQ ID NO: 428702 - RNA, 22 nt, Human
caagagcuuuagaaaugcucau

SEQ ID NO: 428703 - RNA, 22 nt, Human
uccucuggggcgugguccugga

SEQ ID NO: 428704 - RNA, 22 nt, Human
aaguggagccagggaaacugaa

SEQ ID NO: 428705 - RNA, 22 nt, Human
ugcagagaaaccaguggaggac

SEQ ID NO: 428706 - RNA, 22 nt, Human
gaaggcaacaccaggaugcacu

SEQ ID NO: 428707 - RNA, 22 nt, Human
caggguggcacaucacagcauu

SEQ ID NO: 428708 - RNA, 20 nt, Human
cagcucugggaaagaggcca

SEQ ID NO: 428709 - RNA, 22 nt, Human
ugaagccacagagcaucugccu

SEQ ID NO: 428710 - RNA, 22 nt, Human
acaauucucucauaucuuauua

SEQ ID NO: 428711 - RNA, 22 nt, Human
gcucugggaacugacugccuuc

SEQ ID NO: 428712 - RNA, 22 nt, Human
ugaggaagaacaagaauuuaga

SEQ ID NO: 428713 - RNA, 22 nt, Human
acccagagcugggcuuggcaaa

SEQ ID NO: 428714 - RNA, 20 nt, Human
cagcugccuggcucugggau

SEQ ID NO: 428715 - RNA, 22 nt, Human
acuugauuuugaaccuuucuac

SEQ ID NO: 428716 - RNA, 22 nt, Human
ccagagccccugagcuucccug

SEQ ID NO: 428717 - RNA, 22 nt, Human
gaagagcugugauucaggcuua

SEQ ID NO: 428718 - RNA, 22 nt, Human
agucugucucugcuaaucacua

SEQ ID NO: 428719 - RNA, 22 nt, Human
auguacacaugcaugcaugugc

SEQ ID NO: 428720 - RNA, 20 nt, Human
ugcagggccuaaaaagggaa

SEQ ID NO: 428721 - RNA, 20 nt, Human
gugcauuucaccuguacugu

SEQ ID NO: 428722 - RNA, 22 nt, Human
aguuucuaacauauagcauugg

SEQ ID NO: 428723 - RNA, 22 nt, Human
ugcagcccuuccuuccucuggg

SEQ ID NO: 428724 - RNA, 22 nt, Human
cauugcccaguaggaucaccag

SEQ ID NO: 428725 - RNA, 22 nt, Human
cccacucuggcucccuucuagu

SEQ ID NO: 428726 - RNA, 22 nt, Human
gcugggagucgcgucuguggcc

SEQ ID NO: 428727 - RNA, 22 nt, Human
ucuuuccagaggaauuuuuaga

SEQ ID NO: 428728 - RNA, 22 nt, Human
uuuacaaccucauauucugaug

SEQ ID NO: 428729 - RNA, 22 nt, Human
uaauuuaauuucaugccagccu

SEQ ID NO: 428730 - RNA, 22 nt, Human
ucccaggguccucuucuggaau

SEQ ID NO: 428731 - RNA, 21 nt, Human
ccugagccuguuuauccagaa

SEQ ID NO: 428732 - RNA, 22 nt, Human
agagccagccuucucagcuuac

SEQ ID NO: 428733 - RNA, 22 nt, Human
agccauggcgccacuagaggga

SEQ ID NO: 428734 - RNA, 22 nt, Human
uuacauuagacccacuuucaug

SEQ ID NO: 428735 - RNA, 22 nt, Human
uggcuggcuuguucacugacug

SEQ ID NO: 428736 - RNA, 22 nt, Human
gccuugccucagccauggaaac

SEQ ID NO: 428737 - RNA, 22 nt, Human
ucccaaggcacagggcagggac

SEQ ID NO: 428738 - RNA, 22 nt, Human
auuucugugcaguaaaugguga

SEQ ID NO: 428739 - RNA, 22 nt, Human
uccagggguaccggccaggcag

SEQ ID NO: 428740 - RNA, 22 nt, Human
uacuguauuugauaagugaagu

SEQ ID NO: 428741 - RNA, 22 nt, Human
ucuggcucuguguccucaccca

SEQ ID NO: 428742 - RNA, 22 nt, Human
cugaguccagggacagaggcgu

SEQ ID NO: 428743 - RNA, 22 nt, Human
agucucugggcaugguugugac

SEQ ID NO: 428744 - RNA, 22 nt, Human
agcucagcuuccucuccaugcu

SEQ ID NO: 428745 - RNA, 22 nt, Human
gagggcugaugcuuacuuauuu

SEQ ID NO: 428746 - RNA, 22 nt, Human
cucaggggaccuggcuccgagu

SEQ ID NO: 428747 - RNA, 22 nt, Human
agucucagccacacagaccuau

SEQ ID NO: 428748 - RNA, 22 nt, Human
cagccucucuguaucucaggau

SEQ ID NO: 428749 - RNA, 22 nt, Human
accuggcacuacaggcaccugu

SEQ ID NO: 428750 - RNA, 22 nt, Human
cuucucucugcauaggcauggg

SEQ ID NO: 428751 - RNA, 22 nt, Human
aaaaagauguccugaaguuuag

SEQ ID NO: 428752 - RNA, 22 nt, Human
acugucuguccugcucuccgug

SEQ ID NO: 428753 - RNA, 22 nt, Human
gugggcugcccuugaggucagc

SEQ ID NO: 428754 - RNA, 22 nt, Human
gcugucagcgcccaaggagcuc

SEQ ID NO: 428755 - RNA, 22 nt, Human
gcagaggauagcauaugaaccu

SEQ ID NO: 428756 - RNA, 22 nt, Human
agucccagcuucccccaugcag

SEQ ID NO: 428757 - RNA, 22 nt, Human
ucacuguugaccuggaaguggg

SEQ ID NO: 428758 - RNA, 22 nt, Human
cagcucccuauggugaggcgac

SEQ ID NO: 428759 - RNA, 22 nt, Human
ucccagcgcggggggaggaucc

SEQ ID NO: 428760 - RNA, 21 nt, Human
ccugccaggaaacugaguguc

SEQ ID NO: 428761 - RNA, 16 nt, Human
uggcagagguucagcc

SEQ ID NO: 428762 - RNA, 22 nt, Human
cagacccucgggugaguuggcc

SEQ ID NO: 428763 - RNA, 22 nt, Human
uuccucagaaaauacuguccaa

SEQ ID NO: 428764 - RNA, 22 nt, Human
uggcugucagcugccuggugcg

SEQ ID NO: 428765 - RNA, 22 nt, Human
ggaguuggugagcaccaggcuu

SEQ ID NO: 428766 - RNA, 22 nt, Human
ugggcugcuucuauuggugguc

SEQ ID NO: 428767 - RNA, 22 nt, Human
gagauuuccauauuuuguaaca

SEQ ID NO: 428768 - RNA, 19 nt, Human
gccagcagaaugaugaggc

SEQ ID NO: 428769 - RNA, 22 nt, Human
gcagcugggacacugaggccag

SEQ ID NO: 428770 - RNA, 22 nt, Human
gaccauuuuuacagagcauuca

SEQ ID NO: 428771 - RNA, 22 nt, Human
agggcccauagaucgucagcuu

SEQ ID NO: 428772 - RNA, 22 nt, Human
cagcaucaccgccauuucugau

SEQ ID NO: 428773 - RNA, 22 nt, Human
agguguguauaaacauacauau

SEQ ID NO: 428774 - RNA, 22 nt, Human
uauuucugaauccaaaagguca

SEQ ID NO: 428775 - RNA, 22 nt, Human
aagggcucgguagcaguccuga

SEQ ID NO: 428776 - RNA, 22 nt, Human
cagaggcaggauaagaacugcg

SEQ ID NO: 428777 - RNA, 22 nt, Human
cacaggagagcugggaggugcc

SEQ ID NO: 428778 - RNA, 20 nt, Human
ugcuggggacauacagggug

SEQ ID NO: 428779 - RNA, 19 nt, Human
cuggggcuuugguacugcc

SEQ ID NO: 428780 - RNA, 22 nt, Human
agggagacacaugaggaaguca

SEQ ID NO: 428781 - RNA, 22 nt, Human
guugaaagaucauguggcugcc

SEQ ID NO: 428782 - RNA, 22 nt, Human
uguaguaagugcgcaauaaaua

SEQ ID NO: 428783 - RNA, 22 nt, Human
ggagaugcuuuccaguggggau

SEQ ID NO: 428784 - RNA, 23 nt, Human
cuggccuccgacacuggccaaga

SEQ ID NO: 428785 - RNA, 21 nt, Human
gccuggcagguggaagggcuc

SEQ ID NO: 428786 - RNA, 22 nt, Human
ucagggcucaccagccucugcc

SEQ ID NO: 428787 - RNA, 16 nt, Human
ccuuucucugccuucc

SEQ ID NO: 428788 - RNA, 22 nt, Human
aggcaguggagcuggaauaggc

SEQ ID NO: 428789 - RNA, 18 nt, Human
uggcucuggacuugcucc

SEQ ID NO: 428790 - RNA, 22 nt, Human
aaugcuagugugauauguaagg

SEQ ID NO: 428791 - RNA, 22 nt, Human
agaggaggcuggguccagauaa

SEQ ID NO: 428792 - RNA, 22 nt, Human
acugugugcccugacgccaggg

SEQ ID NO: 428793 - RNA, 22 nt, Human
cuuacauugucuuaguuuucaa

SEQ ID NO: 428794 - RNA, 22 nt, Human
uguggcucucaugcacucccag

SEQ ID NO: 428795 - RNA, 22 nt, Human
gguggcagaauaauugaagguc

SEQ ID NO: 428796 - RNA, 20 nt, Human
acugcuucuuucucugaccu

SEQ ID NO: 428797 - RNA, 22 nt, Human
uucacagggcagcagcugagcc

SEQ ID NO: 428798 - RNA, 22 nt, Human
gagaggagguggcuaugacagc

SEQ ID NO: 428799 - RNA, 22 nt, Human
cugcccugcuugaugacagcga

SEQ ID NO: 428800 - RNA, 17 nt, Human
uggcucugaggcugaau

SEQ ID NO: 428801 - RNA, 22 nt, Human
ccagcuuuuggggugacaauuu

SEQ ID NO: 428802 - RNA, 22 nt, Human
ugugugccagccuacgaggagc

SEQ ID NO: 428803 - RNA, 22 nt, Human
guggugcaggccagcaggggcg

SEQ ID NO: 428804 - RNA, 22 nt, Human
uucauuacugcgguagucacac

SEQ ID NO: 428805 - RNA, 22 nt, Human
ccucauggaccucagacugucc

SEQ ID NO: 428806 - RNA, 22 nt, Human
acuuucucccacccacccgucu

SEQ ID NO: 428807 - RNA, 22 nt, Human
augaagucugcacaugcaugug

SEQ ID NO: 428808 - RNA, 22 nt, Human
uggagcagcuaagccucugaga

SEQ ID NO: 428809 - RNA, 22 nt, Human
caaaggcaacauauacuuguuu

SEQ ID NO: 428810 - RNA, 22 nt, Human
uugucuguaaagacggccacca

SEQ ID NO: 428811 - RNA, 22 nt, Human
gagcuucccucugcagucccug

SEQ ID NO: 428812 - RNA, 22 nt, Human
auauuaggcaaggagauuauuu

SEQ ID NO: 428813 - RNA, 22 nt, Human
acacauaugguugcugcaguga

SEQ ID NO: 428814 - RNA, 22 nt, Human
caguggcagagaacagagaccu

SEQ ID NO: 428815 - RNA, 22 nt, Human
caggggccggcuguccgugccc

SEQ ID NO: 428816 - RNA, 22 nt, Human
agggccuggaacuggagaccac

SEQ ID NO: 428817 - RNA, 22 nt, Human
cagaggaagcuggguguggagu

SEQ ID NO: 428818 - RNA, 20 nt, Human
cagagaccugucuucacaga

SEQ ID NO: 428819 - RNA, 19 nt, Human
augucuguugaauuucaua

SEQ ID NO: 428820 - RNA, 22 nt, Human
ugaugaaacugagguuccaaga

SEQ ID NO: 428821 - RNA, 22 nt, Human
aggccugaggaccuucuggagg

SEQ ID NO: 428822 - RNA, 22 nt, Human
caguccugugucccuugguggg

SEQ ID NO: 428823 - RNA, 22 nt, Human
ucuuucucucuaaucaagcaca

SEQ ID NO: 428824 - RNA, 22 nt, Human
cagaguguaucuguguaagcau

SEQ ID NO: 428825 - RNA, 22 nt, Human
aguuuaugaaacacagauuuga

SEQ ID NO: 428826 - RNA, 22 nt, Human
ucuucaaagaauuuuaguaauu

SEQ ID NO: 428827 - RNA, 22 nt, Human
cagaguguuucuuugggugggu

SEQ ID NO: 428828 - RNA, 23 nt, Human
uggcuucugccccauucucucca

SEQ ID NO: 428829 - RNA, 17 nt, Human
aggugcagaggcagagc

SEQ ID NO: 428830 - RNA, 22 nt, Human
aaucaguucuacaucuuaucca

SEQ ID NO: 428831 - RNA, 19 nt, Human
ggaagagaggaaaggugga

SEQ ID NO: 428832 - RNA, 22 nt, Human
ucugccuggguguggagcagag

SEQ ID NO: 428833 - RNA, 22 nt, Human
ugaggcagcccacuuuccuuag

SEQ ID NO: 428834 - RNA, 21 nt, Human
gaugaagcaaucuuucuguug

SEQ ID NO: 428835 - RNA, 22 nt, Human
cuugcuuuguccagaaauucag

SEQ ID NO: 428836 - RNA, 22 nt, Human
ugaggccagucucaucacaggc

SEQ ID NO: 428837 - RNA, 22 nt, Human
cauugcuuugugcauauuuaaa

SEQ ID NO: 428838 - RNA, 20 nt, Human
cacagcuugccuuuuaugac

SEQ ID NO: 428839 - RNA, 22 nt, Human
cucucugaggcaggccuguggg

SEQ ID NO: 428840 - RNA, 22 nt, Human
uaaagguacgaagugagggauu

SEQ ID NO: 428841 - RNA, 21 nt, Human
gcagagccggggcgagaaggc

SEQ ID NO: 428842 - RNA, 22 nt, Human
aggcugggaagguaaaguugua

SEQ ID NO: 428843 - RNA, 22 nt, Human
ugacuucaaaggcucuacuccu

SEQ ID NO: 428844 - RNA, 22 nt, Human
uguauuccaaaaugcugaggau

SEQ ID NO: 428845 - RNA, 22 nt, Human
acagagcaauucuuggguguuu

SEQ ID NO: 428846 - RNA, 22 nt, Human
agcagggcagugcuucagcucu

SEQ ID NO: 428847 - RNA, 23 nt, Human
auaauaacgucugucuugucucu

SEQ ID NO: 428848 - RNA, 22 nt, Human
acuugguuggucucacccuguu

SEQ ID NO: 428849 - RNA, 22 nt, Human
cccugccuugggguccacaccg

SEQ ID NO: 428850 - RNA, 22 nt, Human
gcugccuguguggccacucacu

SEQ ID NO: 428851 - RNA, 21 nt, Human
uccuuccuugagguccuuucc

SEQ ID NO: 428852 - RNA, 22 nt, Human
aauaaacugcucaauugcauca

SEQ ID NO: 428853 - RNA, 22 nt, Human
cagugaggugcccagccugccc

SEQ ID NO: 428854 - RNA, 22 nt, Human
cugguacaaaaugcugauauca

SEQ ID NO: 428855 - RNA, 22 nt, Human
aggcagcaugggccccagcucc

SEQ ID NO: 428856 - RNA, 22 nt, Human
gcagagaguugggcugcgccag

SEQ ID NO: 428857 - RNA, 20 nt, Human
ugaaggccauuuguuccaga

SEQ ID NO: 428858 - RNA, 22 nt, Human
ugaggcagguggauuacaaggu

SEQ ID NO: 428859 - RNA, 22 nt, Human
agagccuggucugagauaggac

SEQ ID NO: 428860 - RNA, 19 nt, Human
auaaggcagugacuuuuuu

SEQ ID NO: 428861 - RNA, 22 nt, Human
acacagggucuagaguuaggcc

SEQ ID NO: 428862 - RNA, 22 nt, Human
cccagguguuuguggcagaggu

SEQ ID NO: 428863 - RNA, 22 nt, Human
aggcagcagucaugaggaaaga

SEQ ID NO: 428864 - RNA, 22 nt, Human
cugagaggaugcugcaguggag

SEQ ID NO: 428865 - RNA, 22 nt, Human
ggcacugauaauguccucucuc

SEQ ID NO: 428866 - RNA, 17 nt, Human
ugcauguccuuuguucc

SEQ ID NO: 428867 - RNA, 22 nt, Human
ucugucaccgagggcauccaaa

SEQ ID NO: 428868 - RNA, 22 nt, Human
agaaauacuuuguaaaucucac

SEQ ID NO: 428869 - RNA, 22 nt, Human
cuucucuucccagggacacagg

SEQ ID NO: 428870 - RNA, 22 nt, Human
cccagcuccaagggacagcgaa

SEQ ID NO: 428871 - RNA, 22 nt, Human
cuccucccugcgauugcucugc

SEQ ID NO: 428872 - RNA, 22 nt, Human
uacaagauaagaauuggcaagg

SEQ ID NO: 428873 - RNA, 22 nt, Human
guguggcugauugacaugguca

SEQ ID NO: 428874 - RNA, 22 nt, Human
uggaggccagagguacugggac

SEQ ID NO: 428875 - RNA, 18 nt, Human
cagagcagagguggagcg

SEQ ID NO: 428876 - RNA, 22 nt, Human
cccugcagcauucucuaacugg

SEQ ID NO: 428877 - RNA, 22 nt, Human
cucaggauagauuguccucuca

SEQ ID NO: 428878 - RNA, 22 nt, Human
gcucccagucugauggaggaga

SEQ ID NO: 428879 - RNA, 22 nt, Human
gguuucaacuaaaucaagaagg

SEQ ID NO: 428880 - RNA, 22 nt, Human
gggagcugguuccugcccucca

SEQ ID NO: 428881 - RNA, 22 nt, Human
gaguccuucuggcuggcaggau

SEQ ID NO: 428882 - RNA, 22 nt, Human
gugugccagacaugaugcuaug

SEQ ID NO: 428883 - RNA, 22 nt, Human
gcaggcagagguggaggagaca

SEQ ID NO: 428884 - RNA, 22 nt, Human
guccucagcaccagaacuaggg

SEQ ID NO: 428885 - RNA, 22 nt, Human
acuguguggaccacucugaggc

SEQ ID NO: 428886 - RNA, 22 nt, Human
gugcauuucucauacacuaaau

SEQ ID NO: 428887 - RNA, 22 nt, Human
ugcauaaagugccauaguauua

SEQ ID NO: 428888 - RNA, 22 nt, Human
uuuccaaaggcuaaacucaguu

SEQ ID NO: 428889 - RNA, 22 nt, Human
uuucauuauucaugcuaguuau

SEQ ID NO: 428890 - RNA, 22 nt, Human
ggagaaagcuguaguggaaugu

SEQ ID NO: 428891 - RNA, 23 nt, Human
cagguggcuccacgagggguggg

SEQ ID NO: 428892 - RNA, 22 nt, Human
ggacagagcccugguggccuaa

SEQ ID NO: 428893 - RNA, 22 nt, Human
ugcagggacacgaagacaaaua

SEQ ID NO: 428894 - RNA, 22 nt, Human
ccaggcucugcgcuggacaugg

SEQ ID NO: 428895 - RNA, 22 nt, Human
uggaaggagcuaaggaccuggg

SEQ ID NO: 428896 - RNA, 22 nt, Human
cacacauugaauucauucuugu

SEQ ID NO: 428897 - RNA, 22 nt, Human
ucccuuaaaacucauguguugu

SEQ ID NO: 428898 - RNA, 21 nt, Human
aaaaagcuggggcaugcaugc

SEQ ID NO: 428899 - RNA, 22 nt, Human
ucaagagaaggggaaauagacu

SEQ ID NO: 428900 - RNA, 22 nt, Human
agagcccucuucacugccccuu

SEQ ID NO: 428901 - RNA, 22 nt, Human
ucuggagagucacagugccaga

SEQ ID NO: 428902 - RNA, 22 nt, Human
acuccuggguugcaguccucaa

SEQ ID NO: 428903 - RNA, 20 nt, Human
agccaggccucaaguuaagu

SEQ ID NO: 428904 - RNA, 22 nt, Human
agcuggagcuucaagcagguaa

SEQ ID NO: 428905 - RNA, 22 nt, Human
uggccuugcccagcgccuaggu

SEQ ID NO: 428906 - RNA, 22 nt, Human
gaguuucuucauggugcagagg

SEQ ID NO: 428907 - RNA, 22 nt, Human
cuggcuuuuuucccauuaugca

SEQ ID NO: 428908 - RNA, 22 nt, Human
gccccgucguggggccagggau

SEQ ID NO: 428909 - RNA, 22 nt, Human
aaucuguugucaggaauccaca

SEQ ID NO: 428910 - RNA, 23 nt, Human
ugucuggauucgacugugguugg

SEQ ID NO: 428911 - RNA, 22 nt, Human
ugggggagccuucacaguagcu

SEQ ID NO: 428912 - RNA, 22 nt, Human
aagggccagggcucuagagaua

SEQ ID NO: 428913 - RNA, 19 nt, Human
gagcagcuuccuaucuggu

SEQ ID NO: 428914 - RNA, 19 nt, Human
acccagcccaggaguggca

SEQ ID NO: 428915 - RNA, 22 nt, Human
aggccagggcacugcucuuuag

SEQ ID NO: 428916 - RNA, 22 nt, Human
cuggcagcugcccgagaugccc

SEQ ID NO: 428917 - RNA, 22 nt, Human
ggcucucuuaacuggccauccu

SEQ ID NO: 428918 - RNA, 22 nt, Human
ccugcgcgucugggucugucuc

SEQ ID NO: 428919 - RNA, 22 nt, Human
gcaguggccacauggaggagga

SEQ ID NO: 428920 - RNA, 22 nt, Human
caugcaugccgggcugacagag

SEQ ID NO: 428921 - RNA, 22 nt, Human
aaagaggcucaaggugggccag

SEQ ID NO: 428922 - RNA, 22 nt, Human
uucugugcucaaaacuuuccaa

SEQ ID NO: 428923 - RNA, 20 nt, Human
gggcucugcauccaucagcc

SEQ ID NO: 428924 - RNA, 22 nt, Human
gaugcgggcccgcuccacugcc

SEQ ID NO: 428925 - RNA, 22 nt, Human
cauuuugugcuagacacuaugg

SEQ ID NO: 428926 - RNA, 22 nt, Human
ggcggcacgcaggcugcugucg

SEQ ID NO: 428927 - RNA, 22 nt, Human
ggccagccuggggcucccagac

SEQ ID NO: 428928 - RNA, 22 nt, Human
ucggugcgcgaggcgcgguccc

SEQ ID NO: 428929 - RNA, 22 nt, Human
ggugugggucagcuuuauuaau

SEQ ID NO: 428930 - RNA, 22 nt, Human
aggacugggugcagagggcauc

SEQ ID NO: 428931 - RNA, 22 nt, Human
ccuggggagaagagcuuccccc

SEQ ID NO: 428932 - RNA, 22 nt, Human
gggagccccaccucggugcccg

SEQ ID NO: 428933 - RNA, 22 nt, Human
cucccagggucuaggcugcugg

SEQ ID NO: 428934 - RNA, 22 nt, Human
augcuuucucuuaguucauuga

SEQ ID NO: 428935 - RNA, 22 nt, Human
ggcucugcugguaagaugccuc

SEQ ID NO: 428936 - RNA, 22 nt, Human
agccaggucaggaaagguccca

SEQ ID NO: 428937 - RNA, 21 nt, Human
cccagaaguuccauggggggc

SEQ ID NO: 428938 - RNA, 22 nt, Human
guggcauuugggagaugcgugg

SEQ ID NO: 428939 - RNA, 20 nt, Human
ccacccuguccggggcggag

SEQ ID NO: 428940 - RNA, 22 nt, Human
ucuccacaccagaaggagcuga

SEQ ID NO: 428941 - RNA, 22 nt, Human
aggggagccagggcugcgaguu

SEQ ID NO: 428942 - RNA, 22 nt, Human
gucugugcaguuacuagcuggu

SEQ ID NO: 428943 - RNA, 22 nt, Human
caggugggagccacagcguaca

SEQ ID NO: 428944 - RNA, 22 nt, Human
ugaauaaucuuggguauuaaua

SEQ ID NO: 428945 - RNA, 22 nt, Human
uggcccagcucagggugggcgg

SEQ ID NO: 428946 - RNA, 22 nt, Human
ggaguagcugcauuccgagcac

SEQ ID NO: 428947 - RNA, 22 nt, Human
uggagcugguucuggggaagcu

SEQ ID NO: 428948 - RNA, 22 nt, Human
ucccugagugggcugguaguau

SEQ ID NO: 428949 - RNA, 23 nt, Human
uuaacaggaucucgggcaagagg

SEQ ID NO: 428950 - RNA, 22 nt, Human
ugguuggauggcucuuguggcu

SEQ ID NO: 428951 - RNA, 22 nt, Human
gacggagcugguugcugcggcu

SEQ ID NO: 428952 - RNA, 22 nt, Human
agcuggguacacguugucacaa

SEQ ID NO: 428953 - RNA, 22 nt, Human
gaagcgcggcgucggcgugggu

SEQ ID NO: 428954 - RNA, 22 nt, Human
ggggcccagcaccccuccucgc

SEQ ID NO: 428955 - RNA, 20 nt, Human
ugagccugcuguaggaggcc

SEQ ID NO: 428956 - RNA, 19 nt, Human
ucuggcugccaaggauuga

SEQ ID NO: 428957 - RNA, 22 nt, Human
uuccuggggacuuaccgucauu

SEQ ID NO: 428958 - RNA, 22 nt, Human
aguuuccacuggagacacugug

SEQ ID NO: 428959 - RNA, 22 nt, Human
aggggcuuguggaguugcuggu

SEQ ID NO: 428960 - RNA, 22 nt, Human
auuuggucuacauuuuccaaau

SEQ ID NO: 428961 - RNA, 22 nt, Human
caggggacacuccugcuugggc

SEQ ID NO: 428962 - RNA, 19 nt, Human
cuucaguguucaccuggcc

SEQ ID NO: 428963 - RNA, 22 nt, Human
gcacagagagcagugggggaca

SEQ ID NO: 428964 - RNA, 22 nt, Human
uugauucugcugaucucggacg

SEQ ID NO: 428965 - RNA, 22 nt, Human
cugggguccuugccauguguca

SEQ ID NO: 428966 - RNA, 22 nt, Human
aggcagugguguuugcuggugg

SEQ ID NO: 428967 - RNA, 22 nt, Human
ugggaaggggagcuggaaagga

SEQ ID NO: 428968 - RNA, 21 nt, Human
gcuccuggugcugcguggcgc

SEQ ID NO: 428969 - RNA, 22 nt, Human
agguggagaagagaugggcagu

SEQ ID NO: 428970 - RNA, 21 nt, Human
uaaacauaaccuuguauggcu

SEQ ID NO: 428971 - RNA, 22 nt, Human
ugcugcucuucaccauggccuc

SEQ ID NO: 428972 - RNA, 22 nt, Human
uuuacuguuuacagcuaaugca

SEQ ID NO: 428973 - RNA, 22 nt, Human
agcaccaggucgcuggcacgcu

SEQ ID NO: 428974 - RNA, 22 nt, Human
uggccuuggcagugagaagagu

SEQ ID NO: 428975 - RNA, 22 nt, Human
gugccuccaggcucgacuaguc

SEQ ID NO: 428976 - RNA, 23 nt, Human
acucguggaauucucugcgaucg

SEQ ID NO: 428977 - RNA, 22 nt, Human
ucccugggguaucgcugaggca

SEQ ID NO: 428978 - RNA, 22 nt, Human
aaaucccacucacgaguuuugc

SEQ ID NO: 428979 - RNA, 22 nt, Human
cccacucccugcacgccugccg

SEQ ID NO: 428980 - RNA, 22 nt, Human
gugcagcugugguggagccagg

SEQ ID NO: 428981 - RNA, 22 nt, Human
aucccuggccacgaagcugccc

SEQ ID NO: 428982 - RNA, 22 nt, Human
gcggccuuguggcggagcaggc

SEQ ID NO: 428983 - RNA, 22 nt, Human
ggcgcucaguguugccccagag

SEQ ID NO: 428984 - RNA, 20 nt, Human
cuguuugcuaucaugagcug

SEQ ID NO: 428985 - RNA, 22 nt, Human
cgaggagugugaaggcuugucg

SEQ ID NO: 428986 - RNA, 22 nt, Human
uccacagguccucuuugcaaag

SEQ ID NO: 428987 - RNA, 22 nt, Human
cccagcugaacuugcauuccaa

SEQ ID NO: 428988 - RNA, 20 nt, Human
agcuuugguuaagccagugg

SEQ ID NO: 428989 - RNA, 22 nt, Human
ggcggcgcguagccggagacuu

SEQ ID NO: 428990 - RNA, 22 nt, Human
aggcccugcugaggccucccuc

SEQ ID NO: 428991 - RNA, 22 nt, Human
ugggagcaagcuggugcuggag

SEQ ID NO: 428992 - RNA, 22 nt, Human
uugaggagucaggggcacggaa

SEQ ID NO: 428993 - RNA, 21 nt, Human
ucagagggcccuggaggcuca

SEQ ID NO: 428994 - RNA, 22 nt, Human
uggccccugaggagcgucagcc

SEQ ID NO: 428995 - RNA, 22 nt, Human
ucccggcgcugggagguggguc

SEQ ID NO: 428996 - RNA, 22 nt, Human
uucuguuuauaauuugcaguug

SEQ ID NO: 428997 - RNA, 22 nt, Human
gcccagggcugcaaguggacgc

SEQ ID NO: 428998 - RNA, 22 nt, Human
gaccacaguccagucaucaugg

SEQ ID NO: 428999 - RNA, 22 nt, Human
uuccccuugcacuaucacccug

SEQ ID NO: 429000 - RNA, 22 nt, Human
gcacugggagucuguggggguu

SEQ ID NO: 429001 - RNA, 20 nt, Human
caucaacaccuugucagccu

SEQ ID NO: 429002 - RNA, 19 nt, Human
aggugaugugacucuagaa

SEQ ID NO: 429003 - RNA, 22 nt, Human
gagcuccugaaacguuccugcc

SEQ ID NO: 429004 - RNA, 22 nt, Human
augcugugccuggaaagcggcu

SEQ ID NO: 429005 - RNA, 22 nt, Human
ucugggagaguagauaaaggaa

SEQ ID NO: 429006 - RNA, 22 nt, Human
uuagggacagcucuguagguga

SEQ ID NO: 429007 - RNA, 22 nt, Human
gaccacuggggugagggccauc

SEQ ID NO: 429008 - RNA, 22 nt, Human
uccagugguggcucccggaccu

SEQ ID NO: 429009 - RNA, 22 nt, Human
uagauaccugcuggaccucauu

SEQ ID NO: 429010 - RNA, 22 nt, Human
ugccagagaggagaaagcauuu

SEQ ID NO: 429011 - RNA, 22 nt, Human
gauuccugcuauucacagggcu

SEQ ID NO: 429012 - RNA, 20 nt, Human
ucuggggaugaggucuagga

SEQ ID NO: 429013 - RNA, 22 nt, Human
cugugugcagggcacaauggaa

SEQ ID NO: 429014 - RNA, 22 nt, Human
uggcuccaggggacacgcagua

SEQ ID NO: 429015 - RNA, 22 nt, Human
aauggcuguucucugugauugg

SEQ ID NO: 429016 - RNA, 18 nt, Human
agguguguuucuaggagc

SEQ ID NO: 429017 - RNA, 22 nt, Human
gcggcccgagcaggacgggugg

SEQ ID NO: 429018 - RNA, 22 nt, Human
augugagcuggggcccggccag

SEQ ID NO: 429019 - RNA, 22 nt, Human
cauaaauuguacccauuccaac

SEQ ID NO: 429020 - RNA, 22 nt, Human
ucuuauugugaugaugaagaac

SEQ ID NO: 429021 - RNA, 22 nt, Human
cgugcggccucggggcccggcu

SEQ ID NO: 429022 - RNA, 21 nt, Human
agaugcaguuugcaggugggu

SEQ ID NO: 429023 - RNA, 22 nt, Human
aggagcggauguguccugccag

SEQ ID NO: 429024 - RNA, 23 nt, Human
agguggagcugugcagccggggc

SEQ ID NO: 429025 - RNA, 22 nt, Human
aagggggaaauccuagcgccgc

SEQ ID NO: 429026 - RNA, 21 nt, Human
aggcaugagcccugcauggac

SEQ ID NO: 429027 - RNA, 22 nt, Human
gccagaggggcucgaaggcgcg

SEQ ID NO: 429028 - RNA, 22 nt, Human
caguguuuagcacagugcuugg

SEQ ID NO: 429029 - RNA, 22 nt, Human
ggagaagggaacugaguuuuug

SEQ ID NO: 429030 - RNA, 22 nt, Human
cagaggaccauuguauguauug

SEQ ID NO: 429031 - RNA, 22 nt, Human
caggacccaucagccaggcacu

SEQ ID NO: 429032 - RNA, 19 nt, Human
ucaaagucugagucacuuu

SEQ ID NO: 429033 - RNA, 22 nt, Human
uuauugagcacauaguaugugg

SEQ ID NO: 429034 - RNA, 19 nt, Human
aggaaggcggcggcugccc

SEQ ID NO: 429035 - RNA, 22 nt, Human
agccagucggggccaugcuggg

SEQ ID NO: 429036 - RNA, 22 nt, Human
ucuguuauaaaucacacugcau

SEQ ID NO: 429037 - RNA, 22 nt, Human
cagcccacugccucugugguag

SEQ ID NO: 429038 - RNA, 22 nt, Human
gagcaccgccuccacgaugccc

SEQ ID NO: 429039 - RNA, 23 nt, Human
cguguccuucagggagagugugg

SEQ ID NO: 429040 - RNA, 22 nt, Human
auccaggcgaaugcagaaggcc

SEQ ID NO: 429041 - RNA, 19 nt, Human
ugcuccaggccuugccgca

SEQ ID NO: 429042 - RNA, 22 nt, Human
ggguuguagagcuggaagggga

SEQ ID NO: 429043 - RNA, 22 nt, Human
ggcagguguggugaccagagau

SEQ ID NO: 429044 - RNA, 22 nt, Human
guuuauuggguauuguggagcc

SEQ ID NO: 429045 - RNA, 22 nt, Human
uggcugaguuacgaacagagca

SEQ ID NO: 429046 - RNA, 23 nt, Human
uggcucugagcuuccugguggcc

SEQ ID NO: 429047 - RNA, 20 nt, Human
ucccuggggcccuacuuccu

SEQ ID NO: 429048 - RNA, 22 nt, Human
aggccgugugagcaugugugag

SEQ ID NO: 429049 - RNA, 22 nt, Human
gugggggcaggcagugcuagga

SEQ ID NO: 429050 - RNA, 22 nt, Human
gacauacagcccucucccuggu

SEQ ID NO: 429051 - RNA, 22 nt, Human
agagcgagucuggggcucggau

SEQ ID NO: 429052 - RNA, 22 nt, Human
cuguguacccacgugggcaccc

SEQ ID NO: 429053 - RNA, 22 nt, Human
acacggcacuuuaggaaggggc

SEQ ID NO: 429054 - RNA, 22 nt, Human
ucgcuugaacccaggaagugga

SEQ ID NO: 429055 - RNA, 22 nt, Human
aacccuggggcugcucugccug

SEQ ID NO: 429056 - RNA, 22 nt, Human
uucuccccgucucucugaggcc

SEQ ID NO: 429057 - RNA, 22 nt, Human
gcacccagggcaggaagugagg

SEQ ID NO: 429058 - RNA, 22 nt, Human
acgccucugcagcugccgggcc

SEQ ID NO: 429059 - RNA, 22 nt, Human
ucccugccuccuggcagugcca

SEQ ID NO: 429060 - RNA, 22 nt, Human
ggccgcggauuuucccgcuggc

SEQ ID NO: 429061 - RNA, 22 nt, Human
uggcugaggucuggggcuucug

SEQ ID NO: 429062 - RNA, 22 nt, Human
ggugugucugccaggaacugca

SEQ ID NO: 429063 - RNA, 22 nt, Human
acccaggucucucgacuucugg

SEQ ID NO: 429064 - RNA, 22 nt, Human
cuccuuggguucuuucgguucc

SEQ ID NO: 429065 - RNA, 22 nt, Human
gcugcccauugcucucccacuc

SEQ ID NO: 429066 - RNA, 22 nt, Human
aagggccacaugccauuuaaaa

SEQ ID NO: 429067 - RNA, 22 nt, Human
gccuggcgccgggcugccuguc

SEQ ID NO: 429068 - RNA, 22 nt, Human
gugcuuccuguauugauuccau

SEQ ID NO: 429069 - RNA, 22 nt, Human
ccagagagggcgccaccuggag

SEQ ID NO: 429070 - RNA, 22 nt, Human
ggagugggaacaaugacauggu

SEQ ID NO: 429071 - RNA, 22 nt, Human
gagggcugccacguugggcgag

SEQ ID NO: 429072 - RNA, 21 nt, Human
ggcagcucagcagauggggac

SEQ ID NO: 429073 - RNA, 22 nt, Human
ucgauuuguuugggggagaagu

SEQ ID NO: 429074 - RNA, 22 nt, Human
cagugcugcaggcgccugcggu

SEQ ID NO: 429075 - RNA, 22 nt, Human
agggagcugcucugcuuccgug

SEQ ID NO: 429076 - RNA, 22 nt, Human
cugggaguugacgaggcuugua

SEQ ID NO: 429077 - RNA, 22 nt, Human
uacucuggaguugagaugcgag

SEQ ID NO: 429078 - RNA, 22 nt, Human
ugggugccaaccucugguggcc

SEQ ID NO: 429079 - RNA, 22 nt, Human
ccagcaggaaagugacguuuga

SEQ ID NO: 429080 - RNA, 22 nt, Human
aggccaagcucccagagaagcu

SEQ ID NO: 429081 - RNA, 22 nt, Human
uguguccuucugggagucccag

SEQ ID NO: 429082 - RNA, 22 nt, Human
cuggcccagguggucguugagg

SEQ ID NO: 429083 - RNA, 22 nt, Human
aggggcagccucacaauccucu

SEQ ID NO: 429084 - RNA, 22 nt, Human
agugauguagguggauucuggc

SEQ ID NO: 429085 - RNA, 22 nt, Human
ggccauggcgggagccggcguc

SEQ ID NO: 429086 - RNA, 22 nt, Human
uugcacgcuugcgguuccugcc

SEQ ID NO: 429087 - RNA, 22 nt, Human
ggucagugccuaucaugugggc

SEQ ID NO: 429088 - RNA, 22 nt, Human
gaugugucccuuucaacucaga

SEQ ID NO: 429089 - RNA, 22 nt, Human
uggcccgggaguuuugaagagu

SEQ ID NO: 429090 - RNA, 22 nt, Human
uccggcggccggccugagcccg

SEQ ID NO: 429091 - RNA, 22 nt, Human
agggggcuccuuggugugcaga

SEQ ID NO: 429092 - RNA, 22 nt, Human
ugucuuuagccacuugccucuu

SEQ ID NO: 429093 - RNA, 21 nt, Human
uaggugggagccccaguaugc

SEQ ID NO: 429094 - RNA, 22 nt, Human
ccaggaggaaagaccagcccau

SEQ ID NO: 429095 - RNA, 22 nt, Human
gagacagagagguacucaacau

SEQ ID NO: 429096 - RNA, 22 nt, Human
caggguggcaggcaccauggcc

SEQ ID NO: 429097 - RNA, 22 nt, Human
uguuaguauuggcaaauuuguu

SEQ ID NO: 429098 - RNA, 22 nt, Human
gggucagggaggccccaccaug

SEQ ID NO: 429099 - RNA, 22 nt, Human
guuuccaggcuuugguaugguu

SEQ ID NO: 429100 - RNA, 22 nt, Human
ugcccacaggaagacaccagcg

SEQ ID NO: 429101 - RNA, 22 nt, Human
cuggagcagcagguggccaggg

SEQ ID NO: 429102 - RNA, 22 nt, Human
ccuggccauagggcccaggaaa

SEQ ID NO: 429103 - RNA, 22 nt, Human
uuauugcuaugaugauguguag

SEQ ID NO: 429104 - RNA, 22 nt, Human
ugcacgugugagcauucacaug

SEQ ID NO: 429105 - RNA, 22 nt, Human
acagggagucugaggggauagu

SEQ ID NO: 429106 - RNA, 16 nt, Human
uugccgcacaggucgc

SEQ ID NO: 429107 - RNA, 22 nt, Human
cugcggcuggggacagcuguug

SEQ ID NO: 429108 - RNA, 22 nt, Human
caggcccuuuccugggcauagg

SEQ ID NO: 429109 - RNA, 22 nt, Human
ugccuguggaaaggcuggugcu

SEQ ID NO: 429110 - RNA, 22 nt, Human
cuggaaggagcccgggcggauc

SEQ ID NO: 429111 - RNA, 22 nt, Human
ugcuugcugaaaggcauuuaga

SEQ ID NO: 429112 - RNA, 22 nt, Human
acagagggucugggcacaggac

SEQ ID NO: 429113 - RNA, 22 nt, Human
caaugggccuggagagagcugg

SEQ ID NO: 429114 - RNA, 22 nt, Human
ggcagguguuuuuauauuaaag

SEQ ID NO: 429115 - RNA, 22 nt, Human
gagaggaagccuucuguacuug

SEQ ID NO: 429116 - RNA, 22 nt, Human
gcccagcaccucucucaggguu

SEQ ID NO: 429117 - RNA, 22 nt, Human
uccugcagccauuagaggucaa

SEQ ID NO: 429118 - RNA, 22 nt, Human
cccucucccugcagaauguggc

SEQ ID NO: 429119 - RNA, 22 nt, Human
accaagaguccaagugagguug

SEQ ID NO: 429120 - RNA, 17 nt, Human
ugggggcccuguguaga

SEQ ID NO: 429121 - RNA, 22 nt, Human
gcagggcugauggcuucccuca

SEQ ID NO: 429122 - RNA, 22 nt, Human
cucuauucuaauggauucuggg

SEQ ID NO: 429123 - RNA, 17 nt, Human
ggugaguguccaggugg

SEQ ID NO: 429124 - RNA, 22 nt, Human
aaggugccacuucccucagacu

SEQ ID NO: 429125 - RNA, 22 nt, Human
cuccccuagcccguugggaggu

SEQ ID NO: 429126 - RNA, 22 nt, Human
acgcggugcggcaaguucaugg

SEQ ID NO: 429127 - RNA, 22 nt, Human
uaaugccuuucuguacuauaug

SEQ ID NO: 429128 - RNA, 22 nt, Human
ucugggugucacuccugccugc

SEQ ID NO: 429129 - RNA, 22 nt, Human
acaagcgggccacagugcuggu

SEQ ID NO: 429130 - RNA, 22 nt, Human
cuguggcugcgcccugggggag

SEQ ID NO: 429131 - RNA, 22 nt, Human
uggcuuccagaacugagcaaca

SEQ ID NO: 429132 - RNA, 22 nt, Human
caggacccaaccucccugcucu

SEQ ID NO: 429133 - RNA, 22 nt, Human
uugaacaguccuaagagacccu

SEQ ID NO: 429134 - RNA, 22 nt, Human
agcuuugggcagaagaggauuc

SEQ ID NO: 429135 - RNA, 22 nt, Human
cuccagcagaaagggcgagugg

SEQ ID NO: 429136 - RNA, 22 nt, Human
aggugcugccccgagaaggaug

SEQ ID NO: 429137 - RNA, 23 nt, Human
ugggcagcuucugcaugcccacc

SEQ ID NO: 429138 - RNA, 22 nt, Human
cugagcagucuagccagguguu

SEQ ID NO: 429139 - RNA, 22 nt, Human
aggagacaguuuggacguguag

SEQ ID NO: 429140 - RNA, 22 nt, Human
aggcucccaagcacugacccca

SEQ ID NO: 429141 - RNA, 22 nt, Human
cccucuggcucuucucaggccg

SEQ ID NO: 429142 - RNA, 20 nt, Human
ggccggggagcucuccaggg

SEQ ID NO: 429143 - RNA, 22 nt, Human
ggaggugacuggaucaugggca

SEQ ID NO: 429144 - RNA, 22 nt, Human
uuauuuuguagcucugaucuuu

SEQ ID NO: 429145 - RNA, 22 nt, Human
ugcccguggccuggggcagcuu

SEQ ID NO: 429146 - RNA, 22 nt, Human
cuggcuccauccuugagcucug

SEQ ID NO: 429147 - RNA, 22 nt, Human
gaggggccuggcgaggacaugu

SEQ ID NO: 429148 - RNA, 22 nt, Human
aucaagggcgcgugguucggcg

SEQ ID NO: 429149 - RNA, 20 nt, Human
uguauuuaaugaaggcuuuu

SEQ ID NO: 429150 - RNA, 22 nt, Human
uggaaggggccaggcgcggagu

SEQ ID NO: 429151 - RNA, 22 nt, Human
gaccuccguguacaccucccag

SEQ ID NO: 429152 - RNA, 22 nt, Human
gccagccccagacauccuaucg

SEQ ID NO: 429153 - RNA, 22 nt, Human
cagugccaaggauggccuggga

SEQ ID NO: 429154 - RNA, 22 nt, Human
cggggccuagucuaccucggca

SEQ ID NO: 429155 - RNA, 22 nt, Human
cagaggccuggcuuggacaccu

SEQ ID NO: 429156 - RNA, 22 nt, Human
gggaggugauuaggaccaugua

SEQ ID NO: 429157 - RNA, 22 nt, Human
gaaggagaggauugugaggcug

SEQ ID NO: 429158 - RNA, 22 nt, Human
gguguggcaguggaccugugaa

SEQ ID NO: 429159 - RNA, 22 nt, Human
gggcaugguggcaggcaccugu

SEQ ID NO: 429160 - RNA, 22 nt, Human
cugggccacaagccugugugau

SEQ ID NO: 429161 - RNA, 22 nt, Human
ucccaggauguuuauggcuggu

SEQ ID NO: 429162 - RNA, 22 nt, Human
cgcggucucuuuaaggcggguc

SEQ ID NO: 429163 - RNA, 22 nt, Human
gacagcagccacagggagaggg

SEQ ID NO: 429164 - RNA, 22 nt, Human
ggcuguggucauuaggagguug

SEQ ID NO: 429165 - RNA, 22 nt, Human
uuuggauugcuuggaugcuucg

SEQ ID NO: 429166 - RNA, 22 nt, Human
auccugggaaguggccuccucc

SEQ ID NO: 429167 - RNA, 22 nt, Human
ugacaagagaccccuccgcagg

SEQ ID NO: 429168 - RNA, 22 nt, Human
gcugccuggaauaacggcuggc

SEQ ID NO: 429169 - RNA, 22 nt, Human
uggcccugccgccacgacgucu

SEQ ID NO: 429170 - RNA, 22 nt, Human
cucugcaggcacccaggguggg

SEQ ID NO: 429171 - RNA, 22 nt, Human
gggacuggaguagaggccggug

SEQ ID NO: 429172 - RNA, 22 nt, Human
ucuggcuucaguaggguucacu

SEQ ID NO: 429173 - RNA, 22 nt, Human
gggggacaggaugaauaucugu

SEQ ID NO: 429174 - RNA, 22 nt, Human
gggagccagcagggcauggagc

SEQ ID NO: 429175 - RNA, 22 nt, Human
gggcugaauuuguugcauguaa

SEQ ID NO: 429176 - RNA, 22 nt, Human
gagcugagggucuaggaggguu

SEQ ID NO: 429177 - RNA, 22 nt, Human
cagcgguggcaaggugacugug

SEQ ID NO: 429178 - RNA, 22 nt, Human
gggagagcgcgcuagggccgag

SEQ ID NO: 429179 - RNA, 22 nt, Human
ggcagccagagggcagcuggau

SEQ ID NO: 429180 - RNA, 22 nt, Human
ugaaaacacuuuaguuuagguc

SEQ ID NO: 429181 - RNA, 22 nt, Human
cucgcggcgcccgaagcccuug

SEQ ID NO: 429182 - RNA, 22 nt, Human
ggucuccugaccuuuagucccu

SEQ ID NO: 429183 - RNA, 18 nt, Human
gguguguaacguguuuuc

SEQ ID NO: 429184 - RNA, 22 nt, Human
cugggcuguuuguucuggucuc

SEQ ID NO: 429185 - RNA, 22 nt, Human
uggcugggagcuggaacugggc

SEQ ID NO: 429186 - RNA, 22 nt, Human
ugggagagauaggcuucuggac

SEQ ID NO: 429187 - RNA, 22 nt, Human
guggccaucuuuggcccugacu

SEQ ID NO: 429188 - RNA, 22 nt, Human
agguggaguuaagugugaacug

SEQ ID NO: 429189 - RNA, 22 nt, Human
ugucugccugcgggccggcaca

SEQ ID NO: 429190 - RNA, 22 nt, Human
gcggcccggguccccagcagca

SEQ ID NO: 429191 - RNA, 21 nt, Human
ugcuggguuugcccaucaggc

SEQ ID NO: 429192 - RNA, 22 nt, Human
ccagaucccuguuugccucugg

SEQ ID NO: 429193 - RNA, 22 nt, Human
ucuccaggggcagggucuggag

SEQ ID NO: 429194 - RNA, 22 nt, Human
gccugagccgccugagcggcgg

SEQ ID NO: 429195 - RNA, 22 nt, Human
ucacaggagcccaggggagcug

SEQ ID NO: 429196 - RNA, 22 nt, Human
acucgcggcggacggcggccag

SEQ ID NO: 429197 - RNA, 22 nt, Human
acuguagucuaaauauagucuu

SEQ ID NO: 429198 - RNA, 17 nt, Human
gccuggcccagccuggc

SEQ ID NO: 429199 - RNA, 19 nt, Human
uuuaaugugugcugcaauc

SEQ ID NO: 429200 - RNA, 22 nt, Human
uggcaugcaagaggaggcuccc

SEQ ID NO: 429201 - RNA, 22 nt, Human
uccgcgcucucacccgcucccg

SEQ ID NO: 429202 - RNA, 21 nt, Human
gcaggguuugugcugugaguu

SEQ ID NO: 429203 - RNA, 22 nt, Human
agccagcauauauauaguugaa

SEQ ID NO: 429204 - RNA, 22 nt, Human
ugaccguuuuggcacccaugcu

SEQ ID NO: 429205 - RNA, 22 nt, Human
ugaguccagaugggccagcagg

SEQ ID NO: 429206 - RNA, 18 nt, Human
uccaggcuccaggcuaac

SEQ ID NO: 429207 - RNA, 22 nt, Human
guggcagcggcccaggccgucu

SEQ ID NO: 429208 - RNA, 22 nt, Human
cugggccucacccuagaccaau

SEQ ID NO: 429209 - RNA, 22 nt, Human
caugccugccuggugggcgugg

SEQ ID NO: 429210 - RNA, 22 nt, Human
uggccagaacucagacaugugg

SEQ ID NO: 429211 - RNA, 22 nt, Human
ucggagcgucacuggcuggagg

SEQ ID NO: 429212 - RNA, 22 nt, Human
ggagaggguguggaaaguuauc

SEQ ID NO: 429213 - RNA, 19 nt, Human
cugggacaaugaaagcauc

SEQ ID NO: 429214 - RNA, 22 nt, Human
ugguaaaugucuaacaaucacu

SEQ ID NO: 429215 - RNA, 22 nt, Human
cagugcccuuccaggacugcag

SEQ ID NO: 429216 - RNA, 22 nt, Human
aggcugucucaccucaggaggg

SEQ ID NO: 429217 - RNA, 22 nt, Human
auucccagauuuauauugauag

SEQ ID NO: 429218 - RNA, 22 nt, Human
ugcauuucccauuguguggcuc

SEQ ID NO: 429219 - RNA, 22 nt, Human
ucagccaggccaggcauucaca

SEQ ID NO: 429220 - RNA, 19 nt, Human
gaugcucauucagguggaa

SEQ ID NO: 429221 - RNA, 23 nt, Human
ugacagagcacagugggggagau

SEQ ID NO: 429222 - RNA, 22 nt, Human
guaggggccagaaagacuuaga

SEQ ID NO: 429223 - RNA, 22 nt, Human
acccacagccgcugugcguccc

SEQ ID NO: 429224 - RNA, 22 nt, Human
guugggcugaagugugugcuua

SEQ ID NO: 429225 - RNA, 22 nt, Human
cugcacagccugucugggggcc

SEQ ID NO: 429226 - RNA, 22 nt, Human
caauuaccaguaauugagguuu

SEQ ID NO: 429227 - RNA, 15 nt, Human
uggugguguugagac

SEQ ID NO: 429228 - RNA, 22 nt, Human
uguuaccauaggucagaacguu

SEQ ID NO: 429229 - RNA, 22 nt, Human
ugggcaaggcuggagccugcag

SEQ ID NO: 429230 - RNA, 22 nt, Human
cuuuggucuccgucaucaauca

SEQ ID NO: 429231 - RNA, 22 nt, Human
uuuguugguugcacuggugggu

SEQ ID NO: 429232 - RNA, 22 nt, Human
cugggaggcccacguugggaag

SEQ ID NO: 429233 - RNA, 22 nt, Human
ugggcccaucauugcugugggc

SEQ ID NO: 429234 - RNA, 22 nt, Human
aacagaaaucauuuagggcucu

SEQ ID NO: 429235 - RNA, 22 nt, Human
caugaccagagaggacggccag

SEQ ID NO: 429236 - RNA, 22 nt, Human
ggaaacugcuuacacuagaggg

SEQ ID NO: 429237 - RNA, 22 nt, Human
ugucuggauagagccuaggccc

SEQ ID NO: 429238 - RNA, 22 nt, Human
gaggagaggcuggacgcgguga

SEQ ID NO: 429239 - RNA, 22 nt, Human
uaaugccuuaugucaaauguaa

SEQ ID NO: 429240 - RNA, 20 nt, Human
cagagcagugcccaggcggc

SEQ ID NO: 429241 - RNA, 22 nt, Human
uuaauggauuggagguuucaau

SEQ ID NO: 429242 - RNA, 17 nt, Human
uuuguucguuaguccgg

SEQ ID NO: 429243 - RNA, 22 nt, Human
ccaggaggcggaagguacagug

SEQ ID NO: 429244 - RNA, 20 nt, Human
augucaggaagggagucagg

SEQ ID NO: 429245 - RNA, 22 nt, Human
gggccccaagaaccuccuccug

SEQ ID NO: 429246 - RNA, 22 nt, Human
ugccuaggcuggaaugcagugg

SEQ ID NO: 429247 - RNA, 22 nt, Human
augugggccgugcggguguccu

SEQ ID NO: 429248 - RNA, 22 nt, Human
uuuaacccaaauaaccacagga

SEQ ID NO: 429249 - RNA, 22 nt, Human
uggcuccguuguacaggcugga

SEQ ID NO: 429250 - RNA, 22 nt, Human
cuggagggcugcagcgaggcug

SEQ ID NO: 429251 - RNA, 22 nt, Human
agggaugcaguaaaaacuguag

SEQ ID NO: 429252 - RNA, 22 nt, Human
guccacauaggaacccagcuuc

SEQ ID NO: 429253 - RNA, 22 nt, Human
caauaauugcuuuccagaguua

SEQ ID NO: 429254 - RNA, 22 nt, Human
cccuugggcuucagcccuaccg

SEQ ID NO: 429255 - RNA, 22 nt, Human
gcguggcuuagagugggguacc

SEQ ID NO: 429256 - RNA, 22 nt, Human
uuucugugauaggcugcgacgc

SEQ ID NO: 429257 - RNA, 22 nt, Human
acaacuuuaauggguuucagcu

SEQ ID NO: 429258 - RNA, 22 nt, Human
gguguuguacauucuguggauu

SEQ ID NO: 429259 - RNA, 23 nt, Human
agccucuuguggauggucagcga

SEQ ID NO: 429260 - RNA, 22 nt, Human
ggugcccaaggaagguugccgu

SEQ ID NO: 429261 - RNA, 22 nt, Human
aggcggcuccgggagugugggc

SEQ ID NO: 429262 - RNA, 22 nt, Human
uccuggcccuguggccugcagu

SEQ ID NO: 429263 - RNA, 19 nt, Human
acugcagggaggaggugug

SEQ ID NO: 429264 - RNA, 22 nt, Human
cuggcuuucauggcgcaguuga

SEQ ID NO: 429265 - RNA, 22 nt, Human
uauggauauaaucagacuggaa

SEQ ID NO: 429266 - RNA, 22 nt, Human
ugcagaauauucuggugacaau

SEQ ID NO: 429267 - RNA, 22 nt, Human
gaaggacccucuggggucucag

SEQ ID NO: 429268 - RNA, 22 nt, Human
acuggcaguagagggagcgcau

SEQ ID NO: 429269 - RNA, 22 nt, Human
cccaggaacagcacagaacagc

SEQ ID NO: 429270 - RNA, 22 nt, Human
agcuggugauguggucccucac

SEQ ID NO: 429271 - RNA, 22 nt, Human
aggcugagccugggcguggugg

SEQ ID NO: 429272 - RNA, 22 nt, Human
uccaggagcucauccacgucaa

SEQ ID NO: 429273 - RNA, 22 nt, Human
cugggcuuucaggcccuaaggc

SEQ ID NO: 429274 - RNA, 19 nt, Human
uccuggggaggggcauggc

SEQ ID NO: 429275 - RNA, 22 nt, Human
ggccugcuucucugggcuuucu

SEQ ID NO: 429276 - RNA, 22 nt, Human
gcagcagaaggccaaggggagc

SEQ ID NO: 429277 - RNA, 22 nt, Human
agccacauggaccugaugcuag

SEQ ID NO: 429278 - RNA, 22 nt, Human
ugagccuggagucguggagggg

SEQ ID NO: 429279 - RNA, 22 nt, Human
ucaccggcagacguggccugau

SEQ ID NO: 429280 - RNA, 19 nt, Human
ugccuggcaccagcuccac

SEQ ID NO: 429281 - RNA, 22 nt, Human
aaggcccacagaacugucucca

SEQ ID NO: 429282 - RNA, 22 nt, Human
guucucucagcgauagugaugg

SEQ ID NO: 429283 - RNA, 22 nt, Human
cccaggacucugacacccccaa

SEQ ID NO: 429284 - RNA, 22 nt, Human
agauguuuuuccaggucuaauu

SEQ ID NO: 429285 - RNA, 22 nt, Human
cccaggaguaagugacauuguu

SEQ ID NO: 429286 - RNA, 22 nt, Human
aggcagccuauggggagcucag

SEQ ID NO: 429287 - RNA, 22 nt, Human
cgccguccccuaggaaagagcu

SEQ ID NO: 429288 - RNA, 22 nt, Human
cuccugcagcccucagcagcca

SEQ ID NO: 429289 - RNA, 22 nt, Human
uuugcaaaguccauugaaguua

SEQ ID NO: 429290 - RNA, 22 nt, Human
uuggaggaagcucaugggggau

SEQ ID NO: 429291 - RNA, 18 nt, Human
uggcagccagcugcuccu

SEQ ID NO: 429292 - RNA, 22 nt, Human
ucuggcccaucuucugccacca

SEQ ID NO: 429293 - RNA, 22 nt, Human
ucaggccccaucccagacuuau

SEQ ID NO: 429294 - RNA, 22 nt, Human
gcugggugauucauuuccauaa

SEQ ID NO: 429295 - RNA, 21 nt, Human
ccuguggugccagaucgccag

SEQ ID NO: 429296 - RNA, 22 nt, Human
gcugggcaggccucgugagggc

SEQ ID NO: 429297 - RNA, 22 nt, Human
ucucagggaugggaggccccag

SEQ ID NO: 429298 - RNA, 22 nt, Human
uauugccaaaugucugcuggaa

SEQ ID NO: 429299 - RNA, 18 nt, Human
gccuggcuucggagccgc

SEQ ID NO: 429300 - RNA, 22 nt, Human
ggugacgaauccauagcaucga

SEQ ID NO: 429301 - RNA, 21 nt, Human
ggccuuggcgggggccgaauu

SEQ ID NO: 429302 - RNA, 22 nt, Human
gccagagaggccuuagaaucca

SEQ ID NO: 429303 - RNA, 22 nt, Human
gcugauggcuugcuggcugaca

SEQ ID NO: 429304 - RNA, 22 nt, Human
agaggaaguaaucaggaccugc

SEQ ID NO: 429305 - RNA, 22 nt, Human
ugccagcaguagcaguaggcca

SEQ ID NO: 429306 - RNA, 22 nt, Human
cagggcucacucggcuggcguc

SEQ ID NO: 429307 - RNA, 22 nt, Human
cugucacagcccgcgucuccuc

SEQ ID NO: 429308 - RNA, 22 nt, Human
agugggagcggcagucggggac

SEQ ID NO: 429309 - RNA, 22 nt, Human
cugggguuggccagggcccuag

SEQ ID NO: 429310 - RNA, 22 nt, Human
gucuggagccacugcugcugcu

SEQ ID NO: 429311 - RNA, 22 nt, Human
gcugcuccgcagagugugugug

SEQ ID NO: 429312 - RNA, 22 nt, Human
ucguggaugcgcagggcggccu

SEQ ID NO: 429313 - RNA, 19 nt, Human
auacacguguauacauaca

SEQ ID NO: 429314 - RNA, 22 nt, Human
augaggagucaaggagucggag

SEQ ID NO: 429315 - RNA, 22 nt, Human
uccaggagugauaaggccacug

SEQ ID NO: 429316 - RNA, 22 nt, Human
auagacacagcuaugauuugag

SEQ ID NO: 429317 - RNA, 22 nt, Human
cggcagcgguuggagguuguag

SEQ ID NO: 429318 - RNA, 22 nt, Human
acucagaguuugcguuccauac

SEQ ID NO: 429319 - RNA, 22 nt, Human
aggcucagcaucugauucauau

SEQ ID NO: 429320 - RNA, 22 nt, Human
agagcggggauaguuaauauuc

SEQ ID NO: 429321 - RNA, 22 nt, Human
cugggaccugugugccugggcc

SEQ ID NO: 429322 - RNA, 22 nt, Human
caucagucugaaagccagggag

SEQ ID NO: 429323 - RNA, 22 nt, Human
aggcaguuguugcugagcagcu

SEQ ID NO: 429324 - RNA, 22 nt, Human
gugggccugaugcugccaugag

SEQ ID NO: 429325 - RNA, 22 nt, Human
ggcuagggaucuagaccaggac

SEQ ID NO: 429326 - RNA, 22 nt, Human
ccccagcagacucagggcaggu

SEQ ID NO: 429327 - RNA, 19 nt, Human
gggucccacugcccgucug

SEQ ID NO: 429328 - RNA, 22 nt, Human
gcugggcugcgucggggaagcc

SEQ ID NO: 429329 - RNA, 22 nt, Human
cuccagagagaaaggaggccgc

SEQ ID NO: 429330 - RNA, 22 nt, Human
gagguccacugaggcaacaggg

SEQ ID NO: 429331 - RNA, 23 nt, Human
gggugcugccuguagucaugcug

SEQ ID NO: 429332 - RNA, 22 nt, Human
acagagacaauauuuguaaagu

SEQ ID NO: 429333 - RNA, 22 nt, Human
caacuuuagaccccaaguagcu

SEQ ID NO: 429334 - RNA, 22 nt, Human
ggcagcaggguagccauuucuc

SEQ ID NO: 429335 - RNA, 22 nt, Human
aagucuucagacuggagagauu

SEQ ID NO: 429336 - RNA, 17 nt, Human
uuucugcaugauuggac

SEQ ID NO: 429337 - RNA, 22 nt, Human
ugggugguugcugaggcuccuu

SEQ ID NO: 429338 - RNA, 22 nt, Human
ccagagacaaggagcuggaguc

SEQ ID NO: 429339 - RNA, 22 nt, Human
uggcuggggccugaauccugca

SEQ ID NO: 429340 - RNA, 22 nt, Human
ccagcugggucccugcuggggc

SEQ ID NO: 429341 - RNA, 22 nt, Human
uguccuguccuuccuggaaguc

SEQ ID NO: 429342 - RNA, 22 nt, Human
ucgucugugaaauugggauaag

SEQ ID NO: 429343 - RNA, 22 nt, Human
cuccaggacugaggacagagcu

SEQ ID NO: 429344 - RNA, 22 nt, Human
uuuccaaagguggcaggaacaa

SEQ ID NO: 429345 - RNA, 22 nt, Human
ggugcggagacuccaugaggcc

SEQ ID NO: 429346 - RNA, 22 nt, Human
gcggcgccugggacccgccagc

SEQ ID NO: 429347 - RNA, 22 nt, Human
gugcuccaggucgcucagagag

SEQ ID NO: 429348 - RNA, 22 nt, Human
ugacucacuuaauuuacaaguc

SEQ ID NO: 429349 - RNA, 22 nt, Human
augggucccuggccgcccucgg

SEQ ID NO: 429350 - RNA, 22 nt, Human
uccagcucugcugugcgccggu

SEQ ID NO: 429351 - RNA, 22 nt, Human
cagcuccagcccaggcagcucc

SEQ ID NO: 429352 - RNA, 22 nt, Human
ggcucuccacuauggaugagaa

SEQ ID NO: 429353 - RNA, 22 nt, Human
gggcagcaaaucugagucuggu

SEQ ID NO: 429354 - RNA, 22 nt, Human
gauugcugccagcguguccgug

SEQ ID NO: 429355 - RNA, 22 nt, Human
caggcuacauuugcucugagaa

SEQ ID NO: 429356 - RNA, 22 nt, Human
ggcccucucuacauguuagacg

SEQ ID NO: 429357 - RNA, 22 nt, Human
uccagcugugcuccaggaggug

SEQ ID NO: 429358 - RNA, 22 nt, Human
guggccuuuucaaguaggguau

SEQ ID NO: 429359 - RNA, 22 nt, Human
aggccagugguucucugugucc

SEQ ID NO: 429360 - RNA, 22 nt, Human
ccuggccgacauggugaaacgc

SEQ ID NO: 429361 - RNA, 22 nt, Human
gacaggugcuaagggaccuggc

SEQ ID NO: 429362 - RNA, 21 nt, Human
uggcccuggccacggcugcca

SEQ ID NO: 429363 - RNA, 22 nt, Human
acugagcaggguuccgcaugga

SEQ ID NO: 429364 - RNA, 16 nt, Human
ucucuggguugcacag

SEQ ID NO: 429365 - RNA, 22 nt, Human
aguguucuagcgcugugcuugu

SEQ ID NO: 429366 - RNA, 22 nt, Human
ggaaggggagcuaaaucuacug

SEQ ID NO: 429367 - RNA, 22 nt, Human
agcagcaggagccgugggguga

SEQ ID NO: 429368 - RNA, 22 nt, Human
ggcuuuggggguguccaagaaa

SEQ ID NO: 429369 - RNA, 22 nt, Human
agcuggguguagggcuggacaa

SEQ ID NO: 429370 - RNA, 22 nt, Human
ugaggucuguccugucuuugga

SEQ ID NO: 429371 - RNA, 22 nt, Human
gggacaaccaacuuagcauuac

SEQ ID NO: 429372 - RNA, 22 nt, Human
ucaauuuauguggcuauucauu

SEQ ID NO: 429373 - RNA, 18 nt, Human
uggggggcuugucugaag

SEQ ID NO: 429374 - RNA, 22 nt, Human
gcuagggagacuugugucauca

SEQ ID NO: 429375 - RNA, 22 nt, Human
auguccagaguaaagcacauuc

SEQ ID NO: 429376 - RNA, 23 nt, Human
gguuggcuguacccaggcucccu

SEQ ID NO: 429377 - RNA, 22 nt, Human
caccugagcaacccugugcggg

SEQ ID NO: 429378 - RNA, 23 nt, Human
ucucaggguggcugggcccaucc

SEQ ID NO: 429379 - RNA, 19 nt, Human
ggaggcuucuuggggucgg

SEQ ID NO: 429380 - RNA, 22 nt, Human
ccagcagccaccuucucgaaau

SEQ ID NO: 429381 - RNA, 22 nt, Human
ggaccugaacauaaaacgaggc

SEQ ID NO: 429382 - RNA, 22 nt, Human
uaaaaguuagcuaggacaaagu

SEQ ID NO: 429383 - RNA, 22 nt, Human
uggcugagugaacauguccauu

SEQ ID NO: 429384 - RNA, 22 nt, Human
acgugcaggaucugguuggcga

SEQ ID NO: 429385 - RNA, 22 nt, Human
ggcagcagaacuggcccuguau

SEQ ID NO: 429386 - RNA, 22 nt, Human
caucaggaauaaaugaggcugu

SEQ ID NO: 429387 - RNA, 22 nt, Human
aggcucaguauagcuggcaagu

SEQ ID NO: 429388 - RNA, 22 nt, Human
ugcccuccacaguggcuccacc

SEQ ID NO: 429389 - RNA, 22 nt, Human
ugugagacguaggccaucgagg

SEQ ID NO: 429390 - RNA, 22 nt, Human
acuggcccuggcugcuaggcug

SEQ ID NO: 429391 - RNA, 22 nt, Human
gggcugacaccacccaggcgca

SEQ ID NO: 429392 - RNA, 22 nt, Human
uugggucaugggaucccagcau

SEQ ID NO: 429393 - RNA, 22 nt, Human
cuggcuccucaggacugcggga

SEQ ID NO: 429394 - RNA, 22 nt, Human
gcccacagucuaucaguuugcg

SEQ ID NO: 429395 - RNA, 22 nt, Human
ugcaggccuggacugauguggu

SEQ ID NO: 429396 - RNA, 22 nt, Human
ugcuggcugggcugcuggagac

SEQ ID NO: 429397 - RNA, 22 nt, Human
agcgggucugcaagccuucccu

SEQ ID NO: 429398 - RNA, 22 nt, Human
ggccuugggauguggcugcagc

SEQ ID NO: 429399 - RNA, 22 nt, Human
gagguggcugcuugcugggaaa

SEQ ID NO: 429400 - RNA, 22 nt, Human
uggggucagcaggccuggccug

SEQ ID NO: 429401 - RNA, 22 nt, Human
ggggaggaagcuggaacacggg

SEQ ID NO: 429402 - RNA, 22 nt, Human
caggcgaccccuaggagcaaca

SEQ ID NO: 429403 - RNA, 22 nt, Human
agcaggugucacuuucacucca

SEQ ID NO: 429404 - RNA, 18 nt, Human
agggagagaccgcggguc

SEQ ID NO: 429405 - RNA, 22 nt, Human
ucuccccaguauggauucucug

SEQ ID NO: 429406 - RNA, 22 nt, Human
gugagguccucccugcugggag

SEQ ID NO: 429407 - RNA, 22 nt, Human
gccagcagcucuugggcgggca

SEQ ID NO: 429408 - RNA, 22 nt, Human
cuucuccgacaaccgacgccgg

SEQ ID NO: 429409 - RNA, 22 nt, Human
cauugggcggggaccucggcug

SEQ ID NO: 429410 - RNA, 22 nt, Human
cgaggaggaaacgcggagaacu

SEQ ID NO: 429411 - RNA, 22 nt, Human
ugcccagucuccgggccagccc

SEQ ID NO: 429412 - RNA, 17 nt, Human
gugcuggccuggggcuc

SEQ ID NO: 429413 - RNA, 22 nt, Human
agguucccagagauagagcugu

SEQ ID NO: 429414 - RNA, 22 nt, Human
agaaucugcauuuuaacaagau

SEQ ID NO: 429415 - RNA, 22 nt, Human
acaggaaaugaaaugguaucua

SEQ ID NO: 429416 - RNA, 18 nt, Human
gaucgggggcgccccaag

SEQ ID NO: 429417 - RNA, 22 nt, Human
agcggcgccggagggaggugcg

SEQ ID NO: 429418 - RNA, 22 nt, Human
agggcccaccuuggugcugagg

SEQ ID NO: 429419 - RNA, 22 nt, Human
cugggcccaggcggcucucgga

SEQ ID NO: 429420 - RNA, 22 nt, Human
uuauuuaaaauguagguuggga

SEQ ID NO: 429421 - RNA, 22 nt, Human
ggcggccugugggucggccuca

SEQ ID NO: 429422 - RNA, 22 nt, Human
cucgccccggcacaguguccgu

SEQ ID NO: 429423 - RNA, 21 nt, Human
agaugcagugacccacugggg

SEQ ID NO: 429424 - RNA, 22 nt, Human
cuccguggcuguggacgcagcc

SEQ ID NO: 429425 - RNA, 22 nt, Human
ugcgggucccagggucacaggc

SEQ ID NO: 429426 - RNA, 22 nt, Human
ccccacaccugccgggcagcag

SEQ ID NO: 429427 - RNA, 22 nt, Human
gggcugcacuagggcaagguga

SEQ ID NO: 429428 - RNA, 22 nt, Human
acccggaggcgggggaugcagu

SEQ ID NO: 429429 - RNA, 22 nt, Human
agugacagauuaccggcagagc

SEQ ID NO: 429430 - RNA, 22 nt, Human
auccaaggcgcaagauggcgcu

SEQ ID NO: 429431 - RNA, 22 nt, Human
agcauggccucccgggccuggc

SEQ ID NO: 429432 - RNA, 22 nt, Human
gacagucccccagcagcaaacc

SEQ ID NO: 429433 - RNA, 22 nt, Human
auguacauuauucgagugaugg

SEQ ID NO: 429434 - RNA, 22 nt, Human
aacaggcuaaauuguccauuuc

SEQ ID NO: 429435 - RNA, 22 nt, Human
uguaccgccuugugggguuggg

SEQ ID NO: 429436 - RNA, 22 nt, Human
gccugccuucggugcgcagcgg

SEQ ID NO: 429437 - RNA, 22 nt, Human
ugacaggcuugcuaagacauag

SEQ ID NO: 429438 - RNA, 22 nt, Human
uaucuguauucugacagucacu

SEQ ID NO: 429439 - RNA, 22 nt, Human
ucgggcucgcucuccuagcgga

SEQ ID NO: 429440 - RNA, 19 nt, Human
ugggcuuccccagggcaga

SEQ ID NO: 429441 - RNA, 22 nt, Human
aaaacuuucagggauacagaaa

SEQ ID NO: 429442 - RNA, 22 nt, Human
ccacccagccagaugcaggaag

SEQ ID NO: 429443 - RNA, 21 nt, Human
ugcauauauaagugcauacac

SEQ ID NO: 429444 - RNA, 22 nt, Human
gcgcuccucccggcccuggugg

SEQ ID NO: 429445 - RNA, 22 nt, Human
aguaaaaucaccaucucuuugu

SEQ ID NO: 429446 - RNA, 22 nt, Human
gccaggcaggccacgcuguguu

SEQ ID NO: 429447 - RNA, 22 nt, Human
gcccagaguuugaagauacagu

SEQ ID NO: 429448 - RNA, 22 nt, Human
ggguucagugaugccuucagga

SEQ ID NO: 429449 - RNA, 22 nt, Human
uuuacuuuugguaaggucauuu

SEQ ID NO: 429450 - RNA, 21 nt, Human
cagaggggcuagccuggcugc

SEQ ID NO: 429451 - RNA, 23 nt, Human
uggcucuguggaucccucaggag

SEQ ID NO: 429452 - RNA, 22 nt, Human
ugagucaccucucagaagccac

SEQ ID NO: 429453 - RNA, 22 nt, Human
accuggaggcagagguugcagu

SEQ ID NO: 429454 - RNA, 22 nt, Human
ccagacuggggcuccuugaggg

SEQ ID NO: 429455 - RNA, 22 nt, Human
ggcgagcaugagucacucuggg

SEQ ID NO: 429456 - RNA, 22 nt, Human
uccgggagcugaacgucuugcg

SEQ ID NO: 429457 - RNA, 22 nt, Human
aaaguaauugugguucuugcca

SEQ ID NO: 429458 - RNA, 22 nt, Human
gagagagacauguaaacgcggu

SEQ ID NO: 429459 - RNA, 22 nt, Human
ggagcagggaauuacagcgcag

SEQ ID NO: 429460 - RNA, 22 nt, Human
uuuggucuggaaucuucagggu

SEQ ID NO: 429461 - RNA, 22 nt, Human
cagaguccugcaccagcuccag

SEQ ID NO: 429462 - RNA, 22 nt, Human
cauggggcccaugugcuccaag

SEQ ID NO: 429463 - RNA, 22 nt, Human
ggggucccugcaccagcauguc

SEQ ID NO: 429464 - RNA, 22 nt, Human
uuacuguagcuugacauauguc

SEQ ID NO: 429465 - RNA, 22 nt, Human
ucuccuggcauuugguugagua

SEQ ID NO: 429466 - RNA, 22 nt, Human
ugaaagcucugucaucauuccu

SEQ ID NO: 429467 - RNA, 22 nt, Human
ccccaacccugguuccguggcg

SEQ ID NO: 429468 - RNA, 22 nt, Human
cagggacucgcuggacauaccg

SEQ ID NO: 429469 - RNA, 22 nt, Human
cuggccucacagaggcuaagcc

SEQ ID NO: 429470 - RNA, 22 nt, Human
uccuggccaaguagauguggcg

SEQ ID NO: 429471 - RNA, 22 nt, Human
agagaagagucuugucaaauua

SEQ ID NO: 429472 - RNA, 22 nt, Human
ggucuuucuuugauaguggaga

SEQ ID NO: 429473 - RNA, 22 nt, Human
ucgggguagacgccagcucgga

SEQ ID NO: 429474 - RNA, 22 nt, Human
ccagcagcgauagggugagugc

SEQ ID NO: 429475 - RNA, 22 nt, Human
uuccgagucuccaagggguugu

SEQ ID NO: 429476 - RNA, 22 nt, Human
gaggcuggacgugcauuucuac

SEQ ID NO: 429477 - RNA, 22 nt, Human
gaggcuggcagaaaagcacagg

SEQ ID NO: 429478 - RNA, 22 nt, Human
ccugaggaugccagcaugggug

SEQ ID NO: 429479 - RNA, 22 nt, Human
gugugcgccgacacagccaggu

SEQ ID NO: 429480 - RNA, 22 nt, Human
uccaggaggacugagggggcug

SEQ ID NO: 429481 - RNA, 22 nt, Human
ggggaagaaauagaacauuuug

SEQ ID NO: 429482 - RNA, 22 nt, Human
aacuuagagcucuccuaaauga

SEQ ID NO: 429483 - RNA, 22 nt, Human
auuggccagacuuauccuucag

SEQ ID NO: 429484 - RNA, 22 nt, Human
guccuggugccaccugcgggau

SEQ ID NO: 429485 - RNA, 22 nt, Human
ccugggaaggugaggcccugga

SEQ ID NO: 429486 - RNA, 22 nt, Human
cugggucccggcuucuauccac

SEQ ID NO: 429487 - RNA, 22 nt, Human
ggagaggguagggguccugccc

SEQ ID NO: 429488 - RNA, 22 nt, Human
cagagccaaaccucagggcccg

SEQ ID NO: 429489 - RNA, 22 nt, Human
auguaguauuuggaaauguaaa

SEQ ID NO: 429490 - RNA, 22 nt, Human
aaugaguuuguucuauuauuug

SEQ ID NO: 429491 - RNA, 22 nt, Human
guggccuccuccguccgccucu

SEQ ID NO: 429492 - RNA, 22 nt, Human
gggcucaucaagccucuccgcc

SEQ ID NO: 429493 - RNA, 17 nt, Human
uaagggggaaacggagc

SEQ ID NO: 429494 - RNA, 22 nt, Human
gguuuguugggguccaggccca

SEQ ID NO: 429495 - RNA, 22 nt, Human
agacacuguguacagaaaaaga

SEQ ID NO: 429496 - RNA, 22 nt, Human
ccugggacuuggucugggguuu

SEQ ID NO: 429497 - RNA, 22 nt, Human
uggcucaggccuacgacgccuu

SEQ ID NO: 429498 - RNA, 22 nt, Human
cuccccacgccuggacuaagag

SEQ ID NO: 429499 - RNA, 22 nt, Human
aucuguucuucaaaauauuaca

SEQ ID NO: 429500 - RNA, 23 nt, Human
agaagcagcuucuggaguaucgg

SEQ ID NO: 429501 - RNA, 22 nt, Human
agcaggccugccaccucggggu

SEQ ID NO: 429502 - RNA, 22 nt, Human
acucagugggcuugaugucgaa

SEQ ID NO: 429503 - RNA, 22 nt, Human
guccuggggauuauagaguguu

SEQ ID NO: 429504 - RNA, 22 nt, Human
uaauuuugucacagugacaugc

SEQ ID NO: 429505 - RNA, 22 nt, Human
uguguuucugagaaucccaccu

SEQ ID NO: 429506 - RNA, 22 nt, Human
agcgggcucacccgguuguugu

SEQ ID NO: 429507 - RNA, 22 nt, Human
ggucuggagcuaaucuuguugg

SEQ ID NO: 429508 - RNA, 20 nt, Human
ugggguccuggaggggaucc

SEQ ID NO: 429509 - RNA, 22 nt, Human
uuuaauuuucugggcccagcag

SEQ ID NO: 429510 - RNA, 22 nt, Human
uggguccuggaaggcgacaggu

SEQ ID NO: 429511 - RNA, 22 nt, Human
ucagagacaucagguuguagca

SEQ ID NO: 429512 - RNA, 22 nt, Human
gcggagaggcagagacuccgcg

SEQ ID NO: 429513 - RNA, 22 nt, Human
aagccgggccugagaaaugaca

SEQ ID NO: 429514 - RNA, 22 nt, Human
gggagggucugagagcugcacc

SEQ ID NO: 429515 - RNA, 22 nt, Human
agggccagcagcuuggccaacc

SEQ ID NO: 429516 - RNA, 22 nt, Human
uggccagucuuagcugugccug

SEQ ID NO: 429517 - RNA, 19 nt, Human
uggugcgcuguuccugagc

SEQ ID NO: 429518 - RNA, 22 nt, Human
cugggauccacgggcucccaag

SEQ ID NO: 429519 - RNA, 22 nt, Human
cugcauaucaaauuacuccugg

SEQ ID NO: 429520 - RNA, 18 nt, Human
ucugagggugcgggagcu

SEQ ID NO: 429521 - RNA, 18 nt, Human
uauaaacacacuuagguu

SEQ ID NO: 429522 - RNA, 19 nt, Human
caguuuguccagaggggac

SEQ ID NO: 429523 - RNA, 22 nt, Human
gcuggguggaucggaggcucug

SEQ ID NO: 429524 - RNA, 21 nt, Human
acaaauuguuuauauaggaag

SEQ ID NO: 429525 - RNA, 22 nt, Human
uuauuccauagaagucaaggaa

SEQ ID NO: 429526 - RNA, 22 nt, Human
uccaguggugguuugaagggca

SEQ ID NO: 429527 - RNA, 22 nt, Human
ucguuagccucgagaucuuugu

SEQ ID NO: 429528 - RNA, 22 nt, Human
gcugccauggcugggggccgug

SEQ ID NO: 429529 - RNA, 22 nt, Human
aacccaggguggagguugcagu

SEQ ID NO: 429530 - RNA, 22 nt, Human
cagggagcuggugccagccgac

SEQ ID NO: 429531 - RNA, 22 nt, Human
agggaggucuggcugcccugag

SEQ ID NO: 429532 - RNA, 21 nt, Human
ccaccaggucuucugcucggg

SEQ ID NO: 429533 - RNA, 22 nt, Human
guuugcaaauuguguuaaagcu

SEQ ID NO: 429534 - RNA, 22 nt, Human
gggacaauggaggccucucucc

SEQ ID NO: 429535 - RNA, 22 nt, Human
uucuuuuaauuucugucugcag

SEQ ID NO: 429536 - RNA, 22 nt, Human
agguggcuaugaggaugcaguc

SEQ ID NO: 429537 - RNA, 22 nt, Human
uccaggcugacgcagcuauuua

SEQ ID NO: 429538 - RNA, 17 nt, Human
uccuggccuggugugug

SEQ ID NO: 429539 - RNA, 22 nt, Human
gggcacagucugcagcccccca

SEQ ID NO: 429540 - RNA, 22 nt, Human
uguccagaucaaugcccacaug

SEQ ID NO: 429541 - RNA, 22 nt, Human
gcaggguaggugacagguaguc

SEQ ID NO: 429542 - RNA, 22 nt, Human
ucugcccaggaggucccauggg

SEQ ID NO: 429543 - RNA, 22 nt, Human
gcaggccugucuugcucgcccu

SEQ ID NO: 429544 - RNA, 22 nt, Human
uaucuguagucucaugguuccu

SEQ ID NO: 429545 - RNA, 22 nt, Human
ggaagaggcugaggccaugcug

SEQ ID NO: 429546 - RNA, 23 nt, Human
cagcugguugugggaguggcugc

SEQ ID NO: 429547 - RNA, 22 nt, Human
gccagguaugaauuacgcacga

SEQ ID NO: 429548 - RNA, 22 nt, Human
gggacagcuguagugcuuggcu

SEQ ID NO: 429549 - RNA, 22 nt, Human
uucuuugcccauguuuccuaag

SEQ ID NO: 429550 - RNA, 17 nt, Human
cucugggucuccugcuu

SEQ ID NO: 429551 - RNA, 22 nt, Human
agccacugugugaccagcuguc

SEQ ID NO: 429552 - RNA, 22 nt, Human
gagggccaaugugucccugagc

SEQ ID NO: 429553 - RNA, 22 nt, Human
gacggggcagccagcugguggc

SEQ ID NO: 429554 - RNA, 22 nt, Human
cuuuauguuggggugucuuagu

SEQ ID NO: 429555 - RNA, 22 nt, Human
ggcucuggcgagcuuuaguaca

SEQ ID NO: 429556 - RNA, 22 nt, Human
ggcuuccuccuuccugcuguca

SEQ ID NO: 429557 - RNA, 22 nt, Human
ggucauagagcuggaaauuggc

SEQ ID NO: 429558 - RNA, 22 nt, Human
ugguaugcuuauuaucuucaac

SEQ ID NO: 429559 - RNA, 22 nt, Human
gcagcugccgugagcucacgcc

SEQ ID NO: 429560 - RNA, 21 nt, Human
gcccacagugaggaggauccc

SEQ ID NO: 429561 - RNA, 20 nt, Human
ucagugggaaagugagagug

SEQ ID NO: 429562 - RNA, 19 nt, Human
cgcacagccugccaggcgc

SEQ ID NO: 429563 - RNA, 22 nt, Human
ggaaggggagcuggaaagggua

SEQ ID NO: 429564 - RNA, 18 nt, Human
ggugagggagcuggaagc

SEQ ID NO: 429565 - RNA, 22 nt, Human
cuggugcuguagccugauugag

SEQ ID NO: 429566 - RNA, 22 nt, Human
ggacagacuuuacagccccggg

SEQ ID NO: 429567 - RNA, 22 nt, Human
caggcgggcaggugcggccccu

SEQ ID NO: 429568 - RNA, 22 nt, Human
uuucacauacaguguauaguag

SEQ ID NO: 429569 - RNA, 22 nt, Human
gcccagcugagaagcgcggggc

SEQ ID NO: 429570 - RNA, 22 nt, Human
auggccuuucucaguggugcuu

SEQ ID NO: 429571 - RNA, 22 nt, Human
ucccagccugacagugcaucaa

SEQ ID NO: 429572 - RNA, 22 nt, Human
ucuuauugguaaugauggcauu

SEQ ID NO: 429573 - RNA, 22 nt, Human
gcucccugguauugcugccacu

SEQ ID NO: 429574 - RNA, 22 nt, Human
accuccuccaaggagccauagg

SEQ ID NO: 429575 - RNA, 22 nt, Human
gggugcaaacccguucugcacc

SEQ ID NO: 429576 - RNA, 22 nt, Human
auucccauagccauccggagag

SEQ ID NO: 429577 - RNA, 22 nt, Human
uccagagaacgaugaaagcugg

SEQ ID NO: 429578 - RNA, 23 nt, Human
uggggcugauggagacggaccag

SEQ ID NO: 429579 - RNA, 20 nt, Human
gcucagggccugggucugga

SEQ ID NO: 429580 - RNA, 22 nt, Human
uguagggaggaaggguuggaaa

SEQ ID NO: 429581 - RNA, 22 nt, Human
cacgcacgcuggguggaggcgc

SEQ ID NO: 429582 - RNA, 22 nt, Human
agcagccuugugacuccggggu

SEQ ID NO: 429583 - RNA, 22 nt, Human
cccagaggcugaguugggagca

SEQ ID NO: 429584 - RNA, 22 nt, Human
uucagguuuuuaaguucugccu

SEQ ID NO: 429585 - RNA, 22 nt, Human
ugcugguucuuaggagagagau

SEQ ID NO: 429586 - RNA, 22 nt, Human
uaaggcuguuaggaggauuaaa

SEQ ID NO: 429587 - RNA, 22 nt, Human
guuuccaagucucucaacaccc

SEQ ID NO: 429588 - RNA, 22 nt, Human
uggaagggguuacgcagcagga

SEQ ID NO: 429589 - RNA, 22 nt, Human
uuucauuauaaaaaguuggcuu

SEQ ID NO: 429590 - RNA, 22 nt, Human
cguggggcggguggacacuugc

SEQ ID NO: 429591 - RNA, 22 nt, Human
gccaggucgucuccauguccaa

SEQ ID NO: 429592 - RNA, 22 nt, Human
uauuaugguuguagguuaacaa

SEQ ID NO: 429593 - RNA, 22 nt, Human
aaggggggcaccugcaugcccg

SEQ ID NO: 429594 - RNA, 22 nt, Human
gagcugggaagauagcuugagc

SEQ ID NO: 429595 - RNA, 22 nt, Human
ucgggacgguggcauuugugcc

SEQ ID NO: 429596 - RNA, 22 nt, Human
aacccaggaguuggaggcugug

SEQ ID NO: 429597 - RNA, 20 nt, Human
cagcucugggcaggucgagg

SEQ ID NO: 429598 - RNA, 22 nt, Human
acggagcccgugucagguggga

SEQ ID NO: 429599 - RNA, 22 nt, Human
ggaccugcucucccaguucucu

SEQ ID NO: 429600 - RNA, 22 nt, Human
ucaggggacagccagcuggagg

SEQ ID NO: 429601 - RNA, 22 nt, Human
aagagagaacucccuucgccag

SEQ ID NO: 429602 - RNA, 22 nt, Human
uccugccaccggggguggcgau

SEQ ID NO: 429603 - RNA, 22 nt, Human
agccacagucuguagccagcuu

SEQ ID NO: 429604 - RNA, 22 nt, Human
aagcagccagccaucaugcccg

SEQ ID NO: 429605 - RNA, 22 nt, Human
uaggaaauaauucacucuggcu

SEQ ID NO: 429606 - RNA, 22 nt, Human
gcggcuccgaagccaggccgcg

SEQ ID NO: 429607 - RNA, 21 nt, Human
ugagcaccagcugcaugcccc

SEQ ID NO: 429608 - RNA, 22 nt, Human
cagggagaggccucuguugccc

SEQ ID NO: 429609 - RNA, 22 nt, Human
cucagugcuuaguguguuuugg

SEQ ID NO: 429610 - RNA, 22 nt, Human
aggugggacccguggggugcga

SEQ ID NO: 429611 - RNA, 22 nt, Human
ugacuuuggacuagugauuuaa

SEQ ID NO: 429612 - RNA, 22 nt, Human
ugugugcucgauggcccugcag

SEQ ID NO: 429613 - RNA, 20 nt, Human
cugcuccacccggcucucag

SEQ ID NO: 429614 - RNA, 22 nt, Human
gcagagcugucuaagucacuuc

SEQ ID NO: 429615 - RNA, 22 nt, Human
ugcugcgggacccacugugggc

SEQ ID NO: 429616 - RNA, 22 nt, Human
ggggagaguauuuuauucaagu

SEQ ID NO: 429617 - RNA, 22 nt, Human
cggagcagagccacucgggccg

SEQ ID NO: 429618 - RNA, 21 nt, Human
gcaaccagaccacagggcagu

SEQ ID NO: 429619 - RNA, 22 nt, Human
aggccacaggaguacugucggu

SEQ ID NO: 429620 - RNA, 22 nt, Human
gguccagcacaacacuggcaug

SEQ ID NO: 429621 - RNA, 18 nt, Human
ccucagggagagagacgc

SEQ ID NO: 429622 - RNA, 23 nt, Human
uggugggcccugcuugcucacug

SEQ ID NO: 429623 - RNA, 22 nt, Human
acccacgaagaugagcggcaug

SEQ ID NO: 429624 - RNA, 22 nt, Human
cgcaggugccggcagauggggu

SEQ ID NO: 429625 - RNA, 22 nt, Human
caggccgggcacugcgcuaggu

SEQ ID NO: 429626 - RNA, 22 nt, Human
gugacagguauacucaccauug

SEQ ID NO: 429627 - RNA, 22 nt, Human
cauuggcuccugugggacauga

SEQ ID NO: 429628 - RNA, 22 nt, Human
gucccuggucuaccguggcuuc

SEQ ID NO: 429629 - RNA, 22 nt, Human
ucaccgccuugcccggccgggc

SEQ ID NO: 429630 - RNA, 22 nt, Human
gcuguccugggaacaggcacua

SEQ ID NO: 429631 - RNA, 22 nt, Human
gggggcuggacuuucccacaca

SEQ ID NO: 429632 - RNA, 22 nt, Human
cuacauuauguuuauugggacu

SEQ ID NO: 429633 - RNA, 22 nt, Human
ggggucacacuguggugacugg

SEQ ID NO: 429634 - RNA, 22 nt, Human
uguguuuuggaaggaacaugca

SEQ ID NO: 429635 - RNA, 22 nt, Human
gagcuccuauggucgguggcuc

SEQ ID NO: 429636 - RNA, 22 nt, Human
gaggugggaugugugugcuacu

SEQ ID NO: 429637 - RNA, 22 nt, Human
gcuaagggauaggcugccuccu

SEQ ID NO: 429638 - RNA, 22 nt, Human
agcuccugaaaagcgcuugcuu

SEQ ID NO: 429639 - RNA, 22 nt, Human
caggucuucuucagcacuugga

SEQ ID NO: 429640 - RNA, 19 nt, Human
cugaaacacagagagggcu

SEQ ID NO: 429641 - RNA, 22 nt, Human
uggguucgauguauauguagcc

SEQ ID NO: 429642 - RNA, 22 nt, Human
cugcccaucuggccacacacag

SEQ ID NO: 429643 - RNA, 22 nt, Human
gggcucuguuuagaccagagau

SEQ ID NO: 429644 - RNA, 22 nt, Human
gugcucacugugagacguccug

SEQ ID NO: 429645 - RNA, 21 nt, Human
gccaccucaaucuucuagcgc

SEQ ID NO: 429646 - RNA, 22 nt, Human
aggcgaagggaccagacgguag

SEQ ID NO: 429647 - RNA, 22 nt, Human
auggccagcaagguagggcaau

SEQ ID NO: 429648 - RNA, 22 nt, Human
ccaagaggggcagagggcugca

SEQ ID NO: 429649 - RNA, 22 nt, Human
accuuuaugaaacagcugucgu

SEQ ID NO: 429650 - RNA, 22 nt, Human
gcuuggccagcagccgggaugc

SEQ ID NO: 429651 - RNA, 22 nt, Human
auggaguucugccagcgcugcu

SEQ ID NO: 429652 - RNA, 22 nt, Human
ccagguggacggcgaguacagg

SEQ ID NO: 429653 - RNA, 22 nt, Human
ucuuuuaucuguuguguaacaa

SEQ ID NO: 429654 - RNA, 22 nt, Human
gacuuugguucagggcucagag

SEQ ID NO: 429655 - RNA, 20 nt, Human
uuugacaccuugggagagac

SEQ ID NO: 429656 - RNA, 19 nt, Human
gggaaugauggaagacuuc

SEQ ID NO: 429657 - RNA, 22 nt, Human
cccaccagaccugcaccggcac

SEQ ID NO: 429658 - RNA, 23 nt, Human
guuauugcuggugcuggccagcc

SEQ ID NO: 429659 - RNA, 22 nt, Human
cuccagauuccguuuauucagg

SEQ ID NO: 429660 - RNA, 22 nt, Human
aggcucagugauguaaaauaua

SEQ ID NO: 429661 - RNA, 22 nt, Human
cgcccacgaaguagguggcauu

SEQ ID NO: 429662 - RNA, 22 nt, Human
aggcuccaugguucucccucag

SEQ ID NO: 429663 - RNA, 22 nt, Human
cuggcuaaagagcaagaagaug

SEQ ID NO: 429664 - RNA, 22 nt, Human
ugggugugagcccgggagccgc

SEQ ID NO: 429665 - RNA, 22 nt, Human
cuucagggaggagcauggguuc

SEQ ID NO: 429666 - RNA, 22 nt, Human
cugccaucugagccaaaagugc

SEQ ID NO: 429667 - RNA, 22 nt, Human
ggagggaaccuuggcuggauug

SEQ ID NO: 429668 - RNA, 22 nt, Human
ggacaucuguugugguagagga

SEQ ID NO: 429669 - RNA, 22 nt, Human
aggucccugcagcagacugcca

SEQ ID NO: 429670 - RNA, 22 nt, Human
gaguggggcccacugcugggug

SEQ ID NO: 429671 - RNA, 22 nt, Human
cccaggaggcagaaguugcagu

SEQ ID NO: 429672 - RNA, 22 nt, Human
ccugugguuuacucuguggcua

SEQ ID NO: 429673 - RNA, 22 nt, Human
auauguggcauuauuucugagg

SEQ ID NO: 429674 - RNA, 22 nt, Human
uuuauccaccuuacccuguucc

SEQ ID NO: 429675 - RNA, 22 nt, Human
cuugacacugucacucaggcca

SEQ ID NO: 429676 - RNA, 22 nt, Human
ggcugagcuuuucaugaugguu

SEQ ID NO: 429677 - RNA, 22 nt, Human
uggccaggcagguagaacggcc

SEQ ID NO: 429678 - RNA, 19 nt, Human
gcacacccugcaccaccau

SEQ ID NO: 429679 - RNA, 22 nt, Human
ucugggccggagccgacggcag

SEQ ID NO: 429680 - RNA, 20 nt, Human
gugugaccuccuguggaugc

SEQ ID NO: 429681 - RNA, 22 nt, Human
ccaggagaaugggauuacccua

SEQ ID NO: 429682 - RNA, 22 nt, Human
ggcuagggagacagagggcaug

SEQ ID NO: 429683 - RNA, 22 nt, Human
uguggugccgagagucuggacg

SEQ ID NO: 429684 - RNA, 22 nt, Human
uuguaacaguagcugucagcuc

SEQ ID NO: 429685 - RNA, 23 nt, Human
ucuggcugcuccuuucaaugcuc

SEQ ID NO: 429686 - RNA, 22 nt, Human
uugauggacagggaccacuguc

SEQ ID NO: 429687 - RNA, 22 nt, Human
uuaugggcgaugcaaaccugau

SEQ ID NO: 429688 - RNA, 22 nt, Human
aguuauguccucagcaaaucaa

SEQ ID NO: 429689 - RNA, 21 nt, Human
ccacaauucuaguuacauaug

SEQ ID NO: 429690 - RNA, 22 nt, Human
cgggaagguggagguugcagug

SEQ ID NO: 429691 - RNA, 22 nt, Human
gagcuuggugcugccuguuguc

SEQ ID NO: 429692 - RNA, 22 nt, Human
ugugucuuuggcgaugucugga

SEQ ID NO: 429693 - RNA, 15 nt, Human
gccccaggaaucaaa

SEQ ID NO: 429694 - RNA, 22 nt, Human
cucucugggcccaguuggcacc

SEQ ID NO: 429695 - RNA, 22 nt, Human
uagggcucugagaguucagccu

SEQ ID NO: 429696 - RNA, 22 nt, Human
ggagccaguuuagaccucaguu

SEQ ID NO: 429697 - RNA, 20 nt, Human
ggggcccaagcccucuugcc

SEQ ID NO: 429698 - RNA, 22 nt, Human
aaacccaggguuuugucuuccc

SEQ ID NO: 429699 - RNA, 22 nt, Human
ccagccagcugcccuuggggcc

SEQ ID NO: 429700 - RNA, 22 nt, Human
gagguuggagggcuggccugca

SEQ ID NO: 429701 - RNA, 22 nt, Human
gcccuguguguuugcacugauu

SEQ ID NO: 429702 - RNA, 15 nt, Human
gccuugaaugugaau

SEQ ID NO: 429703 - RNA, 22 nt, Human
acggccgaugacuccagcaugg

SEQ ID NO: 429704 - RNA, 22 nt, Human
cacugcccuggggguugccauc

SEQ ID NO: 429705 - RNA, 22 nt, Human
aaguccagguccucauuccauc

SEQ ID NO: 429706 - RNA, 22 nt, Human
aggugcccaugagcuccauggc

SEQ ID NO: 429707 - RNA, 22 nt, Human
gccuggggaacuugauccuguc

SEQ ID NO: 429708 - RNA, 20 nt, Human
ccagagcugauggcugcccg

SEQ ID NO: 429709 - RNA, 22 nt, Human
uggguguguccauauuuugacu

SEQ ID NO: 429710 - RNA, 22 nt, Human
agcuggugugccaguuccaguu

SEQ ID NO: 429711 - RNA, 22 nt, Human
ugguccucacccuacccagcug

SEQ ID NO: 429712 - RNA, 22 nt, Human
gcagcucucuggccugcccugg

SEQ ID NO: 429713 - RNA, 22 nt, Human
guguguggaaugcucauuuauu

SEQ ID NO: 429714 - RNA, 22 nt, Human
agggugugcuguugggucuuuc

SEQ ID NO: 429715 - RNA, 21 nt, Human
uccaaaggagacugagugugu

SEQ ID NO: 429716 - RNA, 22 nt, Human
ccugggugaugugcugcccucg

SEQ ID NO: 429717 - RNA, 22 nt, Human
ccagcuggaacggcagcccagc

SEQ ID NO: 429718 - RNA, 20 nt, Human
auuagcuuggagacaguggc

SEQ ID NO: 429719 - RNA, 22 nt, Human
gucugcacgugccagggagggg

SEQ ID NO: 429720 - RNA, 22 nt, Human
aggcggguuuaggacaaugcuu

SEQ ID NO: 429721 - RNA, 22 nt, Human
aaugcugugauuuauuaaguau

SEQ ID NO: 429722 - RNA, 22 nt, Human
aaugccuuggagagccuagagg

SEQ ID NO: 429723 - RNA, 22 nt, Human
ugccgcgcgcccagguuaggug

SEQ ID NO: 429724 - RNA, 22 nt, Human
gugcauauguguguauacaaac

SEQ ID NO: 429725 - RNA, 22 nt, Human
ggagagagaccuccaugcccag

SEQ ID NO: 429726 - RNA, 21 nt, Human
uugauuuagcagaucuagcug

SEQ ID NO: 429727 - RNA, 22 nt, Human
gcccagccccuggguggacgug

SEQ ID NO: 429728 - RNA, 22 nt, Human
agagaugcuguggguagaggca

SEQ ID NO: 429729 - RNA, 22 nt, Human
cagagccacugucugccaggca

SEQ ID NO: 429730 - RNA, 22 nt, Human
caggggcggguaaaaggccucc

SEQ ID NO: 429731 - RNA, 19 nt, Human
uccagaacugcccuggccu

SEQ ID NO: 429732 - RNA, 22 nt, Human
auggccugcagugcugccacag

SEQ ID NO: 429733 - RNA, 22 nt, Human
uggcccagaucucugaccuuga

SEQ ID NO: 429734 - RNA, 22 nt, Human
ggagcugcucagagccaguccc

SEQ ID NO: 429735 - RNA, 22 nt, Human
ucagacaccgucuauuuugccu

SEQ ID NO: 429736 - RNA, 22 nt, Human
acagacuccccagguuaucuca

SEQ ID NO: 429737 - RNA, 22 nt, Human
uccaggaguccuggguggcccc

SEQ ID NO: 429738 - RNA, 22 nt, Human
gggaagugcccucuucaggaga

SEQ ID NO: 429739 - RNA, 18 nt, Human
uccuuucaccccuucucu

SEQ ID NO: 429740 - RNA, 22 nt, Human
cuggccagggugcgaucguggu

SEQ ID NO: 429741 - RNA, 22 nt, Human
cacccucaagcaguggcacgug

SEQ ID NO: 429742 - RNA, 22 nt, Human
aguggcugugaaauacauggga

SEQ ID NO: 429743 - RNA, 22 nt, Human
ucccuggcacaagaaggcuguc

SEQ ID NO: 429744 - RNA, 22 nt, Human
gauggaggagauggcagggugc

SEQ ID NO: 429745 - RNA, 22 nt, Human
ugggcugcuucuauuggugguc

SEQ ID NO: 429746 - RNA, 19 nt, Human
cccagaggaaugccuggaa

SEQ ID NO: 429747 - RNA, 22 nt, Human
guugcaaaugggaagaugguua

SEQ ID NO: 429748 - RNA, 22 nt, Human
ggagaggggaacuuguugcuug

SEQ ID NO: 429749 - RNA, 22 nt, Human
cagcagcaacaacggaagccuu

SEQ ID NO: 429750 - RNA, 22 nt, Human
cuguucccgguggccgggccag

SEQ ID NO: 429751 - RNA, 22 nt, Human
agcugggcuggagcuccaagcg

SEQ ID NO: 429752 - RNA, 23 nt, Human
guguggccccagggccuccucgc

SEQ ID NO: 429753 - RNA, 22 nt, Human
agggaagcagcagccgccuguc

SEQ ID NO: 429754 - RNA, 22 nt, Human
uuggggccgggauaagguuguu

SEQ ID NO: 429755 - RNA, 20 nt, Human
gcagcagacagacaggggac

SEQ ID NO: 429756 - RNA, 22 nt, Human
guagcccaccuggggagggcga

SEQ ID NO: 429757 - RNA, 22 nt, Human
aggaggguggggucugccuguc

SEQ ID NO: 429758 - RNA, 22 nt, Human
auggugguagaagcacuaugug

SEQ ID NO: 429759 - RNA, 22 nt, Human
aggcuaggccuugcccuggaac

SEQ ID NO: 429760 - RNA, 22 nt, Human
uugaacaguuuugucagguuca

SEQ ID NO: 429761 - RNA, 18 nt, Human
acccauuauauuuguagc

SEQ ID NO: 429762 - RNA, 22 nt, Human
uggcugaggcacagcugccgcc

SEQ ID NO: 429763 - RNA, 22 nt, Human
ugggaagauaugagugaccaac

SEQ ID NO: 429764 - RNA, 22 nt, Human
gucugcccugcagacaugccuc

SEQ ID NO: 429765 - RNA, 20 nt, Human
ucuuuuauuggcagauccug

SEQ ID NO: 429766 - RNA, 22 nt, Human
uggggcuccuccuggcaggagg

SEQ ID NO: 429767 - RNA, 22 nt, Human
gccaugaacucgggcauggaga

SEQ ID NO: 429768 - RNA, 22 nt, Human
ggcggugguugagaggacggcg

SEQ ID NO: 429769 - RNA, 22 nt, Human
cagggaugggauggagucaguu

SEQ ID NO: 429770 - RNA, 22 nt, Human
acagggcugaggcuggcuucuu

SEQ ID NO: 429771 - RNA, 23 nt, Human
caccccacccugaggaggaggga

SEQ ID NO: 429772 - RNA, 22 nt, Human
uggccgggaagggacagugugg

SEQ ID NO: 429773 - RNA, 22 nt, Human
cgggcacucagggucgaggugg

SEQ ID NO: 429774 - RNA, 20 nt, Human
aucagguguucagccacugc

SEQ ID NO: 429775 - RNA, 23 nt, Human
uagauccuuccaacuacucuuac

SEQ ID NO: 429776 - RNA, 22 nt, Human
ucugugggcauuuauaaucugg

SEQ ID NO: 429777 - RNA, 18 nt, Human
gggguagaguguccuauu

SEQ ID NO: 429778 - RNA, 19 nt, Human
ugggcagugccagggcuua

SEQ ID NO: 429779 - RNA, 22 nt, Human
cugggugagcuggccagagggu

SEQ ID NO: 429780 - RNA, 19 nt, Human
cucugccauuugcugccug

SEQ ID NO: 429781 - RNA, 22 nt, Human
ggcagaggagcuggaaacaugg

SEQ ID NO: 429782 - RNA, 20 nt, Human
cgggacacucaagcucuggg

SEQ ID NO: 429783 - RNA, 22 nt, Human
uuccaggaagcucucggccucu

SEQ ID NO: 429784 - RNA, 22 nt, Human
uucccuggugggugagaaccug

SEQ ID NO: 429785 - RNA, 16 nt, Human
ugcggcaacuugcggc

SEQ ID NO: 429786 - RNA, 22 nt, Human
gcgagucgccgcugcagcccua

SEQ ID NO: 429787 - RNA, 22 nt, Human
cacggccacugcagcaccccag

SEQ ID NO: 429788 - RNA, 22 nt, Human
gggaagugagcuggaaucaagg

SEQ ID NO: 429789 - RNA, 22 nt, Human
caagcuuguuucuccugggggu

SEQ ID NO: 429790 - RNA, 22 nt, Human
aggagccauugcaggauggcag

SEQ ID NO: 429791 - RNA, 22 nt, Human
uauuuggugaaucuauggucag

SEQ ID NO: 429792 - RNA, 22 nt, Human
cacaggaagcaagccuggggcc

SEQ ID NO: 429793 - RNA, 22 nt, Human
aggguccugagccuggggcgca

SEQ ID NO: 429794 - RNA, 22 nt, Human
ccaggcccugccugugguuccu

SEQ ID NO: 429795 - RNA, 22 nt, Human
auuauugcaagcagugaaggga

SEQ ID NO: 429796 - RNA, 22 nt, Human
gcacaaaagguacuucauguag

SEQ ID NO: 429797 - RNA, 22 nt, Human
gcuugcuuuguaaauaucugug

SEQ ID NO: 429798 - RNA, 22 nt, Human
gccacguagaagugccgcgaga

SEQ ID NO: 429799 - RNA, 22 nt, Human
uguguccugugaucucuagggu

SEQ ID NO: 429800 - RNA, 22 nt, Human
uggcagcagggccccuggagga

SEQ ID NO: 429801 - RNA, 22 nt, Human
uggcugaggagagggcggaagu

SEQ ID NO: 429802 - RNA, 22 nt, Human
uggcuggcuguccagcugggca

SEQ ID NO: 429803 - RNA, 22 nt, Human
ugcccucagcagcagcuccugc

SEQ ID NO: 429804 - RNA, 23 nt, Human
agugaugucacccacagacaagg

SEQ ID NO: 429805 - RNA, 21 nt, Human
ugcuccaggagggggcagucc

SEQ ID NO: 429806 - RNA, 22 nt, Human
agccccaggcccggacgccucu

SEQ ID NO: 429807 - RNA, 22 nt, Human
gccagugccugcugcucagggc

SEQ ID NO: 429808 - RNA, 22 nt, Human
gggagacaaaggugagguucuu

SEQ ID NO: 429809 - RNA, 22 nt, Human
cgcuuuggagucccugcuuuac

SEQ ID NO: 429810 - RNA, 22 nt, Human
ggcuggccuguguggccgccac

SEQ ID NO: 429811 - RNA, 22 nt, Human
aaucuguuuuaaaguuugugcc

SEQ ID NO: 429812 - RNA, 18 nt, Human
ggguccccagcugcaggg

SEQ ID NO: 429813 - RNA, 22 nt, Human
ucccaaguagaugggaauacag

SEQ ID NO: 429814 - RNA, 22 nt, Human
aagcacagggacucaggaccgg

SEQ ID NO: 429815 - RNA, 22 nt, Human
ucuuuuccuugaugguuaaaua

SEQ ID NO: 429816 - RNA, 22 nt, Human
aauggcugccagggcaggaggu

SEQ ID NO: 429817 - RNA, 22 nt, Human
uuccggaauggcaggguagcuc

SEQ ID NO: 429818 - RNA, 22 nt, Human
gauggcgguggccaccuccuug

SEQ ID NO: 429819 - RNA, 22 nt, Human
cccagguaaggaugcuccucau

SEQ ID NO: 429820 - RNA, 22 nt, Human
agagaccuuccugacuccagag

SEQ ID NO: 429821 - RNA, 22 nt, Human
agucaggacagauuuucugggg

SEQ ID NO: 429822 - RNA, 22 nt, Human
gagggugguggcuuaaggugcu

SEQ ID NO: 429823 - RNA, 21 nt, Human
agggccucuguguacuggggg

SEQ ID NO: 429824 - RNA, 22 nt, Human
ccauggccaggaaagccaaggu

SEQ ID NO: 429825 - RNA, 22 nt, Human
uucuuuccucccagccuuugga

SEQ ID NO: 429826 - RNA, 22 nt, Human
gccaccagccccaugcgcugug

SEQ ID NO: 429827 - RNA, 22 nt, Human
uggccucuccuggcagcaucca

SEQ ID NO: 429828 - RNA, 22 nt, Human
guggauggagcuggaagccauu

SEQ ID NO: 429829 - RNA, 22 nt, Human
uggcggugacggcggcgccugg

SEQ ID NO: 429830 - RNA, 22 nt, Human
gggcauuucuugucaauguagg

SEQ ID NO: 429831 - RNA, 23 nt, Human
cagcacaguacauuuccugucuc

SEQ ID NO: 429832 - RNA, 22 nt, Human
uuguaagacuguagaaugcaaa

SEQ ID NO: 429833 - RNA, 22 nt, Human
uucgcuuugcccguugucauuu

SEQ ID NO: 429834 - RNA, 22 nt, Human
uugaguuuccugacagcgaagg

SEQ ID NO: 429835 - RNA, 22 nt, Human
gcccagcugcacccuggugggu

SEQ ID NO: 429836 - RNA, 22 nt, Human
cuccacagccccuccaguggca

SEQ ID NO: 429837 - RNA, 22 nt, Human
uggaaaauauuuaggugaauga

SEQ ID NO: 429838 - RNA, 22 nt, Human
agcuuuggcaucugacuagccg

SEQ ID NO: 429839 - RNA, 20 nt, Human
ugcuggaggcgccggcgcuc

SEQ ID NO: 429840 - RNA, 22 nt, Human
uccaugacagcgugagaguuug

SEQ ID NO: 429841 - RNA, 22 nt, Human
gggcggggcuuccguccuccac

SEQ ID NO: 429842 - RNA, 22 nt, Human
uacauguacaugcauagguaga

SEQ ID NO: 429843 - RNA, 18 nt, Human
agcucacagaucuguuuu

SEQ ID NO: 429844 - RNA, 22 nt, Human
acacacagaaggaagccccacu

SEQ ID NO: 429845 - RNA, 22 nt, Human
agacagcacuuuuguauggggg

SEQ ID NO: 429846 - RNA, 22 nt, Human
ggaaggcuuuaagcaccaaagc

SEQ ID NO: 429847 - RNA, 22 nt, Human
uugcccacuggcuguuggucag

SEQ ID NO: 429848 - RNA, 22 nt, Human
ugggcaaaugcuuuuuagucaa

SEQ ID NO: 429849 - RNA, 22 nt, Human
gugcuggggagauaggaagaga

SEQ ID NO: 429850 - RNA, 22 nt, Human
uggagugcaguugggaggacac

SEQ ID NO: 429851 - RNA, 22 nt, Human
cucccugggccucaguuucucu

SEQ ID NO: 429852 - RNA, 22 nt, Human
ugccuguguccccuucuuggca

SEQ ID NO: 429853 - RNA, 22 nt, Human
uggggugccgacagggagggca

SEQ ID NO: 429854 - RNA, 22 nt, Human
gccacccuggacgcacuguucg

SEQ ID NO: 429855 - RNA, 18 nt, Human
aaacauggcuuaaaggcu

SEQ ID NO: 429856 - RNA, 22 nt, Human
gcccucugguggccgccucggc

SEQ ID NO: 429857 - RNA, 22 nt, Human
ugguccagacuuugaccucuca

SEQ ID NO: 429858 - RNA, 22 nt, Human
cuggcuuuuggaggagggucag

SEQ ID NO: 429859 - RNA, 22 nt, Human
ccgggagguggagauugcggug

SEQ ID NO: 429860 - RNA, 22 nt, Human
gcggggggcagcagucgcucag

SEQ ID NO: 429861 - RNA, 22 nt, Human
gcucgguggccagccugaggcc

SEQ ID NO: 429862 - RNA, 22 nt, Human
gagcagcagcugggccagguuc

SEQ ID NO: 429863 - RNA, 22 nt, Human
ucccuggcugguguagagggau

SEQ ID NO: 429864 - RNA, 22 nt, Human
cauuuacauuuaagguuaauau

SEQ ID NO: 429865 - RNA, 22 nt, Human
gcaggggcugagcaccagcggg

SEQ ID NO: 429866 - RNA, 22 nt, Human
agacagcgaggacagaggggug

SEQ ID NO: 429867 - RNA, 22 nt, Human
gaggucaggggagaggcugaug

SEQ ID NO: 429868 - RNA, 22 nt, Human
cucugggguggaggaggcugac

SEQ ID NO: 429869 - RNA, 22 nt, Human
cccgggaggaggaaguugcagu

SEQ ID NO: 429870 - RNA, 22 nt, Human
guggcuaggcccaacggcagga

SEQ ID NO: 429871 - RNA, 22 nt, Human
ucuauuaaugauucaauagugu

SEQ ID NO: 429872 - RNA, 21 nt, Human
agaugaggauacugaggccua

SEQ ID NO: 429873 - RNA, 22 nt, Human
acuuuggugcgaagucacuuua

SEQ ID NO: 429874 - RNA, 22 nt, Human
cagggagaucuuggcuccuggu

SEQ ID NO: 429875 - RNA, 19 nt, Human
agcagccaucgaccaugga

SEQ ID NO: 429876 - RNA, 19 nt, Human
ccuggcccugcugcgcggg

SEQ ID NO: 429877 - RNA, 22 nt, Human
guguuuggucagacguccgggg

SEQ ID NO: 429878 - RNA, 22 nt, Human
gccuggcucugaguuucucucc

SEQ ID NO: 429879 - RNA, 22 nt, Human
uccagguccuacuggcccauag

SEQ ID NO: 429880 - RNA, 22 nt, Human
acagcuggccgaggcucaggga

SEQ ID NO: 429881 - RNA, 22 nt, Human
uauucacaaaaugagguccuca

SEQ ID NO: 429882 - RNA, 22 nt, Human
uggaagggagcuggaauuugga

SEQ ID NO: 429883 - RNA, 22 nt, Human
gugggcaucuccuuggaagcca

SEQ ID NO: 429884 - RNA, 22 nt, Human
uccuggggaggucgaggcugag

SEQ ID NO: 429885 - RNA, 22 nt, Human
cggcgcaggcagaccgcgggcu

SEQ ID NO: 429886 - RNA, 22 nt, Human
aggaagagcuggaccagaggac

SEQ ID NO: 429887 - RNA, 22 nt, Human
cugcugucuuuauuucacugcu

SEQ ID NO: 429888 - RNA, 22 nt, Human
ccuaggccgcccggugcguggg

SEQ ID NO: 429889 - RNA, 22 nt, Human
uugggugcugucauggggcacg

SEQ ID NO: 429890 - RNA, 22 nt, Human
cccgaccucgcaaagcgcacuc

SEQ ID NO: 429891 - RNA, 22 nt, Human
ggcugcccucggggucgcaggc

SEQ ID NO: 429892 - RNA, 20 nt, Human
gggugugggcccggccaggc

SEQ ID NO: 429893 - RNA, 22 nt, Human
cugggacacguugugcuuuaac

SEQ ID NO: 429894 - RNA, 22 nt, Human
acagcuggaggucugugagcac

SEQ ID NO: 429895 - RNA, 22 nt, Human
agagccuguucggaggcgcccc

SEQ ID NO: 429896 - RNA, 22 nt, Human
ggggugaagguuuucugaaagc

SEQ ID NO: 429897 - RNA, 22 nt, Human
ccucguccacaauccuugcaca

SEQ ID NO: 429898 - RNA, 22 nt, Human
caggguggaacaggcaauacuu

SEQ ID NO: 429899 - RNA, 22 nt, Human
caggccagcagggccuccgugg

SEQ ID NO: 429900 - RNA, 22 nt, Human
aggcuguccucucuugcucagu

SEQ ID NO: 429901 - RNA, 17 nt, Human
ucuggaugucauggaag

SEQ ID NO: 429902 - RNA, 22 nt, Human
gagggaaacagauggguugugg

SEQ ID NO: 429903 - RNA, 22 nt, Human
gucuuuuuuacaccuuacauca

SEQ ID NO: 429904 - RNA, 22 nt, Human
aggagggagcuuaagccaggca

SEQ ID NO: 429905 - RNA, 22 nt, Human
gcucguacaccagcguggaggu

SEQ ID NO: 429906 - RNA, 18 nt, Human
gccagcccuccaaccucc

SEQ ID NO: 429907 - RNA, 20 nt, Human
uggccucugagaugccacgg

SEQ ID NO: 429908 - RNA, 22 nt, Human
uguggguccuccugugugcccg

SEQ ID NO: 429909 - RNA, 22 nt, Human
cuguggccagagcgccguugac

SEQ ID NO: 429910 - RNA, 22 nt, Human
gucagaggggcagcugccaggc

SEQ ID NO: 429911 - RNA, 21 nt, Human
ucuuggggaggagggcugcac

SEQ ID NO: 429912 - RNA, 22 nt, Human
uccuccuuuccccgcuggagcc

SEQ ID NO: 429913 - RNA, 22 nt, Human
ccgcuguccuggagcugcugcu

SEQ ID NO: 429914 - RNA, 22 nt, Human
ggcagugaugucaaacagugaa

SEQ ID NO: 429915 - RNA, 22 nt, Human
uguucuggugaggccauggggu

SEQ ID NO: 429916 - RNA, 22 nt, Human
cugagguccucagagggaaagg

SEQ ID NO: 429917 - RNA, 17 nt, Human
gugagcugagucaggac

SEQ ID NO: 429918 - RNA, 21 nt, Human
cccuugccugcacuccucggc

SEQ ID NO: 429919 - RNA, 22 nt, Human
gcggggggcaggcaguacguug

SEQ ID NO: 429920 - RNA, 22 nt, Human
uuuccacacucacugcacucau

SEQ ID NO: 429921 - RNA, 22 nt, Human
uugcauauccuccaacacaugg

SEQ ID NO: 429922 - RNA, 22 nt, Human
gggcucggcaucuguggacucu

SEQ ID NO: 429923 - RNA, 22 nt, Human
gguuguaguuggagguuguaua

SEQ ID NO: 429924 - RNA, 22 nt, Human
cgcacuggagcuggaacgaguc

SEQ ID NO: 429925 - RNA, 22 nt, Human
gcagacccugaacugggcaugg

SEQ ID NO: 429926 - RNA, 22 nt, Human
gcaccgagaaggaagcaugccu

SEQ ID NO: 429927 - RNA, 17 nt, Human
uggcacagaggugcuau

SEQ ID NO: 429928 - RNA, 22 nt, Human
uccucuucaaaauagcucugaa

SEQ ID NO: 429929 - RNA, 22 nt, Human
cagacagagucuucccaucagu

SEQ ID NO: 429930 - RNA, 22 nt, Human
agauaaaguccaaacuguguag

SEQ ID NO: 429931 - RNA, 22 nt, Human
ccgcgagguggagguugcagug

SEQ ID NO: 429932 - RNA, 22 nt, Human
aguccgcgcuccaugggagucc

SEQ ID NO: 429933 - RNA, 19 nt, Human
cauaauacaguggaucuga

SEQ ID NO: 429934 - RNA, 22 nt, Human
agccccaguccgcugcgggcgg

SEQ ID NO: 429935 - RNA, 22 nt, Human
cacuguuuuacauguuauuuaa

SEQ ID NO: 429936 - RNA, 22 nt, Human
ucaggaugagucaucaagcugc

SEQ ID NO: 429937 - RNA, 22 nt, Human
gauguucgagcagaagaccagg

SEQ ID NO: 429938 - RNA, 22 nt, Human
agggcaguguggugggacugac

SEQ ID NO: 429939 - RNA, 18 nt, Human
gagaggagccagaauuuu

SEQ ID NO: 429940 - RNA, 19 nt, Human
ugcuugccugccuuuccca

SEQ ID NO: 429941 - RNA, 22 nt, Human
ccaggcagccaagugugugugu

SEQ ID NO: 429942 - RNA, 22 nt, Human
gcagcccaggaggcgggagccc

SEQ ID NO: 429943 - RNA, 18 nt, Human
ccucuggguuuuguuccc

SEQ ID NO: 429944 - RNA, 22 nt, Human
cagacaggguccuguccgucac

SEQ ID NO: 429945 - RNA, 22 nt, Human
uaccugggcccaccagugccug

SEQ ID NO: 429946 - RNA, 22 nt, Human
ccuccccacagcccaggagacu

SEQ ID NO: 429947 - RNA, 22 nt, Human
aggccagaacagcucugcacca

SEQ ID NO: 429948 - RNA, 22 nt, Human
gucgaucaccucguccuccgug

SEQ ID NO: 429949 - RNA, 22 nt, Human
gcuuuggaaauauagacucaag

SEQ ID NO: 429950 - RNA, 22 nt, Human
aagagcuggcucuugcagcagc

SEQ ID NO: 429951 - RNA, 22 nt, Human
gcagagcugguacuugagccug

SEQ ID NO: 429952 - RNA, 22 nt, Human
gcagccuccgcacugcgagucc

SEQ ID NO: 429953 - RNA, 22 nt, Human
gucacccguuugacuauccacc

SEQ ID NO: 429954 - RNA, 22 nt, Human
uggugaagucagcggagcccgg

SEQ ID NO: 429955 - RNA, 22 nt, Human
cagaggccccauuggcugugcg

SEQ ID NO: 429956 - RNA, 19 nt, Human
agcaguggagccaugccug

SEQ ID NO: 429957 - RNA, 19 nt, Human
cuccacagggauugugauu

SEQ ID NO: 429958 - RNA, 22 nt, Human
ugcuuuggcccaacauugaugc

SEQ ID NO: 429959 - RNA, 22 nt, Human
caggccugugacaccgugucug

SEQ ID NO: 429960 - RNA, 22 nt, Human
gcggaagcgguagucacccucg

SEQ ID NO: 429961 - RNA, 22 nt, Human
gccugcuuccuagccuuccaag

SEQ ID NO: 429962 - RNA, 22 nt, Human
agacgcgguggugcaugccugu

SEQ ID NO: 429963 - RNA, 22 nt, Human
ugccgcugucgccaccauggcu

SEQ ID NO: 429964 - RNA, 22 nt, Human
augcauaucuccuaucuccuca

SEQ ID NO: 429965 - RNA, 22 nt, Human
cgggagccucugggucacacug

SEQ ID NO: 429966 - RNA, 22 nt, Human
cuguggaguccuggggaaugga

SEQ ID NO: 429967 - RNA, 22 nt, Human
agcgcuggugaucucuauuuug

SEQ ID NO: 429968 - RNA, 22 nt, Human
cuggcuuugaucagagugaccu

SEQ ID NO: 429969 - RNA, 22 nt, Human
augaaaacagccuccugugaua

SEQ ID NO: 429970 - RNA, 22 nt, Human
acagauccugguuacagccauu

SEQ ID NO: 429971 - RNA, 22 nt, Human
uucuuuuaauagagauccugug

SEQ ID NO: 429972 - RNA, 22 nt, Human
ccugggacgacucuguacccuu

SEQ ID NO: 429973 - RNA, 23 nt, Human
ggacaugucucuggguauuuuga

SEQ ID NO: 429974 - RNA, 22 nt, Human
gggcuguuugcauauguuuaua

SEQ ID NO: 429975 - RNA, 22 nt, Human
ggccacuguuuccugggcaguu

SEQ ID NO: 429976 - RNA, 22 nt, Human
ggccgggcuguggagaaggggu

SEQ ID NO: 429977 - RNA, 22 nt, Human
ugggaugggaucucgcuguguc

SEQ ID NO: 429978 - RNA, 22 nt, Human
uuuguguuggaagaaaugcuac

SEQ ID NO: 429979 - RNA, 22 nt, Human
auggguggccccgugugcaguc

SEQ ID NO: 429980 - RNA, 22 nt, Human
uugucgggcuuacgcagggcca

SEQ ID NO: 429981 - RNA, 22 nt, Human
cagggccagggcuauggugaag

SEQ ID NO: 429982 - RNA, 22 nt, Human
acagagacacggaagcuaaaga

SEQ ID NO: 429983 - RNA, 22 nt, Human
aggcugcugccuuggagagugu

SEQ ID NO: 429984 - RNA, 18 nt, Human
ucugugggaucagugagg

SEQ ID NO: 429985 - RNA, 22 nt, Human
uugacccgaguccuucuugggg

SEQ ID NO: 429986 - RNA, 22 nt, Human
ccugguguuaucauaggucaug

SEQ ID NO: 429987 - RNA, 22 nt, Human
caggccuugaaggccugcggga

SEQ ID NO: 429988 - RNA, 22 nt, Human
aucccaggcggcacagguugca

SEQ ID NO: 429989 - RNA, 22 nt, Human
gcucguugaaccuguccccgag

SEQ ID NO: 429990 - RNA, 22 nt, Human
cccaggaguuagagguuguggu

SEQ ID NO: 429991 - RNA, 22 nt, Human
cuugcuuuaucugguuucucau

SEQ ID NO: 429992 - RNA, 22 nt, Human
ucuggggucaccuggggugcuu

SEQ ID NO: 429993 - RNA, 21 nt, Human
cacuccacuuagaacaggguu

SEQ ID NO: 429994 - RNA, 23 nt, Human
agcccagcagagaaccuaggucc

SEQ ID NO: 429995 - RNA, 22 nt, Human
ggcuaaggacgggcaaguccca

SEQ ID NO: 429996 - RNA, 22 nt, Human
uugaggucuucaggaucaggcu

SEQ ID NO: 429997 - RNA, 22 nt, Human
gucucuaucauagcugaacccu

SEQ ID NO: 429998 - RNA, 22 nt, Human
agaaggcaucagaaguguguag

SEQ ID NO: 429999 - RNA, 22 nt, Human
ugggguccucucacuuggaggg

SEQ ID NO: 430000 - RNA, 22 nt, Human
guuucuccucugugucuuguuu

SEQ ID NO: 430001 - RNA, 22 nt, Human
acccggagucggagguugcagu

SEQ ID NO: 430002 - RNA, 22 nt, Human
uuggccguuucacugggcaguu

SEQ ID NO: 430003 - RNA, 20 nt, Human
uggcccagcacgacgaggac

SEQ ID NO: 430004 - RNA, 22 nt, Human
gcucagagauguucaguagcuu

SEQ ID NO: 430005 - RNA, 22 nt, Human
gggagggcuuggacccagaugu

SEQ ID NO: 430006 - RNA, 22 nt, Human
gcguuggggaccccgaagcugg

SEQ ID NO: 430007 - RNA, 22 nt, Human
gggcccugcgacucgcggcgga

SEQ ID NO: 430008 - RNA, 22 nt, Human
agggccacgugcaccgcggucu

SEQ ID NO: 430009 - RNA, 22 nt, Human
cugaagcugggcacuuccuuuu

SEQ ID NO: 430010 - RNA, 21 nt, Human
agggaaaaggcugagugaggg

SEQ ID NO: 430011 - RNA, 18 nt, Human
ggcggguguuuuauucac

SEQ ID NO: 430012 - RNA, 22 nt, Human
ggcacagcugaugcagacacac

SEQ ID NO: 430013 - RNA, 22 nt, Human
uggcagcauuuuuuccagaaca

SEQ ID NO: 430014 - RNA, 20 nt, Human
ugggaucgaaucaagucugu

SEQ ID NO: 430015 - RNA, 22 nt, Human
uggaaggggagcuggaaagggg

SEQ ID NO: 430016 - RNA, 22 nt, Human
cucacaggguucuaucgaagag

SEQ ID NO: 430017 - RNA, 22 nt, Human
gguggcaccuuacccugcgcag

SEQ ID NO: 430018 - RNA, 22 nt, Human
agagggcgcccaggcccacgcc

SEQ ID NO: 430019 - RNA, 22 nt, Human
ugcaaauucuuuacucugugau

SEQ ID NO: 430020 - RNA, 22 nt, Human
accccagaggcggaggcugcag

SEQ ID NO: 430021 - RNA, 22 nt, Human
gagcagcuguucugacuugucu

SEQ ID NO: 430022 - RNA, 18 nt, Human
gagagcccagcagguggu

SEQ ID NO: 430023 - RNA, 23 nt, Human
ugacacccucauugugugucgca

SEQ ID NO: 430024 - RNA, 22 nt, Human
agcaggaggagagccuggcggu

SEQ ID NO: 430025 - RNA, 20 nt, Human
caauaauuuacuucccuauu

SEQ ID NO: 430026 - RNA, 22 nt, Human
ucccacacagcccgcucaccgg

SEQ ID NO: 430027 - RNA, 22 nt, Human
ugcugugcuggcggcagaggcc

SEQ ID NO: 430028 - RNA, 22 nt, Human
gaaggcaguaaauggcuguuuu

SEQ ID NO: 430029 - RNA, 22 nt, Human
ccugggcugcucauggggauga

SEQ ID NO: 430030 - RNA, 22 nt, Human
cagggcucgcucgcucgcucgc

SEQ ID NO: 430031 - RNA, 22 nt, Human
cgagagauggguuggcaggggc

SEQ ID NO: 430032 - RNA, 20 nt, Human
gggugugugcagggccuggu

SEQ ID NO: 430033 - RNA, 22 nt, Human
acggugcuggguauugggguuc

SEQ ID NO: 430034 - RNA, 22 nt, Human
aggggagguggcagaaaugugc

SEQ ID NO: 430035 - RNA, 21 nt, Human
gccaucaccaagcucuucccc

SEQ ID NO: 430036 - RNA, 22 nt, Human
ggcaguggugggaggcucgcuc

SEQ ID NO: 430037 - RNA, 22 nt, Human
gugcaggugguuggcccagccg

SEQ ID NO: 430038 - RNA, 22 nt, Human
cagggcuccccagagagccucu

SEQ ID NO: 430039 - RNA, 22 nt, Human
guguggcuaggauggcuuugcu

SEQ ID NO: 430040 - RNA, 22 nt, Human
ucugcuggaaaaccagggaauu

SEQ ID NO: 430041 - RNA, 19 nt, Human
ccgucauggagaguggggu

SEQ ID NO: 430042 - RNA, 18 nt, Human
acagggagggcgcugggg

SEQ ID NO: 430043 - RNA, 22 nt, Human
cugaggagauccccccagaagu

SEQ ID NO: 430044 - RNA, 22 nt, Human
agacaagagcugaggacauauu

SEQ ID NO: 430045 - RNA, 21 nt, Human
gcugcucgagauccagugcuu

SEQ ID NO: 430046 - RNA, 20 nt, Human
cugaccagcagccugucucc

SEQ ID NO: 430047 - RNA, 23 nt, Human
agugggcucaguccuccaacccc

SEQ ID NO: 430048 - RNA, 22 nt, Human
aggggcacgaguagagcucuag

SEQ ID NO: 430049 - RNA, 21 nt, Human
agggccagaucaccaaggagc

SEQ ID NO: 430050 - RNA, 22 nt, Human
ggcuacagcgggguggagacgg

SEQ ID NO: 430051 - RNA, 22 nt, Human
ccaugcccuugucaucuccagg

SEQ ID NO: 430052 - RNA, 18 nt, Human
cccacggugcuguagggc

SEQ ID NO: 430053 - RNA, 21 nt, Human
uccaggagcacgggacuagga

SEQ ID NO: 430054 - RNA, 22 nt, Human
gugcgccagcucaaggggaggc

SEQ ID NO: 430055 - RNA, 22 nt, Human
guggccaaggcagagaaagagc

SEQ ID NO: 430056 - RNA, 22 nt, Human
gucuguccacuuggaagcuccc

SEQ ID NO: 430057 - RNA, 22 nt, Human
ugggaagaguuagagacagcug

SEQ ID NO: 430058 - RNA, 22 nt, Human
aacccgggagguggagguuaug

SEQ ID NO: 430059 - RNA, 22 nt, Human
agugggaauuuucucccaggga

SEQ ID NO: 430060 - RNA, 22 nt, Human
gacagcaggaugugaggggaug

SEQ ID NO: 430061 - RNA, 19 nt, Human
gcuuccagcacugcaggag

SEQ ID NO: 430062 - RNA, 22 nt, Human
cccaggucgucagcaguguggu

SEQ ID NO: 430063 - RNA, 22 nt, Human
ccgcguggcacccuccuggagg

SEQ ID NO: 430064 - RNA, 22 nt, Human
gacagggacacagccagugagg

SEQ ID NO: 430065 - RNA, 22 nt, Human
gggagaguagcuggaagguucu

SEQ ID NO: 430066 - RNA, 22 nt, Human
gaaccuguccugagugaggagu

SEQ ID NO: 430067 - RNA, 22 nt, Human
caggccacagcuaaagaggauu

SEQ ID NO: 430068 - RNA, 19 nt, Human
cccuggaggaguguuggcu

SEQ ID NO: 430069 - RNA, 21 nt, Human
cuguccccagugagcaccccc

SEQ ID NO: 430070 - RNA, 22 nt, Human
uacagccuggcacuacccuggg

SEQ ID NO: 430071 - RNA, 22 nt, Human
agugccaaaucgagggcucuga

SEQ ID NO: 430072 - RNA, 22 nt, Human
aaacacaucauucaugucguca

SEQ ID NO: 430073 - RNA, 22 nt, Human
cugggaagggacgccagugccu

SEQ ID NO: 430074 - RNA, 22 nt, Human
gugcaggacagcacaucuccug

SEQ ID NO: 430075 - RNA, 22 nt, Human
uaguggggaaggaggacaagaa

SEQ ID NO: 430076 - RNA, 22 nt, Human
ggaaggguuuaagcaggagagu

SEQ ID NO: 430077 - RNA, 22 nt, Human
ccaggccuguguuguguggagg

SEQ ID NO: 430078 - RNA, 22 nt, Human
cuagggccaaaggcugugaugc

SEQ ID NO: 430079 - RNA, 22 nt, Human
ccugcucaacgaauauggcgau

SEQ ID NO: 430080 - RNA, 17 nt, Human
gcguguccccgcgucuc

SEQ ID NO: 430081 - RNA, 18 nt, Human
aggagcggcugcggcugc

SEQ ID NO: 430082 - RNA, 22 nt, Human
gccaagaaugcgacagccguca

SEQ ID NO: 430083 - RNA, 22 nt, Human
ggcucagaggagcuggaacggu

SEQ ID NO: 430084 - RNA, 22 nt, Human
auuuacagacguggauuagugc

SEQ ID NO: 430085 - RNA, 22 nt, Human
ugccaggcugcccuccagucug

SEQ ID NO: 430086 - RNA, 22 nt, Human
auccuggguaaguuccuuuuaa

SEQ ID NO: 430087 - RNA, 22 nt, Human
uguggagcccccaggagugggg

SEQ ID NO: 430088 - RNA, 22 nt, Human
cggcagagcccugagucagccu

SEQ ID NO: 430089 - RNA, 22 nt, Human
uggcccaggugcacccagaggc

SEQ ID NO: 430090 - RNA, 22 nt, Human
ucacccagacugucugacucuu

SEQ ID NO: 430091 - RNA, 22 nt, Human
uuugggcuguacaauuucugua

SEQ ID NO: 430092 - RNA, 22 nt, Human
uggcaaggccacaggugcaguu

SEQ ID NO: 430093 - RNA, 22 nt, Human
ucauuuacacuucacaaaugga

SEQ ID NO: 430094 - RNA, 22 nt, Human
gagaauacaaccagaagcugag

SEQ ID NO: 430095 - RNA, 22 nt, Human
uguaccacucuacuaaggguuc

SEQ ID NO: 430096 - RNA, 22 nt, Human
ugagucacuggcaaggcuuuga

SEQ ID NO: 430097 - RNA, 22 nt, Human
uggccuuggucacaaugcaaac

SEQ ID NO: 430098 - RNA, 20 nt, Human
gugcuaaguacugugaaggg

SEQ ID NO: 430099 - RNA, 22 nt, Human
accuggccaguggggccgcgcu

SEQ ID NO: 430100 - RNA, 22 nt, Human
aguggguguagucuuccuccug

SEQ ID NO: 430101 - RNA, 22 nt, Human
aggggagguguccccaaaucuc

SEQ ID NO: 430102 - RNA, 22 nt, Human
uuuucaguugugcucucuaguu

SEQ ID NO: 430103 - RNA, 22 nt, Human
ucucgugcaggccuugcucgga

SEQ ID NO: 430104 - RNA, 22 nt, Human
ggcuggcuggcuuagcagagga

SEQ ID NO: 430105 - RNA, 22 nt, Human
uaacacauagauauuuuaacuu

SEQ ID NO: 430106 - RNA, 22 nt, Human
gagccacaguggauugauucca

SEQ ID NO: 430107 - RNA, 22 nt, Human
ugcugcccacuguauuucucca

SEQ ID NO: 430108 - RNA, 22 nt, Human
gccugaucagguccucggcaua

SEQ ID NO: 430109 - RNA, 22 nt, Human
agcagcaggugaccucgaugcc

SEQ ID NO: 430110 - RNA, 22 nt, Human
gucccaggggagcucucugauu

SEQ ID NO: 430111 - RNA, 22 nt, Human
cagggucuuggcgccaucaccc

SEQ ID NO: 430112 - RNA, 22 nt, Human
uucucucaguuaaacuuuguga

SEQ ID NO: 430113 - RNA, 20 nt, Human
uuugauugccccucugacuu

SEQ ID NO: 430114 - RNA, 22 nt, Human
uguguggcaagcuguaugcuag

SEQ ID NO: 430115 - RNA, 22 nt, Human
uagcccauggacuggucagcug

SEQ ID NO: 430116 - RNA, 22 nt, Human
ugcgccugcgcaaagguuucug

SEQ ID NO: 430117 - RNA, 22 nt, Human
cuuauuggucccaggaggagaa

SEQ ID NO: 430118 - RNA, 22 nt, Human
ggcagaggaagcuggaaguggg

SEQ ID NO: 430119 - RNA, 22 nt, Human
aagcccgguugggaacguggug

SEQ ID NO: 430120 - RNA, 22 nt, Human
caggcucgguccaguggcaccc

SEQ ID NO: 430121 - RNA, 22 nt, Human
ccagcagcucccucaggguccg

SEQ ID NO: 430122 - RNA, 22 nt, Human
gagaaagggaacuuacagagug

SEQ ID NO: 430123 - RNA, 22 nt, Human
gagaugggcgagaagguggacu

SEQ ID NO: 430124 - RNA, 22 nt, Human
gcagcugcgcugguguggggca

SEQ ID NO: 430125 - RNA, 22 nt, Human
gaagaccccagagcgagguaag

SEQ ID NO: 430126 - RNA, 22 nt, Human
gugggccaguuccucacaggua

SEQ ID NO: 430127 - RNA, 22 nt, Human
guucucugccggcaccuacccg

SEQ ID NO: 430128 - RNA, 22 nt, Human
uaaaugaaaggguuuaauuuau

SEQ ID NO: 430129 - RNA, 22 nt, Human
acagccaggaauucuggagaag

SEQ ID NO: 430130 - RNA, 22 nt, Human
uggcagugugggaggaagguac

SEQ ID NO: 430131 - RNA, 22 nt, Human
ugggccagauccauggcaauaa

SEQ ID NO: 430132 - RNA, 22 nt, Human
uuuaauuauaucugggcaguua

SEQ ID NO: 430133 - RNA, 22 nt, Human
gcugcagggagcuggaaggcuc

SEQ ID NO: 430134 - RNA, 22 nt, Human
gugcgggccuggggguuucucu

SEQ ID NO: 430135 - RNA, 22 nt, Human
gggagcugaaggagccggcggg

SEQ ID NO: 430136 - RNA, 22 nt, Human
uggugcaggccaagcugcgagc

SEQ ID NO: 430137 - RNA, 22 nt, Human
ggugagaggcagugcuguggaa

SEQ ID NO: 430138 - RNA, 22 nt, Human
gaugugugugcccugggccugc

SEQ ID NO: 430139 - RNA, 22 nt, Human
ggggucugggcuuagcuggaau

SEQ ID NO: 430140 - RNA, 22 nt, Human
ccacuguuggcccgaagggguc

SEQ ID NO: 430141 - RNA, 22 nt, Human
ccucccugccggcuggacuagu

SEQ ID NO: 430142 - RNA, 22 nt, Human
gagugugucggucagcguggcg

SEQ ID NO: 430143 - RNA, 22 nt, Human
cauugagcgacccugcaugacu

SEQ ID NO: 430144 - RNA, 22 nt, Human
ccccagugguugcaacagcaga

SEQ ID NO: 430145 - RNA, 22 nt, Human
cucagagagacaaugugggaca

SEQ ID NO: 430146 - RNA, 22 nt, Human
gccccagcagcaaugcgguuga

SEQ ID NO: 430147 - RNA, 22 nt, Human
ugcagcugccuagggcuggcuu

SEQ ID NO: 430148 - RNA, 22 nt, Human
cagcugccuaugaccuagccuc

SEQ ID NO: 430149 - RNA, 22 nt, Human
cagcugccuguauuguccucau

SEQ ID NO: 430150 - RNA, 22 nt, Human
cgcugggcgcgcuccgaacccg

SEQ ID NO: 430151 - RNA, 22 nt, Human
gcggggacagaaggcgguucuc

SEQ ID NO: 430152 - RNA, 22 nt, Human
uuggaauuugagaccaagaaaa

SEQ ID NO: 430153 - RNA, 22 nt, Human
gggcagcaucaggaggggcuuu

SEQ ID NO: 430154 - RNA, 22 nt, Human
cccguguggaugcgcuggugcu

SEQ ID NO: 430155 - RNA, 23 nt, Human
uugggcaaaucacuaacgucucc

SEQ ID NO: 430156 - RNA, 22 nt, Human
gaggagagaagcuaacggugcu

SEQ ID NO: 430157 - RNA, 22 nt, Human
cuuuacuucagcaagcuuuccu

SEQ ID NO: 430158 - RNA, 22 nt, Human
guggcauuuuagaacagcugac

SEQ ID NO: 430159 - RNA, 22 nt, Human
uuauguauggauggcugaaagu

SEQ ID NO: 430160 - RNA, 21 nt, Human
uuggccgugcagaugaacagc

SEQ ID NO: 430161 - RNA, 22 nt, Human
gcuggccugcgagggcaggcug

SEQ ID NO: 430162 - RNA, 18 nt, Human
ggccucagccuggccgga

SEQ ID NO: 430163 - RNA, 21 nt, Human
uacaucaguuuucuuggcuca

SEQ ID NO: 430164 - RNA, 22 nt, Human
uuguccuuaccucaaucuggaa

SEQ ID NO: 430165 - RNA, 22 nt, Human
cgggcuccgggucuuugcaguc

SEQ ID NO: 430166 - RNA, 22 nt, Human
augcggagccccaagcuugaag

SEQ ID NO: 430167 - RNA, 23 nt, Human
cuguggaucuagagggggcccua

SEQ ID NO: 430168 - RNA, 22 nt, Human
aguggcuguuccaggugaggac

SEQ ID NO: 430169 - RNA, 22 nt, Human
ccaggcuccccaggaggcccuu

SEQ ID NO: 430170 - RNA, 19 nt, Human
uggcagcauugguaccuug

SEQ ID NO: 430171 - RNA, 22 nt, Human
gcgguauuugugugggugucga

SEQ ID NO: 430172 - RNA, 22 nt, Human
ggcgcaguugagcgugcuguuc

SEQ ID NO: 430173 - RNA, 22 nt, Human
cggucaggugcagcguuggcac

SEQ ID NO: 430174 - RNA, 22 nt, Human
uugaggucuggcaguagcguug

SEQ ID NO: 430175 - RNA, 22 nt, Human
ccauggccugaaggagugcauc

SEQ ID NO: 430176 - RNA, 22 nt, Human
uggcagccugcgugaaggagcu

SEQ ID NO: 430177 - RNA, 22 nt, Human
acaggcgcacaugagggccgug

SEQ ID NO: 430178 - RNA, 18 nt, Human
gguccugggccuggcuca

SEQ ID NO: 430179 - RNA, 22 nt, Human
aguggcaguagaugagcugguu

SEQ ID NO: 430180 - RNA, 22 nt, Human
gccuuuuaaggcagagggagau

SEQ ID NO: 430181 - RNA, 22 nt, Human
gcuggccugaccugaggcuggg

SEQ ID NO: 430182 - RNA, 22 nt, Human
uuggcgcccaggacgccgccgc

SEQ ID NO: 430183 - RNA, 22 nt, Human
cauugcaacuucaaacuccugg

SEQ ID NO: 430184 - RNA, 22 nt, Human
agacacauuuucagcucugcca

SEQ ID NO: 430185 - RNA, 22 nt, Human
agccagggacgcugcaggcuac

SEQ ID NO: 430186 - RNA, 22 nt, Human
cacagagagcuacgugcagcgu

SEQ ID NO: 430187 - RNA, 22 nt, Human
uggcuccacaggccagggugug

SEQ ID NO: 430188 - RNA, 22 nt, Human
ugaacaggugccuucagggagu

SEQ ID NO: 430189 - RNA, 18 nt, Human
uggguggcuagggaguuu

SEQ ID NO: 430190 - RNA, 22 nt, Human
gcugucaggaacaugccuuggu

SEQ ID NO: 430191 - RNA, 22 nt, Human
uccaggagggggagccgugccg

SEQ ID NO: 430192 - RNA, 18 nt, Human
ggaggcucugugguuucc

SEQ ID NO: 430193 - RNA, 16 nt, Human
ggcagcagcuccgugc

SEQ ID NO: 430194 - RNA, 22 nt, Human
aagguggugaucaucuugaagg

SEQ ID NO: 430195 - RNA, 22 nt, Human
uuuucaguuccaucucugcucu

SEQ ID NO: 430196 - RNA, 22 nt, Human
agguaagguuuggaggcagugg

SEQ ID NO: 430197 - RNA, 22 nt, Human
gccacaggucggcuagaggguc

SEQ ID NO: 430198 - RNA, 21 nt, Human
ucgaccugcugggcucgggcu

SEQ ID NO: 430199 - RNA, 22 nt, Human
gucaggggccaugggccaagga

SEQ ID NO: 430200 - RNA, 22 nt, Human
gcccagcgagcagagguggacg

SEQ ID NO: 430201 - RNA, 22 nt, Human
cuuccucuguggccagagugua

SEQ ID NO: 430202 - RNA, 22 nt, Human
cuguggguggcugugccccagg

SEQ ID NO: 430203 - RNA, 22 nt, Human
gcccuguuuucuggguuccuug

SEQ ID NO: 430204 - RNA, 22 nt, Human
uuugcuggagaugagcgugggu

SEQ ID NO: 430205 - RNA, 22 nt, Human
gggucugcuccaccugcagccc

SEQ ID NO: 430206 - RNA, 22 nt, Human
cugcaucaguggauaugauggu

SEQ ID NO: 430207 - RNA, 22 nt, Human
gcugugcagaggugagaaucca

SEQ ID NO: 430208 - RNA, 22 nt, Human
uggggugugcucagagcagggg

SEQ ID NO: 430209 - RNA, 20 nt, Human
gcugugccaugacccucgag

SEQ ID NO: 430210 - RNA, 22 nt, Human
gggggcgccgccgcucaucuca

SEQ ID NO: 430211 - RNA, 22 nt, Human
uggcucaucuuuuuagacuuau

SEQ ID NO: 430212 - RNA, 22 nt, Human
agcaccagcucaaggugcaccu

SEQ ID NO: 430213 - RNA, 22 nt, Human
uuuuuggguccaggcuguaucu

SEQ ID NO: 430214 - RNA, 22 nt, Human
agaagugaguugugacuauggg

SEQ ID NO: 430215 - RNA, 22 nt, Human
uugcaaauaauagccugaaacu

SEQ ID NO: 430216 - RNA, 22 nt, Human
gcccagcccagaaagguucgga

SEQ ID NO: 430217 - RNA, 19 nt, Human
ggggcccggggucugcgag

SEQ ID NO: 430218 - RNA, 20 nt, Human
aggcccuccccacuguugcu

SEQ ID NO: 430219 - RNA, 22 nt, Human
agcuccugaaaauccagacugg

SEQ ID NO: 430220 - RNA, 22 nt, Human
gggaggaaggcuugggugagua

SEQ ID NO: 430221 - RNA, 20 nt, Human
ucucccugcccaucucagau

SEQ ID NO: 430222 - RNA, 22 nt, Human
aagaggaggacgguucccagaa

SEQ ID NO: 430223 - RNA, 22 nt, Human
guggggacgggauggcucacug

SEQ ID NO: 430224 - RNA, 22 nt, Human
ccugguccccaucggcccagcg

SEQ ID NO: 430225 - RNA, 22 nt, Human
ugcagguggcagcggggcacca

SEQ ID NO: 430226 - RNA, 22 nt, Human
cuggagaggcugggaacagguu

SEQ ID NO: 430227 - RNA, 22 nt, Human
gagucgagcagaaagccgucgg

SEQ ID NO: 430228 - RNA, 21 nt, Human
gcuguucggcggcccucgcgc

SEQ ID NO: 430229 - RNA, 22 nt, Human
aggguccugggugcaguugcuu

SEQ ID NO: 430230 - RNA, 22 nt, Human
aucauuaacccuugaugcuggg

SEQ ID NO: 430231 - RNA, 22 nt, Human
ucagguccaagauggccaucca

SEQ ID NO: 430232 - RNA, 22 nt, Human
accaggcccuccagcugcgugg

SEQ ID NO: 430233 - RNA, 22 nt, Human
aggagccgggccugggcccugc

SEQ ID NO: 430234 - RNA, 22 nt, Human
cagggacugagauccagacugu

SEQ ID NO: 430235 - RNA, 22 nt, Human
gcgcugccucugcucuccccac

SEQ ID NO: 430236 - RNA, 22 nt, Human
gugcaugucuuuggaggccucc

SEQ ID NO: 430237 - RNA, 22 nt, Human
gugcugauugggagcugggauu

SEQ ID NO: 430238 - RNA, 22 nt, Human
gcagaggggaagcugaggaauu

SEQ ID NO: 430239 - RNA, 22 nt, Human
cucuggaucugcccugacgcca

SEQ ID NO: 430240 - RNA, 22 nt, Human
uccguggggccuguggcuuccg

SEQ ID NO: 430241 - RNA, 22 nt, Human
ccuuaauuucuguccuucagau

SEQ ID NO: 430242 - RNA, 22 nt, Human
cacauuuaaagguugaagcuga

SEQ ID NO: 430243 - RNA, 22 nt, Human
cuggccgcaguguggaguugug

SEQ ID NO: 430244 - RNA, 22 nt, Human
gccaggaccucagaugcagggc

SEQ ID NO: 430245 - RNA, 22 nt, Human
gcuagcaaaugucauuuggaag

SEQ ID NO: 430246 - RNA, 22 nt, Human
gggcccuggacguggcggcaga

SEQ ID NO: 430247 - RNA, 22 nt, Human
gagccaggcccguacuugcugu

SEQ ID NO: 430248 - RNA, 22 nt, Human
gaugggcaucaaacaugacgug

SEQ ID NO: 430249 - RNA, 22 nt, Human
ccaccgaaacgucugcggaucc

SEQ ID NO: 430250 - RNA, 21 nt, Human
agccaggcaagcacccccacu

SEQ ID NO: 430251 - RNA, 22 nt, Human
ccuuuuauauggcucaucacag

SEQ ID NO: 430252 - RNA, 22 nt, Human
gcugucucauacaaggcccugc

SEQ ID NO: 430253 - RNA, 22 nt, Human
gcugggucucucccugguccug

SEQ ID NO: 430254 - RNA, 22 nt, Human
auggucacuucacccaugagcu

SEQ ID NO: 430255 - RNA, 22 nt, Human
uucuguaauucuguuaguuuca

SEQ ID NO: 430256 - RNA, 22 nt, Human
uccagaugcugcacauuccuga

SEQ ID NO: 430257 - RNA, 22 nt, Human
uuuucuuggaguggcuguccuu

SEQ ID NO: 430258 - RNA, 22 nt, Human
gggcuaagcagagugggaacag

SEQ ID NO: 430259 - RNA, 22 nt, Human
agggcucacuacaacccuggga

SEQ ID NO: 430260 - RNA, 19 nt, Human
auucuucucuuccugcugu

SEQ ID NO: 430261 - RNA, 22 nt, Human
ggauguggaccuugccugguga

SEQ ID NO: 430262 - RNA, 22 nt, Human
uugagcugccuggcuguggcuc

SEQ ID NO: 430263 - RNA, 22 nt, Human
ugcgcaugcguggcucuccggc

SEQ ID NO: 430264 - RNA, 22 nt, Human
cgucaggguugagcagguagau

SEQ ID NO: 430265 - RNA, 22 nt, Human
ucugggaguuucugugggagcu

SEQ ID NO: 430266 - RNA, 22 nt, Human
uuagccaugcccuagaagagga

SEQ ID NO: 430267 - RNA, 19 nt, Human
ucuugaggaaaguaaggca

SEQ ID NO: 430268 - RNA, 22 nt, Human
gaaggaagcugucuggaugugu

SEQ ID NO: 430269 - RNA, 20 nt, Human
aggaaggagaaucugagcaa

SEQ ID NO: 430270 - RNA, 22 nt, Human
cuggaagcgucggaggaagggc

SEQ ID NO: 430271 - RNA, 22 nt, Human
ucaggggcuugaggugcauguc

SEQ ID NO: 430272 - RNA, 22 nt, Human
uggucaggcugcucugcggcgu

SEQ ID NO: 430273 - RNA, 21 nt, Human
cccgugccuucagcaguccug

SEQ ID NO: 430274 - RNA, 22 nt, Human
ucuugccgcgcaggcgcaguuc

SEQ ID NO: 430275 - RNA, 22 nt, Human
gggaccuggacaugugugugcu

SEQ ID NO: 430276 - RNA, 19 nt, Human
aacuacagcgcacuguccu

SEQ ID NO: 430277 - RNA, 22 nt, Human
gccacaggaaagcacccuggag

SEQ ID NO: 430278 - RNA, 22 nt, Human
cagcccaggacugcagguguuu

SEQ ID NO: 430279 - RNA, 22 nt, Human
uagggggcuuugcugcuugaca

SEQ ID NO: 430280 - RNA, 19 nt, Human
gggugaggaagagcguugc

SEQ ID NO: 430281 - RNA, 22 nt, Human
uaucuguuuuuacagugucuuu

SEQ ID NO: 430282 - RNA, 22 nt, Human
ggucuggccuccgggcaggugg

SEQ ID NO: 430283 - RNA, 22 nt, Human
cggagaggugggggcagcaucu

SEQ ID NO: 430284 - RNA, 22 nt, Human
cuggcagcucugagucccuucu

SEQ ID NO: 430285 - RNA, 22 nt, Human
cccuguccugcuaggcccuggu

SEQ ID NO: 430286 - RNA, 22 nt, Human
gggccuuggcgaaguguggugg

SEQ ID NO: 430287 - RNA, 22 nt, Human
uggcugagcugcagcguggcuu

SEQ ID NO: 430288 - RNA, 22 nt, Human
ggugggugagcccugggagcug

SEQ ID NO: 430289 - RNA, 18 nt, Human
uccaccgcgugcaccucu

SEQ ID NO: 430290 - RNA, 22 nt, Human
aguccggggucuggacaccugg

SEQ ID NO: 430291 - RNA, 22 nt, Human
gagagaagggggauaugagccu

SEQ ID NO: 430292 - RNA, 22 nt, Human
gccagcuggcugcaggucccag

SEQ ID NO: 430293 - RNA, 22 nt, Human
ugccuggcugggcugcucaugg

SEQ ID NO: 430294 - RNA, 22 nt, Human
ggguggaaaguauuuggggacc

SEQ ID NO: 430295 - RNA, 22 nt, Human
uccuuggcaugccgucuucucc

SEQ ID NO: 430296 - RNA, 22 nt, Human
ugggccaggauuucaagacccu

SEQ ID NO: 430297 - RNA, 22 nt, Human
ggacuggucugagagggauuca

SEQ ID NO: 430298 - RNA, 22 nt, Human
ccugugggagggagcggcugga

SEQ ID NO: 430299 - RNA, 22 nt, Human
guugugcaaacacuggggucug

SEQ ID NO: 430300 - RNA, 22 nt, Human
gccggggcuggggagagacaug

SEQ ID NO: 430301 - RNA, 22 nt, Human
caggcacaaugagcgccaucuu

SEQ ID NO: 430302 - RNA, 19 nt, Human
ugguggaggugcaccugac

SEQ ID NO: 430303 - RNA, 22 nt, Human
ugaggauggaaugcugugcaag

SEQ ID NO: 430304 - RNA, 16 nt, Human
aggcucagaggcugga

SEQ ID NO: 430305 - RNA, 22 nt, Human
gcacugccugugagcccugguu

SEQ ID NO: 430306 - RNA, 22 nt, Human
acuugguggcgaacgaggguca

SEQ ID NO: 430307 - RNA, 22 nt, Human
guggcccaggcuuggcgcuggc

SEQ ID NO: 430308 - RNA, 22 nt, Human
ccuggggaccugccucagcccu

SEQ ID NO: 430309 - RNA, 21 nt, Human
cugugauguugccgggguagg

SEQ ID NO: 430310 - RNA, 22 nt, Human
uugggacagcaacgguucuguu

SEQ ID NO: 430311 - RNA, 22 nt, Human
gagccucguggcggccacugcg

SEQ ID NO: 430312 - RNA, 22 nt, Human
cagguuccaguugcagggacuu

SEQ ID NO: 430313 - RNA, 22 nt, Human
agguggucuuguggaugccgca

SEQ ID NO: 430314 - RNA, 21 nt, Human
ggucaggcaugugcccugagc

SEQ ID NO: 430315 - RNA, 22 nt, Human
ggcucacgcaauuaucccggcc

SEQ ID NO: 430316 - RNA, 22 nt, Human
gggcuuggcuggggccaccaga

SEQ ID NO: 430317 - RNA, 22 nt, Human
ccaggcccugcuccucacacca

SEQ ID NO: 430318 - RNA, 22 nt, Human
cugagggagcugcuggccuugg

SEQ ID NO: 430319 - RNA, 22 nt, Human
agcucagggccaggcgcguuuc

SEQ ID NO: 430320 - RNA, 22 nt, Human
agucuggagugauuauguggga

SEQ ID NO: 430321 - RNA, 22 nt, Human
acaaaugcuuaguucaccaaaa

SEQ ID NO: 430322 - RNA, 22 nt, Human
aguuggcuucaaaggcagagag

SEQ ID NO: 430323 - RNA, 19 nt, Human
ggauaagguuggagugauc

SEQ ID NO: 430324 - RNA, 22 nt, Human
auggagcagcagaaggggcuug

SEQ ID NO: 430325 - RNA, 22 nt, Human
accaggaguuuugaccaggggc

SEQ ID NO: 430326 - RNA, 22 nt, Human
cugcaccgugucucgggcugcc

SEQ ID NO: 430327 - RNA, 22 nt, Human
uccaggcuccccugcgugcucc

SEQ ID NO: 430328 - RNA, 22 nt, Human
ggagguggagcuggaaguucca

SEQ ID NO: 430329 - RNA, 22 nt, Human
uuugacaacugugcaguuugua

SEQ ID NO: 430330 - RNA, 22 nt, Human
aagccagguguuuaggccagcg

SEQ ID NO: 430331 - RNA, 22 nt, Human
gugcuaaugaauuggagugccu

SEQ ID NO: 430332 - RNA, 22 nt, Human
cagcuccccucuguggggcagu

SEQ ID NO: 430333 - RNA, 22 nt, Human
gcugguggcagagcuccgcggc

SEQ ID NO: 430334 - RNA, 22 nt, Human
uuccaggacuggguguuugaag

SEQ ID NO: 430335 - RNA, 22 nt, Human
acuucccacugcagugacugag

SEQ ID NO: 430336 - RNA, 22 nt, Human
gcccaguggcaucuucacugcu

SEQ ID NO: 430337 - RNA, 22 nt, Human
gagcugcuggccuccugcggga

SEQ ID NO: 430338 - RNA, 22 nt, Human
caacccaagguuaguuggucuu

SEQ ID NO: 430339 - RNA, 22 nt, Human
auccgggguucauuuucacuga

SEQ ID NO: 430340 - RNA, 22 nt, Human
aggcaguugaguggcuuuuuca

SEQ ID NO: 430341 - RNA, 22 nt, Human
ucggggauggugucugagggag

SEQ ID NO: 430342 - RNA, 22 nt, Human
ugucuuacagcaaucuguucug

SEQ ID NO: 430343 - RNA, 22 nt, Human
cagggagccccaauuccaugcc

SEQ ID NO: 430344 - RNA, 20 nt, Human
gccaagaauaugcccgacuc

SEQ ID NO: 430345 - RNA, 22 nt, Human
uuuauucucuaguuggucagau

SEQ ID NO: 430346 - RNA, 22 nt, Human
guguggucgaaguucucccgga

SEQ ID NO: 430347 - RNA, 22 nt, Human
gcggggccauguccaacggccu

SEQ ID NO: 430348 - RNA, 22 nt, Human
gaagcgugcagguccguauacu

SEQ ID NO: 430349 - RNA, 22 nt, Human
uggugcagacaggagccccgcu

SEQ ID NO: 430350 - RNA, 22 nt, Human
gggaugagagcugggacagaag

SEQ ID NO: 430351 - RNA, 22 nt, Human
uggcugaggcuuuucuuaaaga

SEQ ID NO: 430352 - RNA, 22 nt, Human
aaaccggguccagaucuucagg

SEQ ID NO: 430353 - RNA, 22 nt, Human
uucccagauuggagggcagggg

SEQ ID NO: 430354 - RNA, 23 nt, Human
uccugcagauaagcugguugaca

SEQ ID NO: 430355 - RNA, 22 nt, Human
ggccccagggauuaggccaacc

SEQ ID NO: 430356 - RNA, 22 nt, Human
ggagacagugacuuagagacug

SEQ ID NO: 430357 - RNA, 19 nt, Human
uccugcccaccagccaggg

SEQ ID NO: 430358 - RNA, 22 nt, Human
cgcgcugcagacagcggaggcc

SEQ ID NO: 430359 - RNA, 22 nt, Human
gcucagguagaugggguugucc

SEQ ID NO: 430360 - RNA, 22 nt, Human
ccggcucggcgaccaggcugaa

SEQ ID NO: 430361 - RNA, 22 nt, Human
gccgugcgugcgcaggugcugu

SEQ ID NO: 430362 - RNA, 22 nt, Human
ucccuacuguuagggacucagc

SEQ ID NO: 430363 - RNA, 18 nt, Human
ggaaggugcuggagugca

SEQ ID NO: 430364 - RNA, 22 nt, Human
ccagugugcauuaucauguguc

SEQ ID NO: 430365 - RNA, 22 nt, Human
aggaagccuggaguccugccca

SEQ ID NO: 430366 - RNA, 22 nt, Human
ccaggagagcucucguucagug

SEQ ID NO: 430367 - RNA, 23 nt, Human
aaauugucguaagguggagaugu

SEQ ID NO: 430368 - RNA, 21 nt, Human
auacaagaagauggcagucug

SEQ ID NO: 430369 - RNA, 22 nt, Human
gaggcuguaacuugggcacugg

SEQ ID NO: 430370 - RNA, 22 nt, Human
gaccugugcagugacugguggc

SEQ ID NO: 430371 - RNA, 22 nt, Human
gucuagggcuccucagugacaa

SEQ ID NO: 430372 - RNA, 22 nt, Human
agccccaguucccuggaagucu

SEQ ID NO: 430373 - RNA, 20 nt, Human
guccugggagccacagcaca

SEQ ID NO: 430374 - RNA, 22 nt, Human
ucccagucuagagccggauugg

SEQ ID NO: 430375 - RNA, 22 nt, Human
caugugguauugugagauccac

SEQ ID NO: 430376 - RNA, 22 nt, Human
ugcuugucacccugccugagug

SEQ ID NO: 430377 - RNA, 22 nt, Human
ugguggggccagacuucagcuc

SEQ ID NO: 430378 - RNA, 22 nt, Human
gcucccuggaauguuggcugcc

SEQ ID NO: 430379 - RNA, 22 nt, Human
aauguuaaguuuagauuauaac

SEQ ID NO: 430380 - RNA, 22 nt, Human
augagugcuuagagaguaaucc

SEQ ID NO: 430381 - RNA, 22 nt, Human
aacccagaaacgcaggcgguca

SEQ ID NO: 430382 - RNA, 22 nt, Human
gaggaggcuuccgggaggcacg

SEQ ID NO: 430383 - RNA, 22 nt, Human
cuuggcugaacuccaggaugca

SEQ ID NO: 430384 - RNA, 22 nt, Human
aggaaagcucccaguagggcuc

SEQ ID NO: 430385 - RNA, 22 nt, Human
ucugcacccugugguccucuag

SEQ ID NO: 430386 - RNA, 22 nt, Human
guuucuuauuucaacuggaaca

SEQ ID NO: 430387 - RNA, 22 nt, Human
gggcagcaggcuccacguuccu

SEQ ID NO: 430388 - RNA, 22 nt, Human
auggaguugagcucuguugucc

SEQ ID NO: 430389 - RNA, 23 nt, Human
gccagagcugccugcccuugcug

SEQ ID NO: 430390 - RNA, 22 nt, Human
gauggugcaggugaagugcugg

SEQ ID NO: 430391 - RNA, 22 nt, Human
uaacauuucggugacaguggga

SEQ ID NO: 430392 - RNA, 22 nt, Human
ccugcgggcugugcugaagccu

SEQ ID NO: 430393 - RNA, 19 nt, Human
agcagggagugguuguggg

SEQ ID NO: 430394 - RNA, 22 nt, Human
guauuaugaaugccgaggcggc

SEQ ID NO: 430395 - RNA, 23 nt, Human
uuguucuuggaucuuccugaagc

SEQ ID NO: 430396 - RNA, 22 nt, Human
gauauucauaggcagguauuua

SEQ ID NO: 430397 - RNA, 22 nt, Human
cugggcuccuaaccauccaggu

SEQ ID NO: 430398 - RNA, 22 nt, Human
agggcuccuaugccccauggac

SEQ ID NO: 430399 - RNA, 22 nt, Human
ccagaacagaccugccugaccu

SEQ ID NO: 430400 - RNA, 20 nt, Human
uccugggguaagccaugguc

SEQ ID NO: 430401 - RNA, 22 nt, Human
ucugcuugugucuguccagccu

SEQ ID NO: 430402 - RNA, 22 nt, Human
caugggcucuucuggacugcac

SEQ ID NO: 430403 - RNA, 22 nt, Human
guuaaaugcagauucugacuca

SEQ ID NO: 430404 - RNA, 22 nt, Human
gcaggccuccccugcuggagcu

SEQ ID NO: 430405 - RNA, 22 nt, Human
augcaguuagguaauagucuca

SEQ ID NO: 430406 - RNA, 22 nt, Human
guacuuucaggcuuucccuuaa

SEQ ID NO: 430407 - RNA, 20 nt, Human
aggggcaccugcgacggggc

SEQ ID NO: 430408 - RNA, 22 nt, Human
caggcuguguuccuggaacccc

SEQ ID NO: 430409 - RNA, 20 nt, Human
uccagccacuuccgcugguc

SEQ ID NO: 430410 - RNA, 22 nt, Human
gcugggagucgcgucuguggcc

SEQ ID NO: 430411 - RNA, 23 nt, Human
ggucccaguggagaggccucacc

SEQ ID NO: 430412 - RNA, 22 nt, Human
ggugggucuuguggggcagcuu

SEQ ID NO: 430413 - RNA, 22 nt, Human
cugcgggcugucaggcgugcca

SEQ ID NO: 430414 - RNA, 21 nt, Human
ugggcucuuuaacccaggcac

SEQ ID NO: 430415 - RNA, 22 nt, Human
uggaagguguggcaggucuagu

SEQ ID NO: 430416 - RNA, 22 nt, Human
guggcauugccuucugcaggaa

SEQ ID NO: 430417 - RNA, 22 nt, Human
agcuccacucccugccuguuuc

SEQ ID NO: 430418 - RNA, 22 nt, Human
uccacagggaugccugcggcuu

SEQ ID NO: 430419 - RNA, 22 nt, Human
cccacaggcaggugcaugggcu

SEQ ID NO: 430420 - RNA, 22 nt, Human
auagucuuagaaucuugagugu

SEQ ID NO: 430421 - RNA, 22 nt, Human
ucaguguccuucguucuuguug

SEQ ID NO: 430422 - RNA, 22 nt, Human
gggcagagguucaacuucaaca

SEQ ID NO: 430423 - RNA, 22 nt, Human
cagggcacaguuauggaggugg

SEQ ID NO: 430424 - RNA, 22 nt, Human
agugcguggaccccuggcugcu

SEQ ID NO: 430425 - RNA, 22 nt, Human
ucagauggucauucacuagggu

SEQ ID NO: 430426 - RNA, 22 nt, Human
aggccugggacgggagccguga

SEQ ID NO: 430427 - RNA, 22 nt, Human
caguuaaacagauugaguguua

SEQ ID NO: 430428 - RNA, 22 nt, Human
ccaggagcccugccacaauggu

SEQ ID NO: 430429 - RNA, 22 nt, Human
caggcacaagaucggcuagaua

SEQ ID NO: 430430 - RNA, 19 nt, Human
augggaagcggccagcgga

SEQ ID NO: 430431 - RNA, 22 nt, Human
uuauuuaaaagugguaagauuc

SEQ ID NO: 430432 - RNA, 22 nt, Human
ccagagaggccuuggcaagaca

SEQ ID NO: 430433 - RNA, 22 nt, Human
gcuguggcuccaauggugagcc

SEQ ID NO: 430434 - RNA, 22 nt, Human
acccagcucuuugauggucuug

SEQ ID NO: 430435 - RNA, 22 nt, Human
gcuuuuauuucuucacaaaagu

SEQ ID NO: 430436 - RNA, 22 nt, Human
gaaaggcucagauucccccagg

SEQ ID NO: 430437 - RNA, 22 nt, Human
aaguuauugguggagagcacug

SEQ ID NO: 430438 - RNA, 22 nt, Human
aaccccgcucaggcugggugag

SEQ ID NO: 430439 - RNA, 22 nt, Human
uuccaggccgggcaggaaacac

SEQ ID NO: 430440 - RNA, 22 nt, Human
ggccucugccccgcggggcucg

SEQ ID NO: 430441 - RNA, 22 nt, Human
cgcugccuucaucccacgccua

SEQ ID NO: 430442 - RNA, 22 nt, Human
gugauuuucuccuccuagaagu

SEQ ID NO: 430443 - RNA, 22 nt, Human
aaggggaguuagugauaaaacc

SEQ ID NO: 430444 - RNA, 22 nt, Human
ucccgggcaggucgagcgagcc

SEQ ID NO: 430445 - RNA, 22 nt, Human
gacaaagcgccugcucgcgggc

SEQ ID NO: 430446 - RNA, 22 nt, Human
ggcgaggugucugccaucaagc

SEQ ID NO: 430447 - RNA, 22 nt, Human
uuugggaaacuuaggggucaga

SEQ ID NO: 430448 - RNA, 22 nt, Human
uccaagaagcuuacaaucuaau

SEQ ID NO: 430449 - RNA, 22 nt, Human
augccaggcuguuuggccucag

SEQ ID NO: 430450 - RNA, 23 nt, Human
agacagaggcugaggcuggccgc

SEQ ID NO: 430451 - RNA, 22 nt, Human
agcugggugcccgaagccacgu

SEQ ID NO: 430452 - RNA, 22 nt, Human
agauguuuauaacucaugagug

SEQ ID NO: 430453 - RNA, 22 nt, Human
ggacauggaaguauggagugga

SEQ ID NO: 430454 - RNA, 22 nt, Human
agcccgcaucucgcuaaagaua

SEQ ID NO: 430455 - RNA, 22 nt, Human
agagacuguaaugagagguaca

SEQ ID NO: 430456 - RNA, 19 nt, Human
ggguccauggugucaagga

SEQ ID NO: 430457 - RNA, 22 nt, Human
accgugucugacacuuugggcg

SEQ ID NO: 430458 - RNA, 22 nt, Human
aggcucucucugccagccgugc

SEQ ID NO: 430459 - RNA, 22 nt, Human
cagggccugccugguuccugga

SEQ ID NO: 430460 - RNA, 22 nt, Human
uuuugguaauuaaguagauauu

SEQ ID NO: 430461 - RNA, 22 nt, Human
ggagaugccuuguuucaggaac

SEQ ID NO: 430462 - RNA, 22 nt, Human
acagacacaggcguggagucgc

SEQ ID NO: 430463 - RNA, 17 nt, Human
gcaggcacugcugccug

SEQ ID NO: 430464 - RNA, 21 nt, Human
ccuggagacaaagacagggug

SEQ ID NO: 430465 - RNA, 22 nt, Human
cccccagcucugcugggucccg

SEQ ID NO: 430466 - RNA, 21 nt, Human
gccugggaagagaaagguaag

SEQ ID NO: 430467 - RNA, 22 nt, Human
ggacugucuccuugcugguagg

SEQ ID NO: 430468 - RNA, 22 nt, Human
gacaguggagccacguugggag

SEQ ID NO: 430469 - RNA, 22 nt, Human
cuuguuuucuucugcagucuau

SEQ ID NO: 430470 - RNA, 22 nt, Human
cgccccagccaguugagcggcg

SEQ ID NO: 430471 - RNA, 22 nt, Human
ugcuggccucggcgcugggccu

SEQ ID NO: 430472 - RNA, 22 nt, Human
ggggcuuccagcgcccgccggu

SEQ ID NO: 430473 - RNA, 22 nt, Human
ugugcugcucucagugacagcc

SEQ ID NO: 430474 - RNA, 17 nt, Human
gcccgugggcuacggua

SEQ ID NO: 430475 - RNA, 22 nt, Human
cagcuggcgacucuccucgaug

SEQ ID NO: 430476 - RNA, 22 nt, Human
ugcuuguauucauaucacagcu

SEQ ID NO: 430477 - RNA, 22 nt, Human
ugggucagauugagccccuggu

SEQ ID NO: 430478 - RNA, 22 nt, Human herpesvirus 1
cuccccugcggcguugcgacau

SEQ ID NO: 430479 - RNA, 22 nt, Human herpesvirus 1
ccucgagacggccgccagcgcu

SEQ ID NO: 430480 - RNA, 22 nt, Human herpesvirus 1
cgucccccgacgaccucuugca

SEQ ID NO: 430481 - RNA, 22 nt, Human herpesvirus 1
gcagccuucgcucuccauccug

SEQ ID NO: 430482 - RNA, 22 nt, Human herpesvirus 1
gccagggucgcgcggcccgaaa

SEQ ID NO: 430483 - RNA, 22 nt, Human herpesvirus 1
accccaggcgugccgggggaac

SEQ ID NO: 430484 - RNA, 22 nt, Human herpesvirus 1
ccauguccuuuugucaaucggu

SEQ ID NO: 430485 - RNA, 22 nt, Human herpesvirus 1
ccggagagcggcuuggugcgga

SEQ ID NO: 430486 - RNA, 22 nt, Human herpesvirus 1
gguguuuacgaacgaguuugac

SEQ ID NO: 430487 - RNA, 22 nt, Human herpesvirus 1
uccccugugguguuuuugguua

SEQ ID NO: 430488 - RNA, 22 nt, Human herpesvirus 1
ucgggggugccgacgcaggcgu

SEQ ID NO: 430489 - RNA, 22 nt, Human herpesvirus 1
gagugccagcccugggaccgaa

SEQ ID NO: 430490 - RNA, 22 nt, Human herpesvirus 1
ggcagggcguuguucuggucaa

SEQ ID NO: 430491 - RNA, 22 nt, Human herpesvirus 1
ggagcugugccgccagacacgc

SEQ ID NO: 430492 - RNA, 22 nt, Human herpesvirus 1
ggcugguucgcagcgaggugca

SEQ ID NO: 430493 - RNA, 22 nt, Human herpesvirus 1
gggcccggaacgggaggccaca

SEQ ID NO: 430494 - RNA, 17 nt, Human herpesvirus 1
gggggaagcgagauagg

SEQ ID NO: 430495 - RNA, 22 nt, Human herpesvirus 1
guccuuuggaucccgaccccuc

SEQ ID NO: 430496 - RNA, 22 nt, Human herpesvirus 1
gucucggggucagccucgagcu

SEQ ID NO: 430497 - RNA, 23 nt, Human herpesvirus 1
guggaccugggaccgcgccgccc

SEQ ID NO: 430498 - RNA, 21 nt, Human herpesvirus 1
uuuauaauagcggccacgccc

SEQ ID NO: 430499 - RNA, 22 nt, Human herpesvirus 1
uggguuccgggagcaggcgugg

SEQ ID NO: 430500 - RNA, 22 nt, Human herpesvirus 1
uggucccgacgccaacccaggc

SEQ ID NO: 430501 - RNA, 22 nt, Human herpesvirus 1
ucugucucgccaggggcuggcc

SEQ ID NO: 430502 - RNA, 16 nt, Human herpesvirus 1
gcuuggaggccggaug

SEQ ID NO: 430503 - RNA, 20 nt, Human herpesvirus 1
uagggcgaagugcgagcacu

SEQ ID NO: 430504 - RNA, 22 nt, Human herpesvirus 1
uacugggcguggugauggacga

SEQ ID NO: 430505 - RNA, 22 nt, Human herpesvirus 1
ggcccagacgccguacccggug

SEQ ID NO: 430506 - RNA, 22 nt, Human herpesvirus 1
ggcccgguuggcggcgacgcuu

SEQ ID NO: 430507 - RNA, 22 nt, Human herpesvirus 1
ggccggggcccgcgcgcugaug

SEQ ID NO: 430508 - RNA, 22 nt, Human herpesvirus 1
ggccuuguuugucuggcggauc

SEQ ID NO: 430509 - RNA, 22 nt, Human herpesvirus 1
ggcgcgacacgaacaccgggcg

SEQ ID NO: 430510 - RNA, 22 nt, Human herpesvirus 1
gggagugagggucgcgucgucu

SEQ ID NO: 430511 - RNA, 22 nt, Human herpesvirus 1
gggcucgaggucgcucgguggg

SEQ ID NO: 430512 - RNA, 22 nt, Human herpesvirus 1
ccggccuggccgcccugugucu

SEQ ID NO: 430513 - RNA, 22 nt, Human herpesvirus 1
cggugcagcggacuggcaccga

SEQ ID NO: 430514 - RNA, 22 nt, Human herpesvirus 1
agugcucgcacuucgcccuaau

SEQ ID NO: 430515 - RNA, 22 nt, Human herpesvirus 1
gugugcacggaugagaucgcgc

SEQ ID NO: 430516 - RNA, 22 nt, Human herpesvirus 1
gcagguugucguugccgcgggu

SEQ ID NO: 430517 - RNA, 22 nt, Human herpesvirus 1
ggacggccuggacguugcgagc

SEQ ID NO: 430518 - RNA, 22 nt, Human herpesvirus 1
gagcuuguuuucgugggggacg

SEQ ID NO: 430519 - RNA, 22 nt, Human herpesvirus 1
gcaggccgugugcaggcccugc

SEQ ID NO: 430520 - RNA, 20 nt, Human herpesvirus 1
uguggugccgccugugauac

SEQ ID NO: 430521 - RNA, 22 nt, Human herpesvirus 1
ccaacccuggguggucgcggaa

SEQ ID NO: 430522 - RNA, 22 nt, Human herpesvirus 1
cagucgcacucgucccuggcuc

SEQ ID NO: 430523 - RNA, 22 nt, Human herpesvirus 1
ccgggcaugaaaacgaccucca

SEQ ID NO: 430524 - RNA, 22 nt, Human herpesvirus 1
ccuuggccgccccggcugcagg

SEQ ID NO: 430525 - RNA, 23 nt, Human herpesvirus 1
cggccggccgccauggcguagcc

SEQ ID NO: 430526 - RNA, 22 nt, Human herpesvirus 1
cggggugaaugagcugggcggc

SEQ ID NO: 430527 - RNA, 22 nt, Human herpesvirus 1
gaaaggggucugcaaccaaagg

SEQ ID NO: 430528 - RNA, 22 nt, Human herpesvirus 1
cucgcugcgaaccagcccgggu

SEQ ID NO: 430529 - RNA, 22 nt, Human herpesvirus 1
ggucccggcgcuggcgguaagu

SEQ ID NO: 430530 - RNA, 22 nt, Human herpesvirus 1
uuggugccgguggggcguaccg

SEQ ID NO: 430531 - RNA, 22 nt, Human herpesvirus 1
gggcguggccgcuauuauaaaa

SEQ ID NO: 430532 - RNA, 22 nt, Human herpesvirus 1
ggggggugcucugauagucucg

SEQ ID NO: 430533 - RNA, 22 nt, Human herpesvirus 1
gugggggaguuugagacggccg

SEQ ID NO: 430534 - RNA, 22 nt, Human herpesvirus 1
uagcauaucacauaccccguuc

SEQ ID NO: 430535 - RNA, 22 nt, Human herpesvirus 1
uagggcgaagugcgagcacugg

SEQ ID NO: 430536 - RNA, 22 nt, Human herpesvirus 1
ugcccgggacccacguggcggc

SEQ ID NO: 430537 - RNA, 22 nt, Human herpesvirus 1
gcgccacggccuccgcguucuc

SEQ ID NO: 430538 - RNA, 22 nt, Human herpesvirus 1
uggacaggcucuggagcauccg

SEQ ID NO: 430539 - RNA, 22 nt, Human herpesvirus 1
uggguuuggcgcgcguaugcgu

SEQ ID NO: 430540 - RNA, 22 nt, Human herpesvirus 1
ugaauaucucguugcgauucac

SEQ ID NO: 430541 - RNA, 22 nt, Human herpesvirus 1
ggcccccguucgccgccugggu

SEQ ID NO: 430542 - RNA, 22 nt, Human herpesvirus 1
ggcucguguuguuuuccgagua

SEQ ID NO: 430543 - RNA, 22 nt, Human herpesvirus 1
gggcccagcgcgaucuacggga

SEQ ID NO: 430544 - RNA, 22 nt, Human herpesvirus 1
agaacagcgucacccgauuacu

SEQ ID NO: 430545 - RNA, 18 nt, Human herpesvirus 1
acgggcugucauuccucg

SEQ ID NO: 430546 - RNA, 22 nt, Human herpesvirus 1
agcugcucgagucccugccugu

SEQ ID NO: 430547 - RNA, 22 nt, Human herpesvirus 1
aaaggggucugcaaccaaaggu

SEQ ID NO: 430548 - RNA, 22 nt, Human herpesvirus 1
aagaagcucacauaguccccac

SEQ ID NO: 430549 - RNA, 22 nt, Human herpesvirus 1
agccccacgcagggucugcgag

SEQ ID NO: 430550 - RNA, 22 nt, Human herpesvirus 1
accugcagcaaacggcaccacg

SEQ ID NO: 430551 - RNA, 22 nt, Human herpesvirus 1
cagaggggcgagguccguuucg

SEQ ID NO: 430552 - RNA, 22 nt, Human herpesvirus 1
auaauuuuauuggugggucguu

SEQ ID NO: 430553 - RNA, 22 nt, Human herpesvirus 1
caucaacaggaggucagugucc

SEQ ID NO: 430554 - RNA, 22 nt, Human herpesvirus 1
ccacgggccgcagcggcaccgu

SEQ ID NO: 430555 - RNA, 22 nt, Human herpesvirus 1
caugcucacgcugcaggugcug

SEQ ID NO: 430556 - RNA, 22 nt, Human herpesvirus 1
cuggcgucggcgcguguggguc

SEQ ID NO: 430557 - RNA, 22 nt, Human herpesvirus 1
gaguuugacaggcaagcaugug

SEQ ID NO: 430558 - RNA, 22 nt, Human herpesvirus 1
acccaggcggcgaacgggggcc

SEQ ID NO: 430559 - RNA, 22 nt, Human herpesvirus 1
agaaccuccccggguugcucgu

SEQ ID NO: 430560 - RNA, 22 nt, Human herpesvirus 1
agaugggcugcgcugggcgcca

SEQ ID NO: 430561 - RNA, 22 nt, Human herpesvirus 1
agcgcuggcggccgucucgagg

SEQ ID NO: 430562 - RNA, 22 nt, Human herpesvirus 1
cgccggggcugcccggccguga

SEQ ID NO: 430563 - RNA, 15 nt, Human herpesvirus 1
cgccgcgcccgggcc

SEQ ID NO: 430564 - RNA, 22 nt, Human herpesvirus 1
ccuuggccgccccggcugcagg

SEQ ID NO: 430565 - RNA, 22 nt, Human herpesvirus 1
aggccccuaggucgcgacggcu

SEQ ID NO: 430566 - RNA, 22 nt, Human herpesvirus 1
cgcccccucccuguuugucgcc

SEQ ID NO: 430567 - RNA, 22 nt, Human herpesvirus 1
cgccccgacggccaggugcgug

SEQ ID NO: 430568 - RNA, 22 nt, Human herpesvirus 1
cgagucggauuaugcccucuac

SEQ ID NO: 430569 - RNA, 22 nt, Human herpesvirus 1
cgauagugccgaggcgccgccc

SEQ ID NO: 430570 - RNA, 22 nt, Human herpesvirus 1
cgaacgcacaacggcgcugcuc

SEQ ID NO: 430571 - RNA, 22 nt, Human herpesvirus 1
cgacaggauuugggaccuacca

SEQ ID NO: 430572 - RNA, 22 nt, Human herpesvirus 1
agaugggcugcgcugggcgcca

SEQ ID NO: 430573 - RNA, 22 nt, Human herpesvirus 1
agccccacgcagggucugcgag

SEQ ID NO: 430574 - RNA, 22 nt, Human herpesvirus 1
agaacagcgucacccgauuacu

SEQ ID NO: 430575 - RNA, 22 nt, Human herpesvirus 1
agaaccuccccggguugcucgu

SEQ ID NO: 430576 - RNA, 22 nt, Human herpesvirus 1
agcguucgcacuucgucccaau

SEQ ID NO: 430577 - RNA, 22 nt, Human herpesvirus 1
agcucauccaacgccgcauggg

SEQ ID NO: 430578 - RNA, 22 nt, Human herpesvirus 1
agcgcuggcggccgucucgagg

SEQ ID NO: 430579 - RNA, 22 nt, Human herpesvirus 1
agcgcgcucgucugacguuugg

SEQ ID NO: 430580 - RNA, 22 nt, Human herpesvirus 1
acggcccgaagaugcguggcua

SEQ ID NO: 430581 - RNA, 22 nt, Human herpesvirus 1
acgggcgcuuuggcacccaguc

SEQ ID NO: 430582 - RNA, 22 nt, Human herpesvirus 1
ggggcgagcugugcccgcguga

SEQ ID NO: 430583 - RNA, 22 nt, Human herpesvirus 1
ggggcggagcguugugugggcg

SEQ ID NO: 430584 - RNA, 17 nt, Human herpesvirus 1
gggggaagcgagauagg

SEQ ID NO: 430585 - RNA, 22 nt, Human herpesvirus 1
gggccuguucgguaucgucguu

SEQ ID NO: 430586 - RNA, 22 nt, Human herpesvirus 1
gggcccagcgcgaucuacggga

SEQ ID NO: 430587 - RNA, 22 nt, Human herpesvirus 1
gggcccggaacgggaggccaca

SEQ ID NO: 430588 - RNA, 22 nt, Human herpesvirus 1
gggccuaccguggacuccauuu

SEQ ID NO: 430589 - RNA, 22 nt, Human herpesvirus 1
gggcguggccgcuauuauaaaa

SEQ ID NO: 430590 - RNA, 22 nt, Human herpesvirus 1
ggcgcgacacgaacaccgggcg

SEQ ID NO: 430591 - RNA, 22 nt, Human herpesvirus 1
gggacgcgaguacccacguuaa

SEQ ID NO: 430592 - RNA, 22 nt, Human herpesvirus 1
gggagugagggucgcgucgucu

SEQ ID NO: 430593 - RNA, 22 nt, Human herpesvirus 1
ggcugguucgcagcgaggugca

SEQ ID NO: 430594 - RNA, 22 nt, Human herpesvirus 1
ggcucguguuguuuuccgagua

SEQ ID NO: 430595 - RNA, 22 nt, Human herpesvirus 1
ggcggacguggugccucagcgu

SEQ ID NO: 430596 - RNA, 22 nt, Human herpesvirus 1
ggcguuguugauggccacggug

SEQ ID NO: 430597 - RNA, 18 nt, Human herpesvirus 1
gcggggguggauacgcug

SEQ ID NO: 430598 - RNA, 22 nt, Human herpesvirus 1
gccguguccuucacggggcucu

SEQ ID NO: 430599 - RNA, 22 nt, Human herpesvirus 1
gcccggcucgcgccgugcugac

SEQ ID NO: 430600 - RNA, 22 nt, Human herpesvirus 1
gccagggucgcgcggcccgaaa

SEQ ID NO: 430601 - RNA, 19 nt, Human herpesvirus 1
gcacggccgacgccgcggu

SEQ ID NO: 430602 - RNA, 22 nt, Human herpesvirus 1
gcaccucgugguggacguauag

SEQ ID NO: 430603 - RNA, 22 nt, Human herpesvirus 1
gcagguugucguugccgcgggu

SEQ ID NO: 430604 - RNA, 22 nt, Human herpesvirus 1
gcagccuucgcucuccauccug

SEQ ID NO: 430605 - RNA, 22 nt, Human herpesvirus 1
gcaggccgugugcaggcccugc

SEQ ID NO: 430606 - RNA, 22 nt, Human herpesvirus 1
gcgugcaggaggcggacggccc

SEQ ID NO: 430607 - RNA, 22 nt, Human herpesvirus 1
gcggucccgcgucgggucgugg

SEQ ID NO: 430608 - RNA, 22 nt, Human herpesvirus 1
gcuggccgagggcuucgacggc

SEQ ID NO: 430609 - RNA, 19 nt, Human herpesvirus 1
gcucggcuugcgccugccc

SEQ ID NO: 430610 - RNA, 22 nt, Human herpesvirus 1
gaccaccggcgucggcgcccgg

SEQ ID NO: 430611 - RNA, 18 nt, Human herpesvirus 1
gacaacaacgcccauguu

SEQ ID NO: 430612 - RNA, 22 nt, Human herpesvirus 1
gaccgcgagggacacguggugc

SEQ ID NO: 430613 - RNA, 22 nt, Human herpesvirus 1
gaaaggggucugcaaccaaagg

SEQ ID NO: 430614 - RNA, 22 nt, Human herpesvirus 1
gaacuugggggucgugagcagg

SEQ ID NO: 430615 - RNA, 22 nt, Human herpesvirus 1
gaagaggggucgggauccaaag

SEQ ID NO: 430616 - RNA, 22 nt, Human herpesvirus 1
cuggcgucggcgcguguggguc

SEQ ID NO: 430617 - RNA, 22 nt, Human herpesvirus 1
cuugccgaauccagggagggua

SEQ ID NO: 430618 - RNA, 18 nt, Human herpesvirus 1
cuuuccgagggcgagcuc

SEQ ID NO: 430619 - RNA, 22 nt, Human herpesvirus 1
cuccccugcggcguugcgacau

SEQ ID NO: 430620 - RNA, 22 nt, Human herpesvirus 1
cucauggccacggcggccgccg

SEQ ID NO: 430621 - RNA, 22 nt, Human herpesvirus 1
cguugcggagcaucccgcgccu

SEQ ID NO: 430622 - RNA, 17 nt, Human herpesvirus 1
ucgggccgugggcgacc

SEQ ID NO: 430623 - RNA, 22 nt, Human herpesvirus 1
ucgggggugccgacgcaggcgu

SEQ ID NO: 430624 - RNA, 22 nt, Human herpesvirus 1
ucggugcucuccaaggggcugu

SEQ ID NO: 430625 - RNA, 22 nt, Human herpesvirus 1
ucgucgagcguaccgacgggcg

SEQ ID NO: 430626 - RNA, 22 nt, Human herpesvirus 1
ucgucgucagcaccgucaucca

SEQ ID NO: 430627 - RNA, 22 nt, Human herpesvirus 1
ucgcagcgauuuucguacgggg

SEQ ID NO: 430628 - RNA, 22 nt, Human herpesvirus 1
ucgaugugggggugaccuccgg

SEQ ID NO: 430629 - RNA, 22 nt, Human herpesvirus 1
ggucccggcgcuggcgguaagu

SEQ ID NO: 430630 - RNA, 22 nt, Human herpesvirus 1
gguccggagaucaugcgcgggu

SEQ ID NO: 430631 - RNA, 22 nt, Human herpesvirus 1
ggguggcagcagcgccgggucu

SEQ ID NO: 430632 - RNA, 22 nt, Human herpesvirus 1
gguggucagcacgcggcccccu

SEQ ID NO: 430633 - RNA, 22 nt, Human herpesvirus 1
gguguuuacgaacgaguuugac

SEQ ID NO: 430634 - RNA, 22 nt, Human herpesvirus 1
ggucgucggcgggcugacgauc

SEQ ID NO: 430635 - RNA, 22 nt, Human herpesvirus 1
ggucgaugcggcccgaggauug

SEQ ID NO: 430636 - RNA, 22 nt, Human herpesvirus 1
gucaagaaucccaucgcccgug

SEQ ID NO: 430637 - RNA, 22 nt, Human herpesvirus 1
guacgcgaccguguugguguga

SEQ ID NO: 430638 - RNA, 22 nt, Human herpesvirus 1
guauuggucccaauggggucuc

SEQ ID NO: 430639 - RNA, 22 nt, Human herpesvirus 1
ggacgaggcgucggcgggccuc

SEQ ID NO: 430640 - RNA, 22 nt, Human herpesvirus 1
ggacggccuggacguugcgagc

SEQ ID NO: 430641 - RNA, 22 nt, Human herpesvirus 1
ggggggccuccgacggugcguu

SEQ ID NO: 430642 - RNA, 22 nt, Human herpesvirus 1
ggggggugcucugauagucucg

SEQ ID NO: 430643 - RNA, 22 nt, Human herpesvirus 1
ggccggggcccgcgcgcugaug

SEQ ID NO: 430644 - RNA, 22 nt, Human herpesvirus 1
ggccgcuguucgagggccagga

SEQ ID NO: 430645 - RNA, 22 nt, Human herpesvirus 1
ggccuuguuugucuggcggauc

SEQ ID NO: 430646 - RNA, 22 nt, Human herpesvirus 1
ggcagggcguuguucuggucaa

SEQ ID NO: 430647 - RNA, 22 nt, Human herpesvirus 1
ggcccagacgccguacccggug

SEQ ID NO: 430648 - RNA, 22 nt, Human herpesvirus 1
ggcccccguucgccgccugggu

SEQ ID NO: 430649 - RNA, 22 nt, Human herpesvirus 1
ggcccgguuggcggcgacgcuu

SEQ ID NO: 430650 - RNA, 22 nt, Human herpesvirus 1
aaacgcgagcugcacgcggggc

SEQ ID NO: 430651 - RNA, 22 nt, Human herpesvirus 1
gcgccacggccuccgcguucuc

SEQ ID NO: 430652 - RNA, 22 nt, Human herpesvirus 1
gcgcccgaggccucgaaccggc

SEQ ID NO: 430653 - RNA, 22 nt, Human herpesvirus 1
gcgcagacugucgacggccccc

SEQ ID NO: 430654 - RNA, 21 nt, Human herpesvirus 1
gcgacaccuucccgugcaugc

SEQ ID NO: 430655 - RNA, 22 nt, Human herpesvirus 1
gcgcgugguccccggggacgug

SEQ ID NO: 430656 - RNA, 22 nt, Human herpesvirus 1
gcgcuguggccucccguuccgg

SEQ ID NO: 430657 - RNA, 22 nt, Human herpesvirus 1
gcgggccugucguguagauucg

SEQ ID NO: 430658 - RNA, 22 nt, Human herpesvirus 1
gcggggcccccgcuuccggaug

SEQ ID NO: 430659 - RNA, 22 nt, Human herpesvirus 1
uguaggcgaugcgggucccccg

SEQ ID NO: 430660 - RNA, 14 nt, Human herpesvirus 1
uggugcgauggcga

SEQ ID NO: 430661 - RNA, 22 nt, Human herpesvirus 1
uggggaccacgcccccaacacg

SEQ ID NO: 430662 - RNA, 22 nt, Human herpesvirus 1
ugggggugugcguucgaugcgg

SEQ ID NO: 430663 - RNA, 22 nt, Human herpesvirus 1
uggguuccgggagcaggcgugg

SEQ ID NO: 430664 - RNA, 22 nt, Human herpesvirus 1
uggguuuggcgcgcguaugcgu

SEQ ID NO: 430665 - RNA, 22 nt, Human herpesvirus 1
uggucccgacgccaacccaggc

SEQ ID NO: 430666 - RNA, 20 nt, Human herpesvirus 1
uguggugccgccugugauac

SEQ ID NO: 430667 - RNA, 20 nt, Human herpesvirus 1
ugugucgcagggcggcccgc

SEQ ID NO: 430668 - RNA, 22 nt, Human herpesvirus 1
uguggccucaccugaccaaccu

SEQ ID NO: 430669 - RNA, 22 nt, Human herpesvirus 1
cagaggggcgagguccguuucg

SEQ ID NO: 430670 - RNA, 22 nt, Human herpesvirus 1
ccaacccuggguggucgcggaa

SEQ ID NO: 430671 - RNA, 22 nt, Human herpesvirus 1
caucgggccagauucacgcuuc

SEQ ID NO: 430672 - RNA, 22 nt, Human herpesvirus 1
cagcggccggccggcgcuuagg

SEQ ID NO: 430673 - RNA, 22 nt, Human herpesvirus 1
caguuuggugggauuugcggcg

SEQ ID NO: 430674 - RNA, 22 nt, Human herpesvirus 1
uggccgucgagugccuggccgc

SEQ ID NO: 430675 - RNA, 22 nt, Human herpesvirus 1
uggccgucuuugacgagccgcc

SEQ ID NO: 430676 - RNA, 22 nt, Human herpesvirus 1
ccacaacauggagcauacgcuc

SEQ ID NO: 430677 - RNA, 22 nt, Human herpesvirus 1
ccacgggccgcagcggcaccgu

SEQ ID NO: 430678 - RNA, 22 nt, Human herpesvirus 1
uggcgcacccggacguggggcg

SEQ ID NO: 430679 - RNA, 22 nt, Human herpesvirus 1
uacugggcguggugauggacga

SEQ ID NO: 430680 - RNA, 22 nt, Human herpesvirus 1
uagcauaucacauaccccguuc

SEQ ID NO: 430681 - RNA, 18 nt, Human herpesvirus 1
uacucgcgagcgcggggg

SEQ ID NO: 430682 - RNA, 22 nt, Human herpesvirus 1
guucccccggcacgccuggggu

SEQ ID NO: 430683 - RNA, 22 nt, Human herpesvirus 1
guucggacggcaggcacacgua

SEQ ID NO: 430684 - RNA, 22 nt, Human herpesvirus 1
gugccgggcgcgugcgacggug

SEQ ID NO: 430685 - RNA, 23 nt, Human herpesvirus 1
guggaccugggaccgcgccgccc

SEQ ID NO: 430686 - RNA, 16 nt, Human herpesvirus 1
guggugcccggggcug

SEQ ID NO: 430687 - RNA, 22 nt, Human herpesvirus 1
gugggggaguuugagacggccg

SEQ ID NO: 430688 - RNA, 22 nt, Human herpesvirus 1
gucccgccgaacgcauacaugc

SEQ ID NO: 430689 - RNA, 22 nt, Human herpesvirus 1
gucucggggucagccucgagcu

SEQ ID NO: 430690 - RNA, 22 nt, Human herpesvirus 1
gucucguccguccggcaucuuc

SEQ ID NO: 430691 - RNA, 19 nt, Human herpesvirus 1
gucgacguagggggcgcgg

SEQ ID NO: 430692 - RNA, 22 nt, Human herpesvirus 1
gucgcggcguccuggaucgacg

SEQ ID NO: 430693 - RNA, 22 nt, Human herpesvirus 1
gucgcucgguauucgaggccac

SEQ ID NO: 430694 - RNA, 22 nt, Human herpesvirus 1
ccucgagacggccgccagcgcu

SEQ ID NO: 430695 - RNA, 22 nt, Human herpesvirus 1
ccgucccgggccuucgcggcca

SEQ ID NO: 430696 - RNA, 22 nt, Human herpesvirus 1
ccguccgccuucuccgugacau

SEQ ID NO: 430697 - RNA, 22 nt, Human herpesvirus 1
uugccgucgucguccucguccu

SEQ ID NO: 430698 - RNA, 22 nt, Human herpesvirus 1
uuggucaggugaggccacagcg

SEQ ID NO: 430699 - RNA, 22 nt, Human herpesvirus 1
uuggugccgguggggcguaccg

SEQ ID NO: 430700 - RNA, 22 nt, Human herpesvirus 1
cccaugcggcguuggaugagcu

SEQ ID NO: 430701 - RNA, 22 nt, Human herpesvirus 1
ccccagcgugcaggcugcggcc

SEQ ID NO: 430702 - RNA, 22 nt, Human herpesvirus 1
ccccaugggcgguggaggaguu

SEQ ID NO: 430703 - RNA, 22 nt, Human herpesvirus 1
cccccgagucggacccggaggc

SEQ ID NO: 430704 - RNA, 22 nt, Human herpesvirus 1
ccccgagccacgccagaaccuu

SEQ ID NO: 430705 - RNA, 22 nt, Human herpesvirus 1
ccggagagcggcuuggugcgga

SEQ ID NO: 430706 - RNA, 22 nt, Human herpesvirus 1
ccggagguuccggaggcgccgc

SEQ ID NO: 430707 - RNA, 22 nt, Human herpesvirus 1
ccggaucgagguaccgucggug

SEQ ID NO: 430708 - RNA, 22 nt, Human herpesvirus 1
ccggccuggccgcccugugucu

SEQ ID NO: 430709 - RNA, 22 nt, Human herpesvirus 1
ccgcgugggccccgcuggcguu

SEQ ID NO: 430710 - RNA, 22 nt, Human herpesvirus 1
ccgggcaugaaaacgaccucca

SEQ ID NO: 430711 - RNA, 22 nt, Human herpesvirus 1
ccgccgcuugaucauuaucacc

SEQ ID NO: 430712 - RNA, 22 nt, Human herpesvirus 1
cccgcgagucggagcuggagcu

SEQ ID NO: 430713 - RNA, 22 nt, Human herpesvirus 1
cccgcgcgucgacgggacccag

SEQ ID NO: 430714 - RNA, 22 nt, Human herpesvirus 1
auaauuuuauuggugggucguu

SEQ ID NO: 430715 - RNA, 22 nt, Human herpesvirus 1
agguggcgcacccggacguggg

SEQ ID NO: 430716 - RNA, 22 nt, Human herpesvirus 1
ugaucgggguacuucgccgccg

SEQ ID NO: 430717 - RNA, 22 nt, Human herpesvirus 1
ugacgacagcuuuguaaagacu

SEQ ID NO: 430718 - RNA, 23 nt, Human herpesvirus 1
ucccgaggcgucgcugccggccc

SEQ ID NO: 430719 - RNA, 22 nt, Human herpesvirus 1
uccgcggaagacccaggccgcc

SEQ ID NO: 430720 - RNA, 22 nt, Human herpesvirus 1
ucugucucgccaggggcuggcc

SEQ ID NO: 430721 - RNA, 22 nt, Human herpesvirus 1
ucucggcgggggccgucuggcc

SEQ ID NO: 430722 - RNA, 22 nt, Human herpesvirus 1
ucucgucgacaaacagggggaa

SEQ ID NO: 430723 - RNA, 22 nt, Human herpesvirus 1
gaucggugggcccgccgcggcc

SEQ ID NO: 430724 - RNA, 22 nt, Human herpesvirus 1
gagugccagcccugggaccgaa

SEQ ID NO: 430725 - RNA, 22 nt, Human herpesvirus 1
gaugugcgucgcguuguaccug

SEQ ID NO: 430726 - RNA, 22 nt, Human herpesvirus 1
cggggugaaugagcugggcggc

SEQ ID NO: 430727 - RNA, 22 nt, Human herpesvirus 1
cgguuccgcgguaccccgaguc

SEQ ID NO: 430728 - RNA, 22 nt, Human herpesvirus 1
cgucccccgacgaccucuugca

SEQ ID NO: 430729 - RNA, 23 nt, Human herpesvirus 1
cgucgacucuaucgcgcgugccg

SEQ ID NO: 430730 - RNA, 22 nt, Human herpesvirus 1
cgucgagcguaccgacgggcgg

SEQ ID NO: 430731 - RNA, 22 nt, Human herpesvirus 1
cgucgccugcacaggaaggacc

SEQ ID NO: 430732 - RNA, 18 nt, Human herpesvirus 1
cgugacgggcggggcguc

SEQ ID NO: 430733 - RNA, 22 nt, Human herpesvirus 1
cguggagucgaaggccagcgcc

SEQ ID NO: 430734 - RNA, 22 nt, Human herpesvirus 1
gacgucgacucuaucgcgcgca

SEQ ID NO: 430735 - RNA, 22 nt, Human herpesvirus 1
cgcgcgccaauggggucgggaa

SEQ ID NO: 430736 - RNA, 22 nt, Human herpesvirus 1
cgcggccggggccucgaugugg

SEQ ID NO: 430737 - RNA, 22 nt, Human herpesvirus 1
cggacgucuucggaggccccgc

SEQ ID NO: 430738 - RNA, 20 nt, Human herpesvirus 1
cgcggggugguuccgucacg

SEQ ID NO: 430739 - RNA, 22 nt, Human herpesvirus 1
cgcucacgcgcaugcccgccac

SEQ ID NO: 430740 - RNA, 22 nt, Human herpesvirus 1
cggugcagcggacuggcaccga

SEQ ID NO: 430741 - RNA, 23 nt, Human herpesvirus 1
cgguccauggcgucgcgggcguc

SEQ ID NO: 430742 - RNA, 17 nt, Human herpesvirus 1
cggccggccgccauggc

SEQ ID NO: 430743 - RNA, 23 nt, Human herpesvirus 1
cggccggccgccauggcguagcc

SEQ ID NO: 430744 - RNA, 22 nt, Human herpesvirus 1
cggaacagcaucguaccggggc

SEQ ID NO: 430745 - RNA, 20 nt, Human herpesvirus 1
uggccgucaggagcucggcg

SEQ ID NO: 430746 - RNA, 23 nt, Human herpesvirus 1
uggccgucaggagcucggcgcag

SEQ ID NO: 430747 - RNA, 18 nt, Human herpesvirus 1
ugcuugccugucaaacuc

SEQ ID NO: 430748 - RNA, 22 nt, Human herpesvirus 1
uggacaggcucuggagcauccg

SEQ ID NO: 430749 - RNA, 20 nt, Human herpesvirus 1
ugcgucgcccgcgucuggac

SEQ ID NO: 430750 - RNA, 22 nt, Human herpesvirus 1
ugccccccggccucgucgaggu

SEQ ID NO: 430751 - RNA, 22 nt, Human herpesvirus 1
ugcccgggacccacguggcggc

SEQ ID NO: 430752 - RNA, 22 nt, Human herpesvirus 1
ugccggacacccaggggcgauu

SEQ ID NO: 430753 - RNA, 22 nt, Human herpesvirus 1
ugcgcaggugcaugccccaggu

SEQ ID NO: 430754 - RNA, 19 nt, Human herpesvirus 1
acgcaggcgcccccggcga

SEQ ID NO: 430755 - RNA, 22 nt, Human herpesvirus 1
acgccgccaucgcgcccuuucg

SEQ ID NO: 430756 - RNA, 22 nt, Human herpesvirus 1
acgcgcgauagagucgacgacc

SEQ ID NO: 430757 - RNA, 22 nt, Human herpesvirus 1
ugcaggucguacguggcccccg

SEQ ID NO: 430758 - RNA, 22 nt, Human herpesvirus 1
acccaggcggcgaacgggggcc

SEQ ID NO: 430759 - RNA, 22 nt, Human herpesvirus 1
accccaggcgugccgggggaac

SEQ ID NO: 430760 - RNA, 22 nt, Human herpesvirus 1
accgggucucgagguaucgguu

SEQ ID NO: 430761 - RNA, 22 nt, Human herpesvirus 1
acacgcgggacaucgcgcagcg

SEQ ID NO: 430762 - RNA, 22 nt, Human herpesvirus 1
aaugcgcgcgauagagucgacg

SEQ ID NO: 430763 - RNA, 22 nt, Human
uggcaggguuggccaccuuacc

SEQ ID NO: 430764 - RNA, 22 nt, Human
ggcagucaagagggagucugaa

SEQ ID NO: 430765 - RNA, 22 nt, Human
aggcagccagauggcagccugc

SEQ ID NO: 430766 - RNA, 22 nt, Human
uucacaugaaaguaggaaagga

SEQ ID NO: 430767 - RNA, 22 nt, Human
uggcagaguucgcugugccuuu

SEQ ID NO: 430768 - RNA, 22 nt, Human
ggcagacacaaaaacauaaggu

SEQ ID NO: 430769 - RNA, 22 nt, Human
aaacugcacaugaggcuggugc

SEQ ID NO: 430770 - RNA, 22 nt, Human
aucagcugaaaaacaggcagca

SEQ ID NO: 430771 - RNA, 22 nt, Human
cccuucuuuguaauaaagauua

SEQ ID NO: 430772 - RNA, 22 nt, Human
gaguagaaggaaguuaucuacc

SEQ ID NO: 430773 - RNA, 22 nt, Human
ggagcugggacccugucaucug

SEQ ID NO: 430774 - RNA, 22 nt, Human
aguguccccuacagaggcauuc

SEQ ID NO: 430775 - RNA, 22 nt, Human
aggcuugguuuauagaaguaau

SEQ ID NO: 430776 - RNA, 22 nt, Human
acacaaugucaucauaauguca

SEQ ID NO: 430777 - RNA, 22 nt, Human
uugcagcugcuguuccucaugg

SEQ ID NO: 430778 - RNA, 22 nt, Human
aacaaguuguugaaaauaauua

SEQ ID NO: 430779 - RNA, 22 nt, Human
gacagcaggagaucaugauaga

SEQ ID NO: 430780 - RNA, 22 nt, Human
guuuacaaauauuuuaaauggu

SEQ ID NO: 430781 - RNA, 22 nt, Human
aggaaacaacuuggcaugagcc

SEQ ID NO: 430782 - RNA, 22 nt, Human
aagcaggcccugggccagggga

SEQ ID NO: 430783 - RNA, 22 nt, Human
cuggggagaagcgacucggcug

SEQ ID NO: 430784 - RNA, 22 nt, Human
ugcagcugaggccagcuaugcc

SEQ ID NO: 430785 - RNA, 22 nt, Human
aaggcacacaguuagauagagc

SEQ ID NO: 430786 - RNA, 22 nt, Human
uaagacaaauacuauuucaaga

SEQ ID NO: 430787 - RNA, 22 nt, Human
uaggccaggacagagcuuccag

SEQ ID NO: 430788 - RNA, 21 nt, Human
caagacauaugaguacucugg

SEQ ID NO: 430789 - RNA, 19 nt, Human
ccucuuccucugacacuau

SEQ ID NO: 430790 - RNA, 22 nt, Human
ccugaagcucuuaagaccuuua

SEQ ID NO: 430791 - RNA, 22 nt, Human
aggcagagcugauguucuguga

SEQ ID NO: 430792 - RNA, 22 nt, Human
ugacagcugccacaaaggccau

SEQ ID NO: 430793 - RNA, 22 nt, Human
uugcauuucacuuucaguaggc

SEQ ID NO: 430794 - RNA, 22 nt, Human
uaacacagacagccacuaguaa

SEQ ID NO: 430795 - RNA, 22 nt, Human
gcagcugcaggcaggcuugcug

SEQ ID NO: 430796 - RNA, 22 nt, Human
cugccuguuuucugauagauuu

SEQ ID NO: 430797 - RNA, 22 nt, Human
ggcuagggaucuagaccaggac

SEQ ID NO: 430798 - RNA, 22 nt, Human
gaaugcaugugaagcaaagaau

SEQ ID NO: 430799 - RNA, 22 nt, Human
cuggcucccguuguccuugaag

SEQ ID NO: 430800 - RNA, 22 nt, Human
agaagcaguuauuuuuugcaca

SEQ ID NO: 430801 - RNA, 22 nt, Human
agggagcccugaaccagagggu

SEQ ID NO: 430802 - RNA, 22 nt, Human
cccuggaggucagaggccuggg

SEQ ID NO: 430803 - RNA, 22 nt, Human
ggcagcugaccuagcaccaucc

SEQ ID NO: 430804 - RNA, 22 nt, Human
gaggcugggaaguccaagacca

SEQ ID NO: 430805 - RNA, 22 nt, Human
ugcaaacaguuaagaugcaggc

SEQ ID NO: 430806 - RNA, 22 nt, Human
cuguguccugcgucaagccaau

SEQ ID NO: 430807 - RNA, 23 nt, Human
agacucugagagugugcuuugca

SEQ ID NO: 430808 - RNA, 22 nt, Human
aauagauggguuaaacagcaaa

SEQ ID NO: 430809 - RNA, 19 nt, Human
ggcaggcuggauagagagg

SEQ ID NO: 430810 - RNA, 22 nt, Human
agagacuguguccaucgugccu

SEQ ID NO: 430811 - RNA, 22 nt, Human
cacaguacccagcacuacugag

SEQ ID NO: 430812 - RNA, 20 nt, Human
uuugagaccagucugcccaa

SEQ ID NO: 430813 - RNA, 22 nt, Human
cucagggagagccaagaguucc

SEQ ID NO: 430814 - RNA, 22 nt, Human
uucauuacugaauucucacuac

SEQ ID NO: 430815 - RNA, 22 nt, Human
cugcagccuccugggguacaug

SEQ ID NO: 430816 - RNA, 17 nt, Human
acagggcagaaacagcu

SEQ ID NO: 430817 - RNA, 22 nt, Human
cacauuuagguuccuauagcca

SEQ ID NO: 430818 - RNA, 22 nt, Human
acaggacugugauccaguaacc

SEQ ID NO: 430819 - RNA, 22 nt, Human
augcuuuaaaacguauguguaa

SEQ ID NO: 430820 - RNA, 19 nt, Human
acuuucuccaggaccuguu

SEQ ID NO: 430821 - RNA, 22 nt, Human
agaggaugguugaggaagaccu

SEQ ID NO: 430822 - RNA, 20 nt, Human
cagagccaagagcagcaucu

SEQ ID NO: 430823 - RNA, 22 nt, Human
gugaagaugccucaggugaccc

SEQ ID NO: 430824 - RNA, 22 nt, Human
cuggaagggucuacuuagcaga

SEQ ID NO: 430825 - RNA, 22 nt, Human
gccggggcuggggagagacaug

SEQ ID NO: 430826 - RNA, 22 nt, Human
ucaacuuuaguguagcuauuua

SEQ ID NO: 430827 - RNA, 21 nt, Human
agagcugggacuugccugaga

SEQ ID NO: 430828 - RNA, 22 nt, Human
ccucugagaacaccuggcgucc

SEQ ID NO: 430829 - RNA, 22 nt, Human
gcccucuggugggugagccccg

SEQ ID NO: 430830 - RNA, 22 nt, Human
cucccuggaggcccagaccugg

SEQ ID NO: 430831 - RNA, 22 nt, Human
aggaggccgauuucagaggucg

SEQ ID NO: 430832 - RNA, 22 nt, Human
aaauaagaaauucuucuuugca

SEQ ID NO: 430833 - RNA, 22 nt, Human
caauaugcaagcuauuaaguau

SEQ ID NO: 430834 - RNA, 22 nt, Human
ucaggccugcuguaugauggau

SEQ ID NO: 430835 - RNA, 22 nt, Human
aaguccugugugcuuacacuug

SEQ ID NO: 430836 - RNA, 20 nt, Human
ggcaccaggcuaggauugga

SEQ ID NO: 430837 - RNA, 22 nt, Human
gcacaaguuucuucauuguuca

SEQ ID NO: 430838 - RNA, 22 nt, Human
auucucuuuguauaacaucuug

SEQ ID NO: 430839 - RNA, 22 nt, Human
uugauacaggccuucuagauga

SEQ ID NO: 430840 - RNA, 22 nt, Human
ugcaucauauaaugucuaugga

SEQ ID NO: 430841 - RNA, 22 nt, Human
gcggggggaggaacaucuugca

SEQ ID NO: 430842 - RNA, 22 nt, Human
ugguaauugagaugucuuuucu

SEQ ID NO: 430843 - RNA, 22 nt, Human
cuuggcugucuauaggaaagag

SEQ ID NO: 430844 - RNA, 22 nt, Human
aauaugcacucugauuuagcag

SEQ ID NO: 430845 - RNA, 19 nt, Human
aguuuauuauaggugauuc

SEQ ID NO: 430846 - RNA, 22 nt, Human
uccaacuuucuccuccggcuug

SEQ ID NO: 430847 - RNA, 22 nt, Human
aacacuuuuuccuccugucugg

SEQ ID NO: 430848 - RNA, 23 nt, Human
agcugggaauuuucugaagcuuu

SEQ ID NO: 430849 - RNA, 22 nt, Human
ucaggaaauacaagugacauca

SEQ ID NO: 430850 - RNA, 22 nt, Human
ggucccagguugacagggagac

SEQ ID NO: 430851 - RNA, 22 nt, Human
ugagacaggagaggccccuccu

SEQ ID NO: 430852 - RNA, 22 nt, Human
ugauuguuuccuauguacaccu

SEQ ID NO: 430853 - RNA, 22 nt, Human
ccagcagcugcaaagccugggu

SEQ ID NO: 430854 - RNA, 22 nt, Human
aaaugcauugguuucuacuugu

SEQ ID NO: 430855 - RNA, 22 nt, Human
agacagcauuucuagcaccagg

SEQ ID NO: 430856 - RNA, 22 nt, Human
uucucacaggaaguaggacuuu

SEQ ID NO: 430857 - RNA, 22 nt, Human
ucagugucuugggcuugaaugc

SEQ ID NO: 430858 - RNA, 22 nt, Human
ccugggaggcuguuuccagccu

SEQ ID NO: 430859 - RNA, 22 nt, Human
cacagcagagggagccauugaa

SEQ ID NO: 430860 - RNA, 22 nt, Human
acaggacuguggaaggaucucu

SEQ ID NO: 430861 - RNA, 22 nt, Human
ugucaguuuggcucuaaaguuu

SEQ ID NO: 430862 - RNA, 22 nt, Human
gcugagcugaggcagggcuggg

SEQ ID NO: 430863 - RNA, 22 nt, Human
gcucccugaaaagaacaaaguc

SEQ ID NO: 430864 - RNA, 22 nt, Human
gcuuugcuagcacugcgcuucc

SEQ ID NO: 430865 - RNA, 23 nt, Human
uaggccagggugaccuggggaga

SEQ ID NO: 430866 - RNA, 22 nt, Human
auggaagugcaacuugcucauc

SEQ ID NO: 430867 - RNA, 19 nt, Human
ugaagcagcaaacucucag

SEQ ID NO: 430868 - RNA, 23 nt, Human
aggcaggcaguucagcuguuguu

SEQ ID NO: 430869 - RNA, 22 nt, Human
aucacaguggcagggauuuggg

SEQ ID NO: 430870 - RNA, 22 nt, Human
uggaagaugaauaaagauucua

SEQ ID NO: 430871 - RNA, 23 nt, Human
uggucccugagagcuggggaggg

SEQ ID NO: 430872 - RNA, 19 nt, Human
cgccuggcaggcccugcgc

SEQ ID NO: 430873 - RNA, 22 nt, Human
aagcacaugagcuauucaugcu

SEQ ID NO: 430874 - RNA, 23 nt, Human
ggcucugugcugggccugcagga

SEQ ID NO: 430875 - RNA, 22 nt, Human
uuggaaggauuuagagaugucu

SEQ ID NO: 430876 - RNA, 20 nt, Human
ugcccagcaagagugcaguu

SEQ ID NO: 430877 - RNA, 22 nt, Human
acacagaguauuuagaaggggu

SEQ ID NO: 430878 - RNA, 22 nt, Human
ucuuugcaugugcuucuuggcc

SEQ ID NO: 430879 - RNA, 22 nt, Human
agcagcagauucagcaggaaug

SEQ ID NO: 430880 - RNA, 22 nt, Human
gccugagaaggacacagcaggu

SEQ ID NO: 430881 - RNA, 22 nt, Human
cagcauggggaucacuguaggc

SEQ ID NO: 430882 - RNA, 22 nt, Human
uccagccaugcaugacaaucac

SEQ ID NO: 430883 - RNA, 21 nt, Human
gauuuuaaagagacugccaca

SEQ ID NO: 430884 - RNA, 22 nt, Human
guguccacggcugagaaugauu

SEQ ID NO: 430885 - RNA, 22 nt, Human
gcuaauacuuuggaaagaaugu

SEQ ID NO: 430886 - RNA, 22 nt, Human
aagggcaggcagagaucauaua

SEQ ID NO: 430887 - RNA, 22 nt, Human
ugagaaggaaacaauggcuuuu

SEQ ID NO: 430888 - RNA, 22 nt, Human
uuugggcauguuguggccagcu

SEQ ID NO: 430889 - RNA, 22 nt, Human
uccagcaguccaugugagacac

SEQ ID NO: 430890 - RNA, 22 nt, Human
uuguacaaguuuugagcuuaag

SEQ ID NO: 430891 - RNA, 22 nt, Human
ggcucuucuguggcagccaagg

SEQ ID NO: 430892 - RNA, 21 nt, Human
acagacagggccagugucccc

SEQ ID NO: 430893 - RNA, 22 nt, Human
aaggcccacagaacugucucca

SEQ ID NO: 430894 - RNA, 20 nt, Human
agcagcagauguuggaggug

SEQ ID NO: 430895 - RNA, 22 nt, Human
aguggcagagaccccagccagc

SEQ ID NO: 430896 - RNA, 22 nt, Human
ugaaacagucuccagacuugga

SEQ ID NO: 430897 - RNA, 22 nt, Human
uucuucuuuccuauaauuaauu

SEQ ID NO: 430898 - RNA, 22 nt, Human
caaggaaaaagcgagcucgggg

SEQ ID NO: 430899 - RNA, 22 nt, Human
caggccagugugcuucccaggc

SEQ ID NO: 430900 - RNA, 22 nt, Human
caaggcugagaaauucugcccu

SEQ ID NO: 430901 - RNA, 22 nt, Human
cauuuaaugcacggauguagcc

SEQ ID NO: 430902 - RNA, 19 nt, Human
uucagaauugggaggugau

SEQ ID NO: 430903 - RNA, 22 nt, Human
ucucauuuggcuuuguuuuaaa

SEQ ID NO: 430904 - RNA, 22 nt, Human
gcugcauugcuauaaaauacaa

SEQ ID NO: 430905 - RNA, 22 nt, Human
agcaacaggaaauagcugauua

SEQ ID NO: 430906 - RNA, 22 nt, Human
ccuuuucuauccuucuagguuc

SEQ ID NO: 430907 - RNA, 22 nt, Human
guucacaauggcuuuaccuaag

SEQ ID NO: 430908 - RNA, 22 nt, Human
gcugagagcacauagaaggggc

SEQ ID NO: 430909 - RNA, 22 nt, Human
cagccugagccuucuguagcaa

SEQ ID NO: 430910 - RNA, 22 nt, Human
cuggcuccaucuuugcuuccug

SEQ ID NO: 430911 - RNA, 22 nt, Human
ugaaaagugaucauggauuagg

SEQ ID NO: 430912 - RNA, 22 nt, Human
ugggggcugugcacaggcucac

SEQ ID NO: 430913 - RNA, 22 nt, Human
cccuggcagaagguguagaagc

SEQ ID NO: 430914 - RNA, 22 nt, Human
uggcagcuuuuuguuucaggcu

SEQ ID NO: 430915 - RNA, 22 nt, Human
ggcaggugcucugugggccugg

SEQ ID NO: 430916 - RNA, 22 nt, Human
uggcuccucaucacaguuggug

SEQ ID NO: 430917 - RNA, 22 nt, Human
cagagggcuguguaaggauguu

SEQ ID NO: 430918 - RNA, 22 nt, Human
uucuugauuagucucaugccaa

SEQ ID NO: 430919 - RNA, 22 nt, Human
aauguauucugggaaaauguua

SEQ ID NO: 430920 - RNA, 22 nt, Human
uggugagaccuuguuccuuaug

SEQ ID NO: 430921 - RNA, 22 nt, Human
uuccugaauauaaagacacuag

SEQ ID NO: 430922 - RNA, 23 nt, Human
agaggggagcaucugcuggcuga

SEQ ID NO: 430923 - RNA, 23 nt, Human
uucaaagaucuucugaaaucugu

SEQ ID NO: 430924 - RNA, 22 nt, Human
gaugauuugaggauuucaugag

SEQ ID NO: 430925 - RNA, 22 nt, Human
ugcaggcuuuagccccauggcu

SEQ ID NO: 430926 - RNA, 22 nt, Human
uuuucuccuuucaagauagcau

SEQ ID NO: 430927 - RNA, 23 nt, Human
ccuccugggcacaggccugaugg

SEQ ID NO: 430928 - RNA, 22 nt, Human
cuuagcagaagcuucagcuuca

SEQ ID NO: 430929 - RNA, 23 nt, Human
ugauucagcaaguccacuucugg

SEQ ID NO: 430930 - RNA, 22 nt, Human
ccugugucuuccccacuggugu

SEQ ID NO: 430931 - RNA, 22 nt, Human
gaggcaggguguugauuacaga

SEQ ID NO: 430932 - RNA, 22 nt, Human
cugcagcuccuucuggcaugug

SEQ ID NO: 430933 - RNA, 22 nt, Human
gcuccaggugucccagguaaaa

SEQ ID NO: 430934 - RNA, 22 nt, Human
cuaaagacacaauaaguagcuu

SEQ ID NO: 430935 - RNA, 22 nt, Human
ugucccucauugacgcugugcc

SEQ ID NO: 430936 - RNA, 22 nt, Human
ugcauguuugugucugagaacu

SEQ ID NO: 430937 - RNA, 19 nt, Human
caugugcaugagcacagga

SEQ ID NO: 430938 - RNA, 22 nt, Human
ugcccuggugaagugcucuccu

SEQ ID NO: 430939 - RNA, 22 nt, Human
aggccuggccccaguugcuagg

SEQ ID NO: 430940 - RNA, 22 nt, Human
caguccugucuuuaugacuuca

SEQ ID NO: 430941 - RNA, 22 nt, Human
acagggccauuggaggauuaua

SEQ ID NO: 430942 - RNA, 22 nt, Human
gcugguccacauccugguacgu

SEQ ID NO: 430943 - RNA, 22 nt, Human
agagggagugaaauggaauaga

SEQ ID NO: 430944 - RNA, 22 nt, Human
uauugcuuauucuugagaguca

SEQ ID NO: 430945 - RNA, 22 nt, Human
acuuagcaaaucuuuuggauuc

SEQ ID NO: 430946 - RNA, 19 nt, Human
auuugaaagcugugcuugc

SEQ ID NO: 430947 - RNA, 22 nt, Human
aggcuggagacccgccaagaaa

SEQ ID NO: 430948 - RNA, 22 nt, Human
uacaagagguauauagaaacag

SEQ ID NO: 430949 - RNA, 20 nt, Human
gcuuagcaggcauaguagcu

SEQ ID NO: 430950 - RNA, 19 nt, Human
gcacugaagaguuggucac

SEQ ID NO: 430951 - RNA, 22 nt, Human
acacaguaccccaaggcugggc

SEQ ID NO: 430952 - RNA, 22 nt, Human
aaacuucaaggauuugcaaauc

SEQ ID NO: 430953 - RNA, 22 nt, Human
agggcagagagaugaaugggau

SEQ ID NO: 430954 - RNA, 22 nt, Human
auaauaucgcuccuuuuuuuga

SEQ ID NO: 430955 - RNA, 22 nt, Human
uauaggaauaaagugggguaua

SEQ ID NO: 430956 - RNA, 22 nt, Human
aggcugagaaagugggaagaug

SEQ ID NO: 430957 - RNA, 19 nt, Human
agccagaguggcccagggg

SEQ ID NO: 430958 - RNA, 22 nt, Human
ccucugaggucauggacuuggc

SEQ ID NO: 430959 - RNA, 22 nt, Human
ccaggaaauggcuugcuucuuu

SEQ ID NO: 430960 - RNA, 22 nt, Human
ccugagggaaggaugcuaccca

SEQ ID NO: 430961 - RNA, 22 nt, Human
auugaauagaugcauuauacua

SEQ ID NO: 430962 - RNA, 22 nt, Human
cuguaaauaugaagaauauaug

SEQ ID NO: 430963 - RNA, 22 nt, Human
accacugggcgggcagccugcu

SEQ ID NO: 430964 - RNA, 22 nt, Human
guggccagcaagugcugccucu

SEQ ID NO: 430965 - RNA, 22 nt, Human
guauuuucaagagcaguaguau

SEQ ID NO: 430966 - RNA, 22 nt, Human
gcugcuuuagaauugaaacaga

SEQ ID NO: 430967 - RNA, 22 nt, Human
ggaagagagggcugggccucaa

SEQ ID NO: 430968 - RNA, 22 nt, Human
uggcccugacacgugguacugg

SEQ ID NO: 430969 - RNA, 22 nt, Human
uggcagauaaaauaauagggaa

SEQ ID NO: 430970 - RNA, 21 nt, Human
ggccuuccccugcagucuccg

SEQ ID NO: 430971 - RNA, 22 nt, Human
ggcagcuguggacgucgucauu

SEQ ID NO: 430972 - RNA, 20 nt, Human
caagcccucuuuagccugcc

SEQ ID NO: 430973 - RNA, 22 nt, Human
gaagcuaaaagagaugugguuu

SEQ ID NO: 430974 - RNA, 22 nt, Human
cugguacagggaaauaaaggaa

SEQ ID NO: 430975 - RNA, 22 nt, Human
acagaacuuucugauccugagc

SEQ ID NO: 430976 - RNA, 22 nt, Human
auauuaaugagcaaguaaguga

SEQ ID NO: 430977 - RNA, 22 nt, Human
agcuccuugaagggcucuggga

SEQ ID NO: 430978 - RNA, 22 nt, Human
agguccugggaguucuagugug

SEQ ID NO: 430979 - RNA, 22 nt, Human
ugaauaauuccuuuuugucaag

SEQ ID NO: 430980 - RNA, 22 nt, Human
gauuuauaaagguugcacugga

SEQ ID NO: 430981 - RNA, 22 nt, Human
cacuuugccucuuaccuguggu

SEQ ID NO: 430982 - RNA, 22 nt, Human
gcuggucccaauguguuuccuu

SEQ ID NO: 430983 - RNA, 22 nt, Human
ccucagcugcuucccuggagcc

SEQ ID NO: 430984 - RNA, 22 nt, Human
gccuggaguagcauggcaagcc

SEQ ID NO: 430985 - RNA, 22 nt, Human
ugugugaacauguuuucauuuc

SEQ ID NO: 430986 - RNA, 22 nt, Human
ccugccugcagaaaguaucucc

SEQ ID NO: 430987 - RNA, 22 nt, Human
gaugaugagauaaggauaacuu

SEQ ID NO: 430988 - RNA, 22 nt, Human
cagcaaggccauuggaugcagu

SEQ ID NO: 430989 - RNA, 22 nt, Human
gguaacacaggugcaguuuuaa

SEQ ID NO: 430990 - RNA, 22 nt, Human
aguaccauuacucacuuauuuu

SEQ ID NO: 430991 - RNA, 22 nt, Human
uggcccugcuguaucaucugcu

SEQ ID NO: 430992 - RNA, 22 nt, Human
aaggcugagggcuguaccuggc

SEQ ID NO: 430993 - RNA, 22 nt, Human
ugagccuguggggugacaacca

SEQ ID NO: 430994 - RNA, 22 nt, Human
ccaagaggggcagagggcugca

SEQ ID NO: 430995 - RNA, 22 nt, Human
auucaagaggaacaaugaagau

SEQ ID NO: 430996 - RNA, 22 nt, Human
acuuaaaaagaaucuuuucacg

SEQ ID NO: 430997 - RNA, 22 nt, Human
ugauaugggaaaagggcucgga

SEQ ID NO: 430998 - RNA, 22 nt, Human
uucuugauguaccaacuuggga

SEQ ID NO: 430999 - RNA, 22 nt, Human
auucagaaaguugucauauuug

SEQ ID NO: 431000 - RNA, 22 nt, Human
uccauacuaacagcauuuauca

SEQ ID NO: 431001 - RNA, 22 nt, Human
ccuggaaagaggaaggaagccu

SEQ ID NO: 431002 - RNA, 22 nt, Human
aacagucuuacagaaguagcca

SEQ ID NO: 431003 - RNA, 22 nt, Human
aaaauaguuaacguucagagua

SEQ ID NO: 431004 - RNA, 22 nt, Human
ccaggcagccaagugugugugu

SEQ ID NO: 431005 - RNA, 22 nt, Human
uccugcagaccucagucagguc

SEQ ID NO: 431006 - RNA, 22 nt, Human
acaaaugaaccugaaaucucag

SEQ ID NO: 431007 - RNA, 22 nt, Human
cuguccuguggaccugaggacg

SEQ ID NO: 431008 - RNA, 22 nt, Human
cccucugccugcgcccuggugu

SEQ ID NO: 431009 - RNA, 22 nt, Human
ggccccagcuguggugaauaga

SEQ ID NO: 431010 - RNA, 22 nt, Human
aacacugagaacaauacagagu

SEQ ID NO: 431011 - RNA, 22 nt, Human
cagcucuggguaggaggaaucu

SEQ ID NO: 431012 - RNA, 21 nt, Human
uuuuaacaaggauuucccuag

SEQ ID NO: 431013 - RNA, 22 nt, Human
ugggaggcagaaguugacugga

SEQ ID NO: 431014 - RNA, 22 nt, Human
ccaguacuugcuaccucaauug

SEQ ID NO: 431015 - RNA, 22 nt, Human
caggcaagauccagaggcugcu

SEQ ID NO: 431016 - RNA, 22 nt, Human
caaguauuuuaaggacuagugg

SEQ ID NO: 431017 - RNA, 22 nt, Human
cacauugcagguugagaaggug

SEQ ID NO: 431018 - RNA, 22 nt, Human
agggaagggcagggucuaugca

SEQ ID NO: 431019 - RNA, 22 nt, Human
ggcaggcuggcuuuguuccagg

SEQ ID NO: 431020 - RNA, 22 nt, Human
cugcccaggggagugcugucgg

SEQ ID NO: 431021 - RNA, 22 nt, Human
aacaguacuggacaaggaguca

SEQ ID NO: 431022 - RNA, 22 nt, Human
acauucuauuucaucaugucua

SEQ ID NO: 431023 - RNA, 22 nt, Human
gucaggggccaugggccaagga

SEQ ID NO: 431024 - RNA, 22 nt, Human
aaagagggacaggcgcagacac

SEQ ID NO: 431025 - RNA, 22 nt, Human
augcauauuucuugggcuuacc

SEQ ID NO: 431026 - RNA, 22 nt, Human
ccagucugaggccuggugaggg

SEQ ID NO: 431027 - RNA, 22 nt, Human
uggugagauguauggaggguug

SEQ ID NO: 431028 - RNA, 20 nt, Human
aggaaggagaaucugagcaa

SEQ ID NO: 431029 - RNA, 22 nt, Human
cuggggcccaucgagggcugag

SEQ ID NO: 431030 - RNA, 22 nt, Human
gccuccugaagugcugggauua

SEQ ID NO: 431031 - RNA, 22 nt, Human
ugcagaaggccugacauugcac

SEQ ID NO: 431032 - RNA, 22 nt, Human
ggucccaggagaauaggugcaa

SEQ ID NO: 431033 - RNA, 22 nt, Human
uacccaggagaaacagcagggc

SEQ ID NO: 431034 - RNA, 22 nt, Human
cucacauucacaggacagaagg

SEQ ID NO: 431035 - RNA, 22 nt, Human
gccacaggcacuuaagggcugg

SEQ ID NO: 431036 - RNA, 22 nt, Human
ggccugagcucuggggaggcaa

SEQ ID NO: 431037 - RNA, 22 nt, Human
ggcugcagauagccagccacca

SEQ ID NO: 431038 - RNA, 22 nt, Human
aauucaaagccgcuugggaauc

SEQ ID NO: 431039 - RNA, 22 nt, Human
ccuggcucuagaggccacuccu

SEQ ID NO: 431040 - RNA, 19 nt, Human
agcaccugugagagccugg

SEQ ID NO: 431041 - RNA, 23 nt, Human
auaaauuacuaucucccuagagc

SEQ ID NO: 431042 - RNA, 22 nt, Human
uuuagacacacuuuguauauuu

SEQ ID NO: 431043 - RNA, 22 nt, Human
ccagcagcugacaccaguccca

SEQ ID NO: 431044 - RNA, 17 nt, Human
cucagcagggcucacuu

SEQ ID NO: 431045 - RNA, 22 nt, Human
gcuguuucuuuccuggcacuug

SEQ ID NO: 431046 - RNA, 22 nt, Human
ugccucaggcaccuggcagguu

SEQ ID NO: 431047 - RNA, 22 nt, Human
ugcaggacucaaggguagcagg

SEQ ID NO: 431048 - RNA, 22 nt, Human
gcccauggcagaacugugagca

SEQ ID NO: 431049 - RNA, 22 nt, Human
agucccaguucgguucuuccuc

SEQ ID NO: 431050 - RNA, 22 nt, Human
gaacauuuggauuuguaaauuu

SEQ ID NO: 431051 - RNA, 22 nt, Human
gcucugcuaauauuguaguacc

SEQ ID NO: 431052 - RNA, 22 nt, Human
ccagagcaauucucacagaacu

SEQ ID NO: 431053 - RNA, 22 nt, Human
aauuuccagaucagaugacuca

SEQ ID NO: 431054 - RNA, 18 nt, Human
uucuggcucacucaugcu

SEQ ID NO: 431055 - RNA, 22 nt, Human
ugugaggcuaccugccaggguc

SEQ ID NO: 431056 - RNA, 22 nt, Human
uuaaggcauugauauggugcua

SEQ ID NO: 431057 - RNA, 22 nt, Human
gucccagggagguucagggcuu

SEQ ID NO: 431058 - RNA, 21 nt, Human
agagacagagaaaguaacauu

SEQ ID NO: 431059 - RNA, 22 nt, Human
aaaucucaauuugaauuguagc

SEQ ID NO: 431060 - RNA, 22 nt, Human
ccaggccuuucuucuuggucug

SEQ ID NO: 431061 - RNA, 23 nt, Human
guccuagugcuuggugcccaggc

SEQ ID NO: 431062 - RNA, 22 nt, Human
acagaauuaggagauccucuug

SEQ ID NO: 431063 - RNA, 22 nt, Human
gcacuugucaaauauuauagua

SEQ ID NO: 431064 - RNA, 22 nt, Human
ugcaggacauuaguuaugaauu

SEQ ID NO: 431065 - RNA, 22 nt, Human
ccucuggggugagugggccacu

SEQ ID NO: 431066 - RNA, 22 nt, Human
gaaucacagaggcaaauucuga

SEQ ID NO: 431067 - RNA, 22 nt, Human
cuccaggaccagggcuccugga

SEQ ID NO: 431068 - RNA, 22 nt, Human
ggggcaaagggagagucccuac

SEQ ID NO: 431069 - RNA, 23 nt, Human
uggcagauacaggcaugacuucu

SEQ ID NO: 431070 - RNA, 22 nt, Human
uugcagcuguugcaaagucucu

SEQ ID NO: 431071 - RNA, 22 nt, Human
auuacagaaagcaauauugagu

SEQ ID NO: 431072 - RNA, 22 nt, Human
ugggcaaguaucggacucugag

SEQ ID NO: 431073 - RNA, 22 nt, Human
aaggcaauuucagggcucucua

SEQ ID NO: 431074 - RNA, 22 nt, Human
uaaauucacuccugguagaccu

SEQ ID NO: 431075 - RNA, 22 nt, Human
caaagugagagaauggcagaaa

SEQ ID NO: 431076 - RNA, 22 nt, Human
aaauuauuaugccccucuauaa

SEQ ID NO: 431077 - RNA, 22 nt, Human
agcugccuguccuaggccauca

SEQ ID NO: 431078 - RNA, 22 nt, Human
agccugucugucuccaaagcug

SEQ ID NO: 431079 - RNA, 22 nt, Human
aggccugggucucgugccuacc

SEQ ID NO: 431080 - RNA, 22 nt, Human
gcccugugccagucacgcugug

SEQ ID NO: 431081 - RNA, 22 nt, Human
augggaggaaggaggcccuuga

SEQ ID NO: 431082 - RNA, 22 nt, Human
cagcccugcagccauggccugu

SEQ ID NO: 431083 - RNA, 22 nt, Human
cccugccucugaagcugcucag

SEQ ID NO: 431084 - RNA, 22 nt, Human
caucaagauggaagagcaaaua

SEQ ID NO: 431085 - RNA, 22 nt, Human
gaacauucuugggcaaguuacu

SEQ ID NO: 431086 - RNA, 22 nt, Human
gaacagagcugacuacaaggca

SEQ ID NO: 431087 - RNA, 22 nt, Human
aagcugccaaugguaagcugcu

SEQ ID NO: 431088 - RNA, 22 nt, Human
ugggcagaggacagggaagauc

SEQ ID NO: 431089 - RNA, 22 nt, Human
gccaggcuccccggaucccugg

SEQ ID NO: 431090 - RNA, 22 nt, Human
gggcagcagcaggaggucucug

SEQ ID NO: 431091 - RNA, 21 nt, Human
gcagccagacgggauucaguu

SEQ ID NO: 431092 - RNA, 22 nt, Human
ucccuggguccugcuugcucuc

SEQ ID NO: 431093 - RNA, 22 nt, Human
aggaaggagggcagauauuaag

SEQ ID NO: 431094 - RNA, 22 nt, Human
uuuuccucaccuaacucaaggu

SEQ ID NO: 431095 - RNA, 22 nt, Human
acaugaaaguuauucugaguug

SEQ ID NO: 431096 - RNA, 22 nt, Human
auuaaauuggacgcugggggaa

SEQ ID NO: 431097 - RNA, 23 nt, Human
cugggcuguccugaggucaccuc

SEQ ID NO: 431098 - RNA, 22 nt, Human
cuugggagacacaagaagacau

SEQ ID NO: 431099 - RNA, 22 nt, Human
ccuuugcauucuagauguuuag

SEQ ID NO: 431100 - RNA, 23 nt, Human
auaugucaugcaccagcacuuua

SEQ ID NO: 431101 - RNA, 19 nt, Human
ccugugugggguagagauc

SEQ ID NO: 431102 - RNA, 22 nt, Human
cuccuuccugguuagcaccuua

SEQ ID NO: 431103 - RNA, 22 nt, Human
ucagacaggcuucuuucucccu

SEQ ID NO: 431104 - RNA, 22 nt, Human
uccccuccaacuccaacuaugg

SEQ ID NO: 431105 - RNA, 20 nt, Human
gcauugaguauagacagaug

SEQ ID NO: 431106 - RNA, 22 nt, Human
gccuucuguccaaccccacgau

SEQ ID NO: 431107 - RNA, 22 nt, Human
acagaguacauucagagacuau

SEQ ID NO: 431108 - RNA, 20 nt, Human
ugcucaggauggagaggugu

SEQ ID NO: 431109 - RNA, 22 nt, Human
aagcacagggacuuuaggaaua

SEQ ID NO: 431110 - RNA, 22 nt, Human
uuacagaagaguaacuuggcaa

SEQ ID NO: 431111 - RNA, 22 nt, Human
aggaaggaagagacaccauuug

SEQ ID NO: 431112 - RNA, 22 nt, Human
cuggagagggagcccuggcagu

SEQ ID NO: 431113 - RNA, 21 nt, Human
agaagcuagucacuaaaucca

SEQ ID NO: 431114 - RNA, 22 nt, Human
ucccagaguauuagcaauugcu

SEQ ID NO: 431115 - RNA, 22 nt, Human
ggacaggcugcaucugagcaug

SEQ ID NO: 431116 - RNA, 21 nt, Human
ugucacagauucucagcuugc

SEQ ID NO: 431117 - RNA, 22 nt, Human
cacaugaaggcuggggucguga

SEQ ID NO: 431118 - RNA, 19 nt, Human
ggagaagcccaggaauccu

SEQ ID NO: 431119 - RNA, 22 nt, Human
uggcuccucuucuggguguccc

SEQ ID NO: 431120 - RNA, 22 nt, Human
gaaaugaaauagcaccaagguu

SEQ ID NO: 431121 - RNA, 22 nt, Human
agcuaaugaugagauacagaua

SEQ ID NO: 431122 - RNA, 22 nt, Human
gcuggcuccucuguccucacgg

SEQ ID NO: 431123 - RNA, 22 nt, Human
uaguccugaccagcuggauguu

SEQ ID NO: 431124 - RNA, 22 nt, Human
cugcagugaaaucaggaagcaa

SEQ ID NO: 431125 - RNA, 22 nt, Human
uaguucaccccucuuuauuuuc

SEQ ID NO: 431126 - RNA, 22 nt, Human
gcccucagaguuccccacagug

SEQ ID NO: 431127 - RNA, 21 nt, Human
acagcagcaaucugucuuucc

SEQ ID NO: 431128 - RNA, 22 nt, Human
ugcaaauuauugggccccaacu

SEQ ID NO: 431129 - RNA, 22 nt, Human
agcucuccacacauaggacuag

SEQ ID NO: 431130 - RNA, 22 nt, Human
uucaagaagguacauuuacauc

SEQ ID NO: 431131 - RNA, 22 nt, Human
gcugugugcucacguaguggaa

SEQ ID NO: 431132 - RNA, 22 nt, Human
aaaggcauggaacagauucucc

SEQ ID NO: 431133 - RNA, 22 nt, Human
ucuggcucuuugggugauugua

SEQ ID NO: 431134 - RNA, 22 nt, Human
ucagccugcuccaagugcugcc

SEQ ID NO: 431135 - RNA, 22 nt, Human
cagcccagcagggucuggcccu

SEQ ID NO: 431136 - RNA, 23 nt, Human
uaugccaaaauggaaaguguaua

SEQ ID NO: 431137 - RNA, 22 nt, Human
cagagcagacguugagauuaag

SEQ ID NO: 431138 - RNA, 21 nt, Human
agaagccuggguggagguggg

SEQ ID NO: 431139 - RNA, 18 nt, Human
ggguccugugggagacag

SEQ ID NO: 431140 - RNA, 22 nt, Human
aaguggcuuugagcuucugcca

SEQ ID NO: 431141 - RNA, 22 nt, Human
cagaggcuguguaggcagacug

SEQ ID NO: 431142 - RNA, 16 nt, Human
cagacagagaacaggg

SEQ ID NO: 431143 - RNA, 22 nt, Human
cagcuccugccugggcagcugu

SEQ ID NO: 431144 - RNA, 22 nt, Human
aaaauguaugauggaggugcua

SEQ ID NO: 431145 - RNA, 22 nt, Human
ccuguugucucuuccuguugac

SEQ ID NO: 431146 - RNA, 22 nt, Human
ugggcugcccaagguggccaug

SEQ ID NO: 431147 - RNA, 22 nt, Human
gugggccuugcagggugcaggg

SEQ ID NO: 431148 - RNA, 22 nt, Human
gcagcugucacuuucacaaugc

SEQ ID NO: 431149 - RNA, 22 nt, Human
uguauucuuaguuuuaaucaga

SEQ ID NO: 431150 - RNA, 22 nt, Human
agagccuggaccugagcuacaa

SEQ ID NO: 431151 - RNA, 22 nt, Human
agcucacagaaauccugcagga

SEQ ID NO: 431152 - RNA, 22 nt, Human
ccugugugucugucacugcaca

SEQ ID NO: 431153 - RNA, 20 nt, Human
ucaagacagacauggaguuu

SEQ ID NO: 431154 - RNA, 19 nt, Human
cugaggcccauguaccaug

SEQ ID NO: 431155 - RNA, 22 nt, Human
gugcccuggcucacagugucuc

SEQ ID NO: 431156 - RNA, 22 nt, Human
gugcccugucucuugucuccag

SEQ ID NO: 431157 - RNA, 22 nt, Human
cugaaucaugccauuuugcuua

SEQ ID NO: 431158 - RNA, 22 nt, Human
ggcugcuggggacgugggagag

SEQ ID NO: 431159 - RNA, 22 nt, Human
aacauugaaauauuugcaauag

SEQ ID NO: 431160 - RNA, 22 nt, Human
cacaauguguuggguuaaguuu

SEQ ID NO: 431161 - RNA, 22 nt, Human
agaggcaggaagagcugauuuu

SEQ ID NO: 431162 - RNA, 22 nt, Human
ggcaggagcucuccaguuugcc

SEQ ID NO: 431163 - RNA, 22 nt, Human
ucccagagcaguacuccaggag

SEQ ID NO: 431164 - RNA, 22 nt, Human
cugggacagcugagacaggaga

SEQ ID NO: 431165 - RNA, 22 nt, Human
cagaagaguagcugaacaaguu

SEQ ID NO: 431166 - RNA, 22 nt, Human
ccacagagacucugcaggacug

SEQ ID NO: 431167 - RNA, 22 nt, Human
cgaggcaggcaggcggaggaua

SEQ ID NO: 431168 - RNA, 22 nt, Human
cacugaaaggaaaccagagcau

SEQ ID NO: 431169 - RNA, 22 nt, Human
acauucaaggccuucugacaca

SEQ ID NO: 431170 - RNA, 22 nt, Human
uggcuccuuccgcagcaugccu

SEQ ID NO: 431171 - RNA, 21 nt, Human
cauuucuaagccuggcuauag

SEQ ID NO: 431172 - RNA, 17 nt, Human
aauacugcuuauccagg

SEQ ID NO: 431173 - RNA, 22 nt, Human
uaguggagaaguggagucugug

SEQ ID NO: 431174 - RNA, 20 nt, Human
guccugggagccacagcaca

SEQ ID NO: 431175 - RNA, 23 nt, Human
ucccugagcuggagagacugcac

SEQ ID NO: 431176 - RNA, 22 nt, Human
caggaaggcgcggcugugccug

SEQ ID NO: 431177 - RNA, 22 nt, Human
aggcacaggaacaggaaaagag

SEQ ID NO: 431178 - RNA, 22 nt, Human
ucagaauuagagcucuucuuga

SEQ ID NO: 431179 - RNA, 21 nt, Human
cccagggaagccgcagucacc

SEQ ID NO: 431180 - RNA, 22 nt, Human
auagcaauuaagcuccagaauu

SEQ ID NO: 431181 - RNA, 22 nt, Human
gcaugcugagcccacgccuggg

SEQ ID NO: 431182 - RNA, 22 nt, Human
aagcacaauuucaccuucuugu

SEQ ID NO: 431183 - RNA, 22 nt, Human
cuuuggcaacacaugugggaca

SEQ ID NO: 431184 - RNA, 22 nt, Human
uuagcauuucuggaaucacaag

SEQ ID NO: 431185 - RNA, 22 nt, Human
uuuauuaauguagcauccaugg

SEQ ID NO: 431186 - RNA, 22 nt, Human
ugacagagagguaaguuaugaa

SEQ ID NO: 431187 - RNA, 22 nt, Human
aagcagaauuucccacuaguug

SEQ ID NO: 431188 - RNA, 22 nt, Human
uccugaaggcagauggggauca

SEQ ID NO: 431189 - RNA, 22 nt, Human
cuagccugggauuugaacuuau

SEQ ID NO: 431190 - RNA, 22 nt, Human
aacccagccguguagcugccgc

SEQ ID NO: 431191 - RNA, 22 nt, Human
cagcuguugucucucacauauu

SEQ ID NO: 431192 - RNA, 22 nt, Human
ucaggcugggcuccucucccca

SEQ ID NO: 431193 - RNA, 22 nt, Human
gcuuugcugggugcuucaugua

SEQ ID NO: 431194 - RNA, 22 nt, Human
uuugacaugaaguagcuuauaa

SEQ ID NO: 431195 - RNA, 17 nt, Human
cuuugcagcagacaugu

SEQ ID NO: 431196 - RNA, 23 nt, Human
ccugcagcugccacgcccugcuc

SEQ ID NO: 431197 - RNA, 22 nt, Human
cucggaauggaacaacagcggu

SEQ ID NO: 431198 - RNA, 22 nt, Human
gcugcuuucuguuaggaauugg

SEQ ID NO: 431199 - RNA, 22 nt, Human
ccagaagucaggaaugagucuu

SEQ ID NO: 431200 - RNA, 23 nt, Human
cuagaugcaagcuccaugaggga

SEQ ID NO: 431201 - RNA, 23 nt, Human
acagguacacuugauugcaaucc

SEQ ID NO: 431202 - RNA, 22 nt, Human
uggugccuugggccuacagcgc

SEQ ID NO: 431203 - RNA, 22 nt, Human
ugcagagggacagccacagcuc

SEQ ID NO: 431204 - RNA, 22 nt, Human
aauacaaucaaauucacuagca

SEQ ID NO: 431205 - RNA, 22 nt, Human
cucagggaguagcacaugugga

SEQ ID NO: 431206 - RNA, 22 nt, Human
ccuggaugauccaugucaugga

SEQ ID NO: 431207 - RNA, 22 nt, Human
gcacaaaagguacuucauguag

SEQ ID NO: 431208 - RNA, 22 nt, Human
cagcuugggggcgcuggccuca

SEQ ID NO: 431209 - RNA, 22 nt, Human
auucuuuauugcugaugguuau

SEQ ID NO: 431210 - RNA, 22 nt, Human
ucuuugcaacucccauuuccau

SEQ ID NO: 431211 - RNA, 22 nt, Human
gccugcagaggugcugcuagcu

SEQ ID NO: 431212 - RNA, 22 nt, Human
cuggguaccucaccgcugcugc

SEQ ID NO: 431213 - RNA, 22 nt, Human
uggccuggccacauccagcagg

SEQ ID NO: 431214 - RNA, 22 nt, Human
uggcucuggauuaaucuaggaa

SEQ ID NO: 431215 - RNA, 22 nt, Human
agcuggugucaccuccagucca

SEQ ID NO: 431216 - RNA, 22 nt, Human
cagaggaagagauacaagcccu

SEQ ID NO: 431217 - RNA, 22 nt, Human
uggcagauuguaggcaguuagg

SEQ ID NO: 431218 - RNA, 22 nt, Human
cacaggagcuguggggcagugu

SEQ ID NO: 431219 - RNA, 22 nt, Human
caggaacauuguagaauugaaa

SEQ ID NO: 431220 - RNA, 22 nt, Human
aagcugcagacccccugucuca

SEQ ID NO: 431221 - RNA, 22 nt, Human
uccuucccaggugucgccgccu

SEQ ID NO: 431222 - RNA, 22 nt, Human
cacacagaugguaagggaggga

SEQ ID NO: 431223 - RNA, 22 nt, Human
ucucccaggcugcccuguggac

SEQ ID NO: 431224 - RNA, 20 nt, Human
cccugcagccaugggagugg

SEQ ID NO: 431225 - RNA, 22 nt, Human
ucaggaaggcuucacacgagug

SEQ ID NO: 431226 - RNA, 22 nt, Human
ugcauaauggaugauuucacaa

SEQ ID NO: 431227 - RNA, 22 nt, Human
uucaccuguguuuuguggcuga

SEQ ID NO: 431228 - RNA, 22 nt, Human
aaaguuuuagcuguccaguucc

SEQ ID NO: 431229 - RNA, 22 nt, Human
cagcuggugaacuaguuuuuca

SEQ ID NO: 431230 - RNA, 22 nt, Human
uguguguguuuacaguuucuca

SEQ ID NO: 431231 - RNA, 22 nt, Human
gagggauggugugagaggcuca

SEQ ID NO: 431232 - RNA, 21 nt, Human
guucagagauuauugagucau

SEQ ID NO: 431233 - RNA, 22 nt, Human
aaagacuugggagcaguaugcu

SEQ ID NO: 431234 - RNA, 23 nt, Human
uggaguugauguccuucugugcu

SEQ ID NO: 431235 - RNA, 22 nt, Human
gcaguuauguauguguuugaga

SEQ ID NO: 431236 - RNA, 22 nt, Human
uguacaaauucaguucuagggu

SEQ ID NO: 431237 - RNA, 22 nt, Human
gaggagacugacagcagauucu

SEQ ID NO: 431238 - RNA, 22 nt, Human
ccagcgcuucccaucagggagg

SEQ ID NO: 431239 - RNA, 22 nt, Human
ccccaggccuguuggauggcgc

SEQ ID NO: 431240 - RNA, 22 nt, Human
uaacaguuuugaguuuugcuuc

SEQ ID NO: 431241 - RNA, 22 nt, Human
aaaugcagaucccugaaucuca

SEQ ID NO: 431242 - RNA, 22 nt, Human
cccaagggagugccuggucaac

SEQ ID NO: 431243 - RNA, 22 nt, Human
gugggaugcaguggugaguggc

SEQ ID NO: 431244 - RNA, 22 nt, Human
uucacagugcucacaguucagu

SEQ ID NO: 431245 - RNA, 21 nt, Human
cagagcuguccaaacccugac

SEQ ID NO: 431246 - RNA, 22 nt, Human
gacaauuucucaauauagaaac

SEQ ID NO: 431247 - RNA, 20 nt, Human
agcuccuggacuagagagug

SEQ ID NO: 431248 - RNA, 22 nt, Human
ccagcagcuuugcauacacuaa

SEQ ID NO: 431249 - RNA, 22 nt, Human
ugcaggacuucaggacucugag

SEQ ID NO: 431250 - RNA, 22 nt, Human
ccuggcugcuauagcagcaugu

SEQ ID NO: 431251 - RNA, 20 nt, Human
acauguacagacagguuucu

SEQ ID NO: 431252 - RNA, 22 nt, Human
gaaaggagggaaacagagcggu

SEQ ID NO: 431253 - RNA, 22 nt, Human
caguggucugugcuucuguaca

SEQ ID NO: 431254 - RNA, 22 nt, Human
ggaguuguucugcaggagagaa

SEQ ID NO: 431255 - RNA, 22 nt, Human
ccaggaagcauaauguaguggg

SEQ ID NO: 431256 - RNA, 22 nt, Human
uggcccugcugggucagagcug

SEQ ID NO: 431257 - RNA, 22 nt, Human
agcagagaggagguggcccugu

SEQ ID NO: 431258 - RNA, 22 nt, Human
guccagccagcugguccuugcc

SEQ ID NO: 431259 - RNA, 22 nt, Human
ugcagacaagucgugggaucuu

SEQ ID NO: 431260 - RNA, 22 nt, Human
aucuaacuuauguuuuaccaaa

SEQ ID NO: 431261 - RNA, 22 nt, Human
acugcauuugucugucucaauu

SEQ ID NO: 431262 - RNA, 22 nt, Human
aaaugucagaggaacauauuga

SEQ ID NO: 431263 - RNA, 22 nt, Human
acuuuccuagacuucagugaca

SEQ ID NO: 431264 - RNA, 22 nt, Human
cugaagcuuaguuuacgcucca

SEQ ID NO: 431265 - RNA, 22 nt, Human
aggcucugugauccacaaugag

SEQ ID NO: 431266 - RNA, 22 nt, Human
gcacagaaguaaaauacaaguc

SEQ ID NO: 431267 - RNA, 18 nt, Human
agcagcugugccacacug

SEQ ID NO: 431268 - RNA, 22 nt, Human
ucuaaauucuuuccuggguuga

SEQ ID NO: 431269 - RNA, 22 nt, Human
aauauggcuccauuccuuuagg

SEQ ID NO: 431270 - RNA, 22 nt, Human
ccuggcucgcugaccucagggg

SEQ ID NO: 431271 - RNA, 23 nt, Human
uucuuuauaaaucaaugggaugu

SEQ ID NO: 431272 - RNA, 22 nt, Human
ugcauuuguaacauucaagaau

SEQ ID NO: 431273 - RNA, 22 nt, Human
aaagugcaguccaugaaauuaa

SEQ ID NO: 431274 - RNA, 22 nt, Human
aggaagcaaaaggcagggucua

SEQ ID NO: 431275 - RNA, 22 nt, Human
gugaagacuuggagaaguuaag

SEQ ID NO: 431276 - RNA, 22 nt, Human
uuauugcaacuccuaaauagag

SEQ ID NO: 431277 - RNA, 22 nt, Human
gaacaucuuauccauuuccucu

SEQ ID NO: 431278 - RNA, 22 nt, Human
gggccacacagaaccuccuggu

SEQ ID NO: 431279 - RNA, 22 nt, Human
acagaauuaacauuugaugaau

SEQ ID NO: 431280 - RNA, 20 nt, Human
auacacaugcagacagaugc

SEQ ID NO: 431281 - RNA, 22 nt, Human
caggcagccugcggucugcaca

SEQ ID NO: 431282 - RNA, 22 nt, Human
uggguggaauaaaucaguucug

SEQ ID NO: 431283 - RNA, 22 nt, Human
cagagcagagugauuguucugg

SEQ ID NO: 431284 - RNA, 22 nt, Human
cuggugcuggagccuagucccu

SEQ ID NO: 431285 - RNA, 22 nt, Human
uccugggcccaggcugccaggg

SEQ ID NO: 431286 - RNA, 22 nt, Human
gagauggagucuuuuucuguca

SEQ ID NO: 431287 - RNA, 22 nt, Human
aaaugugcuugugaucagcugu

SEQ ID NO: 431288 - RNA, 22 nt, Human
gcacaggcacagagggccacug

SEQ ID NO: 431289 - RNA, 22 nt, Human
uguuucaguccacuuaggcagc

SEQ ID NO: 431290 - RNA, 22 nt, Human
caggcagaggcuuuucauggcu

SEQ ID NO: 431291 - RNA, 22 nt, Human
uccugucugucuuuggucccuu

SEQ ID NO: 431292 - RNA, 22 nt, Human
ugguccuggccuugaccccagg

SEQ ID NO: 431293 - RNA, 22 nt, Human
gcugggagccccgagccagcgc

SEQ ID NO: 431294 - RNA, 22 nt, Human
aggcacagagaaguaaaguauc

SEQ ID NO: 431295 - RNA, 22 nt, Human
cugggugccagcauggcugagu

SEQ ID NO: 431296 - RNA, 22 nt, Human
gagagaauguacaugcuagggg

SEQ ID NO: 431297 - RNA, 22 nt, Human
guggcucucgccagccugcggg

SEQ ID NO: 431298 - RNA, 22 nt, Human
aaauucaguuuuaauaaucacu

SEQ ID NO: 431299 - RNA, 22 nt, Human
uuaaugaccuagagcaguaauu

SEQ ID NO: 431300 - RNA, 19 nt, Human
ucagaacucagaaugugua

SEQ ID NO: 431301 - RNA, 22 nt, Human
aagcugccugggaggaagggcu

SEQ ID NO: 431302 - RNA, 22 nt, Human
augauucagcccaauuuuucua

SEQ ID NO: 431303 - RNA, 22 nt, Human
ugcauuuuugagguuaacucaa

SEQ ID NO: 431304 - RNA, 22 nt, Human
auuaacaugaguuggagauagg

SEQ ID NO: 431305 - RNA, 22 nt, Human
cuggcucccgucugguggccau

SEQ ID NO: 431306 - RNA, 22 nt, Human
ucugaggccuagagaggggcuu

SEQ ID NO: 431307 - RNA, 22 nt, Human
cagagcuggcucugcauguaca

SEQ ID NO: 431308 - RNA, 22 nt, Human
uuuauugcauacacaaauguca

SEQ ID NO: 431309 - RNA, 23 nt, Human
ggacccuguggagggugagaguc

SEQ ID NO: 431310 - RNA, 22 nt, Human
agcuguggggaggaggcuagca

SEQ ID NO: 431311 - RNA, 22 nt, Human
gugcagguggcuucuagcuucu

SEQ ID NO: 431312 - RNA, 22 nt, Human
uuucuucuugauuuaaacaggg

SEQ ID NO: 431313 - RNA, 22 nt, Human
cuuugcaagugcuuuguagucc

SEQ ID NO: 431314 - RNA, 22 nt, Human
gccagcagcgagaguuuaaccu

SEQ ID NO: 431315 - RNA, 22 nt, Human
aaggcugggaaacaugcaggcc

SEQ ID NO: 431316 - RNA, 22 nt, Human
aaaucacagggucucuaaguau

SEQ ID NO: 431317 - RNA, 22 nt, Human
ggagacaggguugaaccacgca

SEQ ID NO: 431318 - RNA, 22 nt, Human
uuguauuuccuauaaccuuucu

SEQ ID NO: 431319 - RNA, 22 nt, Human
ugggugggagcgcccugucugg

SEQ ID NO: 431320 - RNA, 22 nt, Human
ucacuggugugagaggagcaaa

SEQ ID NO: 431321 - RNA, 22 nt, Human
uuuggccacagauccuuggggg

SEQ ID NO: 431322 - RNA, 22 nt, Human
cauuacaaaguuauaaacaguu

SEQ ID NO: 431323 - RNA, 22 nt, Human
auggcagggcccuuggcuccca

SEQ ID NO: 431324 - RNA, 17 nt, Human
ucugaagccagucugcu

SEQ ID NO: 431325 - RNA, 19 nt, Human
uucacauuggaagaaguag

SEQ ID NO: 431326 - RNA, 22 nt, Human
uuuccucuaaacgcauuugcuu

SEQ ID NO: 431327 - RNA, 22 nt, Human
aggcaccuugagagcaggagcu

SEQ ID NO: 431328 - RNA, 22 nt, Human
aaacacauuuuaggaaaaucua

SEQ ID NO: 431329 - RNA, 17 nt, Human
ggcagccucaggcguuu

SEQ ID NO: 431330 - RNA, 19 nt, Human
aaaguuuuauucucauuug

SEQ ID NO: 431331 - RNA, 23 nt, Human
uccuccugacacagccugaguga

SEQ ID NO: 431332 - RNA, 22 nt, Human
ugcucccaggacucuugagcca

SEQ ID NO: 431333 - RNA, 22 nt, Human
agagaauucuggugcuaacaag

SEQ ID NO: 431334 - RNA, 22 nt, Human
acagaugagacuccaggaccuu

SEQ ID NO: 431335 - RNA, 22 nt, Human
cugcauuauucuaguccaagcc

SEQ ID NO: 431336 - RNA, 22 nt, Human
agaggaagccauugcuuacuga

SEQ ID NO: 431337 - RNA, 22 nt, Human
cagggcuccccagagagccucu

SEQ ID NO: 431338 - RNA, 22 nt, Human
gucugaggguugugcuggagga

SEQ ID NO: 431339 - RNA, 22 nt, Human
aggcaccuggaucuuggaauuc

SEQ ID NO: 431340 - RNA, 22 nt, Human
acuccaggaaacuuaggggaaa

SEQ ID NO: 431341 - RNA, 22 nt, Human
ugucccuggagcuucugucccc

SEQ ID NO: 431342 - RNA, 22 nt, Human
cgucuaggccgugcccugaggu

SEQ ID NO: 431343 - RNA, 22 nt, Human
uucagagagaaaccagugggaa

SEQ ID NO: 431344 - RNA, 22 nt, Human
caggcacugugcugagcucugc

SEQ ID NO: 431345 - RNA, 22 nt, Human
caguguuuguugagaaaggcaa

SEQ ID NO: 431346 - RNA, 22 nt, Human
ugcccuggcuggagugcagugg

SEQ ID NO: 431347 - RNA, 22 nt, Human
agugaauauuuuuagacaccca

SEQ ID NO: 431348 - RNA, 22 nt, Human
caauuuuacucuuccucuucca

SEQ ID NO: 431349 - RNA, 22 nt, Human
ugcucaguccuccugcagugcc

SEQ ID NO: 431350 - RNA, 22 nt, Human
uuucagagcugagaugccacag

SEQ ID NO: 431351 - RNA, 22 nt, Human
gauggaggaaaaguuggaaugc

SEQ ID NO: 431352 - RNA, 22 nt, Human
gaucuuuucagucuugguaguu

SEQ ID NO: 431353 - RNA, 22 nt, Human
aacaggcagcagacugaaucug

SEQ ID NO: 431354 - RNA, 22 nt, Human
ugggccuguugccugaguccau

SEQ ID NO: 431355 - RNA, 22 nt, Human
cccagagcuccgguccugccca

SEQ ID NO: 431356 - RNA, 22 nt, Human
gcauuauuaacuggaggaaaag

SEQ ID NO: 431357 - RNA, 22 nt, Human
agauauaguuguugagaagaac

SEQ ID NO: 431358 - RNA, 22 nt, Human
ugugaauagucagcauuuuguu

SEQ ID NO: 431359 - RNA, 22 nt, Human
uuuuacauugggaaaugccucu

SEQ ID NO: 431360 - RNA, 20 nt, Human
agaaggcaggagacaaaagg

SEQ ID NO: 431361 - RNA, 22 nt, Human
aaggccucaggugaggcugccc

SEQ ID NO: 431362 - RNA, 22 nt, Human
cacagaggauuuuuagggcagu

SEQ ID NO: 431363 - RNA, 22 nt, Human
gugaaggacuagcauggagggc

SEQ ID NO: 431364 - RNA, 22 nt, Human
gaauacaaagcagaacucauac

SEQ ID NO: 431365 - RNA, 22 nt, Human
ucugccugcggcugcagguggc

SEQ ID NO: 431366 - RNA, 22 nt, Human
gcucaaagaccagacagaggag

SEQ ID NO: 431367 - RNA, 22 nt, Human
uaaaugcuaucgcauaaaaccu

SEQ ID NO: 431368 - RNA, 22 nt, Human
uuugaaaggguuaugagacuga

SEQ ID NO: 431369 - RNA, 22 nt, Human
cuggcucccaugagcucucacg

SEQ ID NO: 431370 - RNA, 22 nt, Human
uucagaaucuaugugccagcuc

SEQ ID NO: 431371 - RNA, 22 nt, Human
uucuuuauccuauuuguaggug

SEQ ID NO: 431372 - RNA, 22 nt, Human
gugaauaauauuguuuauaaaa

SEQ ID NO: 431373 - RNA, 22 nt, Human
uggccugggcaugaagcaucgu

SEQ ID NO: 431374 - RNA, 22 nt, Human
uuucucccuccacuacaggcuc

SEQ ID NO: 431375 - RNA, 23 nt, Human
uauugcaagcucugccucccggg

SEQ ID NO: 431376 - RNA, 22 nt, Human
cucucagaaguuuaugucagaa

SEQ ID NO: 431377 - RNA, 22 nt, Human
gaaaaaugcuccaaaucugugg

SEQ ID NO: 431378 - RNA, 22 nt, Human
agaggauucacugcagaagaca

SEQ ID NO: 431379 - RNA, 22 nt, Human
gcacagcaguggcauaaacaau

SEQ ID NO: 431380 - RNA, 19 nt, Human
cugaggugcaguaagaggc

SEQ ID NO: 431381 - RNA, 22 nt, Human
cacaguacuuaauucucuaaau

SEQ ID NO: 431382 - RNA, 22 nt, Human
uccauacucagaaaguauugca

SEQ ID NO: 431383 - RNA, 22 nt, Human
ggcugggcuccgggagcaugcg

SEQ ID NO: 431384 - RNA, 22 nt, Human
cuggggggcuacugacagagga

SEQ ID NO: 431385 - RNA, 22 nt, Human
uguuuaaugaagaugguuuuuc

SEQ ID NO: 431386 - RNA, 22 nt, Human
ucauuuauaaggaugcaauuaa

SEQ ID NO: 431387 - RNA, 22 nt, Human
augguggacgggagacaggacu

SEQ ID NO: 431388 - RNA, 22 nt, Human
auuuauagggcauugaaaacug

SEQ ID NO: 431389 - RNA, 22 nt, Human
auacaaucaucauuauauuccc

SEQ ID NO: 431390 - RNA, 22 nt, Human
uggaaacacucaagcuuauauu

SEQ ID NO: 431391 - RNA, 22 nt, Human
agcuaaugaaauauuuucugau

SEQ ID NO: 431392 - RNA, 22 nt, Human
aagcacagugggcagagcagcc

SEQ ID NO: 431393 - RNA, 22 nt, Human
ugcagaagacacaagguaacgu

SEQ ID NO: 431394 - RNA, 22 nt, Human
acacuucauuuacauuauaggc

SEQ ID NO: 431395 - RNA, 22 nt, Human
auuaaggcacuugagcaugaug

SEQ ID NO: 431396 - RNA, 22 nt, Human
agagagcugacuuuggagucag

SEQ ID NO: 431397 - RNA, 22 nt, Human
uaauuuuaauaguauguggcau

SEQ ID NO: 431398 - RNA, 21 nt, Human
agagaagggauuccaggcccu

SEQ ID NO: 431399 - RNA, 22 nt, Human
gcagcugccgugagcucacgcc

SEQ ID NO: 431400 - RNA, 22 nt, Human
uggcagaguggaccauacucaa

SEQ ID NO: 431401 - RNA, 22 nt, Human
gagcuguccuaccaggaguccu

SEQ ID NO: 431402 - RNA, 22 nt, Human
augaccaagaguccaggucaag

SEQ ID NO: 431403 - RNA, 22 nt, Human
agggcagagcugucuaaauggc

SEQ ID NO: 431404 - RNA, 22 nt, Human
ccuggagcaaaaaucuaaggag

SEQ ID NO: 431405 - RNA, 22 nt, Human
cauucaaauuaagauuuuguua

SEQ ID NO: 431406 - RNA, 18 nt, Human
uccugccugcgggcuccc

SEQ ID NO: 431407 - RNA, 22 nt, Human
aacauugaauuuaaaauacagu

SEQ ID NO: 431408 - RNA, 22 nt, Human
cccagagagcauuuggacaaag

SEQ ID NO: 431409 - RNA, 22 nt, Human
ucccagccggugccuggguccc

SEQ ID NO: 431410 - RNA, 20 nt, Human
cagcagagacccauggggag

SEQ ID NO: 431411 - RNA, 22 nt, Human
ucuucaaauacagucauauuga

SEQ ID NO: 431412 - RNA, 22 nt, Human
aguuuuucugcuggucucacua

SEQ ID NO: 431413 - RNA, 22 nt, Human
agcugccagcaucccggaaggg

SEQ ID NO: 431414 - RNA, 22 nt, Human
caggcagcucuaauggaaagug

SEQ ID NO: 431415 - RNA, 23 nt, Human
uucaugagauuaucugcaugugu

SEQ ID NO: 431416 - RNA, 22 nt, Human
auaucucauuaccuugcuguuc

SEQ ID NO: 431417 - RNA, 22 nt, Human
cagcuuuagagaaaacauauuu

SEQ ID NO: 431418 - RNA, 21 nt, Human
ccugugugucugacugggcua

SEQ ID NO: 431419 - RNA, 22 nt, Human
uaaggaaacaacuuguauuuuu

SEQ ID NO: 431420 - RNA, 22 nt, Human
cacagugcaugaugggcagaag

SEQ ID NO: 431421 - RNA, 22 nt, Human
gggauggcucaaaggagucagg

SEQ ID NO: 431422 - RNA, 22 nt, Human
uauuuguuccagagauaaaaau

SEQ ID NO: 431423 - RNA, 22 nt, Human
auucagaauuuuggggagcuaa

SEQ ID NO: 431424 - RNA, 22 nt, Human
uagaaacaucagcuaaccaaaa

SEQ ID NO: 431425 - RNA, 22 nt, Human
uuugcaaacuuuccucuggacc

SEQ ID NO: 431426 - RNA, 22 nt, Human
uuccuuuuagaaucaugaagac

SEQ ID NO: 431427 - RNA, 22 nt, Human
caagaaauguuuacugagcauc

SEQ ID NO: 431428 - RNA, 22 nt, Human
gcccagccccuggguggacgug

SEQ ID NO: 431429 - RNA, 22 nt, Human
caagcagacaguaggccuagaa

SEQ ID NO: 431430 - RNA, 22 nt, Human
agcaccugucaaguccaggcug

SEQ ID NO: 431431 - RNA, 22 nt, Human
ucagaggagggacucagaccca

SEQ ID NO: 431432 - RNA, 22 nt, Human
gaagacauguuuuuaauaugua

SEQ ID NO: 431433 - RNA, 22 nt, Human
uuuaaauucugucugccgcuua

SEQ ID NO: 431434 - RNA, 22 nt, Human
ccaggaagcggugagggcugcc

SEQ ID NO: 431435 - RNA, 22 nt, Human
ugcuagggaagaacgagggaau

SEQ ID NO: 431436 - RNA, 22 nt, Human
uugagacacuuugggcaucacu

SEQ ID NO: 431437 - RNA, 22 nt, Human
gacagguaaagaugguggcagg

SEQ ID NO: 431438 - RNA, 22 nt, Human
ugcagaagcagagaguugccaa

SEQ ID NO: 431439 - RNA, 22 nt, Human
gccaccagcagaaaaggggcca

SEQ ID NO: 431440 - RNA, 22 nt, Human
aagcugaggcccauggcaaggu

SEQ ID NO: 431441 - RNA, 22 nt, Human
uaggcagggauuaggguugauu

SEQ ID NO: 431442 - RNA, 22 nt, Human
caggaagcucuuagcagucacc

SEQ ID NO: 431443 - RNA, 22 nt, Human
gagggggcuagcgcagugccca

SEQ ID NO: 431444 - RNA, 22 nt, Human
cuggccaggcuugggacagaca

SEQ ID NO: 431445 - RNA, 22 nt, Human
cuguccuguagcuccaucaguc

SEQ ID NO: 431446 - RNA, 22 nt, Human
gcagcccucccugggugugucu

SEQ ID NO: 431447 - RNA, 22 nt, Human
aaacugcacuuuauuuugucaa

SEQ ID NO: 431448 - RNA, 22 nt, Human
ugcuccaugcgcucggccggcg

SEQ ID NO: 431449 - RNA, 22 nt, Human
cacauuuaggagguggggaagc

SEQ ID NO: 431450 - RNA, 22 nt, Human
gcccugggcucccugcuccaca

SEQ ID NO: 431451 - RNA, 22 nt, Human
ccagaggaaaaauaucucccua

SEQ ID NO: 431452 - RNA, 22 nt, Human
agcugguuuaggaaaagguagg

SEQ ID NO: 431453 - RNA, 22 nt, Human
ucagacaguuugcagugugccu

SEQ ID NO: 431454 - RNA, 22 nt, Human
gccaacaggccuugcucugcuc

SEQ ID NO: 431455 - RNA, 22 nt, Human
augcagcuauuugagcauguca

SEQ ID NO: 431456 - RNA, 22 nt, Human
cugacccagaggaacugcaaag

SEQ ID NO: 431457 - RNA, 22 nt, Human
auccuacaaagcagggcuaugg

SEQ ID NO: 431458 - RNA, 22 nt, Human
acauuaaaaaauguugcaugaa

SEQ ID NO: 431459 - RNA, 22 nt, Human
cccuccccagggucauauugaa

SEQ ID NO: 431460 - RNA, 22 nt, Human
uucuuuuuaucuucccauaaga

SEQ ID NO: 431461 - RNA, 22 nt, Human
aacuuugcauaacuaacuacag

SEQ ID NO: 431462 - RNA, 22 nt, Human
aggccagcccucaccuguguuc

SEQ ID NO: 431463 - RNA, 22 nt, Human
aauguaccagccuaagaagugg

SEQ ID NO: 431464 - RNA, 22 nt, Human
aacacuuucuauuauuaugguu

SEQ ID NO: 431465 - RNA, 21 nt, Human
ucuuugcaucaguuguuuucu

SEQ ID NO: 431466 - RNA, 22 nt, Human
aagccgggccugagaaaugaca

SEQ ID NO: 431467 - RNA, 22 nt, Human
ccaggccucccuuuuccagcca

SEQ ID NO: 431468 - RNA, 22 nt, Human
gcacagaacagagaaauagcca

SEQ ID NO: 431469 - RNA, 22 nt, Human
gcuguucccauguggggcucag

SEQ ID NO: 431470 - RNA, 22 nt, Human
agggcugguauguccaugaaag

SEQ ID NO: 431471 - RNA, 22 nt, Human
aucaaauaaagguaccuagcuu

SEQ ID NO: 431472 - RNA, 20 nt, Human
ugugcccugcagacuucuuu

SEQ ID NO: 431473 - RNA, 22 nt, Human
uuacagaacugucuugaaauuu

SEQ ID NO: 431474 - RNA, 22 nt, Human
cugugucccaguaccuugggua

SEQ ID NO: 431475 - RNA, 22 nt, Human
cacauuuacauauaaaacuuuc

SEQ ID NO: 431476 - RNA, 22 nt, Human
agcagugcccauucugcccccu

SEQ ID NO: 431477 - RNA, 22 nt, Human
uggccugggugcugcugacauc

SEQ ID NO: 431478 - RNA, 22 nt, Human
agcacagauuugucaacauaga

SEQ ID NO: 431479 - RNA, 22 nt, Human
gggagccacagugaggugcaug

SEQ ID NO: 431480 - RNA, 22 nt, Human
gcaggccugguuuacaugguag

SEQ ID NO: 431481 - RNA, 22 nt, Human
ucugagggugggagaaggagcu

SEQ ID NO: 431482 - RNA, 22 nt, Human
cugggaggcccacguugggaag

SEQ ID NO: 431483 - RNA, 22 nt, Human
uccugccuucauacugcuguau

SEQ ID NO: 431484 - RNA, 21 nt, Human
uacaagaccggauucgggccc

SEQ ID NO: 431485 - RNA, 22 nt, Human
gugccucagcaccgccugcagc

SEQ ID NO: 431486 - RNA, 22 nt, Human
gggcacagagaagguuuuagug

SEQ ID NO: 431487 - RNA, 22 nt, Human
uguuuguucccucucuuuccug

SEQ ID NO: 431488 - RNA, 22 nt, Human
uuuauccaccuuacccuguucc

SEQ ID NO: 431489 - RNA, 22 nt, Human
caaggacacugauguucauccu

SEQ ID NO: 431490 - RNA, 22 nt, Human
agacaagacuaggcaguuguug

SEQ ID NO: 431491 - RNA, 22 nt, Human
uuugggcaguccuggaauuugu

SEQ ID NO: 431492 - RNA, 22 nt, Human
uggggcugucccgguuuggcga

SEQ ID NO: 431493 - RNA, 22 nt, Human
ucuggcuccuggcuccacugcc

SEQ ID NO: 431494 - RNA, 22 nt, Human
acugugcuuucucuggaggcau

SEQ ID NO: 431495 - RNA, 22 nt, Human
gaaguucaacugccaugcuugg

SEQ ID NO: 431496 - RNA, 22 nt, Human
uuuccucacucaugucaucagu

SEQ ID NO: 431497 - RNA, 22 nt, Human
acagagcaauaacagggagagg

SEQ ID NO: 431498 - RNA, 22 nt, Human
aauuuuacuucccucaguguag

SEQ ID NO: 431499 - RNA, 22 nt, Human
cagcugccaagaaucuuuucua

SEQ ID NO: 431500 - RNA, 22 nt, Human
aggcagcuggcagcacccaggg

SEQ ID NO: 431501 - RNA, 22 nt, Human
ucacaguagacuucucaagagc

SEQ ID NO: 431502 - RNA, 22 nt, Human
gugcccuggaugacuuuggucu

SEQ ID NO: 431503 - RNA, 22 nt, Human
cugugggagaggugccuggauu

SEQ ID NO: 431504 - RNA, 18 nt, Human
ugaggaaggggaaguauu

SEQ ID NO: 431505 - RNA, 22 nt, Human
agagcugagaauguggcuuccu

SEQ ID NO: 431506 - RNA, 22 nt, Human
cccagcuccuuacagggccgaa

SEQ ID NO: 431507 - RNA, 22 nt, Human
ucaggcugauaggaggaacuga

SEQ ID NO: 431508 - RNA, 22 nt, Human
gggcugagugucccaggccgaa

SEQ ID NO: 431509 - RNA, 22 nt, Human
ucugucacucuagagauggcag

SEQ ID NO: 431510 - RNA, 22 nt, Human
uuauagcagcaugauuuacaau

SEQ ID NO: 431511 - RNA, 22 nt, Human
uaauuuaugaugcaaagaaaag

SEQ ID NO: 431512 - RNA, 22 nt, Human
cacaauuuguuuuaucaguauu

SEQ ID NO: 431513 - RNA, 22 nt, Human
uaaggcacacaguugcugcaug

SEQ ID NO: 431514 - RNA, 22 nt, Human
aguuuuucugggaggcacugcu

SEQ ID NO: 431515 - RNA, 22 nt, Human
uccugaaggccugaguuccacc

SEQ ID NO: 431516 - RNA, 22 nt, Human
agacaaguguggugagagcagu

SEQ ID NO: 431517 - RNA, 20 nt, Human
cuugaugagauaaacagcag

SEQ ID NO: 431518 - RNA, 15 nt, Human
ugcauuaucaauaga

SEQ ID NO: 431519 - RNA, 22 nt, Human
gacaagacaccucucuccaucc

SEQ ID NO: 431520 - RNA, 22 nt, Human
agcuccugauucucagagauag

SEQ ID NO: 431521 - RNA, 22 nt, Human
cugaggccucuguucaccagaa

SEQ ID NO: 431522 - RNA, 22 nt, Human
uuaacauuugugaagcauuuag

SEQ ID NO: 431523 - RNA, 22 nt, Human
gcuuagcaaacaucuguagucc

SEQ ID NO: 431524 - RNA, 22 nt, Human
caggcuggagugaguguagugg

SEQ ID NO: 431525 - RNA, 22 nt, Human
gcacagaaccagacaugaggca

SEQ ID NO: 431526 - RNA, 22 nt, Human
cagacuggccacaucugcacug

SEQ ID NO: 431527 - RNA, 22 nt, Human
cuacaugaacucuuaagucaca

SEQ ID NO: 431528 - RNA, 22 nt, Human
aggauuugaaauauuuaguaaa

SEQ ID NO: 431529 - RNA, 22 nt, Human
ucucuaaagcacuuuaaccaca

SEQ ID NO: 431530 - RNA, 22 nt, Human
cacaggaaucagcauuaauggc

SEQ ID NO: 431531 - RNA, 22 nt, Human
agagccuggcucccagcuaccg

SEQ ID NO: 431532 - RNA, 22 nt, Human
ugcccacaccugggggaggcug

SEQ ID NO: 431533 - RNA, 22 nt, Human
acuucauucauuuucacgaaug

SEQ ID NO: 431534 - RNA, 22 nt, Human
guccaugacugugacucacaug

SEQ ID NO: 431535 - RNA, 22 nt, Human
ccugccagggccuuggaagaaa

SEQ ID NO: 431536 - RNA, 22 nt, Human
aagcuaaguauaggugaauccu

SEQ ID NO: 431537 - RNA, 22 nt, Human
aggcccuuggacucaugcucga

SEQ ID NO: 431538 - RNA, 22 nt, Human
uuacaaguuucuggcuucaucc

SEQ ID NO: 431539 - RNA, 22 nt, Human
gcuguauuuauaugaaggcaug

SEQ ID NO: 431540 - RNA, 18 nt, Human
cuuauuguuuaaauggcc

SEQ ID NO: 431541 - RNA, 22 nt, Human
ggugggcacauucagucucugu

SEQ ID NO: 431542 - RNA, 22 nt, Human
aauaugcagcuuaucuucuagg

SEQ ID NO: 431543 - RNA, 22 nt, Human
gcucugcuguguuuguucagca

SEQ ID NO: 431544 - RNA, 22 nt, Human
ucagacagggcuucucaaacuu

SEQ ID NO: 431545 - RNA, 22 nt, Human
gagcugcagaguaaccuuugca

SEQ ID NO: 431546 - RNA, 22 nt, Human
gcucuugauuuccaggagcuag

SEQ ID NO: 431547 - RNA, 22 nt, Human
uugcaaauuccaauccaauauu

SEQ ID NO: 431548 - RNA, 19 nt, Human
ugcccaggccucccaaaag

SEQ ID NO: 431549 - RNA, 22 nt, Human
uuucagaguuaguagagcaugu

SEQ ID NO: 431550 - RNA, 22 nt, Human
aaaguucaugguguuauagaaa

SEQ ID NO: 431551 - RNA, 22 nt, Human
cuggccucagagggucauggug

SEQ ID NO: 431552 - RNA, 22 nt, Human
auuuucauuuugcagggugaga

SEQ ID NO: 431553 - RNA, 22 nt, Human
auccagcacuuguucaugugaa

SEQ ID NO: 431554 - RNA, 22 nt, Human
ccaggcugccgaggaaagaaag

SEQ ID NO: 431555 - RNA, 22 nt, Human
augaacaucucugauccaagca

SEQ ID NO: 431556 - RNA, 22 nt, Human
aggcaagcccccagugaggcuc

SEQ ID NO: 431557 - RNA, 23 nt, Human
ccugggcauuggcugcagcuucu

SEQ ID NO: 431558 - RNA, 22 nt, Human
ccaggcugcuuuauuacucugu

SEQ ID NO: 431559 - RNA, 22 nt, Human
ugaugagggggaacagagauuu

SEQ ID NO: 431560 - RNA, 22 nt, Human
uggcucagauuuuuguaggcuu

SEQ ID NO: 431561 - RNA, 22 nt, Human
ugucccagggaaggcccagcac

SEQ ID NO: 431562 - RNA, 22 nt, Human
aggagccagaauccagacucgg

SEQ ID NO: 431563 - RNA, 22 nt, Human
cagacaggcaggugagagcucc

SEQ ID NO: 431564 - RNA, 22 nt, Human
gagccuggauugaagugggugg

SEQ ID NO: 431565 - RNA, 22 nt, Human
acagccagguaaaggcauggca

SEQ ID NO: 431566 - RNA, 22 nt, Human
uucacaggcuuggagguggggg

SEQ ID NO: 431567 - RNA, 22 nt, Human
uuucauaauacuguacaugaaa

SEQ ID NO: 431568 - RNA, 22 nt, Human
ucucugggcucaggagcccggc

SEQ ID NO: 431569 - RNA, 22 nt, Human
ccaugggaauugggagguccca

SEQ ID NO: 431570 - RNA, 22 nt, Human
aauacagaggcuuccaguaaaa

SEQ ID NO: 431571 - RNA, 22 nt, Human
gcccugucccuuggcuucuagg

SEQ ID NO: 431572 - RNA, 22 nt, Human
cugcauuagucaugcuuugcag

SEQ ID NO: 431573 - RNA, 22 nt, Human
gcauggcaaauaucgagggcag

SEQ ID NO: 431574 - RNA, 22 nt, Human
cagagacauucuccccauugga

SEQ ID NO: 431575 - RNA, 22 nt, Human
aggcagcuuucuggugcaccau

SEQ ID NO: 431576 - RNA, 22 nt, Human
uaaguuuuaagcaaucugauaa

SEQ ID NO: 431577 - RNA, 19 nt, Human
aagcuaagaccugaagguu

SEQ ID NO: 431578 - RNA, 22 nt, Human
aggaggcugguucaggccauau

SEQ ID NO: 431579 - RNA, 22 nt, Human
cagcaaggucugucaauagugg

SEQ ID NO: 431580 - RNA, 22 nt, Human
agcucaggcucugcagggacua

SEQ ID NO: 431581 - RNA, 22 nt, Human
cagagcagaaaccugggugauu

SEQ ID NO: 431582 - RNA, 22 nt, Human
cauuucuacagcuucuucagaa

SEQ ID NO: 431583 - RNA, 22 nt, Human
cugccagcucucuggaggcucu

SEQ ID NO: 431584 - RNA, 22 nt, Human
ggcaguuucucaggcaggggua

SEQ ID NO: 431585 - RNA, 22 nt, Human
ggucccaggcugcgggcuggug

SEQ ID NO: 431586 - RNA, 22 nt, Human
acagaaugcguagugcauguug

SEQ ID NO: 431587 - RNA, 22 nt, Human
acuggcagugucguuuacauga

SEQ ID NO: 431588 - RNA, 22 nt, Human
ugccucugccuccauuguuagu

SEQ ID NO: 431589 - RNA, 20 nt, Human
ccuccuggucaggugugcag

SEQ ID NO: 431590 - RNA, 22 nt, Human
uuagucuucucauaguaaaacu

SEQ ID NO: 431591 - RNA, 22 nt, Human
ugggaugagcuauauagaaagu

SEQ ID NO: 431592 - RNA, 20 nt, Human
agccugccagcuggcccaga

SEQ ID NO: 431593 - RNA, 22 nt, Human
ugaggcagcuuuuucugugugu

SEQ ID NO: 431594 - RNA, 22 nt, Human
cagugagggcccccuuccaggu

SEQ ID NO: 431595 - RNA, 22 nt, Human
ucugggcuuggauuggcucugc

SEQ ID NO: 431596 - RNA, 22 nt, Human
gagagcugcaagguagggcggg

SEQ ID NO: 431597 - RNA, 22 nt, Human
aggcagcugaccacaguaugau

SEQ ID NO: 431598 - RNA, 22 nt, Human
agugcuggagggaggcagguuc

SEQ ID NO: 431599 - RNA, 19 nt, Human
aaguugaucauuuugacag

SEQ ID NO: 431600 - RNA, 22 nt, Human
gaggcugguucugaaguacugu

SEQ ID NO: 431601 - RNA, 22 nt, Human
gcugccucugcacagcucacuc

SEQ ID NO: 431602 - RNA, 22 nt, Human
gacagcuggcaguggaaaggug

SEQ ID NO: 431603 - RNA, 19 nt, Human
auuaacaucaguguuggcc

SEQ ID NO: 431604 - RNA, 22 nt, Human
uuauugugaggaauaagugaga

SEQ ID NO: 431605 - RNA, 22 nt, Human
ugugacaagcauuguauauugg

SEQ ID NO: 431606 - RNA, 16 nt, Human
ggcaccagugaacaca

SEQ ID NO: 431607 - RNA, 22 nt, Human
ucccuguaagguucugagauuu

SEQ ID NO: 431608 - RNA, 23 nt, Human
acucguggaauucucugcgaucg

SEQ ID NO: 431609 - RNA, 22 nt, Human
gcccagguuggagagcaguggc

SEQ ID NO: 431610 - RNA, 22 nt, Human
ucccagccacaguuuccaccug

SEQ ID NO: 431611 - RNA, 22 nt, Human
gccaaggccucugcaggaugag

SEQ ID NO: 431612 - RNA, 22 nt, Human
gagcuuaggccagggacaggga

SEQ ID NO: 431613 - RNA, 22 nt, Human
ucagcaaccaggggcacagucc

SEQ ID NO: 431614 - RNA, 22 nt, Human
ucugccucuuucaggccuggca

SEQ ID NO: 431615 - RNA, 22 nt, Human
cucccacauggaauagcaggga

SEQ ID NO: 431616 - RNA, 22 nt, Human
ggcugccucuggaagcuggaga

SEQ ID NO: 431617 - RNA, 22 nt, Human
gucaggaaaacccggguugacu

SEQ ID NO: 431618 - RNA, 22 nt, Human
cucagaguucuccugggaggug

SEQ ID NO: 431619 - RNA, 22 nt, Human
agcagcauguucauuacauuau

SEQ ID NO: 431620 - RNA, 21 nt, Human
ucugcccuccaggagcucaua

SEQ ID NO: 431621 - RNA, 22 nt, Human
cuguguggacugguugaggccc

SEQ ID NO: 431622 - RNA, 21 nt, Human
agagucugcauuucugacaag

SEQ ID NO: 431623 - RNA, 22 nt, Human
ggccugagcuugggcagcguau

SEQ ID NO: 431624 - RNA, 22 nt, Human
agucucacuucuugagcuaugc

SEQ ID NO: 431625 - RNA, 22 nt, Human
aguccugugaggggugcagcuu

SEQ ID NO: 431626 - RNA, 22 nt, Human
ugacaagagaccccuccgcagg

SEQ ID NO: 431627 - RNA, 22 nt, Human
ucuucuggaucgaucacauugu

SEQ ID NO: 431628 - RNA, 22 nt, Human
caauuucugggccucacacaag

SEQ ID NO: 431629 - RNA, 22 nt, Human
ugcuggggauccguaccaaccc

SEQ ID NO: 431630 - RNA, 21 nt, Human
agagaagggacucuuccaguc

SEQ ID NO: 431631 - RNA, 22 nt, Human
ugcccaaacugacauuggcagu

SEQ ID NO: 431632 - RNA, 21 nt, Human
aagcaggcuguaaucaugugg

SEQ ID NO: 431633 - RNA, 17 nt, Human
aagagaggcugagcugg

SEQ ID NO: 431634 - RNA, 22 nt, Human
uggcaaaggcgcucacaugccu

SEQ ID NO: 431635 - RNA, 22 nt, Human
gugcagauccugauugcaguuc

SEQ ID NO: 431636 - RNA, 22 nt, Human
caaguucaaguccuggcucugc

SEQ ID NO: 431637 - RNA, 22 nt, Human
agcaacagcccugagguucaug

SEQ ID NO: 431638 - RNA, 22 nt, Human
cccagcucaagcagagagcuaa

SEQ ID NO: 431639 - RNA, 22 nt, Human
cugggagauugcuagagaugca

SEQ ID NO: 431640 - RNA, 22 nt, Human
cagcccugagcaaggcuuuuaa

SEQ ID NO: 431641 - RNA, 22 nt, Human
gucuuuauuacaaauccuuuuc

SEQ ID NO: 431642 - RNA, 22 nt, Human
cuugaugacucaggaggaggag

SEQ ID NO: 431643 - RNA, 22 nt, Human
guuccugacuguggaguuuggu

SEQ ID NO: 431644 - RNA, 22 nt, Human
cacaaggaccucagauggauga

SEQ ID NO: 431645 - RNA, 22 nt, Human
agggaugggaacuccuccagca

SEQ ID NO: 431646 - RNA, 17 nt, Human
aggcagguaagaguuau

SEQ ID NO: 431647 - RNA, 21 nt, Human
gcucaggcucagguucagguu

SEQ ID NO: 431648 - RNA, 22 nt, Human
ggccucugcaacuggcuguggc

SEQ ID NO: 431649 - RNA, 22 nt, Human
acaguauacauugauuaggacc

SEQ ID NO: 431650 - RNA, 22 nt, Human
cagcccagugcacgcccguuuc

SEQ ID NO: 431651 - RNA, 22 nt, Human
guucuagaugacugagcagcug

SEQ ID NO: 431652 - RNA, 20 nt, Human
auaaaauaacugccacaaga

SEQ ID NO: 431653 - RNA, 21 nt, Human
gggcucuccugaggccaugaa

SEQ ID NO: 431654 - RNA, 22 nt, Human
gcgagccucuggaguccucugg

SEQ ID NO: 431655 - RNA, 19 nt, Human
gccuggcugggaugagccc

SEQ ID NO: 431656 - RNA, 18 nt, Human
ucauucaaagucuacuga

SEQ ID NO: 431657 - RNA, 22 nt, Human
gcaggcaggagcccaacugccu

SEQ ID NO: 431658 - RNA, 22 nt, Human
agccuggagaggcgccauacac

SEQ ID NO: 431659 - RNA, 22 nt, Human
augggaggcagcagagcccagc

SEQ ID NO: 431660 - RNA, 22 nt, Human
gcuggcuggcgggugcguccuc

SEQ ID NO: 431661 - RNA, 22 nt, Human
cugcugggcagaggcugcauga

SEQ ID NO: 431662 - RNA, 22 nt, Human
uuagcauuucauuucaagagga

SEQ ID NO: 431663 - RNA, 22 nt, Human
uguguacaggccuugcuagacu

SEQ ID NO: 431664 - RNA, 21 nt, Human
aggcuguccuuugccagcccu

SEQ ID NO: 431665 - RNA, 22 nt, Human
ugcccugggcuuugcuaugacu

SEQ ID NO: 431666 - RNA, 22 nt, Human
gcagugugaccgagcuugcuuc

SEQ ID NO: 431667 - RNA, 22 nt, Human
uaaggcaggaacuggcuguuuu

SEQ ID NO: 431668 - RNA, 22 nt, Human
cugggaucagcaguagugauga

SEQ ID NO: 431669 - RNA, 22 nt, Human
gaaggcuggcucagcuuuccag

SEQ ID NO: 431670 - RNA, 22 nt, Human
ccaucagagggcugcucugcaa

SEQ ID NO: 431671 - RNA, 22 nt, Human
ugggacagggaaucugaucccc

SEQ ID NO: 431672 - RNA, 17 nt, Human
gcugguccuugguaacu

SEQ ID NO: 431673 - RNA, 22 nt, Human
agccugagcugccugccgccuc

SEQ ID NO: 431674 - RNA, 22 nt, Human
agcacugauuuuguugcacuua

SEQ ID NO: 431675 - RNA, 22 nt, Human
ccucagcucccaugagaucugc

SEQ ID NO: 431676 - RNA, 22 nt, Human
augggaggcaaagaucgcagaa

SEQ ID NO: 431677 - RNA, 22 nt, Human
accuuuggucauuuacuuuuca

SEQ ID NO: 431678 - RNA, 22 nt, Human
ggcugggcugcugggucagagc

SEQ ID NO: 431679 - RNA, 22 nt, Human
gaacagaguugaaacaaggcug

SEQ ID NO: 431680 - RNA, 21 nt, Human
ugcagagauaucugaagcaga

SEQ ID NO: 431681 - RNA, 23 nt, Human
uugggcaaaucacuaacgucucc

SEQ ID NO: 431682 - RNA, 22 nt, Human
guggguggaucaccugagguca

SEQ ID NO: 431683 - RNA, 22 nt, Human
caaagcugauacucagcaagua

SEQ ID NO: 431684 - RNA, 22 nt, Human
ggcauagcggcucagcguccag

SEQ ID NO: 431685 - RNA, 22 nt, Human
gagcugccggcccacaguacua

SEQ ID NO: 431686 - RNA, 22 nt, Human
augcaguuuuaaaucauuucag

SEQ ID NO: 431687 - RNA, 22 nt, Human
uugcagcugaggaaauugaagc

SEQ ID NO: 431688 - RNA, 22 nt, Human
cccagagaagugaagugacuug

SEQ ID NO: 431689 - RNA, 22 nt, Human
caggacacuaaaaagccaagcu

SEQ ID NO: 431690 - RNA, 22 nt, Human
cucaccaggaacagcugcggag

SEQ ID NO: 431691 - RNA, 22 nt, Human
aggucagaaaaggagagcauug

SEQ ID NO: 431692 - RNA, 22 nt, Human
auagcacuuauagauuuggucu

SEQ ID NO: 431693 - RNA, 22 nt, Human
aaguucaagaucaagguuccag

SEQ ID NO: 431694 - RNA, 22 nt, Human
cugcaguguucuggaaugcauu

SEQ ID NO: 431695 - RNA, 20 nt, Human
aggcaagguagaugucugcu

SEQ ID NO: 431696 - RNA, 22 nt, Human
augcauauaauggccagaacaa

SEQ ID NO: 431697 - RNA, 22 nt, Human
uauauuaacuugugauccugga

SEQ ID NO: 431698 - RNA, 23 nt, Human
aucuaauuucuccaaaucucuac

SEQ ID NO: 431699 - RNA, 22 nt, Human
ucugaagccuuuguacaggccu

SEQ ID NO: 431700 - RNA, 23 nt, Human
uuucacauuuacuguuagauggc

SEQ ID NO: 431701 - RNA, 22 nt, Human
uuucuacauuuguaaccagauu

SEQ ID NO: 431702 - RNA, 22 nt, Human
cccagagagcuuucuuugugcu

SEQ ID NO: 431703 - RNA, 22 nt, Human
acaggcugggcgcuuccugcgg

SEQ ID NO: 431704 - RNA, 22 nt, Human
ucugucacuauuggccagaaca

SEQ ID NO: 431705 - RNA, 22 nt, Human
gcaagacaugucuaagguuuaa

SEQ ID NO: 431706 - RNA, 22 nt, Human
auauauuugagaauauucauga

SEQ ID NO: 431707 - RNA, 22 nt, Human
agggcagagcacugaauuggga

SEQ ID NO: 431708 - RNA, 19 nt, Human
gcaggguguugacuguccc

SEQ ID NO: 431709 - RNA, 22 nt, Human
ucuuugcucuuacacaguuagu

SEQ ID NO: 431710 - RNA, 22 nt, Human
uugcugaugguauuaugcuagu

SEQ ID NO: 431711 - RNA, 22 nt, Human
auuuauugaagcuuauuacguu

SEQ ID NO: 431712 - RNA, 22 nt, Human
cugcagcuccucucugugcccc

SEQ ID NO: 431713 - RNA, 20 nt, Human
guucucacugaucugcaggg

SEQ ID NO: 431714 - RNA, 22 nt, Human
cugggaccucggggugaucaaa

SEQ ID NO: 431715 - RNA, 22 nt, Human
cccuccagccauggacccaggu

SEQ ID NO: 431716 - RNA, 22 nt, Human
aggccugggacgggagccguga

SEQ ID NO: 431717 - RNA, 22 nt, Human
uggagcagugguccuggagaug

SEQ ID NO: 431718 - RNA, 22 nt, Human
guuuuucuaaguagcgauauuu

SEQ ID NO: 431719 - RNA, 22 nt, Human
caggcucuuuugguggcaagga

SEQ ID NO: 431720 - RNA, 22 nt, Human
uaaaguuuggcagacaauaaca

SEQ ID NO: 431721 - RNA, 22 nt, Human
cagcagcucccauccgcugagc

SEQ ID NO: 431722 - RNA, 22 nt, Human
ggaagagccuggggugucaggc

SEQ ID NO: 431723 - RNA, 22 nt, Human
agacagcagaaacuagagcacu

SEQ ID NO: 431724 - RNA, 22 nt, Human
gccuggcacucacugaagaggc

SEQ ID NO: 431725 - RNA, 22 nt, Human
agcuccuggugccucagccgaa

SEQ ID NO: 431726 - RNA, 22 nt, Human
ggucccagaauugguuagcaca

SEQ ID NO: 431727 - RNA, 21 nt, Human
ccugggagaucagcugccuuc

SEQ ID NO: 431728 - RNA, 22 nt, Human
cuggccauguugccucugagac

SEQ ID NO: 431729 - RNA, 22 nt, Human
gaaagaagcuuuagauggcuau

SEQ ID NO: 431730 - RNA, 22 nt, Human
guauuuuuagguaaggaaagua

SEQ ID NO: 431731 - RNA, 22 nt, Human
cuaaggaaaggaaauacaguaa

SEQ ID NO: 431732 - RNA, 22 nt, Human
ucagcacugauagaagucaaua

SEQ ID NO: 431733 - RNA, 22 nt, Human
acaguggccucaaagaaagaga

SEQ ID NO: 431734 - RNA, 22 nt, Human
augcauauuucaugaaucuuug

SEQ ID NO: 431735 - RNA, 22 nt, Human
gagagacagcagaacgugcagc

SEQ ID NO: 431736 - RNA, 22 nt, Human
uuucuaguauauaacuagaucu

SEQ ID NO: 431737 - RNA, 22 nt, Human
ugaggccagucucaucacaggc

SEQ ID NO: 431738 - RNA, 22 nt, Human
uuuaaauuauaguuaaugucug

SEQ ID NO: 431739 - RNA, 22 nt, Human
uuuugguucugggauacagaga

SEQ ID NO: 431740 - RNA, 22 nt, Human
cuguagccaguuuggccucacc

SEQ ID NO: 431741 - RNA, 22 nt, Human
ggcaggcaaugaggaugggaag

SEQ ID NO: 431742 - RNA, 22 nt, Human
uguaggaguccaaucaggagac

SEQ ID NO: 431743 - RNA, 22 nt, Human
ucagcagguggugggcagguga

SEQ ID NO: 431744 - RNA, 22 nt, Human
ucagcucugcaaggucaccucc

SEQ ID NO: 431745 - RNA, 22 nt, Human
uuuauuagauuaucaaagaggu

SEQ ID NO: 431746 - RNA, 20 nt, Human
aaacauucauguacaaguga

SEQ ID NO: 431747 - RNA, 22 nt, Human
cauuuucucaaugaacccucuu

SEQ ID NO: 431748 - RNA, 22 nt, Human
aaggcagcucagcucauggcag

SEQ ID NO: 431749 - RNA, 22 nt, Human
uucucuaagccuuaguuucuuc

SEQ ID NO: 431750 - RNA, 22 nt, Human
gaagcccuauccucuccuggga

SEQ ID NO: 431751 - RNA, 22 nt, Human
gugauccgaugucagucgcaga

SEQ ID NO: 431752 - RNA, 22 nt, Human
cugggagaggcugcuccgcucu

SEQ ID NO: 431753 - RNA, 21 nt, Human
gggggaagaggaguugcuagu

SEQ ID NO: 431754 - RNA, 22 nt, Human
cuuuacaauucaagggaacucu

SEQ ID NO: 431755 - RNA, 22 nt, Human
gccugccuuuguaugacccuga

SEQ ID NO: 431756 - RNA, 22 nt, Human
gagcuggugugugcccgagcac

SEQ ID NO: 431757 - RNA, 22 nt, Human
augagcccuggaggcauuuuuu

SEQ ID NO: 431758 - RNA, 22 nt, Human
aggcuccagggcugugugggag

SEQ ID NO: 431759 - RNA, 22 nt, Human
cauucaaacauuaauuuauuca

SEQ ID NO: 431760 - RNA, 22 nt, Human
gccugggaagacuaagugggag

SEQ ID NO: 431761 - RNA, 18 nt, Human
uggcagcuagguaaagaa

SEQ ID NO: 431762 - RNA, 22 nt, Human
aagagaauacaagcaggcagga

SEQ ID NO: 431763 - RNA, 22 nt, Human
caauuauauuuagaaugauaca

SEQ ID NO: 431764 - RNA, 22 nt, Human
uauacaaugaguacauucuggg

SEQ ID NO: 431765 - RNA, 22 nt, Human
gacagcagacagaacuaccugc

SEQ ID NO: 431766 - RNA, 22 nt, Human
uguccuccagcagcaugguaug

SEQ ID NO: 431767 - RNA, 22 nt, Human
auugcaaagcguagacucuaaa

SEQ ID NO: 431768 - RNA, 22 nt, Human
gauuuggcuuggaugauuaaac

SEQ ID NO: 431769 - RNA, 22 nt, Human
gggcucugguacuuccuggcuc

SEQ ID NO: 431770 - RNA, 22 nt, Human
uagucaaucaguauguauugga

SEQ ID NO: 431771 - RNA, 22 nt, Human
agcuguguagggaaucagagaa

SEQ ID NO: 431772 - RNA, 22 nt, Human
ccugggcuucugucuagauguu

SEQ ID NO: 431773 - RNA, 22 nt, Human
ucauuuugccugccauuugagu

SEQ ID NO: 431774 - RNA, 22 nt, Human
acaugcaaagccacaggacccg

SEQ ID NO: 431775 - RNA, 21 nt, Human
agaggcaggcauuaaguacac

SEQ ID NO: 431776 - RNA, 17 nt, Human
uccuucagggccucaca

SEQ ID NO: 431777 - RNA, 22 nt, Human
uuccucagggcggaugggcagg

SEQ ID NO: 431778 - RNA, 22 nt, Human
caugaacaaauucuguuugagg

SEQ ID NO: 431779 - RNA, 22 nt, Human
uuuuauacacaugaacaugcag

SEQ ID NO: 431780 - RNA, 22 nt, Human
uggcccugaggggcugugcccc

SEQ ID NO: 431781 - RNA, 22 nt, Human
uucauucauucaugaauguuaa

SEQ ID NO: 431782 - RNA, 22 nt, Human
ugcugccaccugguggcugaag

SEQ ID NO: 431783 - RNA, 22 nt, Human
gaguuacagagaggauuauggu

SEQ ID NO: 431784 - RNA, 22 nt, Human
uucuguguggguagcuccuguu

SEQ ID NO: 431785 - RNA, 22 nt, Human
aaggcaggaugggaaaagauuu

SEQ ID NO: 431786 - RNA, 22 nt, Human
acagugucuccugguacccagu

SEQ ID NO: 431787 - RNA, 22 nt, Human
gaaggcaagcuuuggauaugag

SEQ ID NO: 431788 - RNA, 22 nt, Human
ggauaagaaaauuguaauaacu

SEQ ID NO: 431789 - RNA, 22 nt, Human
gugaacaguucauuuuaucaug

SEQ ID NO: 431790 - RNA, 22 nt, Human
aagaaggcggaccagaagggag

SEQ ID NO: 431791 - RNA, 22 nt, Human
ugccucugugugcaggugagca

SEQ ID NO: 431792 - RNA, 22 nt, Human
cuauuugaauugucacaggcua

SEQ ID NO: 431793 - RNA, 20 nt, Human
aaaggaauauaugaaguaua

SEQ ID NO: 431794 - RNA, 20 nt, Human
aggaaggaaguuugcaugga

SEQ ID NO: 431795 - RNA, 22 nt, Human
ugcccagguuugagugcccaag

SEQ ID NO: 431796 - RNA, 22 nt, Human
uaaaugcagcaguuucuguucu

SEQ ID NO: 431797 - RNA, 22 nt, Human
ugcagcugcaaguccaggucag

SEQ ID NO: 431798 - RNA, 22 nt, Human
cccagacauaacagcagagagg

SEQ ID NO: 431799 - RNA, 22 nt, Human
ccucugcacuucaccuuagcuc

SEQ ID NO: 431800 - RNA, 22 nt, Human
aggugccagugcuguggucccc

SEQ ID NO: 431801 - RNA, 22 nt, Human
gccucuggaguugcuuguaaau

SEQ ID NO: 431802 - RNA, 22 nt, Human
uccuggggcugcaaggccuguc

SEQ ID NO: 431803 - RNA, 22 nt, Human
aaugucauuuuuaaaugugaga

SEQ ID NO: 431804 - RNA, 22 nt, Human
ccuuucucuuugcugaucaugu

SEQ ID NO: 431805 - RNA, 22 nt, Human
gaaauauuucucuugagccccu

SEQ ID NO: 431806 - RNA, 22 nt, Human
ugggcagauguggcucuccuug

SEQ ID NO: 431807 - RNA, 22 nt, Human
gaugauuuuugccagugugaug

SEQ ID NO: 431808 - RNA, 22 nt, Human
ucauaaagcucuuccaaaugua

SEQ ID NO: 431809 - RNA, 22 nt, Human
aagaguggagcuggaaaguggg

SEQ ID NO: 431810 - RNA, 22 nt, Human
agggacagaugaaugacugagu

SEQ ID NO: 431811 - RNA, 22 nt, Human
ggcaggcagauggcugcaccaa

SEQ ID NO: 431812 - RNA, 22 nt, Human
uugcuuuauuggguuuacugcc

SEQ ID NO: 431813 - RNA, 22 nt, Human
gagcccuguagcaagucauguc

SEQ ID NO: 431814 - RNA, 22 nt, Human
ugaagcuagcaggaagagcagg

SEQ ID NO: 431815 - RNA, 22 nt, Human
uuugcaaaugaagcucugagga

SEQ ID NO: 431816 - RNA, 22 nt, Human
gcaagcagacauucagguaggu

SEQ ID NO: 431817 - RNA, 22 nt, Human
uuaacauuaaaagcagcauuuu

SEQ ID NO: 431818 - RNA, 22 nt, Human
cccagcaggucggugcugccug

SEQ ID NO: 431819 - RNA, 22 nt, Human
uggaaagaaaaacaggccauga

SEQ ID NO: 431820 - RNA, 22 nt, Human
agaggucagaggucgccagguc

SEQ ID NO: 431821 - RNA, 22 nt, Human
gcugagcucccagcaguaucug

SEQ ID NO: 431822 - RNA, 22 nt, Human
gcaaacauuccacagaaggaag

SEQ ID NO: 431823 - RNA, 17 nt, Human
cuuguggccaguuuuua

SEQ ID NO: 431824 - RNA, 22 nt, Human
ucuggcugcguggccuuuagca

SEQ ID NO: 431825 - RNA, 22 nt, Human
caaacugccaaugguuuuuaua

SEQ ID NO: 431826 - RNA, 22 nt, Human
guuuuaguggguggccacugau

SEQ ID NO: 431827 - RNA, 22 nt, Human
gcuccaggauaauaaaguuguu

SEQ ID NO: 431828 - RNA, 22 nt, Human
cucugcccagugcccacaggag

SEQ ID NO: 431829 - RNA, 22 nt, Human
gcagacagacugcagugauuuu

SEQ ID NO: 431830 - RNA, 23 nt, Human
ucccugggcccgugccagcggug

SEQ ID NO: 431831 - RNA, 22 nt, Human
uccuuccugcucuaacauucag

SEQ ID NO: 431832 - RNA, 22 nt, Human
acauucaaggcagcacugagug

SEQ ID NO: 431833 - RNA, 22 nt, Human
cagguccucgggggaggccggc

SEQ ID NO: 431834 - RNA, 22 nt, Human
cuuuucuuauguggacguaccu

SEQ ID NO: 431835 - RNA, 22 nt, Human
aggcucuguaugaagguuuggg

SEQ ID NO: 431836 - RNA, 22 nt, Human
ugggcugcugucugcacaugcu

SEQ ID NO: 431837 - RNA, 20 nt, Human
ccagguggugccuggagagg

SEQ ID NO: 431838 - RNA, 22 nt, Human
ccugggcuuucggcggcuuccu

SEQ ID NO: 431839 - RNA, 22 nt, Human
uccucugggcucccugcaacag

SEQ ID NO: 431840 - RNA, 22 nt, Human
cagguccugcagggagaguaaa

SEQ ID NO: 431841 - RNA, 22 nt, Human
gcucuggcuacuccacccuguu

SEQ ID NO: 431842 - RNA, 22 nt, Human
agccacagagguugaugugguu

SEQ ID NO: 431843 - RNA, 22 nt, Human
ucauugaagcccuugacaagcc

SEQ ID NO: 431844 - RNA, 19 nt, Human
acacaaugacacauauaua

SEQ ID NO: 431845 - RNA, 22 nt, Human
agcuccuggacgaacagggagu

SEQ ID NO: 431846 - RNA, 22 nt, Human
uucacaauuaacuuuauacuua

SEQ ID NO: 431847 - RNA, 22 nt, Human
uguccuagauccagcugugcug

SEQ ID NO: 431848 - RNA, 22 nt, Human
agcauucaaguaauucacuugg

SEQ ID NO: 431849 - RNA, 22 nt, Human
caguacuuugaagauauuuuag

SEQ ID NO: 431850 - RNA, 22 nt, Human
ggauugagagcacugguagcug

SEQ ID NO: 431851 - RNA, 22 nt, Human
uuugcagcaauucguuauacag

SEQ ID NO: 431852 - RNA, 22 nt, Human
uagcagcauuuuuguagaguau

SEQ ID NO: 431853 - RNA, 22 nt, Human
cagaagcacuaggaggaaacgu

SEQ ID NO: 431854 - RNA, 22 nt, Human
uagugucuguugcuuuuguuca

SEQ ID NO: 431855 - RNA, 22 nt, Human
uaguccagccuuggguguagcc

SEQ ID NO: 431856 - RNA, 22 nt, Human
ucccagagugagccaggggcag

SEQ ID NO: 431857 - RNA, 22 nt, Human
uccccacaucucugcaucaggc

SEQ ID NO: 431858 - RNA, 21 nt, Human
ucuuauacagcaauagaucug

SEQ ID NO: 431859 - RNA, 22 nt, Human
aucuuucuaugguacuuucucc

SEQ ID NO: 431860 - RNA, 21 nt, Human
uuccuggggacuuccguggga

SEQ ID NO: 431861 - RNA, 21 nt, Human
uugaaggaucacuucuguacc

SEQ ID NO: 431862 - RNA, 20 nt, Human
uuuuccucguguuuguucua

SEQ ID NO: 431863 - RNA, 23 nt, Human
cagcugguugugggaguggcugc

SEQ ID NO: 431864 - RNA, 22 nt, Human
uuccaagugucagaucagauuu

SEQ ID NO: 431865 - RNA, 22 nt, Human
uuguuuaaaagaaaucauagaa

SEQ ID NO: 431866 - RNA, 22 nt, Human
ucuuugcacacagcgauucuuc

SEQ ID NO: 431867 - RNA, 22 nt, Human
ucacuuugacggccaacuucua

SEQ ID NO: 431868 - RNA, 22 nt, Human
ucuaaauucaguuuauuuugau

SEQ ID NO: 431869 - RNA, 23 nt, Human
acuuaaaugguucuuuaucucag

SEQ ID NO: 431870 - RNA, 20 nt, Human
agaaggcauuccucauucuu

SEQ ID NO: 431871 - RNA, 22 nt, Human
uuacagcacagugcuuuuacug

SEQ ID NO: 431872 - RNA, 22 nt, Human
agcagaugagccucaugacugg

SEQ ID NO: 431873 - RNA, 22 nt, Human
gccuuugcugugacaaugcugg

SEQ ID NO: 431874 - RNA, 22 nt, Human
cuucucccugggggcucuuuau

SEQ ID NO: 431875 - RNA, 22 nt, Human
agugugugcaugcauucgugca

SEQ ID NO: 431876 - RNA, 22 nt, Human
cuccacucaacaagcccagugu

SEQ ID NO: 431877 - RNA, 22 nt, Human
gcucaagggaugggagugggug

SEQ ID NO: 431878 - RNA, 22 nt, Human
uagcaucuguacugacauaauc

SEQ ID NO: 431879 - RNA, 22 nt, Human
cccagguccccaccugucugcu

SEQ ID NO: 431880 - RNA, 22 nt, Human
ucugggcugcugugcagugacc

SEQ ID NO: 431881 - RNA, 22 nt, Human
auguguguaaacaaguauaauu

SEQ ID NO: 431882 - RNA, 22 nt, Human
aauuuuacaaaauaccuccgau

SEQ ID NO: 431883 - RNA, 19 nt, Human
gcugugccucucuccugcu

SEQ ID NO: 431884 - RNA, 22 nt, Human
aauuauauugaaguugaauguc

SEQ ID NO: 431885 - RNA, 22 nt, Human
ggccgggcaggucucagccagc

SEQ ID NO: 431886 - RNA, 22 nt, Human
uccugaggcuaaagugcagugg

SEQ ID NO: 431887 - RNA, 22 nt, Human
cagagcuggagaaguggauuua

SEQ ID NO: 431888 - RNA, 22 nt, Human
cacagggagaggaacagcgcag

SEQ ID NO: 431889 - RNA, 22 nt, Human
caggaggcccaaagggcgcaga

SEQ ID NO: 431890 - RNA, 22 nt, Human
cacuuuauuauaaauuugagag

SEQ ID NO: 431891 - RNA, 21 nt, Human
aggugcagagccagggaccag

SEQ ID NO: 431892 - RNA, 22 nt, Human
ggugggcacccgagacuggauc

SEQ ID NO: 431893 - RNA, 22 nt, Human
cagcagagcauuugguaggagg

SEQ ID NO: 431894 - RNA, 22 nt, Human
gcucccagauuucagccuugug

SEQ ID NO: 431895 - RNA, 22 nt, Human
gaaaucuacgauuagugaaaau

SEQ ID NO: 431896 - RNA, 22 nt, Human
agucuggguggcugagcuacag

SEQ ID NO: 431897 - RNA, 22 nt, Human
ucagagaaaggccaaaauauca

SEQ ID NO: 431898 - RNA, 22 nt, Human
ugaaaucaauaauuggugauug

SEQ ID NO: 431899 - RNA, 22 nt, Human
ucucugagaucagccacugacu

SEQ ID NO: 431900 - RNA, 22 nt, Human
agcuguuuucuucuaggaagac

SEQ ID NO: 431901 - RNA, 22 nt, Human
uuuuuguagucauuagaagagg

SEQ ID NO: 431902 - RNA, 22 nt, Human
auguguguauauauagucauuu

SEQ ID NO: 431903 - RNA, 21 nt, Human
gacagcaacuguaguccucuu

SEQ ID NO: 431904 - RNA, 22 nt, Human
agcaggcuccuuccuucucugg

SEQ ID NO: 431905 - RNA, 22 nt, Human
ugugcuauuacacauuuauuua

SEQ ID NO: 431906 - RNA, 22 nt, Human
aauaguugugaaucaggacuag

SEQ ID NO: 431907 - RNA, 21 nt, Human
ggccucugucauccugggaag

SEQ ID NO: 431908 - RNA, 22 nt, Human
ugugaagguuaaauaauaugau

SEQ ID NO: 431909 - RNA, 22 nt, Human
agagcaggcauaaagcuuugaa

SEQ ID NO: 431910 - RNA, 22 nt, Human
gcaggugggggucggugcaucu

SEQ ID NO: 431911 - RNA, 22 nt, Human
uguaccaugcgacgccucucac

SEQ ID NO: 431912 - RNA, 22 nt, Human
ccugguguugccaaucugugcc

SEQ ID NO: 431913 - RNA, 22 nt, Human
ugggaguggggcauagaaggua

SEQ ID NO: 431914 - RNA, 22 nt, Human
cagaagcagugagagaugugca

SEQ ID NO: 431915 - RNA, 20 nt, Human
agcaggugacggggccugcu

SEQ ID NO: 431916 - RNA, 22 nt, Human
cccagccagccucuucccauau

SEQ ID NO: 431917 - RNA, 22 nt, Human
agcuccuggcaaggucauggug

SEQ ID NO: 431918 - RNA, 18 nt, Human
agccuggaggguugaagu

SEQ ID NO: 431919 - RNA, 19 nt, Human
cucugccucuggcuguggc

SEQ ID NO: 431920 - RNA, 22 nt, Human
aacaguacaacuccacaagacu

SEQ ID NO: 431921 - RNA, 22 nt, Human
agaaggcagguuuuaaaauguc

SEQ ID NO: 431922 - RNA, 22 nt, Human
acaggcugcugggcuccgugcu

SEQ ID NO: 431923 - RNA, 22 nt, Human
acauaauagguaccugaauaau

SEQ ID NO: 431924 - RNA, 22 nt, Human
aaugaagacacaucuuucucau

SEQ ID NO: 431925 - RNA, 19 nt, Human
agcagcagaagugugccuu

SEQ ID NO: 431926 - RNA, 22 nt, Human
agauuuaaagcaguauucgcaa

SEQ ID NO: 431927 - RNA, 22 nt, Human
uuauacccuccauaccuggccu

SEQ ID NO: 431928 - RNA, 22 nt, Human
ccagcagccagagaaggaccuc

SEQ ID NO: 431929 - RNA, 22 nt, Human
aggcagcuuucuguaggggugu

SEQ ID NO: 431930 - RNA, 22 nt, Human
auuaaacugagcaaauuaacau

SEQ ID NO: 431931 - RNA, 22 nt, Human
caggaggcuccuagggcucugu

SEQ ID NO: 431932 - RNA, 21 nt, Human
aggcucucauccagggaccca

SEQ ID NO: 431933 - RNA, 22 nt, Human
aaguuuuugguagagaaaagua

SEQ ID NO: 431934 - RNA, 22 nt, Human
ugcugccaggucuugcugucca

SEQ ID NO: 431935 - RNA, 22 nt, Human
gucuggaagaacuagggauguu

SEQ ID NO: 431936 - RNA, 21 nt, Human
ugcagcugacacccuuuggga

SEQ ID NO: 431937 - RNA, 22 nt, Human
ugaagcuggaaguuagguagac

SEQ ID NO: 431938 - RNA, 22 nt, Human
ucagcugcagcaggcaccauuu

SEQ ID NO: 431939 - RNA, 22 nt, Human
cuggggagugaagguaauuaca

SEQ ID NO: 431940 - RNA, 22 nt, Human
gggcgagggcgaaagcgagagc

SEQ ID NO: 431941 - RNA, 22 nt, Human
ugggcagauuaaugcaguggcu

SEQ ID NO: 431942 - RNA, 22 nt, Human
uucaaaguaaaaauguguucac

SEQ ID NO: 431943 - RNA, 22 nt, Human
augucuuucuugugucccaaga

SEQ ID NO: 431944 - RNA, 20 nt, Human
cuguccccgaggucaccagg

SEQ ID NO: 431945 - RNA, 17 nt, Human
ccugcccagagacagau

SEQ ID NO: 431946 - RNA, 22 nt, Human
ugacacauaccgaaaauauuug

SEQ ID NO: 431947 - RNA, 22 nt, Human
cugcccaguuugggagccuuuc

SEQ ID NO: 431948 - RNA, 22 nt, Human
auucucagaucuuagaggaaua

SEQ ID NO: 431949 - RNA, 22 nt, Human
agcccagaggcugggcgugcau

SEQ ID NO: 431950 - RNA, 22 nt, Human
uuuuauagcugaauaguauucc

SEQ ID NO: 431951 - RNA, 22 nt, Human
ggaggaugccaagcugugcaca

SEQ ID NO: 431952 - RNA, 21 nt, Human
gcccagagggagccaagccca

SEQ ID NO: 431953 - RNA, 22 nt, Human
gcuggcagcauuagacccuggg

SEQ ID NO: 431954 - RNA, 22 nt, Human
caggaguggugugagggacucc

SEQ ID NO: 431955 - RNA, 22 nt, Human
acuuugcaagguacuaacugua

SEQ ID NO: 431956 - RNA, 23 nt, Human
ccuggguuucagagcugcuuuuc

SEQ ID NO: 431957 - RNA, 22 nt, Human
gaauuucauuuguuuccuacca

SEQ ID NO: 431958 - RNA, 22 nt, Human
cuuguugggucgugaauucugu

SEQ ID NO: 431959 - RNA, 22 nt, Human
cagaggaacguuuggauugauu

SEQ ID NO: 431960 - RNA, 22 nt, Human
ucagccuacacuccaacagcau

SEQ ID NO: 431961 - RNA, 21 nt, Human
ggaguuuuucuggaagggacu

SEQ ID NO: 431962 - RNA, 22 nt, Human
ugcuagcacugugcagucuacg

SEQ ID NO: 431963 - RNA, 22 nt, Human
aggacagguguagugggcucug

SEQ ID NO: 431964 - RNA, 22 nt, Human
agcuguuuccauaaaugagaca

SEQ ID NO: 431965 - RNA, 22 nt, Human
agcaacuagccaggaugcagag

SEQ ID NO: 431966 - RNA, 22 nt, Human
aagugauucuagucaugauucu

SEQ ID NO: 431967 - RNA, 22 nt, Human
agccagagagccccagguucua

SEQ ID NO: 431968 - RNA, 22 nt, Human
uccuuggagcucuccaagggau

SEQ ID NO: 431969 - RNA, 22 nt, Human
uucagaaugagaauggaugggu

SEQ ID NO: 431970 - RNA, 22 nt, Human
accacuuaucaucacuaucuca

SEQ ID NO: 431971 - RNA, 22 nt, Human
cugggugaguugaugaaggaga

SEQ ID NO: 431972 - RNA, 22 nt, Human
cagagcagugaggaguugugua

SEQ ID NO: 431973 - RNA, 19 nt, Human
ucugucacuggggguauuc

SEQ ID NO: 431974 - RNA, 18 nt, Human
ucagaggagauaccuaaa

SEQ ID NO: 431975 - RNA, 22 nt, Human
uccuccagcccucuaggaaaau

SEQ ID NO: 431976 - RNA, 22 nt, Human
ucccagagcagaugugcuaaag

SEQ ID NO: 431977 - RNA, 22 nt, Human
uucaggccuaauuucuagcccc

SEQ ID NO: 431978 - RNA, 22 nt, Human
ucaggccuuguccugaccuccu

SEQ ID NO: 431979 - RNA, 22 nt, Human
gagcaacaguggcagugguggg

SEQ ID NO: 431980 - RNA, 22 nt, Human
auucaaacaggaagaaaucauu

SEQ ID NO: 431981 - RNA, 22 nt, Human
gcugccacgaucucugcuguag

SEQ ID NO: 431982 - RNA, 20 nt, Human
auugaaauuuuucugagauu

SEQ ID NO: 431983 - RNA, 17 nt, Human
agacacugagccaagua

SEQ ID NO: 431984 - RNA, 22 nt, Human
uucucuaauggugaugauuaga

SEQ ID NO: 431985 - RNA, 22 nt, Human
uucaguaaggauaauaaacaga

SEQ ID NO: 431986 - RNA, 22 nt, Human
aaggcccuuccaccaguccucg

SEQ ID NO: 431987 - RNA, 22 nt, Human
cagggaagagccgaugcugcag

SEQ ID NO: 431988 - RNA, 21 nt, Human
guucaaguauuuuuuucgcug

SEQ ID NO: 431989 - RNA, 22 nt, Human
ucacugcagagaccucuaguca

SEQ ID NO: 431990 - RNA, 22 nt, Human
ucugggagcacacgcagugauc

SEQ ID NO: 431991 - RNA, 22 nt, Human
cugguucaugguggaaugacau

SEQ ID NO: 431992 - RNA, 22 nt, Human
ugagagcuugaguaucacuggc

SEQ ID NO: 431993 - RNA, 22 nt, Human
uugauuuuuuucuacuaugcgc

SEQ ID NO: 431994 - RNA, 21 nt, Human
agacagaacaacugcucucca

SEQ ID NO: 431995 - RNA, 22 nt, Human
uuauagcaggugacuaaugagu

SEQ ID NO: 431996 - RNA, 22 nt, Human
ggcucccuagggagagugggag

SEQ ID NO: 431997 - RNA, 22 nt, Human
ugcauuauugaaggcccugugg

SEQ ID NO: 431998 - RNA, 22 nt, Human
uuccuguaucugcuucuuacua

SEQ ID NO: 431999 - RNA, 22 nt, Human
uucuuuuagucauucagggaag

SEQ ID NO: 432000 - RNA, 22 nt, Human
acacuuugcuacauuucauauu

SEQ ID NO: 432001 - RNA, 21 nt, Human
aagcuuuuccugagaguuguc

SEQ ID NO: 432002 - RNA, 23 nt, Human
agcagcagugagaggugucuuac

SEQ ID NO: 432003 - RNA, 22 nt, Human
ucauuuguaccauuuuuuaaga

SEQ ID NO: 432004 - RNA, 22 nt, Human
uauuguacauuucaaaguagcu

SEQ ID NO: 432005 - RNA, 22 nt, Human
ugacacaggcagcucccagcac

SEQ ID NO: 432006 - RNA, 22 nt, Human
gaggccugaggcugccuggagc

SEQ ID NO: 432007 - RNA, 22 nt, Human
cucacugcccugaaguuggguu

SEQ ID NO: 432008 - RNA, 22 nt, Human
gcaacuuuagaaaaaucuauaa

SEQ ID NO: 432009 - RNA, 22 nt, Human
gcugcccugucugcagcaggac

SEQ ID NO: 432010 - RNA, 22 nt, Human
aaggaaaggaugagcaugcauu

SEQ ID NO: 432011 - RNA, 22 nt, Human
aagagcuggcccaaucugagca

SEQ ID NO: 432012 - RNA, 22 nt, Human
aaaggcauuuuaauucuaaaga

SEQ ID NO: 432013 - RNA, 22 nt, Human
uuguuguuggagccaauaugca

SEQ ID NO: 432014 - RNA, 22 nt, Human
cagaagcauugacuccuugcuc

SEQ ID NO: 432015 - RNA, 22 nt, Human
gccuggaggaauguagcugagg

SEQ ID NO: 432016 - RNA, 22 nt, Human
auucuuauuauaguaaaacagu

SEQ ID NO: 432017 - RNA, 22 nt, Human
acugcagccuuugggcucauaa

SEQ ID NO: 432018 - RNA, 17 nt, Human
ggacacagcucauggcu

SEQ ID NO: 432019 - RNA, 22 nt, Human
gacaaggagccaccagucacgu

SEQ ID NO: 432020 - RNA, 22 nt, Human
ggccugaggccaccagcagccc

SEQ ID NO: 432021 - RNA, 22 nt, Human
ccuggcagcuccuccccggcgg

SEQ ID NO: 432022 - RNA, 22 nt, Human
uugcuuuugggaaaacaugccu

SEQ ID NO: 432023 - RNA, 20 nt, Human
gagccugggaagucuaaggu

SEQ ID NO: 432024 - RNA, 19 nt, Human
ugggccugcaucugggucu

SEQ ID NO: 432025 - RNA, 22 nt, Human
cuggugggagcagcaggcagcu

SEQ ID NO: 432026 - RNA, 22 nt, Human
cccagcauccucagggagcggg

SEQ ID NO: 432027 - RNA, 22 nt, Human
aagagucuauuggaacuagaca

SEQ ID NO: 432028 - RNA, 22 nt, Human
aggcagguuggggaaaagcacu

SEQ ID NO: 432029 - RNA, 22 nt, Human
cacuuugcuuagagaacaaggc

SEQ ID NO: 432030 - RNA, 19 nt, Human
ucugcccaguugucugccc

SEQ ID NO: 432031 - RNA, 22 nt, Human
gcaggcagagguggaggagaca

SEQ ID NO: 432032 - RNA, 22 nt, Human
acagccaggaauucuggagaag

SEQ ID NO: 432033 - RNA, 22 nt, Human
caggagcugggucuggaagcag

SEQ ID NO: 432034 - RNA, 22 nt, Human
uggcaaacuggaggaagcccug

SEQ ID NO: 432035 - RNA, 22 nt, Human
ugggcaaaggcuguaacccauc

SEQ ID NO: 432036 - RNA, 22 nt, Human
auauucucugcugcuuuugugu

SEQ ID NO: 432037 - RNA, 22 nt, Human
cuccccuccuuaggucuucuag

SEQ ID NO: 432038 - RNA, 21 nt, Human
cuuuucuagucccagccccgc

SEQ ID NO: 432039 - RNA, 22 nt, Human
guuucagaaaugguuuaugcaa

SEQ ID NO: 432040 - RNA, 22 nt, Human
ucugccuggauuuuggaaagcu

SEQ ID NO: 432041 - RNA, 22 nt, Human
uacaggacagauguuuacagga

SEQ ID NO: 432042 - RNA, 22 nt, Human
uggcacugccuggcagggcccc

SEQ ID NO: 432043 - RNA, 22 nt, Human
gacuuugccacuugcuccagcu

SEQ ID NO: 432044 - RNA, 22 nt, Human
gaauuucaggacaacuggaagg

SEQ ID NO: 432045 - RNA, 22 nt, Human
agcugguggauuaugcuguaca

SEQ ID NO: 432046 - RNA, 22 nt, Human
cacugguauuugaaaauagaug

SEQ ID NO: 432047 - RNA, 22 nt, Human
aaugccuucccauuuauacuuu

SEQ ID NO: 432048 - RNA, 22 nt, Human
augggagugugcuugaggaguu

SEQ ID NO: 432049 - RNA, 22 nt, Human
agcacaguuucuuuuccuuguc

SEQ ID NO: 432050 - RNA, 22 nt, Human
aacuuaaugauuucaugcaugu

SEQ ID NO: 432051 - RNA, 22 nt, Human
gacaggcaauuaccagcgccca

SEQ ID NO: 432052 - RNA, 22 nt, Human
acagagaugucagauuggcagc

SEQ ID NO: 432053 - RNA, 22 nt, Human
guuccugaugcuuugaaauuca

SEQ ID NO: 432054 - RNA, 22 nt, Human
uuacuauaugcguggcaggugc

SEQ ID NO: 432055 - RNA, 22 nt, Human
agaggcagaaguguucaaaccc

SEQ ID NO: 432056 - RNA, 22 nt, Human
gaacaaagacauggaggaggau

SEQ ID NO: 432057 - RNA, 22 nt, Human
aacaguguguacacaucauagg

SEQ ID NO: 432058 - RNA, 22 nt, Human
ugcaauauguugcauuguaugg

SEQ ID NO: 432059 - RNA, 22 nt, Human
ccugggcugggcgucucauggg

SEQ ID NO: 432060 - RNA, 22 nt, Human
cagcugccacaccucuuucucu

SEQ ID NO: 432061 - RNA, 22 nt, Human
cuguuucauagaguugugaauu

SEQ ID NO: 432062 - RNA, 22 nt, Human
cuaaauacuagccuucagauuu

SEQ ID NO: 432063 - RNA, 22 nt, Human
guauuuuucaguuaggagcuua

SEQ ID NO: 432064 - RNA, 22 nt, Human
ugcaacagacuuuauuaacucu

SEQ ID NO: 432065 - RNA, 23 nt, Human
uggagguuuuacugaguugagga

SEQ ID NO: 432066 - RNA, 22 nt, Human
gauucaaagacagacucauuuc

SEQ ID NO: 432067 - RNA, 22 nt, Human
gagaguccuuaguuugcaggua

SEQ ID NO: 432068 - RNA, 22 nt, Human
ggcagagcuuguuccuucuguu

SEQ ID NO: 432069 - RNA, 17 nt, Human
uugcccugauuuuuaac

SEQ ID NO: 432070 - RNA, 22 nt, Human
ggcugccuucagacuccagcuu

SEQ ID NO: 432071 - RNA, 22 nt, Human
uugcaacucuugaaaagcauug

SEQ ID NO: 432072 - RNA, 20 nt, Human
ccagaggcugacagacuuug

SEQ ID NO: 432073 - RNA, 22 nt, Human
cucaggccauuccuaccaaggg

SEQ ID NO: 432074 - RNA, 17 nt, Human
aggcagcucagaacauc

SEQ ID NO: 432075 - RNA, 22 nt, Human
gugcacagagcccagggccgcg

SEQ ID NO: 432076 - RNA, 22 nt, Human
ucacucaguuuuuggccucugc

SEQ ID NO: 432077 - RNA, 22 nt, Human
ugugccugaguuggcugaguac

SEQ ID NO: 432078 - RNA, 22 nt, Human
uauaaagcugacucaugaaacu

SEQ ID NO: 432079 - RNA, 22 nt, Human
ugcugucccccgugucugggcu

SEQ ID NO: 432080 - RNA, 22 nt, Human
ggcaccugaugacugcuucccu

SEQ ID NO: 432081 - RNA, 22 nt, Human
agcccaggucuggcccagccug

SEQ ID NO: 432082 - RNA, 22 nt, Human
cuggugagacgguugacaggag

SEQ ID NO: 432083 - RNA, 22 nt, Human
ugcaucuguucagagcugucga

SEQ ID NO: 432084 - RNA, 22 nt, Human
agcccuguugucugaugauggg

SEQ ID NO: 432085 - RNA, 22 nt, Human
uacacauguuuggcaaguaugu

SEQ ID NO: 432086 - RNA, 22 nt, Human
aaggcagcaagaauuccagguu

SEQ ID NO: 432087 - RNA, 20 nt, Human
uucuugauuugauccugguu

SEQ ID NO: 432088 - RNA, 21 nt, Human
uuugaaagcuacaucuauagc

SEQ ID NO: 432089 - RNA, 22 nt, Human
ucuauuuacagaaagcagaauu

SEQ ID NO: 432090 - RNA, 22 nt, Human
cagcuguugacugguacaugaa

SEQ ID NO: 432091 - RNA, 22 nt, Human
caucuuuaacaauuuacaaugu

SEQ ID NO: 432092 - RNA, 22 nt, Human
acagacagggcaccugccuccu

SEQ ID NO: 432093 - RNA, 22 nt, Human
gccuguucuccagcauccaggu

SEQ ID NO: 432094 - RNA, 22 nt, Human
caagacaugcaauugccacuuu

SEQ ID NO: 432095 - RNA, 20 nt, Human
cagggcacacugcagccucg

SEQ ID NO: 432096 - RNA, 22 nt, Human
aaggcaauugauuauuuuuccu

SEQ ID NO: 432097 - RNA, 22 nt, Human
cacucccuucaggagccuagga

SEQ ID NO: 432098 - RNA, 22 nt, Human
ggcugagcaauuuugaugacau

SEQ ID NO: 432099 - RNA, 22 nt, Human
gugcccugugaacuguaaggaa

SEQ ID NO: 432100 - RNA, 18 nt, Human
gcucagguauagacaggg

SEQ ID NO: 432101 - RNA, 22 nt, Human
uuugcuuaaaagcggagcaaga

SEQ ID NO: 432102 - RNA, 19 nt, Human
caagauuuguucacacaug

SEQ ID NO: 432103 - RNA, 20 nt, Human
gugccuggagaagaggcugu

SEQ ID NO: 432104 - RNA, 22 nt, Human
ccccuggguccaggcuucucug

SEQ ID NO: 432105 - RNA, 22 nt, Human
guuuaacaucugugaagcugcu

SEQ ID NO: 432106 - RNA, 22 nt, Human
gcccagagugaguccugggccc

SEQ ID NO: 432107 - RNA, 22 nt, Human
gcugcccuaauaucacauguua

SEQ ID NO: 432108 - RNA, 22 nt, Human
uagcauaggaaaguacugggaa

SEQ ID NO: 432109 - RNA, 22 nt, Human
uacaaguacuguggcuuugaau

SEQ ID NO: 432110 - RNA, 22 nt, Human
uccugggccuguacuccauccg

SEQ ID NO: 432111 - RNA, 22 nt, Human
cccuggcauaaaacuucuccag

SEQ ID NO: 432112 - RNA, 22 nt, Human
cuggugcccuguguggcaggag

SEQ ID NO: 432113 - RNA, 22 nt, Human
cugcuccuccccaucaggcagc

SEQ ID NO: 432114 - RNA, 22 nt, Human
uucuacagaauaaauguuuaca

SEQ ID NO: 432115 - RNA, 22 nt, Human
cugggcugcaguuccugguccu

SEQ ID NO: 432116 - RNA, 22 nt, Human
gugaaauauuuuguuuauguca

SEQ ID NO: 432117 - RNA, 22 nt, Human
gacagcagaugaagccugcaga

SEQ ID NO: 432118 - RNA, 22 nt, Human
cagcugaccuggcuaagggagc

SEQ ID NO: 432119 - RNA, 22 nt, Human
guuucacauaauuuuaaauugu

SEQ ID NO: 432120 - RNA, 22 nt, Human
uuuagacagcaucuggugacuu

SEQ ID NO: 432121 - RNA, 22 nt, Human
uggcagugggaagcuggaaguc

SEQ ID NO: 432122 - RNA, 22 nt, Human
cucugggcaaguaugauagaaa

SEQ ID NO: 432123 - RNA, 18 nt, Human
agaagcacaagaugucuu

SEQ ID NO: 432124 - RNA, 22 nt, Human
cugcagccuaggugcagcuggg

SEQ ID NO: 432125 - RNA, 22 nt, Human
agaauaccauaauauagaaaga

SEQ ID NO: 432126 - RNA, 22 nt, Human
agcugcuccuuuccugcaggcg

SEQ ID NO: 432127 - RNA, 22 nt, Human
aaacaaugaaauucauucuuca

SEQ ID NO: 432128 - RNA, 20 nt, Human
gaggcccagagaggugaagc

SEQ ID NO: 432129 - RNA, 22 nt, Human
cauguacauucuguagauggag

SEQ ID NO: 432130 - RNA, 17 nt, Human
gccaaaggguuccaauc

SEQ ID NO: 432131 - RNA, 20 nt, Human
aauccugggacagaggcagg

SEQ ID NO: 432132 - RNA, 22 nt, Human
ugcucagugagucugugacagg

SEQ ID NO: 432133 - RNA, 22 nt, Human
aauagaauguaaucuaauacau

SEQ ID NO: 432134 - RNA, 22 nt, Human
cuguacaaauggcaguugaguu

SEQ ID NO: 432135 - RNA, 22 nt, Human
ccugggcuuacgaccucugacu

SEQ ID NO: 432136 - RNA, 22 nt, Human
ugaagcccugugucagcuucca

SEQ ID NO: 432137 - RNA, 22 nt, Human
uacaggcccauagucccugcuu

SEQ ID NO: 432138 - RNA, 22 nt, Human
uuuuauugucaaugaagacaga

SEQ ID NO: 432139 - RNA, 22 nt, Human
uccaaggacgcuggaccccugc

SEQ ID NO: 432140 - RNA, 22 nt, Human
augcuugggacucccuguagca

SEQ ID NO: 432141 - RNA, 22 nt, Human
auauuauucuaguaacagugau

SEQ ID NO: 432142 - RNA, 22 nt, Human
gacacagacaguuagagguaau

SEQ ID NO: 432143 - RNA, 22 nt, Human
uucuuuuaauugugggggagug

SEQ ID NO: 432144 - RNA, 19 nt, Human
uuacaauggugauuagguu

SEQ ID NO: 432145 - RNA, 22 nt, Human
aauugguuugaauaaauaaaga

SEQ ID NO: 432146 - RNA, 22 nt, Human
aauacauguuuucuacuauucu

SEQ ID NO: 432147 - RNA, 22 nt, Human
gauaaagggggaccaaaugacu

SEQ ID NO: 432148 - RNA, 17 nt, Human
ggaaaagaagaguagga

SEQ ID NO: 432149 - RNA, 22 nt, Human
gacagacacuguguccucacuu

SEQ ID NO: 432150 - RNA, 22 nt, Human
cauuuuacugacucuugaauua

SEQ ID NO: 432151 - RNA, 22 nt, Human
agcuaaggaacucuguaacacc

SEQ ID NO: 432152 - RNA, 22 nt, Human
ucccacccauccugcaucucuu

SEQ ID NO: 432153 - RNA, 19 nt, Human
ggugugugcuggggccugu

SEQ ID NO: 432154 - RNA, 22 nt, Human
cagcaggcccagaguuucaugg

SEQ ID NO: 432155 - RNA, 22 nt, Human
uccacugcagcuucugauggaa

SEQ ID NO: 432156 - RNA, 22 nt, Human
aggccagcgcugcuagcucccg

SEQ ID NO: 432157 - RNA, 20 nt, Human
acuuugcauuuccugauuuu

SEQ ID NO: 432158 - RNA, 22 nt, Human
uugugcauuucucugagugugu

SEQ ID NO: 432159 - RNA, 22 nt, Human
gcaggcaauuuuggaaggucag

SEQ ID NO: 432160 - RNA, 21 nt, Human
cuuggcugcagugacaggcau

SEQ ID NO: 432161 - RNA, 22 nt, Human
acaggagugaaucuggcacuua

SEQ ID NO: 432162 - RNA, 22 nt, Human
ccacacugaaccucagugucuu

SEQ ID NO: 432163 - RNA, 22 nt, Human
gcagggcuauuggaaggagaug

SEQ ID NO: 432164 - RNA, 22 nt, Human
gaggcugaggguuagagaguca

SEQ ID NO: 432165 - RNA, 22 nt, Human
aaggcuggguaaccuguccacu

SEQ ID NO: 432166 - RNA, 22 nt, Human
cugaagcugcauaccaaagacu

SEQ ID NO: 432167 - RNA, 18 nt, Human
cugcuugggagacgucag

SEQ ID NO: 432168 - RNA, 22 nt, Human
uaacacuggcuuuugcugaggc

SEQ ID NO: 432169 - RNA, 22 nt, Human
uauuucuaagagauaucuguac

SEQ ID NO: 432170 - RNA, 22 nt, Human
aacauuucagcaaauaagaaca

SEQ ID NO: 432171 - RNA, 23 nt, Human
agcuaaggaagcugaggcacagu

SEQ ID NO: 432172 - RNA, 18 nt, Human
gggcccuggcguccgccc

SEQ ID NO: 432173 - RNA, 22 nt, Human
guccucagucaguuuggugggg

SEQ ID NO: 432174 - RNA, 22 nt, Human
ccagcugguguuccuuaggacc

SEQ ID NO: 432175 - RNA, 22 nt, Human
acaggccugauguuauccuauu

SEQ ID NO: 432176 - RNA, 22 nt, Human
ugcagugguugagagcccagac

SEQ ID NO: 432177 - RNA, 22 nt, Human
gaaggagcuaccaagacugaau

SEQ ID NO: 432178 - RNA, 22 nt, Human
ugugugaaggagccacuguuca

SEQ ID NO: 432179 - RNA, 22 nt, Human
cacugguaguuucagcaaccag

SEQ ID NO: 432180 - RNA, 22 nt, Human
cacagcaagagcuaaaugacca

SEQ ID NO: 432181 - RNA, 22 nt, Human
cacagggcaggccccaggccuc

SEQ ID NO: 432182 - RNA, 22 nt, Human
auugcuuuucagacaaugaggc

SEQ ID NO: 432183 - RNA, 22 nt, Human
uagauugauugcaaagacaggc

SEQ ID NO: 432184 - RNA, 22 nt, Human
agggcagcuaaggugcugacug

SEQ ID NO: 432185 - RNA, 22 nt, Human
uggcacagagggacccagcagc

SEQ ID NO: 432186 - RNA, 22 nt, Human
uugugaauagugccgcuauaaa

SEQ ID NO: 432187 - RNA, 22 nt, Human
uggccagcuuuuuguagugcuc

SEQ ID NO: 432188 - RNA, 22 nt, Human
guaaaggcucugauaaguacug

SEQ ID NO: 432189 - RNA, 21 nt, Human
caaaaggauaggaaauuaggg

SEQ ID NO: 432190 - RNA, 22 nt, Human
cuuguuuucuaaaacaucauuu

SEQ ID NO: 432191 - RNA, 22 nt, Human
agaagagaaauagugccacugu

SEQ ID NO: 432192 - RNA, 22 nt, Human
ggacagggaucauuaucugagc

SEQ ID NO: 432193 - RNA, 22 nt, Human
auguguguguuuaauccucaaa

SEQ ID NO: 432194 - RNA, 22 nt, Human
uuucuugacugcuuaggaaugc

SEQ ID NO: 432195 - RNA, 22 nt, Human
caguucuaucauuuuagagaug

SEQ ID NO: 432196 - RNA, 22 nt, Human
aagugauacguguuuauuucca

SEQ ID NO: 432197 - RNA, 22 nt, Human
auuuagacuucuugcagguaau

SEQ ID NO: 432198 - RNA, 22 nt, Human
aggccagaaaaagacagcucca

SEQ ID NO: 432199 - RNA, 22 nt, Human
gaauuuuaaguguucgccucuu

SEQ ID NO: 432200 - RNA, 22 nt, Human
uccugccugagcguggaggagg

SEQ ID NO: 432201 - RNA, 22 nt, Human
aucugguucuucuuaggcauca

SEQ ID NO: 432202 - RNA, 22 nt, Human
ugucacaaacauacauuauaga

SEQ ID NO: 432203 - RNA, 22 nt, Human
gcuccacuuccuucugcccuca

SEQ ID NO: 432204 - RNA, 22 nt, Human
uugcaaauucauggaucugaau

SEQ ID NO: 432205 - RNA, 22 nt, Human
aucgaauaauugcauucuauaa

SEQ ID NO: 432206 - RNA, 22 nt, Human
gcucucuggaggccauggacag

SEQ ID NO: 432207 - RNA, 22 nt, Human
ugguaaaaacugcaauuacuuu

SEQ ID NO: 432208 - RNA, 22 nt, Human
gacaggugagaugaggaacacc

SEQ ID NO: 432209 - RNA, 22 nt, Human
acccaggagguggaggcugcag

SEQ ID NO: 432210 - RNA, 23 nt, Human
caggaagcagaugggguagaaga

SEQ ID NO: 432211 - RNA, 22 nt, Human
ggcucuggguucugcaaugcgu

SEQ ID NO: 432212 - RNA, 22 nt, Human
agucacacuucguaucucuagc

SEQ ID NO: 432213 - RNA, 22 nt, Human
cauuguuaccaucuuuuaccua

SEQ ID NO: 432214 - RNA, 20 nt, Human
aucaggaagagagacugacc

SEQ ID NO: 432215 - RNA, 22 nt, Human
ugggcuggcugaacuucaaccu

SEQ ID NO: 432216 - RNA, 22 nt, Human
uccuggagagugggcgagcaca

SEQ ID NO: 432217 - RNA, 17 nt, Human
cucugcagugcauggcu

SEQ ID NO: 432218 - RNA, 22 nt, Human
augccaggcuguuuggccucag

SEQ ID NO: 432219 - RNA, 22 nt, Human
uuaaguacuucccuguuggaca

SEQ ID NO: 432220 - RNA, 22 nt, Human
agcugugugccaggggagaugu

SEQ ID NO: 432221 - RNA, 22 nt, Human
ugucacauugaauaugauuuau

SEQ ID NO: 432222 - RNA, 22 nt, Human
gagagcuguguucauucuacca

SEQ ID NO: 432223 - RNA, 22 nt, Human
ggcuugaauggauauaaucugu

SEQ ID NO: 432224 - RNA, 22 nt, Human
gaggcuaagguucugccagaag

SEQ ID NO: 432225 - RNA, 22 nt, Human
caggcuggagugcaauggcaca

SEQ ID NO: 432226 - RNA, 22 nt, Human
cucggguaccaugcuaggcacu

SEQ ID NO: 432227 - RNA, 22 nt, Human
gcuggcuguguuccuucugcca

SEQ ID NO: 432228 - RNA, 22 nt, Human
ccugggcucuauccugacccag

SEQ ID NO: 432229 - RNA, 22 nt, Human
uagcacugagucuagcuuugga

SEQ ID NO: 432230 - RNA, 22 nt, Human
uccuggauaucaaacaaacauu

SEQ ID NO: 432231 - RNA, 22 nt, Human
uaaggcagguagaugacuacgg

SEQ ID NO: 432232 - RNA, 21 nt, Human
agacagacugccugacccacg

SEQ ID NO: 432233 - RNA, 22 nt, Human
cugggccagggaggugucugua

SEQ ID NO: 432234 - RNA, 22 nt, Human
uguguguggggaggcagcagau

SEQ ID NO: 432235 - RNA, 19 nt, Human
ggccuggcuaucccugcug

SEQ ID NO: 432236 - RNA, 22 nt, Human
ucccagaguuuccuguguccca

SEQ ID NO: 432237 - RNA, 22 nt, Human
ucagcaggcaccggaaguguuu

SEQ ID NO: 432238 - RNA, 22 nt, Human
uauaccaaaauaucagaaaggg

SEQ ID NO: 432239 - RNA, 22 nt, Human
cacaguaucuuuugaguaagca

SEQ ID NO: 432240 - RNA, 22 nt, Human
ucugacagucacaguggaggau

SEQ ID NO: 432241 - RNA, 22 nt, Human
ucaggccuucagaccuggcccg

SEQ ID NO: 432242 - RNA, 22 nt, Human
ugcagaaggaggaggaaaucca

SEQ ID NO: 432243 - RNA, 22 nt, Human
gcucagagaaguuaaggaauuu

SEQ ID NO: 432244 - RNA, 22 nt, Human
caagauaucaaugacauaguau

SEQ ID NO: 432245 - RNA, 22 nt, Human
uucucuaagaguuauaugaauu

SEQ ID NO: 432246 - RNA, 22 nt, Human
ugugaauagauugaagcuuugg

SEQ ID NO: 432247 - RNA, 22 nt, Human
ugugggcaggcccgggucugag

SEQ ID NO: 432248 - RNA, 22 nt, Human
ucagaauucugaagggcacaaa

SEQ ID NO: 432249 - RNA, 22 nt, Human
guccugaaugccuuuaggcaga

SEQ ID NO: 432250 - RNA, 22 nt, Human
guugaauaucccguaucuuaaa

SEQ ID NO: 432251 - RNA, 22 nt, Human
uuacaugacucaauagaagggc

SEQ ID NO: 432252 - RNA, 22 nt, Human
ccagcagcgauagggugagugc

SEQ ID NO: 432253 - RNA, 22 nt, Human
cuggcugugcugacugagaggg

SEQ ID NO: 432254 - RNA, 22 nt, Human
acugucaccaucagagcgggaa

SEQ ID NO: 432255 - RNA, 22 nt, Human
uuaauuaaauucaugagcauug

SEQ ID NO: 432256 - RNA, 21 nt, Human
cccaggaggcugagaagagca

SEQ ID NO: 432257 - RNA, 22 nt, Human
agcaggcuaaauaauaauacau

SEQ ID NO: 432258 - RNA, 22 nt, Human
agucuagcuuaggagccuagcu

SEQ ID NO: 432259 - RNA, 22 nt, Human
acuuucuccagaaaaccaagga

SEQ ID NO: 432260 - RNA, 22 nt, Human
uuauuaguguugauauuaggau

SEQ ID NO: 432261 - RNA, 22 nt, Human
ugggggcuccaggcuccaggga

SEQ ID NO: 432262 - RNA, 22 nt, Human
aggccuuuguggagcucauggc

SEQ ID NO: 432263 - RNA, 22 nt, Human
cccaggcugauguucagcgggu

SEQ ID NO: 432264 - RNA, 22 nt, Human
acauguuaaacaucauggaaug

SEQ ID NO: 432265 - RNA, 22 nt, Human
cacacagugggaaaaccugaag

SEQ ID NO: 432266 - RNA, 22 nt, Human
ggcuccuggggaggugagcuug

SEQ ID NO: 432267 - RNA, 22 nt, Human
ccuggcacgaagggcugagguu

SEQ ID NO: 432268 - RNA, 22 nt, Human
uguggcuguguccaccugcugc

SEQ ID NO: 432269 - RNA, 22 nt, Human
agcagggcagguaaggaucaga

SEQ ID NO: 432270 - RNA, 22 nt, Human
uggcugaaagccuggccugcca

SEQ ID NO: 432271 - RNA, 19 nt, Human
gagcaacauauguaaacuc

SEQ ID NO: 432272 - RNA, 22 nt, Human
agccuggauucgugcauccaca

SEQ ID NO: 432273 - RNA, 22 nt, Human
gcugaggccucagaaggcugag

SEQ ID NO: 432274 - RNA, 22 nt, Human
gcaggaguguauuugcauguaa

SEQ ID NO: 432275 - RNA, 22 nt, Human
cugcccugggccaggaagcggc

SEQ ID NO: 432276 - RNA, 22 nt, Human
gcucccugcacucugcagcccu

SEQ ID NO: 432277 - RNA, 22 nt, Human
gaaggaaaacagaucugccuga

SEQ ID NO: 432278 - RNA, 19 nt, Human
ccugggagucagcugaagg

SEQ ID NO: 432279 - RNA, 22 nt, Human
gccaugggcaaaugcagagcug

SEQ ID NO: 432280 - RNA, 22 nt, Human
ucaggcugcuguacugugaaug

SEQ ID NO: 432281 - RNA, 22 nt, Human
uccuucagggggccgccugcac

SEQ ID NO: 432282 - RNA, 22 nt, Human
uguaccaugugacuggagucuu

SEQ ID NO: 432283 - RNA, 22 nt, Human
aggagcugucagagugccagag

SEQ ID NO: 432284 - RNA, 22 nt, Human
aguugcagccuucaggagaccc

SEQ ID NO: 432285 - RNA, 22 nt, Human
uuccauaaaggugauaguauac

SEQ ID NO: 432286 - RNA, 22 nt, Human
augcauucagcggaaugcuuag

SEQ ID NO: 432287 - RNA, 22 nt, Human
agccagccccugacuguguccu

SEQ ID NO: 432288 - RNA, 22 nt, Human
aaguccugggcauuugaacagg

SEQ ID NO: 432289 - RNA, 22 nt, Human
ugcagcugaugauacccccaug

SEQ ID NO: 432290 - RNA, 22 nt, Human
caguacucccagaacaaacccu

SEQ ID NO: 432291 - RNA, 21 nt, Human
aucauuaauugcugagugaca

SEQ ID NO: 432292 - RNA, 22 nt, Human
gcacacagauuaggaaacagaa

SEQ ID NO: 432293 - RNA, 22 nt, Human
uuuauucaagaugagguucaug

SEQ ID NO: 432294 - RNA, 22 nt, Human
ucaggggcuugaggugcauguc

SEQ ID NO: 432295 - RNA, 22 nt, Human
aguccuaggcccugcuccagau

SEQ ID NO: 432296 - RNA, 22 nt, Human
aagcccuggcggguggagggcc

SEQ ID NO: 432297 - RNA, 22 nt, Human
gaggccuggaauuccagccugg

SEQ ID NO: 432298 - RNA, 22 nt, Human
uacaguuccaggaucauagggu

SEQ ID NO: 432299 - RNA, 22 nt, Human
gagcugugagggacacauugcu

SEQ ID NO: 432300 - RNA, 22 nt, Human
uggcugccuuucaccucaucuc

SEQ ID NO: 432301 - RNA, 22 nt, Human
aucagaggaccuaguugggcag

SEQ ID NO: 432302 - RNA, 22 nt, Human
ugcugagggagcaucaaagaaa

SEQ ID NO: 432303 - RNA, 23 nt, Human
uuuaacauuugaacauguggcca

SEQ ID NO: 432304 - RNA, 22 nt, Human
ucuuagcagacuuggcuacugu

SEQ ID NO: 432305 - RNA, 20 nt, Human
agcauuuuaugguaggaaac

SEQ ID NO: 432306 - RNA, 22 nt, Human
ccucaggcuugugagccuucag

SEQ ID NO: 432307 - RNA, 22 nt, Human
uucauuaaguauaaaauguggu

SEQ ID NO: 432308 - RNA, 16 nt, Human
aucuaagaauguagag

SEQ ID NO: 432309 - RNA, 22 nt, Human
cugguacauuugaugauaauag

SEQ ID NO: 432310 - RNA, 22 nt, Human
uuagcauucugccuccuauauc

SEQ ID NO: 432311 - RNA, 22 nt, Human
ccugucuguauugguuugcuau

SEQ ID NO: 432312 - RNA, 22 nt, Human
gugagagaauuugaguuaaauu

SEQ ID NO: 432313 - RNA, 22 nt, Human
agcagagcugcaguggccugcu

SEQ ID NO: 432314 - RNA, 19 nt, Human
gaaaacaugggugaggguc

SEQ ID NO: 432315 - RNA, 19 nt, Human
acuccagggaugacagaag

SEQ ID NO: 432316 - RNA, 22 nt, Human
uauuuaaccaguuaaauuucca

SEQ ID NO: 432317 - RNA, 22 nt, Human
uggcagauguggcauagagcau

SEQ ID NO: 432318 - RNA, 22 nt, Human
uggcacuggcgcaggauggcgg

SEQ ID NO: 432319 - RNA, 22 nt, Human
ccuggcagcaggugggcccgug

SEQ ID NO: 432320 - RNA, 22 nt, Human
caggacagugcagguccauccu

SEQ ID NO: 432321 - RNA, 22 nt, Human
uuaccauaguacuaucaguuua

SEQ ID NO: 432322 - RNA, 22 nt, Human
aagcaucuuaaaaaguaucaga

SEQ ID NO: 432323 - RNA, 22 nt, Human
ugaagaggccgugugcagguga

SEQ ID NO: 432324 - RNA, 22 nt, Human
uucuugauuucaugcaguuaag

SEQ ID NO: 432325 - RNA, 22 nt, Human
gugcagcucaguugaaaugcag

SEQ ID NO: 432326 - RNA, 22 nt, Human
cuggcucccuggacauggggcc

SEQ ID NO: 432327 - RNA, 22 nt, Human
aauccauuuacucuuuacaaga

SEQ ID NO: 432328 - RNA, 22 nt, Human
cagcaggguagguuguaucagu

SEQ ID NO: 432329 - RNA, 22 nt, Human
cuguggcucaaaaucccaugau

SEQ ID NO: 432330 - RNA, 22 nt, Human
agaugcugucacacacacuguu

SEQ ID NO: 432331 - RNA, 22 nt, Human
aaaugcuacacaggaauucuca

SEQ ID NO: 432332 - RNA, 22 nt, Human
uuccaugagcucugaguucaca

SEQ ID NO: 432333 - RNA, 23 nt, Human
uaucuuuuucaauguuggaaaua

SEQ ID NO: 432334 - RNA, 22 nt, Human
auucagaaaggguugccugguu

SEQ ID NO: 432335 - RNA, 22 nt, Human
ggagccuguggcugcuugaagc

SEQ ID NO: 432336 - RNA, 22 nt, Human
aucucaaagcauggagcagaau

SEQ ID NO: 432337 - RNA, 22 nt, Human
aaugacaauauuaauuuggagg

SEQ ID NO: 432338 - RNA, 22 nt, Human
uugcaaaucucuuguguuuggu

SEQ ID NO: 432339 - RNA, 22 nt, Human
cuugaugauuugcagagggagu

SEQ ID NO: 432340 - RNA, 22 nt, Human
cuggggcucacuuuggucaggc

SEQ ID NO: 432341 - RNA, 22 nt, Human
gcugucugcaucucuagagcuu

SEQ ID NO: 432342 - RNA, 22 nt, Human
agccuggauccauguggcuacc

SEQ ID NO: 432343 - RNA, 22 nt, Human
uuucuaguucucugccaaaaaa

SEQ ID NO: 432344 - RNA, 22 nt, Human
cagcuguuccuggaaggagacc

SEQ ID NO: 432345 - RNA, 21 nt, Human
cagagguggccugaccucuga

SEQ ID NO: 432346 - RNA, 22 nt, Human
aaguucaagcucugccuaaaau

SEQ ID NO: 432347 - RNA, 22 nt, Human
agccucugcacuucuuacaggu

SEQ ID NO: 432348 - RNA, 22 nt, Human
gaggccucugucccaccaggga

SEQ ID NO: 432349 - RNA, 22 nt, Human
ugacacaguugucgacucuaca

SEQ ID NO: 432350 - RNA, 22 nt, Human
ccucuuugugccugcaggcugc

SEQ ID NO: 432351 - RNA, 22 nt, Human
guugaauauuuuaagaguuuug

SEQ ID NO: 432352 - RNA, 22 nt, Human
uacacaaaggcacucuguuguu

SEQ ID NO: 432353 - RNA, 22 nt, Human
cccagacugcagagcgggcaga

SEQ ID NO: 432354 - RNA, 22 nt, Human
aaaguugaguuuuauguguuac

SEQ ID NO: 432355 - RNA, 22 nt, Human
uggcucagaacuacuucuaguu

SEQ ID NO: 432356 - RNA, 22 nt, Human
uacagaggaggggauuuuaaua

SEQ ID NO: 432357 - RNA, 22 nt, Human
gcagagcugggucuguauccaa

SEQ ID NO: 432358 - RNA, 22 nt, Human
ccagauucauagaaacucauag

SEQ ID NO: 432359 - RNA, 22 nt, Human
agagcuggaaucagaccucagg

SEQ ID NO: 432360 - RNA, 22 nt, Human
uuuucuaauuuaguuacccucc

SEQ ID NO: 432361 - RNA, 22 nt, Human
ggcgaggccgggacaggcugga

SEQ ID NO: 432362 - RNA, 23 nt, Human
cacagggagggaaacucuuucag

SEQ ID NO: 432363 - RNA, 22 nt, Human
gcaggccugacuguagggggca

SEQ ID NO: 432364 - RNA, 21 nt, Human
uuuguucaggggcaaaguuaa

SEQ ID NO: 432365 - RNA, 22 nt, Human
auucauaaguaaaugauuaccu

SEQ ID NO: 432366 - RNA, 22 nt, Human
ccagaggcuggcaagggcuccu

SEQ ID NO: 432367 - RNA, 22 nt, Human
uucuggaauauuugacacaauu

SEQ ID NO: 432368 - RNA, 22 nt, Human
uuuccagucucagcccuguaac

SEQ ID NO: 432369 - RNA, 22 nt, Human
cugggucuggcuacugcuuccu

SEQ ID NO: 432370 - RNA, 22 nt, Human
ucaagacagauggguaacuugg

SEQ ID NO: 432371 - RNA, 22 nt, Human
agguaauuguauguuccaagca

SEQ ID NO: 432372 - RNA, 22 nt, Human
ugcucagacaagcugaacagua

SEQ ID NO: 432373 - RNA, 22 nt, Human
uuugucauaacucugcugcaag

SEQ ID NO: 432374 - RNA, 22 nt, Human
cucucuggcuuggcacggagau

SEQ ID NO: 432375 - RNA, 22 nt, Human
gauggcuucacuuacauggcug

SEQ ID NO: 432376 - RNA, 22 nt, Human
uagcagagcgggugcgaggcgg

SEQ ID NO: 432377 - RNA, 23 nt, Human
uuaaaggcagauguugaguauua

SEQ ID NO: 432378 - RNA, 22 nt, Human
auuucuacauugaguuuuagca

SEQ ID NO: 432379 - RNA, 22 nt, Human
gaaauauucuugucuuguuuuc

SEQ ID NO: 432380 - RNA, 22 nt, Human
gccugcagggugaugggcugcc

SEQ ID NO: 432381 - RNA, 22 nt, Human
cagcaggugcaggugcggccgc

SEQ ID NO: 432382 - RNA, 22 nt, Human
ggggacaguuaaagaccaagac

SEQ ID NO: 432383 - RNA, 22 nt, Human
ucaggaaaggcagagugucugu

SEQ ID NO: 432384 - RNA, 22 nt, Human
ugagccagucugucugggugaa

SEQ ID NO: 432385 - RNA, 22 nt, Human
uuuucuuaggugcuccaaguag

SEQ ID NO: 432386 - RNA, 22 nt, Human
caagucugaccucugggugaag

SEQ ID NO: 432387 - RNA, 22 nt, Human
cuggccaguuguccuggcuugg

SEQ ID NO: 432388 - RNA, 22 nt, Human
uaaaggaagaauucucugugau

SEQ ID NO: 432389 - RNA, 22 nt, Human
guguuaaauuucuaauuuguga

SEQ ID NO: 432390 - RNA, 22 nt, Human
ucccagaaaaaggaggcuauga

SEQ ID NO: 432391 - RNA, 22 nt, Human
ucccagacaaucauuggccacc

SEQ ID NO: 432392 - RNA, 22 nt, Human
gagcaggccagcaauggaaggg

SEQ ID NO: 432393 - RNA, 18 nt, Human
cuuccucaucgcucuccc

SEQ ID NO: 432394 - RNA, 22 nt, Human
cagugggugaugaguccugggg

SEQ ID NO: 432395 - RNA, 22 nt, Human
guacuucuuuagucaauaugua

SEQ ID NO: 432396 - RNA, 22 nt, Human
uuauucagcagggacuuccuuu

SEQ ID NO: 432397 - RNA, 22 nt, Human
cagggcuugaucugcauccugc

SEQ ID NO: 432398 - RNA, 19 nt, Human
gcagcugugggaagagcca

SEQ ID NO: 432399 - RNA, 22 nt, Human
aacuggcugggaacaccuagag

SEQ ID NO: 432400 - RNA, 22 nt, Human
ucugggagauccaagcagaacu

SEQ ID NO: 432401 - RNA, 22 nt, Human
uugacaaaacaacacagauuuc

SEQ ID NO: 432402 - RNA, 22 nt, Human
caggggccuggcugucuaggaa

SEQ ID NO: 432403 - RNA, 22 nt, Human
gucccugcccuccugggacuca

SEQ ID NO: 432404 - RNA, 19 nt, Human
gucuggauuuuucgguaac

SEQ ID NO: 432405 - RNA, 22 nt, Human
agaagcacagguaaagugauuu

SEQ ID NO: 432406 - RNA, 22 nt, Human
auggcugggauuuccuuugcgu

SEQ ID NO: 432407 - RNA, 18 nt, Human
gagcccugagucugcaca

SEQ ID NO: 432408 - RNA, 19 nt, Human
cccagcuugaccaccugcu

SEQ ID NO: 432409 - RNA, 21 nt, Human
cauugagauaggagagauugu

SEQ ID NO: 432410 - RNA, 22 nt, Human
auauuauaaguuauuucaaguu

SEQ ID NO: 432411 - RNA, 22 nt, Human
ggccagcggcacagccuggccc

SEQ ID NO: 432412 - RNA, 22 nt, Human
acagguacuuuguaaugaagga

SEQ ID NO: 432413 - RNA, 22 nt, Human
ugcaggccucacaccuggcacc

SEQ ID NO: 432414 - RNA, 22 nt, Human
gacagcagguaauuaguuaaca

SEQ ID NO: 432415 - RNA, 22 nt, Human
uccuguguuacugccuggagcg

SEQ ID NO: 432416 - RNA, 22 nt, Human
agcaagcuguucuuggagagua

SEQ ID NO: 432417 - RNA, 19 nt, Human
cagagccucagagcuagaa

SEQ ID NO: 432418 - RNA, 22 nt, Human
cauuuacagcagacugaugaaa

SEQ ID NO: 432419 - RNA, 22 nt, Human
cacaggaaagucagccagaaga

SEQ ID NO: 432420 - RNA, 22 nt, Human
auacaaaauauauacuggagac

SEQ ID NO: 432421 - RNA, 22 nt, Human
caaauacaaauacgggcagcuu

SEQ ID NO: 432422 - RNA, 22 nt, Human
agagccuggggauuggcaaggg

SEQ ID NO: 432423 - RNA, 22 nt, Human
gccuggagaaaggaagguggga

SEQ ID NO: 432424 - RNA, 22 nt, Human
uacugcaugggugcaugcugcu

SEQ ID NO: 432425 - RNA, 22 nt, Human
ucuuugcaaauguuauuaucuu

SEQ ID NO: 432426 - RNA, 22 nt, Human
gaagccaacauuccaaguagaa

SEQ ID NO: 432427 - RNA, 22 nt, Human
cgccugggaguccacaccugcu

SEQ ID NO: 432428 - RNA, 22 nt, Human
cuuccucacggugcaacaggaa

SEQ ID NO: 432429 - RNA, 22 nt, Human
uuaagagcaacauauggugaca

SEQ ID NO: 432430 - RNA, 22 nt, Human
uaaggcauaaggaagauuugga

SEQ ID NO: 432431 - RNA, 22 nt, Human
ugucaccagcugcuccucagga

SEQ ID NO: 432432 - RNA, 22 nt, Human
caggcagcugaggacuuugcua

SEQ ID NO: 432433 - RNA, 22 nt, Human
uggacucagugcugccauuccc

SEQ ID NO: 432434 - RNA, 22 nt, Human
acugcauuggagagcaugaauu

SEQ ID NO: 432435 - RNA, 22 nt, Human
auccugggcugcacccucagcc

SEQ ID NO: 432436 - RNA, 22 nt, Human
agaaauucaauucuaauuagcu

SEQ ID NO: 432437 - RNA, 21 nt, Human
uggccagcugcucgucuccuc

SEQ ID NO: 432438 - RNA, 22 nt, Human
gcuuagcaaugugacaagaugc

SEQ ID NO: 432439 - RNA, 22 nt, Human
gcuuccugagacaacauugagu

SEQ ID NO: 432440 - RNA, 22 nt, Human
uaggaaauggcucaguuacugc

SEQ ID NO: 432441 - RNA, 22 nt, Human
aaguagaaaaccgcacuggacu

SEQ ID NO: 432442 - RNA, 22 nt, Human
agcaacaguguauaucauaggc

SEQ ID NO: 432443 - RNA, 22 nt, Human
gcuggugccuuguuguuguuac

SEQ ID NO: 432444 - RNA, 22 nt, Human
uuguaaaugaccuuuucuaauu

SEQ ID NO: 432445 - RNA, 22 nt, Human
gacagagugcagggcuagaaga

SEQ ID NO: 432446 - RNA, 22 nt, Human
uggaugagucugagauugggca

SEQ ID NO: 432447 - RNA, 22 nt, Human
aaccucuacauccaggaaagga

SEQ ID NO: 432448 - RNA, 22 nt, Human
ugcaggggcuugucugggccug

SEQ ID NO: 432449 - RNA, 22 nt, Human
uuaaugacaucauaggugaagu

SEQ ID NO: 432450 - RNA, 22 nt, Human
agggcagacuaggauggaagug

SEQ ID NO: 432451 - RNA, 22 nt, Human
ugcauuauggcugagucucuca

SEQ ID NO: 432452 - RNA, 22 nt, Human
augcccugugacucuccuggac

SEQ ID NO: 432453 - RNA, 21 nt, Human
ucaggaggcucagacuccugc

SEQ ID NO: 432454 - RNA, 17 nt, Human
ugcagcugauggggaaa

SEQ ID NO: 432455 - RNA, 22 nt, Human
guauucuugaguggcaacuagg

SEQ ID NO: 432456 - RNA, 22 nt, Human
ggcuccuguggcaagacagcuu

SEQ ID NO: 432457 - RNA, 22 nt, Human
aacaucuuuuuguuugcugaaa

SEQ ID NO: 432458 - RNA, 22 nt, Human
aaggcaaguuuuaguuuucugg

SEQ ID NO: 432459 - RNA, 22 nt, Human
augcaacaauguauuuauguau

SEQ ID NO: 432460 - RNA, 22 nt, Human
uguagaaagaauauguuucaua

SEQ ID NO: 432461 - RNA, 22 nt, Human
gcuccucugucaaaugagagug

SEQ ID NO: 432462 - RNA, 17 nt, Human
ucugagaaugcuggagg

SEQ ID NO: 432463 - RNA, 22 nt, Human
uuauugcauagauuaugccaua

SEQ ID NO: 432464 - RNA, 22 nt, Human
agcuccaggccuugggccccgg

SEQ ID NO: 432465 - RNA, 22 nt, Human
ccauuacugaaauaaagagaau

SEQ ID NO: 432466 - RNA, 22 nt, Human
gaucuuuucagguuucucuagu

SEQ ID NO: 432467 - RNA, 22 nt, Human
cugggccauggaagucucugcc

SEQ ID NO: 432468 - RNA, 22 nt, Human
acaggcaaggccagugagaaau

SEQ ID NO: 432469 - RNA, 22 nt, Human
caggguggggcuggcuaucaaa

SEQ ID NO: 432470 - RNA, 22 nt, Human
uccugccucacaguugaaguuu

SEQ ID NO: 432471 - RNA, 22 nt, Human
uuuucugaccuaucuacauuua

SEQ ID NO: 432472 - RNA, 22 nt, Human
gaguccuguugucccagauggg

SEQ ID NO: 432473 - RNA, 22 nt, Human
aaaugcaugagaaaguauucug

SEQ ID NO: 432474 - RNA, 22 nt, Human
auuaagaucauuguagaagauu

SEQ ID NO: 432475 - RNA, 19 nt, Human
uggaaggcuaagacacuug

SEQ ID NO: 432476 - RNA, 22 nt, Human
gugacccaggacacuguguauc

SEQ ID NO: 432477 - RNA, 21 nt, Human
aucucacagcccagagaagcc

SEQ ID NO: 432478 - RNA, 22 nt, Human
ucauuuguugcuguuaccugag

SEQ ID NO: 432479 - RNA, 22 nt, Human
gcucugggaacugacugccuuc

SEQ ID NO: 432480 - RNA, 22 nt, Human
ggccuugggcagacacgucaca

SEQ ID NO: 432481 - RNA, 21 nt, Human
guucaaguuccugcucuguga

SEQ ID NO: 432482 - RNA, 22 nt, Human
uauuuuacaaaugggaaugcug

SEQ ID NO: 432483 - RNA, 22 nt, Human
acugucuccucaucaugccugg

SEQ ID NO: 432484 - RNA, 22 nt, Human
agucacaugcauuuucuucaau

SEQ ID NO: 432485 - RNA, 22 nt, Human
acagucuacuaaacaucaucag

SEQ ID NO: 432486 - RNA, 22 nt, Human
gcagcugucggaaagcuaagug

SEQ ID NO: 432487 - RNA, 23 nt, Human
cugcauguccacugguguaaaug

SEQ ID NO: 432488 - RNA, 22 nt, Human
acauugcaauaauaauucucuu

SEQ ID NO: 432489 - RNA, 22 nt, Human
aauaacuugaagaucucuucca

SEQ ID NO: 432490 - RNA, 22 nt, Human
ugggcaggauaauaucucaugu

SEQ ID NO: 432491 - RNA, 22 nt, Human
cacagaaguuucauagucucga

SEQ ID NO: 432492 - RNA, 22 nt, Human
agggcagccucucagccuaggu

SEQ ID NO: 432493 - RNA, 22 nt, Human
gcaaggcuguugcugcugcaag

SEQ ID NO: 432494 - RNA, 22 nt, Human
uucuuuuacauuaagauuucag

SEQ ID NO: 432495 - RNA, 22 nt, Human
cuucaagagaaugcagggaugu

SEQ ID NO: 432496 - RNA, 19 nt, Human
agcagcuuaauuuuguagc

SEQ ID NO: 432497 - RNA, 23 nt, Human
uuuuauugauauguagcuguugu

SEQ ID NO: 432498 - RNA, 22 nt, Human
ucccacugugaauccaaggccu

SEQ ID NO: 432499 - RNA, 22 nt, Human
agagucagaaagcagacagggg

SEQ ID NO: 432500 - RNA, 23 nt, Human
aaaggcacagcauugucuagcag

SEQ ID NO: 432501 - RNA, 20 nt, Human
ggaagcagagaacuguuuuc

SEQ ID NO: 432502 - RNA, 22 nt, Human
augagcaagagcuauguacaga

SEQ ID NO: 432503 - RNA, 22 nt, Human
cagcagagcuuauguuggguca

SEQ ID NO: 432504 - RNA, 22 nt, Human
ccugagccugaguggugcaggg

SEQ ID NO: 432505 - RNA, 22 nt, Human
ggacacagcugcagccacaccc

SEQ ID NO: 432506 - RNA, 22 nt, Human
acagagauggcacagagaaggu

SEQ ID NO: 432507 - RNA, 22 nt, Human
uaaggcaaagaaccauaguaau

SEQ ID NO: 432508 - RNA, 18 nt, Human
cagagcuccuggaugcag

SEQ ID NO: 432509 - RNA, 22 nt, Human
ucauuauucucuuuaauguucu

SEQ ID NO: 432510 - RNA, 22 nt, Human
ucucagagaacaguuggugcuu

SEQ ID NO: 432511 - RNA, 22 nt, Human
augugaaugcaguuaucuauaa

SEQ ID NO: 432512 - RNA, 22 nt, Human
acagaacugcagacagugccaa

SEQ ID NO: 432513 - RNA, 22 nt, Human
cuguguguccucggacgaguuu

SEQ ID NO: 432514 - RNA, 22 nt, Human
guuuccuguuucucagcagccc

SEQ ID NO: 432515 - RNA, 22 nt, Human
ugcaggugcguuuucaagccuc

SEQ ID NO: 432516 - RNA, 22 nt, Human
cuccuuccugccccagugauaa

SEQ ID NO: 432517 - RNA, 21 nt, Human
aaaaggaggcaggugaacagc

SEQ ID NO: 432518 - RNA, 22 nt, Human
gcaggccuuggcaaugagccug

SEQ ID NO: 432519 - RNA, 22 nt, Human
acacuuuguccuuuuucauugu

SEQ ID NO: 432520 - RNA, 22 nt, Human
ccuccagggcagacggggagca

SEQ ID NO: 432521 - RNA, 22 nt, Human
cagaccugagguugaguaccag

SEQ ID NO: 432522 - RNA, 22 nt, Human
gccuggcuucccuuggagcauu

SEQ ID NO: 432523 - RNA, 22 nt, Human
ugcccucagaauugcucccugc

SEQ ID NO: 432524 - RNA, 22 nt, Human
uucggaguauugacaugugaag

SEQ ID NO: 432525 - RNA, 22 nt, Human
cagcugaggucaaagaagcagg

SEQ ID NO: 432526 - RNA, 22 nt, Human
aggcuggaucucuguugccuuc

SEQ ID NO: 432527 - RNA, 22 nt, Human
ucauaaagugaaggaugauggg

SEQ ID NO: 432528 - RNA, 17 nt, Human
gacaagacagaauucau

SEQ ID NO: 432529 - RNA, 22 nt, Human
agcagcaggcuguguggacuga

SEQ ID NO: 432530 - RNA, 22 nt, Human
aggauuugcacugguguuugag

SEQ ID NO: 432531 - RNA, 22 nt, Human
agcaaaauaagguaauuuauug

SEQ ID NO: 432532 - RNA, 22 nt, Human
ucuguagcaagugagaggcauu

SEQ ID NO: 432533 - RNA, 23 nt, Human
augcccugugcagaaauguggaa

SEQ ID NO: 432534 - RNA, 22 nt, Human
ugcaaauucagaagaacugccc

SEQ ID NO: 432535 - RNA, 22 nt, Human
uucuccuuuguaauucucaucc

SEQ ID NO: 432536 - RNA, 22 nt, Human
uugcaaauaauagccugaaacu

SEQ ID NO: 432537 - RNA, 20 nt, Human
uauuuacaacuuagagccuc

SEQ ID NO: 432538 - RNA, 22 nt, Human
ugggcaaacugucaaccauguc

SEQ ID NO: 432539 - RNA, 22 nt, Human
agaauuucuggaagauugcaag

SEQ ID NO: 432540 - RNA, 22 nt, Human
uccugaagaacgaagucaugua

SEQ ID NO: 432541 - RNA, 18 nt, Human
cauaauuuucuuucuuua

SEQ ID NO: 432542 - RNA, 20 nt, Human
auggaggaagggcaagagaa

SEQ ID NO: 432543 - RNA, 19 nt, Human
aggaaagguggccuuagca

SEQ ID NO: 432544 - RNA, 22 nt, Human
uggcaggggaggugcuugcuua

SEQ ID NO: 432545 - RNA, 22 nt, Human
uuguuuuaacgacucagcuugu

SEQ ID NO: 432546 - RNA, 18 nt, Human
cacaauagacaccgauaa

SEQ ID NO: 432547 - RNA, 22 nt, Human
agcauguguaaucucaauaccu

SEQ ID NO: 432548 - RNA, 22 nt, Human
gcagggcugcagagggcacugu

SEQ ID NO: 432549 - RNA, 23 nt, Human
uccagcagagccuuccaggaggg

SEQ ID NO: 432550 - RNA, 22 nt, Human
acuuucucccacccacccgucu

SEQ ID NO: 432551 - RNA, 22 nt, Human
gugcuuccuguauugauuccau

SEQ ID NO: 432552 - RNA, 22 nt, Human
uuuuacaggucauagguauagu

SEQ ID NO: 432553 - RNA, 22 nt, Human
ccaugccauacuggccacccgg

SEQ ID NO: 432554 - RNA, 22 nt, Human
aggcucuggcaacagcuggugu

SEQ ID NO: 432555 - RNA, 22 nt, Human
aggccagcucuacccuuggacu

SEQ ID NO: 432556 - RNA, 22 nt, Human
gcaggcugaaacucggggucua

SEQ ID NO: 432557 - RNA, 22 nt, Human
cuagggaacaagaugcccaggg

SEQ ID NO: 432558 - RNA, 22 nt, Human
ggcaucaggaucugucuugcuu

SEQ ID NO: 432559 - RNA, 22 nt, Human
acuuugccccaaagaaguuggu

SEQ ID NO: 432560 - RNA, 22 nt, Human
uccugccuuagagcaaggaaaa

SEQ ID NO: 432561 - RNA, 22 nt, Human
caaggcaggcaguucacuugag

SEQ ID NO: 432562 - RNA, 22 nt, Human
ugggggcuagaacccagggauu

SEQ ID NO: 432563 - RNA, 22 nt, Human
aaguuccuauauccaaauacag

SEQ ID NO: 432564 - RNA, 22 nt, Human
agcuacaguugcccucagcagg

SEQ ID NO: 432565 - RNA, 22 nt, Human
caguggaagacucagcucuccc

SEQ ID NO: 432566 - RNA, 20 nt, Human
aaaguucauguuugcacuuu

SEQ ID NO: 432567 - RNA, 22 nt, Human
acagucaaucagaacagcaugu

SEQ ID NO: 432568 - RNA, 22 nt, Human
uguaaauaaugcauguaaauca

SEQ ID NO: 432569 - RNA, 22 nt, Human
ggcagcuguuggcucucuagga

SEQ ID NO: 432570 - RNA, 22 nt, Human
augcccugcaucaagugacacu

SEQ ID NO: 432571 - RNA, 21 nt, Human
ugguggagugugcugagcaug

SEQ ID NO: 432572 - RNA, 22 nt, Human
agaugcugccucuccucacaag

SEQ ID NO: 432573 - RNA, 22 nt, Human
ccagacuguggaguuccuggug

SEQ ID NO: 432574 - RNA, 22 nt, Human
uuuauguaguuacggacuauca

SEQ ID NO: 432575 - RNA, 22 nt, Human
gcaggggcuaaggacacagaga

SEQ ID NO: 432576 - RNA, 22 nt, Human
aauccuggccuagcugggcuca

SEQ ID NO: 432577 - RNA, 22 nt, Human
cuucacaguaaauccagaagaa

SEQ ID NO: 432578 - RNA, 22 nt, Human
agccccaguaagggagggccug

SEQ ID NO: 432579 - RNA, 22 nt, Human
agggcagaaaccaccuugaugg

SEQ ID NO: 432580 - RNA, 23 nt, Human
ccugacccugucucccucacaug

SEQ ID NO: 432581 - RNA, 22 nt, Human
uucaauagaaagucccuaguua

SEQ ID NO: 432582 - RNA, 22 nt, Human
ccugggugucaugggcagcugg

SEQ ID NO: 432583 - RNA, 22 nt, Human
caucuuuuggccuauucugagg

SEQ ID NO: 432584 - RNA, 22 nt, Human
gagcugaguuaccuccagauca

SEQ ID NO: 432585 - RNA, 21 nt, Human
agguuccugagucaugccuua

SEQ ID NO: 432586 - RNA, 22 nt, Human
gcccugucggaacugcgaccuc

SEQ ID NO: 432587 - RNA, 22 nt, Human
uucacauuccgcggcuauuuuc

SEQ ID NO: 432588 - RNA, 22 nt, Human
ucuucaaacccugguuuuguga

SEQ ID NO: 432589 - RNA, 22 nt, Human
auauuuucacagaacuugcaaa

SEQ ID NO: 432590 - RNA, 22 nt, Human
cugucccagauguucucagcac

SEQ ID NO: 432591 - RNA, 22 nt, Human
uagaaggaggacuggcaguguu

SEQ ID NO: 432592 - RNA, 22 nt, Human
uuaaaggcaugguuagacaugg

SEQ ID NO: 432593 - RNA, 22 nt, Human
aaauauaguaaaugcauaguuc

SEQ ID NO: 432594 - RNA, 22 nt, Human
uauuucuaagcuguaagucuga

SEQ ID NO: 432595 - RNA, 22 nt, Human
aagaacuuccuaauauauuuuc

SEQ ID NO: 432596 - RNA, 22 nt, Human
ggagccugagcggcccagggcc

SEQ ID NO: 432597 - RNA, 22 nt, Human
cagcccugggaucuuagugccu

SEQ ID NO: 432598 - RNA, 22 nt, Human
aacaggcacuaagcaugugggg

SEQ ID NO: 432599 - RNA, 20 nt, Human
gucuccucuuugcauuccua

SEQ ID NO: 432600 - RNA, 22 nt, Human
uccugggcaaagaggggcagug

SEQ ID NO: 432601 - RNA, 22 nt, Human
cagcaccuuccuuaacuccagg

SEQ ID NO: 432602 - RNA, 22 nt, Human
agcaggcaccagggcucguccu

SEQ ID NO: 432603 - RNA, 22 nt, Human
ggcaggccugagaggcagggcu

SEQ ID NO: 432604 - RNA, 22 nt, Human
ggagaugggggauuuuacagcg

SEQ ID NO: 432605 - RNA, 22 nt, Human
augcagcugugggcaagaaaug

SEQ ID NO: 432606 - RNA, 22 nt, Human
ggucccaggaaucuguguucua

SEQ ID NO: 432607 - RNA, 22 nt, Human
uuccaaagcugcuuuauuuagu

SEQ ID NO: 432608 - RNA, 22 nt, Human
ccagcacugcucucagacugag

SEQ ID NO: 432609 - RNA, 22 nt, Human
aaauugaauuugggaaacauug

SEQ ID NO: 432610 - RNA, 22 nt, Human
ggugucccaggccagcugugug

SEQ ID NO: 432611 - RNA, 22 nt, Human
ucugagccguauggcuuggcua

SEQ ID NO: 432612 - RNA, 22 nt, Human
uugaaagauauguuaaucuuuc

SEQ ID NO: 432613 - RNA, 22 nt, Human
uuucagagggcagaucuggggc

SEQ ID NO: 432614 - RNA, 22 nt, Human
gccugccuagaauugcagcuuu

SEQ ID NO: 432615 - RNA, 22 nt, Human
ugcucccaggcucuguggucug

SEQ ID NO: 432616 - RNA, 22 nt, Human
gcaagacaauggagcauaaacg

SEQ ID NO: 432617 - RNA, 22 nt, Human
caaacauucaaguacaagucuu

SEQ ID NO: 432618 - RNA, 22 nt, Human
agguaagcaugguggcugcugu

SEQ ID NO: 432619 - RNA, 22 nt, Human
agcuggguguguaucagauaaa

SEQ ID NO: 432620 - RNA, 22 nt, Human
ggaugcuggggaccaaucucug

SEQ ID NO: 432621 - RNA, 22 nt, Human
guuuuucuuugugugaagacaa

SEQ ID NO: 432622 - RNA, 22 nt, Human
uagugucucuuccuguuugaaa

SEQ ID NO: 432623 - RNA, 22 nt, Human
auucacuguggguccuuuggau

SEQ ID NO: 432624 - RNA, 19 nt, Human
ucagaggauuuggcuauga

SEQ ID NO: 432625 - RNA, 22 nt, Human
gccaggcucagcagucaaccug

SEQ ID NO: 432626 - RNA, 22 nt, Human
uuucagagaacugaguccuugc

SEQ ID NO: 432627 - RNA, 22 nt, Human
aaguacauggaggauagcugcu

SEQ ID NO: 432628 - RNA, 22 nt, Human
gaacuguaguuaauacuacaca

SEQ ID NO: 432629 - RNA, 22 nt, Human
ggugcaugugagaaagacuggg

SEQ ID NO: 432630 - RNA, 22 nt, Human
uuggaaaugauuucuauuauua

SEQ ID NO: 432631 - RNA, 22 nt, Human
acagaacuuccagggaacauac

SEQ ID NO: 432632 - RNA, 22 nt, Human
aagaacaugaagucacaaaugc

SEQ ID NO: 432633 - RNA, 22 nt, Human
acaggccuagggucaauuuccu

SEQ ID NO: 432634 - RNA, 22 nt, Human
auucacacuguauacacaggau

SEQ ID NO: 432635 - RNA, 22 nt, Human
gcagcccugcaggcagcuccag

SEQ ID NO: 432636 - RNA, 22 nt, Human
gcccugagccuaugagccucuc

SEQ ID NO: 432637 - RNA, 22 nt, Human
agcaggcuuguuaugucugaga

SEQ ID NO: 432638 - RNA, 22 nt, Human
agaaaugacacacaugagacau

SEQ ID NO: 432639 - RNA, 22 nt, Human
agacaaaugguaauuaugucua

SEQ ID NO: 432640 - RNA, 22 nt, Human
gacaagacaugugaugacauca

SEQ ID NO: 432641 - RNA, 22 nt, Human
ucuuaugggaaagauguaauua

SEQ ID NO: 432642 - RNA, 22 nt, Human
agucccagugagaugagccacg

SEQ ID NO: 432643 - RNA, 22 nt, Human
uuaacacugauuguagagacac

SEQ ID NO: 432644 - RNA, 22 nt, Human
ugcauuauacauggaucuaaag

SEQ ID NO: 432645 - RNA, 22 nt, Human
agcagcccaguuguacugagug

SEQ ID NO: 432646 - RNA, 23 nt, Human
ugcccacaaaaguaaagacauuu

SEQ ID NO: 432647 - RNA, 22 nt, Human
uguccucaaggagcuucagucu

SEQ ID NO: 432648 - RNA, 22 nt, Human
cagugcuccugauguacccuug

SEQ ID NO: 432649 - RNA, 22 nt, Human
uaguuaaagcccuaaauugaua

SEQ ID NO: 432650 - RNA, 22 nt, Human
gcauggcagccaguacauggug

SEQ ID NO: 432651 - RNA, 22 nt, Human
ucagaguuucaggauacaaaua

SEQ ID NO: 432652 - RNA, 22 nt, Human
gaggacacggccuuuuggaaaa

SEQ ID NO: 432653 - RNA, 22 nt, Human
ccaggaagguguuuaacuagag

SEQ ID NO: 432654 - RNA, 22 nt, Human
ugaaggcaacugagaaaaagca

SEQ ID NO: 432655 - RNA, 22 nt, Human
ucaaaggagacacaaggagaaa

SEQ ID NO: 432656 - RNA, 22 nt, Human
gacacagaccaccaggcccugg

SEQ ID NO: 432657 - RNA, 22 nt, Human
ucagaggaauaaugcugcauuu

SEQ ID NO: 432658 - RNA, 22 nt, Human
acuuaacagacauuauuuaccu

SEQ ID NO: 432659 - RNA, 22 nt, Human
ugggaggcuuccagaccuugcu

SEQ ID NO: 432660 - RNA, 22 nt, Human
gagggugggcuccuaucugggu

SEQ ID NO: 432661 - RNA, 22 nt, Human
ugcuucaggaagaaacgccagg

SEQ ID NO: 432662 - RNA, 20 nt, Human
auguagaugaaagcaaaggc

SEQ ID NO: 432663 - RNA, 20 nt, Human
ccucacagggcagagagggg

SEQ ID NO: 432664 - RNA, 22 nt, Human
ucacucagcuagcuucaggagc

SEQ ID NO: 432665 - RNA, 23 nt, Human
caggcaggaugaggacuacacuc

SEQ ID NO: 432666 - RNA, 22 nt, Human
caggguccaucuuucaucacug

SEQ ID NO: 432667 - RNA, 22 nt, Human
ggaaagagggacccagcuuggu

SEQ ID NO: 432668 - RNA, 20 nt, Human
aagagaggaaguuauacuag

SEQ ID NO: 432669 - RNA, 20 nt, Human
ucuggugccccuuccugaga

SEQ ID NO: 432670 - RNA, 22 nt, Human
agcauccagaaaacucucagaa

SEQ ID NO: 432671 - RNA, 20 nt, Human
gccucagccaacccaugggg

SEQ ID NO: 432672 - RNA, 22 nt, Human
uuggaaggcccugccuagcagg

SEQ ID NO: 432673 - RNA, 22 nt, Human
cucuuuuaugugacguguguga

SEQ ID NO: 432674 - RNA, 21 nt, Human
agcagagugcuuugacuuugu

SEQ ID NO: 432675 - RNA, 22 nt, Human
uuuuaugucauaaggacacuca

SEQ ID NO: 432676 - RNA, 22 nt, Human
ugccaggccaaugaaggcaggg

SEQ ID NO: 432677 - RNA, 22 nt, Human
cccuaggcugaggccagggugc

SEQ ID NO: 432678 - RNA, 22 nt, Human
ucacaguauaaccucauauagg

SEQ ID NO: 432679 - RNA, 22 nt, Human
ccugggccaggcuugggaaugc

SEQ ID NO: 432680 - RNA, 22 nt, Human
gcugcuuugacagugggaacag

SEQ ID NO: 432681 - RNA, 22 nt, Human
gaggcccaguccugcaagcacg

SEQ ID NO: 432682 - RNA, 18 nt, Human
gcaggcccuguuucuggg

SEQ ID NO: 432683 - RNA, 22 nt, Human
acuguguccucauguggcagaa

SEQ ID NO: 432684 - RNA, 23 nt, Human
aaaugacuaaauguucuuauaga

SEQ ID NO: 432685 - RNA, 22 nt, Human
ucaaaagacacaggaggcuagu

SEQ ID NO: 432686 - RNA, 21 nt, Human
gccagugcugucugugugauc

SEQ ID NO: 432687 - RNA, 22 nt, Human
ugucccagaucacaggagggga

SEQ ID NO: 432688 - RNA, 22 nt, Human
aaggacaccugcagagggacca

SEQ ID NO: 432689 - RNA, 22 nt, Human
aaggcagccuuuguuugauuga

SEQ ID NO: 432690 - RNA, 22 nt, Human
cucuggcugccucucaggccug

SEQ ID NO: 432691 - RNA, 21 nt, Human
uaauauagguucacaacuagu

SEQ ID NO: 432692 - RNA, 22 nt, Human
acaacuuuaauggguuucagcu

SEQ ID NO: 432693 - RNA, 22 nt, Human
aacacuuucuuccuugcucagg

SEQ ID NO: 432694 - RNA, 22 nt, Human
cagucccagacauaguaaggga

SEQ ID NO: 432695 - RNA, 19 nt, Human
gccugggaugggcagaacu

SEQ ID NO: 432696 - RNA, 22 nt, Human
uuuguacacaggauguuauaau

SEQ ID NO: 432697 - RNA, 22 nt, Human
ugagugccugaacauagaguag

SEQ ID NO: 432698 - RNA, 22 nt, Human
ugggcucuuccuauaguuuaua

SEQ ID NO: 432699 - RNA, 22 nt, Human
aaucacaugugcucaauuuuaa

SEQ ID NO: 432700 - RNA, 22 nt, Human
agcagucauuuuaggucaugca

SEQ ID NO: 432701 - RNA, 22 nt, Human
gucuggcuuuugcccuguguuu

SEQ ID NO: 432702 - RNA, 22 nt, Human
caggcaccuuugugcaugggca

SEQ ID NO: 432703 - RNA, 22 nt, Human
aggaaggacuccaugguccguc

SEQ ID NO: 432704 - RNA, 20 nt, Human
agaagcugauacugauggaa

SEQ ID NO: 432705 - RNA, 22 nt, Human
aagagaagaaagugucuacaca

SEQ ID NO: 432706 - RNA, 22 nt, Human
agcugccaucugaagaacugca

SEQ ID NO: 432707 - RNA, 22 nt, Human
ugcuuucaaaggcuuucuagau

SEQ ID NO: 432708 - RNA, 22 nt, Human
uaggcuugcuucuccuccacag

SEQ ID NO: 432709 - RNA, 22 nt, Human
cacaugaauucacauguauuuu

SEQ ID NO: 432710 - RNA, 21 nt, Human
acaguuuauuagaguaagugc

SEQ ID NO: 432711 - RNA, 22 nt, Human
ccaggccuucugaggacacucu

SEQ ID NO: 432712 - RNA, 18 nt, Human
gauauauaggaggaaagu

SEQ ID NO: 432713 - RNA, 22 nt, Human
uugacccagcuuuccccacaau

SEQ ID NO: 432714 - RNA, 21 nt, Human
gcucccuggcugugugaccug

SEQ ID NO: 432715 - RNA, 21 nt, Human
gccugccugcgugacccucuu

SEQ ID NO: 432716 - RNA, 22 nt, Human
acaugcauacaagcacauguag

SEQ ID NO: 432717 - RNA, 22 nt, Human
gcaacauuaaaccaauaauugu

SEQ ID NO: 432718 - RNA, 22 nt, Human
acauucaagaugcauucacuua

SEQ ID NO: 432719 - RNA, 22 nt, Human
aaucacaauuacuuuugcacca

SEQ ID NO: 432720 - RNA, 22 nt, Human
ucaugcagagccagucaggaua

SEQ ID NO: 432721 - RNA, 22 nt, Human
ugcaaauuuauauggugacugc

SEQ ID NO: 432722 - RNA, 22 nt, Human
aggaauugguucaagguuuauc

SEQ ID NO: 432723 - RNA, 22 nt, Human
agcuguccuggcucaggcugug

SEQ ID NO: 432724 - RNA, 22 nt, Human
gccacugugguccucccaugau

SEQ ID NO: 432725 - RNA, 22 nt, Human
cuggacaaccacucagccucag

SEQ ID NO: 432726 - RNA, 22 nt, Human
gugcaugugcauccauguguac

SEQ ID NO: 432727 - RNA, 22 nt, Human
ugggcucugaagucagucugcu

SEQ ID NO: 432728 - RNA, 22 nt, Human
uauugcaauuuggcuaaagaau

SEQ ID NO: 432729 - RNA, 22 nt, Human
ucagaggaugcuguucuuuaau

SEQ ID NO: 432730 - RNA, 22 nt, Human
gugucccaaucuacuuuucccu

SEQ ID NO: 432731 - RNA, 22 nt, Human
aaaaggaggacaugguuacaga

SEQ ID NO: 432732 - RNA, 20 nt, Human
guugcuuuagucugguuugg

SEQ ID NO: 432733 - RNA, 22 nt, Human
uauucaggucgagcuaacugcu

SEQ ID NO: 432734 - RNA, 21 nt, Human
uauaguguggauaugcugaug

SEQ ID NO: 432735 - RNA, 21 nt, Human
cuuugcaagaugucuaugaaa

SEQ ID NO: 432736 - RNA, 22 nt, Human
ggaauugguuucaagggaaagu

SEQ ID NO: 432737 - RNA, 22 nt, Human
uuucagagaaagcccaaagacu

SEQ ID NO: 432738 - RNA, 22 nt, Human
gucccaggcuuauguggagcuu

SEQ ID NO: 432739 - RNA, 22 nt, Human
uaaggcauucucaugcugugaa

SEQ ID NO: 432740 - RNA, 20 nt, Human
auuuggcaugaaguauugau

SEQ ID NO: 432741 - RNA, 22 nt, Human
aaauagcauuguauuuagcuga

SEQ ID NO: 432742 - RNA, 22 nt, Human
aguggcuuggcugcacuacagg

SEQ ID NO: 432743 - RNA, 22 nt, Human
cccagagauguccugagugaua

SEQ ID NO: 432744 - RNA, 22 nt, Human
uaaguacaaauguauacauaag

SEQ ID NO: 432745 - RNA, 22 nt, Human
ugccugugucacagugauguuu

SEQ ID NO: 432746 - RNA, 22 nt, Human
aacauucuuuagcucuuccugc

SEQ ID NO: 432747 - RNA, 22 nt, Human
gcuguuuccaguuacguggaua

SEQ ID NO: 432748 - RNA, 19 nt, Human
ugucccagacuccgugucu

SEQ ID NO: 432749 - RNA, 22 nt, Human
gcagcuggagccagccagacac

SEQ ID NO: 432750 - RNA, 22 nt, Human
caccagucuuuauuuuguuauu

SEQ ID NO: 432751 - RNA, 22 nt, Human
augggaggaugcucgggugcuc

SEQ ID NO: 432752 - RNA, 22 nt, Human
aaugccuugccugcuacaacuu

SEQ ID NO: 432753 - RNA, 22 nt, Human
acagagagaaacaaucagcagc

SEQ ID NO: 432754 - RNA, 22 nt, Human
cuuccaaaauuuauauguugaa

SEQ ID NO: 432755 - RNA, 22 nt, Human
uguaauuuucucaaguuucuac

SEQ ID NO: 432756 - RNA, 22 nt, Human
gcucuguggcaggaggucuugu

SEQ ID NO: 432757 - RNA, 22 nt, Human
acaaugcagccuauggauccag

SEQ ID NO: 432758 - RNA, 23 nt, Human
cccaggaguuucacugcaaaggu

SEQ ID NO: 432759 - RNA, 20 nt, Human
uccagaggccacauccagug

SEQ ID NO: 432760 - RNA, 23 nt, Human
ucugucaccuauggcugcucuuc

SEQ ID NO: 432761 - RNA, 22 nt, Human
ucugaggccuugggacagaagu

SEQ ID NO: 432762 - RNA, 23 nt, Human
aggcugcagaagaauagggucau

SEQ ID NO: 432763 - RNA, 21 nt, Human
acacagaggcaucaucacuuu

SEQ ID NO: 432764 - RNA, 22 nt, Human
aggcuugggacugcuuaggagc

SEQ ID NO: 432765 - RNA, 22 nt, Human
cucugccaucuuggagcucaag

SEQ ID NO: 432766 - RNA, 22 nt, Human
aaggaagaagggaaguuacuua

SEQ ID NO: 432767 - RNA, 22 nt, Human
cugugucggacgugggcagcag

SEQ ID NO: 432768 - RNA, 23 nt, Human
uugcaaaaugcaauugaguuaga

SEQ ID NO: 432769 - RNA, 22 nt, Human
uacuuugguuaaugaaauguga

SEQ ID NO: 432770 - RNA, 22 nt, Human
agccuguggaucccugcacugg

SEQ ID NO: 432771 - RNA, 22 nt, Human
uuuauaggguagcuaggauuga

SEQ ID NO: 432772 - RNA, 22 nt, Human
caggacaguauaggcuuuagga

SEQ ID NO: 432773 - RNA, 22 nt, Human
ucacauuuucuacuacuguacg

SEQ ID NO: 432774 - RNA, 22 nt, Human
accacugcccauggugaaaacu

SEQ ID NO: 432775 - RNA, 22 nt, Human
gcugccacauuuucaggacuaa

SEQ ID NO: 432776 - RNA, 22 nt, Human
uucacaguggcuuaggcuaugg

SEQ ID NO: 432777 - RNA, 22 nt, Human
agggaagcuuguuacugagaag

SEQ ID NO: 432778 - RNA, 22 nt, Human
cagagggcucaguccugcugga

SEQ ID NO: 432779 - RNA, 22 nt, Human
gggcacagucuaaaguugggcc

SEQ ID NO: 432780 - RNA, 22 nt, Human
aggcagcuggcaaauucuagag

SEQ ID NO: 432781 - RNA, 22 nt, Human
cuggcccuggagggcugugcga

SEQ ID NO: 432782 - RNA, 22 nt, Human
acagagcaguucuggagcuggc

SEQ ID NO: 432783 - RNA, 22 nt, Human
gcucccaggcauggagguaauu

SEQ ID NO: 432784 - RNA, 22 nt, Human
aggcuccaccagucaggugcau

SEQ ID NO: 432785 - RNA, 22 nt, Human
auacaauccagccauugccaca

SEQ ID NO: 432786 - RNA, 22 nt, Human
ggccccucagcaucugagucag

SEQ ID NO: 432787 - RNA, 22 nt, Human
aaggcugaggagggccugcagg

SEQ ID NO: 432788 - RNA, 22 nt, Human
uuuauuaagaugcgaaugcuga

SEQ ID NO: 432789 - RNA, 22 nt, Human
gagcccagggugaaauagcagc

SEQ ID NO: 432790 - RNA, 22 nt, Human
guugcaaaugggaagaugguua

SEQ ID NO: 432791 - RNA, 22 nt, Human
gagcccugcccacuugucugag

SEQ ID NO: 432792 - RNA, 22 nt, Human
cuacuuugcugcccagcagugc

SEQ ID NO: 432793 - RNA, 22 nt, Human
gcucuggguagccacugccugg

SEQ ID NO: 432794 - RNA, 22 nt, Human
cagcccuugcgacacccuggcu

SEQ ID NO: 432795 - RNA, 22 nt, Human
cugcucuguucccccaucaucu

SEQ ID NO: 432796 - RNA, 22 nt, Human
uuucaaacugggagugagggga

SEQ ID NO: 432797 - RNA, 22 nt, Human
cucuccacucagcgucaugucc

SEQ ID NO: 432798 - RNA, 22 nt, Human
auucaaacacuuugagaaguuc

SEQ ID NO: 432799 - RNA, 20 nt, Human
ucacaauaugagcucauaca

SEQ ID NO: 432800 - RNA, 22 nt, Human
ugaugauuucauuucuagcugu

SEQ ID NO: 432801 - RNA, 22 nt, Human
agauuggguuugcuucugugcc

SEQ ID NO: 432802 - RNA, 18 nt, Human
uuggcuuugagaacuggu

SEQ ID NO: 432803 - RNA, 22 nt, Human
aggcugagguaggaggaucgcu

SEQ ID NO: 432804 - RNA, 22 nt, Human
gaggcuaagcacuggcauuucu

SEQ ID NO: 432805 - RNA, 22 nt, Human
uuguacaacacauauucuacag

SEQ ID NO: 432806 - RNA, 22 nt, Human
agugcugucccgacaacugagg

SEQ ID NO: 432807 - RNA, 22 nt, Human
ugagccaguggaagauggcagu

SEQ ID NO: 432808 - RNA, 22 nt, Human
uacauuaucuuguuaucuuuca

SEQ ID NO: 432809 - RNA, 22 nt, Human
gcuggcuguguuucaucucuga

SEQ ID NO: 432810 - RNA, 22 nt, Human
cugcccucccaguugguccgug

SEQ ID NO: 432811 - RNA, 22 nt, Human
gcagggacagggcagggccuuu

SEQ ID NO: 432812 - RNA, 22 nt, Human
cagcugagaaauggggaaaggg

SEQ ID NO: 432813 - RNA, 22 nt, Human
aaauuauuacaagcuaguuggc

SEQ ID NO: 432814 - RNA, 22 nt, Human
ugguacaaggguugggagacag

SEQ ID NO: 432815 - RNA, 22 nt, Human
gaaauauuacaguggaggggau

SEQ ID NO: 432816 - RNA, 22 nt, Human
agggcagaccacgugcaaggau

SEQ ID NO: 432817 - RNA, 22 nt, Human
acaggaggggcaugaaagacgg

SEQ ID NO: 432818 - RNA, 17 nt, Human
uuuucuccugcccauuc

SEQ ID NO: 432819 - RNA, 22 nt, Human
ccugggagaacugcuggguugg

SEQ ID NO: 432820 - RNA, 22 nt, Human
gcugaagcugcagcaggaggaa

SEQ ID NO: 432821 - RNA, 22 nt, Human
uggugaggucauagagaacugu

SEQ ID NO: 432822 - RNA, 23 nt, Human
uuacaguaggaguuggaaaacca

SEQ ID NO: 432823 - RNA, 22 nt, Human
cuuaaauuuucaucuacaagaa

SEQ ID NO: 432824 - RNA, 21 nt, Human
gcucucugcaugguggcucag

SEQ ID NO: 432825 - RNA, 22 nt, Human
ucccuccccacuucugagcuuu

SEQ ID NO: 432826 - RNA, 22 nt, Human
gcuguuucggguggagguggag

SEQ ID NO: 432827 - RNA, 22 nt, Human
caggaaauucaagagaggcugc

SEQ ID NO: 432828 - RNA, 23 nt, Human
gcugucaguuguuuuugucucua

SEQ ID NO: 432829 - RNA, 22 nt, Human
ugcccagcuucuuacuuuuaaa

SEQ ID NO: 432830 - RNA, 22 nt, Human
aaguccugaaacuucuuucuga

SEQ ID NO: 432831 - RNA, 22 nt, Human
cccaggucugugccagcucuga

SEQ ID NO: 432832 - RNA, 22 nt, Human
uguagugugacauaggugucca

SEQ ID NO: 432833 - RNA, 22 nt, Human
uuauugcaccaugccucaguuu

SEQ ID NO: 432834 - RNA, 22 nt, Human
cugggaguuucuagagaaagac

SEQ ID NO: 432835 - RNA, 22 nt, Human
ccaggguggaggcuggauggag

SEQ ID NO: 432836 - RNA, 22 nt, Human
caaauucaaugaacauguuuaa

SEQ ID NO: 432837 - RNA, 22 nt, Human
gcaagcaguuacccaggauucg

SEQ ID NO: 432838 - RNA, 22 nt, Human
aaggagacauuugcagagcacc

SEQ ID NO: 432839 - RNA, 22 nt, Human
gucaggggaugugcugguggcc

SEQ ID NO: 432840 - RNA, 22 nt, Human
gagccugaugaaacaggcagac

SEQ ID NO: 432841 - RNA, 20 nt, Human
caggaugauuggacacgaug

SEQ ID NO: 432842 - RNA, 22 nt, Human
ugcccugcagugagugcgucug

SEQ ID NO: 432843 - RNA, 22 nt, Human
uuuaaagaaauuccucaucuuu

SEQ ID NO: 432844 - RNA, 22 nt, Human
augaugcaccauuauaagaguu

SEQ ID NO: 432845 - RNA, 22 nt, Human
gauuuuacaugucauaucuauu

SEQ ID NO: 432846 - RNA, 22 nt, Human
uggugugggcguggcaggcaag

SEQ ID NO: 432847 - RNA, 22 nt, Human
agagucuuccaggcagccugag

SEQ ID NO: 432848 - RNA, 22 nt, Human
aggcuugacugcugauuuugcc

SEQ ID NO: 432849 - RNA, 22 nt, Human
aagcagagccaccagcuuugga

SEQ ID NO: 432850 - RNA, 22 nt, Human
cacgugagaccuugcagaggug

SEQ ID NO: 432851 - RNA, 23 nt, Human
ugacaagucucagccaaugcaga

SEQ ID NO: 432852 - RNA, 22 nt, Human
gcuugcagcaggugcuuaggaa

SEQ ID NO: 432853 - RNA, 22 nt, Human
gacaagacagcuugcagacaac

SEQ ID NO: 432854 - RNA, 22 nt, Human
ccugccugguguaagucuaagg

SEQ ID NO: 432855 - RNA, 20 nt, Human
uucuugagccaaaaggcaua

SEQ ID NO: 432856 - RNA, 22 nt, Human
ugugugugugcgcgcacgcaua

SEQ ID NO: 432857 - RNA, 19 nt, Human
caguuccagcuucuugacc

SEQ ID NO: 432858 - RNA, 22 nt, Human
ucaggcugggagacaaucacug

SEQ ID NO: 432859 - RNA, 22 nt, Human
gugagcagaacagguggcuucu

SEQ ID NO: 432860 - RNA, 22 nt, Human
aagagggcugcaaucuuauugc

SEQ ID NO: 432861 - RNA, 22 nt, Human
gcuuuucauagauaaaauucua

SEQ ID NO: 432862 - RNA, 18 nt, Human
accuccccauuuucugaa

SEQ ID NO: 432863 - RNA, 22 nt, Human
aguggcagagucaggguuugga

SEQ ID NO: 432864 - RNA, 22 nt, Human
gggcaggugugcagagcuguug

SEQ ID NO: 432865 - RNA, 22 nt, Human
gcccuagggggaaccgaggacu

SEQ ID NO: 432866 - RNA, 22 nt, Human
ccagcugggauuaagggaaaau

SEQ ID NO: 432867 - RNA, 22 nt, Human
uugcaggggaaggagcagagcu

SEQ ID NO: 432868 - RNA, 20 nt, Human
ugcaggcuucgcucuaggag

SEQ ID NO: 432869 - RNA, 22 nt, Human
gagguucgauacagcguauuua

SEQ ID NO: 432870 - RNA, 22 nt, Human
acugggccuggauuggcguguc

SEQ ID NO: 432871 - RNA, 22 nt, Human
ggacagagagugaauaugacau

SEQ ID NO: 432872 - RNA, 22 nt, Human
agagcccuggagggcagucccg

SEQ ID NO: 432873 - RNA, 22 nt, Human
cuggccagacuacacaugugug

SEQ ID NO: 432874 - RNA, 22 nt, Human
cuguauauggcuuacuuuauau

SEQ ID NO: 432875 - RNA, 22 nt, Human
caggggccggcuguccgugccc

SEQ ID NO: 432876 - RNA, 22 nt, Human
aaggcucugcaaaaccuccaag

SEQ ID NO: 432877 - RNA, 22 nt, Human
caaguucacaugcauccuugcu

SEQ ID NO: 432878 - RNA, 22 nt, Human
acuuuguaggaaaaagucacaa

SEQ ID NO: 432879 - RNA, 22 nt, Human
uccugaagaggcuacacugcuu

SEQ ID NO: 432880 - RNA, 22 nt, Human
uuucuugugccuaauuuugggc

SEQ ID NO: 432881 - RNA, 22 nt, Human
cacaggagaaaggggaagcucg

SEQ ID NO: 432882 - RNA, 22 nt, Human
acagaugagaagcugcauucaa

SEQ ID NO: 432883 - RNA, 20 nt, Human
uuguuuaaaggugaagaggc

SEQ ID NO: 432884 - RNA, 21 nt, Human
cacugcagccuugaccugggc

SEQ ID NO: 432885 - RNA, 22 nt, Human
acuuuuuacaggguguauacca

SEQ ID NO: 432886 - RNA, 22 nt, Human
cagcccugcuggcaaugaugag

SEQ ID NO: 432887 - RNA, 22 nt, Human
ucucagcugccugcccugcucc

SEQ ID NO: 432888 - RNA, 22 nt, Human
uccagcagugcucuagagcgug

SEQ ID NO: 432889 - RNA, 21 nt, Human
acaaugcauggaacucauggc

SEQ ID NO: 432890 - RNA, 22 nt, Human
agcugccacauggugucacugu

SEQ ID NO: 432891 - RNA, 21 nt, Human
gccagccuguuuaccuguggu

SEQ ID NO: 432892 - RNA, 22 nt, Human
gaagcugaugaggaccagauug

SEQ ID NO: 432893 - RNA, 22 nt, Human
uuauuuguggcauaugagacga

SEQ ID NO: 432894 - RNA, 22 nt, Human
gaggccuccucugagacaucug

SEQ ID NO: 432895 - RNA, 22 nt, Human
gacagggcgcccagccuguuuc

SEQ ID NO: 432896 - RNA, 22 nt, Human
ccuggaaagagaaugaaugagc

SEQ ID NO: 432897 - RNA, 22 nt, Human
uucuggcucuccccugcugggu

SEQ ID NO: 432898 - RNA, 22 nt, Human
gaggcagcuuaggguacugacu

SEQ ID NO: 432899 - RNA, 22 nt, Human
ucuugggauugcccugcaguuc

SEQ ID NO: 432900 - RNA, 22 nt, Human
gaagcccauuuguacagcacau

SEQ ID NO: 432901 - RNA, 22 nt, Human
guccuggggaauacagaagccg

SEQ ID NO: 432902 - RNA, 22 nt, Human
agcugccauccgaggugucaga

SEQ ID NO: 432903 - RNA, 22 nt, Human
gcucagaggccacuguuggaaa

SEQ ID NO: 432904 - RNA, 20 nt, Human
aacaguaccauuuaucucag

SEQ ID NO: 432905 - RNA, 22 nt, Human
cagcccugcggagguguauacu

SEQ ID NO: 432906 - RNA, 22 nt, Human
uguauuuaauuguaucaucaca

SEQ ID NO: 432907 - RNA, 22 nt, Human
cuggagccagccagggcccucu

SEQ ID NO: 432908 - RNA, 22 nt, Human
cugcacagagcagggcagacac

SEQ ID NO: 432909 - RNA, 19 nt, Human
gcuccugggccucacucau

SEQ ID NO: 432910 - RNA, 22 nt, Human
acaugcaaaaauauauuuauga

SEQ ID NO: 432911 - RNA, 22 nt, Human
agcagguggacagaggaagaaa

SEQ ID NO: 432912 - RNA, 19 nt, Human
uggccagguacugucugcu

SEQ ID NO: 432913 - RNA, 22 nt, Human
uugucugacuucuuuaguuacu

SEQ ID NO: 432914 - RNA, 19 nt, Human
ccagcagacacagcugccc

SEQ ID NO: 432915 - RNA, 22 nt, Human
caaaugaauauuuccauggguu

SEQ ID NO: 432916 - RNA, 22 nt, Human
cacaauuagcagcucuuuauuu

SEQ ID NO: 432917 - RNA, 22 nt, Human
uggcuucagagacagaaucuau

SEQ ID NO: 432918 - RNA, 22 nt, Human
cugagguggaacagaggugaag

SEQ ID NO: 432919 - RNA, 22 nt, Human
ccaguucuucuugacacgaaag

SEQ ID NO: 432920 - RNA, 22 nt, Human
agcaggcagcaugggacccucc

SEQ ID NO: 432921 - RNA, 22 nt, Human
gcugaagcccacguggcuugua

SEQ ID NO: 432922 - RNA, 22 nt, Human
uuuuauuggagugauaccaagc

SEQ ID NO: 432923 - RNA, 22 nt, Human
acuucauauuguuuccacuaga

SEQ ID NO: 432924 - RNA, 22 nt, Human
aacacuuuuuaguaaagauuga

SEQ ID NO: 432925 - RNA, 18 nt, Human
gcaggugccacugcuguu

SEQ ID NO: 432926 - RNA, 22 nt, Human
auugcaaaauuguccuguggaa

SEQ ID NO: 432927 - RNA, 22 nt, Human
agagcagcugugacauggacag

SEQ ID NO: 432928 - RNA, 22 nt, Human
cgcgguggcggccuccagcgcc

SEQ ID NO: 432929 - RNA, 22 nt, Human
uugagaaaggggucaauaucuc

SEQ ID NO: 432930 - RNA, 22 nt, Human
uugauaucucugcuguguuagg

SEQ ID NO: 432931 - RNA, 22 nt, Human
gcaggcugagaguccaagaagg

SEQ ID NO: 432932 - RNA, 22 nt, Human
gcagcaaagcucuucaugugau

SEQ ID NO: 432933 - RNA, 22 nt, Human
gagugcagaugaacagaagauu

SEQ ID NO: 432934 - RNA, 22 nt, Human
cagacagaaggcuccuugaggu

SEQ ID NO: 432935 - RNA, 22 nt, Human
cagcccugccauggagccuccu

SEQ ID NO: 432936 - RNA, 22 nt, Human
caauacaauuaccaguuaauca

SEQ ID NO: 432937 - RNA, 22 nt, Human
ggagaguggauuccagcuguau

SEQ ID NO: 432938 - RNA, 22 nt, Human
ggcugcacgccucucagcuugc

SEQ ID NO: 432939 - RNA, 22 nt, Human
ccuggaaaaugccacuuucaca

SEQ ID NO: 432940 - RNA, 22 nt, Human
ugggacacccucacgccugcac

SEQ ID NO: 432941 - RNA, 19 nt, Human
gguggcucagggcccagcc

SEQ ID NO: 432942 - RNA, 22 nt, Human
cauggugaggggugaagggcag

SEQ ID NO: 432943 - RNA, 22 nt, Human
ucugcugcugcagcuacacuau

SEQ ID NO: 432944 - RNA, 22 nt, Human
uccuuagacaaagagugggcuu

SEQ ID NO: 432945 - RNA, 22 nt, Human
aguucacauuccgagguacugg

SEQ ID NO: 432946 - RNA, 22 nt, Human
gcuccagggucagcucagaacu

SEQ ID NO: 432947 - RNA, 22 nt, Human
uggaaagagaaacucuugcuaa

SEQ ID NO: 432948 - RNA, 22 nt, Human
gaccugccugagcugccucugc

SEQ ID NO: 432949 - RNA, 22 nt, Human
aaggcagccaugugcuuugggu

SEQ ID NO: 432950 - RNA, 22 nt, Human
uuuuuguauagaaaugaacuaa

SEQ ID NO: 432951 - RNA, 22 nt, Human
agcuguuuaauaaaugucuguu

SEQ ID NO: 432952 - RNA, 22 nt, Human
uacuaggaagcagcugcauugg

SEQ ID NO: 432953 - RNA, 22 nt, Human
ccccagcugcauacuugccaag

SEQ ID NO: 432954 - RNA, 22 nt, Human
ucuccaggugcuaagugugccu

SEQ ID NO: 432955 - RNA, 21 nt, Human
ugcaguauguauuuguaucca

SEQ ID NO: 432956 - RNA, 22 nt, Human
aagcugcccuguguuagaguuc

SEQ ID NO: 432957 - RNA, 22 nt, Human
aaacaucaauugcaucucccaa

SEQ ID NO: 432958 - RNA, 22 nt, Human
cccaggagacagaaacagaggu

SEQ ID NO: 432959 - RNA, 22 nt, Human
cugaagucccuguuuuguuuac

SEQ ID NO: 432960 - RNA, 22 nt, Human
cugggccuccacgggccaucac

SEQ ID NO: 432961 - RNA, 22 nt, Human
guucaaauggcugcaguuacca

SEQ ID NO: 432962 - RNA, 22 nt, Human
gcugucacauuuggagcacugg

SEQ ID NO: 432963 - RNA, 22 nt, Human
acccucugagaggcacacuuug

SEQ ID NO: 432964 - RNA, 22 nt, Human
cugagcagucuagccagguguu

SEQ ID NO: 432965 - RNA, 17 nt, Human
ucuacuccugaaggaag

SEQ ID NO: 432966 - RNA, 22 nt, Human
ucuaaagagaaccuuuucucau

SEQ ID NO: 432967 - RNA, 21 nt, Human
uuucuuaucuguaaaguggga

SEQ ID NO: 432968 - RNA, 22 nt, Human
ggcaccagggacaauccucuuc

SEQ ID NO: 432969 - RNA, 22 nt, Human
guacaaaaguuauugcgguuuu

SEQ ID NO: 432970 - RNA, 22 nt, Human
ugcauuauuacaagguaagacu

SEQ ID NO: 432971 - RNA, 22 nt, Human
ucagagacaccagagagcugug

SEQ ID NO: 432972 - RNA, 22 nt, Human
ugcaggaaaaauaaauaguguu

SEQ ID NO: 432973 - RNA, 22 nt, Human
agccagaggaacuugaugacug

SEQ ID NO: 432974 - RNA, 22 nt, Human
cccaggagguuggggcuacagu

SEQ ID NO: 432975 - RNA, 22 nt, Human
cagaauuucagugauguuuucu

SEQ ID NO: 432976 - RNA, 23 nt, Human
agcuccugaggccagccucuccu

SEQ ID NO: 432977 - RNA, 22 nt, Human
uucucacaggcuggaaugauga

SEQ ID NO: 432978 - RNA, 18 nt, Human
ccugcagcccaggaggcc

SEQ ID NO: 432979 - RNA, 18 nt, Human
cugccacuuaauguggug

SEQ ID NO: 432980 - RNA, 22 nt, Human
gcuuccaguccucagaggcugg

SEQ ID NO: 432981 - RNA, 22 nt, Human
cagcccugugcggagggcccug

SEQ ID NO: 432982 - RNA, 22 nt, Human
ggagcucaguggggggacugug

SEQ ID NO: 432983 - RNA, 22 nt, Human
caucuuuaguuauugaauauag

SEQ ID NO: 432984 - RNA, 22 nt, Human
auuauugcaauuugacauucag

SEQ ID NO: 432985 - RNA, 22 nt, Human
gaagaaauguguucaagguagg

SEQ ID NO: 432986 - RNA, 19 nt, Human
gauuucuacaaaugucaga

SEQ ID NO: 432987 - RNA, 22 nt, Human
uuugaaaggugucgagaugugu

SEQ ID NO: 432988 - RNA, 22 nt, Human
agggcccaugugggagcacuug

SEQ ID NO: 432989 - RNA, 22 nt, Human
agcagggcagugaucagaaagg

SEQ ID NO: 432990 - RNA, 22 nt, Human
ccugggaggcggagguugcagg

SEQ ID NO: 432991 - RNA, 22 nt, Human
ugcacacaccgugcuucacuga

SEQ ID NO: 432992 - RNA, 22 nt, Human
cagcagccuggccccuccucgg

SEQ ID NO: 432993 - RNA, 22 nt, Human
gcagcguggggcugagucagcu

SEQ ID NO: 432994 - RNA, 22 nt, Human
ccacagcaggacuggagccgcc

SEQ ID NO: 432995 - RNA, 22 nt, Human
cagcauggcuugaguguuuccu

SEQ ID NO: 432996 - RNA, 22 nt, Human
ccucacagggccaggccccuca

SEQ ID NO: 432997 - RNA, 22 nt, Human
aagugaaucuccuuucuuuauu

SEQ ID NO: 432998 - RNA, 22 nt, Human
augcaguuagguaauagucuca

SEQ ID NO: 432999 - RNA, 22 nt, Human
ugcugggcuaggguggagcucu

SEQ ID NO: 433000 - RNA, 22 nt, Human
ggcucucagggaaaggccuccc

SEQ ID NO: 433001 - RNA, 22 nt, Human
uuccuaacaaacuucagugaau

SEQ ID NO: 433002 - RNA, 22 nt, Human
ccagcuccucuucccaguguca

SEQ ID NO: 433003 - RNA, 22 nt, Human
gcccacaguuaaugggggcucu

SEQ ID NO: 433004 - RNA, 22 nt, Human
cccuggaguccggagcucaccu

SEQ ID NO: 433005 - RNA, 22 nt, Human
aguguuguaugggaugacugcu

SEQ ID NO: 433006 - RNA, 22 nt, Human
ugcccagcagggagcuaccugg

SEQ ID NO: 433007 - RNA, 22 nt, Human
uaugcaaagccacccagggacg

SEQ ID NO: 433008 - RNA, 22 nt, Human
gaggggcugcccuggugucagg

SEQ ID NO: 433009 - RNA, 22 nt, Human
uugaggccugcuggaagguguu

SEQ ID NO: 433010 - RNA, 22 nt, Human
ugcacacacaugcagagggaga

SEQ ID NO: 433011 - RNA, 22 nt, Human
gauggaagaaaaaugcaugucu

SEQ ID NO: 433012 - RNA, 22 nt, Human
aggaaagcaauggcugagaaca

SEQ ID NO: 433013 - RNA, 22 nt, Human
cccagcuccaagggacagcgaa

SEQ ID NO: 433014 - RNA, 22 nt, Human
ggcagacacucaaaagcuggga

SEQ ID NO: 433015 - RNA, 22 nt, Human
ugaggcagcaauugauuauuca

SEQ ID NO: 433016 - RNA, 22 nt, Human
ucagacagaggagcucgugcag

SEQ ID NO: 433017 - RNA, 22 nt, Human
aaucuuuuucacaagaaagcac

SEQ ID NO: 433018 - RNA, 22 nt, Human
cuucccuucugugcagggcaga

SEQ ID NO: 433019 - RNA, 22 nt, Human
aaaaugaacagaacaaugggga

SEQ ID NO: 433020 - RNA, 22 nt, Human
cuuugcagauuuguuuagugcu

SEQ ID NO: 433021 - RNA, 23 nt, Human
ucagagaggcccccugcagagau

SEQ ID NO: 433022 - RNA, 22 nt, Human
gaggacagugugaucugccagc

SEQ ID NO: 433023 - RNA, 22 nt, Human
cuggacaggcuggggacugcaa

SEQ ID NO: 433024 - RNA, 22 nt, Human
gcagugguccaguucacaccca

SEQ ID NO: 433025 - RNA, 22 nt, Human
aaaguugaccgaaagauuuuga

SEQ ID NO: 433026 - RNA, 22 nt, Human
guggcagagcaggagacaggac

SEQ ID NO: 433027 - RNA, 22 nt, Human
ggcaccaggggauguaaugucc

SEQ ID NO: 433028 - RNA, 22 nt, Human
ccuggagggcgccgcacagucc

SEQ ID NO: 433029 - RNA, 22 nt, Human
gacagggccaaaccggcugauc

SEQ ID NO: 433030 - RNA, 22 nt, Human
aagugacauaccuuacauaugu

SEQ ID NO: 433031 - RNA, 22 nt, Human
ucagaagggaaacacaagugac

SEQ ID NO: 433032 - RNA, 22 nt, Human
auuaaauuuucacuaggcuccc

SEQ ID NO: 433033 - RNA, 22 nt, Human
ucacacagugagcggggcucag

SEQ ID NO: 433034 - RNA, 22 nt, Human
gcaguaugaguguuuuagacau

SEQ ID NO: 433035 - RNA, 22 nt, Human
agacuuugagcucuuagagaag

SEQ ID NO: 433036 - RNA, 22 nt, Human
gcugagcugggacaguccuggg

SEQ ID NO: 433037 - RNA, 22 nt, Human
uuaggauuugaaaaggggcaga

SEQ ID NO: 433038 - RNA, 22 nt, Human
agagcugcccacacagcagauu

SEQ ID NO: 433039 - RNA, 22 nt, Human
ucaugcaggcagccuuuaguaa

SEQ ID NO: 433040 - RNA, 23 nt, Human
gggugggccaaauuagguagccu

SEQ ID NO: 433041 - RNA, 22 nt, Human
gggccaugagagguucaucaac

SEQ ID NO: 433042 - RNA, 22 nt, Human
aaugauauagcagacauagccu

SEQ ID NO: 433043 - RNA, 22 nt, Human
aaggcagcagaggaaaggugcu

SEQ ID NO: 433044 - RNA, 22 nt, Human
auuugucauguauguaaaguug

SEQ ID NO: 433045 - RNA, 22 nt, Human
uuaacaugucuugacuucaucu

SEQ ID NO: 433046 - RNA, 22 nt, Human
uuucuaaaugguggcugcauug

SEQ ID NO: 433047 - RNA, 19 nt, Human
aggaaggaaccugagucug

SEQ ID NO: 433048 - RNA, 22 nt, Human
uggcagaugugguuugagacag

SEQ ID NO: 433049 - RNA, 21 nt, Human
ugacuuuauuugacagcccag

SEQ ID NO: 433050 - RNA, 22 nt, Human
cucagagccaguuagcaggugc

SEQ ID NO: 433051 - RNA, 23 nt, Human
auugaacagagagaaaaacaucc

SEQ ID NO: 433052 - RNA, 22 nt, Human
cucagaguccccacaucugggu

SEQ ID NO: 433053 - RNA, 22 nt, Human
agagccugaggaugucccagcu

SEQ ID NO: 433054 - RNA, 22 nt, Human
uugcugaucugugaaucagcca

SEQ ID NO: 433055 - RNA, 22 nt, Human
auaaaggcagauuuuggaccuc

SEQ ID NO: 433056 - RNA, 22 nt, Human
gaugauuuuaguugacuaaacu

SEQ ID NO: 433057 - RNA, 22 nt, Human
uuaagggccauuauggaugggu

SEQ ID NO: 433058 - RNA, 22 nt, Human
auaaauuuauaauuguuuccug

SEQ ID NO: 433059 - RNA, 22 nt, Human
gcagcuguacuggcagcauugu

SEQ ID NO: 433060 - RNA, 22 nt, Human
aaagggccuccgccugggcagg

SEQ ID NO: 433061 - RNA, 22 nt, Human
cugcccuggcagccuaccaugg

SEQ ID NO: 433062 - RNA, 22 nt, Human
cagcaaagguagaagcacagga

SEQ ID NO: 433063 - RNA, 22 nt, Human
cuggaagguaacaaggccauua

SEQ ID NO: 433064 - RNA, 22 nt, Human
gaaggagggugcggaucugagc

SEQ ID NO: 433065 - RNA, 22 nt, Human
ucugucacuuuuauuuacugaa

SEQ ID NO: 433066 - RNA, 22 nt, Human
augacagacccucuaaagacaa

SEQ ID NO: 433067 - RNA, 22 nt, Human
gagcugagauuugaagcaaguu

SEQ ID NO: 433068 - RNA, 22 nt, Human
aggcugcagugcagguaggauu

SEQ ID NO: 433069 - RNA, 22 nt, Human
gggcagacugguuauacacggg

SEQ ID NO: 433070 - RNA, 22 nt, Human
gaugcauuacaaaagugauuau

SEQ ID NO: 433071 - RNA, 22 nt, Human
acugucacuccaacugagucgu

SEQ ID NO: 433072 - RNA, 22 nt, Human
ugcaguggaagagguggagauc

SEQ ID NO: 433073 - RNA, 18 nt, Human
acaggccucaguccugca

SEQ ID NO: 433074 - RNA, 22 nt, Human
uaugacaagaaauacagaggua

SEQ ID NO: 433075 - RNA, 22 nt, Human
gccuucugcgcucgugucuccg

SEQ ID NO: 433076 - RNA, 17 nt, Human
uaaagccagucaaguca

SEQ ID NO: 433077 - RNA, 22 nt, Human
acauucaaaauauuucugaugu

SEQ ID NO: 433078 - RNA, 22 nt, Human
aaguccugggugagaacugucc

SEQ ID NO: 433079 - RNA, 22 nt, Human
uuugggcaagguccagauuccu

SEQ ID NO: 433080 - RNA, 20 nt, Human
uccagccacuuccgcugguc

SEQ ID NO: 433081 - RNA, 22 nt, Human
uaaggcagugaaacuauucugu

SEQ ID NO: 433082 - RNA, 22 nt, Human
guucaaguuaugccuuuacccu

SEQ ID NO: 433083 - RNA, 22 nt, Human
caaauagugucacauugugagg

SEQ ID NO: 433084 - RNA, 22 nt, Human
gccugagaucagccaagccccu

SEQ ID NO: 433085 - RNA, 20 nt, Human
cugcccugcccuggguccug

SEQ ID NO: 433086 - RNA, 22 nt, Human
agacuucacucccagagauucu

SEQ ID NO: 433087 - RNA, 22 nt, Human
cauugguuugauauugccaugg

SEQ ID NO: 433088 - RNA, 22 nt, Human
cuggggggagcugcguccagca

SEQ ID NO: 433089 - RNA, 22 nt, Human
ugagcuuccucccugcauccau

SEQ ID NO: 433090 - RNA, 23 nt, Human
cccaggagccugaguccucucug

SEQ ID NO: 433091 - RNA, 22 nt, Human
uagucccauuuugagguauuug

SEQ ID NO: 433092 - RNA, 22 nt, Human
ugugagcacugugaugcuguuc

SEQ ID NO: 433093 - RNA, 22 nt, Human
ugacuugucucuuugggagaca

SEQ ID NO: 433094 - RNA, 22 nt, Human
cagcugaaagaaggaaguguca

SEQ ID NO: 433095 - RNA, 23 nt, Human
cugcauauggagguuagcaacuc

SEQ ID NO: 433096 - RNA, 21 nt, Human
aggcccuggaggucagagaaa

SEQ ID NO: 433097 - RNA, 22 nt, Human
uacagcagggcgcugugaugaa

SEQ ID NO: 433098 - RNA, 22 nt, Human
augaauggauggggucaagaua

SEQ ID NO: 433099 - RNA, 22 nt, Human
accaaaaagauauguugaagcc

SEQ ID NO: 433100 - RNA, 22 nt, Human
uuggccaguggaaagaggagga

SEQ ID NO: 433101 - RNA, 22 nt, Human
ccccagagaaagucagcagcau

SEQ ID NO: 433102 - RNA, 23 nt, Human
cagaccuggcagucauccucaac

SEQ ID NO: 433103 - RNA, 22 nt, Human
uugggaggucauaaaucuguuc

SEQ ID NO: 433104 - RNA, 22 nt, Human
uccagcuggcccggccaugaau

SEQ ID NO: 433105 - RNA, 22 nt, Human
ucaggcugccuaucagacugug

SEQ ID NO: 433106 - RNA, 22 nt, Human
gaaguucacauagcuggcaggu

SEQ ID NO: 433107 - RNA, 22 nt, Human
acacuuugauagauaaugcagg

SEQ ID NO: 433108 - RNA, 22 nt, Human
auuuucucucaaaccuuaaaau

SEQ ID NO: 433109 - RNA, 22 nt, Human
cagggacagacagauauauuug

SEQ ID NO: 433110 - RNA, 22 nt, Human
ggagcagcacugccacacagag

SEQ ID NO: 433111 - RNA, 22 nt, Human
gcacccaggcuugggcagcaac

SEQ ID NO: 433112 - RNA, 23 nt, Human
cugcccugaucuugaucuauugu

SEQ ID NO: 433113 - RNA, 22 nt, Human
aauuauauuguggugugaaugu

SEQ ID NO: 433114 - RNA, 20 nt, Human
cugcuuaaguaagugacaca

SEQ ID NO: 433115 - RNA, 22 nt, Human
uccuggaggcaaaugaagacuc

SEQ ID NO: 433116 - RNA, 22 nt, Human
ggcauggacgucucugaggcca

SEQ ID NO: 433117 - RNA, 22 nt, Human
cagaauuuagcacaauguaugg

SEQ ID NO: 433118 - RNA, 22 nt, Human
gagccccaggacagcucuaguu

SEQ ID NO: 433119 - RNA, 22 nt, Human
cauuuguaauacugacuugcag

SEQ ID NO: 433120 - RNA, 22 nt, Human
agaagcugacagaugcagcagg

SEQ ID NO: 433121 - RNA, 23 nt, Human
ugccucugccucccuagucugca

SEQ ID NO: 433122 - RNA, 22 nt, Human
cugccaucugaggguccagccu

SEQ ID NO: 433123 - RNA, 22 nt, Human
augaggccuaucuuggcagagg

SEQ ID NO: 433124 - RNA, 22 nt, Human
ugguacaacuguauuaggcaaa

SEQ ID NO: 433125 - RNA, 22 nt, Human
auuauugccagcuauuacaaca

SEQ ID NO: 433126 - RNA, 22 nt, Human
aggaugagagauacauggagca

SEQ ID NO: 433127 - RNA, 22 nt, Human
uguuucagagcacugggcuuau

SEQ ID NO: 433128 - RNA, 22 nt, Human
agcaggcugggcaauaugggca

SEQ ID NO: 433129 - RNA, 22 nt, Human
ugcauuauucuuuuuugguagg

SEQ ID NO: 433130 - RNA, 22 nt, Human
ccucugaguccucccugguugc

SEQ ID NO: 433131 - RNA, 23 nt, Human
gcuguuuccccaugugcugaagg

SEQ ID NO: 433132 - RNA, 22 nt, Human
aucauucaagugcucuaaaaug

SEQ ID NO: 433133 - RNA, 22 nt, Human
aagaacaugggugugggcauuc

SEQ ID NO: 433134 - RNA, 20 nt, Human
cuguggcucaugcaucugcc

SEQ ID NO: 433135 - RNA, 22 nt, Human
agcagcugcagggagggucugc

SEQ ID NO: 433136 - RNA, 22 nt, Human
ggcccugggaugcucagcagug

SEQ ID NO: 433137 - RNA, 22 nt, Human
cugugggcuccugcagcucagg

SEQ ID NO: 433138 - RNA, 20 nt, Human
gggaugagaguccuagcucu

SEQ ID NO: 433139 - RNA, 18 nt, Human
gcuuugcagaaauacaga

SEQ ID NO: 433140 - RNA, 22 nt, Human
agugacagcugggaaggugaaa

SEQ ID NO: 433141 - RNA, 22 nt, Human
agcagcugcuccacuugcuuaa

SEQ ID NO: 433142 - RNA, 22 nt, Human
uauacagcuauggcaagacaaa

SEQ ID NO: 433143 - RNA, 22 nt, Human
gcuguuucucuugagucaaaau

SEQ ID NO: 433144 - RNA, 22 nt, Human
gacagcagacaaaccauguuuu

SEQ ID NO: 433145 - RNA, 22 nt, Human
acuaauuguauaguugauguaa

SEQ ID NO: 433146 - RNA, 22 nt, Human
uucuggcuugaccccuacuucc

SEQ ID NO: 433147 - RNA, 22 nt, Human
ucaugcaguuuugccaccuaag

SEQ ID NO: 433148 - RNA, 22 nt, Human
gcugccugauuuacauagugaa

SEQ ID NO: 433149 - RNA, 22 nt, Human
ggccugaggcaauagucagaca

SEQ ID NO: 433150 - RNA, 22 nt, Human
cucccuggaggugagcuggcac

SEQ ID NO: 433151 - RNA, 22 nt, Human
gcugucagcgcccaaggagcuc

SEQ ID NO: 433152 - RNA, 22 nt, Human
ugaagcagagugaaggugaauu

SEQ ID NO: 433153 - RNA, 22 nt, Human
ggguguccugugccaagcuggg

SEQ ID NO: 433154 - RNA, 22 nt, Human
ugggccuccugcccuggccuag

SEQ ID NO: 433155 - RNA, 22 nt, Human
uuugcuuuugugcucuaguggu

SEQ ID NO: 433156 - RNA, 22 nt, Human
ccucucuguaagggucccuccc

SEQ ID NO: 433157 - RNA, 17 nt, Human
agcagcugaagcagcca

SEQ ID NO: 433158 - RNA, 22 nt, Human
cauuucuagggaucauaaagua

SEQ ID NO: 433159 - RNA, 22 nt, Human
ggagacugaucugagugauaac

SEQ ID NO: 433160 - RNA, 22 nt, Human
cucugggcggcccaggccaacc

SEQ ID NO: 433161 - RNA, 22 nt, Human
uagcaacaugguuaucacauua

SEQ ID NO: 433162 - RNA, 22 nt, Human
ucuuauagcucaaaggaagagu

SEQ ID NO: 433163 - RNA, 22 nt, Human
uggccucaaccguccuaagcac

SEQ ID NO: 433164 - RNA, 22 nt, Human
acaaggcacuuuaugaagagga

SEQ ID NO: 433165 - RNA, 22 nt, Human
auucauacaggcuuugcucuua

SEQ ID NO: 433166 - RNA, 22 nt, Human
uauugcuucauaauuguugcca

SEQ ID NO: 433167 - RNA, 22 nt, Human
ccugggagugugccaucucugu

SEQ ID NO: 433168 - RNA, 22 nt, Human
gggucccaggaaggagcagugu

SEQ ID NO: 433169 - RNA, 18 nt, Human
gggcauggaugcagcauc

SEQ ID NO: 433170 - RNA, 20 nt, Human
acagaaagagagaaugucag

SEQ ID NO: 433171 - RNA, 22 nt, Human
ugcuggcuuucugucccuggca

SEQ ID NO: 433172 - RNA, 22 nt, Human
uuauugcaacuuuagggauaga

SEQ ID NO: 433173 - RNA, 22 nt, Human
agggcucuguccccagaggccc

SEQ ID NO: 433174 - RNA, 22 nt, Human
agguuccucuucauguucaaca

SEQ ID NO: 433175 - RNA, 22 nt, Human
cugggcuagaaggaccaggaug

SEQ ID NO: 433176 - RNA, 22 nt, Human
cuggggcugcagcgaucuucau

SEQ ID NO: 433177 - RNA, 19 nt, Human
aacuuugcuacccuauccu

SEQ ID NO: 433178 - RNA, 22 nt, Human
cuucuccuuauaugucccguuc

SEQ ID NO: 433179 - RNA, 22 nt, Human
ugagacagucaccaggcaggcc

SEQ ID NO: 433180 - RNA, 22 nt, Human
ccacccagccagaugcaggaag

SEQ ID NO: 433181 - RNA, 22 nt, Human
uggcagauucugguugauacuu

SEQ ID NO: 433182 - RNA, 22 nt, Human
uauuuuugccucucagauaaaa

SEQ ID NO: 433183 - RNA, 22 nt, Human
gcaguggggaaugcuggggaga

SEQ ID NO: 433184 - RNA, 22 nt, Human
gaggagggagcuggaagcucuu

SEQ ID NO: 433185 - RNA, 22 nt, Human
gcugagugauugauauuuuagu

SEQ ID NO: 433186 - RNA, 22 nt, Human
cuuuguuuauauuucuccucga

SEQ ID NO: 433187 - RNA, 18 nt, Human
ccuguguguguugcaggc

SEQ ID NO: 433188 - RNA, 22 nt, Human
uuucagaggaaaucucauugag

SEQ ID NO: 433189 - RNA, 22 nt, Human
augacaaaagaagacaugaggu

SEQ ID NO: 433190 - RNA, 22 nt, Human
augcuuggcguuucacuuccug

SEQ ID NO: 433191 - RNA, 22 nt, Human
gcccaggaggucaaguagcuau

SEQ ID NO: 433192 - RNA, 22 nt, Human
acaggcagggaccuuggcuaag

SEQ ID NO: 433193 - RNA, 22 nt, Human
acugaaguagucauugucauua

SEQ ID NO: 433194 - RNA, 22 nt, Human
uggcagggccugaaucuuauac

SEQ ID NO: 433195 - RNA, 22 nt, Human
auuucuauaggaggacaguauu

SEQ ID NO: 433196 - RNA, 22 nt, Human
uggggacauucaugcagguugu

SEQ ID NO: 433197 - RNA, 22 nt, Human
caggacuauguucaacagauag

SEQ ID NO: 433198 - RNA, 21 nt, Human
gagugcaggucugaugccauc

SEQ ID NO: 433199 - RNA, 18 nt, Human
agcaacagaaacauaugg

SEQ ID NO: 433200 - RNA, 22 nt, Human
gcugccaguguggcaugaugca

SEQ ID NO: 433201 - RNA, 22 nt, Human
ccaacagguugagagucugaau

SEQ ID NO: 433202 - RNA, 22 nt, Human
ccagggugagaaaaggcuggau

SEQ ID NO: 433203 - RNA, 22 nt, Human
cauuccuuaacguggggagucu

SEQ ID NO: 433204 - RNA, 22 nt, Human
aaugaacacuuagccuuucuau

SEQ ID NO: 433205 - RNA, 22 nt, Human
ucagcaggcgguuccuuguggg

SEQ ID NO: 433206 - RNA, 22 nt, Human
cacagaggucugggcccagcag

SEQ ID NO: 433207 - RNA, 22 nt, Human
cuagagaaaauguuaauacagu

SEQ ID NO: 433208 - RNA, 22 nt, Human
ggcaggagaauggcgugaacuc

SEQ ID NO: 433209 - RNA, 22 nt, Human
ucccugaggaagggguguggug

SEQ ID NO: 433210 - RNA, 22 nt, Human
aaaguuuuauucaagcauuagu

SEQ ID NO: 433211 - RNA, 20 nt, Human
cugggcucaagugauccucc

SEQ ID NO: 433212 - RNA, 22 nt, Human
cuuugcaggaguaugugauaau

SEQ ID NO: 433213 - RNA, 22 nt, Human
ccccagcaggaauacagggguc

SEQ ID NO: 433214 - RNA, 22 nt, Human
cagugucuuauuuguagcucag

SEQ ID NO: 433215 - RNA, 22 nt, Human
gggcuaggucugaucagagaag

SEQ ID NO: 433216 - RNA, 22 nt, Human
ggccucuggucaagacaagcau

SEQ ID NO: 433217 - RNA, 22 nt, Human
acaggcugagcguccaucuuca

SEQ ID NO: 433218 - RNA, 22 nt, Human
auucaaauuaaguuaauucagc

SEQ ID NO: 433219 - RNA, 22 nt, Human
cagcacuguucccagaccacug

SEQ ID NO: 433220 - RNA, 22 nt, Human
uauggcuuuucauuccuaugug

SEQ ID NO: 433221 - RNA, 19 nt, Human
aaaaacuuaguccagaaag

SEQ ID NO: 433222 - RNA, 22 nt, Human
uguugggaagcucugccagggg

SEQ ID NO: 433223 - RNA, 22 nt, Human
uugcaaauauguucuccuauuc

SEQ ID NO: 433224 - RNA, 22 nt, Human
cugagaauaaagccagcaggag

SEQ ID NO: 433225 - RNA, 22 nt, Human
gacagggcauggugcagaguuc

SEQ ID NO: 433226 - RNA, 22 nt, Human
cggcacagccgggcaaggcugg

SEQ ID NO: 433227 - RNA, 22 nt, Human
ucccugggccacagcugugagc

SEQ ID NO: 433228 - RNA, 21 nt, Human
acuuggcagaacgcagaaggc

SEQ ID NO: 433229 - RNA, 17 nt, Human
agcaggcacgucagcac

SEQ ID NO: 433230 - RNA, 22 nt, Human
uacuagaaccucacaacaaucc

SEQ ID NO: 433231 - RNA, 22 nt, Human
cagcugugcuguauuaagcucu

SEQ ID NO: 433232 - RNA, 22 nt, Human
gaauuucaaaagccagaacggg

SEQ ID NO: 433233 - RNA, 22 nt, Human
guugcagcaucacugcugagug

SEQ ID NO: 433234 - RNA, 22 nt, Human
aaccagucccagugagaugaac

SEQ ID NO: 433235 - RNA, 22 nt, Human
caccagcuuugcccacugccca

SEQ ID NO: 433236 - RNA, 23 nt, Human
agcucugcucgggcaugcccugc

SEQ ID NO: 433237 - RNA, 22 nt, Human
cagcuccccucuguggggcagu

SEQ ID NO: 433238 - RNA, 22 nt, Human
gcacagccuugcccugugcccu

SEQ ID NO: 433239 - RNA, 22 nt, Human
uccagcagcccgaaggcccauc

SEQ ID NO: 433240 - RNA, 22 nt, Human
gccuccccaaagugcugacagc

SEQ ID NO: 433241 - RNA, 22 nt, Human
uuucuuaugagcaagacucuau

SEQ ID NO: 433242 - RNA, 22 nt, Human
ucaugcagauaagaauaaguaa

SEQ ID NO: 433243 - RNA, 22 nt, Human
ggugugugguuuugauacaguc

SEQ ID NO: 433244 - RNA, 22 nt, Human
uucuuauaagauaggccucagg

SEQ ID NO: 433245 - RNA, 22 nt, Human
aguuccaaagccuguauucuua

SEQ ID NO: 433246 - RNA, 22 nt, Human
cacuggcugagcuucucuaggg

SEQ ID NO: 433247 - RNA, 22 nt, Human
gcacacagaauugauucacugu

SEQ ID NO: 433248 - RNA, 22 nt, Human
accagcucagaagccagaaaga

SEQ ID NO: 433249 - RNA, 22 nt, Human
ugcaggaagacuucccaagcca

SEQ ID NO: 433250 - RNA, 22 nt, Human
uugcauuugcucauuugauaug

SEQ ID NO: 433251 - RNA, 22 nt, Human
ugcucaucaacaugaugaucau

SEQ ID NO: 433252 - RNA, 22 nt, Human
guuugcaggaacucuggggaga

SEQ ID NO: 433253 - RNA, 22 nt, Human
gcuccuggcuccaggcagccaa

SEQ ID NO: 433254 - RNA, 22 nt, Human
aaagaagacagacauuucuuuc

SEQ ID NO: 433255 - RNA, 22 nt, Human
ggcuacagcgggguggagacgg

SEQ ID NO: 433256 - RNA, 23 nt, Human
gggagccauggguggucauggag

SEQ ID NO: 433257 - RNA, 22 nt, Human
cuugaugaugacgucggugaug

SEQ ID NO: 433258 - RNA, 23 nt, Human
gcaggaacucaggguaggcagca

SEQ ID NO: 433259 - RNA, 22 nt, Human
ccugccugucccucaguccaca

SEQ ID NO: 433260 - RNA, 22 nt, Human
cccaggagauaacguucccaag

SEQ ID NO: 433261 - RNA, 22 nt, Human
cugggugcugugggcucagagg

SEQ ID NO: 433262 - RNA, 22 nt, Human
ugcaggccucagacuuagccau

SEQ ID NO: 433263 - RNA, 22 nt, Human
cccagccucugggcucacccaa

SEQ ID NO: 433264 - RNA, 22 nt, Human
cugucagcacucuacuacagau

SEQ ID NO: 433265 - RNA, 22 nt, Human
aggaagccuggggcugcccucg

SEQ ID NO: 433266 - RNA, 22 nt, Human
gaguccuggagaaacgcaggug

SEQ ID NO: 433267 - RNA, 22 nt, Human
ggcagccaugcuccaggugcag

SEQ ID NO: 433268 - RNA, 22 nt, Human
gagccugggacugggggucaug

SEQ ID NO: 433269 - RNA, 22 nt, Human
acuguauuggaaauauagcaaa

SEQ ID NO: 433270 - RNA, 22 nt, Human
gauacaguauuuaaagagcaac

SEQ ID NO: 433271 - RNA, 22 nt, Human
ccuggcucugaaguccacauca

SEQ ID NO: 433272 - RNA, 22 nt, Human
aaaagagguuaaccaggugugu

SEQ ID NO: 433273 - RNA, 22 nt, Human
aauaauguaggaugauaaauga

SEQ ID NO: 433274 - RNA, 22 nt, Human
gcugucugcugugcacugagca

SEQ ID NO: 433275 - RNA, 20 nt, Human
ugacucugcaaccgucucuc

SEQ ID NO: 433276 - RNA, 22 nt, Human
cagaagaaaguggggagacaag

SEQ ID NO: 433277 - RNA, 22 nt, Human
caggggccaggcugucugcugu

SEQ ID NO: 433278 - RNA, 20 nt, Human
ccuggagccuggaaggaguc

SEQ ID NO: 433279 - RNA, 22 nt, Human
ggcagcaguaggagcuaaucuu

SEQ ID NO: 433280 - RNA, 22 nt, Human
ugugugaagcacauguucaagg

SEQ ID NO: 433281 - RNA, 22 nt, Human
uugaacauuggcaauuucauau

SEQ ID NO: 433282 - RNA, 22 nt, Human
uuugucaaguuugcaaauacgu

SEQ ID NO: 433283 - RNA, 22 nt, Human
uuccugcaaagccagaugucga

SEQ ID NO: 433284 - RNA, 22 nt, Human
ccacacagggggaugaguuauu

SEQ ID NO: 433285 - RNA, 22 nt, Human
caggcacuagcagaaugaggcu

SEQ ID NO: 433286 - RNA, 22 nt, Human
augcagagacagauguggcaug

SEQ ID NO: 433287 - RNA, 22 nt, Human
cacagaggaaaugacuuucuua

SEQ ID NO: 433288 - RNA, 22 nt, Human
ugcuggagcggaggugagccag

SEQ ID NO: 433289 - RNA, 22 nt, Human
cauuauugccagccauacugaa

SEQ ID NO: 433290 - RNA, 22 nt, Human
cagggcuccccgcaccgcagcc

SEQ ID NO: 433291 - RNA, 22 nt, Human
aggcaauagguuccucaucuuu

SEQ ID NO: 433292 - RNA, 20 nt, Human
aauuuuaucuccauccuuug

SEQ ID NO: 433293 - RNA, 22 nt, Human
ugcccacagcucagggcugcuc

SEQ ID NO: 433294 - RNA, 23 nt, Human
cugggacaugguaggggcacaac

SEQ ID NO: 433295 - RNA, 22 nt, Human
ugccugucuccucugcagggug

SEQ ID NO: 433296 - RNA, 22 nt, Human
ugguaccauguugcuuugauuu

SEQ ID NO: 433297 - RNA, 22 nt, Human
uggcaggaagacguggggcacc

SEQ ID NO: 433298 - RNA, 22 nt, Human
cagcugcuuucagcaggaggga

SEQ ID NO: 433299 - RNA, 23 nt, Human
cagcaggagggugccugggcugc

SEQ ID NO: 433300 - RNA, 21 nt, Human
gacaggcaaggagucacuuag

SEQ ID NO: 433301 - RNA, 22 nt, Human
gggguccuggaggccagcugga

SEQ ID NO: 433302 - RNA, 22 nt, Human
uauuccaagucacuguguccug

SEQ ID NO: 433303 - RNA, 22 nt, Human
uugcccaccuuagucuucagac

SEQ ID NO: 433304 - RNA, 22 nt, Human
uuuuuauacuuugcucaagauu

SEQ ID NO: 433305 - RNA, 22 nt, Human
ugauuauauucuaacuucauaa

SEQ ID NO: 433306 - RNA, 22 nt, Human
uacaggaaggcucuggaggugc

SEQ ID NO: 433307 - RNA, 22 nt, Human
gcucuccacugaccacggggca

SEQ ID NO: 433308 - RNA, 22 nt, Human
guuuaacauuguaccaacaccu

SEQ ID NO: 433309 - RNA, 22 nt, Human
auuuaccauauguacugaguau

SEQ ID NO: 433310 - RNA, 22 nt, Human
uauguacaauuuguuguauguc

SEQ ID NO: 433311 - RNA, 22 nt, Human
aaaacagacagccaguguagag

SEQ ID NO: 433312 - RNA, 22 nt, Human
cugggcaguuuauucaguucug

SEQ ID NO: 433313 - RNA, 22 nt, Human
uugaggauucaugucagaauuc

SEQ ID NO: 433314 - RNA, 22 nt, Human
cugccugugugugccugcagaa

SEQ ID NO: 433315 - RNA, 22 nt, Human
uuccugaaaauacagggagacc

SEQ ID NO: 433316 - RNA, 22 nt, Human
acagauuuuaaaugacacuccc

SEQ ID NO: 433317 - RNA, 22 nt, Human
uuugcaaauuucgucuccucag

SEQ ID NO: 433318 - RNA, 22 nt, Human
ugggagccauuuuagaggcugc

SEQ ID NO: 433319 - RNA, 22 nt, Human
gcaggcugcugagauccuuagg

SEQ ID NO: 433320 - RNA, 22 nt, Human
gccacagggcagaugcgcagag

SEQ ID NO: 433321 - RNA, 22 nt, Human
auauuuauaagcaagcaggacu

SEQ ID NO: 433322 - RNA, 22 nt, Human
gccuggcccagggcuccgcagg

SEQ ID NO: 433323 - RNA, 22 nt, Human
uguaucaaucauguaauuuggu

SEQ ID NO: 433324 - RNA, 22 nt, Human
caccacuguaucccuagcacuu

SEQ ID NO: 433325 - RNA, 20 nt, Human
cagaacagucugagaggcca

SEQ ID NO: 433326 - RNA, 22 nt, Human
gauuguggaagucagugguucu

SEQ ID NO: 433327 - RNA, 22 nt, Human
ugcagaggagucagccugggca

SEQ ID NO: 433328 - RNA, 22 nt, Human
ucaaaggguaauguaauagucu

SEQ ID NO: 433329 - RNA, 22 nt, Human
gugcucuccuggcugcccugac

SEQ ID NO: 433330 - RNA, 22 nt, Human
uugcaaaucuuugccagaaggc

SEQ ID NO: 433331 - RNA, 22 nt, Human
gauucaaaguuaaugaagaugc

SEQ ID NO: 433332 - RNA, 22 nt, Human
uaugaagauauaucugaucucu

SEQ ID NO: 433333 - RNA, 22 nt, Human
gacaggaaacaagaaggcagga

SEQ ID NO: 433334 - RNA, 22 nt, Human
ugcaggcagggccagcgugagg

SEQ ID NO: 433335 - RNA, 22 nt, Human
cuggcucauagagcagcuccaa

SEQ ID NO: 433336 - RNA, 22 nt, Human
cagggacagagacugcaccuug

SEQ ID NO: 433337 - RNA, 22 nt, Human
uagaaaugcaguguacuguguc

SEQ ID NO: 433338 - RNA, 22 nt, Human
ucagcuggugaguggauagaca

SEQ ID NO: 433339 - RNA, 19 nt, Human
cugagcagcggcagcacuu

SEQ ID NO: 433340 - RNA, 22 nt, Human
ugccagcacuucuggcugucug

SEQ ID NO: 433341 - RNA, 22 nt, Human
ccuugccucauugugcuucucc

SEQ ID NO: 433342 - RNA, 22 nt, Human
acagaaauucaaacuggaauuu

SEQ ID NO: 433343 - RNA, 22 nt, Human
ccagagaaagguuugauucauu

SEQ ID NO: 433344 - RNA, 22 nt, Human
cagggcuagggagcccuccugg

SEQ ID NO: 433345 - RNA, 22 nt, Human
uuuacaugaguagcagauguuc

SEQ ID NO: 433346 - RNA, 21 nt, Human
auaauguacaaaaacugucuu

SEQ ID NO: 433347 - RNA, 22 nt, Human
acugcagccuugaacucugggc

SEQ ID NO: 433348 - RNA, 22 nt, Human
caguucaaaauuuugaagaagg

SEQ ID NO: 433349 - RNA, 22 nt, Human
gcagggacaucuucagaucacu

SEQ ID NO: 433350 - RNA, 22 nt, Human
cuauuuaagaauaaaaggggca

SEQ ID NO: 433351 - RNA, 22 nt, Human
uugcagggcaggaccauggaca

SEQ ID NO: 433352 - RNA, 22 nt, Human
ccucagggaggccucuguggcu

SEQ ID NO: 433353 - RNA, 22 nt, Human
agacacagguguaauuucugcu

SEQ ID NO: 433354 - RNA, 22 nt, Human
ucuuugcauuccugugugcuuu

SEQ ID NO: 433355 - RNA, 22 nt, Human
ugugugugcacgugcgcgcgag

SEQ ID NO: 433356 - RNA, 22 nt, Human
ugaagcaggaaacuucuuguuu

SEQ ID NO: 433357 - RNA, 22 nt, Human
auuacaguaacagcuacaaugc

SEQ ID NO: 433358 - RNA, 22 nt, Human
ggcuccugccgucuuuucugag

SEQ ID NO: 433359 - RNA, 22 nt, Human
cagggacaaggaauaagauuag

SEQ ID NO: 433360 - RNA, 20 nt, Human
acauguacuaaugaauacag

SEQ ID NO: 433361 - RNA, 22 nt, Human
uggcacugaccccaggccugug

SEQ ID NO: 433362 - RNA, 22 nt, Human
uucaaagugcauguuccucaga

SEQ ID NO: 433363 - RNA, 22 nt, Human
caggaggcaguuucagaaguca

SEQ ID NO: 433364 - RNA, 22 nt, Human
gugccuggcacacagaaggcaa

SEQ ID NO: 433365 - RNA, 22 nt, Human
ucagcccugggcuuccucaugg

SEQ ID NO: 433366 - RNA, 22 nt, Human
cuggcuccugaggcuuggcccc

SEQ ID NO: 433367 - RNA, 22 nt, Human
agacaaguaggaaugguugaag

SEQ ID NO: 433368 - RNA, 22 nt, Human
gcuguauuggaacacauccaug

SEQ ID NO: 433369 - RNA, 22 nt, Human
uuaccauagaaacuuccuuuuu

SEQ ID NO: 433370 - RNA, 18 nt, Human
agucuucugauccauuuu

SEQ ID NO: 433371 - RNA, 22 nt, Human
augauuuuuucuaacacagucg

SEQ ID NO: 433372 - RNA, 20 nt, Human
ccagagcagccacugaaguu

SEQ ID NO: 433373 - RNA, 22 nt, Human
ucagaggagcaaaagaggggau

SEQ ID NO: 433374 - RNA, 22 nt, Human
ggcaccagggcaagggucuuuc

SEQ ID NO: 433375 - RNA, 22 nt, Human
aaugccaacuuggauauacauu

SEQ ID NO: 433376 - RNA, 22 nt, Human
gacagaagaggaacuuggacag

SEQ ID NO: 433377 - RNA, 22 nt, Human
agggaagcccuggcugagaccc

SEQ ID NO: 433378 - RNA, 22 nt, Human
caaaggagguaaugggugugag

SEQ ID NO: 433379 - RNA, 22 nt, Human
gaggcuggggucugccuuucug

SEQ ID NO: 433380 - RNA, 22 nt, Human
uggagagaagaggcagugugcu

SEQ ID NO: 433381 - RNA, 22 nt, Human
cagggacaugacuggucucugu

SEQ ID NO: 433382 - RNA, 22 nt, Human
cagggacauugguggccagguu

SEQ ID NO: 433383 - RNA, 22 nt, Human
agagaugacaugagggacuuaa

SEQ ID NO: 433384 - RNA, 22 nt, Human
cugugagcuggguggccaggac

SEQ ID NO: 433385 - RNA, 22 nt, Human
agucucugucguagaucagcgu

SEQ ID NO: 433386 - RNA, 22 nt, Human
uauaccaaaaaaauucuugucu

SEQ ID NO: 433387 - RNA, 22 nt, Human
aggcugccuguuccaaucuccu

SEQ ID NO: 433388 - RNA, 22 nt, Human
aaagaucuguguuaacucaagg

SEQ ID NO: 433389 - RNA, 22 nt, Human
aauuggcagaacuuuauauauu

SEQ ID NO: 433390 - RNA, 16 nt, Human
ccaccugcagcucuca

SEQ ID NO: 433391 - RNA, 22 nt, Human
ccuuagcauuagaagcuguggg

SEQ ID NO: 433392 - RNA, 22 nt, Human
caggguggcccuguggucucau

SEQ ID NO: 433393 - RNA, 22 nt, Human
ugccaggcuuagagcaggggcu

SEQ ID NO: 433394 - RNA, 22 nt, Human
auucagcaaacauuuauugugu

SEQ ID NO: 433395 - RNA, 22 nt, Human
agcuucuguucaucuuccaggc

SEQ ID NO: 433396 - RNA, 17 nt, Human
gcugccaccuuuggagc

SEQ ID NO: 433397 - RNA, 22 nt, Human
gcuguuucccgugcgcugcguc

SEQ ID NO: 433398 - RNA, 20 nt, Human
agugccagggcaggugagag

SEQ ID NO: 433399 - RNA, 22 nt, Human
uauagcacacaguuuauaaaag

SEQ ID NO: 433400 - RNA, 22 nt, Human
acacagagugguuuguagaaua

SEQ ID NO: 433401 - RNA, 22 nt, Human
gcagcgcuguaggcccaaggca

SEQ ID NO: 433402 - RNA, 22 nt, Human
ugaggcuggcaaggcugguauu

SEQ ID NO: 433403 - RNA, 22 nt, Human
cacccaggcagguggcugagaa

SEQ ID NO: 433404 - RNA, 22 nt, Human
auucuuuucccaacugcuuuaa

SEQ ID NO: 433405 - RNA, 22 nt, Human
gggagacacgcugcaggcauaa

SEQ ID NO: 433406 - RNA, 22 nt, Human
agaacugugaaguaugugaaau

SEQ ID NO: 433407 - RNA, 22 nt, Human
cagaggaaaguauuucuggaag

SEQ ID NO: 433408 - RNA, 22 nt, Human
acacagagguggccacucuuuu

SEQ ID NO: 433409 - RNA, 20 nt, Human
agccucugcccuucccacug

SEQ ID NO: 433410 - RNA, 22 nt, Human
gacccagaggccugacagugug

SEQ ID NO: 433411 - RNA, 22 nt, Human
cccagagaugggaggugaucgg

SEQ ID NO: 433412 - RNA, 22 nt, Human
cugugcaguaggucagggcugg

SEQ ID NO: 433413 - RNA, 22 nt, Human
agccacagagagggagcugcaa

SEQ ID NO: 433414 - RNA, 22 nt, Human
acagaggacaacuaggcgcuca

SEQ ID NO: 433415 - RNA, 22 nt, Human
aaaaguaauugcaguuuuguca

SEQ ID NO: 433416 - RNA, 20 nt, Human
gaggcugcggacugcuggac

SEQ ID NO: 433417 - RNA, 22 nt, Human
agcagcaggaggcuguccacca

SEQ ID NO: 433418 - RNA, 22 nt, Human
aaaucucacuguagucaaagug

SEQ ID NO: 433419 - RNA, 20 nt, Human
uccugagugcaguuggcuug

SEQ ID NO: 433420 - RNA, 22 nt, Human
cugugucucuccuuacaagacu

SEQ ID NO: 433421 - RNA, 22 nt, Human
uuauaauucuggcauaggcugu

SEQ ID NO: 433422 - RNA, 22 nt, Human
agcuguugcugggaggagagaa

SEQ ID NO: 433423 - RNA, 21 nt, Human
cuguccucagauguggacgag

SEQ ID NO: 433424 - RNA, 19 nt, Human
gggcagaauggcaucucag

SEQ ID NO: 433425 - RNA, 22 nt, Human
aauuaauucaguuuuuaaggga

SEQ ID NO: 433426 - RNA, 23 nt, Human
acuuugcauacccaaauuguuuu

SEQ ID NO: 433427 - RNA, 22 nt, Human
acugaaaaagacaucuugguaa

SEQ ID NO: 433428 - RNA, 22 nt, Human
acuauucaagugcucauucaga

SEQ ID NO: 433429 - RNA, 22 nt, Human
ucuuagcauuucauaacaacug

SEQ ID NO: 433430 - RNA, 22 nt, Human
aagcuggaacaucuugaggaag

SEQ ID NO: 433431 - RNA, 20 nt, Human
gcagccguggagacuaggag

SEQ ID NO: 433432 - RNA, 22 nt, Human
acaauuuuccccauagguuauc

SEQ ID NO: 433433 - RNA, 22 nt, Human
ugcaauuucaggcauauauugu

SEQ ID NO: 433434 - RNA, 22 nt, Human
cagcccuggcccaggugccuua

SEQ ID NO: 433435 - RNA, 22 nt, Human
gcugucccuugucccaccuugc

SEQ ID NO: 433436 - RNA, 22 nt, Human
uuuggccacuugggaguccagg

SEQ ID NO: 433437 - RNA, 22 nt, Human
uccuggagauaauugcagugaa

SEQ ID NO: 433438 - RNA, 22 nt, Human
cucaguccuuauuugccucuac

SEQ ID NO: 433439 - RNA, 22 nt, Human
auccaguuaagaugaggucaua

SEQ ID NO: 433440 - RNA, 22 nt, Human
ugcaggcuggcagauaucucau

SEQ ID NO: 433441 - RNA, 22 nt, Human
uccagcagguccgagacaaguu

SEQ ID NO: 433442 - RNA, 21 nt, Human
gggcuggaggaugggaagccc

SEQ ID NO: 433443 - RNA, 22 nt, Human
gagcagcagguggcugugaugg

SEQ ID NO: 433444 - RNA, 21 nt, Human
ucacaugcuuauuccuggaau

SEQ ID NO: 433445 - RNA, 21 nt, Human
gcaggcuggucaaaccucagu

SEQ ID NO: 433446 - RNA, 22 nt, Human
uuuagcaucgaaguaaauuuag

SEQ ID NO: 433447 - RNA, 22 nt, Human
uacaggaaagaaauuugaacuc

SEQ ID NO: 433448 - RNA, 22 nt, Human
aagggaggggauguaagccugg

SEQ ID NO: 433449 - RNA, 22 nt, Human
ggcaacaacuggacauagcugg

SEQ ID NO: 433450 - RNA, 22 nt, Human
gcagggcauagaggcacggagg

SEQ ID NO: 433451 - RNA, 22 nt, Human
agagcuggcugguagcccugau

SEQ ID NO: 433452 - RNA, 22 nt, Human
ucuagcugaggguaggagaccu

SEQ ID NO: 433453 - RNA, 22 nt, Human
cccagcagugacccagugauac

SEQ ID NO: 433454 - RNA, 22 nt, Human
ccaggccuguguuguguggagg

SEQ ID NO: 433455 - RNA, 22 nt, Human
agacacagcuaccauaauacca

SEQ ID NO: 433456 - RNA, 22 nt, Human
uggugagaauugguuggauuua

SEQ ID NO: 433457 - RNA, 22 nt, Human
aauuaagagagaguugaagcaa

SEQ ID NO: 433458 - RNA, 22 nt, Human
cuugaugauagaaugugaggag

SEQ ID NO: 433459 - RNA, 22 nt, Human
gagagcugggaaagccguggag

SEQ ID NO: 433460 - RNA, 22 nt, Human
aagaccugcguuauccugccug

SEQ ID NO: 433461 - RNA, 22 nt, Human
ucacaggcuggucuccgaggac

SEQ ID NO: 433462 - RNA, 22 nt, Human
uaggcagauuccauauuuuggc

SEQ ID NO: 433463 - RNA, 22 nt, Human
agcagugggggaguguuaguuu

SEQ ID NO: 433464 - RNA, 22 nt, Human
caauuuuauugguccaaauaca

SEQ ID NO: 433465 - RNA, 22 nt, Human
gugucccaauguucaggacggc

SEQ ID NO: 433466 - RNA, 19 nt, Human
ggccuugcucuguggcagc

SEQ ID NO: 433467 - RNA, 22 nt, Human
gcugagacugacaugaagaggu

SEQ ID NO: 433468 - RNA, 22 nt, Human
aaggcagccagauccuuugggu

SEQ ID NO: 433469 - RNA, 22 nt, Human
ugaagcuaguauuaacucagau

SEQ ID NO: 433470 - RNA, 22 nt, Human
gcccucuguguaacaauccaga

SEQ ID NO: 433471 - RNA, 22 nt, Human
uugcccaccuucuuuucgugcc

SEQ ID NO: 433472 - RNA, 22 nt, Human
agucacagaaacccaggugugg

SEQ ID NO: 433473 - RNA, 22 nt, Human
gagcuuugcuggaagccugggg

SEQ ID NO: 433474 - RNA, 23 nt, Human
uucuacagcuucuucaguuaagg

SEQ ID NO: 433475 - RNA, 22 nt, Human
ugagcugggcugggcugagcug

SEQ ID NO: 433476 - RNA, 20 nt, Human
cagcaggcuauggggcaccc

SEQ ID NO: 433477 - RNA, 22 nt, Human
agccuggcacugaggcagggcg

SEQ ID NO: 433478 - RNA, 22 nt, Human
ugaagccaucaggaagccagca

SEQ ID NO: 433479 - RNA, 21 nt, Human
ucagcaggcaccagaaggcug

SEQ ID NO: 433480 - RNA, 21 nt, Human
aaaucacuguccaaucuuggu

SEQ ID NO: 433481 - RNA, 22 nt, Human
ucaaaggguagcccagggaaga

SEQ ID NO: 433482 - RNA, 22 nt, Human
gagcuggugaucagcuggagga

SEQ ID NO: 433483 - RNA, 22 nt, Human
uaauuuuacuuccugagcaccu

SEQ ID NO: 433484 - RNA, 19 nt, Human
ugaagagcugucaaaagug

SEQ ID NO: 433485 - RNA, 20 nt, Human
uuuugcagagaaggcgacug

SEQ ID NO: 433486 - RNA, 22 nt, Human
aaagcacagagcucccacagga

SEQ ID NO: 433487 - RNA, 22 nt, Human
ugcagcugggucugcccuggcu

SEQ ID NO: 433488 - RNA, 22 nt, Human
cuccugggcugggaacucagcc

SEQ ID NO: 433489 - RNA, 22 nt, Human
cagaaacacuguauuuagggaa

SEQ ID NO: 433490 - RNA, 22 nt, Human
ggcugccugaggcagugagaga

SEQ ID NO: 433491 - RNA, 18 nt, Human
gguggcaggucagaugcc

SEQ ID NO: 433492 - RNA, 22 nt, Human
guucagagugggaaugaucacu

SEQ ID NO: 433493 - RNA, 22 nt, Human
aaggcaaugggauggaucaugu

SEQ ID NO: 433494 - RNA, 22 nt, Human
ugggcagggagcuggaaccaca

SEQ ID NO: 433495 - RNA, 22 nt, Human
gagggccucugcugcuccacau

SEQ ID NO: 433496 - RNA, 22 nt, Human
uauguacauacaugugcauacg

SEQ ID NO: 433497 - RNA, 23 nt, Human
cauuucuagguguguuuggccau

SEQ ID NO: 433498 - RNA, 21 nt, Human
aguguccuugaucuugccuug

SEQ ID NO: 433499 - RNA, 22 nt, Human
caaaugaaaauggcgucuugga

SEQ ID NO: 433500 - RNA, 23 nt, Human
guuuuacaggugagaaaauggag

SEQ ID NO: 433501 - RNA, 22 nt, Human
gugugugucuccgcggccguag

SEQ ID NO: 433502 - RNA, 22 nt, Human
gacugcauaggaccaaauagua

SEQ ID NO: 433503 - RNA, 22 nt, Human
uacaggaaguuacagacuauga

SEQ ID NO: 433504 - RNA, 22 nt, Human
aaaaaggcuaagcaucuugugc

SEQ ID NO: 433505 - RNA, 22 nt, Human
gggcuccacagcagugagugga

SEQ ID NO: 433506 - RNA, 22 nt, Human
gccucuccgagccacugccucu

SEQ ID NO: 433507 - RNA, 18 nt, Human
ggcagggaaaagauaggg

SEQ ID NO: 433508 - RNA, 22 nt, Human
caugagaaccaggucuguguuu

SEQ ID NO: 433509 - RNA, 21 nt, Human
ggcacagccugaaaugccuca

SEQ ID NO: 433510 - RNA, 22 nt, Human
ccaggcuguuuucaaacuuggg

SEQ ID NO: 433511 - RNA, 22 nt, Human
agacauagggaggcauauaaau

SEQ ID NO: 433512 - RNA, 22 nt, Human
aguacuuuacuucuuacaguuu

SEQ ID NO: 433513 - RNA, 22 nt, Human
uccuggaggggacagcaugggc

SEQ ID NO: 433514 - RNA, 22 nt, Human
ugcaaauucaaacauuuuccug

SEQ ID NO: 433515 - RNA, 21 nt, Human
aguuucaggaaguucagcugc

SEQ ID NO: 433516 - RNA, 22 nt, Human
cacacaugucucuccaugcucu

SEQ ID NO: 433517 - RNA, 22 nt, Human
gacacagggggauguguggacg

SEQ ID NO: 433518 - RNA, 22 nt, Human
agcaggcauagaguagcacuca

SEQ ID NO: 433519 - RNA, 20 nt, Human
agaaucugacccagagagac

SEQ ID NO: 433520 - RNA, 22 nt, Human
guccuggugccaccugcgggau

SEQ ID NO: 433521 - RNA, 22 nt, Human
uggaaugcagugggagcuuacc

SEQ ID NO: 433522 - RNA, 22 nt, Human
ucaggaagucucaauuagcuac

SEQ ID NO: 433523 - RNA, 22 nt, Human
cacauaaucaccaaguccuuuc

SEQ ID NO: 433524 - RNA, 22 nt, Human
cauuucuaagaaggcugcacau

SEQ ID NO: 433525 - RNA, 22 nt, Human
gcccacaguguagcagguacuc

SEQ ID NO: 433526 - RNA, 22 nt, Human
uccugggcugugugccacucug

SEQ ID NO: 433527 - RNA, 22 nt, Human
cagacuuucugacucccuugcc

SEQ ID NO: 433528 - RNA, 22 nt, Human
uuugcauuuuagauuuaggccu

SEQ ID NO: 433529 - RNA, 22 nt, Human
caugaacagauucuucauuucu

SEQ ID NO: 433530 - RNA, 22 nt, Human
uuaaaggcuauggcugccuggg

SEQ ID NO: 433531 - RNA, 22 nt, Human
cugccuuugcccuugacacugu

SEQ ID NO: 433532 - RNA, 22 nt, Human
uacauugcuuucuaauacaucu

SEQ ID NO: 433533 - RNA, 22 nt, Human
aaagaugaucuacaaguucauu

SEQ ID NO: 433534 - RNA, 21 nt, Human
uggaaaaauguggccuaguga

SEQ ID NO: 433535 - RNA, 18 nt, Human
cuccuuucccuacaccuc

SEQ ID NO: 433536 - RNA, 21 nt, Human
gaguccuggcuaggguggcag

SEQ ID NO: 433537 - RNA, 22 nt, Human
uccucagaugcucuuggacgcc

SEQ ID NO: 433538 - RNA, 22 nt, Human
gcagaggauagcauaugaaccu

SEQ ID NO: 433539 - RNA, 22 nt, Human
uuauugcagccgcagggcgcug

SEQ ID NO: 433540 - RNA, 23 nt, Human
uccugaggguuucccagccuugg

SEQ ID NO: 433541 - RNA, 23 nt, Human
uggauaaaauacuuacauucaac

SEQ ID NO: 433542 - RNA, 22 nt, Human
cacagaagaaucaugcuguguu

SEQ ID NO: 433543 - RNA, 22 nt, Human
ggggaggccaguggaccguccc

SEQ ID NO: 433544 - RNA, 22 nt, Human
uccugcagagccgcccucaggu

SEQ ID NO: 433545 - RNA, 22 nt, Human
aguggccacugacuuggaaauc

SEQ ID NO: 433546 - RNA, 22 nt, Human
aacaugauuucaugcauuuaga

SEQ ID NO: 433547 - RNA, 22 nt, Human
auggaugaguccuugagacaca

SEQ ID NO: 433548 - RNA, 22 nt, Human
ucccagcagucagagcuaugug

SEQ ID NO: 433549 - RNA, 22 nt, Human
uucuggaguugugaccucaggg

SEQ ID NO: 433550 - RNA, 22 nt, Human
guguccugccacccugggcuuu

SEQ ID NO: 433551 - RNA, 22 nt, Human
cugggccagucucggccgcucu

SEQ ID NO: 433552 - RNA, 22 nt, Human
uaaaacuucucauuuuuauggu

SEQ ID NO: 433553 - RNA, 22 nt, Human
acugaaguccacacauguagga

SEQ ID NO: 433554 - RNA, 20 nt, Human
cccaggaguuugcucuuacu

SEQ ID NO: 433555 - RNA, 17 nt, Human
acacagacaggcagaca

SEQ ID NO: 433556 - RNA, 18 nt, Human
auugagcaugacagaccu

SEQ ID NO: 433557 - RNA, 22 nt, Human
uuuuaugugcuggacuggcagu

SEQ ID NO: 433558 - RNA, 22 nt, Human
agaaaaguuuaaaucuuggcac

SEQ ID NO: 433559 - RNA, 23 nt, Human
agaggcaggaguggcuugcccgg

SEQ ID NO: 433560 - RNA, 22 nt, Human
aggccuggugugccggaugcag

SEQ ID NO: 433561 - RNA, 22 nt, Human
ccaggccugcauucccucucag

SEQ ID NO: 433562 - RNA, 22 nt, Human
acagaugaggcuggcgagggca

SEQ ID NO: 433563 - RNA, 22 nt, Human
ucugggcugugccaaagcucuu

SEQ ID NO: 433564 - RNA, 22 nt, Human
uuugaaaguguuuacuugggaa

SEQ ID NO: 433565 - RNA, 22 nt, Human
ucaggcugaaaggacuccaguu

SEQ ID NO: 433566 - RNA, 22 nt, Human
uauugcaaguggcauaaaauuu

SEQ ID NO: 433567 - RNA, 22 nt, Human
ggagcagagcucuucaucugca

SEQ ID NO: 433568 - RNA, 22 nt, Human
ugauucuuucuccaccaauuca

SEQ ID NO: 433569 - RNA, 22 nt, Human
uguguccuucugggagucccag

SEQ ID NO: 433570 - RNA, 22 nt, Human
uggcacaggaucucagcggcca

SEQ ID NO: 433571 - RNA, 22 nt, Human
uuguuaaaggcaaaacaagcac

SEQ ID NO: 433572 - RNA, 22 nt, Human
aagacaaugcauuacuaagaag

SEQ ID NO: 433573 - RNA, 22 nt, Human
cuggcagcagcuucuggaucga

SEQ ID NO: 433574 - RNA, 22 nt, Human
ugaagccaucccucagauggcc

SEQ ID NO: 433575 - RNA, 22 nt, Human
cagcagcaaaucuagaagagga

SEQ ID NO: 433576 - RNA, 22 nt, Human
gaggccuguagucauggaugua

SEQ ID NO: 433577 - RNA, 22 nt, Human
ggagguucucucuuugcagagc

SEQ ID NO: 433578 - RNA, 22 nt, Human
agagggcauaaaauagagcacg

SEQ ID NO: 433579 - RNA, 22 nt, Human
cccuggccagcucaugucugag

SEQ ID NO: 433580 - RNA, 22 nt, Human
aggucuggugagagcaggugcu

SEQ ID NO: 433581 - RNA, 22 nt, Human
cagucccagcugcucagaaggc

SEQ ID NO: 433582 - RNA, 18 nt, Human
aaggcacaggagaacauu

SEQ ID NO: 433583 - RNA, 22 nt, Human
gguuccuguacuuagcuaugua

SEQ ID NO: 433584 - RNA, 22 nt, Human
cugagcugcucccgcugcagcg

SEQ ID NO: 433585 - RNA, 22 nt, Human
aagcaggcuugguguggccgcu

SEQ ID NO: 433586 - RNA, 19 nt, Human
ggagccuggagcacgugcc

SEQ ID NO: 433587 - RNA, 22 nt, Human
aagcccuuggcgcacaccgggc

SEQ ID NO: 433588 - RNA, 22 nt, Human
ccagcagcuuuauuggcucucc

SEQ ID NO: 433589 - RNA, 22 nt, Human
augcaggcagacacugugggca

SEQ ID NO: 433590 - RNA, 22 nt, Human
agacccacacuuugaguagcaa

SEQ ID NO: 433591 - RNA, 21 nt, Human
ugcagcugacacugguaugcc

SEQ ID NO: 433592 - RNA, 22 nt, Human
aggaaggacugcagcauuuggu

SEQ ID NO: 433593 - RNA, 22 nt, Human
guuccacaaaaggucuaguuua

SEQ ID NO: 433594 - RNA, 22 nt, Human
agcaacauuuuucaauuaacau

SEQ ID NO: 433595 - RNA, 22 nt, Human
gaauacaaacuuaaggcuuuac

SEQ ID NO: 433596 - RNA, 21 nt, Human
caggcuugacccuagugggaa

SEQ ID NO: 433597 - RNA, 22 nt, Human
uuuaaacaucuuguugccuuaa

SEQ ID NO: 433598 - RNA, 22 nt, Human
gucccuggaucugggacagcug

SEQ ID NO: 433599 - RNA, 22 nt, Human
cagggagcuuucccaggacccu

SEQ ID NO: 433600 - RNA, 22 nt, Human
ggcaucaguauggccauagggu

SEQ ID NO: 433601 - RNA, 22 nt, Human
ucccagagucuucuccuguaau

SEQ ID NO: 433602 - RNA, 22 nt, Human
cuuugcuuacuggugucugcau

SEQ ID NO: 433603 - RNA, 22 nt, Human
agcuccugcuugacagaagagg

SEQ ID NO: 433604 - RNA, 22 nt, Human
cuuccucaggcauuagcuggac

SEQ ID NO: 433605 - RNA, 22 nt, Human
uauuauugcaaguauauaaagu

SEQ ID NO: 433606 - RNA, 18 nt, Human
gggcagcacagcagccuc

SEQ ID NO: 433607 - RNA, 22 nt, Human
uacaggagcauggggaagggau

SEQ ID NO: 433608 - RNA, 22 nt, Human
gggaagcugaagcuagagaaaa

SEQ ID NO: 433609 - RNA, 22 nt, Human
agaggcagccguauuucaaagg

SEQ ID NO: 433610 - RNA, 22 nt, Human
gaauacaagccaggcacaaggc

SEQ ID NO: 433611 - RNA, 22 nt, Human
cagcauuuggugaucaucuuaa

SEQ ID NO: 433612 - RNA, 22 nt, Human
ucagcugccuuucccaugcuag

SEQ ID NO: 433613 - RNA, 22 nt, Human
agcugggucuugggccaggaga

SEQ ID NO: 433614 - RNA, 22 nt, Human
ucauuuguucucauucucuacu

SEQ ID NO: 433615 - RNA, 22 nt, Human
uugaagacacagacauauagag

SEQ ID NO: 433616 - RNA, 22 nt, Human
cagcauagcugauuaaggcaaa

SEQ ID NO: 433617 - RNA, 22 nt, Human
aggcagcuucugauuagcagcg

SEQ ID NO: 433618 - RNA, 22 nt, Human
ugggaggagcccucugggaagg

SEQ ID NO: 433619 - RNA, 20 nt, Human
cugcccagccacugagggau

SEQ ID NO: 433620 - RNA, 22 nt, Human
gcaggcugaguauuacccuagu

SEQ ID NO: 433621 - RNA, 22 nt, Human
gaggccagaagucugagaucag

SEQ ID NO: 433622 - RNA, 22 nt, Human
cuggccuggagccucugggugg

SEQ ID NO: 433623 - RNA, 22 nt, Human
ccagcuccaggacugggagcug

SEQ ID NO: 433624 - RNA, 22 nt, Human
agagugggccucugagucccag

SEQ ID NO: 433625 - RNA, 23 nt, Human
uucagacugccuucagcauuguc

SEQ ID NO: 433626 - RNA, 22 nt, Human
cagcucugugcaggccugggga

SEQ ID NO: 433627 - RNA, 21 nt, Human
gacaaagugaagcaggcagga

SEQ ID NO: 433628 - RNA, 23 nt, Human
aggcuaguuugugacuuucuuug

SEQ ID NO: 433629 - RNA, 22 nt, Human
ggagacaguauggcuuguagcu

SEQ ID NO: 433630 - RNA, 22 nt, Human
uuugcagccacagugccuugua

SEQ ID NO: 433631 - RNA, 22 nt, Human
acaggccugagauuuugcauuu

SEQ ID NO: 433632 - RNA, 22 nt, Human
gagacacagagaggcuguguga

SEQ ID NO: 433633 - RNA, 22 nt, Human
uaucacaauuccuauaguuugu

SEQ ID NO: 433634 - RNA, 21 nt, Human
acaaaagaagcugccuuuuaa

SEQ ID NO: 433635 - RNA, 22 nt, Human
ugugaauagugccgcaauaaac

SEQ ID NO: 433636 - RNA, 23 nt, Human
aggcaaggguguaaaggaaauga

SEQ ID NO: 433637 - RNA, 22 nt, Human
agcuccugcagacuccugcuca

SEQ ID NO: 433638 - RNA, 22 nt, Human
gcaucuaagguggauaacuucu

SEQ ID NO: 433639 - RNA, 22 nt, Human
uugaaaaaauugguagaggaug

SEQ ID NO: 433640 - RNA, 22 nt, Human
ugaggauggucccgaggacacu

SEQ ID NO: 433641 - RNA, 22 nt, Human
cacauuuaucuguucuuucuag

SEQ ID NO: 433642 - RNA, 22 nt, Human
cuccucccugcgauugcucugc

SEQ ID NO: 433643 - RNA, 22 nt, Human
uuuacauguaauguuauacaaa

SEQ ID NO: 433644 - RNA, 22 nt, Human
uaaggcaauggcauucuugaca

SEQ ID NO: 433645 - RNA, 22 nt, Human
gacagagcagcacccagccccu

SEQ ID NO: 433646 - RNA, 22 nt, Human
uugcagcuccauuuuaauggcu

SEQ ID NO: 433647 - RNA, 20 nt, Human
agcaaggcuggagcuuaugg

SEQ ID NO: 433648 - RNA, 19 nt, Human
auagagacagaguuuaauc

SEQ ID NO: 433649 - RNA, 22 nt, Human
aggaggcagaugcuuggcugua

SEQ ID NO: 433650 - RNA, 22 nt, Human
agcaggugacccaagcaggcug

SEQ ID NO: 433651 - RNA, 22 nt, Human
aucaugcagcuaauccaauuca

SEQ ID NO: 433652 - RNA, 21 nt, Human
gggccacaccuucugcagacc

SEQ ID NO: 433653 - RNA, 20 nt, Human
accccagccccucuaucuga

SEQ ID NO: 433654 - RNA, 22 nt, Human
caguacuuugcaucauuccacu

SEQ ID NO: 433655 - RNA, 22 nt, Human
uuacacaugcucacuuauuugu

SEQ ID NO: 433656 - RNA, 22 nt, Human
cagcuguugugauccauuuacg

SEQ ID NO: 433657 - RNA, 22 nt, Human
ucuggccauggcaagccgagug

SEQ ID NO: 433658 - RNA, 22 nt, Human
ccuggaaaugcaaaagccauga

SEQ ID NO: 433659 - RNA, 22 nt, Human
acuuugcaauacuuaauacaaa

SEQ ID NO: 433660 - RNA, 22 nt, Human
gggcuccaacggugagcaugga

SEQ ID NO: 433661 - RNA, 22 nt, Human
acaaaugaaucauacauaaugu

SEQ ID NO: 433662 - RNA, 22 nt, Human
cagggcccauggcucagguagg

SEQ ID NO: 433663 - RNA, 22 nt, Human
cagcaacauauaugaaacugug

SEQ ID NO: 433664 - RNA, 22 nt, Human
gcuggcuguaucaccuggccag

SEQ ID NO: 433665 - RNA, 22 nt, Human
cugucauuuucuuccaauauaa

SEQ ID NO: 433666 - RNA, 22 nt, Human
ugcuguagcccugcacagugca

SEQ ID NO: 433667 - RNA, 22 nt, Human
uuucauugucuacauaugacau

SEQ ID NO: 433668 - RNA, 22 nt, Human
uacuuaaaacugauagaaucuc

SEQ ID NO: 433669 - RNA, 22 nt, Human
ucuggccagcaugagaccuggu

SEQ ID NO: 433670 - RNA, 22 nt, Human
aaugaggcuugcauugugaacu

SEQ ID NO: 433671 - RNA, 22 nt, Human
gagcugccugaacaagcagcag

SEQ ID NO: 433672 - RNA, 20 nt, Human
guccaggacccagcaggagg

SEQ ID NO: 433673 - RNA, 23 nt, Human
aagcugccuucgcaguuggucug

SEQ ID NO: 433674 - RNA, 22 nt, Human
uauuagaaagcuuaauaucgug

SEQ ID NO: 433675 - RNA, 22 nt, Human
cugggcagcuaccaccacugcu

SEQ ID NO: 433676 - RNA, 22 nt, Human
ccugaggcuuaaucugucccaa

SEQ ID NO: 433677 - RNA, 22 nt, Human
ugcaggcugcaccccugcccug

SEQ ID NO: 433678 - RNA, 22 nt, Human
gauuuuauauggcauacugugg

SEQ ID NO: 433679 - RNA, 22 nt, Human
cugaggccagcugcagagcucu

SEQ ID NO: 433680 - RNA, 18 nt, Human
ggcugugcguggaggcug

SEQ ID NO: 433681 - RNA, 22 nt, Human
gccagagccacuuuugggugau

SEQ ID NO: 433682 - RNA, 22 nt, Human
uauggcuuucaaaggaacucgg

SEQ ID NO: 433683 - RNA, 22 nt, Human
uauuaaauguuauuuggguugu

SEQ ID NO: 433684 - RNA, 22 nt, Human
aaagcacauuacaagcucaguc

SEQ ID NO: 433685 - RNA, 22 nt, Human
auucagcauaaucaguagcuug

SEQ ID NO: 433686 - RNA, 22 nt, Human
cccagagggaagggaaugaggu

SEQ ID NO: 433687 - RNA, 22 nt, Human
ucucagagagcuguguuuuccu

SEQ ID NO: 433688 - RNA, 22 nt, Human
gaaaaugagccucagcuacauu

SEQ ID NO: 433689 - RNA, 22 nt, Human
uuugacaaauaggggaauaagg

SEQ ID NO: 433690 - RNA, 22 nt, Human
gcauggcagugaggauggugcu

SEQ ID NO: 433691 - RNA, 22 nt, Human
ugucacagucucgugagcaucu

SEQ ID NO: 433692 - RNA, 22 nt, Human
cagcagggggcagcgcagauca

SEQ ID NO: 433693 - RNA, 22 nt, Human
cagaaauguacugacaugcagu

SEQ ID NO: 433694 - RNA, 22 nt, Human
gggaugaggaucaaucagggag

SEQ ID NO: 433695 - RNA, 22 nt, Human
cagcugcccugccuugcccuua

SEQ ID NO: 433696 - RNA, 22 nt, Human
augcacuuuguaaucuguucaa

SEQ ID NO: 433697 - RNA, 22 nt, Human
ugcaauuuucagaaauuccaaa

SEQ ID NO: 433698 - RNA, 22 nt, Human
aagcaggcgagggccuggagca

SEQ ID NO: 433699 - RNA, 22 nt, Human
cuagcagggauugggcacuggg

SEQ ID NO: 433700 - RNA, 22 nt, Human
aguacacaagacacauuuaaaa

SEQ ID NO: 433701 - RNA, 22 nt, Human
uguucagaacaaagguaaauga

SEQ ID NO: 433702 - RNA, 22 nt, Human
ugaggccugcauugaacuagaa

SEQ ID NO: 433703 - RNA, 22 nt, Human
ugggcaggaugcguugauucuu

SEQ ID NO: 433704 - RNA, 22 nt, Human
gcuguccagagcaugggagcaa

SEQ ID NO: 433705 - RNA, 22 nt, Human
ggcagagcgcaugcgucgcaga

SEQ ID NO: 433706 - RNA, 22 nt, Human
uucagaauaauguguuagagaa

SEQ ID NO: 433707 - RNA, 22 nt, Human
ucagcugccccgggcacugccc

SEQ ID NO: 433708 - RNA, 22 nt, Human
uggcauuuucuccuuugaguuu

SEQ ID NO: 433709 - RNA, 23 nt, Human
agcuguuucuugugaguugagug

SEQ ID NO: 433710 - RNA, 22 nt, Human
ucacaggagggagagacaccca

SEQ ID NO: 433711 - RNA, 22 nt, Human
aggaagagguagcugucaaggg

SEQ ID NO: 433712 - RNA, 22 nt, Human
gcucuugauguucauugacuug

SEQ ID NO: 433713 - RNA, 17 nt, Human
agucugggaccugcgug

SEQ ID NO: 433714 - RNA, 22 nt, Human
gaauugcugaugaaucugauug

SEQ ID NO: 433715 - RNA, 22 nt, Human
acaauucaagaugagauucagg

SEQ ID NO: 433716 - RNA, 22 nt, Human
cagagaaacucagauagcugau

SEQ ID NO: 433717 - RNA, 22 nt, Human
auaguuuaaggaacuaugcgau

SEQ ID NO: 433718 - RNA, 22 nt, Human
acuuugcauggaaaauggucau

SEQ ID NO: 433719 - RNA, 22 nt, Human
uucuugaugcuuguuuaaaggu

SEQ ID NO: 433720 - RNA, 18 nt, Human
augcccuguugacuucag

SEQ ID NO: 433721 - RNA, 22 nt, Human
gggcuuggcacaugggcucagc

SEQ ID NO: 433722 - RNA, 22 nt, Human
agcuuugcugcuggagaagggu

SEQ ID NO: 433723 - RNA, 22 nt, Human
acagccuguguaccagcuggga

SEQ ID NO: 433724 - RNA, 22 nt, Human
uuuuauugguaaugauaaaagu

SEQ ID NO: 433725 - RNA, 22 nt, Human
gguuccugaucguugucucucu

SEQ ID NO: 433726 - RNA, 22 nt, Human
auguuaaauagccauuuguuug

SEQ ID NO: 433727 - RNA, 22 nt, Human
ccaggcaccauguucuuaggac

SEQ ID NO: 433728 - RNA, 22 nt, Human
ugggccuguugggguugaguua

SEQ ID NO: 433729 - RNA, 22 nt, Human
cagaaagaccugggcucaagag

SEQ ID NO: 433730 - RNA, 22 nt, Human
ucccaggcuaggccucugcguu

SEQ ID NO: 433731 - RNA, 22 nt, Human
gcucagagaaauuauaggaauu

SEQ ID NO: 433732 - RNA, 22 nt, Human
gugcccuggggugaaccccugg

SEQ ID NO: 433733 - RNA, 22 nt, Human
ucuaagaggcaucaagacaagc

SEQ ID NO: 433734 - RNA, 22 nt, Human
uugcaaauauuguuuaccuuuc

SEQ ID NO: 433735 - RNA, 22 nt, Human
aggcaguuguugcugagcagcu

SEQ ID NO: 433736 - RNA, 22 nt, Human
uggcacaguccugggugccugc

SEQ ID NO: 433737 - RNA, 22 nt, Human
aucugguuuuggcugugucccu

SEQ ID NO: 433738 - RNA, 22 nt, Human
gucuuucuuaauucaagugcuu

SEQ ID NO: 433739 - RNA, 22 nt, Human
ugccuuggauugcagggaaccu

SEQ ID NO: 433740 - RNA, 22 nt, Human
caggacaguuggcaucugcugc

SEQ ID NO: 433741 - RNA, 22 nt, Human
uauuuucuggacagucuugcuu

SEQ ID NO: 433742 - RNA, 22 nt, Human
ucuuuuagcucugcaaggaaag

SEQ ID NO: 433743 - RNA, 22 nt, Human
aagguucccucucuggaagccu

SEQ ID NO: 433744 - RNA, 22 nt, Human
acugguacucagcuggcacuca

SEQ ID NO: 433745 - RNA, 22 nt, Human
uggcucaguuuagcagcucagu

SEQ ID NO: 433746 - RNA, 22 nt, Human
aggccucacauugggcuucaag

SEQ ID NO: 433747 - RNA, 20 nt, Human
ggcacuggaagcacacagga

SEQ ID NO: 433748 - RNA, 23 nt, Human
cuguggcaaguccugcaccugcc

SEQ ID NO: 433749 - RNA, 22 nt, Human
guuccacaaaauguacccaguu

SEQ ID NO: 433750 - RNA, 22 nt, Human
uuuccagguauuaauacuguau

SEQ ID NO: 433751 - RNA, 22 nt, Human
ggcaguggugggaggcucgcuc

SEQ ID NO: 433752 - RNA, 21 nt, Human
gcaaggccuaucauggcagcu

SEQ ID NO: 433753 - RNA, 22 nt, Human
gcugucagaaggugaaggguaa

SEQ ID NO: 433754 - RNA, 22 nt, Human
cacauccuucagcugagcccag

SEQ ID NO: 433755 - RNA, 22 nt, Human
ucauuuucacacauaaauagca

SEQ ID NO: 433756 - RNA, 22 nt, Human
uuccagagaggcucauguuccc

SEQ ID NO: 433757 - RNA, 22 nt, Human
ggugcucaagagggcauccucu

SEQ ID NO: 433758 - RNA, 23 nt, Human
auuauccagugcacuucacagcu

SEQ ID NO: 433759 - RNA, 22 nt, Human
caggcacucauucagagaggug

SEQ ID NO: 433760 - RNA, 21 nt, Human
agcagacacuugugaccuucc

SEQ ID NO: 433761 - RNA, 22 nt, Human
gcugcccaguucugcugcugcc

SEQ ID NO: 433762 - RNA, 22 nt, Human
gcuccaggagcucacagcucgc

SEQ ID NO: 433763 - RNA, 22 nt, Human
aagagcuggaugaagaaaucaa

SEQ ID NO: 433764 - RNA, 22 nt, Human
gaauuucagagguaacaucauc

SEQ ID NO: 433765 - RNA, 22 nt, Human
cagcagcuacuuggagcagcag

SEQ ID NO: 433766 - RNA, 22 nt, Human
cccagcucugcagaccugcccu

SEQ ID NO: 433767 - RNA, 22 nt, Human
gcuguuuccuacaugguguuau

SEQ ID NO: 433768 - RNA, 22 nt, Human
ccaugccuuucacugaaccagu

SEQ ID NO: 433769 - RNA, 18 nt, Human
cagaggagagacauucag

SEQ ID NO: 433770 - RNA, 22 nt, Human
uccuccagaaacugaggcagaa

SEQ ID NO: 433771 - RNA, 22 nt, Human
gagguaggagguagguauugug

SEQ ID NO: 433772 - RNA, 20 nt, Human
auucuaaagcucugcucuuu

SEQ ID NO: 433773 - RNA, 22 nt, Human
ucaguguccggagccugagugc

SEQ ID NO: 433774 - RNA, 22 nt, Human
acaggcuguacuucuaaucauc

SEQ ID NO: 433775 - RNA, 23 nt, Human
gggaagcuccauggaggugcugg

SEQ ID NO: 433776 - RNA, 22 nt, Human
ggagccugugggaugagaugug

SEQ ID NO: 433777 - RNA, 22 nt, Human
caaugacagguucaugacuccu

SEQ ID NO: 433778 - RNA, 22 nt, Human
gacaggaaauauggggguuguu

SEQ ID NO: 433779 - RNA, 22 nt, Human
gcccacagaggcaccaccaggc

SEQ ID NO: 433780 - RNA, 22 nt, Human
caggaccuggaaugcuugugaa

SEQ ID NO: 433781 - RNA, 22 nt, Human
uauuacaauuuacauugcacuu

SEQ ID NO: 433782 - RNA, 21 nt, Human
gcaaggcaaugccaugauuuc

SEQ ID NO: 433783 - RNA, 22 nt, Human
aaucacauuacagcauaucugu

SEQ ID NO: 433784 - RNA, 22 nt, Human
aaggcaauauugaguuucccuu

SEQ ID NO: 433785 - RNA, 22 nt, Human
caggugagaggcgguccugcau

SEQ ID NO: 433786 - RNA, 22 nt, Human
cugaggcuuugugugcaugccu

SEQ ID NO: 433787 - RNA, 22 nt, Human
cagcuguucagcaacucgcaga

SEQ ID NO: 433788 - RNA, 22 nt, Human
ugacacaguagaaagaugauga

SEQ ID NO: 433789 - RNA, 19 nt, Human
ggaaggcagaggggcugug

SEQ ID NO: 433790 - RNA, 22 nt, Human
ggcccagcacagugcuuggggg

SEQ ID NO: 433791 - RNA, 22 nt, Human
ugggaagaagcagagaacugga

SEQ ID NO: 433792 - RNA, 22 nt, Human
agguggugaugacagaagacag

SEQ ID NO: 433793 - RNA, 22 nt, Human
aggaagccaugguggacgucua

SEQ ID NO: 433794 - RNA, 22 nt, Human
caggacagguguucuagaucag

SEQ ID NO: 433795 - RNA, 22 nt, Human
aguaucucaaagugguuuaugg

SEQ ID NO: 433796 - RNA, 22 nt, Human
ugcccacagcaaagagguagga

SEQ ID NO: 433797 - RNA, 22 nt, Human
gcacacaguauaugcucauuaa

SEQ ID NO: 433798 - RNA, 22 nt, Human
agccaacaacucugagcccagu

SEQ ID NO: 433799 - RNA, 22 nt, Human
acacaagaauaaugaugaaggu

SEQ ID NO: 433800 - RNA, 22 nt, Human
cugggugguucuaacuguugau

SEQ ID NO: 433801 - RNA, 22 nt, Human
aacuuugcuugggucaaacuca

SEQ ID NO: 433802 - RNA, 19 nt, Human
cugccuguuauggagagaa

SEQ ID NO: 433803 - RNA, 23 nt, Human
gacacaggagcacccagcugagc

SEQ ID NO: 433804 - RNA, 22 nt, Human
gggcaggagagaacagucaugg

SEQ ID NO: 433805 - RNA, 22 nt, Human
uuugcaaauaaauaagugcucg

SEQ ID NO: 433806 - RNA, 22 nt, Human
cagccagcuggcacugugagua

SEQ ID NO: 433807 - RNA, 22 nt, Human
aaguuccuugaaugaagcuagg

SEQ ID NO: 433808 - RNA, 22 nt, Human
ggagagucugccgagccagccc

SEQ ID NO: 433809 - RNA, 22 nt, Human
agauauguuacugcaucauggg

SEQ ID NO: 433810 - RNA, 22 nt, Human
uuuaaggcuucacuggaguggg

SEQ ID NO: 433811 - RNA, 22 nt, Human
cccugagcagucugcagagagc

SEQ ID NO: 433812 - RNA, 22 nt, Human
cugccucuggccucaggcccag

SEQ ID NO: 433813 - RNA, 22 nt, Human
agcugggaugaggagcauccuu

SEQ ID NO: 433814 - RNA, 22 nt, Human
gauuuucugagccuucaaauuu

SEQ ID NO: 433815 - RNA, 22 nt, Human
guccugggaaggaagccaggga

SEQ ID NO: 433816 - RNA, 22 nt, Human
agaagcagacucugaggcaagg

SEQ ID NO: 433817 - RNA, 22 nt, Human
aggcaauaagccucaacugucu

SEQ ID NO: 433818 - RNA, 22 nt, Human
gaugauuuugaugcaguaaaga

SEQ ID NO: 433819 - RNA, 22 nt, Human
aguacaaugucugacacaguag

SEQ ID NO: 433820 - RNA, 22 nt, Human
uuuucucccgcuggcugcucuu

SEQ ID NO: 433821 - RNA, 22 nt, Human
gcagaggcaaucagguaugugg

SEQ ID NO: 433822 - RNA, 22 nt, Human
ugagggacuugcuaguucucug

SEQ ID NO: 433823 - RNA, 22 nt, Human
ugaugauuugaaaccaguuucu

SEQ ID NO: 433824 - RNA, 22 nt, Human
cuggccugaggucggcuguagg

SEQ ID NO: 433825 - RNA, 22 nt, Human
ucccagaggcaguugguaacuu

SEQ ID NO: 433826 - RNA, 22 nt, Human
cagcuggucaacugaaugaaca

SEQ ID NO: 433827 - RNA, 22 nt, Human
guuucuaugguuuauauuacug

SEQ ID NO: 433828 - RNA, 22 nt, Human
auuguauuagcacaauacaauu

SEQ ID NO: 433829 - RNA, 22 nt, Human
cugccugugccaccgccucauu

SEQ ID NO: 433830 - RNA, 22 nt, Human
aggcagaggagaaugaucuucc

SEQ ID NO: 433831 - RNA, 22 nt, Human
auuucauauguaucaccuagcc

SEQ ID NO: 433832 - RNA, 22 nt, Human
cuggagccggaccagggacggu

SEQ ID NO: 433833 - RNA, 22 nt, Human
agcuguuuuugucugcugaucc

SEQ ID NO: 433834 - RNA, 18 nt, Human
gucaccuggaucagauua

SEQ ID NO: 433835 - RNA, 22 nt, Human
uccugaagaaggcagauauuug

SEQ ID NO: 433836 - RNA, 22 nt, Human
cuggccagaguuggagggugug

SEQ ID NO: 433837 - RNA, 20 nt, Human
cagaggcauuuucagacucu

SEQ ID NO: 433838 - RNA, 22 nt, Human
accggguaggugucaacucuga

SEQ ID NO: 433839 - RNA, 22 nt, Human
acacaaugauucacaagcagca

SEQ ID NO: 433840 - RNA, 22 nt, Human
cucuuuuacaccaaaaggccua

SEQ ID NO: 433841 - RNA, 21 nt, Human
ggcugcugucaccgcugucac

SEQ ID NO: 433842 - RNA, 22 nt, Human
uuuaacagauaguuucuucugu

SEQ ID NO: 433843 - RNA, 22 nt, Human
gugcauuugugcaugcacaugu

SEQ ID NO: 433844 - RNA, 22 nt, Human
ugcuggguguuccgcacuugac

SEQ ID NO: 433845 - RNA, 22 nt, Human
aucuaaaaggagcucuuuaucu

SEQ ID NO: 433846 - RNA, 22 nt, Human
cuccugggaauuuaguugugag

SEQ ID NO: 433847 - RNA, 22 nt, Human
cuuucauuugauaagaaugcca

SEQ ID NO: 433848 - RNA, 22 nt, Human
uguccagggauggggucaggga

SEQ ID NO: 433849 - RNA, 22 nt, Human
ccugccuggcuuccagaagaga

SEQ ID NO: 433850 - RNA, 22 nt, Human
aggcagcauuugaauccagguc

SEQ ID NO: 433851 - RNA, 19 nt, Human
gcucagucuccugauugcu

SEQ ID NO: 433852 - RNA, 22 nt, Human
gcuuccagcaccagcagagggg

SEQ ID NO: 433853 - RNA, 22 nt, Human
aagacauguuuuaagaauauuu

SEQ ID NO: 433854 - RNA, 22 nt, Human
ugugcccaucccucuggagugu

SEQ ID NO: 433855 - RNA, 22 nt, Human
gcugucacucaccaggccugca

SEQ ID NO: 433856 - RNA, 22 nt, Human
cugcaggcucgaagacacggau

SEQ ID NO: 433857 - RNA, 22 nt, Human
ugcagauagcgucauucuugcu

SEQ ID NO: 433858 - RNA, 22 nt, Human
gaggcugcuguuagcccugggc

SEQ ID NO: 433859 - RNA, 22 nt, Human
uuauacaguuuauacuuagaau

SEQ ID NO: 433860 - RNA, 22 nt, Human
ugguaauuauaaaauguuuuug

SEQ ID NO: 433861 - RNA, 22 nt, Human
aggucuggaggcggagucagga

SEQ ID NO: 433862 - RNA, 22 nt, Human
gagggcucuacucaccacccug

SEQ ID NO: 433863 - RNA, 21 nt, Human
auauuucucauaagguuaugg

SEQ ID NO: 433864 - RNA, 22 nt, Human
aggcugaggcuuuccuuggaga

SEQ ID NO: 433865 - RNA, 22 nt, Human
aagcccugagcacugcagagaa

SEQ ID NO: 433866 - RNA, 22 nt, Human
uguuugcauuaauuagaaggua

SEQ ID NO: 433867 - RNA, 22 nt, Human
uaauuauuaugacaacaauugc

SEQ ID NO: 433868 - RNA, 22 nt, Human
ccaggagaugauguuggggauu

SEQ ID NO: 433869 - RNA, 20 nt, Human
cuccucaguuccaugggagg

SEQ ID NO: 433870 - RNA, 22 nt, Human
cagcccugcagcuggaucucac

SEQ ID NO: 433871 - RNA, 22 nt, Human
ugugccuggcauucugggcuuc

SEQ ID NO: 433872 - RNA, 22 nt, Human
agcagcccaaacagacuaagac

SEQ ID NO: 433873 - RNA, 22 nt, Human
gccugagagaacugaccaagag

SEQ ID NO: 433874 - RNA, 21 nt, Human
agaagagaagcaggacccucu

SEQ ID NO: 433875 - RNA, 22 nt, Human
aguagaaagaaggcacugggcc

SEQ ID NO: 433876 - RNA, 22 nt, Human
caugcuucaugcaaaauucuga

SEQ ID NO: 433877 - RNA, 17 nt, Human
gcucccugaggacagcu

SEQ ID NO: 433878 - RNA, 22 nt, Human
augcauauguacuugcauaugu

SEQ ID NO: 433879 - RNA, 22 nt, Human
acaaguuucauuguuuagaacc

SEQ ID NO: 433880 - RNA, 22 nt, Human
ccuuugcaaugaauuguuauug

SEQ ID NO: 433881 - RNA, 22 nt, Human
gccugguggacacugggcauca

SEQ ID NO: 433882 - RNA, 20 nt, Human
cucaguguggccugaguguu

SEQ ID NO: 433883 - RNA, 22 nt, Human
aauaacuucaucuucaggauag

SEQ ID NO: 433884 - RNA, 22 nt, Human
agucccagcucagaaccacuag

SEQ ID NO: 433885 - RNA, 22 nt, Human
auugaauagcugcuuguuguau

SEQ ID NO: 433886 - RNA, 22 nt, Human
aagacaaugaguccugauggga

SEQ ID NO: 433887 - RNA, 22 nt, Human
ucagggcaggacaguguaggcc

SEQ ID NO: 433888 - RNA, 22 nt, Human
uccccaggaaauucugauucuu

SEQ ID NO: 433889 - RNA, 22 nt, Human
gccagcagggcccaaaugcugg

SEQ ID NO: 433890 - RNA, 22 nt, Human
cccagacuccucuggcuggugg

SEQ ID NO: 433891 - RNA, 22 nt, Human
caugagaaugaagaagacuuaa

SEQ ID NO: 433892 - RNA, 22 nt, Human
uacaaaacagugcucugguccu

SEQ ID NO: 433893 - RNA, 22 nt, Human
acaguagucuuaauuucaugua

SEQ ID NO: 433894 - RNA, 22 nt, Human
ucaggcugguggucagauggcu

SEQ ID NO: 433895 - RNA, 18 nt, Human
ugugguggagcugccuuc

SEQ ID NO: 433896 - RNA, 22 nt, Human
uaguuaaagauucuguuaagag

SEQ ID NO: 433897 - RNA, 22 nt, Human
ccuggagauuauuugguccaau

SEQ ID NO: 433898 - RNA, 22 nt, Human
cagggagcuggcuggcgugagu

SEQ ID NO: 433899 - RNA, 22 nt, Human
gcagcuggggccacacuuaggc

SEQ ID NO: 433900 - RNA, 22 nt, Human
gcagcuggcucagagagguggg

SEQ ID NO: 433901 - RNA, 22 nt, Human
acagggaaguucugcaacagga

SEQ ID NO: 433902 - RNA, 22 nt, Human
ccagccaggcauugcaaacuga

SEQ ID NO: 433903 - RNA, 22 nt, Human
ucaggcuguagggccccuggag

SEQ ID NO: 433904 - RNA, 22 nt, Human
gcucagggccauggaccagcag

SEQ ID NO: 433905 - RNA, 22 nt, Human
ugggcuccucgucacucgcugu

SEQ ID NO: 433906 - RNA, 22 nt, Human
gaggcuagagcaggggcucaau

SEQ ID NO: 433907 - RNA, 22 nt, Human
gcaggagucacugacuuggucc

SEQ ID NO: 433908 - RNA, 22 nt, Human
ugggcaaagucacauacaugau

SEQ ID NO: 433909 - RNA, 17 nt, Human
ggccuugggcugcucuu

SEQ ID NO: 433910 - RNA, 22 nt, Human
uguggagcagcgucacagccuu

SEQ ID NO: 433911 - RNA, 22 nt, Human
agagaagagucuugucaaauua

SEQ ID NO: 433912 - RNA, 22 nt, Human
cugccucucaggucccugagau

SEQ ID NO: 433913 - RNA, 22 nt, Human
agagcuggacgucugagcccua

SEQ ID NO: 433914 - RNA, 22 nt, Human
acauagaucugugauucauucu

SEQ ID NO: 433915 - RNA, 22 nt, Human
gccuggagcucggcugagggcg

SEQ ID NO: 433916 - RNA, 18 nt, Human
caggaugagugaugggga

SEQ ID NO: 433917 - RNA, 22 nt, Human
cugaagcuugauaaacuauaaa

SEQ ID NO: 433918 - RNA, 22 nt, Human
acacugaauaauugagaguuga

SEQ ID NO: 433919 - RNA, 19 nt, Human
caggccucuggucugcugu

SEQ ID NO: 433920 - RNA, 22 nt, Human
uggccuggaaccuggcagggac

SEQ ID NO: 433921 - RNA, 21 nt, Human
aggugccaaggagaagcaggc

SEQ ID NO: 433922 - RNA, 22 nt, Human
gaggcuggucagcccuaagauc

SEQ ID NO: 433923 - RNA, 22 nt, Human
acccacagaaccugugacaaca

SEQ ID NO: 433924 - RNA, 22 nt, Human
ucacucagccugccugguuccu

SEQ ID NO: 433925 - RNA, 22 nt, Human
uaagagcagagguugaauaaau

SEQ ID NO: 433926 - RNA, 22 nt, Human
cagaguuuuauguaugcaugua

SEQ ID NO: 433927 - RNA, 22 nt, Human
uggccugguuauauugcuauca

SEQ ID NO: 433928 - RNA, 22 nt, Human
uuuuguuggcuuaagaaauaca

SEQ ID NO: 433929 - RNA, 20 nt, Human
cccaggagcugugccccauc

SEQ ID NO: 433930 - RNA, 20 nt, Human
ccuguuccauucccucaacc

SEQ ID NO: 433931 - RNA, 22 nt, Human
ugcaguuuugccaggcaaugga

SEQ ID NO: 433932 - RNA, 22 nt, Human
gcaguggauccaaugguaucuu

SEQ ID NO: 433933 - RNA, 22 nt, Human
cucucccccacagcagccuucu

SEQ ID NO: 433934 - RNA, 22 nt, Human
gcagcccucuuggucacuaggc

SEQ ID NO: 433935 - RNA, 22 nt, Human
ggagccugcgggagcucccauu

SEQ ID NO: 433936 - RNA, 21 nt, Human
ggguccugggaugggauccag

SEQ ID NO: 433937 - RNA, 22 nt, Human
uuuacugaacugcuaguacagg

SEQ ID NO: 433938 - RNA, 18 nt, Human
augggaggggccaagaga

SEQ ID NO: 433939 - RNA, 22 nt, Human
guggccuggaugagcuucgaca

SEQ ID NO: 433940 - RNA, 20 nt, Human
ugaaggcagguaagaaagau

SEQ ID NO: 433941 - RNA, 22 nt, Human
acaggcagauuaaggguaggca

SEQ ID NO: 433942 - RNA, 22 nt, Human
agcucccagggcugggcaaguu

SEQ ID NO: 433943 - RNA, 22 nt, Human
cauuuaaagguuguggguaaaa

SEQ ID NO: 433944 - RNA, 22 nt, Human
cggcagcugauugcagagcacc

SEQ ID NO: 433945 - RNA, 22 nt, Human
cugacucacuguggcucuuaau

SEQ ID NO: 433946 - RNA, 23 nt, Human
aagcugccagucugaagccuggg

SEQ ID NO: 433947 - RNA, 22 nt, Human
auuucagauucgagaggaagug

SEQ ID NO: 433948 - RNA, 22 nt, Human
ggcaaacaccaggcgagggagc

SEQ ID NO: 433949 - RNA, 22 nt, Human
ccagcuggcaggagagucaggg

SEQ ID NO: 433950 - RNA, 22 nt, Human
acugcagccuagggaccacagu

SEQ ID NO: 433951 - RNA, 22 nt, Human
cuggcccagucucagaguguca

SEQ ID NO: 433952 - RNA, 22 nt, Human
augauggagguguccuggauuu

SEQ ID NO: 433953 - RNA, 22 nt, Human
acagaguuguguuuguacaacg

SEQ ID NO: 433954 - RNA, 22 nt, Human
uaagauaaggaacauucuguga

SEQ ID NO: 433955 - RNA, 22 nt, Human
auggcuuggcaccaucuccuug

SEQ ID NO: 433956 - RNA, 22 nt, Human
agccuguccagaggacagggcu

SEQ ID NO: 433957 - RNA, 22 nt, Human
ucaggcugcuuucaugcuuaga

SEQ ID NO: 433958 - RNA, 22 nt, Human
gcagcuggcucugggaaaaacu

SEQ ID NO: 433959 - RNA, 22 nt, Human
aacagcuagaauucuacuggcu

SEQ ID NO: 433960 - RNA, 22 nt, Human
ucugggcugcuaugaggcagag

SEQ ID NO: 433961 - RNA, 22 nt, Human
gcagggaagaucuuggagcugc

SEQ ID NO: 433962 - RNA, 22 nt, Human
aggccagcuucuacccucuguu

SEQ ID NO: 433963 - RNA, 22 nt, Human
uauauugaccaguacaauuggu

SEQ ID NO: 433964 - RNA, 22 nt, Human
cugugggcauuugagugugggu

SEQ ID NO: 433965 - RNA, 22 nt, Human
gugccugggcaugagcuuguug

SEQ ID NO: 433966 - RNA, 18 nt, Human
ucugaauauuaugcagug

SEQ ID NO: 433967 - RNA, 22 nt, Human
gcacagggaggcuggccuggcc

SEQ ID NO: 433968 - RNA, 22 nt, Human
uaaggcaaacaggaaagcaggc

SEQ ID NO: 433969 - RNA, 22 nt, Human
guggcccucugauagggucagg

SEQ ID NO: 433970 - RNA, 22 nt, Human
acagcagauuucccugggcucc

SEQ ID NO: 433971 - RNA, 22 nt, Human
aggcaauacacagcauuucaca

SEQ ID NO: 433972 - RNA, 22 nt, Human
gggcuccaaaauccuguagccu

SEQ ID NO: 433973 - RNA, 22 nt, Human
agagcugcaccuaugcagaccu

SEQ ID NO: 433974 - RNA, 22 nt, Human
ccucacucugcacccugcagca

SEQ ID NO: 433975 - RNA, 22 nt, Human
ugguccauguccuccaucucuc

SEQ ID NO: 433976 - RNA, 22 nt, Human
cagcccugggucccugcccugg

SEQ ID NO: 433977 - RNA, 22 nt, Human
cuaaaugacagguaccauagug

SEQ ID NO: 433978 - RNA, 21 nt, Human
gcccucaggggaggauggccu

SEQ ID NO: 433979 - RNA, 22 nt, Human
ucauuuguggaagugauugugg

SEQ ID NO: 433980 - RNA, 22 nt, Human
cacaggcaccccugacugcuca

SEQ ID NO: 433981 - RNA, 22 nt, Human
cgggcagaucacacagggcuug

SEQ ID NO: 433982 - RNA, 22 nt, Human
cugcagaggguuugagcauccu

SEQ ID NO: 433983 - RNA, 22 nt, Human
gggagaaggagcuaguucuuga

SEQ ID NO: 433984 - RNA, 22 nt, Human
uuauaguuaugaaagacugagg

SEQ ID NO: 433985 - RNA, 22 nt, Human
auaaagcaauagauuguguaau

SEQ ID NO: 433986 - RNA, 21 nt, Human
aaaaggaaggucuguuugggg

SEQ ID NO: 433987 - RNA, 22 nt, Human
uuguuacagcagcaauagaaaa

SEQ ID NO: 433988 - RNA, 22 nt, Human
acaguuauucuuuaugcaacca

SEQ ID NO: 433989 - RNA, 22 nt, Human
aggaagggauacauaggauagu

SEQ ID NO: 433990 - RNA, 22 nt, Human
gaaggcagguuuuucaaaacug

SEQ ID NO: 433991 - RNA, 22 nt, Human
aaauguacugauacuuauuuua

SEQ ID NO: 433992 - RNA, 22 nt, Human
uauguacacauacacuuguaau

SEQ ID NO: 433993 - RNA, 22 nt, Human
aucuagaaaaggugacuaaaau

SEQ ID NO: 433994 - RNA, 22 nt, Human
gagcuaggcuagggggagucgc

SEQ ID NO: 433995 - RNA, 22 nt, Human
uauggcuugaguuucagacuau

SEQ ID NO: 433996 - RNA, 22 nt, Human
auccuugagaaaauaaaugacc

SEQ ID NO: 433997 - RNA, 22 nt, Human
gagcagaacuacucacauaucg

SEQ ID NO: 433998 - RNA, 23 nt, Human
acagugaaacacgcaguaagagu

SEQ ID NO: 433999 - RNA, 22 nt, Human
aagcuaagauuacagauuuggg

SEQ ID NO: 434000 - RNA, 19 nt, Human
cuccucagucccagagguc

SEQ ID NO: 434001 - RNA, 22 nt, Human
ugggaagcuacucaugcaggca

SEQ ID NO: 434002 - RNA, 22 nt, Human
cagcuaguacaaugggagagca

SEQ ID NO: 434003 - RNA, 22 nt, Human
cucccagaggugucauucgagc

SEQ ID NO: 434004 - RNA, 22 nt, Human
gucuggaaauuaagaggagguu

SEQ ID NO: 434005 - RNA, 22 nt, Human
ucucuuccaguaagagucuuua

SEQ ID NO: 434006 - RNA, 22 nt, Human
ucagaauuuugguuugguuggu

SEQ ID NO: 434007 - RNA, 20 nt, Human
gcagugcuggugccucugcu

SEQ ID NO: 434008 - RNA, 22 nt, Human
uguccagggggcuuaccuggag

SEQ ID NO: 434009 - RNA, 22 nt, Human
uauuaacauuuuaugaaaauaa

SEQ ID NO: 434010 - RNA, 22 nt, Human
uguggcccagaugagugugcua

SEQ ID NO: 434011 - RNA, 22 nt, Human
guaaggcaauaguaaggagucc

SEQ ID NO: 434012 - RNA, 22 nt, Human
uuccaauuuguggugaguuaau

SEQ ID NO: 434013 - RNA, 22 nt, Human
cuuugauauaaguauacauagu

SEQ ID NO: 434014 - RNA, 22 nt, Human
auuccaaacuuaccccagagga

SEQ ID NO: 434015 - RNA, 22 nt, Human
gaggggcugggcagucccugga

SEQ ID NO: 434016 - RNA, 22 nt, Human
cagaggauauaugguuuguaug

SEQ ID NO: 434017 - RNA, 22 nt, Human
ucccagagguugagucacuuau

SEQ ID NO: 434018 - RNA, 22 nt, Human
uucagcaacauuuguugagugc

SEQ ID NO: 434019 - RNA, 22 nt, Human
gcuccacuaggaaucugcucuu

SEQ ID NO: 434020 - RNA, 22 nt, Human
gaucugaauagacuugcuaagg

SEQ ID NO: 434021 - RNA, 22 nt, Human
acagcagagugugagauagcca

SEQ ID NO: 434022 - RNA, 22 nt, Human
ccagagaaccuugagcugugag

SEQ ID NO: 434023 - RNA, 22 nt, Human
gugcccugaguggguaggagag

SEQ ID NO: 434024 - RNA, 22 nt, Human
auucagaaacucugggcagaac

SEQ ID NO: 434025 - RNA, 22 nt, Human
cugccagcucaaagcgcagcua

SEQ ID NO: 434026 - RNA, 22 nt, Human
agggcuccaaggaaguguagcu

SEQ ID NO: 434027 - RNA, 22 nt, Human
aaauuagaaauacuuucaaagc

SEQ ID NO: 434028 - RNA, 22 nt, Human
uugagcaaugucacugaggcuu

SEQ ID NO: 434029 - RNA, 22 nt, Human
cagcaaagcaggcuccuagaac

SEQ ID NO: 434030 - RNA, 22 nt, Human
aggagcuggguuccuuuggugg

SEQ ID NO: 434031 - RNA, 22 nt, Human
ucagaggugguaaaggacagca

SEQ ID NO: 434032 - RNA, 22 nt, Human
gugucccacucuggaggugaag

SEQ ID NO: 434033 - RNA, 22 nt, Human
ugucccauggacacaacuucuu

SEQ ID NO: 434034 - RNA, 22 nt, Human
ccugucucccuggcauggcuca

SEQ ID NO: 434035 - RNA, 22 nt, Human
gccaggaaggcugaagccagaa

SEQ ID NO: 434036 - RNA, 22 nt, Human
uauggcaauugucuaaguuuua

SEQ ID NO: 434037 - RNA, 22 nt, Human
uggcccugcuuaugucucucuu

SEQ ID NO: 434038 - RNA, 22 nt, Human
cagcucaaguuucccaggucag

SEQ ID NO: 434039 - RNA, 23 nt, Human
gcugagguacauuuacaggaaga

SEQ ID NO: 434040 - RNA, 22 nt, Human
ugagccaggcucaagugauccu

SEQ ID NO: 434041 - RNA, 22 nt, Human
cuccuuccugcagaucugagau

SEQ ID NO: 434042 - RNA, 20 nt, Human
cugggcugcccagcuauggg

SEQ ID NO: 434043 - RNA, 22 nt, Human
cagcaggcguugggagaaagac

SEQ ID NO: 434044 - RNA, 22 nt, Human
acuggacagaggaaauauggag

SEQ ID NO: 434045 - RNA, 22 nt, Human
cugugccaguguauuccuguga

SEQ ID NO: 434046 - RNA, 22 nt, Human
gagcaacaguuuaugguuuuuc

SEQ ID NO: 434047 - RNA, 22 nt, Human
augacaaaggcugaaagggaaa

SEQ ID NO: 434048 - RNA, 23 nt, Human
aggcaauacaaggcaucucugga

SEQ ID NO: 434049 - RNA, 22 nt, Human
guguuaaaugcaaucacaugca

SEQ ID NO: 434050 - RNA, 22 nt, Human
ucaaguauuauuacagauguag

SEQ ID NO: 434051 - RNA, 19 nt, Human
gcaggcacagcccugggug

SEQ ID NO: 434052 - RNA, 22 nt, Human
cccagaggaggaucucggcccg

SEQ ID NO: 434053 - RNA, 22 nt, Human
ugucccucugaggcuucccugg

SEQ ID NO: 434054 - RNA, 22 nt, Human
aagagcuccaggcaaugcgguc

SEQ ID NO: 434055 - RNA, 22 nt, Human
ggagccuguggccgucacgacu

SEQ ID NO: 434056 - RNA, 20 nt, Human
acauagaucagugauugaca

SEQ ID NO: 434057 - RNA, 22 nt, Human
caacagagcaguugaucaggaa

SEQ ID NO: 434058 - RNA, 19 nt, Human
uggagaggaaaugcugcuc

SEQ ID NO: 434059 - RNA, 22 nt, Human
ucaauagauuagguauuagauu

SEQ ID NO: 434060 - RNA, 22 nt, Human
cagcaguagucucuguggcuuu

SEQ ID NO: 434061 - RNA, 22 nt, Human
aauaggaaaauauuuaacaaga

SEQ ID NO: 434062 - RNA, 22 nt, Human
cacacaaauauucuggaggcaa

SEQ ID NO: 434063 - RNA, 22 nt, Human
agagggcccauguugggcugcu

SEQ ID NO: 434064 - RNA, 22 nt, Human
ucauauuuauauguuggcacag

SEQ ID NO: 434065 - RNA, 20 nt, Human
cacugcccuccagccugagc

SEQ ID NO: 434066 - RNA, 22 nt, Human
cuggagccccaggcugugcaga

SEQ ID NO: 434067 - RNA, 21 nt, Human
aaugucauugaauggugagac

SEQ ID NO: 434068 - RNA, 22 nt, Human
gcugccaauccagcugugggag

SEQ ID NO: 434069 - RNA, 22 nt, Human
aggagccaaggaaaacaguauu

SEQ ID NO: 434070 - RNA, 22 nt, Human
gcagcuggauuucaagagggag

SEQ ID NO: 434071 - RNA, 23 nt, Human
ucugagggagugggcaguggcac

SEQ ID NO: 434072 - RNA, 22 nt, Human
aacaggcaggagaauucugccu

SEQ ID NO: 434073 - RNA, 22 nt, Human
cucucugggcccaguuggcacc

SEQ ID NO: 434074 - RNA, 22 nt, Human
uacuuugcuaaaaugugcagaa

SEQ ID NO: 434075 - RNA, 22 nt, Human
cuccaggacucaggccccuggg

SEQ ID NO: 434076 - RNA, 22 nt, Human
aagcacaggaucuugaggagcg

SEQ ID NO: 434077 - RNA, 22 nt, Human
cugaggcagaaaaagcaagggu

SEQ ID NO: 434078 - RNA, 22 nt, Human
aggccucuucagggagcaugga

SEQ ID NO: 434079 - RNA, 22 nt, Human
ggagucccuguccccauacgag

SEQ ID NO: 434080 - RNA, 22 nt, Human
gauuuuacaaacugcaggaccc

SEQ ID NO: 434081 - RNA, 22 nt, Human
cagaagcagauucuaaagcaag

SEQ ID NO: 434082 - RNA, 22 nt, Human
guucacaauuuuuacugauugg

SEQ ID NO: 434083 - RNA, 16 nt, Human
guaaaggcagggaauu

SEQ ID NO: 434084 - RNA, 22 nt, Human
ucccuguccugggcaaucccag

SEQ ID NO: 434085 - RNA, 22 nt, Human
uugugagcauguuuacuugauu

SEQ ID NO: 434086 - RNA, 22 nt, Human
auuagaaugacagaaaugaggc

SEQ ID NO: 434087 - RNA, 22 nt, Human
ccagagggaacugggccucauu

SEQ ID NO: 434088 - RNA, 22 nt, Human
acagcagagccaguggcucuag

SEQ ID NO: 434089 - RNA, 22 nt, Human
cagcucucuaaggucuugcuuu

SEQ ID NO: 434090 - RNA, 22 nt, Human
cuuuuuccagcuucaggguggg

SEQ ID NO: 434091 - RNA, 22 nt, Human
ugauuuuauuggugaggaaauu

SEQ ID NO: 434092 - RNA, 17 nt, Human
ccacagccuggcacuug

SEQ ID NO: 434093 - RNA, 22 nt, Human
cuccauggcuuucgcaucugca

SEQ ID NO: 434094 - RNA, 22 nt, Human
gaaacacauaugaacaguugau

SEQ ID NO: 434095 - RNA, 22 nt, Human
ugaagacagaccaaggagaaug

SEQ ID NO: 434096 - RNA, 22 nt, Human
cgcagcuggauaucaugugccu

SEQ ID NO: 434097 - RNA, 22 nt, Human
aaagacuuucaccuagcaaaga

SEQ ID NO: 434098 - RNA, 22 nt, Human
cuuauugugagguauugagauu

SEQ ID NO: 434099 - RNA, 22 nt, Human
aagagcuggaguuugcagcccu

SEQ ID NO: 434100 - RNA, 22 nt, Human
gaacagugccagcacacaauaa

SEQ ID NO: 434101 - RNA, 22 nt, Human
gagacacaaucucauuuacauu

SEQ ID NO: 434102 - RNA, 22 nt, Human
ggagaaugauauauagcucagu

SEQ ID NO: 434103 - RNA, 22 nt, Human
acaugcagacgggauccuggca

SEQ ID NO: 434104 - RNA, 22 nt, Human
agcagcaggcuagggaacugcu

SEQ ID NO: 434105 - RNA, 22 nt, Human
ccaggccucuggcugcuuaguc

SEQ ID NO: 434106 - RNA, 22 nt, Human
uugggcagauguuuccugugga

SEQ ID NO: 434107 - RNA, 22 nt, Human
ucaggaggcggugcugccuuug

SEQ ID NO: 434108 - RNA, 22 nt, Human
ucccagcagcauagcucagaau

SEQ ID NO: 434109 - RNA, 22 nt, Human
ugguacaagaguauuugcgguu

SEQ ID NO: 434110 - RNA, 22 nt, Human
acagaaaugauguuuggcaaua

SEQ ID NO: 434111 - RNA, 22 nt, Human
acaggaaguuuggaaagccuca

SEQ ID NO: 434112 - RNA, 22 nt, Human
ugaauagauggugacaguauga

SEQ ID NO: 434113 - RNA, 22 nt, Human
uucucagguagugcugaugcug

SEQ ID NO: 434114 - RNA, 22 nt, Human
cagaggaguucaguacacagcc

SEQ ID NO: 434115 - RNA, 22 nt, Human
gagcucagggcauugagcaaga

SEQ ID NO: 434116 - RNA, 22 nt, Human
gcagcaggagaguuuguccugc

SEQ ID NO: 434117 - RNA, 22 nt, Human
aagcccuguuaggcacugggga

SEQ ID NO: 434118 - RNA, 22 nt, Human
cacaaggacuggauggaguggg

SEQ ID NO: 434119 - RNA, 22 nt, Human
gcuaaggcucagguucuaagga

SEQ ID NO: 434120 - RNA, 22 nt, Human
cuguuucaccacuggcucuuug

SEQ ID NO: 434121 - RNA, 22 nt, Human
ugcccagccccuaucccuggga

SEQ ID NO: 434122 - RNA, 19 nt, Human
uucaaguaaacuauuauua

SEQ ID NO: 434123 - RNA, 22 nt, Human
cagaggcugccagccaugugca

SEQ ID NO: 434124 - RNA, 21 nt, Human
uugauuuuaggaaguuuguca

SEQ ID NO: 434125 - RNA, 22 nt, Human
acacccagagcgccagugccga

SEQ ID NO: 434126 - RNA, 18 nt, Human
ucucaaaaauaauggcuu

SEQ ID NO: 434127 - RNA, 22 nt, Human
cagcacuaauccugcaauuucu

SEQ ID NO: 434128 - RNA, 22 nt, Human
auacacuguucacuagaucuuc

SEQ ID NO: 434129 - RNA, 20 nt, Human
aacacaggguuaccaucaga

SEQ ID NO: 434130 - RNA, 21 nt, Human
aaguagaucacuguucucuug

SEQ ID NO: 434131 - RNA, 17 nt, Human
cuggucccaccaagccc

SEQ ID NO: 434132 - RNA, 22 nt, Human
gccuucugauugcuggacugac

SEQ ID NO: 434133 - RNA, 18 nt, Human
cugccccuucucugagau

SEQ ID NO: 434134 - RNA, 23 nt, Human
ugacacaggucaaaaauaagaug

SEQ ID NO: 434135 - RNA, 22 nt, Human
cacaggaacaaagaagacaauu

SEQ ID NO: 434136 - RNA, 22 nt, Human
aaugaagaaauggacaucuuua

SEQ ID NO: 434137 - RNA, 22 nt, Human
aauaugcaaagcguguuaucug

SEQ ID NO: 434138 - RNA, 19 nt, Human
aggagccuugagcagugag

SEQ ID NO: 434139 - RNA, 22 nt, Human
augguggauuugugauucagcu

SEQ ID NO: 434140 - RNA, 22 nt, Human
cugaggccuguguuggggcagu

SEQ ID NO: 434141 - RNA, 22 nt, Human
aaugauaccaaacauguagaua

SEQ ID NO: 434142 - RNA, 22 nt, Human
ccaggcucugucuggucagaag

SEQ ID NO: 434143 - RNA, 22 nt, Human
auuauuguugcggcuguuaccg

SEQ ID NO: 434144 - RNA, 22 nt, Human
caggccucagagaguggcgggg

SEQ ID NO: 434145 - RNA, 22 nt, Human
agcagcuggcagcuucuucucu

SEQ ID NO: 434146 - RNA, 19 nt, Human
cuggccuguguccugugcu

SEQ ID NO: 434147 - RNA, 22 nt, Human
accugccuucucaaggacauga

SEQ ID NO: 434148 - RNA, 22 nt, Human
caucucugguucagucucugug

SEQ ID NO: 434149 - RNA, 22 nt, Human
gggugggccugucuggccaugu

SEQ ID NO: 434150 - RNA, 22 nt, Human
ugaaggugucuuugugaacauc

SEQ ID NO: 434151 - RNA, 22 nt, Human
gaggccaggggucagcaauugg

SEQ ID NO: 434152 - RNA, 20 nt, Human
aauugcccauccuccuagcc

SEQ ID NO: 434153 - RNA, 22 nt, Human
aggagggagaugcccauccugg

SEQ ID NO: 434154 - RNA, 22 nt, Human
gcacugaaugcuuuuacuguaa

SEQ ID NO: 434155 - RNA, 22 nt, Human
acagcagcaauagcagugacau

SEQ ID NO: 434156 - RNA, 22 nt, Human
caggccucuccuuagucuggca

SEQ ID NO: 434157 - RNA, 22 nt, Human
ucacaaugaaaaacacuacaua

SEQ ID NO: 434158 - RNA, 22 nt, Human
gguccguuuuugaagacagugg

SEQ ID NO: 434159 - RNA, 22 nt, Human
cuggcagcauggagccugugcu

SEQ ID NO: 434160 - RNA, 19 nt, Human
ugcucaguggcuaaaagca

SEQ ID NO: 434161 - RNA, 22 nt, Human
ccagcuucucucugaugcagcu

SEQ ID NO: 434162 - RNA, 22 nt, Human
uacacaaugacuuaagauguca

SEQ ID NO: 434163 - RNA, 22 nt, Human
cugacucagcagcugaugaucc

SEQ ID NO: 434164 - RNA, 22 nt, Human
aaacagaguuugguaaauagcc

SEQ ID NO: 434165 - RNA, 22 nt, Human
acaguucuguccuagacuucgu

SEQ ID NO: 434166 - RNA, 22 nt, Human
cuagagaagagguuaagcauga

SEQ ID NO: 434167 - RNA, 22 nt, Human
gaaaagagaacaucugaggauc

SEQ ID NO: 434168 - RNA, 21 nt, Human
guugaauauccauguaugugu

SEQ ID NO: 434169 - RNA, 22 nt, Human
agcaagauugaggcuuccucag

SEQ ID NO: 434170 - RNA, 22 nt, Human
cugcugcucuugugcauuagug

SEQ ID NO: 434171 - RNA, 22 nt, Human
ucagacuugacuuuguaaguuu

SEQ ID NO: 434172 - RNA, 22 nt, Human
auccaacaggacaaagaaagga

SEQ ID NO: 434173 - RNA, 22 nt, Human
ugcaggcucucugcugccagau

SEQ ID NO: 434174 - RNA, 22 nt, Human
cagcugaguuacucugaggucu

SEQ ID NO: 434175 - RNA, 22 nt, Human
ucagagcuuaucucuugcugga

SEQ ID NO: 434176 - RNA, 22 nt, Human
ggccccagggauuaggccaacc

SEQ ID NO: 434177 - RNA, 20 nt, Human
gcccaagguccagaaggggg

SEQ ID NO: 434178 - RNA, 22 nt, Human
ucagaggucacacagcaaguuu

SEQ ID NO: 434179 - RNA, 22 nt, Human
aacagcagggaugacauggcca

SEQ ID NO: 434180 - RNA, 22 nt, Human
gccugggagagggauagugcag

SEQ ID NO: 434181 - RNA, 22 nt, Human
gggcucuggauggagccugcag

SEQ ID NO: 434182 - RNA, 22 nt, Human
gcaggccagcugugcagauggg

SEQ ID NO: 434183 - RNA, 22 nt, Human
caggcagcugacugucagauau

SEQ ID NO: 434184 - RNA, 22 nt, Human
ggcagcaggagccaucugguag

SEQ ID NO: 434185 - RNA, 21 nt, Human
gagccuucccucugcccuuuc

SEQ ID NO: 434186 - RNA, 22 nt, Human
caugccuguauuucugaucuau

SEQ ID NO: 434187 - RNA, 22 nt, Human
cccacaguuaaccaaaggaauu

SEQ ID NO: 434188 - RNA, 22 nt, Human
aaauucaguuccucagccacau

SEQ ID NO: 434189 - RNA, 22 nt, Human
uuugcaaauuagccacccuguu

SEQ ID NO: 434190 - RNA, 22 nt, Human
gccagcagggaagccuugggcu

SEQ ID NO: 434191 - RNA, 22 nt, Human
ucccagagauuuccucuccuuc

SEQ ID NO: 434192 - RNA, 22 nt, Human
ccaggcugggcuacaaguugag

SEQ ID NO: 434193 - RNA, 22 nt, Human
acacuaauuaagcugcuuuacu

SEQ ID NO: 434194 - RNA, 22 nt, Human
ggagccugggccuccugcccuu

SEQ ID NO: 434195 - RNA, 22 nt, Human
ugcacacaaaugugaacgugcc

SEQ ID NO: 434196 - RNA, 22 nt, Human
ugaucaaaacauuacuccacca

SEQ ID NO: 434197 - RNA, 22 nt, Human
uguacaaagguacuuugauguu

SEQ ID NO: 434198 - RNA, 22 nt, Human
ucaggccccuugucagcucugu

SEQ ID NO: 434199 - RNA, 22 nt, Human
uggcuccuuuccgggucuccag

SEQ ID NO: 434200 - RNA, 20 nt, Human
caacagaggggucuggagua

SEQ ID NO: 434201 - RNA, 22 nt, Human
uuauggaauaaccuuucugaaa

SEQ ID NO: 434202 - RNA, 22 nt, Human
gcugagcugcuguucauccugc

SEQ ID NO: 434203 - RNA, 22 nt, Human
auucaaguccagcuucucuaca

SEQ ID NO: 434204 - RNA, 19 nt, Human
ucucagagcccuagaggcc

SEQ ID NO: 434205 - RNA, 22 nt, Human
uugcagcugugagcuuuacacg

SEQ ID NO: 434206 - RNA, 22 nt, Human
aggccagguuccucaaucuuga

SEQ ID NO: 434207 - RNA, 23 nt, Human
ggccucuguguucugcccacaug

SEQ ID NO: 434208 - RNA, 22 nt, Human
gcucccaggaugaggagccagg

SEQ ID NO: 434209 - RNA, 22 nt, Human
cagggguggcugcagcagaggu

SEQ ID NO: 434210 - RNA, 22 nt, Human
aaguuuuucacauugcuguugu

SEQ ID NO: 434211 - RNA, 22 nt, Human
gccuggaguuguggugaagcca

SEQ ID NO: 434212 - RNA, 22 nt, Human
cuguguccucccgcugcaccca

SEQ ID NO: 434213 - RNA, 22 nt, Human
gaucaaggcaguagggccagcu

SEQ ID NO: 434214 - RNA, 22 nt, Human
ucugggcacugcugagccugua

SEQ ID NO: 434215 - RNA, 21 nt, Human
acacaacaggcagucauuuuc

SEQ ID NO: 434216 - RNA, 22 nt, Human
ucaaacuguuagauuucagcuc

SEQ ID NO: 434217 - RNA, 22 nt, Human
gcccuucauuuauaguuggaau

SEQ ID NO: 434218 - RNA, 22 nt, Human
agcagggcucuguggagggugg

SEQ ID NO: 434219 - RNA, 22 nt, Human
ucugagaagcgugucucuguuu

SEQ ID NO: 434220 - RNA, 22 nt, Human
aaauguacaacauccauauaua

SEQ ID NO: 434221 - RNA, 18 nt, Human
aggcuucuuggcucaguc

SEQ ID NO: 434222 - RNA, 22 nt, Human
auucuacaccucucucauuuag

SEQ ID NO: 434223 - RNA, 22 nt, Human
uccccaggggcaucucucugcu

SEQ ID NO: 434224 - RNA, 21 nt, Human
augaagcaagggucacacgug

SEQ ID NO: 434225 - RNA, 22 nt, Human
cugcagagaauuguggggcuuc

SEQ ID NO: 434226 - RNA, 22 nt, Human
agagcacugcugauuuacaguc

SEQ ID NO: 434227 - RNA, 23 nt, Human
cugcauugucuccugggagcaug

SEQ ID NO: 434228 - RNA, 22 nt, Human
aagcagagaaaagcuuagguuc

SEQ ID NO: 434229 - RNA, 22 nt, Human
gccuuccuuacaccugcucagc

SEQ ID NO: 434230 - RNA, 22 nt, Human
gggcuccaacuacaucagccuu

SEQ ID NO: 434231 - RNA, 22 nt, Human
cagagcugggaucccaugggcg

SEQ ID NO: 434232 - RNA, 22 nt, Human
ggaugaggaaaccacagugucc

SEQ ID NO: 434233 - RNA, 22 nt, Human
uucaacauuuuugaguuuaggu

SEQ ID NO: 434234 - RNA, 22 nt, Human
caggcccuggcagggcugaguc

SEQ ID NO: 434235 - RNA, 22 nt, Human
acacuuuaucaauauucaaaaa

SEQ ID NO: 434236 - RNA, 22 nt, Human
uuacagcagcagggacagacua

SEQ ID NO: 434237 - RNA, 22 nt, Human
gaacauucacagacucaccauu

SEQ ID NO: 434238 - RNA, 22 nt, Human
ucaugcagaguagaaagggcaa

SEQ ID NO: 434239 - RNA, 22 nt, Human
gacagcaacacucaauucugca

SEQ ID NO: 434240 - RNA, 22 nt, Human
uuucagagcucuaggcucucag

SEQ ID NO: 434241 - RNA, 22 nt, Human
ugacagagcugggauuugaagc

SEQ ID NO: 434242 - RNA, 22 nt, Human
cagggcacuuaaauugccucgu

SEQ ID NO: 434243 - RNA, 22 nt, Human
gcucccucugcucaggcacuug

SEQ ID NO: 434244 - RNA, 22 nt, Human
gaugauuuaaguggccaaagua

SEQ ID NO: 434245 - RNA, 22 nt, Human
gcucuugacucccaguucugug

SEQ ID NO: 434246 - RNA, 20 nt, Human
agcauuugaaauaugacuau

SEQ ID NO: 434247 - RNA, 22 nt, Human
ccuccuggcccugggccuggaa

SEQ ID NO: 434248 - RNA, 22 nt, Human
cagccugcccuggaagcccagc

SEQ ID NO: 434249 - RNA, 22 nt, Human
cagcagaguauggcacucaacu

SEQ ID NO: 434250 - RNA, 22 nt, Human
cugggagggguagccaauccua

SEQ ID NO: 434251 - RNA, 21 nt, Human
uaaagcucguucaggaaaguc

SEQ ID NO: 434252 - RNA, 22 nt, Human
uggcagcuggcucugcgcaggc

SEQ ID NO: 434253 - RNA, 22 nt, Human
auuuggcaacauuaauugaauc

SEQ ID NO: 434254 - RNA, 22 nt, Human
agaaggcauagaccggauuaug

SEQ ID NO: 434255 - RNA, 22 nt, Human
ggagcuguugcgcaugcgcucg

SEQ ID NO: 434256 - RNA, 22 nt, Human
aaguauucauaaggacauaugu

SEQ ID NO: 434257 - RNA, 22 nt, Human
cacugugucaguuugguuagac

SEQ ID NO: 434258 - RNA, 22 nt, Human
caggcaggugcagauuccucuu

SEQ ID NO: 434259 - RNA, 19 nt, Human
aggucuaaucauaagacaa

SEQ ID NO: 434260 - RNA, 22 nt, Human
aaggaggaauuucagggugaau

SEQ ID NO: 434261 - RNA, 22 nt, Human
uaggguccugccuacagagaca

SEQ ID NO: 434262 - RNA, 22 nt, Human
gacugcauucauuugguuggca

SEQ ID NO: 434263 - RNA, 22 nt, Human
gagggcagagacagugauucac

SEQ ID NO: 434264 - RNA, 19 nt, Human
acccauuuucaguauuggc

SEQ ID NO: 434265 - RNA, 22 nt, Human
uuacuauaguccagcccuuuuu

SEQ ID NO: 434266 - RNA, 22 nt, Human
ugucacauaggcaaaauguuuu

SEQ ID NO: 434267 - RNA, 22 nt, Human
aaauaacuuucuguguauaguc

SEQ ID NO: 434268 - RNA, 18 nt, Human
ggagccagucugucucug

SEQ ID NO: 434269 - RNA, 22 nt, Human
aacacaaagaagcugcaggauc

SEQ ID NO: 434270 - RNA, 22 nt, Human
accaucuuagcagacugcagug

SEQ ID NO: 434271 - RNA, 22 nt, Human
ucugagaagcgggagccuguga

SEQ ID NO: 434272 - RNA, 22 nt, Human
augugcucuuauuacccugucg

SEQ ID NO: 434273 - RNA, 22 nt, Human
uccaguuuccaaucacugcacg

SEQ ID NO: 434274 - RNA, 22 nt, Human
cucugggaugaggccuaggcac

SEQ ID NO: 434275 - RNA, 22 nt, Human
gagggaagaaagaauugaugcg

SEQ ID NO: 434276 - RNA, 22 nt, Human
guggccucugugcuccugccua

SEQ ID NO: 434277 - RNA, 22 nt, Human
aaguauucuacaaagaaauuga

SEQ ID NO: 434278 - RNA, 22 nt, Human
aaguagaugaucuuucugcaua

SEQ ID NO: 434279 - RNA, 22 nt, Human
cccauucuucaugguuuccugu

SEQ ID NO: 434280 - RNA, 22 nt, Human
cagugaggaguccagggcagag

SEQ ID NO: 434281 - RNA, 22 nt, Human
ucagcaguggguccugagggug

SEQ ID NO: 434282 - RNA, 22 nt, Human
uuaauacaacuguugucacugg

SEQ ID NO: 434283 - RNA, 22 nt, Human
agcagcuugagcuggggcuggc

SEQ ID NO: 434284 - RNA, 22 nt, Human
ugcagaagaauguaggcauaag

SEQ ID NO: 434285 - RNA, 22 nt, Human
cacccaggacaggccagaugug

SEQ ID NO: 434286 - RNA, 22 nt, Human
ccucuccccucccaaggcggga

SEQ ID NO: 434287 - RNA, 20 nt, Human
ucagccuucucauccugggg

SEQ ID NO: 434288 - RNA, 22 nt, Human
ggaacacaaaugggagagcugg

SEQ ID NO: 434289 - RNA, 22 nt, Human
ugagggauccagaggcaguggu

SEQ ID NO: 434290 - RNA, 22 nt, Human
gcaggcugggguagccccacuu

SEQ ID NO: 434291 - RNA, 22 nt, Human
gcagagcauguccucaggacag

SEQ ID NO: 434292 - RNA, 22 nt, Human
auuuggaaaagcgguaacuugc

SEQ ID NO: 434293 - RNA, 22 nt, Human
cugagcagcacagggcgccagg

SEQ ID NO: 434294 - RNA, 22 nt, Human
gcagcuguguaaugagcccaca

SEQ ID NO: 434295 - RNA, 22 nt, Human
ggcacagggugauguugcaguu

SEQ ID NO: 434296 - RNA, 22 nt, Human
cagguucccuugcagcuaagug

SEQ ID NO: 434297 - RNA, 22 nt, Human
agcacuuaaguuaauugaacug

SEQ ID NO: 434298 - RNA, 19 nt, Human
gccaggccuggaccugcag

SEQ ID NO: 434299 - RNA, 22 nt, Human
ccugucaggguuugccucagaa

SEQ ID NO: 434300 - RNA, 22 nt, Human
ccugggaggcggagguugcagu

SEQ ID NO: 434301 - RNA, 22 nt, Human
aagcacaguucuuagaguuaca

SEQ ID NO: 434302 - RNA, 22 nt, Human
uucacagugguagugcauuuag

SEQ ID NO: 434303 - RNA, 22 nt, Human
cucugcagaggcccaaggcuga

SEQ ID NO: 434304 - RNA, 22 nt, Human
agaauaaaucaaauguccugag

SEQ ID NO: 434305 - RNA, 22 nt, Human
gcugccugccuugccuggagga

SEQ ID NO: 434306 - RNA, 22 nt, Human
ugccuguggaaaggcuggugcu

SEQ ID NO: 434307 - RNA, 22 nt, Human
ccuggguuauuuuggucuagug

SEQ ID NO: 434308 - RNA, 22 nt, Human
ggaggcccagaaggaagcccag

SEQ ID NO: 434309 - RNA, 20 nt, Human
cagcuagugguaggagucgg

SEQ ID NO: 434310 - RNA, 22 nt, Human
agcaaagaagacacaggcuuca

SEQ ID NO: 434311 - RNA, 22 nt, Human
gcucuugaauauggguuucaug

SEQ ID NO: 434312 - RNA, 20 nt, Human
ugguccugucccacccacuc

SEQ ID NO: 434313 - RNA, 22 nt, Human
auucucuagucucuuccauaaa

SEQ ID NO: 434314 - RNA, 19 nt, Human
cagcccucuuaccacugug

SEQ ID NO: 434315 - RNA, 22 nt, Human
gcagcugucagaaguuggaauc

SEQ ID NO: 434316 - RNA, 22 nt, Human
agggcuggaggguacuaguuua

SEQ ID NO: 434317 - RNA, 22 nt, Human
gcuguuuccccuucacaguggc

SEQ ID NO: 434318 - RNA, 22 nt, Human
auugacaauucuaugcagagca

SEQ ID NO: 434319 - RNA, 16 nt, Human
aacccacagcucccga

SEQ ID NO: 434320 - RNA, 22 nt, Human
aaguuccugagcucauauagca

SEQ ID NO: 434321 - RNA, 22 nt, Human
acauguuagaaaugcagaaucu

SEQ ID NO: 434322 - RNA, 22 nt, Human
aaggcuaaguaaggcucuuucu

SEQ ID NO: 434323 - RNA, 22 nt, Human
ggcagucuuaucagcauuggac

SEQ ID NO: 434324 - RNA, 22 nt, Human
ucccagagaagagcuggaugga

SEQ ID NO: 434325 - RNA, 22 nt, Human
auuuuucaacuuuggaaauggc

SEQ ID NO: 434326 - RNA, 22 nt, Human
caggaaagaaaugagaacacca

SEQ ID NO: 434327 - RNA, 22 nt, Human
acagaagcucaagagagcagug

SEQ ID NO: 434328 - RNA, 22 nt, Human
aacaugcaaugucugaaaaucc

SEQ ID NO: 434329 - RNA, 22 nt, Human
agcagcuguuuguugaauuggu

SEQ ID NO: 434330 - RNA, 22 nt, Human
aagcccagcugaaagcauuuuu

SEQ ID NO: 434331 - RNA, 22 nt, Human
uuaucacuuaugagcuuuuugc

SEQ ID NO: 434332 - RNA, 22 nt, Human
ugcccuggggagcccagccagg

SEQ ID NO: 434333 - RNA, 22 nt, Human
acaggcuguugggguccagggu

SEQ ID NO: 434334 - RNA, 22 nt, Human
uccaggccaauguagcaggccc

SEQ ID NO: 434335 - RNA, 22 nt, Human
agagccuggucugagauaggac

SEQ ID NO: 434336 - RNA, 22 nt, Human
caggcagaugcugacaagaguu

SEQ ID NO: 434337 - RNA, 22 nt, Human
ggcucaguaagucagguucauu

SEQ ID NO: 434338 - RNA, 22 nt, Human
auacaaaaauuagccgggagua

SEQ ID NO: 434339 - RNA, 22 nt, Human
uucuaaguguugacaaagucua

SEQ ID NO: 434340 - RNA, 22 nt, Human
gucaugccagcggagcucggga

SEQ ID NO: 434341 - RNA, 22 nt, Human
auuuaacaagacagagaacugg

SEQ ID NO: 434342 - RNA, 22 nt, Human
cagagcuggagggaacccuggc

SEQ ID NO: 434343 - RNA, 22 nt, Human
cacauuuaauccuuuauaagua

SEQ ID NO: 434344 - RNA, 22 nt, Human
aacagcagggggaccugcuggu

SEQ ID NO: 434345 - RNA, 22 nt, Human
aagcugcccucauucccagugc

SEQ ID NO: 434346 - RNA, 22 nt, Human
ugaugaggcuucuuggugaaca

SEQ ID NO: 434347 - RNA, 22 nt, Human
cuucaaauucgaggaguagaug

SEQ ID NO: 434348 - RNA, 22 nt, Human
uaauaguuucauaaugugcuuc

SEQ ID NO: 434349 - RNA, 22 nt, Human
ggcaggguggcagaggcucaga

SEQ ID NO: 434350 - RNA, 22 nt, Human
accugccuaguugguucugccc

SEQ ID NO: 434351 - RNA, 22 nt, Human
ucugggcuugguuagggcuguu

SEQ ID NO: 434352 - RNA, 22 nt, Human
uucuauaagacucauauuucuu

SEQ ID NO: 434353 - RNA, 22 nt, Human
acagaugaugugcacagauaga

SEQ ID NO: 434354 - RNA, 22 nt, Human
uucacauggcaauagagaggga

SEQ ID NO: 434355 - RNA, 22 nt, Human
ggacacagccacuuaggguacc

SEQ ID NO: 434356 - RNA, 22 nt, Human
cagugcugcaucuccaugccag

SEQ ID NO: 434357 - RNA, 21 nt, Human
cucugcugucuaccagcuguu

SEQ ID NO: 434358 - RNA, 22 nt, Human
cacaggcucuccagggccugga

SEQ ID NO: 434359 - RNA, 23 nt, Human
aaaguugauuugcaguuuaagag

SEQ ID NO: 434360 - RNA, 22 nt, Human
gucuuuaugguaugaaaacuga

SEQ ID NO: 434361 - RNA, 22 nt, Human
gcccagaguucaaggcugcagu

SEQ ID NO: 434362 - RNA, 22 nt, Human
ggccagguaagagugcagccgc

SEQ ID NO: 434363 - RNA, 22 nt, Human
augugugugugcgcgcgcagga

SEQ ID NO: 434364 - RNA, 22 nt, Human
uugagcaagccugcggcgggaa

SEQ ID NO: 434365 - RNA, 22 nt, Human
agcagcugaaaggcaaacuucu

SEQ ID NO: 434366 - RNA, 22 nt, Human
caggcagaagaaguggaaggac

SEQ ID NO: 434367 - RNA, 22 nt, Human
uacuaaaugauuaagcaggaau

SEQ ID NO: 434368 - RNA, 22 nt, Human
uuagaaaucaccucugaagauc

SEQ ID NO: 434369 - RNA, 22 nt, Human
uauuggauuucugaaagaugag

SEQ ID NO: 434370 - RNA, 22 nt, Human
ucauuugugugagugauuugac

SEQ ID NO: 434371 - RNA, 22 nt, Human
auucagacucuugagcaguccc

SEQ ID NO: 434372 - RNA, 23 nt, Human
ucauucaaggcugguaucuuuca

SEQ ID NO: 434373 - RNA, 22 nt, Human
gugccuggagcuaauguguaua

SEQ ID NO: 434374 - RNA, 21 nt, Human
acagaguaguugaaacagaga

SEQ ID NO: 434375 - RNA, 22 nt, Human
uuuggaaagugugauuucaagg

SEQ ID NO: 434376 - RNA, 22 nt, Human
uuugacaaaggaaaaaugcaca

SEQ ID NO: 434377 - RNA, 22 nt, Human
ccugggugaugugcugcccucg

SEQ ID NO: 434378 - RNA, 22 nt, Human
gcaggcugaugacuggaguugg

SEQ ID NO: 434379 - RNA, 22 nt, Human
gcugucagugaggugagacaug

SEQ ID NO: 434380 - RNA, 22 nt, Human
gcugccucugcgacucugggcg

SEQ ID NO: 434381 - RNA, 22 nt, Human
ggcauccuccauauaggugaau

SEQ ID NO: 434382 - RNA, 22 nt, Human
gcagcugccccgacugugaguc

SEQ ID NO: 434383 - RNA, 23 nt, Human
acccaucucuccugucaugcaga

SEQ ID NO: 434384 - RNA, 22 nt, Human
cugugccaggcccagcugacuu

SEQ ID NO: 434385 - RNA, 20 nt, Human
agguuccuuuguggagaauu

SEQ ID NO: 434386 - RNA, 22 nt, Human
uuaaagcccagcauauacuagg

SEQ ID NO: 434387 - RNA, 22 nt, Human
cgcagaagagguugucuagucc

SEQ ID NO: 434388 - RNA, 22 nt, Human
agcccuccaaagguugggggag

SEQ ID NO: 434389 - RNA, 22 nt, Human
ggcuagggagacagagggcaug

SEQ ID NO: 434390 - RNA, 22 nt, Human
cucuccuugaggcuuggacuuc

SEQ ID NO: 434391 - RNA, 21 nt, Human
uuucuaaggaggaagaaaaga

SEQ ID NO: 434392 - RNA, 22 nt, Human
cccagccaaggugcugguguug

SEQ ID NO: 434393 - RNA, 20 nt, Human
cacugccagaauacacuguc

SEQ ID NO: 434394 - RNA, 22 nt, Human
gcucucugccuuucucaaugac

SEQ ID NO: 434395 - RNA, 21 nt, Human
gguuaaaagacacaucuguuu

SEQ ID NO: 434396 - RNA, 22 nt, Human
ccagcccugucaccaacuggag

SEQ ID NO: 434397 - RNA, 22 nt, Human
gagaaggcugauccuuggaguu

SEQ ID NO: 434398 - RNA, 22 nt, Human
aaaaggaggucacuuuauuccu

SEQ ID NO: 434399 - RNA, 22 nt, Human
cacagaggaugcccaagcgauc

SEQ ID NO: 434400 - RNA, 22 nt, Human
uguggcugacuccuggucccca

SEQ ID NO: 434401 - RNA, 22 nt, Human
guccuugcuugagacaggcagu

SEQ ID NO: 434402 - RNA, 22 nt, Human
agggaauggaugauggcagguu

SEQ ID NO: 434403 - RNA, 22 nt, Human
ucuuugcacacaucccuucccg

SEQ ID NO: 434404 - RNA, 20 nt, Human
gcagcugcccccagucccug

SEQ ID NO: 434405 - RNA, 22 nt, Human
gccuggagaggaagccggugga

SEQ ID NO: 434406 - RNA, 21 nt, Human
augacagaugcugcagaucgu

SEQ ID NO: 434407 - RNA, 22 nt, Human
uccugcagccacugcaggcaga

SEQ ID NO: 434408 - RNA, 22 nt, Human
gcuccagggaacagaauguacu

SEQ ID NO: 434409 - RNA, 20 nt, Human
aaggcagaguggguuggagc

SEQ ID NO: 434410 - RNA, 22 nt, Human
aaauugccaaauuguuuuccag

SEQ ID NO: 434411 - RNA, 22 nt, Human
agagccugggcagcuccucugg

SEQ ID NO: 434412 - RNA, 22 nt, Human
gcccuaucauucauugagugcu

SEQ ID NO: 434413 - RNA, 22 nt, Human
aagauucagccaaauuguucau

SEQ ID NO: 434414 - RNA, 22 nt, Human
uuucaaauaccauaaaccuaau

SEQ ID NO: 434415 - RNA, 18 nt, Human
aggccagcccugcuacug

SEQ ID NO: 434416 - RNA, 22 nt, Human
uccugagggcugcagucauagg

SEQ ID NO: 434417 - RNA, 22 nt, Human
acacagagcaaaucaugacaga

SEQ ID NO: 434418 - RNA, 22 nt, Human
acaguacuguguuaacugaacc

SEQ ID NO: 434419 - RNA, 21 nt, Human
ggugggcacaggagagcagag

SEQ ID NO: 434420 - RNA, 18 nt, Human
gagagcccagcagguggu

SEQ ID NO: 434421 - RNA, 22 nt, Human
ugcccacauucaaaaggugaug

SEQ ID NO: 434422 - RNA, 22 nt, Human
uccugggcuugcuccuccagcu

SEQ ID NO: 434423 - RNA, 22 nt, Human
cagagcugggcauggugaaagg

SEQ ID NO: 434424 - RNA, 22 nt, Human
ccugcagacacuuguccagcaa

SEQ ID NO: 434425 - RNA, 22 nt, Human
gagcauaggacacagaggugug

SEQ ID NO: 434426 - RNA, 22 nt, Human
ccugccugacagagaagguuca

SEQ ID NO: 434427 - RNA, 22 nt, Human
ucugggugacccugggcaaggc

SEQ ID NO: 434428 - RNA, 22 nt, Human
ggcccugagcugaaguacugug

SEQ ID NO: 434429 - RNA, 22 nt, Human
cuguggcaagucugccugucac

SEQ ID NO: 434430 - RNA, 22 nt, Human
ugcacacacaggagucuccucc

SEQ ID NO: 434431 - RNA, 22 nt, Human
gagcucagcccaaagagcagug

SEQ ID NO: 434432 - RNA, 22 nt, Human
uggggaugaaacccaggcaucu

SEQ ID NO: 434433 - RNA, 22 nt, Human
ucccagagaaagucaaggucuu

SEQ ID NO: 434434 - RNA, 22 nt, Human
aggguccaguaacagaugccag

SEQ ID NO: 434435 - RNA, 22 nt, Human
gcaguggcaccgcuggcucugg

SEQ ID NO: 434436 - RNA, 22 nt, Human
gggaugagagcugggacagaag

SEQ ID NO: 434437 - RNA, 22 nt, Human
gagcaugagggaaggcagcaga

SEQ ID NO: 434438 - RNA, 22 nt, Human
ugaggcagcaauuguauuguau

SEQ ID NO: 434439 - RNA, 22 nt, Human
aauccaauccuacucagaaagu

SEQ ID NO: 434440 - RNA, 22 nt, Human
aaucuagagugcuaggucugug

SEQ ID NO: 434441 - RNA, 22 nt, Human
ccagagaagaaaagcaccuuuu

SEQ ID NO: 434442 - RNA, 21 nt, Human
ugcccacagcaaaugcagagg

SEQ ID NO: 434443 - RNA, 22 nt, Human
uuaagacauuuuuggagauuau

SEQ ID NO: 434444 - RNA, 22 nt, Human
ucagcagaggggaaggcaucug

SEQ ID NO: 434445 - RNA, 22 nt, Human
uuggaaagaagggcugagcaag

SEQ ID NO: 434446 - RNA, 22 nt, Human
gcagcccugcagcuccacaccg

SEQ ID NO: 434447 - RNA, 22 nt, Human
cacugccuggaaggagagacau

SEQ ID NO: 434448 - RNA, 22 nt, Human
ccagccugaaaugccucauccu

SEQ ID NO: 434449 - RNA, 22 nt, Human
acggugcuggguauugggguuc

SEQ ID NO: 434450 - RNA, 22 nt, Human
agccagagggaaucuuugggga

SEQ ID NO: 434451 - RNA, 22 nt, Human
gcuggugagcaaaggagaagga

SEQ ID NO: 434452 - RNA, 22 nt, Human
cacuuaucucauuuaaucacca

SEQ ID NO: 434453 - RNA, 22 nt, Human
caggagguugguagcaguagau

SEQ ID NO: 434454 - RNA, 22 nt, Human
cuggccacuggagguggcaccc

SEQ ID NO: 434455 - RNA, 22 nt, Human
ugagggagcacacacugaagug

SEQ ID NO: 434456 - RNA, 19 nt, Human
uacuuauuagaaauauggg

SEQ ID NO: 434457 - RNA, 22 nt, Human
cgcgcugcagacagcggaggcc

SEQ ID NO: 434458 - RNA, 22 nt, Human
acagcugggugucccacuucug

SEQ ID NO: 434459 - RNA, 20 nt, Human
agggcagagggauuacaggc

SEQ ID NO: 434460 - RNA, 22 nt, Human
aaugaaugaaccacauauaaca

SEQ ID NO: 434461 - RNA, 22 nt, Human
gaggcagagucacaaagagucu

SEQ ID NO: 434462 - RNA, 22 nt, Human
ucagagccaaucauggugcauu

SEQ ID NO: 434463 - RNA, 22 nt, Human
gggucuggcaugcugagaugga

SEQ ID NO: 434464 - RNA, 22 nt, Human
caggccuccacuccacgcagac

SEQ ID NO: 434465 - RNA, 22 nt, Human
gagcugccaguguaugaauucu

SEQ ID NO: 434466 - RNA, 18 nt, Human
gcucaggcccuagucagu

SEQ ID NO: 434467 - RNA, 22 nt, Human
ugcaguggaaagacucagacuu

SEQ ID NO: 434468 - RNA, 22 nt, Human
ugcccucagccaccuccaaguu

SEQ ID NO: 434469 - RNA, 22 nt, Human
gaugcagaaaguagacaccauc

SEQ ID NO: 434470 - RNA, 22 nt, Human
gaucuuuacuacugccuucucu

SEQ ID NO: 434471 - RNA, 22 nt, Human
aaugauauuuauugaauagaug

SEQ ID NO: 434472 - RNA, 22 nt, Human
augacuuuccuggcaaaaguug

SEQ ID NO: 434473 - RNA, 22 nt, Human
ggugggcaacauuuggccugag

SEQ ID NO: 434474 - RNA, 19 nt, Human
cuaaggcaagaaacuggac

SEQ ID NO: 434475 - RNA, 22 nt, Human
gagcacuguacucauuugcacu

SEQ ID NO: 434476 - RNA, 22 nt, Human
gagggaagaggccugacauuuu

SEQ ID NO: 434477 - RNA, 22 nt, Human
cagaauuuaaguggauuauucu

SEQ ID NO: 434478 - RNA, 22 nt, Human
cagagcagaagguccaagccug

SEQ ID NO: 434479 - RNA, 22 nt, Human
cccagccucuggguucugccgg

SEQ ID NO: 434480 - RNA, 22 nt, Human
agagccagccuucucagcuuac

SEQ ID NO: 434481 - RNA, 22 nt, Human
agagcuggauggucaagauggc

SEQ ID NO: 434482 - RNA, 22 nt, Human
acagaauaguagcuuaaaguca

SEQ ID NO: 434483 - RNA, 22 nt, Human
aaggcagccucugccagccggg

SEQ ID NO: 434484 - RNA, 23 nt, Human
agagaaucauggaaacucuuucu

SEQ ID NO: 434485 - RNA, 22 nt, Human
ccuggagcgcgggucaagcugg

SEQ ID NO: 434486 - RNA, 21 nt, Human
ucauuugugaucugauuucca

SEQ ID NO: 434487 - RNA, 22 nt, Human
cugagaggcggagcuugcagug

SEQ ID NO: 434488 - RNA, 22 nt, Human
aaguuuguucauucauucaucc

SEQ ID NO: 434489 - RNA, 22 nt, Human
gcuggguuuucuuccgggccua

SEQ ID NO: 434490 - RNA, 19 nt, Human
ccaggccucuggggccugu

SEQ ID NO: 434491 - RNA, 22 nt, Human
caauauagagagaaaauuaugu

SEQ ID NO: 434492 - RNA, 22 nt, Human
auugugaauugagaguacuucu

SEQ ID NO: 434493 - RNA, 22 nt, Human
ucaugcagugaaucuuucuugc

SEQ ID NO: 434494 - RNA, 22 nt, Human
ggggcagaaguagugccccuga

SEQ ID NO: 434495 - RNA, 22 nt, Human
acauucuauucugcaggacaag

SEQ ID NO: 434496 - RNA, 22 nt, Human
uacaugaacaaaauagcagaaa

SEQ ID NO: 434497 - RNA, 22 nt, Human
ugucaccucuuuggcugcagcu

SEQ ID NO: 434498 - RNA, 22 nt, Human
gaggcugguaggaaaggaaaca

SEQ ID NO: 434499 - RNA, 22 nt, Human
cccagcagaaucugaugagggc

SEQ ID NO: 434500 - RNA, 22 nt, Human
aauuaacagagggcuuauuacu

SEQ ID NO: 434501 - RNA, 22 nt, Human
cagacagagucuucccaucagu

SEQ ID NO: 434502 - RNA, 22 nt, Human
uuuauguaaguggaaugaugcc

SEQ ID NO: 434503 - RNA, 22 nt, Human
gcugccugcucggcuccuggga

SEQ ID NO: 434504 - RNA, 17 nt, Human
agugugugaaauggugg

SEQ ID NO: 434505 - RNA, 22 nt, Human
cagcagguauguuuguucagca

SEQ ID NO: 434506 - RNA, 22 nt, Human
cucuggcuccauuucccuaugu

SEQ ID NO: 434507 - RNA, 22 nt, Human
cugcauuaaguugccuguaaga

SEQ ID NO: 434508 - RNA, 22 nt, Human
cugggagaugacucagagcagg

SEQ ID NO: 434509 - RNA, 22 nt, Human
guuggcuaugagagcuuuagug

SEQ ID NO: 434510 - RNA, 22 nt, Human
gccaccaggagcccaguccaaa

SEQ ID NO: 434511 - RNA, 22 nt, Human
aauuauugagcaucuacugugu

SEQ ID NO: 434512 - RNA, 22 nt, Human
uugcauuuugguuguaaauaug

SEQ ID NO: 434513 - RNA, 22 nt, Human
uggccaggcagguagaacggcc

SEQ ID NO: 434514 - RNA, 17 nt, Human
acauuugcaaaggucug

SEQ ID NO: 434515 - RNA, 22 nt, Human
cuguccuccggccaccuacagu

SEQ ID NO: 434516 - RNA, 22 nt, Human
cauggcaggaggcugcuggcag

SEQ ID NO: 434517 - RNA, 22 nt, Human
ggagccugacagugcccagcau

SEQ ID NO: 434518 - RNA, 22 nt, Human
agggccagcugcagaauuagca

SEQ ID NO: 434519 - RNA, 22 nt, Human
uagcaucucaaccuccugaaag

SEQ ID NO: 434520 - RNA, 22 nt, Human
cugcauaugauagaugccuugc

SEQ ID NO: 434521 - RNA, 22 nt, Human
aggcuucuugagccccacaggc

SEQ ID NO: 434522 - RNA, 22 nt, Human
ugcauauugugaaaauguagau

SEQ ID NO: 434523 - RNA, 22 nt, Human
aggaagcuaaccagggagugag

SEQ ID NO: 434524 - RNA, 22 nt, Human
caugaaaauaacauuguuguga

SEQ ID NO: 434525 - RNA, 17 nt, Human
agaggcagauacuugga

SEQ ID NO: 434526 - RNA, 22 nt, Human
ugggcuggcugaggcauucacu

SEQ ID NO: 434527 - RNA, 22 nt, Human
gcacaaaacacauuuugacaau

SEQ ID NO: 434528 - RNA, 22 nt, Human
aggccagggucccacacucgca

SEQ ID NO: 434529 - RNA, 22 nt, Human
gagccagccgcaagagcuguga

SEQ ID NO: 434530 - RNA, 22 nt, Human
caguggcaggggaagcaggugu

SEQ ID NO: 434531 - RNA, 22 nt, Human
aagaaugugcuaaugaaaacuu

SEQ ID NO: 434532 - RNA, 22 nt, Human
auuuugauaaucauguuagaga

SEQ ID NO: 434533 - RNA, 22 nt, Human
ccugucucuuucaaucugagag

SEQ ID NO: 434534 - RNA, 22 nt, Human
auccugggaagcugacauugaa

SEQ ID NO: 434535 - RNA, 21 nt, Human
cccaggaguccuauuuaaaug

SEQ ID NO: 434536 - RNA, 19 nt, Human
agucucacccaagcagucu

SEQ ID NO: 434537 - RNA, 17 nt, Human
cccuggcaaagaauggc

SEQ ID NO: 434538 - RNA, 22 nt, Human
agucacauagaaguggguuuaa

SEQ ID NO: 434539 - RNA, 22 nt, Human
gggccugcuccccaucgcugcu

SEQ ID NO: 434540 - RNA, 22 nt, Human
agggcucuguuggggucagcac

SEQ ID NO: 434541 - RNA, 22 nt, Human
uaaggcaggcuuucauccagag

SEQ ID NO: 434542 - RNA, 22 nt, Human
cuauacaguaaccacagugauu

SEQ ID NO: 434543 - RNA, 22 nt, Human
cuggguggaaagugcugagaau

SEQ ID NO: 434544 - RNA, 22 nt, Human
aagcccuggcaaugucagauga

SEQ ID NO: 434545 - RNA, 22 nt, Human
caauuucuuguuaauucucagg

SEQ ID NO: 434546 - RNA, 22 nt, Human
cagaauuuuucacucaaucuuc

SEQ ID NO: 434547 - RNA, 22 nt, Human
ugcaguggcgccaucucagcuc

SEQ ID NO: 434548 - RNA, 22 nt, Human
agucuugguccaggcucauuuc

SEQ ID NO: 434549 - RNA, 22 nt, Human
gucuggcuguccagcuuaucua

SEQ ID NO: 434550 - RNA, 22 nt, Human
agcagcuuaucuuggagaggca

SEQ ID NO: 434551 - RNA, 22 nt, Human
ugccucugcugcuguggcauca

SEQ ID NO: 434552 - RNA, 22 nt, Human
caaggcccugcaaccugacuug

SEQ ID NO: 434553 - RNA, 22 nt, Human
ggcaccaggcugggcauaggcc

SEQ ID NO: 434554 - RNA, 22 nt, Human
acagcagcuggguucccaccau

SEQ ID NO: 434555 - RNA, 22 nt, Human
acaugcauaaacuacuucuuau

SEQ ID NO: 434556 - RNA, 22 nt, Human
gugcccugaugcaauugucuca

SEQ ID NO: 434557 - RNA, 22 nt, Human
uuacauauugucuauuguucaa

SEQ ID NO: 434558 - RNA, 22 nt, Human
uccuggaguugugcagugcaca

SEQ ID NO: 434559 - RNA, 22 nt, Human
acuaggaauucaaguagacaga

SEQ ID NO: 434560 - RNA, 22 nt, Human
cugaguccuugggcuuagagug

SEQ ID NO: 434561 - RNA, 22 nt, Human
cugagggcaccgacagagugga

SEQ ID NO: 434562 - RNA, 22 nt, Human
ucagagaaguaagguggggugc

SEQ ID NO: 434563 - RNA, 22 nt, Human
ugcaacaguggggcaugcugaa

SEQ ID NO: 434564 - RNA, 22 nt, Human
ugcagcuggauuuaucuuuucc

SEQ ID NO: 434565 - RNA, 22 nt, Human
gagaaagcuaaauaaguugauu

SEQ ID NO: 434566 - RNA, 22 nt, Human
ugaacauuaguugaguaaaguc

SEQ ID NO: 434567 - RNA, 22 nt, Human
cugugagggcagggaccagagg

SEQ ID NO: 434568 - RNA, 22 nt, Human
gcagaggacacaggagggcaag

SEQ ID NO: 434569 - RNA, 22 nt, Human
ccacaucugguggccagugcua

SEQ ID NO: 434570 - RNA, 22 nt, Human
cagaggccccagaacuagcucu

SEQ ID NO: 434571 - RNA, 22 nt, Human
uuccugggcuuuccccucuggu

SEQ ID NO: 434572 - RNA, 22 nt, Human
gccucugggcucugccccuggc

SEQ ID NO: 434573 - RNA, 22 nt, Human
cauccaaacucucauuaucugu

SEQ ID NO: 434574 - RNA, 22 nt, Human
aaggaagaagacucuuuacucc

SEQ ID NO: 434575 - RNA, 22 nt, Human
caggagcuacucagguuggguu

SEQ ID NO: 434576 - RNA, 22 nt, Human
uuugugugcuugguauugaaga

SEQ ID NO: 434577 - RNA, 22 nt, Human
uccugccugcaaucccagcacu

SEQ ID NO: 434578 - RNA, 21 nt, Human
ucccacucuaaauggacugaa

SEQ ID NO: 434579 - RNA, 22 nt, Human
uuuccuugccuccuguccuucu

SEQ ID NO: 434580 - RNA, 22 nt, Human
accaguccgcggagcuccgggg

SEQ ID NO: 434581 - RNA, 22 nt, Human
cugcuuccaugcaauggcaguc

SEQ ID NO: 434582 - RNA, 18 nt, Human
uuguuuuaagacucuguc

SEQ ID NO: 434583 - RNA, 22 nt, Human
ucaggccucaagcugcuuuaag

SEQ ID NO: 434584 - RNA, 22 nt, Human
gcaggccucuaauucaccgcag

SEQ ID NO: 434585 - RNA, 22 nt, Human
cugcugcugagagcucagccug

SEQ ID NO: 434586 - RNA, 22 nt, Human
caguacucuuauuugaaauaug

SEQ ID NO: 434587 - RNA, 17 nt, Human
agcaccuguccaguccc

SEQ ID NO: 434588 - RNA, 22 nt, Human
acauuuuacaccaagacuucuu

SEQ ID NO: 434589 - RNA, 19 nt, Human
agggccugcagcucaagcu

SEQ ID NO: 434590 - RNA, 22 nt, Human
uuccugaaugcuguugugcugu

SEQ ID NO: 434591 - RNA, 22 nt, Human
acuuagcagguacuuucauauu

SEQ ID NO: 434592 - RNA, 22 nt, Human
caggaagcugagcugcacugca

SEQ ID NO: 434593 - RNA, 22 nt, Human
cugacugugagagcaggaaugg

SEQ ID NO: 434594 - RNA, 22 nt, Human
ccugucagcugauggcuaugua

SEQ ID NO: 434595 - RNA, 22 nt, Human
cugggcacuugcucacagcucu

SEQ ID NO: 434596 - RNA, 22 nt, Human
gcucccagggaccgcagggcag

SEQ ID NO: 434597 - RNA, 22 nt, Human
aagcccagcaucccugcaccag

SEQ ID NO: 434598 - RNA, 22 nt, Human
uccagccacucagcagggauug

SEQ ID NO: 434599 - RNA, 22 nt, Human
caguggcagagaacagagaccu

SEQ ID NO: 434600 - RNA, 22 nt, Human
uucucugcuacauacuagggcu

SEQ ID NO: 434601 - RNA, 22 nt, Human
agacccugucaguguuaggaaa

SEQ ID NO: 434602 - RNA, 22 nt, Human
ggccacagaacagcuacaggac

SEQ ID NO: 434603 - RNA, 22 nt, Human
cccaggaggucgaagcugcagu

SEQ ID NO: 434604 - RNA, 22 nt, Human
cccagaaggucgaggcugcagu

SEQ ID NO: 434605 - RNA, 22 nt, Human
ugucaccaugccagcuucugcc

SEQ ID NO: 434606 - RNA, 22 nt, Human
cccugggcucagagcagguagc

SEQ ID NO: 434607 - RNA, 22 nt, Human
cagaaagccgacuuacaaugga

SEQ ID NO: 434608 - RNA, 22 nt, Human
aaaaaguuucaacugccaacuc

SEQ ID NO: 434609 - RNA, 21 nt, Human
ugccuuggcaaaugaccauga

SEQ ID NO: 434610 - RNA, 22 nt, Human
cugcccugcucuccgggaucuu

SEQ ID NO: 434611 - RNA, 22 nt, Human
uccagcagguuggucaggugca

SEQ ID NO: 434612 - RNA, 22 nt, Human
gcuguccaugucuggccucagu

SEQ ID NO: 434613 - RNA, 22 nt, Human
agcaggcuuuccacagaaggag

SEQ ID NO: 434614 - RNA, 22 nt, Human
acccagagugucugucucaguc

SEQ ID NO: 434615 - RNA, 22 nt, Human
ucaguacuucccauucugagcu

SEQ ID NO: 434616 - RNA, 22 nt, Human
cccagagaucuuguccuuucca

SEQ ID NO: 434617 - RNA, 22 nt, Human
gacuuuauuuccuuauuuguga

SEQ ID NO: 434618 - RNA, 22 nt, Human
ggcucccugccuguccucaguc

SEQ ID NO: 434619 - RNA, 20 nt, Human
gcugccuguuucuguaagua

SEQ ID NO: 434620 - RNA, 22 nt, Human
aggccagcugccacccgguccg

SEQ ID NO: 434621 - RNA, 22 nt, Human
ucacaguacugugacuauugac

SEQ ID NO: 434622 - RNA, 22 nt, Human
gcacagcccugagcgcaugucu

SEQ ID NO: 434623 - RNA, 22 nt, Human
ggcagcaaaaagccugguugaa

SEQ ID NO: 434624 - RNA, 22 nt, Human
aguggcaguaacauuccacaau

SEQ ID NO: 434625 - RNA, 22 nt, Human
aagggagcggggagacccuaug

SEQ ID NO: 434626 - RNA, 22 nt, Human
ugcaggcagcuaaaccauguaa

SEQ ID NO: 434627 - RNA, 22 nt, Human
uccaccauguaacaagcucugu

SEQ ID NO: 434628 - RNA, 22 nt, Human
gcuuccaguaaguugcugccau

SEQ ID NO: 434629 - RNA, 21 nt, Human
aggaguugcuguggccugguu

SEQ ID NO: 434630 - RNA, 22 nt, Human
uacaguuccucucguggaggug

SEQ ID NO: 434631 - RNA, 22 nt, Human
ucuuugcagaacgaugaagaug

SEQ ID NO: 434632 - RNA, 22 nt, Human
cagcagcugcgugcccaggccg

SEQ ID NO: 434633 - RNA, 22 nt, Human
gagggaguaacguacuacagug

SEQ ID NO: 434634 - RNA, 22 nt, Human
uuugggcagugggcuuagcggc

SEQ ID NO: 434635 - RNA, 22 nt, Human
gccuuccaggcagggggagcag

SEQ ID NO: 434636 - RNA, 22 nt, Human
cacaggaggaggccagagcgua

SEQ ID NO: 434637 - RNA, 22 nt, Human
aaggcagccauagcaccaucca

SEQ ID NO: 434638 - RNA, 22 nt, Human
aagcaaauucuggaggugaggu

SEQ ID NO: 434639 - RNA, 22 nt, Human
ucaugcaggacuuacgagagau

SEQ ID NO: 434640 - RNA, 19 nt, Human
ucagucuaggaaugagcua

SEQ ID NO: 434641 - RNA, 22 nt, Human
aagcccuggauagagagaacug

SEQ ID NO: 434642 - RNA, 23 nt, Human
gacagagugagaccuugucuuac

SEQ ID NO: 434643 - RNA, 18 nt, Human
cagcugccagcucaugga

SEQ ID NO: 434644 - RNA, 22 nt, Human
ggccuuccuggcggcucagggu

SEQ ID NO: 434645 - RNA, 22 nt, Human
ggcagagguagcuggaaccagg

SEQ ID NO: 434646 - RNA, 22 nt, Human
aaauucaauuaacuuucaugcu

SEQ ID NO: 434647 - RNA, 19 nt, Human
ccagccucucuuccacccc

SEQ ID NO: 434648 - RNA, 22 nt, Human
gggaagcagaucauaccagacc

SEQ ID NO: 434649 - RNA, 22 nt, Human
acaccagggccuagccagggcg

SEQ ID NO: 434650 - RNA, 22 nt, Human
cagaggucaagaucugaaguga

SEQ ID NO: 434651 - RNA, 22 nt, Human
ucucaaauucccuuuuccuccu

SEQ ID NO: 434652 - RNA, 22 nt, Human
ugugccaggcacuugcccaggc

SEQ ID NO: 434653 - RNA, 22 nt, Human
guuugcagggagagauguggug

SEQ ID NO: 434654 - RNA, 22 nt, Human
auggauuggauuuuuauggacc

SEQ ID NO: 434655 - RNA, 23 nt, Human
agcaaugcugggagacucuguaa

SEQ ID NO: 434656 - RNA, 22 nt, Human
ugcaggcauaaccgauguugau

SEQ ID NO: 434657 - RNA, 22 nt, Human
agcuccuggucuuuguccagag

SEQ ID NO: 434658 - RNA, 22 nt, Human
gcaaacauuuggucuagugugu

SEQ ID NO: 434659 - RNA, 22 nt, Human
cucccagagaccaagcugagaa

SEQ ID NO: 434660 - RNA, 22 nt, Human
auucagaauugugggcaguaca

SEQ ID NO: 434661 - RNA, 22 nt, Human
aggagcugaaacuucucauaug

SEQ ID NO: 434662 - RNA, 22 nt, Human
cugacccuagcaucucugugca

SEQ ID NO: 434663 - RNA, 22 nt, Human
ucaaaucucacucugcauuucu

SEQ ID NO: 434664 - RNA, 22 nt, Human
agaaaaguuuucugagacugac

SEQ ID NO: 434665 - RNA, 18 nt, Human
ggcagccuggacaugcuc

SEQ ID NO: 434666 - RNA, 22 nt, Human
aacacugaguaucagaguuggg

SEQ ID NO: 434667 - RNA, 22 nt, Human
ccagaggagaugccuccucugu

SEQ ID NO: 434668 - RNA, 22 nt, Human
aggacccacgcacaggaacccc

SEQ ID NO: 434669 - RNA, 22 nt, Human
ccuggcugguggcagcgacaag

SEQ ID NO: 434670 - RNA, 22 nt, Human
uuaaaugacuuuuauuauucuc

SEQ ID NO: 434671 - RNA, 21 nt, Human
gaacauuuggguuguuucuac

SEQ ID NO: 434672 - RNA, 22 nt, Human
ccucaggcccugucccugcgcc

SEQ ID NO: 434673 - RNA, 22 nt, Human
ccaggcaggcgauggugcagug

SEQ ID NO: 434674 - RNA, 22 nt, Human
gaacauuuggcaugagaauuug

SEQ ID NO: 434675 - RNA, 22 nt, Human
acaaguucugggaauuaggaca

SEQ ID NO: 434676 - RNA, 22 nt, Human
uccuggguggugguaggagcag

SEQ ID NO: 434677 - RNA, 22 nt, Human
ccuuagcaaauuggcaucuucu

SEQ ID NO: 434678 - RNA, 22 nt, Human
caguacuuuucaaccaguauga

SEQ ID NO: 434679 - RNA, 22 nt, Human
cagaguuucgguaagcauagaa

SEQ ID NO: 434680 - RNA, 23 nt, Human
ugucacauuuaguuggcauuguu

SEQ ID NO: 434681 - RNA, 22 nt, Human
cuggcuccaucacugggugaug

SEQ ID NO: 434682 - RNA, 23 nt, Human
uggccagcagaagcaaggggagc

SEQ ID NO: 434683 - RNA, 22 nt, Human
uccuggacuggcucagcacccu

SEQ ID NO: 434684 - RNA, 21 nt, Human
uuuacugagcacuuacuaugu

SEQ ID NO: 434685 - RNA, 22 nt, Human
gcaggagcucguuuccaggcug

SEQ ID NO: 434686 - RNA, 23 nt, Human
ggagccuggcauaugagacgcau

SEQ ID NO: 434687 - RNA, 22 nt, Human
uuuuucuuaaauguggguuggc

SEQ ID NO: 434688 - RNA, 22 nt, Human
uggcacugccaaccugcuaggu

SEQ ID NO: 434689 - RNA, 22 nt, Human
caggcuuggcagggaggcuggu

SEQ ID NO: 434690 - RNA, 22 nt, Human
uuggccagguguaggucacacc

SEQ ID NO: 434691 - RNA, 22 nt, Human
uuuauucacuggggucugcccg

SEQ ID NO: 434692 - RNA, 22 nt, Human
auugcuuuuaagcaccaccuaa

SEQ ID NO: 434693 - RNA, 22 nt, Human
aauaucuucuaaggauagaacu

SEQ ID NO: 434694 - RNA, 22 nt, Human
cacagaguggaggcuuggccug

SEQ ID NO: 434695 - RNA, 22 nt, Human
aacugcauguguguggcaugau

SEQ ID NO: 434696 - RNA, 22 nt, Human
cuggcucccucucccugaguca

SEQ ID NO: 434697 - RNA, 22 nt, Human
auucagaagcuauucuuaguuc

SEQ ID NO: 434698 - RNA, 22 nt, Human
uagagcugauaaugaggccaag

SEQ ID NO: 434699 - RNA, 19 nt, Human
aaggcuggagaaggccucu

SEQ ID NO: 434700 - RNA, 22 nt, Human
cagagcagguaucuuuggugaa

SEQ ID NO: 434701 - RNA, 22 nt, Human
cagggagcaggcucuguccauc

SEQ ID NO: 434702 - RNA, 22 nt, Human
uucaugaagggugaauauaguc

SEQ ID NO: 434703 - RNA, 22 nt, Human
acagacagaggcuccaugagga

SEQ ID NO: 434704 - RNA, 20 nt, Human
ucauccaggacaggaguggc

SEQ ID NO: 434705 - RNA, 22 nt, Human
gagccagcuacauggucugcaa

SEQ ID NO: 434706 - RNA, 22 nt, Human
uggcagcacuagguacugagcu

SEQ ID NO: 434707 - RNA, 22 nt, Human
ucagaauuuuuguuacccuuga

SEQ ID NO: 434708 - RNA, 22 nt, Human
caggcacaagaucggcuagaua

SEQ ID NO: 434709 - RNA, 22 nt, Human
cuggagcucuccagagccccgu

SEQ ID NO: 434710 - RNA, 22 nt, Human
uggacucaaguccaaguucacg

SEQ ID NO: 434711 - RNA, 22 nt, Human
agauucaguuaaggcugguaga

SEQ ID NO: 434712 - RNA, 22 nt, Human
acuuuguugaagaauauguuag

SEQ ID NO: 434713 - RNA, 22 nt, Human
gggccuguaugggucucagaua

SEQ ID NO: 434714 - RNA, 22 nt, Human
aauuuuacaagaaggccucgua

SEQ ID NO: 434715 - RNA, 22 nt, Human
uuguuucaaauauuucagaaua

SEQ ID NO: 434716 - RNA, 22 nt, Human
aguucacaauagaagagguggc

SEQ ID NO: 434717 - RNA, 22 nt, Human
gccaggcauguccucugcagaa

SEQ ID NO: 434718 - RNA, 22 nt, Human
aagagcugcccaaggugaacag

SEQ ID NO: 434719 - RNA, 22 nt, Human
cugcauuacuaacaaacuccca

SEQ ID NO: 434720 - RNA, 18 nt, Human
ggugagggagcuggaagc

SEQ ID NO: 434721 - RNA, 22 nt, Human
agcagcuguggaaaaguaacua

SEQ ID NO: 434722 - RNA, 17 nt, Human
caggcacaugaagccag

SEQ ID NO: 434723 - RNA, 16 nt, Human
ccacaguaagaaauac

SEQ ID NO: 434724 - RNA, 22 nt, Human
cugccucugguuuuggucccug

SEQ ID NO: 434725 - RNA, 19 nt, Human
ugggcagguucaguaaugg

SEQ ID NO: 434726 - RNA, 22 nt, Human
aggggcacuagaaugggagacu

SEQ ID NO: 434727 - RNA, 22 nt, Human
agcaccuguguucaugccucau

SEQ ID NO: 434728 - RNA, 22 nt, Human
ugcagcugaccagcaaguccug

SEQ ID NO: 434729 - RNA, 22 nt, Human
uuuuccucuguauuugaaaugc

SEQ ID NO: 434730 - RNA, 23 nt, Human
uguaaauuuuguagucacauuuu

SEQ ID NO: 434731 - RNA, 22 nt, Human
agcuguuuuuccagucucugga

SEQ ID NO: 434732 - RNA, 22 nt, Human
cucugagcagaggccguggcua

SEQ ID NO: 434733 - RNA, 22 nt, Human
ugagaggagugauuguaaaauu

SEQ ID NO: 434734 - RNA, 22 nt, Human
uggccuggaaaaaugcagaugg

SEQ ID NO: 434735 - RNA, 22 nt, Human
acugccaaugguaguuugaugg

SEQ ID NO: 434736 - RNA, 19 nt, Human
cagaccuguccagccugug

SEQ ID NO: 434737 - RNA, 22 nt, Human
ugagaaucagcugcacagaggu

SEQ ID NO: 434738 - RNA, 22 nt, Human
ggagacagugguagggccuaag

SEQ ID NO: 434739 - RNA, 22 nt, Human
gcucagggcgcgagggacgugg

SEQ ID NO: 434740 - RNA, 21 nt, Human
uuuaucaucacgagcuugagc

SEQ ID NO: 434741 - RNA, 22 nt, Human
cugaggcuucucuaguucagcu

SEQ ID NO: 434742 - RNA, 22 nt, Human
aggccucugagcagcacucaug

SEQ ID NO: 434743 - RNA, 20 nt, Human
cagcugccuggcucugggau

SEQ ID NO: 434744 - RNA, 22 nt, Human
gcuggcuguuggagguaccugc

SEQ ID NO: 434745 - RNA, 22 nt, Human
cugcauuauuggaacggcugaa

SEQ ID NO: 434746 - RNA, 22 nt, Human
cagauauguggauucuauuagc

SEQ ID NO: 434747 - RNA, 22 nt, Human
auauucuugugauuauaaagua

SEQ ID NO: 434748 - RNA, 22 nt, Human
uuuaguguagccuaagcagaau

SEQ ID NO: 434749 - RNA, 22 nt, Human
ggagggugcauuuuacccugug

SEQ ID NO: 434750 - RNA, 22 nt, Human
acaggcugcccgcuccccaccu

SEQ ID NO: 434751 - RNA, 22 nt, Human
ccugggucuguauugguaggua

SEQ ID NO: 434752 - RNA, 22 nt, Human
aaggcacuugcccagagcugca

SEQ ID NO: 434753 - RNA, 22 nt, Human
gaugaugaggccaugaggcagg

SEQ ID NO: 434754 - RNA, 22 nt, Human
uuauuuaauuuucucacucaga

SEQ ID NO: 434755 - RNA, 22 nt, Human
ccagcucucagcgggagacuca

SEQ ID NO: 434756 - RNA, 22 nt, Human
gaggaaagaaccccagucaaua

SEQ ID NO: 434757 - RNA, 22 nt, Human
auuagcaaucacgcagucauuu

SEQ ID NO: 434758 - RNA, 22 nt, Human
ugcagcugggacauuuuugaua

SEQ ID NO: 434759 - RNA, 22 nt, Human
ccaggaagcucugcuccacggg

SEQ ID NO: 434760 - RNA, 22 nt, Human
cugcccugggauggucugugcg

SEQ ID NO: 434761 - RNA, 22 nt, Human
ucacagugaggcaguucuugua

SEQ ID NO: 434762 - RNA, 22 nt, Human
cugccagcacugccuccugagg

SEQ ID NO: 434763 - RNA, 22 nt, Human
uucaacuuuaugcauauguauu

SEQ ID NO: 434764 - RNA, 22 nt, Human
ucccagccugacagugcaucaa

SEQ ID NO: 434765 - RNA, 22 nt, Human
gccaggaguucagaugcauguu

SEQ ID NO: 434766 - RNA, 21 nt, Human
ucugagaacuucugcugcagc

SEQ ID NO: 434767 - RNA, 17 nt, Human
agcaggcugcagaggcc

SEQ ID NO: 434768 - RNA, 22 nt, Human
ucucuuccccuuuccuuuaaca

SEQ ID NO: 434769 - RNA, 22 nt, Human
auuuuccuccaugugagcaguu

SEQ ID NO: 434770 - RNA, 22 nt, Human
caggggaguuuuaugcaacaga

SEQ ID NO: 434771 - RNA, 22 nt, Human
uucacauaaauagaucacauca

SEQ ID NO: 434772 - RNA, 22 nt, Human
ccaggagcaaagaucacuggga

SEQ ID NO: 434773 - RNA, 22 nt, Human
gcuuagcaucuuacaaugcuga

SEQ ID NO: 434774 - RNA, 22 nt, Human
cucagagcugaggccagggaca

SEQ ID NO: 434775 - RNA, 22 nt, Human
cacugaguucccugacauuuca

SEQ ID NO: 434776 - RNA, 22 nt, Human
acaauucacuccagugacccca

SEQ ID NO: 434777 - RNA, 22 nt, Human
uagugaauuccuaauaggaaga

SEQ ID NO: 434778 - RNA, 23 nt, Human
uauuagcaauucccacagagcag

SEQ ID NO: 434779 - RNA, 22 nt, Human
ccaggcugugguuuagauagag

SEQ ID NO: 434780 - RNA, 18 nt, Human
cacauuuaccuggcuccc

SEQ ID NO: 434781 - RNA, 22 nt, Human
cuugucagccaauuguggauuu

SEQ ID NO: 434782 - RNA, 22 nt, Human
acccacaccuccguauaucacu

SEQ ID NO: 434783 - RNA, 22 nt, Human
agagggcaaguguaguccagua

SEQ ID NO: 434784 - RNA, 22 nt, Human
ccagggcaucacauccaguguu

SEQ ID NO: 434785 - RNA, 22 nt, Human
uacuauuuggaauuuuaaauug

SEQ ID NO: 434786 - RNA, 22 nt, Human
ugaagguggcauaggagagaug

SEQ ID NO: 434787 - RNA, 22 nt, Human
caggcccucgcccgcagcgacc

SEQ ID NO: 434788 - RNA, 22 nt, Human
uuauuuaaaagugguaagauuc

SEQ ID NO: 434789 - RNA, 22 nt, Human
uccucuggaaccucacccuugc

SEQ ID NO: 434790 - RNA, 21 nt, Human
ccagcuccaggaccuuggauc

SEQ ID NO: 434791 - RNA, 21 nt, Human
aaggagccuaggaggcucagg

SEQ ID NO: 434792 - RNA, 22 nt, Human
agacaauauauaauuuuaguug

SEQ ID NO: 434793 - RNA, 22 nt, Human
uuucuauaacuggacuggauug

SEQ ID NO: 434794 - RNA, 16 nt, Human
gagaagagcccggcag

SEQ ID NO: 434795 - RNA, 22 nt, Human
cagcaggcuggacuucaguccc

SEQ ID NO: 434796 - RNA, 22 nt, Human
cauggccuugagugacugcacu

SEQ ID NO: 434797 - RNA, 22 nt, Human
uuuauccacaguauccaaaauc

SEQ ID NO: 434798 - RNA, 22 nt, Human
aacaacaacggagaaaggguug

SEQ ID NO: 434799 - RNA, 22 nt, Human
ucucagagggaggauuacugcc

SEQ ID NO: 434800 - RNA, 22 nt, Human
augauuuucugauaaagaacug

SEQ ID NO: 434801 - RNA, 20 nt, Human
ugcacagcugugaauaggau

SEQ ID NO: 434802 - RNA, 22 nt, Human
augguggacucuugauucaggc

SEQ ID NO: 434803 - RNA, 22 nt, Human
uuucaaauggagucgugaaaug

SEQ ID NO: 434804 - RNA, 22 nt, Human
ucagaauuggacaauagaagca

SEQ ID NO: 434805 - RNA, 23 nt, Human
gcaggacaacagagugggaaggc

SEQ ID NO: 434806 - RNA, 22 nt, Human
gugcagugagcagugcagcacc

SEQ ID NO: 434807 - RNA, 22 nt, Human
agucugggcugucugcaggagu

SEQ ID NO: 434808 - RNA, 22 nt, Human
ucaggaaagccuagaagagaac

SEQ ID NO: 434809 - RNA, 22 nt, Human
gagacagagagguacucaacau

SEQ ID NO: 434810 - RNA, 22 nt, Human
ggcagccuccagggcacuggug

SEQ ID NO: 434811 - RNA, 22 nt, Human
agcagggggaguuagacuagau

SEQ ID NO: 434812 - RNA, 22 nt, Human
aaggcuggaccuggaugaaucu

SEQ ID NO: 434813 - RNA, 20 nt, Human
acuuucucgguuucucaccu

SEQ ID NO: 434814 - RNA, 22 nt, Human
ucucuuccaguggcuuugauuu

SEQ ID NO: 434815 - RNA, 22 nt, Human
ugaagcuagucaagcuuagaua

SEQ ID NO: 434816 - RNA, 22 nt, Human
ggcugugccucaaggcuacuca

SEQ ID NO: 434817 - RNA, 22 nt, Human
auugaaaaugacauuugugccc

SEQ ID NO: 434818 - RNA, 22 nt, Human
uuuuauugcaauaaagugugua

SEQ ID NO: 434819 - RNA, 22 nt, Human
cugagcugggcucucuugaggg

SEQ ID NO: 434820 - RNA, 22 nt, Human
cagagugauggcaccugcuggg

SEQ ID NO: 434821 - RNA, 22 nt, Human
gcacagagagucccgggugccc

SEQ ID NO: 434822 - RNA, 22 nt, Human
aaauguuccggguaaggagaaa

SEQ ID NO: 434823 - RNA, 22 nt, Human
cuauugaggacauaaggacucu

SEQ ID NO: 434824 - RNA, 22 nt, Human
gguuaaaaauaauuuacuuggc

SEQ ID NO: 434825 - RNA, 22 nt, Human
auuuucucacaaugcagaagga

SEQ ID NO: 434826 - RNA, 22 nt, Human
agguuugguuugacaagacuga

SEQ ID NO: 434827 - RNA, 22 nt, Human
ccagacaggggcuguuccugcu

SEQ ID NO: 434828 - RNA, 20 nt, Human
augcccuguccucuucuguu

SEQ ID NO: 434829 - RNA, 22 nt, Human
uggcucugucacugugagcuau

SEQ ID NO: 434830 - RNA, 22 nt, Human
cucaggccugaguggcaguccc

SEQ ID NO: 434831 - RNA, 22 nt, Human
uggcuccuaucaaggagugggu

SEQ ID NO: 434832 - RNA, 21 nt, Human
acauguacacauguaugcaca

SEQ ID NO: 434833 - RNA, 22 nt, Human
auuguuaugaaaauaagauguu

SEQ ID NO: 434834 - RNA, 22 nt, Human
gcugcccucccagggcaagcuu

SEQ ID NO: 434835 - RNA, 22 nt, Human
ugaucccuggacuugaguaagu

SEQ ID NO: 434836 - RNA, 17 nt, Human
agccugggaaggaguga

SEQ ID NO: 434837 - RNA, 22 nt, Human
aggccagguggucaugcuugcu

SEQ ID NO: 434838 - RNA, 22 nt, Human
gcagcuguucagcuggccagau

SEQ ID NO: 434839 - RNA, 22 nt, Human
agcacacaggacuugauucaug

SEQ ID NO: 434840 - RNA, 22 nt, Human
cccuugagccuggaggagcucu

SEQ ID NO: 434841 - RNA, 22 nt, Human
ugcagccauuuucugccaaugc

SEQ ID NO: 434842 - RNA, 22 nt, Human
ggggcccagggcagcagugcag

SEQ ID NO: 434843 - RNA, 22 nt, Human
gagcccaggcagagguugcagu

SEQ ID NO: 434844 - RNA, 22 nt, Human
gguguccaucaggcugugcuuc

SEQ ID NO: 434845 - RNA, 22 nt, Human
ccuggaaacacaugaugaugaa

SEQ ID NO: 434846 - RNA, 22 nt, Human
uugcuuuguuacugcaguuucc

SEQ ID NO: 434847 - RNA, 22 nt, Human
ucagaguucucuguccagauga

SEQ ID NO: 434848 - RNA, 22 nt, Human
gaagaagccucuguggaucuga

SEQ ID NO: 434849 - RNA, 22 nt, Human
cagcacuaggauauacauuucc

SEQ ID NO: 434850 - RNA, 22 nt, Human
gggcauggugaugugcaccugu

SEQ ID NO: 434851 - RNA, 22 nt, Human
ccaguuaaucacugaguccugu

SEQ ID NO: 434852 - RNA, 22 nt, Human
uccucagaaaccccugugaggu

SEQ ID NO: 434853 - RNA, 22 nt, Human
ucaggaagcuacugccagcagc

SEQ ID NO: 434854 - RNA, 22 nt, Human
gagcugagggucuaggaggguu

SEQ ID NO: 434855 - RNA, 22 nt, Human
ucuaaaugugguagucauaaga

SEQ ID NO: 434856 - RNA, 22 nt, Human
cacuggaagagcaucugagcca

SEQ ID NO: 434857 - RNA, 22 nt, Human
gaaggaaaggucucaugccuuu

SEQ ID NO: 434858 - RNA, 22 nt, Human
ugacaaauucauauuucagagg

SEQ ID NO: 434859 - RNA, 22 nt, Human
agccaggcuacuccuugcugac

SEQ ID NO: 434860 - RNA, 22 nt, Human
gacagaguuguugauguaugcu

SEQ ID NO: 434861 - RNA, 22 nt, Human
cagcugccagcuucucuccauc

SEQ ID NO: 434862 - RNA, 22 nt, Human
cacaauuuccuugcuucacuuu

SEQ ID NO: 434863 - RNA, 20 nt, Human
agccagaagaaggcuggaga

SEQ ID NO: 434864 - RNA, 22 nt, Human
guguggcugauugacaugguca

SEQ ID NO: 434865 - RNA, 22 nt, Human
ugggccucggagcacaggagac

SEQ ID NO: 434866 - RNA, 22 nt, Human
ggacaggaugcugaagaugaag

SEQ ID NO: 434867 - RNA, 22 nt, Human
cagugcugcaggcgccugcggu

SEQ ID NO: 434868 - RNA, 21 nt, Human
agcagacagcccaagaaaauc

SEQ ID NO: 434869 - RNA, 22 nt, Human
ugcugccagggcucugcccaca

SEQ ID NO: 434870 - RNA, 22 nt, Human
aagacauuguggagauguugcu

SEQ ID NO: 434871 - RNA, 22 nt, Human
ugcucaguagcagugugcugcu

SEQ ID NO: 434872 - RNA, 22 nt, Human
ugcuuuaaccaucuuguuugga

SEQ ID NO: 434873 - RNA, 22 nt, Human
ucacaaaugucuccuguccugu

SEQ ID NO: 434874 - RNA, 22 nt, Human
cagaagcaaaugccuugcugag

SEQ ID NO: 434875 - RNA, 22 nt, Human
uagcaggguccaaugugaggca

SEQ ID NO: 434876 - RNA, 22 nt, Human
ugcagcugagucacccagccau

SEQ ID NO: 434877 - RNA, 22 nt, Human
cuguguguuuauaucauuuccu

SEQ ID NO: 434878 - RNA, 22 nt, Human
uuacaagauaaccugaugcugu

SEQ ID NO: 434879 - RNA, 22 nt, Human
gagcaggcaacucugcagugcc

SEQ ID NO: 434880 - RNA, 22 nt, Human
aauucauagcaacaaagaccca

SEQ ID NO: 434881 - RNA, 22 nt, Human
uuacaaacugucauauaguauu

SEQ ID NO: 434882 - RNA, 22 nt, Human
gcugugcuauaucucugagugu

SEQ ID NO: 434883 - RNA, 22 nt, Human
ugcuuucaugaagucuauagag

SEQ ID NO: 434884 - RNA, 22 nt, Human
agccagcacggauuucccagga

SEQ ID NO: 434885 - RNA, 20 nt, Human
gacaggagaguuagguaggu

SEQ ID NO: 434886 - RNA, 22 nt, Human
ugcauauuuucugauucagaag

SEQ ID NO: 434887 - RNA, 15 nt, Human
ugggcagaucacuug

SEQ ID NO: 434888 - RNA, 22 nt, Human
gagagguguguuucagauaaga

SEQ ID NO: 434889 - RNA, 22 nt, Human
auuaaauguuccuuaaauuaua

SEQ ID NO: 434890 - RNA, 22 nt, Human
ccagaccacccuggccaugcac

SEQ ID NO: 434891 - RNA, 22 nt, Human
gagagcugcagccgagaggggg

SEQ ID NO: 434892 - RNA, 22 nt, Human
gaagaacacuucaugauucauu

SEQ ID NO: 434893 - RNA, 22 nt, Human
aggaaaugcugaugcuccugga

SEQ ID NO: 434894 - RNA, 22 nt, Human
ccucuugccaaucagcuacaga

SEQ ID NO: 434895 - RNA, 22 nt, Human
acccucugccuugagcagugcc

SEQ ID NO: 434896 - RNA, 22 nt, Human
uuuucauuguaaaucaggaaac

SEQ ID NO: 434897 - RNA, 18 nt, Human
ugacagaaccuggagccu

SEQ ID NO: 434898 - RNA, 22 nt, Human
gggaucugaugcacugcugaaa

SEQ ID NO: 434899 - RNA, 19 nt, Human
ggccaggcugacugugguc

SEQ ID NO: 434900 - RNA, 22 nt, Human
uggcauguggcagcugguucag

SEQ ID NO: 434901 - RNA, 22 nt, Human
uguaccaucucagcauucagga

SEQ ID NO: 434902 - RNA, 22 nt, Human
uuauacaggagauuccuuacuu

SEQ ID NO: 434903 - RNA, 21 nt, Human
gaagagaguccucauccugag

SEQ ID NO: 434904 - RNA, 22 nt, Human
agcaacagguuuauuaucuuau

SEQ ID NO: 434905 - RNA, 20 nt, Human
aggcaacucaaguuuuugcc

SEQ ID NO: 434906 - RNA, 22 nt, Human
uagcugccaaaagggugggcua

SEQ ID NO: 434907 - RNA, 22 nt, Human
gugacagucaaagacaugacuu

SEQ ID NO: 434908 - RNA, 19 nt, Human
gcagcaaacaaaacaggua

SEQ ID NO: 434909 - RNA, 22 nt, Human
cagcccuuccuucuguuuauac

SEQ ID NO: 434910 - RNA, 21 nt, Human
ugcaauuuagacuugaacauu

SEQ ID NO: 434911 - RNA, 22 nt, Human
ggggcagagucuggacuguugu

SEQ ID NO: 434912 - RNA, 22 nt, Human
uggauugauaaaaugggauguu

SEQ ID NO: 434913 - RNA, 22 nt, Human
aaugagggggaugggaaagugu

SEQ ID NO: 434914 - RNA, 22 nt, Human
uauuuaauuagugauuguagag

SEQ ID NO: 434915 - RNA, 22 nt, Human
gucaggacaagguggucuccag

SEQ ID NO: 434916 - RNA, 22 nt, Human
agcuguugucugcaggagaagc

SEQ ID NO: 434917 - RNA, 22 nt, Human
aggcagccaucugcaggaagga

SEQ ID NO: 434918 - RNA, 22 nt, Human
uauuaagagauguaugaagaga

SEQ ID NO: 434919 - RNA, 22 nt, Human
ccagcagccccucaaugaucug

SEQ ID NO: 434920 - RNA, 22 nt, Human
gcuguuccugcuuagaggucgg

SEQ ID NO: 434921 - RNA, 22 nt, Human
auucaauaagucacuguggaau

SEQ ID NO: 434922 - RNA, 22 nt, Human
uugaggcccggcaggccgagcg

SEQ ID NO: 434923 - RNA, 22 nt, Human
caggaggccaacugugggacuu

SEQ ID NO: 434924 - RNA, 22 nt, Human
caaagggcggcugucggagggu

SEQ ID NO: 434925 - RNA, 22 nt, Human
gcuauucaucaauuguucuagc

SEQ ID NO: 434926 - RNA, 22 nt, Human
ccuggccugugaaucugagagc

SEQ ID NO: 434927 - RNA, 22 nt, Human
agaugcugugucuguucccuug

SEQ ID NO: 434928 - RNA, 22 nt, Human
acuuagcaguuuagaauauguc

SEQ ID NO: 434929 - RNA, 22 nt, Human
uugauuuugccugaucugagag

SEQ ID NO: 434930 - RNA, 22 nt, Human
agcugcucucacuggacgccug

SEQ ID NO: 434931 - RNA, 22 nt, Human
ucagcaggcucugguugaccau

SEQ ID NO: 434932 - RNA, 22 nt, Human
cuguccugcccacccugcaggg

SEQ ID NO: 434933 - RNA, 22 nt, Human
gagaagcaaucgugacaucucc

SEQ ID NO: 434934 - RNA, 22 nt, Human
augcaguggcagcuccuggugu

SEQ ID NO: 434935 - RNA, 22 nt, Human
aacauucugguucuaaaaaccu

SEQ ID NO: 434936 - RNA, 22 nt, Human
ccaggcugcagucaaggggcau

SEQ ID NO: 434937 - RNA, 22 nt, Human
ucugccugcuaacuccugcacc

SEQ ID NO: 434938 - RNA, 22 nt, Human
gguugguaacucccugugcagu

SEQ ID NO: 434939 - RNA, 22 nt, Human
uucaaacucacacuagggagac

SEQ ID NO: 434940 - RNA, 22 nt, Human
ugggccaggcaugugaucagca

SEQ ID NO: 434941 - RNA, 22 nt, Human
cagcccuggccccagguggucu

SEQ ID NO: 434942 - RNA, 22 nt, Human
agaagcagcuuucaaggugauu

SEQ ID NO: 434943 - RNA, 22 nt, Human
ugcccaggaucuggcgaugcuc

SEQ ID NO: 434944 - RNA, 22 nt, Human
gcagcuggugcaaaugucacuc

SEQ ID NO: 434945 - RNA, 16 nt, Human
uuuuauugugacagcc

SEQ ID NO: 434946 - RNA, 22 nt, Human
uggcagcauguuauguaaggaa

SEQ ID NO: 434947 - RNA, 22 nt, Human
ucuggguguagggccuggcaac

SEQ ID NO: 434948 - RNA, 21 nt, Human
aggaaaggccagcacguaggg

SEQ ID NO: 434949 - RNA, 22 nt, Human
ggagccuuagacaucugauccu

SEQ ID NO: 434950 - RNA, 22 nt, Human
gaucugaaaaugcucuucuucu

SEQ ID NO: 434951 - RNA, 22 nt, Human
cagcuguugugcugggcaguua

SEQ ID NO: 434952 - RNA, 22 nt, Human
gcuccaggcagcauaguggaug

SEQ ID NO: 434953 - RNA, 22 nt, Human
cuguauaucaugguuuugcagu

SEQ ID NO: 434954 - RNA, 22 nt, Human
gaggcagcaaaauauaucauaa

SEQ ID NO: 434955 - RNA, 22 nt, Human
uaaggcauuauagagacagccu

SEQ ID NO: 434956 - RNA, 22 nt, Human
ugaagcuauugguaaggaagug

SEQ ID NO: 434957 - RNA, 22 nt, Human
agccuggccacucagggccuga

SEQ ID NO: 434958 - RNA, 22 nt, Human
ugcaggacuggggagcggaagg

SEQ ID NO: 434959 - RNA, 22 nt, Human
ggagaggguguggaaaguuauc

SEQ ID NO: 434960 - RNA, 22 nt, Human
cagcugaagaaagagugguuag

SEQ ID NO: 434961 - RNA, 22 nt, Human
guuccucaugaguaccccuuaa

SEQ ID NO: 434962 - RNA, 22 nt, Human
uaaguucauaagcuuauucuua

SEQ ID NO: 434963 - RNA, 22 nt, Human
cagcuguuucaguagcguuacu

SEQ ID NO: 434964 - RNA, 22 nt, Human
cugacuguugcuguugaugagg

SEQ ID NO: 434965 - RNA, 23 nt, Human
aacuuugccaggagacagcacag

SEQ ID NO: 434966 - RNA, 22 nt, Human
gauaaugugccgauaauuucua

SEQ ID NO: 434967 - RNA, 22 nt, Human
uuccugauaaugagauuuuccc

SEQ ID NO: 434968 - RNA, 22 nt, Human
uugcccugccucccugagguga

SEQ ID NO: 434969 - RNA, 22 nt, Human
guuccucagcccuuacuuagcc

SEQ ID NO: 434970 - RNA, 21 nt, Human
aggcaauaaaguuuugucuac

SEQ ID NO: 434971 - RNA, 22 nt, Human
ucauuuguucaucugcucuucu

SEQ ID NO: 434972 - RNA, 22 nt, Human
ggcaaaaacagcaaugacuuuu

SEQ ID NO: 434973 - RNA, 22 nt, Human
guuuuauaggcuguugcuauau

SEQ ID NO: 434974 - RNA, 22 nt, Human
cugccagcucgccacaaugaca

SEQ ID NO: 434975 - RNA, 22 nt, Human
aaacauuccauuucuauguaag

SEQ ID NO: 434976 - RNA, 22 nt, Human
cugugucccuugucccagagcc

SEQ ID NO: 434977 - RNA, 22 nt, Human
ccuggagcccaaggcagugaga

SEQ ID NO: 434978 - RNA, 22 nt, Human
agugggcagugcgcucggaugc

SEQ ID NO: 434979 - RNA, 22 nt, Human
uucccuggcucuucuacaucgu

SEQ ID NO: 434980 - RNA, 22 nt, Human
uauaggaaguauucaaagacug

SEQ ID NO: 434981 - RNA, 22 nt, Human
ccuggcagacagcacugaagcu

SEQ ID NO: 434982 - RNA, 22 nt, Human
acacuuugggcuggauaauuau

SEQ ID NO: 434983 - RNA, 22 nt, Human
ucacuuuggauuauguaauuuc

SEQ ID NO: 434984 - RNA, 22 nt, Human
agaagaauacuugauguucaug

SEQ ID NO: 434985 - RNA, 22 nt, Human
uggagugaaguaaagaggacaa

SEQ ID NO: 434986 - RNA, 19 nt, Human
ggacacagaaagcugcauu

SEQ ID NO: 434987 - RNA, 22 nt, Human
agagugggugaucucuguuguc

SEQ ID NO: 434988 - RNA, 22 nt, Human
auugacaacccugguaugagca

SEQ ID NO: 434989 - RNA, 22 nt, Human
uugcuugcagacuuagcaaauu

SEQ ID NO: 434990 - RNA, 21 nt, Human
gcaggaugcaucuuggugucu

SEQ ID NO: 434991 - RNA, 22 nt, Human
caggcuggacauuagauacaua

SEQ ID NO: 434992 - RNA, 22 nt, Human
ucucccaguccucugugcuuac

SEQ ID NO: 434993 - RNA, 22 nt, Human
gaggaggcuuccgggaggcacg

SEQ ID NO: 434994 - RNA, 22 nt, Human
gccuucugaucgcuggacugac

SEQ ID NO: 434995 - RNA, 22 nt, Human
ucagaggacaagcucccuggug

SEQ ID NO: 434996 - RNA, 22 nt, Human
caggcagccaggggaccugucc

SEQ ID NO: 434997 - RNA, 22 nt, Human
cugacaaaccacugcuccagcu

SEQ ID NO: 434998 - RNA, 22 nt, Human
ugaacccaggagguugcaguga

SEQ ID NO: 434999 - RNA, 22 nt, Human
ccuggugcuuaccagagcuuuu

SEQ ID NO: 435000 - RNA, 22 nt, Human
ugguacaagauguucuaacuga

SEQ ID NO: 435001 - RNA, 22 nt, Human
uaugcauauguguucauuggag

SEQ ID NO: 435002 - RNA, 22 nt, Human
uacaugaaccuuuaugugugau

SEQ ID NO: 435003 - RNA, 22 nt, Human
guaucuuuugguggaaaaauaa

SEQ ID NO: 435004 - RNA, 22 nt, Human
guggcagagggugagcuggacu

SEQ ID NO: 435005 - RNA, 22 nt, Human
ccuggagccccucuggccagcc

SEQ ID NO: 435006 - RNA, 22 nt, Human
agauuggagauggaagaaaagu

SEQ ID NO: 435007 - RNA, 22 nt, Human
cacaggaaucgucacuuagcgc

SEQ ID NO: 435008 - RNA, 22 nt, Human
ucuuagcaaauuuucuuugccu

SEQ ID NO: 435009 - RNA, 23 nt, Human
acagagacaaugguuucaucuug

SEQ ID NO: 435010 - RNA, 22 nt, Human
cagugccucuuaagugucaccc

SEQ ID NO: 435011 - RNA, 21 nt, Human
cuggacugaggagacagucgc

SEQ ID NO: 435012 - RNA, 22 nt, Human
cuauauucuggaauguccauuu

SEQ ID NO: 435013 - RNA, 22 nt, Human
gcaguacuuuaucacauggaau

SEQ ID NO: 435014 - RNA, 22 nt, Human
acaaaguuaacaguuggauagu

SEQ ID NO: 435015 - RNA, 22 nt, Human
gcuuacaggugaggcagcaaga

SEQ ID NO: 435016 - RNA, 22 nt, Human
uuggcucaccuggagccuguug

SEQ ID NO: 435017 - RNA, 22 nt, Human
cagagacacuuaacaggaaugg

SEQ ID NO: 435018 - RNA, 22 nt, Human
cugcuacaccggaauagugaca

SEQ ID NO: 435019 - RNA, 22 nt, Human
uccugaagcaguuagcaugagc

SEQ ID NO: 435020 - RNA, 22 nt, Human
aguggcagagccaggguuggga

SEQ ID NO: 435021 - RNA, 22 nt, Human
agguggcuguauucagcuguaa

SEQ ID NO: 435022 - RNA, 22 nt, Human
ugguaauuuauuuugagagauu

SEQ ID NO: 435023 - RNA, 23 nt, Human
ucacagagcauacugcauuuugc

SEQ ID NO: 435024 - RNA, 22 nt, Human
ugcuagggauauaguggcgagu

SEQ ID NO: 435025 - RNA, 22 nt, Human
ugugaggcuugaaguaauucca

SEQ ID NO: 435026 - RNA, 18 nt, Human
ugcaggcuguugaaacug

SEQ ID NO: 435027 - RNA, 22 nt, Human
aaaugcacaaagauuuugcacu

SEQ ID NO: 435028 - RNA, 22 nt, Human
ccccagcacuuggaguggggag

SEQ ID NO: 435029 - RNA, 21 nt, Human
gcagggacaaagcuucaggag

SEQ ID NO: 435030 - RNA, 22 nt, Human
ugaguggaguagugaaugcauu

SEQ ID NO: 435031 - RNA, 22 nt, Human
agaaggcaccguggccaauauu

SEQ ID NO: 435032 - RNA, 22 nt, Human
acuuugcacuaaguuacucauu

SEQ ID NO: 435033 - RNA, 20 nt, Human
uaucuaaaugcuuacauuac

SEQ ID NO: 435034 - RNA, 22 nt, Human
aucuuauuuaacacagcaaaac

SEQ ID NO: 435035 - RNA, 22 nt, Human
ugcccuguuaucuuggaagagu

SEQ ID NO: 435036 - RNA, 22 nt, Human
ucaugccaauuucugcauggcu

SEQ ID NO: 435037 - RNA, 22 nt, Human
ucaggccugagaaaaauccuuu

SEQ ID NO: 435038 - RNA, 20 nt, Human
uccucagaagacauuugggg

SEQ ID NO: 435039 - RNA, 22 nt, Human
uagcugucagcaaucaaguggu

SEQ ID NO: 435040 - RNA, 20 nt, Human
aauuauauaacuccaacauu

SEQ ID NO: 435041 - RNA, 22 nt, Human
agcagggacuacgugaaaguga

SEQ ID NO: 435042 - RNA, 22 nt, Human
ugcccagcgcccacauucuguc

SEQ ID NO: 435043 - RNA, 22 nt, Human
ggccuugggcuggcugcaguau

SEQ ID NO: 435044 - RNA, 22 nt, Human
aauuuacaggugcacucgccau

SEQ ID NO: 435045 - RNA, 23 nt, Human
uggcccugaaucuguccuggagg

SEQ ID NO: 435046 - RNA, 21 nt, Human
gcagagcuggaaccaggaccc

SEQ ID NO: 435047 - RNA, 22 nt, Human
acuuuguugaugaaauaguuuu

SEQ ID NO: 435048 - RNA, 22 nt, Human
aaggcagcaacuaauggaucuc

SEQ ID NO: 435049 - RNA, 22 nt, Human
ccucagaguuggaaucacauuu

SEQ ID NO: 435050 - RNA, 22 nt, Human
cuaaaggcucagcauucuuuuc

SEQ ID NO: 435051 - RNA, 22 nt, Human
uuuucuccccagagaccaucau

SEQ ID NO: 435052 - RNA, 22 nt, Human
caagagcugaggcuggagaggu

SEQ ID NO: 435053 - RNA, 22 nt, Human
ucaguacuugcauccucuccuu

SEQ ID NO: 435054 - RNA, 22 nt, Human
guggccugucagaagccguggg

SEQ ID NO: 435055 - RNA, 22 nt, Human
auacuuauacuaagaauguacu

SEQ ID NO: 435056 - RNA, 22 nt, Human
cacuggaauguugaggagacaa

SEQ ID NO: 435057 - RNA, 22 nt, Human
ccuggaaagcgguucauuuugu

SEQ ID NO: 435058 - RNA, 22 nt, Human
auuguugucuuuaccuguauuu

SEQ ID NO: 435059 - RNA, 22 nt, Human
augucuuugccauaguucauau

SEQ ID NO: 435060 - RNA, 22 nt, Human
gacaugcaguucucaaggguag

SEQ ID NO: 435061 - RNA, 22 nt, Human
gagggcaguagccucguacccu

SEQ ID NO: 435062 - RNA, 22 nt, Human
uaugacaaaugauauauuuggc

SEQ ID NO: 435063 - RNA, 19 nt, Human
uucuucuaccucuaccacu

SEQ ID NO: 435064 - RNA, 22 nt, Human
cugaaaauguuacacaggaaga

SEQ ID NO: 435065 - RNA, 22 nt, Human
auucaaacuguguuaggcagca

SEQ ID NO: 435066 - RNA, 22 nt, Human
cuuuauuguccuucuuaggugg

SEQ ID NO: 435067 - RNA, 23 nt, Human
cacauggaggaccguucuuauaa

SEQ ID NO: 435068 - RNA, 22 nt, Human
uugagacacaaggcacaguaag

SEQ ID NO: 435069 - RNA, 22 nt, Human
cccagccucuguuugcuccucu

SEQ ID NO: 435070 - RNA, 20 nt, Human
ucccucaguuuccagcccug

SEQ ID NO: 435071 - RNA, 22 nt, Human
aagcacagagagguaaaguaac

SEQ ID NO: 435072 - RNA, 21 nt, Human
acagggcaugcagcuggcugu

SEQ ID NO: 435073 - RNA, 22 nt, Human
ucagaggaacuggacuaaagcc

SEQ ID NO: 435074 - RNA, 22 nt, Human
ccacagagacagagcccagggu

SEQ ID NO: 435075 - RNA, 22 nt, Human
auuauugcaagcagugaaggga

SEQ ID NO: 435076 - RNA, 21 nt, Human
gggagcuggaaacugggugac

SEQ ID NO: 435077 - RNA, 22 nt, Human
gcaaauggagugaagagcugga

SEQ ID NO: 435078 - RNA, 22 nt, Human
aagcagaacugggaaguagugg

SEQ ID NO: 435079 - RNA, 22 nt, Human
ggcuccaguuuccccuuggggc

SEQ ID NO: 435080 - RNA, 22 nt, Human
aaguguguugacugaauugggg

SEQ ID NO: 435081 - RNA, 22 nt, Human
auccaugaucaauuuauuacua

SEQ ID NO: 435082 - RNA, 22 nt, Human
gagcagcuugcgcugucuucac

SEQ ID NO: 435083 - RNA, 22 nt, Human
ugccugggaaccaauccuggcu

SEQ ID NO: 435084 - RNA, 22 nt, Human
auucacacauacucauguguga

SEQ ID NO: 435085 - RNA, 22 nt, Human
gugaaggcaaugauaagaguga

SEQ ID NO: 435086 - RNA, 22 nt, Human
aaagacaugacacauuggagag

SEQ ID NO: 435087 - RNA, 22 nt, Human
gaaucuagggccuagaucacag

SEQ ID NO: 435088 - RNA, 22 nt, Human
cagguggguguaugaaugcaaa

SEQ ID NO: 435089 - RNA, 22 nt, Human
aagcacagagaugggcacgccu

SEQ ID NO: 435090 - RNA, 22 nt, Human
aguggcagagugcacucaggca

SEQ ID NO: 435091 - RNA, 22 nt, Human
acuccagggaggugagugugcg

SEQ ID NO: 435092 - RNA, 22 nt, Human
acgagguuggagaguuguuugg

SEQ ID NO: 435093 - RNA, 22 nt, Human
aauacagaggggucacaauuca

SEQ ID NO: 435094 - RNA, 22 nt, Human
acagagcugggugcccccugga

SEQ ID NO: 435095 - RNA, 22 nt, Human
agcccuggggugcagaaccaug

SEQ ID NO: 435096 - RNA, 22 nt, Human
cuucaagauauuucuagaauca

SEQ ID NO: 435097 - RNA, 22 nt, Human
uacugcaucgaaaugcuuuuau

SEQ ID NO: 435098 - RNA, 22 nt, Human
caauucaauggcaaaguauugu

SEQ ID NO: 435099 - RNA, 22 nt, Human
cacugagaccagagucccugac

SEQ ID NO: 435100 - RNA, 22 nt, Human
gcaggaugggagcuucacuuug

SEQ ID NO: 435101 - RNA, 20 nt, Human
gucagugucuucaguaguga

SEQ ID NO: 435102 - RNA, 19 nt, Human
uugaaauuguuugauaugg

SEQ ID NO: 435103 - RNA, 22 nt, Human
cugugugugcuacaggcuucca

SEQ ID NO: 435104 - RNA, 22 nt, Human
acaaaugacuauuugguacagg

SEQ ID NO: 435105 - RNA, 22 nt, Human
gucccagggaagaaggcagcac

SEQ ID NO: 435106 - RNA, 22 nt, Human
ccacaguagaauucaucucccu

SEQ ID NO: 435107 - RNA, 22 nt, Human
uguaccauauauguuacugacu

SEQ ID NO: 435108 - RNA, 22 nt, Human
agugcuuuuauuauauacagga

SEQ ID NO: 435109 - RNA, 22 nt, Human
gcugggcuugguuucccugcuu

SEQ ID NO: 435110 - RNA, 22 nt, Human
caguccugagcuccugggcuga

SEQ ID NO: 435111 - RNA, 21 nt, Human
agugacagaggaaggugcaua

SEQ ID NO: 435112 - RNA, 20 nt, Human
aggcaccugucacaggugag

SEQ ID NO: 435113 - RNA, 22 nt, Human
caggacagcucaacaccuccuc

SEQ ID NO: 435114 - RNA, 22 nt, Human
gaggaagagcauggccaguuuc

SEQ ID NO: 435115 - RNA, 22 nt, Human
gagaacaggcucuggagucaga

SEQ ID NO: 435116 - RNA, 22 nt, Human
cuggagggaggaggcugcuauu

SEQ ID NO: 435117 - RNA, 22 nt, Human
gugggccacugggaggcaaggg

SEQ ID NO: 435118 - RNA, 22 nt, Human
guggccugccgugugguauggg

SEQ ID NO: 435119 - RNA, 17 nt, Human
uuauugcagugcugaag

SEQ ID NO: 435120 - RNA, 22 nt, Human
aggcuucuuuuagaggggaugg

SEQ ID NO: 435121 - RNA, 22 nt, Human
aggcuggaaagggaccagagug

SEQ ID NO: 435122 - RNA, 22 nt, Human
aagcacagcuggaacagcagga

SEQ ID NO: 435123 - RNA, 22 nt, Human
gccugccuuugugaggaagcgg

SEQ ID NO: 435124 - RNA, 22 nt, Human
uugaacaauuugguauacaaac

SEQ ID NO: 435125 - RNA, 22 nt, Human
agagacaggguuuugucguguu

SEQ ID NO: 435126 - RNA, 22 nt, Human
auuugcuuguaaauguaugccu

SEQ ID NO: 435127 - RNA, 22 nt, Human
cacaugaagauucaacuggaug

SEQ ID NO: 435128 - RNA, 22 nt, Human
uuauuuauucauucugucuguc

SEQ ID NO: 435129 - RNA, 22 nt, Human
caguccugcuggccuucccugg

SEQ ID NO: 435130 - RNA, 22 nt, Human
cacugccuccccaggcuccaca

SEQ ID NO: 435131 - RNA, 22 nt, Human
ggcacagggggcugaggacuag

SEQ ID NO: 435132 - RNA, 17 nt, Human
cugaggcccagggccca

SEQ ID NO: 435133 - RNA, 22 nt, Human
auuugcaaugauuucagugcuu

SEQ ID NO: 435134 - RNA, 22 nt, Human
ccagcagccaccuucucgaaau

SEQ ID NO: 435135 - RNA, 22 nt, Human
uuuagcaaaaaagcucugcgua

SEQ ID NO: 435136 - RNA, 22 nt, Human
ccacaguaacuguuuuguaccg

SEQ ID NO: 435137 - RNA, 22 nt, Human
uaucuuuagaggaagagaaucu

SEQ ID NO: 435138 - RNA, 22 nt, Human
cacuuguugguggugaaaucac

SEQ ID NO: 435139 - RNA, 22 nt, Human
uuuaaauuuagaagaaacacug

SEQ ID NO: 435140 - RNA, 22 nt, Human
aaaugcacugaacacauguugu

SEQ ID NO: 435141 - RNA, 22 nt, Human
ggaacauuuaaauucuuauuug

SEQ ID NO: 435142 - RNA, 22 nt, Human
ugggagcccaagggagcugccg

SEQ ID NO: 435143 - RNA, 22 nt, Human
gagagggccgggggccagcucc

SEQ ID NO: 435144 - RNA, 22 nt, Human
uuggcugaaagccaugagaccg

SEQ ID NO: 435145 - RNA, 22 nt, Human
aucacaauguacguuaaaaugu

SEQ ID NO: 435146 - RNA, 22 nt, Human
caauuucucgaacucuaaucca

SEQ ID NO: 435147 - RNA, 22 nt, Human
agaagccauguuuaguaggaug

SEQ ID NO: 435148 - RNA, 20 nt, Human
ugggugccugccacggggcc

SEQ ID NO: 435149 - RNA, 20 nt, Human
acccagcucugugcccuggg

SEQ ID NO: 435150 - RNA, 22 nt, Human
uauauuaaacccucucuguagg

SEQ ID NO: 435151 - RNA, 22 nt, Human
ccccuccuggccacacugucag

SEQ ID NO: 435152 - RNA, 22 nt, Human
gaggcuggaggucaaagaugaa

SEQ ID NO: 435153 - RNA, 22 nt, Human
gcucuugaggaagugcagggca

SEQ ID NO: 435154 - RNA, 22 nt, Human
ucaugcaguuugaaguucaggg

SEQ ID NO: 435155 - RNA, 18 nt, Human
agcugguggggagacagc

SEQ ID NO: 435156 - RNA, 22 nt, Human
agcagcuguuagaaacaggaag

SEQ ID NO: 435157 - RNA, 23 nt, Human
ugauuacaagggccaaagaaagg

SEQ ID NO: 435158 - RNA, 17 nt, Human
uuugaaaggaugucagu

SEQ ID NO: 435159 - RNA, 22 nt, Human
ggagcugcuccuucagccaagu

SEQ ID NO: 435160 - RNA, 22 nt, Human
gccugccugcugugugcaaguu

SEQ ID NO: 435161 - RNA, 22 nt, Human
cugucauuguacauguuauaca

SEQ ID NO: 435162 - RNA, 22 nt, Human
gcuccaggagagggaagcagau

SEQ ID NO: 435163 - RNA, 22 nt, Human
aauguaaaguugggcacaaaug

SEQ ID NO: 435164 - RNA, 22 nt, Human
cggcuggugucgggcacagcaa

SEQ ID NO: 435165 - RNA, 22 nt, Human
gcuggagcuugagaggacaggg

SEQ ID NO: 435166 - RNA, 22 nt, Human
agccuggacagcuacggagaac

SEQ ID NO: 435167 - RNA, 22 nt, Human
cagcccaguaccaagcaguugg

SEQ ID NO: 435168 - RNA, 22 nt, Human
gaggaaugggugucucgugauu

SEQ ID NO: 435169 - RNA, 22 nt, Human
augcccugaaagauucaaaggc

SEQ ID NO: 435170 - RNA, 22 nt, Human
gaguccuggaacccugaaugcu

SEQ ID NO: 435171 - RNA, 22 nt, Human
acugggagucaugaggaaggag

SEQ ID NO: 435172 - RNA, 22 nt, Human
ccagcugguuaaaauagagaaa

SEQ ID NO: 435173 - RNA, 22 nt, Human
ccuggugcugcuaucaggggua

SEQ ID NO: 435174 - RNA, 22 nt, Human
gagagcuggguucaaguagcug

SEQ ID NO: 435175 - RNA, 22 nt, Human
agcuaggggaccaagguggccc

SEQ ID NO: 435176 - RNA, 22 nt, Human
cccacagugaucgcauucguac

SEQ ID NO: 435177 - RNA, 22 nt, Human
ugccuggcacagagcagguggc

SEQ ID NO: 435178 - RNA, 22 nt, Human
uuuuacaagcugagucguuaaa

SEQ ID NO: 435179 - RNA, 22 nt, Human
caggcacaguguugcuguucaa

SEQ ID NO: 435180 - RNA, 22 nt, Human
ucaggcugaccagguuuugcuc

SEQ ID NO: 435181 - RNA, 21 nt, Human
aggcagaaagagcccaggcug

SEQ ID NO: 435182 - RNA, 22 nt, Human
cagcagcaguguucuagaaucu

SEQ ID NO: 435183 - RNA, 21 nt, Human
uggcucugagccucauggcug

SEQ ID NO: 435184 - RNA, 17 nt, Human
guccugggaggagagag

SEQ ID NO: 435185 - RNA, 22 nt, Human
uuuagcaaguucucugagagaa

SEQ ID NO: 435186 - RNA, 22 nt, Human
uauugcaauuggcagagugcua

SEQ ID NO: 435187 - RNA, 22 nt, Human
uuuauccaugcucccguugaug

SEQ ID NO: 435188 - RNA, 17 nt, Human
ggcuggaggggacccgg

SEQ ID NO: 435189 - RNA, 22 nt, Human
aagacaauuuugaguaugcaca

SEQ ID NO: 435190 - RNA, 22 nt, Human
uuugcaaaaugaggugaagagu

SEQ ID NO: 435191 - RNA, 22 nt, Human
caaggcaggucugaggagguug

SEQ ID NO: 435192 - RNA, 22 nt, Human
uguggccagccacaggcauggu

SEQ ID NO: 435193 - RNA, 20 nt, Human
agcaguuuccuaacucagcu

SEQ ID NO: 435194 - RNA, 22 nt, Human
gcagcugagagaagaacagggc

SEQ ID NO: 435195 - RNA, 21 nt, Human
uggccagcuggagucuccaca

SEQ ID NO: 435196 - RNA, 22 nt, Human
ugcagauacaguauguggaagc

SEQ ID NO: 435197 - RNA, 22 nt, Human
ccaauucauccucuggggcuuc

SEQ ID NO: 435198 - RNA, 22 nt, Human
acuccagagcucacaugucuaa

SEQ ID NO: 435199 - RNA, 22 nt, Human
aggagccaagaugcugucuggc

SEQ ID NO: 435200 - RNA, 22 nt, Human
uggccagccauaaaagaaccca

SEQ ID NO: 435201 - RNA, 20 nt, Human
ggcugugcccuuccguggcc

SEQ ID NO: 435202 - RNA, 18 nt, Human
aagcugcccucaggcagg

SEQ ID NO: 435203 - RNA, 22 nt, Human
ucugggcuauauggucucugcu

SEQ ID NO: 435204 - RNA, 22 nt, Human
gcagugcuaaggauucugccuu

SEQ ID NO: 435205 - RNA, 22 nt, Human
auucagaaauagaaaauuugau

SEQ ID NO: 435206 - RNA, 22 nt, Human
acacaauacagggcucaaaaua

SEQ ID NO: 435207 - RNA, 19 nt, Human
acacagggcuagaguuaca

SEQ ID NO: 435208 - RNA, 22 nt, Human
cccuggagcugcuugcauguug

SEQ ID NO: 435209 - RNA, 22 nt, Human
uugcagcuuagugauguuaucu

SEQ ID NO: 435210 - RNA, 22 nt, Human
agguaaggcuguaagcuaagcc

SEQ ID NO: 435211 - RNA, 22 nt, Human
agagcagauggagcuggaagag

SEQ ID NO: 435212 - RNA, 22 nt, Human
gagcucccuggagguucagaua

SEQ ID NO: 435213 - RNA, 22 nt, Human
ugggcaagucacuucugucuuu

SEQ ID NO: 435214 - RNA, 20 nt, Human
caggccucugggggcccugg

SEQ ID NO: 435215 - RNA, 22 nt, Human
agaagugccauacuguggucca

SEQ ID NO: 435216 - RNA, 22 nt, Human
ugagccagauaagggcucacgc

SEQ ID NO: 435217 - RNA, 22 nt, Human
gccugugcauagcagcggacuc

SEQ ID NO: 435218 - RNA, 22 nt, Human
aagagacuggaaacuaggguca

SEQ ID NO: 435219 - RNA, 22 nt, Human
uccugccucuugccuucuucac

SEQ ID NO: 435220 - RNA, 22 nt, Human
ugguacaaaaguaauugcguga

SEQ ID NO: 435221 - RNA, 22 nt, Human
gucugugcaguuacuagcuggu

SEQ ID NO: 435222 - RNA, 17 nt, Human
ucagcaguaaugguggg

SEQ ID NO: 435223 - RNA, 19 nt, Human
gccagcagaaugaugaggc

SEQ ID NO: 435224 - RNA, 22 nt, Human
agcagagcggggccuccggaag

SEQ ID NO: 435225 - RNA, 22 nt, Human
gucccuaguggaaagacaugau

SEQ ID NO: 435226 - RNA, 22 nt, Human
auuuuacuuaguguaaugucca

SEQ ID NO: 435227 - RNA, 22 nt, Human
uuuauuguuaucaugggugagu

SEQ ID NO: 435228 - RNA, 22 nt, Human
cagagcuuucugucacauuagu

SEQ ID NO: 435229 - RNA, 22 nt, Human
acaggcugccuaccaaguauca

SEQ ID NO: 435230 - RNA, 22 nt, Human
uauaaaauggcaucagcuccaa

SEQ ID NO: 435231 - RNA, 22 nt, Human
cugagaauggacagcagggcag

SEQ ID NO: 435232 - RNA, 22 nt, Human
ugcuacagagccaggaagagug

SEQ ID NO: 435233 - RNA, 23 nt, Human
ucaaacauauugugagacacagg

SEQ ID NO: 435234 - RNA, 17 nt, Human
uccagagcacagagcuc

SEQ ID NO: 435235 - RNA, 22 nt, Human
aagggcagaauagagaagaugg

SEQ ID NO: 435236 - RNA, 22 nt, Human
cagagcugguaagugguagagg

SEQ ID NO: 435237 - RNA, 19 nt, Human
uagcugccuguuaccucca

SEQ ID NO: 435238 - RNA, 22 nt, Human
ccagcccuguaaggaugaggca

SEQ ID NO: 435239 - RNA, 22 nt, Human
aggaugagauuccagggucaau

SEQ ID NO: 435240 - RNA, 22 nt, Human
gaguugaagaaauaguuuugau

SEQ ID NO: 435241 - RNA, 22 nt, Human
caaauacugagcacgcaaucaa

SEQ ID NO: 435242 - RNA, 16 nt, Human
gcuaggcaacaggcug

SEQ ID NO: 435243 - RNA, 22 nt, Human
ggcaggcaggucuucauggccc

SEQ ID NO: 435244 - RNA, 22 nt, Human
caacaguuccuccauccucucu

SEQ ID NO: 435245 - RNA, 22 nt, Human
uucaaguaugagaaaggggacu

SEQ ID NO: 435246 - RNA, 22 nt, Human
cauguacaaaaggcaaaugccu

SEQ ID NO: 435247 - RNA, 22 nt, Human
gcuguuucggccuccuggggaa

SEQ ID NO: 435248 - RNA, 22 nt, Human
uucuuuauguuaaugaaucuau

SEQ ID NO: 435249 - RNA, 22 nt, Human
ugcagcccagccccagaaccuu

SEQ ID NO: 435250 - RNA, 22 nt, Human
ugaggcaguucuuacuuguauu

SEQ ID NO: 435251 - RNA, 18 nt, Human
acaaaggaucaugaggga

SEQ ID NO: 435252 - RNA, 22 nt, Human
ggagcugcacgcucugaagccu

SEQ ID NO: 435253 - RNA, 22 nt, Human
gaggccugggagccuguccucc

SEQ ID NO: 435254 - RNA, 22 nt, Human
ccacaagaugcaaacucuaaca

SEQ ID NO: 435255 - RNA, 22 nt, Human
ggcacagcacaguggacccagg

SEQ ID NO: 435256 - RNA, 22 nt, Human
ugaugaggagacuguggcuugg

SEQ ID NO: 435257 - RNA, 21 nt, Human
agcuguuugaagcuauauugg

SEQ ID NO: 435258 - RNA, 17 nt, Human
acagcagggaaguguug

SEQ ID NO: 435259 - RNA, 22 nt, Human
auucagaaagcaagugcugggu

SEQ ID NO: 435260 - RNA, 22 nt, Human
gccucccuguucuuccacaaua

SEQ ID NO: 435261 - RNA, 18 nt, Human
uggagcagguaggcauga

SEQ ID NO: 435262 - RNA, 22 nt, Human
acagagcauuugggacagagag

SEQ ID NO: 435263 - RNA, 22 nt, Human
gacaggaagucugaaggaggga

SEQ ID NO: 435264 - RNA, 22 nt, Human
uucagcacuuuguuuugcucau

SEQ ID NO: 435265 - RNA, 22 nt, Human
ugcccacagauaugugcagucu

SEQ ID NO: 435266 - RNA, 22 nt, Human
acuuuccuggcccuguccucug

SEQ ID NO: 435267 - RNA, 22 nt, Human
uuguacaacguuuuaaauuuga

SEQ ID NO: 435268 - RNA, 22 nt, Human
cacugcccaggaccugccaccc

SEQ ID NO: 435269 - RNA, 17 nt, Human
aauagcugcucagagag

SEQ ID NO: 435270 - RNA, 22 nt, Human
aaguucaagagugacauauuag

SEQ ID NO: 435271 - RNA, 22 nt, Human
ucccugcucagcucaccuggca

SEQ ID NO: 435272 - RNA, 22 nt, Human
ggagcugaaggggugggcucag

SEQ ID NO: 435273 - RNA, 22 nt, Human
gcacugguguguuaguaaggga

SEQ ID NO: 435274 - RNA, 22 nt, Human
uugauuaaaaugagacaucauu

SEQ ID NO: 435275 - RNA, 22 nt, Human
aauuaaaugacaggggaagaug

SEQ ID NO: 435276 - RNA, 21 nt, Human
aagaaagauaauuaaggaccc

SEQ ID NO: 435277 - RNA, 19 nt, Human
ugagacagagaccaguucu

SEQ ID NO: 435278 - RNA, 22 nt, Human
agcucacaguguccuuccucaa

SEQ ID NO: 435279 - RNA, 22 nt, Human
gccaggaaugcauaaaugaccu

SEQ ID NO: 435280 - RNA, 22 nt, Human
auucaauaaauaugcuacaugg

SEQ ID NO: 435281 - RNA, 22 nt, Human
cugcauaucaaauuacuccugg

SEQ ID NO: 435282 - RNA, 22 nt, Human
ccaaggcuccucagcuggucuu

SEQ ID NO: 435283 - RNA, 22 nt, Human
uuucucccaacucuggaagcca

SEQ ID NO: 435284 - RNA, 22 nt, Human
caguguggcugagacagaggcu

SEQ ID NO: 435285 - RNA, 17 nt, Human
cuaagggcccacucuuc

SEQ ID NO: 435286 - RNA, 22 nt, Human
guagaaaugguguguuucuucu

SEQ ID NO: 435287 - RNA, 22 nt, Human
agagccugcuguguaagucaca

SEQ ID NO: 435288 - RNA, 22 nt, Human
ugaagacucagaagcuaagaua

SEQ ID NO: 435289 - RNA, 20 nt, Human
aagagaagaagucuuugaaa

SEQ ID NO: 435290 - RNA, 22 nt, Human
ccucugagagaaggccuucagc

SEQ ID NO: 435291 - RNA, 19 nt, Human
ggaugagggucaggcauag

SEQ ID NO: 435292 - RNA, 21 nt, Human
agcacagcauauccaauguca

SEQ ID NO: 435293 - RNA, 22 nt, Human
gaaggcugucagagaggagggc

SEQ ID NO: 435294 - RNA, 22 nt, Human
ccagugcaggugagcaccaggu

SEQ ID NO: 435295 - RNA, 23 nt, Human
auuuuuugucuuuguaacuagau

SEQ ID NO: 435296 - RNA, 22 nt, Human
auugagaagaaaaucuaauaua

SEQ ID NO: 435297 - RNA, 22 nt, Human
ccacaguaagagauaguuuaug

SEQ ID NO: 435298 - RNA, 19 nt, Human
ccugugagaggacaggugu

SEQ ID NO: 435299 - RNA, 22 nt, Human
aagagcuggcucuugcagcagc

SEQ ID NO: 435300 - RNA, 22 nt, Human
ugcucaguuaagcagaggaaau

SEQ ID NO: 435301 - RNA, 22 nt, Human
guggcacacaggagagagcuca

SEQ ID NO: 435302 - RNA, 22 nt, Human
gcuuucucuucacugauguuca

SEQ ID NO: 435303 - RNA, 22 nt, Human
acagggcagagaggcaggcuug

SEQ ID NO: 435304 - RNA, 22 nt, Human
cuucuugacuucugggugcccu

SEQ ID NO: 435305 - RNA, 22 nt, Human
ugcauauuuguaugauguuuag

SEQ ID NO: 435306 - RNA, 22 nt, Human
ugccuggcaacuguggugggcu

SEQ ID NO: 435307 - RNA, 22 nt, Human
uaaaggcaguaauuccugaguu

SEQ ID NO: 435308 - RNA, 22 nt, Human
uuguuacacauaauaacauuuu

SEQ ID NO: 435309 - RNA, 16 nt, Human
aucuaagaugugcauu

SEQ ID NO: 435310 - RNA, 20 nt, Human
gcuggcugaacugaaagcaa

SEQ ID NO: 435311 - RNA, 22 nt, Human
ccccucagguacccgugcagca

SEQ ID NO: 435312 - RNA, 22 nt, Human
ugacacagauuagagacauacc

SEQ ID NO: 435313 - RNA, 22 nt, Human
gacaggcaccuugucugucuug

SEQ ID NO: 435314 - RNA, 22 nt, Human
uacagaggcuggguuuucaggg

SEQ ID NO: 435315 - RNA, 22 nt, Human
uggggccugagguggagcugca

SEQ ID NO: 435316 - RNA, 22 nt, Human
cagucuaaucuguuacucauua

SEQ ID NO: 435317 - RNA, 22 nt, Human
aggcaguuuaggcagcgauuua

SEQ ID NO: 435318 - RNA, 22 nt, Human
ugcauuggucuuaaucuucagg

SEQ ID NO: 435319 - RNA, 22 nt, Human
ggcaccuggauguagcagugaa

SEQ ID NO: 435320 - RNA, 22 nt, Human
ccucaggguggcaucagaucuu

SEQ ID NO: 435321 - RNA, 22 nt, Human
agcauggggcuccgcaaugaac

SEQ ID NO: 435322 - RNA, 22 nt, Human
aggacagcccccaacagcaaca

SEQ ID NO: 435323 - RNA, 22 nt, Human
guggcuugaccaucccugcuac

SEQ ID NO: 435324 - RNA, 22 nt, Human
caggcccugggcaggcacagag

SEQ ID NO: 435325 - RNA, 22 nt, Human
uccugcagagacagaggccuca

SEQ ID NO: 435326 - RNA, 22 nt, Human
cccagcacaggcaauuccauac

SEQ ID NO: 435327 - RNA, 22 nt, Human
uuggccagcucuggaaaguggu

SEQ ID NO: 435328 - RNA, 22 nt, Human
ucugaggggcuggaagggcugc

SEQ ID NO: 435329 - RNA, 22 nt, Human
caggacagaaauaaggaauaua

SEQ ID NO: 435330 - RNA, 22 nt, Human
gaugcaaacugugacauagagu

SEQ ID NO: 435331 - RNA, 22 nt, Human
augcauauucuuagccccuccu

SEQ ID NO: 435332 - RNA, 20 nt, Human
aggguggcaaguuagugaca

SEQ ID NO: 435333 - RNA, 22 nt, Human
ugcaauaaguuguguuaucacu

SEQ ID NO: 435334 - RNA, 22 nt, Human
ucuaacauugaauggcugauua

SEQ ID NO: 435335 - RNA, 22 nt, Human
uggcuccuaggauggugccugg

SEQ ID NO: 435336 - RNA, 22 nt, Human
ccuggcucuguccucgcgcaaa

SEQ ID NO: 435337 - RNA, 22 nt, Human
uauguacauaacaugaaaugca

SEQ ID NO: 435338 - RNA, 22 nt, Human
caugugucaaaugauguagcug

SEQ ID NO: 435339 - RNA, 22 nt, Human
auucaaaugucaaauccaccag

SEQ ID NO: 435340 - RNA, 20 nt, Human
cacucuaaccauauuuccuc

SEQ ID NO: 435341 - RNA, 22 nt, Human
auauuuugaaguuaauaaugug

SEQ ID NO: 435342 - RNA, 22 nt, Human
ucuccaggugacucugauguau

SEQ ID NO: 435343 - RNA, 22 nt, Human
cccaggcuggagugcaauggca

SEQ ID NO: 435344 - RNA, 22 nt, Human
ucacugcaaucucugccuucca

SEQ ID NO: 435345 - RNA, 22 nt, Human
cguugugagcuugguagacacu

SEQ ID NO: 435346 - RNA, 22 nt, Human
aaguucaaggugauaguggcag

SEQ ID NO: 435347 - RNA, 22 nt, Human
cccaggaguuugaguucagcau

SEQ ID NO: 435348 - RNA, 22 nt, Human
agaacagcagcacgucaagcug

SEQ ID NO: 435349 - RNA, 22 nt, Human
aaaugcaucagcucauaagaga

SEQ ID NO: 435350 - RNA, 23 nt, Human
agcagcccagaugccuuccaucc

SEQ ID NO: 435351 - RNA, 22 nt, Human
ucugaaaauguugacuuuguuu

SEQ ID NO: 435352 - RNA, 22 nt, Human
acacaggaggaggauggugguc

SEQ ID NO: 435353 - RNA, 22 nt, Human
agagcugcaauuucauguggug

SEQ ID NO: 435354 - RNA, 22 nt, Human
ucaggccugcagugccaaccca

SEQ ID NO: 435355 - RNA, 21 nt, Human
agguuucugugagcagagcag

SEQ ID NO: 435356 - RNA, 22 nt, Human
ugaaguaggcagcaugcugaga

SEQ ID NO: 435357 - RNA, 22 nt, Human
aggggccauuguucugcccgcu

SEQ ID NO: 435358 - RNA, 22 nt, Human
ucagaguuggccuuucuguauu

SEQ ID NO: 435359 - RNA, 22 nt, Human
ggcacagcugaugcagacacac

SEQ ID NO: 435360 - RNA, 20 nt, Human
cagaccugcacccacuucga

SEQ ID NO: 435361 - RNA, 22 nt, Human
auggcagaccugggcuggagaa

SEQ ID NO: 435362 - RNA, 22 nt, Human
uucucuacuucacaagggaugg

SEQ ID NO: 435363 - RNA, 22 nt, Human
gcagccacuaguuuuccuguuu

SEQ ID NO: 435364 - RNA, 17 nt, Human
gccagggagaggaagcc

SEQ ID NO: 435365 - RNA, 22 nt, Human
cccaggagaugcacuccauugg

SEQ ID NO: 435366 - RNA, 22 nt, Human
ucaaaacccagccaucaggacu

SEQ ID NO: 435367 - RNA, 22 nt, Human
ggaggacaggggcugcagcaca

SEQ ID NO: 435368 - RNA, 22 nt, Human
uuaugacagaaaugaaaagcug

SEQ ID NO: 435369 - RNA, 20 nt, Human
caccagucaugagucaauac

SEQ ID NO: 435370 - RNA, 22 nt, Human
caagugucuauaucagugcuug

SEQ ID NO: 435371 - RNA, 22 nt, Human
agcugguaaaggggaaagcaga

SEQ ID NO: 435372 - RNA, 19 nt, Human
cacuucaauccuuuaucaa

SEQ ID NO: 435373 - RNA, 22 nt, Human
cacaggcagccuuguagaagaa

SEQ ID NO: 435374 - RNA, 22 nt, Human
aagcccugggauguucagcagu

SEQ ID NO: 435375 - RNA, 22 nt, Human
gcccagcccugaggucacagcu

SEQ ID NO: 435376 - RNA, 22 nt, Human
ucucuggguugagaacuaggac

SEQ ID NO: 435377 - RNA, 22 nt, Human
cagcagcaccuauuauaguguu

SEQ ID NO: 435378 - RNA, 22 nt, Human
guccuagugccuggaagcuggg

SEQ ID NO: 435379 - RNA, 22 nt, Human
gaggcagccagagguucucauu

SEQ ID NO: 435380 - RNA, 22 nt, Human
caguugagucugcuagcuagga

SEQ ID NO: 435381 - RNA, 22 nt, Human
ugccuggguccaggccaagccu

SEQ ID NO: 435382 - RNA, 22 nt, Human
guucagaguauuaauugauuua

SEQ ID NO: 435383 - RNA, 22 nt, Human
acaacauuuccauuuccuuggu

SEQ ID NO: 435384 - RNA, 22 nt, Human
cugucauuuaagacauucugga

SEQ ID NO: 435385 - RNA, 23 nt, Human
acacauuuuucccguucugaggu

SEQ ID NO: 435386 - RNA, 23 nt, Human
uuugcaaauuuuccugacuacuc

SEQ ID NO: 435387 - RNA, 22 nt, Human
ccccagcacucugacucuuacc

SEQ ID NO: 435388 - RNA, 22 nt, Human
caguacauuucauaugauucua

SEQ ID NO: 435389 - RNA, 22 nt, Human
uuuugguacaugcaauagcaau

SEQ ID NO: 435390 - RNA, 22 nt, Human
gcucacuggccugaagaggacg

SEQ ID NO: 435391 - RNA, 22 nt, Human
ggcucaggagaggggcuaaaag

SEQ ID NO: 435392 - RNA, 22 nt, Human
aggugccugucgucucugguua

SEQ ID NO: 435393 - RNA, 22 nt, Human
acuauaaaaggauaaaccagaa

SEQ ID NO: 435394 - RNA, 22 nt, Human
ugggauggcauccugggccuug

SEQ ID NO: 435395 - RNA, 23 nt, Human
cccagcgcugagcccugcaggca

SEQ ID NO: 435396 - RNA, 22 nt, Human
gccagcagcccagaaggacuuu

SEQ ID NO: 435397 - RNA, 18 nt, Human
caggagcaggaguugaac

SEQ ID NO: 435398 - RNA, 22 nt, Human
aaucacaugugggucuuguagc

SEQ ID NO: 435399 - RNA, 22 nt, Human
gagguuccagacagcuuaggga

SEQ ID NO: 435400 - RNA, 22 nt, Human
gcccagcagaucucagugucuc

SEQ ID NO: 435401 - RNA, 22 nt, Human
augcacuucaagcaucucucug

SEQ ID NO: 435402 - RNA, 22 nt, Human
cagggacucccaggguagcucc

SEQ ID NO: 435403 - RNA, 22 nt, Human
gcugggcagccuggccgcugcc

SEQ ID NO: 435404 - RNA, 22 nt, Human
cccuggaguccuggcaguugau

SEQ ID NO: 435405 - RNA, 22 nt, Human
gcucccacaaccuucuugcucc

SEQ ID NO: 435406 - RNA, 22 nt, Human
cagcccuggcgcccccagaucu

SEQ ID NO: 435407 - RNA, 22 nt, Human
uuccuuuagugucauauacuuu

SEQ ID NO: 435408 - RNA, 22 nt, Human
acagaacugggggcacagauag

SEQ ID NO: 435409 - RNA, 22 nt, Human
augucauuuaaauguuuguaua

SEQ ID NO: 435410 - RNA, 22 nt, Human
agaaagauccuucuggcugccu

SEQ ID NO: 435411 - RNA, 22 nt, Human
cgcauccagggcgcaggaucug

SEQ ID NO: 435412 - RNA, 19 nt, Human
ugcagaagacacaguggug

SEQ ID NO: 435413 - RNA, 22 nt, Human
cccagccuuugcuuccugguuc

SEQ ID NO: 435414 - RNA, 22 nt, Human
ugaggcaggacauggacaacug

SEQ ID NO: 435415 - RNA, 22 nt, Human
guccugucccccaaggcugugg

SEQ ID NO: 435416 - RNA, 22 nt, Human
agcacaauauggguuuuauagu

SEQ ID NO: 435417 - RNA, 19 nt, Human
cuguuucaaguaggaggag

SEQ ID NO: 435418 - RNA, 22 nt, Human
gcagcccaggagcaggcgaccc

SEQ ID NO: 435419 - RNA, 22 nt, Human
cuccaggacccaguggcuccag

SEQ ID NO: 435420 - RNA, 22 nt, Human
aaagagcuuuagaaaucucaga

SEQ ID NO: 435421 - RNA, 22 nt, Human
ugcaggagcugugcggugaggg

SEQ ID NO: 435422 - RNA, 22 nt, Human
acucuauaaagauaccucaauu

SEQ ID NO: 435423 - RNA, 22 nt, Human
gauuccuuuggugaacugccga

SEQ ID NO: 435424 - RNA, 22 nt, Human
aacauagaauuguuauauuuuc

SEQ ID NO: 435425 - RNA, 22 nt, Human
agcagugcuauggccaggcuaa

SEQ ID NO: 435426 - RNA, 22 nt, Human
uaaauguaccuucugccuuacu

SEQ ID NO: 435427 - RNA, 22 nt, Human
ucugaggcuucagacuguacug

SEQ ID NO: 435428 - RNA, 22 nt, Human
aacacuuuguugccuaugaacg

SEQ ID NO: 435429 - RNA, 22 nt, Human
cauuaagauuuuuuucuacugg

SEQ ID NO: 435430 - RNA, 22 nt, Human
ucagaauuguggagaaagggga

SEQ ID NO: 435431 - RNA, 22 nt, Human
augcaacaaaugcuacgaaucg

SEQ ID NO: 435432 - RNA, 22 nt, Human
uacagaacugaaguagugaaaa

SEQ ID NO: 435433 - RNA, 22 nt, Human
ggcuagggaaauccugauccaa

SEQ ID NO: 435434 - RNA, 22 nt, Human
ugggaagauggagugacaggca

SEQ ID NO: 435435 - RNA, 22 nt, Human
ucugggcuuuacacugugcuua

SEQ ID NO: 435436 - RNA, 21 nt, Human
auuuacaaaacagucccuucc

SEQ ID NO: 435437 - RNA, 22 nt, Human
uucaacaugcuuuauuucuaaa

SEQ ID NO: 435438 - RNA, 22 nt, Human
aguuuacauauuugucggaguc

SEQ ID NO: 435439 - RNA, 22 nt, Human
ccuggggagagaaagcccagcc

SEQ ID NO: 435440 - RNA, 22 nt, Human
ugcaacaggagaguucagggca

SEQ ID NO: 435441 - RNA, 22 nt, Human
gaggccucugucccgccaggga

SEQ ID NO: 435442 - RNA, 17 nt, Human
ucuuugcaaugagacug

SEQ ID NO: 435443 - RNA, 22 nt, Human
ccugggagccgacugacugugc

SEQ ID NO: 435444 - RNA, 22 nt, Human
gagaaggcuuccaaauucugug

SEQ ID NO: 435445 - RNA, 22 nt, Human
uacuuugcggcgcggaggagca

SEQ ID NO: 435446 - RNA, 22 nt, Human
caagcccaggauuccccaguua

SEQ ID NO: 435447 - RNA, 19 nt, Human
gcuggcagauguggccgug

SEQ ID NO: 435448 - RNA, 22 nt, Human
uuucaaaugcaugucuuuccuc

SEQ ID NO: 435449 - RNA, 22 nt, Human
uuugcuuuguuuaaaaguggua

SEQ ID NO: 435450 - RNA, 18 nt, Human
uaugagaagauuagcaau

SEQ ID NO: 435451 - RNA, 22 nt, Human
ggcugcugacaaacaugaucau

SEQ ID NO: 435452 - RNA, 22 nt, Human
aggcuaggcaugugcuaccaca

SEQ ID NO: 435453 - RNA, 22 nt, Human
gagggaaggucacccuuguagc

SEQ ID NO: 435454 - RNA, 22 nt, Human
gcagggacaaggcagguguucu

SEQ ID NO: 435455 - RNA, 22 nt, Human
uugcuuuucccugucucugauu

SEQ ID NO: 435456 - RNA, 22 nt, Human
cacaagacuuauuuguguagaa

SEQ ID NO: 435457 - RNA, 22 nt, Human
uaggcugggccugccuuccagg

SEQ ID NO: 435458 - RNA, 22 nt, Human
uacaguacagucuagacucugg

SEQ ID NO: 435459 - RNA, 22 nt, Human
aagugcauuagauagaaugaug

SEQ ID NO: 435460 - RNA, 22 nt, Human
guccccucaaaauucauauguu

SEQ ID NO: 435461 - RNA, 21 nt, Human
gcccuaggcuaccuggagcgc

SEQ ID NO: 435462 - RNA, 22 nt, Human
caagacauugauuuuguacaga

SEQ ID NO: 435463 - RNA, 22 nt, Human
caggccuggagugcaauggcac

SEQ ID NO: 435464 - RNA, 20 nt, Human
caggcagaggaugcugacca

SEQ ID NO: 435465 - RNA, 22 nt, Human
caucugaagagcuuugcaagag

SEQ ID NO: 435466 - RNA, 22 nt, Human
aggggcacgaguagagcucuag

SEQ ID NO: 435467 - RNA, 20 nt, Human
gcugaccccugcugucaugc

SEQ ID NO: 435468 - RNA, 22 nt, Human
uacaggaacugggcaggacauu

SEQ ID NO: 435469 - RNA, 22 nt, Human
auucagacugucuaaaugguuu

SEQ ID NO: 435470 - RNA, 22 nt, Human
cagaaacagacaugacgcagua

SEQ ID NO: 435471 - RNA, 22 nt, Human
cauuuucagcacccaucugaaa

SEQ ID NO: 435472 - RNA, 22 nt, Human
uguccuggugcuucuugggauu

SEQ ID NO: 435473 - RNA, 22 nt, Human
cagagccucucagaggucagac

SEQ ID NO: 435474 - RNA, 22 nt, Human
ugccucugugggcagagcugcc

SEQ ID NO: 435475 - RNA, 22 nt, Human
cgcaggcaaugcuccgcggggg

SEQ ID NO: 435476 - RNA, 22 nt, Human
uccaggagcauccaggugaagc

SEQ ID NO: 435477 - RNA, 22 nt, Human
agugucuuucauauccuccauc

SEQ ID NO: 435478 - RNA, 22 nt, Human
ggcaaaaaccgcaauaacuucu

SEQ ID NO: 435479 - RNA, 22 nt, Human
cuugcaaaguagcugagagguu

SEQ ID NO: 435480 - RNA, 18 nt, Human
aaauguacuguccauggc

SEQ ID NO: 435481 - RNA, 22 nt, Human
cagccagagaaagggcacugcc

SEQ ID NO: 435482 - RNA, 22 nt, Human
aacaugcaugaagaaguuauau

SEQ ID NO: 435483 - RNA, 22 nt, Human
agagccugcagcugugaagaaa

SEQ ID NO: 435484 - RNA, 22 nt, Human
ggcaggagggcggacaaugacc

SEQ ID NO: 435485 - RNA, 22 nt, Human
agcuccagccucuucuggaggu

SEQ ID NO: 435486 - RNA, 20 nt, Human
gugcagauguccuuucacac

SEQ ID NO: 435487 - RNA, 22 nt, Human
ugaauacacuaaaaaucacuuu

SEQ ID NO: 435488 - RNA, 22 nt, Human
uuuggccaagaaaguucugugg

SEQ ID NO: 435489 - RNA, 22 nt, Human
acaggcaagaggaaagcaagua

SEQ ID NO: 435490 - RNA, 22 nt, Human
aagaucaagugcuggcaguguu

SEQ ID NO: 435491 - RNA, 22 nt, Human
gacagagauugaaucaggaaau

SEQ ID NO: 435492 - RNA, 22 nt, Human
ucucaaaguagcucccacagau

SEQ ID NO: 435493 - RNA, 22 nt, Human
ugaugaggggcucagaggucag

SEQ ID NO: 435494 - RNA, 22 nt, Human
uugcaaauaaacaaguauacau

SEQ ID NO: 435495 - RNA, 22 nt, Human
cugagagguaaucacacaaaau

SEQ ID NO: 435496 - RNA, 22 nt, Human
uuuaacagaugugaaauuuuca

SEQ ID NO: 435497 - RNA, 17 nt, Human
ggcagagcugacagggc

SEQ ID NO: 435498 - RNA, 22 nt, Human
ucaugcaguuacuguuaugcaa

SEQ ID NO: 435499 - RNA, 22 nt, Human
uggcacaggaauuuagaugcag

SEQ ID NO: 435500 - RNA, 22 nt, Human
ugccuccuucaggagggcccgg

SEQ ID NO: 435501 - RNA, 22 nt, Human
augggaaguguuagaagauuuu

SEQ ID NO: 435502 - RNA, 22 nt, Human
ggcaguggguggaucucaggga

SEQ ID NO: 435503 - RNA, 21 nt, Human
gucagggauucaagugcucac

SEQ ID NO: 435504 - RNA, 22 nt, Human
gucuggaagaaccugugccagu

SEQ ID NO: 435505 - RNA, 22 nt, Human
gcuuugcuaugacucaccagca

SEQ ID NO: 435506 - RNA, 22 nt, Human
guuugcauaaaguggaugcagg

SEQ ID NO: 435507 - RNA, 22 nt, Human
uuucauugagacuauagacauc

SEQ ID NO: 435508 - RNA, 22 nt, Human
gccaacagcugggugcaugucc

SEQ ID NO: 435509 - RNA, 22 nt, Human
uugcuuuauucacaucuauauu

SEQ ID NO: 435510 - RNA, 22 nt, Human
aggaaagauggaaggaggauaa

SEQ ID NO: 435511 - RNA, 23 nt, Human
cuggcuccgaagacuccaggauc

SEQ ID NO: 435512 - RNA, 22 nt, Human
aagcuaaguggaagucuuauca

SEQ ID NO: 435513 - RNA, 22 nt, Human
ccugcccuagagaugacacaau

SEQ ID NO: 435514 - RNA, 22 nt, Human
cucaggaguaguucagcagcug

SEQ ID NO: 435515 - RNA, 22 nt, Human
uggcugccuagucccucagccu

SEQ ID NO: 435516 - RNA, 22 nt, Human
cugggccuugaucacacaggug

SEQ ID NO: 435517 - RNA, 22 nt, Human
cgcaggcucgguucacagagca

SEQ ID NO: 435518 - RNA, 22 nt, Human
uacuucauuccuuuguaaaaug

SEQ ID NO: 435519 - RNA, 22 nt, Human
uggccugucuuguugugcuaga

SEQ ID NO: 435520 - RNA, 22 nt, Human
ccugagcaucagcgccuccuua

SEQ ID NO: 435521 - RNA, 22 nt, Human
gccugggaacucugaucuccug

SEQ ID NO: 435522 - RNA, 22 nt, Human
uuuuaguuguacugucaacagu

SEQ ID NO: 435523 - RNA, 22 nt, Human
gccaccagugggggccugggca

SEQ ID NO: 435524 - RNA, 22 nt, Human
ugcagaagaaugagcuuggagu

SEQ ID NO: 435525 - RNA, 20 nt, Human
ugcacagggugggaagcaac

SEQ ID NO: 435526 - RNA, 22 nt, Human
ccaccagcagugugcaaggauu

SEQ ID NO: 435527 - RNA, 18 nt, Human
cugaggcccagagagggc

SEQ ID NO: 435528 - RNA, 23 nt, Human
aaaugacauaugguuucugaagg

SEQ ID NO: 435529 - RNA, 19 nt, Human
cuggggcuuugguacugcc

SEQ ID NO: 435530 - RNA, 22 nt, Human
ccaguuuagguacuaggcucua

SEQ ID NO: 435531 - RNA, 18 nt, Human
ggagagugacagagucgu

SEQ ID NO: 435532 - RNA, 22 nt, Human
uucagugucaauuuuuaaauau

SEQ ID NO: 435533 - RNA, 22 nt, Human
agcuguuuguacuuagauagua

SEQ ID NO: 435534 - RNA, 22 nt, Human
gcagaacauuucacaguaucuu

SEQ ID NO: 435535 - RNA, 22 nt, Human
aguucaaacucuauaagaacuu

SEQ ID NO: 435536 - RNA, 22 nt, Human
ccugcagguccccggaugcgca

SEQ ID NO: 435537 - RNA, 22 nt, Human
aggaugagccgcgcaagcugac

SEQ ID NO: 435538 - RNA, 22 nt, Human
cucccagaaaauucucagacaa

SEQ ID NO: 435539 - RNA, 22 nt, Human
gacagagguguccuugagucca

SEQ ID NO: 435540 - RNA, 22 nt, Human
cccagccuuccacccuggacua

SEQ ID NO: 435541 - RNA, 22 nt, Human
gcucugccaaggacccauucuc

SEQ ID NO: 435542 - RNA, 22 nt, Human
augcauaugugugcacacgugu

SEQ ID NO: 435543 - RNA, 22 nt, Human
gaauauuaguaucaguuauacc

SEQ ID NO: 435544 - RNA, 22 nt, Human
ugcagcugaaaggacugaauga

SEQ ID NO: 435545 - RNA, 22 nt, Human
ugagcccaggaguuggaggcug

SEQ ID NO: 435546 - RNA, 22 nt, Human
caggcacacccacuggugcaga

SEQ ID NO: 435547 - RNA, 22 nt, Human
cauucaaaugugccacuguccu

SEQ ID NO: 435548 - RNA, 22 nt, Human
aggcuccuuguucaucauccau

SEQ ID NO: 435549 - RNA, 22 nt, Human
cacagaacaccaaagaaccuuc

SEQ ID NO: 435550 - RNA, 22 nt, Human
gagcacagaaggagaaauaugg

SEQ ID NO: 435551 - RNA, 22 nt, Human
agcugcccugggucuugcugcu

SEQ ID NO: 435552 - RNA, 22 nt, Human
agccuggagcuugaguuaugag

SEQ ID NO: 435553 - RNA, 22 nt, Human
ugcuugcuggaggcagacagaa

SEQ ID NO: 435554 - RNA, 22 nt, Human
auagcaacaccccaauuuucua

SEQ ID NO: 435555 - RNA, 22 nt, Human
aagccaaguuggaagacugaau

SEQ ID NO: 435556 - RNA, 22 nt, Human
cagcagaguaauucucaccucu

SEQ ID NO: 435557 - RNA, 22 nt, Human
cccagaaggcuugccaggaagc

SEQ ID NO: 435558 - RNA, 22 nt, Human
acauggaaaacuaacugcuuuu

SEQ ID NO: 435559 - RNA, 21 nt, Human
ugaugaggucauagcacccuc

SEQ ID NO: 435560 - RNA, 22 nt, Human
auguuuacaaaaaggaggcuug

SEQ ID NO: 435561 - RNA, 22 nt, Human
ugcccugugugugcaagcacug

SEQ ID NO: 435562 - RNA, 18 nt, Human
cuagggcuguggcucuca

SEQ ID NO: 435563 - RNA, 22 nt, Human
ucucugggaaauggagaauuuu

SEQ ID NO: 435564 - RNA, 22 nt, Human
gcguggugcugcccugcacaca

SEQ ID NO: 435565 - RNA, 22 nt, Human
ucccuggguucccguggaagug

SEQ ID NO: 435566 - RNA, 22 nt, Human
uuucaaacuccagcucaccaau

SEQ ID NO: 435567 - RNA, 23 nt, Human
ggagaggggugugggcaucuuua

SEQ ID NO: 435568 - RNA, 22 nt, Human
agagacaggauaucugcucaug

SEQ ID NO: 435569 - RNA, 22 nt, Human
aagccaauggauugguugcuuu

SEQ ID NO: 435570 - RNA, 22 nt, Human
agguggcagagcuggcccagcg

SEQ ID NO: 435571 - RNA, 22 nt, Human
caacaguguugcaaucugaaaa

SEQ ID NO: 435572 - RNA, 22 nt, Human
aaaguuuuagaacuaggaagca

SEQ ID NO: 435573 - RNA, 22 nt, Human
uaauauacuucccauaguuuga

SEQ ID NO: 435574 - RNA, 22 nt, Human
aggcuugacaauuuuacaugua

SEQ ID NO: 435575 - RNA, 22 nt, Human
gcacagccagcaucugagggau

SEQ ID NO: 435576 - RNA, 23 nt, Human
aggaaggagguccuaacaguauc

SEQ ID NO: 435577 - RNA, 22 nt, Human
aagaaaugcugauguuggaugg

SEQ ID NO: 435578 - RNA, 21 nt, Human
ugacugaggcuucuucacaca

SEQ ID NO: 435579 - RNA, 22 nt, Human
uaacuacuaauugaugauaaug

SEQ ID NO: 435580 - RNA, 22 nt, Human
caggcuggagugcaauggugcu

SEQ ID NO: 435581 - RNA, 22 nt, Human
gugcaguggcagauccuagcuc

SEQ ID NO: 435582 - RNA, 22 nt, Human
uucuuauauugggucauggaua

SEQ ID NO: 435583 - RNA, 22 nt, Human
ggcagccaugugggcagcgagu

SEQ ID NO: 435584 - RNA, 22 nt, Human
ugaggccucauuuagggagagg

SEQ ID NO: 435585 - RNA, 22 nt, Human
aagcagcuuaaauuagagccug

SEQ ID NO: 435586 - RNA, 22 nt, Human
ugcagcugcuugauucaucuug

SEQ ID NO: 435587 - RNA, 22 nt, Human
ugcacuauuucgccaugguugu

SEQ ID NO: 435588 - RNA, 22 nt, Human
gcaaacaucuuagccauagagu

SEQ ID NO: 435589 - RNA, 22 nt, Human
uaaugaggaaauagagggaaug

SEQ ID NO: 435590 - RNA, 22 nt, Human
uuucaguucaucugugaagauu

SEQ ID NO: 435591 - RNA, 22 nt, Human
aauaacuuuuaaaagacccugg

SEQ ID NO: 435592 - RNA, 22 nt, Human
agggaagcaggaauagcucuga

SEQ ID NO: 435593 - RNA, 22 nt, Human
auacaacugcucucagauaagu

SEQ ID NO: 435594 - RNA, 22 nt, Human
augaggauguuaguggacugga

SEQ ID NO: 435595 - RNA, 22 nt, Human
uggcucucuacaggucaagacc

SEQ ID NO: 435596 - RNA, 23 nt, Human
agcugaggcugugggugucagag

SEQ ID NO: 435597 - RNA, 22 nt, Human
aggagcagaacuguuguggagg

SEQ ID NO: 435598 - RNA, 18 nt, Human
gccaggaagaggaaugug

SEQ ID NO: 435599 - RNA, 22 nt, Human
ugacagcugagccccaggcaag

SEQ ID NO: 435600 - RNA, 22 nt, Human
ugaugaggcauaugcuacacau

SEQ ID NO: 435601 - RNA, 22 nt, Human
ucccaggauguuggcggcaggu

SEQ ID NO: 435602 - RNA, 22 nt, Human
uuucuaaaggguagauuuggcc

SEQ ID NO: 435603 - RNA, 22 nt, Human
guuccucauccagucaugacua

SEQ ID NO: 435604 - RNA, 22 nt, Human
auguaccagauguauguucuca

SEQ ID NO: 435605 - RNA, 22 nt, Human
ccugggccucacccagcucuug

SEQ ID NO: 435606 - RNA, 22 nt, Human
gugugccaacaaaagacagugc

SEQ ID NO: 435607 - RNA, 22 nt, Human
aggguccaucaaggacugcaca

SEQ ID NO: 435608 - RNA, 22 nt, Human
aaaaggcauuuugucaaccaua

SEQ ID NO: 435609 - RNA, 22 nt, Human
agcagagguuuguuggaaaccu

SEQ ID NO: 435610 - RNA, 22 nt, Human
gcccagggcagggcaagaguga

SEQ ID NO: 435611 - RNA, 22 nt, Human
uaggaauugcccgugggguccu

SEQ ID NO: 435612 - RNA, 17 nt, Human
uuuguacaacauuuuaa

SEQ ID NO: 435613 - RNA, 22 nt, Human
auaacuuauuagauuggagcug

SEQ ID NO: 435614 - RNA, 18 nt, Human
uggagcaggaagccuggc

SEQ ID NO: 435615 - RNA, 22 nt, Human
cagcugugcugauugcucagua

SEQ ID NO: 435616 - RNA, 22 nt, Human
gugccugugcggacucagggaa

SEQ ID NO: 435617 - RNA, 22 nt, Human
gagcccaggaaguggaggcuga

SEQ ID NO: 435618 - RNA, 22 nt, Human
cacagcaaagacacucucaacu

SEQ ID NO: 435619 - RNA, 22 nt, Human
auugcuuuugagcuagaauuuu

SEQ ID NO: 435620 - RNA, 23 nt, Human
uuuugcaauaagucacuggaaua

SEQ ID NO: 435621 - RNA, 22 nt, Human
uuuauuguguugaaacugaauu

SEQ ID NO: 435622 - RNA, 22 nt, Human
gggagcugagggaccucugugg

SEQ ID NO: 435623 - RNA, 22 nt, Human
ugcaaauugcaugauguguauc

SEQ ID NO: 435624 - RNA, 22 nt, Human
ggccuuggugccauggccaguu

SEQ ID NO: 435625 - RNA, 22 nt, Human
auaaggcaucucucaguuagca

SEQ ID NO: 435626 - RNA, 22 nt, Human
ugucccagcacuuugggagucu

SEQ ID NO: 435627 - RNA, 22 nt, Human
gaagcucuggacagugaagaag

SEQ ID NO: 435628 - RNA, 22 nt, Human
cauucaaaaugggcugaccugu

SEQ ID NO: 435629 - RNA, 22 nt, Human
cugcugggcuccucaugugacu

SEQ ID NO: 435630 - RNA, 22 nt, Human
gagcccugacacugagggaguu

SEQ ID NO: 435631 - RNA, 22 nt, Human
caggggcucccugggugccagu

SEQ ID NO: 435632 - RNA, 22 nt, Human
aauagcaauuacccuucaacuc

SEQ ID NO: 435633 - RNA, 22 nt, Human
ugucccagacauaaguggacau

SEQ ID NO: 435634 - RNA, 22 nt, Human
auuacuaugauuugaucauuac

SEQ ID NO: 435635 - RNA, 22 nt, Human
gggucuggacggcugcaggaag

SEQ ID NO: 435636 - RNA, 22 nt, Human
cauggcagagccugcagguggg

SEQ ID NO: 435637 - RNA, 22 nt, Human
gaagccaagggcugcuuuuccu

SEQ ID NO: 435638 - RNA, 21 nt, Human
ggauuuuaaaaacugcaccug

SEQ ID NO: 435639 - RNA, 22 nt, Human
uucaacuuuggagauuuaauaa

SEQ ID NO: 435640 - RNA, 22 nt, Human
uuucuauaugaggagcuaaagu

SEQ ID NO: 435641 - RNA, 22 nt, Human
uggccaggaggcugcuucugac

SEQ ID NO: 435642 - RNA, 22 nt, Human
cagcucugaggaacacuccuuu

SEQ ID NO: 435643 - RNA, 22 nt, Human
aagagucauagagacauugauu

SEQ ID NO: 435644 - RNA, 22 nt, Human
uucacauuucucugcuguuuga

SEQ ID NO: 435645 - RNA, 22 nt, Human
uucaguauaaaaucaaagugau

SEQ ID NO: 435646 - RNA, 21 nt, Human
aaagcagcccauggcacaguc

SEQ ID NO: 435647 - RNA, 22 nt, Human
gugcccugaucgcuaggcuccc

SEQ ID NO: 435648 - RNA, 22 nt, Human
aagccagcauuuucccauuccu

SEQ ID NO: 435649 - RNA, 22 nt, Human
ucagcagugucaguucccagag

SEQ ID NO: 435650 - RNA, 22 nt, Human
cugggcuguaauguggcacuga

SEQ ID NO: 435651 - RNA, 22 nt, Human
cuuucuaauucucccauagucu

SEQ ID NO: 435652 - RNA, 22 nt, Human
uaucagcaggccaaagcugcaa

SEQ ID NO: 435653 - RNA, 22 nt, Human
uuauugcaaccuuuucuggugu

SEQ ID NO: 435654 - RNA, 22 nt, Human
ugucugcuacuugguucuacca

SEQ ID NO: 435655 - RNA, 22 nt, Human
cacaagagagugcgcguugcaa

SEQ ID NO: 435656 - RNA, 22 nt, Human
gacagaggcaagaccagaagcc

SEQ ID NO: 435657 - RNA, 22 nt, Human
ugugcuauuugacuguuugcua

SEQ ID NO: 435658 - RNA, 22 nt, Human
cugucuccagggcaggugcagg

SEQ ID NO: 435659 - RNA, 22 nt, Human
ugcagaagaccuuccagggcug

SEQ ID NO: 435660 - RNA, 22 nt, Human
uguuaaaaauucagcucuagau

SEQ ID NO: 435661 - RNA, 22 nt, Human
ucaggaagccacuccacagaga

SEQ ID NO: 435662 - RNA, 22 nt, Human
cagagcugcuucccaguuugug

SEQ ID NO: 435663 - RNA, 22 nt, Human
gacagcagauaagaccucauca

SEQ ID NO: 435664 - RNA, 22 nt, Human
ugccuguccugaggaugagggu

SEQ ID NO: 435665 - RNA, 22 nt, Human
cacagaggcaugacccugcccu

SEQ ID NO: 435666 - RNA, 20 nt, Human
gcugccagugccugaugcuu

SEQ ID NO: 435667 - RNA, 21 nt, Human
aacaaagggaugcucaucuuu

SEQ ID NO: 435668 - RNA, 22 nt, Human
aaauacaauuucaggcuguaau

SEQ ID NO: 435669 - RNA, 22 nt, Human
aaaauucauggcuugggaaaag

SEQ ID NO: 435670 - RNA, 22 nt, Human
cccaggcucccaggugggacaa

SEQ ID NO: 435671 - RNA, 22 nt, Human
caggcagacauuuuugacauag

SEQ ID NO: 435672 - RNA, 22 nt, Human
uauaaauuauuaggcugcuaaa

SEQ ID NO: 435673 - RNA, 22 nt, Human
agcacaguggcuucuaugucua

SEQ ID NO: 435674 - RNA, 22 nt, Human
cuguccccgcgaguccagagcu

SEQ ID NO: 435675 - RNA, 22 nt, Human
gccagggaggcuguaggguccu

SEQ ID NO: 435676 - RNA, 22 nt, Human
caguuuguauuuauuacucaua

SEQ ID NO: 435677 - RNA, 22 nt, Human
cacaguacugcuuugggaugug

SEQ ID NO: 435678 - RNA, 22 nt, Human
gugcccuguugcacacuugagg

SEQ ID NO: 435679 - RNA, 20 nt, Human
gagggcacauuguuccgugc

SEQ ID NO: 435680 - RNA, 22 nt, Human
gcaagcaguuguggcuucugag

SEQ ID NO: 435681 - RNA, 19 nt, Human
ggccucugcaggccgcccc

SEQ ID NO: 435682 - RNA, 22 nt, Human
gcaguggcuaggagucuggcgu

SEQ ID NO: 435683 - RNA, 22 nt, Human
gggcagagagcuggaacuccuu

SEQ ID NO: 435684 - RNA, 22 nt, Human
aggagcugagucagcccgacag

SEQ ID NO: 435685 - RNA, 22 nt, Human
ucucagugcagcaaggaauuua

SEQ ID NO: 435686 - RNA, 19 nt, Human
cugggagguguucagagaa

SEQ ID NO: 435687 - RNA, 22 nt, Human
ccaggccugugcaaggagggag

SEQ ID NO: 435688 - RNA, 22 nt, Human
uggaugagggcugagcacuggg

SEQ ID NO: 435689 - RNA, 22 nt, Human
agcuaaggagcaaguaggaguu

SEQ ID NO: 435690 - RNA, 22 nt, Human
agcuggaagcugaugagcacag

SEQ ID NO: 435691 - RNA, 19 nt, Human
uccauggcucuucauccuu

SEQ ID NO: 435692 - RNA, 22 nt, Human
guccugguuuucacagaccuuu

SEQ ID NO: 435693 - RNA, 22 nt, Human
aggcagcuggacauaacuaacc

SEQ ID NO: 435694 - RNA, 21 nt, Human
agcauucugcuucuuuccugg

SEQ ID NO: 435695 - RNA, 20 nt, Human
agccaggcucaagcuccccc

SEQ ID NO: 435696 - RNA, 22 nt, Human
agagcuggggccagagucaagg

SEQ ID NO: 435697 - RNA, 22 nt, Human
ugagccugaguucaaggcugca

SEQ ID NO: 435698 - RNA, 21 nt, Human
ccugagccuguuuauccagaa

SEQ ID NO: 435699 - RNA, 22 nt, Human
uuugugaucuccucccucuaga

SEQ ID NO: 435700 - RNA, 22 nt, Human
ccagggcagcagaauuggggca

SEQ ID NO: 435701 - RNA, 22 nt, Human
gucccucugugucccugcaguc

SEQ ID NO: 435702 - RNA, 21 nt, Human
ggccauccugggaagggcugc

SEQ ID NO: 435703 - RNA, 22 nt, Human
aauaacuuguaugguuauucca

SEQ ID NO: 435704 - RNA, 22 nt, Human
uagcccuggagcagggaaauac

SEQ ID NO: 435705 - RNA, 22 nt, Human
auugagaaugcaaucuacuaug

SEQ ID NO: 435706 - RNA, 22 nt, Human
uaaugcaacgugagauaauuaa

SEQ ID NO: 435707 - RNA, 23 nt, Human
cauguacagaguuugauaaagug

SEQ ID NO: 435708 - RNA, 22 nt, Human
ccugagcucaaagggugccugg

SEQ ID NO: 435709 - RNA, 22 nt, Human
ggaagagagaucccauagaugu

SEQ ID NO: 435710 - RNA, 22 nt, Human
cagcccuggaacagcugacuca

SEQ ID NO: 435711 - RNA, 22 nt, Human
uuuucuccuaagacccuucacc

SEQ ID NO: 435712 - RNA, 22 nt, Human
cacaggaauauaaguuugaguu

SEQ ID NO: 435713 - RNA, 22 nt, Human
augcuuuauguucuggcauuuu

SEQ ID NO: 435714 - RNA, 22 nt, Human
auaaagacaugcuuacuugccc

SEQ ID NO: 435715 - RNA, 22 nt, Human
gaugcugagagguggagggaac

SEQ ID NO: 435716 - RNA, 22 nt, Human
auggacaaugccaauacaguuu

SEQ ID NO: 435717 - RNA, 22 nt, Human
uuccuuuucuuaaacauaugug

SEQ ID NO: 435718 - RNA, 22 nt, Human
ccagcccugccagagagagcug

SEQ ID NO: 435719 - RNA, 22 nt, Human
ucccagggauuaggacauggau

SEQ ID NO: 435720 - RNA, 22 nt, Human
agcccccaaaagugcuuaugau

SEQ ID NO: 435721 - RNA, 22 nt, Human
uccagccaugacucggacagug

SEQ ID NO: 435722 - RNA, 23 nt, Human
ucugggcaccuuguugacaugau

SEQ ID NO: 435723 - RNA, 22 nt, Human
acugggcuguggacacccagcg

SEQ ID NO: 435724 - RNA, 23 nt, Human
ccucagcauggcaggagcccagc

SEQ ID NO: 435725 - RNA, 22 nt, Human
caggcaauaaaggguugguugg

SEQ ID NO: 435726 - RNA, 22 nt, Human
auugcuuuguacaugccuagca

SEQ ID NO: 435727 - RNA, 22 nt, Human
agguaagguuuggaggcagugg

SEQ ID NO: 435728 - RNA, 22 nt, Human
ugcauauacccgcauuuacaua

SEQ ID NO: 435729 - RNA, 22 nt, Human
ggagaagccaggugauaagcaa

SEQ ID NO: 435730 - RNA, 22 nt, Human
cuuugcuuuacucccacugugu

SEQ ID NO: 435731 - RNA, 22 nt, Human
acaguaauuaaggucugaaacg

SEQ ID NO: 435732 - RNA, 22 nt, Human
acaggaagugggaagaaacagg

SEQ ID NO: 435733 - RNA, 22 nt, Human
aauaguuuuauaggugggauua

SEQ ID NO: 435734 - RNA, 22 nt, Human
ucugggugcccuuugcucuguu

SEQ ID NO: 435735 - RNA, 22 nt, Human
agagaauuaacauuccauggcu

SEQ ID NO: 435736 - RNA, 22 nt, Human
uuugggcacagauauuaaguau

SEQ ID NO: 435737 - RNA, 22 nt, Human
ggcagcagcaagguuggagcug

SEQ ID NO: 435738 - RNA, 22 nt, Human
acagcaacuccugcuucugagu

SEQ ID NO: 435739 - RNA, 17 nt, Human
ccauacugacauauuga

SEQ ID NO: 435740 - RNA, 22 nt, Human
cacagggcuaaaugaaggguug

SEQ ID NO: 435741 - RNA, 22 nt, Human
aggccaggccuuucuccauucc

SEQ ID NO: 435742 - RNA, 22 nt, Human
ugaugggaggugcugcaggacc

SEQ ID NO: 435743 - RNA, 23 nt, Human
accaacaagccucuggagagugg

SEQ ID NO: 435744 - RNA, 22 nt, Human
cccagagaaucuuucagaaagg

SEQ ID NO: 435745 - RNA, 22 nt, Human
gcagggcucugcuguaguccua

SEQ ID NO: 435746 - RNA, 22 nt, Human
uucugaaaccuucaguaugaag

SEQ ID NO: 435747 - RNA, 21 nt, Human
uccagccaguaaaugcucagc

SEQ ID NO: 435748 - RNA, 22 nt, Human
ucucacucauuuccuaggucuu

SEQ ID NO: 435749 - RNA, 17 nt, Human
cccagcuggcagugccg

SEQ ID NO: 435750 - RNA, 22 nt, Human
uggggacauagccagucuggcu

SEQ ID NO: 435751 - RNA, 22 nt, Human
guccagccccugacucccaggc

SEQ ID NO: 435752 - RNA, 22 nt, Human
gggcacagaagucuaagacauc

SEQ ID NO: 435753 - RNA, 20 nt, Human
uuccuguaaccggcagcugc

SEQ ID NO: 435754 - RNA, 21 nt, Human
cagacaugagucucagcuuug

SEQ ID NO: 435755 - RNA, 22 nt, Human
acaggccuuaggagagaugggg

SEQ ID NO: 435756 - RNA, 22 nt, Human
cacuggcuaugagggagauggg

SEQ ID NO: 435757 - RNA, 22 nt, Human
ccaggaggugcuggaagaaagc

SEQ ID NO: 435758 - RNA, 22 nt, Human
gcugccaugccacagcacucac

SEQ ID NO: 435759 - RNA, 17 nt, Human
aagacagaagccaugag

SEQ ID NO: 435760 - RNA, 22 nt, Human
agcagcugggcucagagcuggg

SEQ ID NO: 435761 - RNA, 22 nt, Human
uaucuagauuucuuucucugug

SEQ ID NO: 435762 - RNA, 22 nt, Human
uugcaaaugguaccaagggucu

SEQ ID NO: 435763 - RNA, 22 nt, Human
uaaggacauuagaaaugaugcu

SEQ ID NO: 435764 - RNA, 22 nt, Human
agccauccuccacagccuugau

SEQ ID NO: 435765 - RNA, 22 nt, Human
agugaaaagaugcauuucucug

SEQ ID NO: 435766 - RNA, 22 nt, Human
gacagagaggcugagcaguaca

SEQ ID NO: 435767 - RNA, 22 nt, Human
ugccaggccucaggagucucca

SEQ ID NO: 435768 - RNA, 22 nt, Human
gcccagccagagcugugugaug

SEQ ID NO: 435769 - RNA, 22 nt, Human
uuuauccauugguuagaaaauc

SEQ ID NO: 435770 - RNA, 22 nt, Human
gccuggagcucaugugggcauu

SEQ ID NO: 435771 - RNA, 22 nt, Human
ccacugcucugccaggagcugg

SEQ ID NO: 435772 - RNA, 18 nt, Human
agagacagcagcaaaaga

SEQ ID NO: 435773 - RNA, 22 nt, Human
cccagccuacucugccauagca

SEQ ID NO: 435774 - RNA, 21 nt, Human
uccaggccaugguggggaggc

SEQ ID NO: 435775 - RNA, 20 nt, Human
gcuucaaagccauccuuuua

SEQ ID NO: 435776 - RNA, 22 nt, Human
ugggcagacugagcccuguccc

SEQ ID NO: 435777 - RNA, 22 nt, Human
caggcagggagcuggaaaggau

SEQ ID NO: 435778 - RNA, 22 nt, Human
uggcaguggcucagagugcaga

SEQ ID NO: 435779 - RNA, 22 nt, Human
aaguuucuguucauaucucuga

SEQ ID NO: 435780 - RNA, 23 nt, Human
caguacuuaguguagcguuaauu

SEQ ID NO: 435781 - RNA, 22 nt, Human
cuuuacugaagugaagaccugg

SEQ ID NO: 435782 - RNA, 22 nt, Human
auccaguucuuggaagcacagg

SEQ ID NO: 435783 - RNA, 22 nt, Human
guauaucuucagaaauuauagg

SEQ ID NO: 435784 - RNA, 22 nt, Human
gcagacagcauguugggcuauu

SEQ ID NO: 435785 - RNA, 22 nt, Human
ugaggccacuuccccacagccc

SEQ ID NO: 435786 - RNA, 22 nt, Human
aguacuuucuuccgagagagaa

SEQ ID NO: 435787 - RNA, 22 nt, Human
aauuucaaacucuugcccucag

SEQ ID NO: 435788 - RNA, 22 nt, Human
ccugagcugaacuaagcaguuu

SEQ ID NO: 435789 - RNA, 21 nt, Human
agagaagaggacuuucucaca

SEQ ID NO: 435790 - RNA, 22 nt, Human
acaggaaauuggcauaucaguu

SEQ ID NO: 435791 - RNA, 22 nt, Human
caaagggcauggccugagcacu

SEQ ID NO: 435792 - RNA, 22 nt, Human
gggcuggaggugagcaggacag

SEQ ID NO: 435793 - RNA, 22 nt, Human
caggaagggggauccuuggaag

SEQ ID NO: 435794 - RNA, 22 nt, Human
uaucugaacaaccuuuauuacu

SEQ ID NO: 435795 - RNA, 22 nt, Human
gccagccugugggggcucugug

SEQ ID NO: 435796 - RNA, 22 nt, Human
cucucagaagcuuccaguaugg

SEQ ID NO: 435797 - RNA, 22 nt, Human
agcagcagggucauugcucuuu

SEQ ID NO: 435798 - RNA, 19 nt, Human
acauuuaaauucagaucuc

SEQ ID NO: 435799 - RNA, 22 nt, Human
aauuuaacugagaguacuuuua

SEQ ID NO: 435800 - RNA, 22 nt, Human
uugcugaugcccuuguccaggc

SEQ ID NO: 435801 - RNA, 22 nt, Human
agcaacagcaacgacauuucuc

SEQ ID NO: 435802 - RNA, 22 nt, Human
acaguauauauagucuaaaagc

SEQ ID NO: 435803 - RNA, 22 nt, Human
uagcacaaguaucugcuuuucc

SEQ ID NO: 435804 - RNA, 22 nt, Human
agcugccaggccccugagaacc

SEQ ID NO: 435805 - RNA, 22 nt, Human
ccuguucaccauggucacgugc

SEQ ID NO: 435806 - RNA, 22 nt, Human
ucagcacuuuuuaaagcagcau

SEQ ID NO: 435807 - RNA, 22 nt, Human
uauucagaguguagcaaauaga

SEQ ID NO: 435808 - RNA, 22 nt, Human
uuccaaagucauguugcugaua

SEQ ID NO: 435809 - RNA, 22 nt, Human
ugcaaauuugagcagacuguuc

SEQ ID NO: 435810 - RNA, 23 nt, Human
ugugacagggucauugaaaaggg

SEQ ID NO: 435811 - RNA, 22 nt, Human
uggagcugggguuugaaucugg

SEQ ID NO: 435812 - RNA, 22 nt, Human
uaaaugcuuagauucauagaaa

SEQ ID NO: 435813 - RNA, 22 nt, Human
ggcaggaauaaauuauggacuu

SEQ ID NO: 435814 - RNA, 22 nt, Human
uggcacuggaaucguagccuug

SEQ ID NO: 435815 - RNA, 22 nt, Human
caguacuucuuggaaacuggau

SEQ ID NO: 435816 - RNA, 18 nt, Human
cacaauuuacagaugaca

SEQ ID NO: 435817 - RNA, 22 nt, Human
cuucagcagccucuugcauaaa

SEQ ID NO: 435818 - RNA, 22 nt, Human
ucugucacccaggcuggagugc

SEQ ID NO: 435819 - RNA, 22 nt, Human
uucaaaauuguucuaagcucug

SEQ ID NO: 435820 - RNA, 22 nt, Human
gccucugcucucagguagccuc

SEQ ID NO: 435821 - RNA, 22 nt, Human
ugcccaggcuggagugcagagg

SEQ ID NO: 435822 - RNA, 22 nt, Human
ugcccagcuauuccuuucuuag

SEQ ID NO: 435823 - RNA, 22 nt, Human
cagcccuguugcgcuuccggcg

SEQ ID NO: 435824 - RNA, 22 nt, Human
uugcccaccauccaauaaaaug

SEQ ID NO: 435825 - RNA, 22 nt, Human
cagacagggaccucgcuccaga

SEQ ID NO: 435826 - RNA, 23 nt, Human
cuagaauuuugcuaaaagacuag

SEQ ID NO: 435827 - RNA, 22 nt, Human
gagcagagacaguacaacuggc

SEQ ID NO: 435828 - RNA, 22 nt, Human
uccauuuucaucucauguauaa

SEQ ID NO: 435829 - RNA, 22 nt, Human
gggcacuggaaggcucucaggc

SEQ ID NO: 435830 - RNA, 22 nt, Human
agaacaucugaagauacaaagu

SEQ ID NO: 435831 - RNA, 22 nt, Human
uucagcacuggacagcgagucu

SEQ ID NO: 435832 - RNA, 22 nt, Human
ccucaaaggccuggcaccagaa

SEQ ID NO: 435833 - RNA, 21 nt, Human
uuuagcauuuacauauuucca

SEQ ID NO: 435834 - RNA, 20 nt, Human
ucagcccugaguccaggcug

SEQ ID NO: 435835 - RNA, 22 nt, Human
caggagcaaggagcagugggau

SEQ ID NO: 435836 - RNA, 22 nt, Human
uggcucuguugugcugagccag

SEQ ID NO: 435837 - RNA, 22 nt, Human
cugagcugggacucaguagcaa

SEQ ID NO: 435838 - RNA, 22 nt, Human
uucuggaaguguuagaaucugg

SEQ ID NO: 435839 - RNA, 22 nt, Human
cugggcuggacacacuuaaccu

SEQ ID NO: 435840 - RNA, 22 nt, Human
aaagacuuggcuuaugauuugc

SEQ ID NO: 435841 - RNA, 22 nt, Human
agcugccagaugacagugcuau

SEQ ID NO: 435842 - RNA, 22 nt, Human
aagagagggauuugguuuauug

SEQ ID NO: 435843 - RNA, 20 nt, Human
aacaguaccccccuuguucu

SEQ ID NO: 435844 - RNA, 22 nt, Human
uggcagcugucagaaugcaaau

SEQ ID NO: 435845 - RNA, 22 nt, Human
agaaaugcucaggucaacuuaa

SEQ ID NO: 435846 - RNA, 22 nt, Human
aggcugggaaaccugaaguugu

SEQ ID NO: 435847 - RNA, 22 nt, Human
gcccaugggccugaggcccuag

SEQ ID NO: 435848 - RNA, 19 nt, Human
ccaguagagacagcugcag

SEQ ID NO: 435849 - RNA, 22 nt, Human
agcuggugugcucuggaauccu

SEQ ID NO: 435850 - RNA, 22 nt, Human
cauucaaagcaggaaaggccuu

SEQ ID NO: 435851 - RNA, 22 nt, Human
uuauugcagauggugugagaga

SEQ ID NO: 435852 - RNA, 22 nt, Human
ucugaggcuaagagacagaggc

SEQ ID NO: 435853 - RNA, 22 nt, Human
ccuccccacagcccaggagacu

SEQ ID NO: 435854 - RNA, 22 nt, Human
acauggaagcaaaguucuauuu

SEQ ID NO: 435855 - RNA, 19 nt, Human
cagcaagaaugaaggcaua

SEQ ID NO: 435856 - RNA, 22 nt, Human
agauuuuauagauaauuuccca

SEQ ID NO: 435857 - RNA, 22 nt, Human
gggaaaaauaaugcacagauau

SEQ ID NO: 435858 - RNA, 23 nt, Human
agucagagagugugagacaacug

SEQ ID NO: 435859 - RNA, 22 nt, Human
cuuugcaugugguagaagguuc

SEQ ID NO: 435860 - RNA, 22 nt, Human
gauuuucuugggaaacaaugag

SEQ ID NO: 435861 - RNA, 22 nt, Human
uucagagaacuucauggaagag

SEQ ID NO: 435862 - RNA, 22 nt, Human
cccuccaggcacugcccucuuc

SEQ ID NO: 435863 - RNA, 22 nt, Human
gccucagcucccagcccaggcu

SEQ ID NO: 435864 - RNA, 22 nt, Human
uaaggaaaauggacaucaaaca

SEQ ID NO: 435865 - RNA, 22 nt, Human
uuuucauuguuccucgagcauu

SEQ ID NO: 435866 - RNA, 22 nt, Human
ucacaguacuccccaaaguuuc

SEQ ID NO: 435867 - RNA, 22 nt, Human
gggagcuggagcuggaagacuc

SEQ ID NO: 435868 - RNA, 21 nt, Human
gaugauggcaggcagcacugg

SEQ ID NO: 435869 - RNA, 22 nt, Human
uuggcucaggaccccugugacu

SEQ ID NO: 435870 - RNA, 22 nt, Human
cccaggccccagggcuugucag

SEQ ID NO: 435871 - RNA, 22 nt, Human
ucaacaaugggucuguaaugga

SEQ ID NO: 435872 - RNA, 22 nt, Human
cucugggcaccaaagagcagcu

SEQ ID NO: 435873 - RNA, 22 nt, Human
gcagggcuaauggggcaaguag

SEQ ID NO: 435874 - RNA, 22 nt, Human
aauugcuuagagaauccaggua

SEQ ID NO: 435875 - RNA, 22 nt, Human
auguuauuaaaguacagauucu

SEQ ID NO: 435876 - RNA, 22 nt, Human
uguacagagguguacauaugau

SEQ ID NO: 435877 - RNA, 22 nt, Human
aauauccagguagaugucuucu

SEQ ID NO: 435878 - RNA, 22 nt, Human
acuuucucaaaucagacuuuaa

SEQ ID NO: 435879 - RNA, 22 nt, Human
auacacuggccuuugcagagcc

SEQ ID NO: 435880 - RNA, 22 nt, Human
uggccagguguggguucucaga

SEQ ID NO: 435881 - RNA, 22 nt, Human
ccccaggagauuugggagcaca

SEQ ID NO: 435882 - RNA, 22 nt, Human
aguuuccuugggcauuuguuua

SEQ ID NO: 435883 - RNA, 22 nt, Human
aacaguuugccugaaauguauu

SEQ ID NO: 435884 - RNA, 23 nt, Human
ucugcucugaaguucggcugagc

SEQ ID NO: 435885 - RNA, 23 nt, Human
uauggcuuacagugcuuuaggua

SEQ ID NO: 435886 - RNA, 22 nt, Human
uggagaugccuggagauuaggg

SEQ ID NO: 435887 - RNA, 22 nt, Human
uuacagacaaacuguguuaagu

SEQ ID NO: 435888 - RNA, 22 nt, Human
agcagcugugggcaauauguaa

SEQ ID NO: 435889 - RNA, 22 nt, Human
uccuguggaagacaguguuggg

SEQ ID NO: 435890 - RNA, 22 nt, Human
ucagcaggcccauccuccaggc

SEQ ID NO: 435891 - RNA, 22 nt, Human
acauucaaguuucugcucaugg

SEQ ID NO: 435892 - RNA, 22 nt, Human
uugccuuauagugcucugcauu

SEQ ID NO: 435893 - RNA, 22 nt, Human
agccugggcaacaacacagcga

SEQ ID NO: 435894 - RNA, 22 nt, Human
uucuuuuaaaagagagcagaaa

SEQ ID NO: 435895 - RNA, 22 nt, Human
caggccucccggugcacacuga

SEQ ID NO: 435896 - RNA, 22 nt, Human
auuacaauaauacaugcucauu

SEQ ID NO: 435897 - RNA, 22 nt, Human
ucaggcugaaucauccuagcuu

SEQ ID NO: 435898 - RNA, 22 nt, Human
cagagugggcugucagccacca

SEQ ID NO: 435899 - RNA, 22 nt, Human
ucagaggaaagggaacauaguc

SEQ ID NO: 435900 - RNA, 22 nt, Human
uuuauauaacagagacugcuau

SEQ ID NO: 435901 - RNA, 22 nt, Human
auuauuguacuuucaauaaggu

SEQ ID NO: 435902 - RNA, 22 nt, Human
agggcagccugagugcuggccc

SEQ ID NO: 435903 - RNA, 22 nt, Human
uuauacagggaguuucccugca

SEQ ID NO: 435904 - RNA, 22 nt, Human
caucugguuuaaaagaagaaag

SEQ ID NO: 435905 - RNA, 22 nt, Human
cuggggcugcggacgggagccc

SEQ ID NO: 435906 - RNA, 22 nt, Human
gacacagagauaggccuguguu

SEQ ID NO: 435907 - RNA, 22 nt, Human
ucuguaucacccguucccagaa

SEQ ID NO: 435908 - RNA, 20 nt, Human
gaauuuuaugaacacuacca

SEQ ID NO: 435909 - RNA, 22 nt, Human
ucaaaggaauuugauuuugaug

SEQ ID NO: 435910 - RNA, 22 nt, Human
ucaaguguaguggugucagguc

SEQ ID NO: 435911 - RNA, 22 nt, Human
aggaagccugcaggugacugcu

SEQ ID NO: 435912 - RNA, 22 nt, Human
cuggauuuugaugagcaguuuu

SEQ ID NO: 435913 - RNA, 22 nt, Human
ggcacagcaccuuuucacauug

SEQ ID NO: 435914 - RNA, 22 nt, Human
cucagaggcaagcaaggagcug

SEQ ID NO: 435915 - RNA, 22 nt, Human
ucagaauucuacaauagaucag

SEQ ID NO: 435916 - RNA, 22 nt, Human
auuccaaaaggauguuagaaug

SEQ ID NO: 435917 - RNA, 22 nt, Human
cuguccuaugaguacucacuag

SEQ ID NO: 435918 - RNA, 22 nt, Human
caggccucaugguguguccuuc

SEQ ID NO: 435919 - RNA, 22 nt, Human
auuucccaggacuagaaauaua

SEQ ID NO: 435920 - RNA, 17 nt, Human
ucugagaacuugaagca

SEQ ID NO: 435921 - RNA, 22 nt, Human
cuagagaauugucuugagaguu

SEQ ID NO: 435922 - RNA, 22 nt, Human
uaagacaagccucgcauuugua

SEQ ID NO: 435923 - RNA, 22 nt, Human
uccugaagucacaggcucugag

SEQ ID NO: 435924 - RNA, 22 nt, Human
caagcuccuuacauccacaggg

SEQ ID NO: 435925 - RNA, 22 nt, Human
cagagggaguuucugagguugc

SEQ ID NO: 435926 - RNA, 22 nt, Human
aggcugucaucuuugcaggcag

SEQ ID NO: 435927 - RNA, 18 nt, Human
cuccccagcugcccccag

SEQ ID NO: 435928 - RNA, 22 nt, Human
uggcagauguauaucacagcuu

SEQ ID NO: 435929 - RNA, 22 nt, Human
gagcacaggcugcugugaacug

SEQ ID NO: 435930 - RNA, 22 nt, Human
gagcaggccuggggugaggccu

SEQ ID NO: 435931 - RNA, 22 nt, Human
aguauuuucgccaucacaagaa

SEQ ID NO: 435932 - RNA, 22 nt, Human
guugcaaacuccuacuucucau

SEQ ID NO: 435933 - RNA, 22 nt, Human
uguacacaauucuuaacauaca

SEQ ID NO: 435934 - RNA, 22 nt, Human
acuguguggaaauuugugaggg

SEQ ID NO: 435935 - RNA, 22 nt, Human
cuagagaaucuuuuaagaagug

SEQ ID NO: 435936 - RNA, 22 nt, Human
acacagaagcuuuuucuauucc

SEQ ID NO: 435937 - RNA, 21 nt, Human
uggcuuugcccugcuugcccc

SEQ ID NO: 435938 - RNA, 22 nt, Human
caggcccauucuaggcuugcua

SEQ ID NO: 435939 - RNA, 22 nt, Human
agacacagaacacaaaagcaua

SEQ ID NO: 435940 - RNA, 22 nt, Human
ucugcccaccagcgguugcaua

SEQ ID NO: 435941 - RNA, 21 nt, Human
uucugccuucgaggucucagg

SEQ ID NO: 435942 - RNA, 22 nt, Human
aggcagcuggaaaacuccaggc

SEQ ID NO: 435943 - RNA, 22 nt, Human
aaguuuaacuugaauucuuucu

SEQ ID NO: 435944 - RNA, 22 nt, Human
acagcaggaagcuggagggaaa

SEQ ID NO: 435945 - RNA, 22 nt, Human
ugaugggaaaaugaggccuggg

SEQ ID NO: 435946 - RNA, 22 nt, Human
cugacucuccucaagcauaaau

SEQ ID NO: 435947 - RNA, 22 nt, Human
ccaagggaaaccgagaggcugg

SEQ ID NO: 435948 - RNA, 22 nt, Human
auguaggauugagugauagagg

SEQ ID NO: 435949 - RNA, 22 nt, Human
gugggacucuucuuuggcagug

SEQ ID NO: 435950 - RNA, 22 nt, Human
cugggaggcagucucucuagaa

SEQ ID NO: 435951 - RNA, 17 nt, Human
caacuucacaaacuguc

SEQ ID NO: 435952 - RNA, 22 nt, Human
ccugacucuggccaggccagcu

SEQ ID NO: 435953 - RNA, 22 nt, Human
uggccugguaccacauagauuu

SEQ ID NO: 435954 - RNA, 22 nt, Human
ucaaaggguccuuaacaugaga

SEQ ID NO: 435955 - RNA, 22 nt, Human
agcuggccuguuagagcugagu

SEQ ID NO: 435956 - RNA, 22 nt, Human
caagcaaugcccugguauauua

SEQ ID NO: 435957 - RNA, 22 nt, Human
uggagcccagggugagaaggag

SEQ ID NO: 435958 - RNA, 22 nt, Human
agcagggcagugcuucagcucu

SEQ ID NO: 435959 - RNA, 22 nt, Human
uaacaucuugcaguagcagaac

SEQ ID NO: 435960 - RNA, 22 nt, Human
cagagcugcaaaugccccuccg

SEQ ID NO: 435961 - RNA, 22 nt, Human
gcagcccuaaccugucauagug

SEQ ID NO: 435962 - RNA, 22 nt, Human
ggguccagcgacagcaggcuca

SEQ ID NO: 435963 - RNA, 22 nt, Human
ccagaggacuugggggcugaau

SEQ ID NO: 435964 - RNA, 22 nt, Human
gcugcagggagcuggaaggcuc

SEQ ID NO: 435965 - RNA, 22 nt, Human
acuuugcaaugggcagaaccca

SEQ ID NO: 435966 - RNA, 22 nt, Human
cuggugggaggcaagguggaag

SEQ ID NO: 435967 - RNA, 22 nt, Human
agaauacccaucccuucaacuc

SEQ ID NO: 435968 - RNA, 22 nt, Human
ggccuggaagaggacagagaaa

SEQ ID NO: 435969 - RNA, 22 nt, Human
cauggaaggcaaaagacacaga

SEQ ID NO: 435970 - RNA, 22 nt, Human
gccaggcagccacccucugcga

SEQ ID NO: 435971 - RNA, 22 nt, Human
auugcagcucagggugaugacu

SEQ ID NO: 435972 - RNA, 22 nt, Human
gcagcaggcacggucucgacau

SEQ ID NO: 435973 - RNA, 22 nt, Human
gaugcauugcaucgaguagcuu

SEQ ID NO: 435974 - RNA, 22 nt, Human
ucccagcagggccgaccagccu

SEQ ID NO: 435975 - RNA, 22 nt, Human
uuugggcauuaguaaguuaagc

SEQ ID NO: 435976 - RNA, 22 nt, Human
cuugcagccuuaccaaggcauu

SEQ ID NO: 435977 - RNA, 22 nt, Human
auguacaauuuuugcuuagggg

SEQ ID NO: 435978 - RNA, 22 nt, Human
augcauugucaggcaauuucau

SEQ ID NO: 435979 - RNA, 22 nt, Human
agucccagcuucccccaugcag

SEQ ID NO: 435980 - RNA, 22 nt, Human
aggcccuaauccaacaugacug

SEQ ID NO: 435981 - RNA, 22 nt, Human
gcagggcugggugggagacaga

SEQ ID NO: 435982 - RNA, 17 nt, Human
ggugaguguccaggugg

SEQ ID NO: 435983 - RNA, 21 nt, Human
augcauauuuuaaguuguguc

SEQ ID NO: 435984 - RNA, 22 nt, Human
gacaggaacauaaauguaggag

SEQ ID NO: 435985 - RNA, 22 nt, Human
gacuccucagucacccucagcu

SEQ ID NO: 435986 - RNA, 22 nt, Human
ggacagggcucuuggcacuccu

SEQ ID NO: 435987 - RNA, 22 nt, Human
uuuccucacuucaugagaguuu

SEQ ID NO: 435988 - RNA, 22 nt, Human
aagcugccuugcugaggagaaa

SEQ ID NO: 435989 - RNA, 22 nt, Human
gcugggcuggaaggccaaggca

SEQ ID NO: 435990 - RNA, 22 nt, Human
acaaguuccacuacagaguugu

SEQ ID NO: 435991 - RNA, 22 nt, Human
agaauuuagcuccuuggucaua

SEQ ID NO: 435992 - RNA, 22 nt, Human
agucugaaccagauggcaaggu

SEQ ID NO: 435993 - RNA, 21 nt, Human
ugaggccugccagucucagaa

SEQ ID NO: 435994 - RNA, 22 nt, Human
agcaacagcccuguuucauuag

SEQ ID NO: 435995 - RNA, 18 nt, Human
cccagcuccacuucccuc

SEQ ID NO: 435996 - RNA, 22 nt, Human
aacauugcauucucuaugagau

SEQ ID NO: 435997 - RNA, 22 nt, Human
aggaauuuagacagggcauaaa

SEQ ID NO: 435998 - RNA, 22 nt, Human
ucuucagauugcacugagcaag

SEQ ID NO: 435999 - RNA, 22 nt, Human
ucuucuuugaaucauagugacc

SEQ ID NO: 436000 - RNA, 22 nt, Human
ccuucuugagguagcacauucu

SEQ ID NO: 436001 - RNA, 22 nt, Human
uucuggaaguggaauuuuugua

SEQ ID NO: 436002 - RNA, 22 nt, Human
ggcuuugcauuuugauggaggu

SEQ ID NO: 436003 - RNA, 22 nt, Human
caggguggaauggaaugcuggc

SEQ ID NO: 436004 - RNA, 22 nt, Human
aauguacacugaaagccuauca

SEQ ID NO: 436005 - RNA, 22 nt, Human
ggcagccauacucagaccuggg

SEQ ID NO: 436006 - RNA, 22 nt, Human
caaaugaauuucccugcaaaug

SEQ ID NO: 436007 - RNA, 22 nt, Human
ccaggcagggcucaaggaaccu

SEQ ID NO: 436008 - RNA, 22 nt, Human
guucaaaucucaggacuucaga

SEQ ID NO: 436009 - RNA, 19 nt, Human
cuggugaggguuauugaua

SEQ ID NO: 436010 - RNA, 22 nt, Human
gcagagugggagcccagggcug

SEQ ID NO: 436011 - RNA, 17 nt, Human
gcuccaggcgugaguga

SEQ ID NO: 436012 - RNA, 22 nt, Human
agcagcuguggggacaagggua

SEQ ID NO: 436013 - RNA, 22 nt, Human
uuucucaguaauguccuggaau

SEQ ID NO: 436014 - RNA, 22 nt, Human
uuauugcaccuuccucacuaac

SEQ ID NO: 436015 - RNA, 19 nt, Human
gagggcucauuugaacaau

SEQ ID NO: 436016 - RNA, 22 nt, Human
gcuggcugggucccugagaggc

SEQ ID NO: 436017 - RNA, 22 nt, Human
ggcacagggagccgcaguugca

SEQ ID NO: 436018 - RNA, 20 nt, Human
uacaauacacaugcauauga

SEQ ID NO: 436019 - RNA, 22 nt, Human
gccucaggccgcccugcugcuc

SEQ ID NO: 436020 - RNA, 22 nt, Human
aggcaacaaggguagucaguga

SEQ ID NO: 436021 - RNA, 22 nt, Human
ucaggccuagaacacagcagau

SEQ ID NO: 436022 - RNA, 22 nt, Human
uuguaaauaguaguaagaugcc

SEQ ID NO: 436023 - RNA, 22 nt, Human
ggcucugcaugcagguugucag

SEQ ID NO: 436024 - RNA, 22 nt, Human
cuuaaauucuuaaugcccucau

SEQ ID NO: 436025 - RNA, 22 nt, Human
cccagcaugcacgcugacacuc

SEQ ID NO: 436026 - RNA, 22 nt, Human
cuauaaaucuacccagcauugg

SEQ ID NO: 436027 - RNA, 22 nt, Human
caggcacuucugcugcuugucu

SEQ ID NO: 436028 - RNA, 22 nt, Human
acacagaguccuuacugaggua

SEQ ID NO: 436029 - RNA, 22 nt, Human
caucaaaucugacuuuucuucc

SEQ ID NO: 436030 - RNA, 22 nt, Human
aggcuggucuauacggagacga

SEQ ID NO: 436031 - RNA, 22 nt, Human
ccaggcagcucugauuuauguc

SEQ ID NO: 436032 - RNA, 22 nt, Human
cacaggaaauauuaggagggau

SEQ ID NO: 436033 - RNA, 23 nt, Human
acauuacuuagccagagucucag

SEQ ID NO: 436034 - RNA, 22 nt, Human
gagcccuguucaggccuccuca

SEQ ID NO: 436035 - RNA, 22 nt, Human
cauuuguauagugcuuagacca

SEQ ID NO: 436036 - RNA, 22 nt, Human
gacagacagggguucuccugga

SEQ ID NO: 436037 - RNA, 22 nt, Human
augggaggcaggcucagaaccg

SEQ ID NO: 436038 - RNA, 22 nt, Human
uuagaaauacaagugagguuga

SEQ ID NO: 436039 - RNA, 22 nt, Human
aaggcuggguuugggaugugau

SEQ ID NO: 436040 - RNA, 22 nt, Human
augcaacagagaaaauauugag

SEQ ID NO: 436041 - RNA, 22 nt, Human
agucuugucuuauuuuaauaga

SEQ ID NO: 436042 - RNA, 22 nt, Human
ucuuggcuacuuaggaggauuc

SEQ ID NO: 436043 - RNA, 22 nt, Human
uuccaaguguugagauuagagg

SEQ ID NO: 436044 - RNA, 22 nt, Human
aaaaguucccugguuagaaaag

SEQ ID NO: 436045 - RNA, 23 nt, Human
auuuuacaggucaguuccuugaa

SEQ ID NO: 436046 - RNA, 22 nt, Human
uggccuggggaccugugagacc

SEQ ID NO: 436047 - RNA, 22 nt, Human
aaguuucuguaugcucuucugu

SEQ ID NO: 436048 - RNA, 22 nt, Human
aggaauguauuauuccuucugg

SEQ ID NO: 436049 - RNA, 22 nt, Human
auauuaagaugcuauugguuuu

SEQ ID NO: 436050 - RNA, 22 nt, Human
aaguauucuggcagucauucag

SEQ ID NO: 436051 - RNA, 21 nt, Human
ggaagcaguggcggcaacucc

SEQ ID NO: 436052 - RNA, 22 nt, Human
ggugccaggcucccagcucagg

SEQ ID NO: 436053 - RNA, 22 nt, Human
ucagauuuuauuuuccuguuac

SEQ ID NO: 436054 - RNA, 22 nt, Human
cagacaugauguaagcagaggc

SEQ ID NO: 436055 - RNA, 21 nt, Human
aggcagcgugagggccacuca

SEQ ID NO: 436056 - RNA, 22 nt, Human
cuuccucaugugcaaugcaagc

SEQ ID NO: 436057 - RNA, 22 nt, Human
agcagggggccacagucacagc

SEQ ID NO: 436058 - RNA, 22 nt, Human
gugagaagauaaguauugcaaa

SEQ ID NO: 436059 - RNA, 22 nt, Human
agcaggcuuucaagagucuucu

SEQ ID NO: 436060 - RNA, 22 nt, Human
cgguccuggcacuugcggcucc

SEQ ID NO: 436061 - RNA, 22 nt, Human
cuguuucaagugaagucagaca

SEQ ID NO: 436062 - RNA, 17 nt, Human
agcugccagggagugug

SEQ ID NO: 436063 - RNA, 22 nt, Human
ccaagagguugaggcugcagug

SEQ ID NO: 436064 - RNA, 22 nt, Human
ugcugucaguuggcaggaugag

SEQ ID NO: 436065 - RNA, 22 nt, Human
aagcugccagcugagcugaggc

SEQ ID NO: 436066 - RNA, 22 nt, Human
uggaaggcauuucacacaggau

SEQ ID NO: 436067 - RNA, 22 nt, Human
ggaccugccagaacucaggcua

SEQ ID NO: 436068 - RNA, 22 nt, Human
gaggcuggugguuaguuccauu

SEQ ID NO: 436069 - RNA, 22 nt, Human
uggucccuaggaaagcaguguu

SEQ ID NO: 436070 - RNA, 22 nt, Human
ugaagcaggguggccagauugu

SEQ ID NO: 436071 - RNA, 20 nt, Human
cagagcuguuauggaugaug

SEQ ID NO: 436072 - RNA, 22 nt, Human
cugagccagagggagucggguc

SEQ ID NO: 436073 - RNA, 22 nt, Human
ccagggugaccagcuggccuag

SEQ ID NO: 436074 - RNA, 22 nt, Human
ucaaacuguucagaacuccuuu

SEQ ID NO: 436075 - RNA, 23 nt, Human
ccaauucauggcagauuugaaga

SEQ ID NO: 436076 - RNA, 22 nt, Human
cagcccaaagccccaggcuaga

SEQ ID NO: 436077 - RNA, 22 nt, Human
cugucucucuaggacacugggg

SEQ ID NO: 436078 - RNA, 22 nt, Human
cacagcuuguuuagugacucac

SEQ ID NO: 436079 - RNA, 22 nt, Human
cagacaggcuagccagacucac

SEQ ID NO: 436080 - RNA, 22 nt, Human
caggcucugcugcuacagcugu

SEQ ID NO: 436081 - RNA, 22 nt, Human
uaaggaaagugccaugauuucu

SEQ ID NO: 436082 - RNA, 21 nt, Human
auacuuugaauuacagccuug

SEQ ID NO: 436083 - RNA, 22 nt, Human
aggaggccccuccuggguugcu

SEQ ID NO: 436084 - RNA, 22 nt, Human
ucaauagagccuucuuucaggu

SEQ ID NO: 436085 - RNA, 22 nt, Human
ugcauauuugauugagauaccu

SEQ ID NO: 436086 - RNA, 22 nt, Human
ucuguaguaugguacuuauuua

SEQ ID NO: 436087 - RNA, 21 nt, Human
ucagagagucacagugaacug

SEQ ID NO: 436088 - RNA, 22 nt, Human
agcuaaggacaguugauuuaga

SEQ ID NO: 436089 - RNA, 22 nt, Human
cagcucagcuuccugggugugu

SEQ ID NO: 436090 - RNA, 20 nt, Human
ugcauuuguuauuuguacuc

SEQ ID NO: 436091 - RNA, 22 nt, Human
acucagagaauaucuagaagga

SEQ ID NO: 436092 - RNA, 22 nt, Human
aaaaaugucauuauggaacuga

SEQ ID NO: 436093 - RNA, 22 nt, Human
aggcugaggcaagaggaucacu

SEQ ID NO: 436094 - RNA, 22 nt, Human
ucccagcccagauuugugugac

SEQ ID NO: 436095 - RNA, 21 nt, Human
uccaggccucaggaagggaug

SEQ ID NO: 436096 - RNA, 22 nt, Human
gcaggcugcccucuuguguuga

SEQ ID NO: 436097 - RNA, 22 nt, Human
cuuuaugaaggaacaaugcucc

SEQ ID NO: 436098 - RNA, 22 nt, Human
auggagccauuccugaagacuu

SEQ ID NO: 436099 - RNA, 22 nt, Human
gcucccuguucucagccaugau

SEQ ID NO: 436100 - RNA, 22 nt, Human
aagguccuuuugcagugugauc

SEQ ID NO: 436101 - RNA, 22 nt, Human
acacagauaaugcucauauagg

SEQ ID NO: 436102 - RNA, 18 nt, Human
auuuugaacugggaauau

SEQ ID NO: 436103 - RNA, 23 nt, Human
ccagcuccgugagccucgggcuc

SEQ ID NO: 436104 - RNA, 22 nt, Human
uccccaggagcaaugauucagu

SEQ ID NO: 436105 - RNA, 22 nt, Human
caagcagagacuagauagcugu

SEQ ID NO: 436106 - RNA, 22 nt, Human
acaagacugugcucuaagagug

SEQ ID NO: 436107 - RNA, 22 nt, Human
ggcagaguugguggagucaguu

SEQ ID NO: 436108 - RNA, 23 nt, Human
acugguacagguuuacugguguc

SEQ ID NO: 436109 - RNA, 22 nt, Human
aacacuuuggaugcagaaccaa

SEQ ID NO: 436110 - RNA, 22 nt, Human
cacuuuauaugcauuaccucau

SEQ ID NO: 436111 - RNA, 17 nt, Human
caggcagacauguaagc

SEQ ID NO: 436112 - RNA, 22 nt, Human
aggcccuggcacugccugggag

SEQ ID NO: 436113 - RNA, 22 nt, Human
aggcuuggaaguggcagaacug

SEQ ID NO: 436114 - RNA, 22 nt, Human
cuguggcugcagccuugguccu

SEQ ID NO: 436115 - RNA, 22 nt, Human
aaggcacauuccugaaaacaau

SEQ ID NO: 436116 - RNA, 22 nt, Human
gcagggccagguacaagaagca

SEQ ID NO: 436117 - RNA, 22 nt, Human
auggccuggccagagcucugcu

SEQ ID NO: 436118 - RNA, 23 nt, Human
aggcaagaacggguuguucaccc

SEQ ID NO: 436119 - RNA, 22 nt, Human
ugaagcuagguucaugaggucg

SEQ ID NO: 436120 - RNA, 22 nt, Human
auucacacuuuacuucuuucca

SEQ ID NO: 436121 - RNA, 22 nt, Human
cagaguacugggagaacagaag

SEQ ID NO: 436122 - RNA, 22 nt, Human
ugcaaaaacagccuugaggccu

SEQ ID NO: 436123 - RNA, 22 nt, Human
uacuuuuagccuauuugauucu

SEQ ID NO: 436124 - RNA, 19 nt, Human
cuuugcuuguuucuguguc

SEQ ID NO: 436125 - RNA, 22 nt, Human
gcugggagccguaccugucacg

SEQ ID NO: 436126 - RNA, 22 nt, Human
aggcuuggcuggcagcccuggg

SEQ ID NO: 436127 - RNA, 22 nt, Human
uuuggaagacagggcaggaaag

SEQ ID NO: 436128 - RNA, 22 nt, Human
gacagcagccacagggagaggg

SEQ ID NO: 436129 - RNA, 22 nt, Human
ugccugucuucaggagugucac

SEQ ID NO: 436130 - RNA, 21 nt, Human
cagagcagcguucugcugugg

SEQ ID NO: 436131 - RNA, 22 nt, Human
uuucuuauauucugucauuguu

SEQ ID NO: 436132 - RNA, 22 nt, Human
ucugcccaguuugugcucaggu

SEQ ID NO: 436133 - RNA, 22 nt, Human
acaguacuaagugcucacauga

SEQ ID NO: 436134 - RNA, 20 nt, Human
ugcagcugguuucacaggga

SEQ ID NO: 436135 - RNA, 22 nt, Human
gcuggagccaagcugcucuugg

SEQ ID NO: 436136 - RNA, 22 nt, Human
cauuuguagaguaggaaagagu

SEQ ID NO: 436137 - RNA, 22 nt, Human
gagagcauguggucuaguuuua

SEQ ID NO: 436138 - RNA, 22 nt, Human
ggccaggaagggaagaucagca

SEQ ID NO: 436139 - RNA, 20 nt, Human
ggcaggaccccaguggcauc

SEQ ID NO: 436140 - RNA, 22 nt, Human
ucaggaaagaguuagaugauua

SEQ ID NO: 436141 - RNA, 22 nt, Human
agcaggcacaagaaagggaggu

SEQ ID NO: 436142 - RNA, 22 nt, Human
gcugagcaggguggggaaaggc

SEQ ID NO: 436143 - RNA, 22 nt, Human
agcaacagaagauagagugaau

SEQ ID NO: 436144 - RNA, 22 nt, Human
uuaaauuccagccucauaauag

SEQ ID NO: 436145 - RNA, 23 nt, Human
cacugcagcguggucuggcagga

SEQ ID NO: 436146 - RNA, 22 nt, Human
cauggcagcaauuuuccugacu

SEQ ID NO: 436147 - RNA, 22 nt, Human
acaacacauguguauaugugug

SEQ ID NO: 436148 - RNA, 22 nt, Human
uuggccagagaccagagcaggg

SEQ ID NO: 436149 - RNA, 22 nt, Human
ucuuagcauuuguuaauaccca

SEQ ID NO: 436150 - RNA, 22 nt, Human
uccugagggcucggggcucaug

SEQ ID NO: 436151 - RNA, 22 nt, Human
uacaaguauguuuuaaaauguu

SEQ ID NO: 436152 - RNA, 22 nt, Human
uaggacaggugaggggcugugg

SEQ ID NO: 436153 - RNA, 22 nt, Human
cgcaggcugcagccaagaagag

SEQ ID NO: 436154 - RNA, 22 nt, Human
gagcuggccgcagagagggcag

SEQ ID NO: 436155 - RNA, 22 nt, Human
caaugcaugauggaauugccuu

SEQ ID NO: 436156 - RNA, 22 nt, Human
aguacagaccugucucuuccug

SEQ ID NO: 436157 - RNA, 22 nt, Human
uacagaggggacauggaagaca

SEQ ID NO: 436158 - RNA, 22 nt, Human
aucaugcagagucugggcuuca

SEQ ID NO: 436159 - RNA, 22 nt, Human
ggggacccucaggacugcgucu

SEQ ID NO: 436160 - RNA, 22 nt, Human
gcaacauugagucuaaguacca

SEQ ID NO: 436161 - RNA, 22 nt, Human
ugaaccaggaggcagccagcac

SEQ ID NO: 436162 - RNA, 22 nt, Human
ugcccuguuccugccuccagcu

SEQ ID NO: 436163 - RNA, 22 nt, Human
aggacacagcugcucugcagag

SEQ ID NO: 436164 - RNA, 22 nt, Human
uugacaaaguuuaguaauaauc

SEQ ID NO: 436165 - RNA, 22 nt, Human
ggaaagagcuaaaagggugaga

SEQ ID NO: 436166 - RNA, 22 nt, Human
aucaugcaauaaggugaggccu

SEQ ID NO: 436167 - RNA, 22 nt, Human
uggcucugugucucccagcagc

SEQ ID NO: 436168 - RNA, 22 nt, Human
uuacaguagcuuuauuuggagu

SEQ ID NO: 436169 - RNA, 22 nt, Human
uagcagaaccagcagucaauuu

SEQ ID NO: 436170 - RNA, 22 nt, Human
gcugagguggcugccuuaguaa

SEQ ID NO: 436171 - RNA, 22 nt, Human
uacacccagguaccgugauuuc

SEQ ID NO: 436172 - RNA, 22 nt, Human
aacauuucuucugaaacugagu

SEQ ID NO: 436173 - RNA, 22 nt, Human
ugcccccuuuucuuguuacacu

SEQ ID NO: 436174 - RNA, 22 nt, Human
cugggaggauacacaagaucag

SEQ ID NO: 436175 - RNA, 22 nt, Human
uauaaaauucucaguuuggggu

SEQ ID NO: 436176 - RNA, 22 nt, Human
uaaggcccgugaguuucauauc

SEQ ID NO: 436177 - RNA, 18 nt, Human
gcccugguggagcuggug

SEQ ID NO: 436178 - RNA, 22 nt, Human
agcagcaggagccgugggguga

SEQ ID NO: 436179 - RNA, 22 nt, Human
uucuggcugcagucccuguaau

SEQ ID NO: 436180 - RNA, 23 nt, Human
aucugggcaucuggagugguccu

SEQ ID NO: 436181 - RNA, 22 nt, Human
cacagcccugcgccccaguuug

SEQ ID NO: 436182 - RNA, 21 nt, Human
cugcaucucauagaacauguc

SEQ ID NO: 436183 - RNA, 22 nt, Human
uuuuaguuuggauuucuaaagc

SEQ ID NO: 436184 - RNA, 21 nt, Human
agaaggcaccagcaaggacug

SEQ ID NO: 436185 - RNA, 22 nt, Human
ggagcccaagucugcacucggc

SEQ ID NO: 436186 - RNA, 21 nt, Human
aagagcuggaucaaggauaag

SEQ ID NO: 436187 - RNA, 22 nt, Human
cuggaagggaaaucucuuggca

SEQ ID NO: 436188 - RNA, 22 nt, Human
cagaauccacaacagaaguuga

SEQ ID NO: 436189 - RNA, 23 nt, Human
ucaugcagagaaggacugcuuac

SEQ ID NO: 436190 - RNA, 22 nt, Human
ccuguguggaaaccgcaugacg

SEQ ID NO: 436191 - RNA, 22 nt, Human
gaggcaggcagauugcuugagg

SEQ ID NO: 436192 - RNA, 22 nt, Human
gugcagugaaaaaagaaugucc

SEQ ID NO: 436193 - RNA, 22 nt, Human
uuuuuugucccagagagccugg

SEQ ID NO: 436194 - RNA, 22 nt, Human
cugagccagggccacacaugga

SEQ ID NO: 436195 - RNA, 22 nt, Human
aguuuuuccguggcuacgauaa

SEQ ID NO: 436196 - RNA, 22 nt, Human
gcugucccgaaccccugguaau

SEQ ID NO: 436197 - RNA, 22 nt, Human
uucuggaaggguggaguagcuu

SEQ ID NO: 436198 - RNA, 23 nt, Human
uccagcagccaagaaggguagaa

SEQ ID NO: 436199 - RNA, 22 nt, Human
cgcuggccauagccuccugugu

SEQ ID NO: 436200 - RNA, 22 nt, Human
uucacauuggugauauguuucu

SEQ ID NO: 436201 - RNA, 23 nt, Human
uugcaaaaugagucuugagugaa

SEQ ID NO: 436202 - RNA, 22 nt, Human
caaggaaaacagaugaucaaca

SEQ ID NO: 436203 - RNA, 22 nt, Human
aauucaaugguuuuuaggauau

SEQ ID NO: 436204 - RNA, 22 nt, Human
cugagccagcuggcaugugcua

SEQ ID NO: 436205 - RNA, 22 nt, Human
auugcaaauaaugcgagccagu

SEQ ID NO: 436206 - RNA, 22 nt, Human
aagcagaggccacagagugggc

SEQ ID NO: 436207 - RNA, 22 nt, Human
cuguggcauugccgaggcuggc

SEQ ID NO: 436208 - RNA, 22 nt, Human
aaggagugcugaaaggaagcgg

SEQ ID NO: 436209 - RNA, 22 nt, Human
ucagggagaggugagagccugu

SEQ ID NO: 436210 - RNA, 22 nt, Human
uucagggacuuagugucaguuu

SEQ ID NO: 436211 - RNA, 22 nt, Human
cauacaaucaaguucuuuauua

SEQ ID NO: 436212 - RNA, 22 nt, Human
aaaaacacaaguggcuuggucu

SEQ ID NO: 436213 - RNA, 22 nt, Human
ggccaugguuggggaagacaug

SEQ ID NO: 436214 - RNA, 22 nt, Human
uugcugaucugaaacguuacug

SEQ ID NO: 436215 - RNA, 22 nt, Human
uuuuaugagaaugcgccacuug

SEQ ID NO: 436216 - RNA, 19 nt, Human
gaguacaggugcagaaaug

SEQ ID NO: 436217 - RNA, 22 nt, Human
cugcccagauuuuaccaccugc

SEQ ID NO: 436218 - RNA, 20 nt, Human
ugggcagcacugcuggcugg

SEQ ID NO: 436219 - RNA, 18 nt, Human
guuuggcauaacugaugc

SEQ ID NO: 436220 - RNA, 22 nt, Human
cucacuggcaagacuacaggug

SEQ ID NO: 436221 - RNA, 22 nt, Human
ugcaggcuguuugguggaucuc

SEQ ID NO: 436222 - RNA, 23 nt, Human
cuuugcaaaaacauuagucagug

SEQ ID NO: 436223 - RNA, 22 nt, Human
auccugaguuccugccucuaaa

SEQ ID NO: 436224 - RNA, 22 nt, Human
uuagauaaauuaagacuuuaca

SEQ ID NO: 436225 - RNA, 22 nt, Human
uccuguggucuggaaggaaugg

SEQ ID NO: 436226 - RNA, 22 nt, Human
augggcuguccuaguccagccc

SEQ ID NO: 436227 - RNA, 22 nt, Human
ugccaggcccagcuccagagcu

SEQ ID NO: 436228 - RNA, 22 nt, Human
ccaggaaaaagagaaacauggu

SEQ ID NO: 436229 - RNA, 22 nt, Human
cugacuguuugcugaaaggucu

SEQ ID NO: 436230 - RNA, 22 nt, Human
cuaaggcaccgaggcaggagcg

SEQ ID NO: 436231 - RNA, 22 nt, Human
acagcaaaagacaagaacuuaa

SEQ ID NO: 436232 - RNA, 21 nt, Human
cucagagcaguucagagggau

SEQ ID NO: 436233 - RNA, 22 nt, Human
auacuguaucacuugugaguga

SEQ ID NO: 436234 - RNA, 21 nt, Human
ucauuggucauuaagcucugu

SEQ ID NO: 436235 - RNA, 22 nt, Human
gagcagugaagacagaaguaca

SEQ ID NO: 436236 - RNA, 22 nt, Human
agcaagcuggaggggcucauga

SEQ ID NO: 436237 - RNA, 21 nt, Human
ugcaggcuguuuaagaggcaa

SEQ ID NO: 436238 - RNA, 20 nt, Human
acagcagccuugcuagaaac

SEQ ID NO: 436239 - RNA, 22 nt, Human
cagcuucuuagucuuuccuugu

SEQ ID NO: 436240 - RNA, 22 nt, Human
acagaagaaguucaaggugaag

SEQ ID NO: 436241 - RNA, 22 nt, Human
gaauaauagcagaaauuagcag

SEQ ID NO: 436242 - RNA, 20 nt, Human
ugccaugguaacagagugug

SEQ ID NO: 436243 - RNA, 21 nt, Human
caaguucagaagguugggcug

SEQ ID NO: 436244 - RNA, 22 nt, Human
uaauaugggcagucugaauaua

SEQ ID NO: 436245 - RNA, 22 nt, Human
agaguucagcuacugcaaaugu

SEQ ID NO: 436246 - RNA, 19 nt, Human
cuggcagccugucuguguc

SEQ ID NO: 436247 - RNA, 22 nt, Human
aagugauacaucuagucuauaa

SEQ ID NO: 436248 - RNA, 22 nt, Human
gaggccugcuuuggcacucugg

SEQ ID NO: 436249 - RNA, 23 nt, Human
ggcaauaacgagcuugucucuga

SEQ ID NO: 436250 - RNA, 22 nt, Human
agcagagccugggcuaggggug

SEQ ID NO: 436251 - RNA, 22 nt, Human
uuugcaaaauuauucccagcau

SEQ ID NO: 436252 - RNA, 22 nt, Human
gcacaauaacagccaagguuau

SEQ ID NO: 436253 - RNA, 22 nt, Human
ugcagcugauuaaagggcagac

SEQ ID NO: 436254 - RNA, 22 nt, Human
cagcauuucaggaggcugaggu

SEQ ID NO: 436255 - RNA, 22 nt, Human
aagcccugucacccugacuuca

SEQ ID NO: 436256 - RNA, 22 nt, Human
uaaagacacugguuuuaaucau

SEQ ID NO: 436257 - RNA, 22 nt, Human
aggcugaggcgggaggaucacu

SEQ ID NO: 436258 - RNA, 22 nt, Human
uucuccuuauucauaguugucu

SEQ ID NO: 436259 - RNA, 20 nt, Human
uaggacagggccuggcuucu

SEQ ID NO: 436260 - RNA, 22 nt, Human
agcgcaggaacacgucugccuu

SEQ ID NO: 436261 - RNA, 22 nt, Human
gauuuauaguaugugcuuucag

SEQ ID NO: 436262 - RNA, 18 nt, Human
gcuggcugcacuucugcu

SEQ ID NO: 436263 - RNA, 22 nt, Human
cuuuccucuggcacugucuggu

SEQ ID NO: 436264 - RNA, 22 nt, Human
ccugaagcacccggagcuggca

SEQ ID NO: 436265 - RNA, 22 nt, Human
ucuuagcacagcuauauaaguu

SEQ ID NO: 436266 - RNA, 22 nt, Human
auuagagaaauguugccaagau

SEQ ID NO: 436267 - RNA, 22 nt, Human
ucccagauuguugauggcuuaa

SEQ ID NO: 436268 - RNA, 22 nt, Human
uuugcaaauacagaggucuugc

SEQ ID NO: 436269 - RNA, 22 nt, Human
auguuauuucugaaagaucauu

SEQ ID NO: 436270 - RNA, 22 nt, Human
cacugguacguagguuggggca

SEQ ID NO: 436271 - RNA, 22 nt, Human
ucuggccccggucuucacagcu

SEQ ID NO: 436272 - RNA, 22 nt, Human
ucccagagccucugccacucug

SEQ ID NO: 436273 - RNA, 21 nt, Human
acaaauuguuuauauaggaag

SEQ ID NO: 436274 - RNA, 22 nt, Human
gggcacagcugcuacccagugc

SEQ ID NO: 436275 - RNA, 21 nt, Human
gagugcagcaagguagagucu

SEQ ID NO: 436276 - RNA, 22 nt, Human
uagcagggucucaggagucagg

SEQ ID NO: 436277 - RNA, 22 nt, Human
gcccacaguacgaggcucaggc

SEQ ID NO: 436278 - RNA, 22 nt, Human
ugcaaauuccauuuaaacacua

SEQ ID NO: 436279 - RNA, 22 nt, Human
ugugucccuuggaaccucagcu

SEQ ID NO: 436280 - RNA, 22 nt, Human
cuucuugaaguccuccagaagu

SEQ ID NO: 436281 - RNA, 22 nt, Human
uaaacugcuucucucagucugu

SEQ ID NO: 436282 - RNA, 20 nt, Human
uccaagcccuccuuccauuc

SEQ ID NO: 436283 - RNA, 22 nt, Human
aggcccaguagugcugccuuua

SEQ ID NO: 436284 - RNA, 22 nt, Human
agagcacaugguuccugugucc

SEQ ID NO: 436285 - RNA, 22 nt, Human
agaggccucaaaccagaccuga

SEQ ID NO: 436286 - RNA, 22 nt, Human
gcauuuuaauaagauucauagg

SEQ ID NO: 436287 - RNA, 22 nt, Human
gcucaaggcaggcagacaugag

SEQ ID NO: 436288 - RNA, 22 nt, Human
ucagcccuuccuggagcuuuua

SEQ ID NO: 436289 - RNA, 22 nt, Human
uguacauacauagauauacaca

SEQ ID NO: 436290 - RNA, 18 nt, Human
uggaggaaucacaauggc

SEQ ID NO: 436291 - RNA, 18 nt, Human
ccucaggggaccuggcag

SEQ ID NO: 436292 - RNA, 22 nt, Human
augaggcagguggaggcugcca

SEQ ID NO: 436293 - RNA, 22 nt, Human
gaggcuggaauauuagaaaugu

SEQ ID NO: 436294 - RNA, 22 nt, Human
acagaacugcaggaggaaaagc

SEQ ID NO: 436295 - RNA, 18 nt, Human
auuucuacuacuauaaag

SEQ ID NO: 436296 - RNA, 22 nt, Human
caagcagccccaacaugaggau

SEQ ID NO: 436297 - RNA, 22 nt, Human
agaagucaaugaugagagugcu

SEQ ID NO: 436298 - RNA, 18 nt, Human
ggagcccagaggacagga

SEQ ID NO: 436299 - RNA, 22 nt, Human
agcaggugucggcgagggucuu

SEQ ID NO: 436300 - RNA, 22 nt, Human
aguggcaguggaaagcacacgg

SEQ ID NO: 436301 - RNA, 22 nt, Human
aaagaccauguuuacagcuagg

SEQ ID NO: 436302 - RNA, 22 nt, Human
uucuuuauggaauggugauagu

SEQ ID NO: 436303 - RNA, 22 nt, Human
ugaaacaggaaguaaacagaca

SEQ ID NO: 436304 - RNA, 22 nt, Human
agagacagaggcaauauagcuu

SEQ ID NO: 436305 - RNA, 22 nt, Human
ccuuuuucccuggagggacagc

SEQ ID NO: 436306 - RNA, 22 nt, Human
cuggcagcuggaggcuagaggc

SEQ ID NO: 436307 - RNA, 22 nt, Human
uuguacaaagauuucacagcuc

SEQ ID NO: 436308 - RNA, 22 nt, Human
uauagcaagcaggacagucuca

SEQ ID NO: 436309 - RNA, 22 nt, Human
ugcagaagcugcaggucagugg

SEQ ID NO: 436310 - RNA, 22 nt, Human
cuggcuccauuacucagcaucu

SEQ ID NO: 436311 - RNA, 23 nt, Human
ugcccucccaaugcuucggucac

SEQ ID NO: 436312 - RNA, 22 nt, Human
aguucuuuuaccaaggcaaaug

SEQ ID NO: 436313 - RNA, 22 nt, Human
ugugcccauuacacagaggcau

SEQ ID NO: 436314 - RNA, 22 nt, Human
gacagaggcuggagcaccuccu

SEQ ID NO: 436315 - RNA, 22 nt, Human
agaggagcugggaggcccucgu

SEQ ID NO: 436316 - RNA, 20 nt, Human
gaacauggcagguggagggg

SEQ ID NO: 436317 - RNA, 22 nt, Human
uagccgggugugguggaacucc

SEQ ID NO: 436318 - RNA, 22 nt, Human
gaaggcaggcuucugauuaggu

SEQ ID NO: 436319 - RNA, 22 nt, Human
uguaagaaaaguaaauagugac

SEQ ID NO: 436320 - RNA, 22 nt, Human
aucuaagaggaugguuggaaau

SEQ ID NO: 436321 - RNA, 22 nt, Human
acaaggaacaagcauguaguuu

SEQ ID NO: 436322 - RNA, 22 nt, Human
caggugccucaggaugagacaa

SEQ ID NO: 436323 - RNA, 22 nt, Human
acugugugcccugacgccaggg

SEQ ID NO: 436324 - RNA, 22 nt, Human
uaaaggcagccacugagcucaa

SEQ ID NO: 436325 - RNA, 22 nt, Human
ggccuugggaggagggucagaa

SEQ ID NO: 436326 - RNA, 22 nt, Human
cauguaaagaauuucacacaag

SEQ ID NO: 436327 - RNA, 22 nt, Human
acagaguuguaaacauuuacca

SEQ ID NO: 436328 - RNA, 22 nt, Human
accugaggccuccccagcagac

SEQ ID NO: 436329 - RNA, 22 nt, Human
guuuugugaggcacccacaggu

SEQ ID NO: 436330 - RNA, 19 nt, Human
agcacagacaagaccagca

SEQ ID NO: 436331 - RNA, 22 nt, Human
guguguccucaguaguggcaug

SEQ ID NO: 436332 - RNA, 21 nt, Human
ugcucaguaaaugcugaguga

SEQ ID NO: 436333 - RNA, 22 nt, Human
agcagcagggugauagugccca

SEQ ID NO: 436334 - RNA, 22 nt, Human
agcacaaugugaaaagagcucu

SEQ ID NO: 436335 - RNA, 22 nt, Human
uauuuguauguguguacauaua

SEQ ID NO: 436336 - RNA, 22 nt, Human
aauucaaucuaagaaaugauca

SEQ ID NO: 436337 - RNA, 17 nt, Human
acagcaggcccggaggg

SEQ ID NO: 436338 - RNA, 22 nt, Human
gcagagcucuguucuuaucucc

SEQ ID NO: 436339 - RNA, 23 nt, Human
gccucuggagccccagugcucag

SEQ ID NO: 436340 - RNA, 17 nt, Human
uuacagcagcaauagag

SEQ ID NO: 436341 - RNA, 22 nt, Human
aaugccuuauaggcugaaaauu

SEQ ID NO: 436342 - RNA, 22 nt, Human
cuaggcuguaaagagcuaggag

SEQ ID NO: 436343 - RNA, 22 nt, Human
ugaagcaggugaauggaugucg

SEQ ID NO: 436344 - RNA, 22 nt, Human
aggcccugggagcagagaugca

SEQ ID NO: 436345 - RNA, 22 nt, Human
ugcaggugugguuccucagcca

SEQ ID NO: 436346 - RNA, 22 nt, Human
ggcaucguccugggcauaggga

SEQ ID NO: 436347 - RNA, 22 nt, Human
aggucuggaaacagcagggaga

SEQ ID NO: 436348 - RNA, 23 nt, Human
uaaggcauuuuuucuguaucagu

SEQ ID NO: 436349 - RNA, 22 nt, Human
uccugaaggagcaguugcuggg

SEQ ID NO: 436350 - RNA, 22 nt, Human
uacaaggcuucagcucagcuau

SEQ ID NO: 436351 - RNA, 22 nt, Human
ucccugagcuucaucaggcuuu

SEQ ID NO: 436352 - RNA, 22 nt, Human
gugcccucacaaaguggaaaga

SEQ ID NO: 436353 - RNA, 22 nt, Human
ccugggaagucagccaaggacg

SEQ ID NO: 436354 - RNA, 18 nt, Human
uagcagcacuggccgcuu

SEQ ID NO: 436355 - RNA, 22 nt, Human
cucaguccgucccgcuaggugc

SEQ ID NO: 436356 - RNA, 21 nt, Human
gugcucugggcagcagagggc

SEQ ID NO: 436357 - RNA, 22 nt, Human
acaggccuggguucaaauuugg

SEQ ID NO: 436358 - RNA, 22 nt, Human
uaacaucuuaacuggauacuuc

SEQ ID NO: 436359 - RNA, 22 nt, Human
uggaacgucguaauguugguua

SEQ ID NO: 436360 - RNA, 22 nt, Human
agcuguuuucuugccguccuag

SEQ ID NO: 436361 - RNA, 20 nt, Human
gagggcucguggauggauaa

SEQ ID NO: 436362 - RNA, 17 nt, Human
ggccuuggggccucagu

SEQ ID NO: 436363 - RNA, 22 nt, Human
aagcagugcgcucaucuaaggg

SEQ ID NO: 436364 - RNA, 22 nt, Human
ugguggcuguugcagaacugag

SEQ ID NO: 436365 - RNA, 22 nt, Human
ccagagaaagugaagcaaaugu

SEQ ID NO: 436366 - RNA, 22 nt, Human
gcacaagaauaaccauauuuaa

SEQ ID NO: 436367 - RNA, 22 nt, Human
cucaaaagacuuaaacauaaga

SEQ ID NO: 436368 - RNA, 22 nt, Human
aaaugcauucuguuuucacuag

SEQ ID NO: 436369 - RNA, 22 nt, Human
cuuugcaguauagccuaguaga

SEQ ID NO: 436370 - RNA, 22 nt, Human
cccaggaggcagauguugcagu

SEQ ID NO: 436371 - RNA, 22 nt, Human
gcccagcugucuggcagggaug

SEQ ID NO: 436372 - RNA, 22 nt, Human
ugggcagagaucuggaucaaac

SEQ ID NO: 436373 - RNA, 22 nt, Human
gagcagugguugaacagaggca

SEQ ID NO: 436374 - RNA, 22 nt, Human
ggcaucuguccaucucuccagc

SEQ ID NO: 436375 - RNA, 22 nt, Human
gucagcagugucagcucugggg

SEQ ID NO: 436376 - RNA, 22 nt, Human
auucaaguucuucugucuuugc

SEQ ID NO: 436377 - RNA, 22 nt, Human
gugcagcugcaggagucagguc

SEQ ID NO: 436378 - RNA, 22 nt, Human
uuucaaaccacugagguucuga

SEQ ID NO: 436379 - RNA, 22 nt, Human
ugggccaggauuucaagacccu

SEQ ID NO: 436380 - RNA, 22 nt, Human
aauucaaagacuagaauuuugc

SEQ ID NO: 436381 - RNA, 19 nt, Human
gcaggccucuugggaauua

SEQ ID NO: 436382 - RNA, 22 nt, Human
ucuaucagaguagaaggcaacg

SEQ ID NO: 436383 - RNA, 22 nt, Human
uccuggagggaggcggugcuac

SEQ ID NO: 436384 - RNA, 22 nt, Human
gcaacaguuggauuccagagga

SEQ ID NO: 436385 - RNA, 20 nt, Human
ucagccuugaaugcuugaaa

SEQ ID NO: 436386 - RNA, 22 nt, Human
aggacacaccagguccagcugu

SEQ ID NO: 436387 - RNA, 22 nt, Human
ccagagaggcaaaacuccuucc

SEQ ID NO: 436388 - RNA, 22 nt, Human
ucuuauaaaaggacucccauuu

SEQ ID NO: 436389 - RNA, 19 nt, Human
ccugggaggcggagguugc

SEQ ID NO: 436390 - RNA, 22 nt, Human
uguacaaaacaagaugggggua

SEQ ID NO: 436391 - RNA, 22 nt, Human
cuuauugugagaugcgauaauu

SEQ ID NO: 436392 - RNA, 22 nt, Human
gcuuugcacagauuagguuauu

SEQ ID NO: 436393 - RNA, 22 nt, Human
uaaaggagugugaugaaaggga

SEQ ID NO: 436394 - RNA, 22 nt, Human
aguggcagaagucacuggguag

SEQ ID NO: 436395 - RNA, 22 nt, Human
ugcagagguguugcugagauaa

SEQ ID NO: 436396 - RNA, 22 nt, Human
gagcugagccuggguggaccgc

SEQ ID NO: 436397 - RNA, 19 nt, Human
agacaaugggguuggcagu

SEQ ID NO: 436398 - RNA, 22 nt, Human
agaagcagggcagggaaaagca

SEQ ID NO: 436399 - RNA, 22 nt, Human
agucccaggcagccgagccggu

SEQ ID NO: 436400 - RNA, 22 nt, Human
agugcugaagacuggcuaggga

SEQ ID NO: 436401 - RNA, 19 nt, Human
agaggcagucuccaacagg

SEQ ID NO: 436402 - RNA, 22 nt, Human
uuugaaagaaaccagugaguga

SEQ ID NO: 436403 - RNA, 19 nt, Human
ucuggcugccaaggauuga

SEQ ID NO: 436404 - RNA, 22 nt, Human
ugaaggcagugauuuuguuugg

SEQ ID NO: 436405 - RNA, 22 nt, Human
agcuacuggagaacacaaaacc

SEQ ID NO: 436406 - RNA, 22 nt, Human
augauuuuucagcagaggaucu

SEQ ID NO: 436407 - RNA, 22 nt, Human
cagagccuaaaacgacuccacu

SEQ ID NO: 436408 - RNA, 22 nt, Human
gcagcugggccccagccucucc

SEQ ID NO: 436409 - RNA, 22 nt, Human
acggcuucuugacuguggguug

SEQ ID NO: 436410 - RNA, 22 nt, Human
uuuaaauuuguguuuagagggu

SEQ ID NO: 436411 - RNA, 22 nt, Human
uaaggcaguuuugccugagaua

SEQ ID NO: 436412 - RNA, 22 nt, Human
aauacugcauacaguuucucau

SEQ ID NO: 436413 - RNA, 22 nt, Human
cugcuuggaguccuccagcacc

SEQ ID NO: 436414 - RNA, 22 nt, Human
gcaggaacuggagcuggauguu

SEQ ID NO: 436415 - RNA, 22 nt, Human
ccccacagccgccagcagggag

SEQ ID NO: 436416 - RNA, 22 nt, Human
guccugguagggcucugugucu

SEQ ID NO: 436417 - RNA, 22 nt, Human
ucagauauucucuaagaacaau

SEQ ID NO: 436418 - RNA, 22 nt, Human
cagcaggcaggugggccaaguc

SEQ ID NO: 436419 - RNA, 22 nt, Human
uagacagauuuaaaggaaugga

SEQ ID NO: 436420 - RNA, 22 nt, Human
aguucagaaaugucuuugcaaa

SEQ ID NO: 436421 - RNA, 22 nt, Human
gccagcucagaugcaggaagga

SEQ ID NO: 436422 - RNA, 22 nt, Human
ucacaguaucuagaaaugaggg

SEQ ID NO: 436423 - RNA, 22 nt, Human
caccagggacaaugcuaggggu

SEQ ID NO: 436424 - RNA, 22 nt, Human
uuaugacaggaaaaucacagaa

SEQ ID NO: 436425 - RNA, 22 nt, Human
gagcagggcuuguccuccucau

SEQ ID NO: 436426 - RNA, 22 nt, Human
cagcccugugcuaagcacccuc

SEQ ID NO: 436427 - RNA, 22 nt, Human
ugggcaggagagaagcuaaaga

SEQ ID NO: 436428 - RNA, 22 nt, Human
caucaugccccgcuacagugca

SEQ ID NO: 436429 - RNA, 22 nt, Human
uccaggagugugugcuaauggg

SEQ ID NO: 436430 - RNA, 22 nt, Human
ugggccugaaggagcugcgccc

SEQ ID NO: 436431 - RNA, 22 nt, Human
aaacacuuccuguaacaugaca

SEQ ID NO: 436432 - RNA, 22 nt, Human
auucuauagacagaaggucaau

SEQ ID NO: 436433 - RNA, 22 nt, Human
gcacccagggcaggaagugagg

SEQ ID NO: 436434 - RNA, 22 nt, Human
gacaggcuggcaaugcccugcu

SEQ ID NO: 436435 - RNA, 22 nt, Human
cacauuuagagguuagcauggu

SEQ ID NO: 436436 - RNA, 19 nt, Human
auuuauuguaugauuccau

SEQ ID NO: 436437 - RNA, 22 nt, Human
uuuucucuacaaaauaaccagc

SEQ ID NO: 436438 - RNA, 22 nt, Human
gccuggagccucagcaaggagg

SEQ ID NO: 436439 - RNA, 22 nt, Human
ugccgcagugcggggagggccc

SEQ ID NO: 436440 - RNA, 22 nt, Human
ucugccugcaguguggcagggc

SEQ ID NO: 436441 - RNA, 22 nt, Human
uggugagauaacuuucggcaag

SEQ ID NO: 436442 - RNA, 22 nt, Human
gcugaggcugggagcagccugu

SEQ ID NO: 436443 - RNA, 21 nt, Human
agagccugagaucuuccagca

SEQ ID NO: 436444 - RNA, 22 nt, Human
cuccuucccaugagugugggca

SEQ ID NO: 436445 - RNA, 22 nt, Human
ucaggccugcccugaaagcaca

SEQ ID NO: 436446 - RNA, 19 nt, Human
ucccugaguuccagcccag

SEQ ID NO: 436447 - RNA, 22 nt, Human
uauuuuacaugauccagaguug

SEQ ID NO: 436448 - RNA, 22 nt, Human
aaaagcacuacaauuucgcuuc

SEQ ID NO: 436449 - RNA, 22 nt, Human
uacagaggaggugguugggagu

SEQ ID NO: 436450 - RNA, 22 nt, Human
caguacuuuucuggcuuucuac

SEQ ID NO: 436451 - RNA, 22 nt, Human
cugagggcuggagcugaggccu

SEQ ID NO: 436452 - RNA, 22 nt, Human
agacacagcaauaacuacuguu

SEQ ID NO: 436453 - RNA, 22 nt, Human
cccuggcaagugcuguguagcu

SEQ ID NO: 436454 - RNA, 22 nt, Human
gggcagaggggcgcuucccucu

SEQ ID NO: 436455 - RNA, 22 nt, Human
uucuaacuggcuugacaguuuc

SEQ ID NO: 436456 - RNA, 22 nt, Human
caaaguugcaguuaugugauua

SEQ ID NO: 436457 - RNA, 22 nt, Human
cuguuucagcuacuguuccaug

SEQ ID NO: 436458 - RNA, 22 nt, Human
ucacaguauagaguuauuuugg

SEQ ID NO: 436459 - RNA, 22 nt, Human
aagcagaggaccgacggaggga

SEQ ID NO: 436460 - RNA, 22 nt, Human
acagacaguaugguggggcuga

SEQ ID NO: 436461 - RNA, 22 nt, Human
cucccagacaugugccuccuug

SEQ ID NO: 436462 - RNA, 22 nt, Human
aaaugccucccauucuacugac

SEQ ID NO: 436463 - RNA, 22 nt, Human
ucacccccuguauuaguagcua

SEQ ID NO: 436464 - RNA, 22 nt, Human
gugcccugaggucuucacuuug

SEQ ID NO: 436465 - RNA, 22 nt, Human
agacaaguguuucuggguaacu

SEQ ID NO: 436466 - RNA, 23 nt, Human
agcaauaagaagggauacaugug

SEQ ID NO: 436467 - RNA, 22 nt, Human
aaguucaaggcucuagaguucc

SEQ ID NO: 436468 - RNA, 22 nt, Human
ccagggcagugggagaaggugc

SEQ ID NO: 436469 - RNA, 22 nt, Human
gcauugaaauggcaaaaagaga

SEQ ID NO: 436470 - RNA, 22 nt, Human
ucaugccaaacugaacacaguu

SEQ ID NO: 436471 - RNA, 22 nt, Human
caugcaaaauguauuuuauuag

SEQ ID NO: 436472 - RNA, 22 nt, Human
agggcagaaguacagacacuua

SEQ ID NO: 436473 - RNA, 22 nt, Human
gcuggaccaggugugcacaggc

SEQ ID NO: 436474 - RNA, 21 nt, Human
agcagcugggcaacauggagg

SEQ ID NO: 436475 - RNA, 22 nt, Human
uuuaucugucauuucccauauc

SEQ ID NO: 436476 - RNA, 19 nt, Human
gccaggagggcucuggcug

SEQ ID NO: 436477 - RNA, 22 nt, Human
aaacacuuuagaaagggacuug

SEQ ID NO: 436478 - RNA, 22 nt, Human
cagggacaauggcagagccuga

SEQ ID NO: 436479 - RNA, 22 nt, Human
acagugucugacacauuguagc

SEQ ID NO: 436480 - RNA, 22 nt, Human
uucuuuaucaguuacucauagg

SEQ ID NO: 436481 - RNA, 22 nt, Human
uugacuucccagacuuguguuu

SEQ ID NO: 436482 - RNA, 22 nt, Human
gugcagcuuccuggucucagcc

SEQ ID NO: 436483 - RNA, 19 nt, Human
uaucacugggcacugagga

SEQ ID NO: 436484 - RNA, 22 nt, Human
aucaauuuugaggauacaagaa

SEQ ID NO: 436485 - RNA, 22 nt, Human
cacagcaaaggcuucggcugau

SEQ ID NO: 436486 - RNA, 22 nt, Human
aagagauguugaaguuuauuag

SEQ ID NO: 436487 - RNA, 22 nt, Human
uggccuggaagagaggucgagg

SEQ ID NO: 436488 - RNA, 22 nt, Human
ugccucagagaccugacaguac

SEQ ID NO: 436489 - RNA, 22 nt, Human
ucacaauauuuaucuuccaauu

SEQ ID NO: 436490 - RNA, 22 nt, Human
cagcugagcugccagacuacug

SEQ ID NO: 436491 - RNA, 22 nt, Human
uaguuuuuaaguguacaauuuc

SEQ ID NO: 436492 - RNA, 22 nt, Human
acuccaggcaucugcuucugcu

SEQ ID NO: 436493 - RNA, 22 nt, Human
ggcagcugguucuuuccauuaa

SEQ ID NO: 436494 - RNA, 22 nt, Human
auugcuuuuccuuaacacaugc

SEQ ID NO: 436495 - RNA, 22 nt, Human
auggaaaagggucuuucauuuc

SEQ ID NO: 436496 - RNA, 20 nt, Human
uuuaucaggcacuuacuauu

SEQ ID NO: 436497 - RNA, 22 nt, Human
aaggacuggcauuaucuuaugu

SEQ ID NO: 436498 - RNA, 15 nt, Human
ccaggcugggugagc

SEQ ID NO: 436499 - RNA, 22 nt, Human
caaugacacucugcacagugcu

SEQ ID NO: 436500 - RNA, 17 nt, Human
ccucacagggaccagac

SEQ ID NO: 436501 - RNA, 22 nt, Human
ucucuggcuggcaccccaggga

SEQ ID NO: 436502 - RNA, 22 nt, Human
cuagcacugagaauagugcaua

SEQ ID NO: 436503 - RNA, 20 nt, Human
uacaggaccuucuuuguauc

SEQ ID NO: 436504 - RNA, 22 nt, Human
ugggcagacgcuguuggaaggc

SEQ ID NO: 436505 - RNA, 22 nt, Human
ggcagccaugcacgcugccugg

SEQ ID NO: 436506 - RNA, 22 nt, Human
uaggcccaguuccgccucccgg

SEQ ID NO: 436507 - RNA, 22 nt, Human
gauuucuacuugaacuugcuaa

SEQ ID NO: 436508 - RNA, 22 nt, Human
cacugcaguaacucuaggacug

SEQ ID NO: 436509 - RNA, 22 nt, Human
auccuuuauaagacuuguauuc

SEQ ID NO: 436510 - RNA, 22 nt, Human
cuuuaacaaaugacucuugucu

SEQ ID NO: 436511 - RNA, 22 nt, Human
aagcuggcaaacaagcaucauu

SEQ ID NO: 436512 - RNA, 22 nt, Human
cuucuguguuuuacuauaugua

SEQ ID NO: 436513 - RNA, 22 nt, Human
caauucaugggcugaggaaggg

SEQ ID NO: 436514 - RNA, 22 nt, Human
ucugaggccuucagcaugaauc

SEQ ID NO: 436515 - RNA, 22 nt, Human
cugcccugcuggagaucacagu

SEQ ID NO: 436516 - RNA, 22 nt, Human
gucuggagccacccuaagcauu

SEQ ID NO: 436517 - RNA, 22 nt, Human
uggggacaggagacuuacagcu

SEQ ID NO: 436518 - RNA, 22 nt, Human
gacuuccuaagauucaggaaug

SEQ ID NO: 436519 - RNA, 22 nt, Human
aauuuggagcuuuguuucuaga

SEQ ID NO: 436520 - RNA, 20 nt, Human
gcagucugucacagagcaug

SEQ ID NO: 436521 - RNA, 22 nt, Human
uuuccuugcacauugguuucca

SEQ ID NO: 436522 - RNA, 22 nt, Human
uggcucagcugucacagccugg

SEQ ID NO: 436523 - RNA, 22 nt, Human
aggugcagcugguggagucugg

SEQ ID NO: 436524 - RNA, 22 nt, Human
agguucuggagaacuuggaggu

SEQ ID NO: 436525 - RNA, 22 nt, Human
guuucagaguagaaccucaagg

SEQ ID NO: 436526 - RNA, 18 nt, Human
gaaaggagagacaguagg

SEQ ID NO: 436527 - RNA, 22 nt, Human
cagcagagcuuauuaacuaaaa

SEQ ID NO: 436528 - RNA, 22 nt, Human
gcugggcuccaggccaggguga

SEQ ID NO: 436529 - RNA, 22 nt, Human
ggcuagggacacagcucugcuc

SEQ ID NO: 436530 - RNA, 22 nt, Human
ccaggcuggauuuugcaguuca

SEQ ID NO: 436531 - RNA, 22 nt, Human
uucagcaaauggcuugagauaa

SEQ ID NO: 436532 - RNA, 22 nt, Human
aaggaauucccuuucugacaga

SEQ ID NO: 436533 - RNA, 22 nt, Human
ccagcugucugguuccagagcc

SEQ ID NO: 436534 - RNA, 22 nt, Human
aggcagccugguuugaauggaa

SEQ ID NO: 436535 - RNA, 22 nt, Human
augacagaggagugcaggugau

SEQ ID NO: 436536 - RNA, 22 nt, Human
acaguaccugcucucaagcaaa

SEQ ID NO: 436537 - RNA, 22 nt, Human
uugcaaaagcaauugcaguuuu

SEQ ID NO: 436538 - RNA, 22 nt, Human
cagaggcaggauaagaacugcg

SEQ ID NO: 436539 - RNA, 22 nt, Human
uacuuugcagcuugauaaaaug

SEQ ID NO: 436540 - RNA, 22 nt, Human
uaaggcauaaggccagaggcua

SEQ ID NO: 436541 - RNA, 22 nt, Human
auauuugugguaaagguaagaa

SEQ ID NO: 436542 - RNA, 22 nt, Human
uccaguucuaggucacucucug

SEQ ID NO: 436543 - RNA, 22 nt, Human
gagcugcccugagcuuugcaug

SEQ ID NO: 436544 - RNA, 22 nt, Human
ggucccaggaagugcggcggcg

SEQ ID NO: 436545 - RNA, 22 nt, Human
gggcagucacagugcuggagca

SEQ ID NO: 436546 - RNA, 22 nt, Human
guggagcccugccuugcucaug

SEQ ID NO: 436547 - RNA, 22 nt, Human
ccugggcaggccggacgcuggg

SEQ ID NO: 436548 - RNA, 22 nt, Human
ccuuugcauuuauguguccauu

SEQ ID NO: 436549 - RNA, 22 nt, Human
ucccagccauuccuuuaggugu

SEQ ID NO: 436550 - RNA, 22 nt, Human
aggcuuggcucuccuaugagaa

SEQ ID NO: 436551 - RNA, 22 nt, Human
uuucaaacuuaaauaccuuucc

SEQ ID NO: 436552 - RNA, 22 nt, Human
gcccaucccugaaccaacuggg

SEQ ID NO: 436553 - RNA, 22 nt, Human
ugacagaacagguugggagcaa

SEQ ID NO: 436554 - RNA, 22 nt, Human
aacacagaagugccaagagcca

SEQ ID NO: 436555 - RNA, 22 nt, Human
aggcaggcuagucgcuugagcc

SEQ ID NO: 436556 - RNA, 22 nt, Human
augagcugggccauccagugau

SEQ ID NO: 436557 - RNA, 22 nt, Human
guggccagccagggugcugaug

SEQ ID NO: 436558 - RNA, 22 nt, Human
aagagucagcuucuguaugggu

SEQ ID NO: 436559 - RNA, 22 nt, Human
cccucccaggaguggccagaga

SEQ ID NO: 436560 - RNA, 22 nt, Human
gaaaggagggcucacaaaagug

SEQ ID NO: 436561 - RNA, 22 nt, Human
ucauugguaauuauuuuugaca

SEQ ID NO: 436562 - RNA, 22 nt, Human
uuugaaauaugaggcauuauga

SEQ ID NO: 436563 - RNA, 23 nt, Human
ccugcccaggaauccggcggcgu

SEQ ID NO: 436564 - RNA, 22 nt, Human
ucagcucuuaacccucuggccu

SEQ ID NO: 436565 - RNA, 21 nt, Human
agaauuaaauuggauuugugu

SEQ ID NO: 436566 - RNA, 22 nt, Human
uggguggcacuucuggggucca

SEQ ID NO: 436567 - RNA, 18 nt, Human
ggagcccagaggugaguu

SEQ ID NO: 436568 - RNA, 22 nt, Human
gauacauuucaaggaggacugg

SEQ ID NO: 436569 - RNA, 22 nt, Human
ucugaucugucagucaugaagg

SEQ ID NO: 436570 - RNA, 23 nt, Human
ucagcugcuuccuccugccugcc

SEQ ID NO: 436571 - RNA, 20 nt, Human
guuuuucucucuugccacua

SEQ ID NO: 436572 - RNA, 22 nt, Human
ccagaggagcaggcuggcucca

SEQ ID NO: 436573 - RNA, 20 nt, Human
aggggcaccugcgacggggc

SEQ ID NO: 436574 - RNA, 22 nt, Human
gggcaagcucuucagaagcucu

SEQ ID NO: 436575 - RNA, 22 nt, Human
gcaggcuggucugaccaucccu

SEQ ID NO: 436576 - RNA, 22 nt, Human
gugcccuccugaagccaucaca

SEQ ID NO: 436577 - RNA, 22 nt, Human
uacuucauaccugcuagaaugg

SEQ ID NO: 436578 - RNA, 22 nt, Human
cuggccaacuugcuuguuggca

SEQ ID NO: 436579 - RNA, 22 nt, Human
uguacauagaucuugaaaauua

SEQ ID NO: 436580 - RNA, 18 nt, Human
caggaauggaugggauuu

SEQ ID NO: 436581 - RNA, 22 nt, Human
uggagggaacccaggcugcucu

SEQ ID NO: 436582 - RNA, 22 nt, Human
agauacaguguuacauuuuuau

SEQ ID NO: 436583 - RNA, 23 nt, Human
cacaggcagaaaucaagacggua

SEQ ID NO: 436584 - RNA, 22 nt, Human
aauugcuugaugacuaguaauu

SEQ ID NO: 436585 - RNA, 22 nt, Human
gaggcccugaagacagcugggg

SEQ ID NO: 436586 - RNA, 22 nt, Human
gcuguuucuuuggcaaacugau

SEQ ID NO: 436587 - RNA, 22 nt, Human
caguuucuuagugacacaaauc

SEQ ID NO: 436588 - RNA, 22 nt, Human
gaggccuggcugggaggaggug

SEQ ID NO: 436589 - RNA, 22 nt, Human
agcugucagugcugugccugua

SEQ ID NO: 436590 - RNA, 23 nt, Human
aacaggaugugcuucaucuuuug

SEQ ID NO: 436591 - RNA, 22 nt, Human
augagacaugacuucaggccuu

SEQ ID NO: 436592 - RNA, 22 nt, Human
ggagaagguggcucagcaaagg

SEQ ID NO: 436593 - RNA, 22 nt, Human
ugagacaguucugcagcugggu

SEQ ID NO: 436594 - RNA, 22 nt, Human
uagcagcacuauuuguuguagu

SEQ ID NO: 436595 - RNA, 22 nt, Human
gggcaccagcggccgcacugcc

SEQ ID NO: 436596 - RNA, 22 nt, Human
cuccucacuuuccagacugggc

SEQ ID NO: 436597 - RNA, 22 nt, Human
accaaaaauuguggggcugaau

SEQ ID NO: 436598 - RNA, 22 nt, Human
cccuuugcccaguauauucuag

SEQ ID NO: 436599 - RNA, 22 nt, Human
gguguguguggauuagcaugcc

SEQ ID NO: 436600 - RNA, 22 nt, Human
auugaaauugaugaaauucuug

SEQ ID NO: 436601 - RNA, 22 nt, Human
auguuucccauaagauuuucug

SEQ ID NO: 436602 - RNA, 22 nt, Human
cucugcugcaggaaggcgugca

SEQ ID NO: 436603 - RNA, 22 nt, Human
uuuuuacacuuagcauugagcg

SEQ ID NO: 436604 - RNA, 22 nt, Human
gccugggugucgaucacuagug

SEQ ID NO: 436605 - RNA, 22 nt, Human
acagcaggcaugaagaaauguu

SEQ ID NO: 436606 - RNA, 22 nt, Human
caucugccuaaguggcccuguu

SEQ ID NO: 436607 - RNA, 23 nt, Human
uggaccugaaccagugccucugu

SEQ ID NO: 436608 - RNA, 23 nt, Human
agcaggaaaccgagggugauguu

SEQ ID NO: 436609 - RNA, 22 nt, Human
aacauuucauuggaagcuaugu

SEQ ID NO: 436610 - RNA, 22 nt, Human
aggcccagggcugcucucugaa

SEQ ID NO: 436611 - RNA, 22 nt, Human
agaggcugcacuugcucaugau

SEQ ID NO: 436612 - RNA, 22 nt, Human
ggccccaggccuuuggucuggc

SEQ ID NO: 436613 - RNA, 22 nt, Human
ccacagcaugcaggccugacac

SEQ ID NO: 436614 - RNA, 21 nt, Human
acaguucaugauaacuccauc

SEQ ID NO: 436615 - RNA, 22 nt, Human
guggaaggugcuagaacaagga

SEQ ID NO: 436616 - RNA, 22 nt, Human
caauuucaucuugugcuucaau

SEQ ID NO: 436617 - RNA, 22 nt, Human
gcugggcuucaccuccagaguu

SEQ ID NO: 436618 - RNA, 22 nt, Human
uuaauuaacuagccaaccacua

SEQ ID NO: 436619 - RNA, 22 nt, Human
uccugaggagaagagugcuagg

SEQ ID NO: 436620 - RNA, 22 nt, Human
cagcugguuaucagagaggccu

SEQ ID NO: 436621 - RNA, 22 nt, Human
uacagaccaguaguucucagcg

SEQ ID NO: 436622 - RNA, 16 nt, Human
gccuggaguggcaggg

SEQ ID NO: 436623 - RNA, 19 nt, Human
ugagacagaagaugagccu

SEQ ID NO: 436624 - RNA, 22 nt, Human
gcucugucauuuugcagacacu

SEQ ID NO: 436625 - RNA, 22 nt, Human
agcaggaguuugaugcuuuuau

SEQ ID NO: 436626 - RNA, 22 nt, Human
gugcacagaaauugguaagacu

SEQ ID NO: 436627 - RNA, 22 nt, Human
cccaggagguggaguucacagu

SEQ ID NO: 436628 - RNA, 22 nt, Human
aagcuucagugugagcauguaa

SEQ ID NO: 436629 - RNA, 22 nt, Human
agcacagagguggaaguguaua

SEQ ID NO: 436630 - RNA, 22 nt, Human
uggagcaggugccaggugugug

SEQ ID NO: 436631 - RNA, 20 nt, Human
acacacuuugaucuugagcc

SEQ ID NO: 436632 - RNA, 22 nt, Human
uucaaguaaugcuacuccuaug

SEQ ID NO: 436633 - RNA, 21 nt, Human
cccaggagaagaaaagaugca

SEQ ID NO: 436634 - RNA, 22 nt, Human
uuuaguguaagcauaaagaaca

SEQ ID NO: 436635 - RNA, 22 nt, Human
uaaggccuugaaaggauguccu

SEQ ID NO: 436636 - RNA, 22 nt, Human
uggcccugcagaacuagccugg

SEQ ID NO: 436637 - RNA, 22 nt, Human
uuuauucuagcucagaauaguu

SEQ ID NO: 436638 - RNA, 22 nt, Human
ugaagacacauacaagggaaug

SEQ ID NO: 436639 - RNA, 22 nt, Human
cguggcugguggaccugagggc

SEQ ID NO: 436640 - RNA, 22 nt, Human
agccucuccagagccuggcaga

SEQ ID NO: 436641 - RNA, 22 nt, Human
aagcacauuguacauuugugcu

SEQ ID NO: 436642 - RNA, 22 nt, Human
agagcuguucagcagccagguu

SEQ ID NO: 436643 - RNA, 22 nt, Human
cuugcaaacacucaaagccauc

SEQ ID NO: 436644 - RNA, 22 nt, Human
ccuggagcuuggucacgcugcg

SEQ ID NO: 436645 - RNA, 22 nt, Human
gagcccugcuuccaagggggca

SEQ ID NO: 436646 - RNA, 22 nt, Human
gcaggagcuggaaagugauguu

SEQ ID NO: 436647 - RNA, 22 nt, Human
ucaggcuguaaauggugugggu

SEQ ID NO: 436648 - RNA, 23 nt, Human
ggcagauuugguuuguuuuaaua

SEQ ID NO: 436649 - RNA, 23 nt, Human
ucccugagaugcugcucuguccc

SEQ ID NO: 436650 - RNA, 22 nt, Human
cacuucaacaguuauuucuuag

SEQ ID NO: 436651 - RNA, 22 nt, Human
auucagagauuguuauucagac

SEQ ID NO: 436652 - RNA, 22 nt, Human
ggcagugccacuaagcucugcu

SEQ ID NO: 436653 - RNA, 19 nt, Human
uacaaguaggcguuuucuc

SEQ ID NO: 436654 - RNA, 22 nt, Human
cugcccugccuggccagugugg

SEQ ID NO: 436655 - RNA, 22 nt, Human
ugcauuaugcuugugcuguaua

SEQ ID NO: 436656 - RNA, 23 nt, Human
acagcuguugaaauuucaguggg

SEQ ID NO: 436657 - RNA, 22 nt, Human
cacccaggcuagagugcagugg

SEQ ID NO: 436658 - RNA, 22 nt, Human
uuugcuuucuguugaacagagu

SEQ ID NO: 436659 - RNA, 22 nt, Human
ugcugccagagagacagggacu

SEQ ID NO: 436660 - RNA, 21 nt, Human
agcagcugcaguuucuaucug

SEQ ID NO: 436661 - RNA, 22 nt, Human
ucaggccuagggagaaaauuca

SEQ ID NO: 436662 - RNA, 22 nt, Human
agacccagaaagcagcugcauu

SEQ ID NO: 436663 - RNA, 22 nt, Human
uaaggcaggacuggauagcuau

SEQ ID NO: 436664 - RNA, 20 nt, Human
aggccaggaaauguaguucu

SEQ ID NO: 436665 - RNA, 22 nt, Human
auuguacaaugcugagguuugg

SEQ ID NO: 436666 - RNA, 22 nt, Human
cauuucuagagucccaagaggu

SEQ ID NO: 436667 - RNA, 22 nt, Human
ccagagggcaaaaugaagcuua

SEQ ID NO: 436668 - RNA, 19 nt, Human
cuuauacagauuuucucau

SEQ ID NO: 436669 - RNA, 22 nt, Human
ucagcagggcugugguguggcu

SEQ ID NO: 436670 - RNA, 22 nt, Human
auaaaugauucagcaggaaaua

SEQ ID NO: 436671 - RNA, 22 nt, Human
cagcaguaacucccgugcagca

SEQ ID NO: 436672 - RNA, 22 nt, Human
aggcuggaugugccucaccgag

SEQ ID NO: 436673 - RNA, 22 nt, Human
ucaaguaugacaucaaguuucu

SEQ ID NO: 436674 - RNA, 22 nt, Human
auucagcaaacauuuauuaucu

SEQ ID NO: 436675 - RNA, 22 nt, Human
uuucuagacauuucuauguaca

SEQ ID NO: 436676 - RNA, 22 nt, Human
guguggggucuucucuuggccu

SEQ ID NO: 436677 - RNA, 22 nt, Human
accuggcauaagggcuugaguc

SEQ ID NO: 436678 - RNA, 22 nt, Human
ucagcugccccaguggccccag

SEQ ID NO: 436679 - RNA, 22 nt, Human
gcugagggaggcugaacugagu

SEQ ID NO: 436680 - RNA, 21 nt, Human
uacaucaugcuacuucucuga

SEQ ID NO: 436681 - RNA, 17 nt, Human
aaacugaaaaauucacu

SEQ ID NO: 436682 - RNA, 22 nt, Human
aaaguugacuacuaaggaaugu

SEQ ID NO: 436683 - RNA, 22 nt, Human
ugaagcuuuaggauggguucau

SEQ ID NO: 436684 - RNA, 22 nt, Human
ugccuggcaaugccagaagcca

SEQ ID NO: 436685 - RNA, 22 nt, Human
gaaaugaacugauuaucauugc

SEQ ID NO: 436686 - RNA, 22 nt, Human
cagcccugcacgcugccuccgc

SEQ ID NO: 436687 - RNA, 22 nt, Human
gacaagacauugguaaagauau

SEQ ID NO: 436688 - RNA, 22 nt, Human
ccagcuccugggucuuagucag

SEQ ID NO: 436689 - RNA, 22 nt, Human
guggcccugucccaggccuccu

SEQ ID NO: 436690 - RNA, 22 nt, Human
gaaggcagggaauguggugcua

SEQ ID NO: 436691 - RNA, 22 nt, Human
acaggcugcugagccauuugcu

SEQ ID NO: 436692 - RNA, 22 nt, Human
agcagagaccauauagcccaga

SEQ ID NO: 436693 - RNA, 22 nt, Human
agcuggugaaccugaggcacag

SEQ ID NO: 436694 - RNA, 20 nt, Human
aagagcugacucacaguggu

SEQ ID NO: 436695 - RNA, 22 nt, Human
uacaggaagucucaguacagua

SEQ ID NO: 436696 - RNA, 20 nt, Human
uacagccccugcuucuguug

SEQ ID NO: 436697 - RNA, 22 nt, Human
aauuucaaacuaauaggaacca

SEQ ID NO: 436698 - RNA, 22 nt, Human
ucccagcagagccagcaagccg

SEQ ID NO: 436699 - RNA, 22 nt, Human
aacuagaaccacuuguauuucc

SEQ ID NO: 436700 - RNA, 22 nt, Human
ggagccugggcauuaguaauuu

SEQ ID NO: 436701 - RNA, 22 nt, Human
uuauuaaugaguacaaguuauu

SEQ ID NO: 436702 - RNA, 22 nt, Human
uucuuaaagaggcaaaacacag

SEQ ID NO: 436703 - RNA, 22 nt, Human
uuaccauaaaguuuaucuuucu

SEQ ID NO: 436704 - RNA, 22 nt, Human
uugcaaaaucauuucucaggau

SEQ ID NO: 436705 - RNA, 22 nt, Human
gcagcaguggcugcagguccca

SEQ ID NO: 436706 - RNA, 22 nt, Human
uggcucucugggagguccuggc

SEQ ID NO: 436707 - RNA, 22 nt, Human
uggcagaaguucacuaguagcu

SEQ ID NO: 436708 - RNA, 23 nt, Human
agcacuuguaucuuacuaaaaug

SEQ ID NO: 436709 - RNA, 22 nt, Human
agcaggagagcagugcgugguc

SEQ ID NO: 436710 - RNA, 22 nt, Human
uccuucagccaugggcucucca

SEQ ID NO: 436711 - RNA, 22 nt, Human
gacaggaaaggggucuguuuuc

SEQ ID NO: 436712 - RNA, 22 nt, Human
ucuggggagcagcccuggugag

SEQ ID NO: 436713 - RNA, 22 nt, Human
ggacccaccaggccgggcucca

SEQ ID NO: 436714 - RNA, 22 nt, Human
gccuggcuugccagcccuggcg

SEQ ID NO: 436715 - RNA, 20 nt, Human
ugccuugggacagugccugu

SEQ ID NO: 436716 - RNA, 22 nt, Human
ccucugagaccagcucugcacc

SEQ ID NO: 436717 - RNA, 22 nt, Human
uauguacaucguugaauucaaa

SEQ ID NO: 436718 - RNA, 22 nt, Human
gcauggcuauuaugaggcagaa

SEQ ID NO: 436719 - RNA, 19 nt, Human
gccucugcuggggacaggc

SEQ ID NO: 436720 - RNA, 22 nt, Human
aaggcagagauuagcagaauga

SEQ ID NO: 436721 - RNA, 22 nt, Human
aagggcuggccacauucugggu

SEQ ID NO: 436722 - RNA, 18 nt, Human
cacaggcaggugauaggu

SEQ ID NO: 436723 - RNA, 22 nt, Human
auaaggcagucccuuaacaagg

SEQ ID NO: 436724 - RNA, 22 nt, Human
uuuauccaagcacaauuucuaa

SEQ ID NO: 436725 - RNA, 22 nt, Human
ggcuggccucaggguccucgcu

SEQ ID NO: 436726 - RNA, 22 nt, Human
acuacaauacucuuaguaaaag

SEQ ID NO: 436727 - RNA, 22 nt, Human
agucccagcccaguccuguaag

SEQ ID NO: 436728 - RNA, 22 nt, Human
guucuacaguuccuauuacuua

SEQ ID NO: 436729 - RNA, 22 nt, Human
gugucccaaagauuagaaauca

SEQ ID NO: 436730 - RNA, 22 nt, Human
ugccagcacaaguuaagagauc

SEQ ID NO: 436731 - RNA, 22 nt, Human
gggagagguuacccgagcaacu

SEQ ID NO: 436732 - RNA, 22 nt, Human
cagagaggauggauuccauagc

SEQ ID NO: 436733 - RNA, 22 nt, Human
uuugaaaggaauuaggaugaca

SEQ ID NO: 436734 - RNA, 18 nt, Human
gggcaagcggcugucacc

SEQ ID NO: 436735 - RNA, 19 nt, Human
uugugagcugaagaacagg

SEQ ID NO: 436736 - RNA, 22 nt, Human
ucagcuggcaguucagaggcug

SEQ ID NO: 436737 - RNA, 22 nt, Human
cucaggacuugguuaguguuuu

SEQ ID NO: 436738 - RNA, 22 nt, Human
cccaggguugccugccucugcu

SEQ ID NO: 436739 - RNA, 22 nt, Human
gcugacuuugccugucuuuagc

SEQ ID NO: 436740 - RNA, 22 nt, Human
agcccagcagaaaguccagccu

SEQ ID NO: 436741 - RNA, 22 nt, Human
auucuaaauguaauuuagaauu

SEQ ID NO: 436742 - RNA, 22 nt, Human
augagcaauuaggaagaaaaca

SEQ ID NO: 436743 - RNA, 22 nt, Human
cuggugcaggaaggagcuggca

SEQ ID NO: 436744 - RNA, 22 nt, Human
uauuuuacuuuaaagcgagaga

SEQ ID NO: 436745 - RNA, 22 nt, Human
cugggcuccuaaccauccaggu

SEQ ID NO: 436746 - RNA, 22 nt, Human
uauuacagggcuaguuaugagu

SEQ ID NO: 436747 - RNA, 22 nt, Human
agaaggcaucagaaguguguag

SEQ ID NO: 436748 - RNA, 22 nt, Human
acagugcauuauugcugaaugc

SEQ ID NO: 436749 - RNA, 22 nt, Human
cugagccuugaugucccuuguc

SEQ ID NO: 436750 - RNA, 22 nt, Human
gaucugguacaggccugcagcc

SEQ ID NO: 436751 - RNA, 22 nt, Human
gcugucacaagcaucuggggca

SEQ ID NO: 436752 - RNA, 22 nt, Human
uagcagcaauuucagaaguuug

SEQ ID NO: 436753 - RNA, 22 nt, Human
augcaaagcaccacacuaagau

SEQ ID NO: 436754 - RNA, 17 nt, Human
guccuggugugugagga

SEQ ID NO: 436755 - RNA, 22 nt, Human
ucuuuauuucugaaucccccau

SEQ ID NO: 436756 - RNA, 22 nt, Human
ugcacuggggucccagcgcacg

SEQ ID NO: 436757 - RNA, 22 nt, Human
gugaauaugaucuuauuuggaa

SEQ ID NO: 436758 - RNA, 22 nt, Human
uucuaaagagaaugcguuucug

SEQ ID NO: 436759 - RNA, 22 nt, Human
cagcagggaagcugugcuguuu

SEQ ID NO: 436760 - RNA, 22 nt, Human
ggcagcugggugccuaauaaug

SEQ ID NO: 436761 - RNA, 16 nt, Human
aacugcaugagugggu

SEQ ID NO: 436762 - RNA, 22 nt, Human
uucuuuauugagacuucauugu

SEQ ID NO: 436763 - RNA, 22 nt, Human
aggagcuguuuuguucagcaaa

SEQ ID NO: 436764 - RNA, 22 nt, Human
aacauaucauaggaugucauug

SEQ ID NO: 436765 - RNA, 22 nt, Human
acaguuacaucacuuacugaca

SEQ ID NO: 436766 - RNA, 22 nt, Human
ccagaggagggcucugaugagg

SEQ ID NO: 436767 - RNA, 22 nt, Human
ugcaauauuuuauauccaacaa

SEQ ID NO: 436768 - RNA, 22 nt, Human
ugccugucuuaauaucuggaaa

SEQ ID NO: 436769 - RNA, 20 nt, Human
cagagcagugcccaggcggc

SEQ ID NO: 436770 - RNA, 22 nt, Human
cauucaaaggcauguccuauuu

SEQ ID NO: 436771 - RNA, 22 nt, Human
aaggcagcccuggcucagccug

SEQ ID NO: 436772 - RNA, 22 nt, Human
cccagacucaucccugggagcu

SEQ ID NO: 436773 - RNA, 22 nt, Human
gcaaauauucaagacuuuucca

SEQ ID NO: 436774 - RNA, 22 nt, Human
cagcccugaguuagcccacgga

SEQ ID NO: 436775 - RNA, 22 nt, Human
auuacagauuauaaauuugagc

SEQ ID NO: 436776 - RNA, 23 nt, Human
augacaaacaggacaucuugugc

SEQ ID NO: 436777 - RNA, 22 nt, Human
gaggcagcuuggggcugugggu

SEQ ID NO: 436778 - RNA, 22 nt, Human
cuguagccagaagcagaaggcc

SEQ ID NO: 436779 - RNA, 22 nt, Human
auuaaaugguggucauucauuu

SEQ ID NO: 436780 - RNA, 19 nt, Human
gcugugugaccuugggcaa

SEQ ID NO: 436781 - RNA, 22 nt, Human
ucccaggcuaccagugagguca

SEQ ID NO: 436782 - RNA, 22 nt, Human
ucuucagagacucugagccccu

SEQ ID NO: 436783 - RNA, 22 nt, Human
caggcagugugacgcuaggguu

SEQ ID NO: 436784 - RNA, 22 nt, Human
agggcagcuggaagguggcuuc

SEQ ID NO: 436785 - RNA, 22 nt, Human
ccugugugcacacgaggccaug

SEQ ID NO: 436786 - RNA, 22 nt, Human
aaaaguugcaaaauugcucuuc

SEQ ID NO: 436787 - RNA, 22 nt, Human
cacccagcagcacuuaagacua

SEQ ID NO: 436788 - RNA, 22 nt, Human
uccucaggcugccuggaagacu

SEQ ID NO: 436789 - RNA, 22 nt, Human
gcuguuuccagacaaugucuuu

SEQ ID NO: 436790 - RNA, 22 nt, Human
uuuauauguuuguacaauuaag

SEQ ID NO: 436791 - RNA, 22 nt, Human
uuuguugaguuacagagaugaa

SEQ ID NO: 436792 - RNA, 22 nt, Human
agaugcugcuccacaggccagg

SEQ ID NO: 436793 - RNA, 22 nt, Human
gcccugggauuggguggaggcu

SEQ ID NO: 436794 - RNA, 22 nt, Human
aacaaguuacucuuaaaguaua

SEQ ID NO: 436795 - RNA, 22 nt, Human
auucauaacggcaaaugucacc

SEQ ID NO: 436796 - RNA, 22 nt, Human
aaggauacuuuuagagccugag

SEQ ID NO: 436797 - RNA, 22 nt, Human
ggcugaguugagaggauuacuu

SEQ ID NO: 436798 - RNA, 22 nt, Human
gggcacugaaugccaagcuagg

SEQ ID NO: 436799 - RNA, 22 nt, Human
caggcccauuuguagccacuuu

SEQ ID NO: 436800 - RNA, 22 nt, Human
uauuuauaaucugccaaagaga

SEQ ID NO: 436801 - RNA, 21 nt, Human
acagcaagccuuccuuucagg

SEQ ID NO: 436802 - RNA, 22 nt, Human
ugauucaguacuuucucuaacu

SEQ ID NO: 436803 - RNA, 22 nt, Human
uagcugucaccagaaauggcca

SEQ ID NO: 436804 - RNA, 22 nt, Human
agcagaacauuuucagggcugu

SEQ ID NO: 436805 - RNA, 22 nt, Human
gacagaggagaagaugcugugg

SEQ ID NO: 436806 - RNA, 22 nt, Human
aaggagcucccggcagaccagg

SEQ ID NO: 436807 - RNA, 22 nt, Human
uccugggaugacuuuugaaaug

SEQ ID NO: 436808 - RNA, 22 nt, Human
acaguauaaacuccuaaaagcc

SEQ ID NO: 436809 - RNA, 22 nt, Human
agggcagagaucugagugggca

SEQ ID NO: 436810 - RNA, 22 nt, Human
gaacaucugggaucauugcugu

SEQ ID NO: 436811 - RNA, 22 nt, Human
aaacaaauagugcaugggaauu

SEQ ID NO: 436812 - RNA, 22 nt, Human
acacaggaagucagcacugaug

SEQ ID NO: 436813 - RNA, 22 nt, Human
aaauuuuagacuccugggucua

SEQ ID NO: 436814 - RNA, 22 nt, Human
uucagaaugauuucagcgagca

SEQ ID NO: 436815 - RNA, 22 nt, Human
gaggcagccucaguggaccucg

SEQ ID NO: 436816 - RNA, 22 nt, Human
cugcacaggggaugagggcagu

SEQ ID NO: 436817 - RNA, 23 nt, Human
ccacaggcacagaggcuugcauc

SEQ ID NO: 436818 - RNA, 22 nt, Human
caaauucagaaaauugguagag

SEQ ID NO: 436819 - RNA, 22 nt, Human
acaguacucuaaugaaaagugc

SEQ ID NO: 436820 - RNA, 22 nt, Human
uauuuauauucugccuucugcu

SEQ ID NO: 436821 - RNA, 22 nt, Human
gcaggguccauggaggcagccc

SEQ ID NO: 436822 - RNA, 22 nt, Human
uuuauccagcagcuauucaaaa

SEQ ID NO: 436823 - RNA, 22 nt, Human
auugaagaucagggaaagauuc

SEQ ID NO: 436824 - RNA, 22 nt, Human
ccucucccagggagagccugag

SEQ ID NO: 436825 - RNA, 22 nt, Human
gaacauacaagaauuaaguaca

SEQ ID NO: 436826 - RNA, 22 nt, Human
ucaggccugugcuggaggagau

SEQ ID NO: 436827 - RNA, 22 nt, Human
acaggcuggaggaggaccaaga

SEQ ID NO: 436828 - RNA, 22 nt, Human
auucacaauagcagcuugcaug

SEQ ID NO: 436829 - RNA, 22 nt, Human
caaggaaguuuuaggagaggaa

SEQ ID NO: 436830 - RNA, 22 nt, Human
agaaggcacagugcugcuaaga

SEQ ID NO: 436831 - RNA, 22 nt, Human
gcacagccacugagugagaacc

SEQ ID NO: 436832 - RNA, 22 nt, Human
ucccagucuagagccggauugg

SEQ ID NO: 436833 - RNA, 22 nt, Human
gagagcuguaauagucaugucu

SEQ ID NO: 436834 - RNA, 22 nt, Human
aagaggagacuucagcaacuug

SEQ ID NO: 436835 - RNA, 22 nt, Human
aggaggcugaacuagggucugg

SEQ ID NO: 436836 - RNA, 22 nt, Human
agcagcagagcucuggucugca

SEQ ID NO: 436837 - RNA, 22 nt, Human
aauucaaauuugaguuugugau

SEQ ID NO: 436838 - RNA, 22 nt, Human
aggucagcaugaguagaaggua

SEQ ID NO: 436839 - RNA, 22 nt, Human
ugacuaaaauaggacauuaacu

SEQ ID NO: 436840 - RNA, 22 nt, Human
cgggcacacacuugacagguuc

SEQ ID NO: 436841 - RNA, 20 nt, Human
auacacauucauagaaaaau

SEQ ID NO: 436842 - RNA, 22 nt, Human
auguacaaccugcaugacaguc

SEQ ID NO: 436843 - RNA, 17 nt, Human
ggaagaaaaggaucauc

SEQ ID NO: 436844 - RNA, 22 nt, Human
aacacuuuuuauauauuguauc

SEQ ID NO: 436845 - RNA, 22 nt, Human
cagagcugucauuugccaguga

SEQ ID NO: 436846 - RNA, 20 nt, Human
cccuggagagaagcuccacg

SEQ ID NO: 436847 - RNA, 22 nt, Human
cacucugagaaguacaagcucc

SEQ ID NO: 436848 - RNA, 22 nt, Human
uugcagcuucuugcaucagaaa

SEQ ID NO: 436849 - RNA, 22 nt, Human
cagcuuccaucuccacugcccu

SEQ ID NO: 436850 - RNA, 22 nt, Human
cuguucucuggcgguggcuguu

SEQ ID NO: 436851 - RNA, 22 nt, Human
gucuccuccaguaggaaguggc

SEQ ID NO: 436852 - RNA, 22 nt, Human
agcaccagcucaaggugcaccu

SEQ ID NO: 436853 - RNA, 22 nt, Human
ucugucacccgagcaggcgaga

SEQ ID NO: 436854 - RNA, 19 nt, Human
aaaaggagagaucagaguu

SEQ ID NO: 436855 - RNA, 22 nt, Human
acagcagugucugguacugagu

SEQ ID NO: 436856 - RNA, 22 nt, Human
caggcugggacugaccccugcu

SEQ ID NO: 436857 - RNA, 22 nt, Human
gagcccagcccagagccauaug

SEQ ID NO: 436858 - RNA, 22 nt, Human
gauuccuuggcucugucucagg

SEQ ID NO: 436859 - RNA, 22 nt, Human
auagggcaguggcaucucuuaa

SEQ ID NO: 436860 - RNA, 22 nt, Human
uuucagaggagagcuggaccaa

SEQ ID NO: 436861 - RNA, 19 nt, Human
ggccuggauuuagggcucc

SEQ ID NO: 436862 - RNA, 22 nt, Human
ggcagcuguaagaugagugaau

SEQ ID NO: 436863 - RNA, 22 nt, Human
ugauauuugcugacugcauugu

SEQ ID NO: 436864 - RNA, 22 nt, Human
ccuuuuuucuaugccaacucug

SEQ ID NO: 436865 - RNA, 22 nt, Human
uagaggaacugccuuucuucug

SEQ ID NO: 436866 - RNA, 22 nt, Human
gcccucugcucagcuccucagc

SEQ ID NO: 436867 - RNA, 22 nt, Human
acagacaaguaguucagacaag

SEQ ID NO: 436868 - RNA, 22 nt, Human
caggggccuguccuggcuucug

SEQ ID NO: 436869 - RNA, 22 nt, Human
gggcuccaaaaucuaugucuuc

SEQ ID NO: 436870 - RNA, 22 nt, Human
ggccugugucugugccuguccu

SEQ ID NO: 436871 - RNA, 22 nt, Human
cacucuaaccuccaucuuccau

SEQ ID NO: 436872 - RNA, 21 nt, Human
ggcugcagggagcccuggggu

SEQ ID NO: 436873 - RNA, 22 nt, Human
uaccauuucaguaaaaacuuag

SEQ ID NO: 436874 - RNA, 22 nt, Human
aauggagacuucaaaauggauu

SEQ ID NO: 436875 - RNA, 22 nt, Human
cagcagcagacauuugaucuuc

SEQ ID NO: 436876 - RNA, 22 nt, Human
uucuaaauguaaauaguaugau

SEQ ID NO: 436877 - RNA, 22 nt, Human
ggagaccagaaggaagcuucga

SEQ ID NO: 436878 - RNA, 22 nt, Human
ggcuccagggaguggagagaag

SEQ ID NO: 436879 - RNA, 22 nt, Human
acagccagaggagccaggcugg

SEQ ID NO: 436880 - RNA, 22 nt, Human
aaauguacgggaguagaauuag

SEQ ID NO: 436881 - RNA, 23 nt, Human
cccuguagcccaggacaggcuuu

SEQ ID NO: 436882 - RNA, 22 nt, Human
uucuuuauaucugcuagugggu

SEQ ID NO: 436883 - RNA, 22 nt, Human
augacccagucaaagggaaugg

SEQ ID NO: 436884 - RNA, 20 nt, Human
agaagucagcucagaaguga

SEQ ID NO: 436885 - RNA, 22 nt, Human
uauuaaauuauggauuuaggag

SEQ ID NO: 436886 - RNA, 22 nt, Human
ugcaggcuccaggugcacauau

SEQ ID NO: 436887 - RNA, 22 nt, Human
gguggcagucuuaagagaucuu

SEQ ID NO: 436888 - RNA, 22 nt, Human
acccagaggcggagguugcagu

SEQ ID NO: 436889 - RNA, 22 nt, Human
aaggcagagucuaucuuggaag

SEQ ID NO: 436890 - RNA, 22 nt, Human
ggaagcuguuccuguguggcca

SEQ ID NO: 436891 - RNA, 23 nt, Human
aggcagcuggguagcaucuuucu

SEQ ID NO: 436892 - RNA, 22 nt, Human
gccugucucuuggaacuuggua

SEQ ID NO: 436893 - RNA, 18 nt, Human
cagauccaggcagcuauu

SEQ ID NO: 436894 - RNA, 22 nt, Human
aaggaagacacagaugaaguga

SEQ ID NO: 436895 - RNA, 23 nt, Human
acaucaugauagccaacuuggga

SEQ ID NO: 436896 - RNA, 22 nt, Human
aggucaccauggcaugcuccac

SEQ ID NO: 436897 - RNA, 22 nt, Human
gcuuugcuuccuuccccuucaa

SEQ ID NO: 436898 - RNA, 22 nt, Human
ccauggaguuccucuggucuau

SEQ ID NO: 436899 - RNA, 22 nt, Human
ucaggaaagaguaauguauaca

SEQ ID NO: 436900 - RNA, 22 nt, Human
acagagauguggaugagggauu

SEQ ID NO: 436901 - RNA, 22 nt, Human
cacugcaggucugagauggggg

SEQ ID NO: 436902 - RNA, 22 nt, Human
cagcaggcucugaguggcugcc

SEQ ID NO: 436903 - RNA, 22 nt, Human
agcccagccggauucccaguuc

SEQ ID NO: 436904 - RNA, 22 nt, Human
ucaggaaguugaggcguagaga

SEQ ID NO: 436905 - RNA, 22 nt, Human
agacaaauaagugcugggauuu

SEQ ID NO: 436906 - RNA, 22 nt, Human
ccugucccaagcagggcuggcc

SEQ ID NO: 436907 - RNA, 22 nt, Human
uccuccuguuucucaggccugg

SEQ ID NO: 436908 - RNA, 20 nt, Human
cagcccugugaccuggcccu

SEQ ID NO: 436909 - RNA, 22 nt, Human
cugcccugggaguaccuguccu

SEQ ID NO: 436910 - RNA, 22 nt, Human
uggccugggucacaccaggguc

SEQ ID NO: 436911 - RNA, 22 nt, Human
aaaggcuggauucagagaggug

SEQ ID NO: 436912 - RNA, 23 nt, Human
ccugcagcugcuggggcuccacc

SEQ ID NO: 436913 - RNA, 20 nt, Human
gccuggcacccggggcuggc

SEQ ID NO: 436914 - RNA, 22 nt, Human
cugcagagaugaagaagguggc

SEQ ID NO: 436915 - RNA, 23 nt, Human
uugcuuucaucaugagaugcucc

SEQ ID NO: 436916 - RNA, 22 nt, Human
cagggagcagccccuagaagua

SEQ ID NO: 436917 - RNA, 22 nt, Human
cugcccugacugaccuuuugaa

SEQ ID NO: 436918 - RNA, 22 nt, Human
augacacuguccuaguaaggaa

SEQ ID NO: 436919 - RNA, 22 nt, Human
ccugggcucaccaugccuugga

SEQ ID NO: 436920 - RNA, 22 nt, Human
cucccagauuccugcuguggga

SEQ ID NO: 436921 - RNA, 22 nt, Human
aggcaggugagucaaaacagac

SEQ ID NO: 436922 - RNA, 22 nt, Human
uguacaauagcuauuaucucca

SEQ ID NO: 436923 - RNA, 22 nt, Human
agcacguucuucauuacuucac

SEQ ID NO: 436924 - RNA, 22 nt, Human
aagggcagcugacagaugcuua

SEQ ID NO: 436925 - RNA, 22 nt, Human
acacaguauuacaauaggugcu

SEQ ID NO: 436926 - RNA, 22 nt, Human
aaccccaggcuggaggagucuc

SEQ ID NO: 436927 - RNA, 22 nt, Human
aaugaugagaacuggaguaauu

SEQ ID NO: 436928 - RNA, 22 nt, Human
uuccaggacuucauggcucuga

SEQ ID NO: 436929 - RNA, 22 nt, Human
caucuuuucagaagccauucug

SEQ ID NO: 436930 - RNA, 22 nt, Human
cagagcaguaaaucuggggcac

SEQ ID NO: 436931 - RNA, 22 nt, Human
acaagcauaagugagaugaaua

SEQ ID NO: 436932 - RNA, 22 nt, Human
uacuuauuguugaacugaauca

SEQ ID NO: 436933 - RNA, 22 nt, Human
uguuuaacuaguuuucacacuu

SEQ ID NO: 436934 - RNA, 22 nt, Human
caugaacagcuaacauuuuggg

SEQ ID NO: 436935 - RNA, 22 nt, Human
agccagggacgcugcaggcuac

SEQ ID NO: 436936 - RNA, 22 nt, Human
ugccagggccauagggagucua

SEQ ID NO: 436937 - RNA, 18 nt, Human
gcaacaguaucagcaggc

SEQ ID NO: 436938 - RNA, 22 nt, Human
uuuguacauauaaaucuuguau

SEQ ID NO: 436939 - RNA, 22 nt, Human
aaguuccuaaagucagggguca

SEQ ID NO: 436940 - RNA, 22 nt, Human
ugcagcugcaggagggugggag

SEQ ID NO: 436941 - RNA, 22 nt, Human
ggucccaggauugguugcgcag

SEQ ID NO: 436942 - RNA, 22 nt, Human
gcaauaaacauguuugaugcgc

SEQ ID NO: 436943 - RNA, 22 nt, Human
uuaugcagucgacaucugauca

SEQ ID NO: 436944 - RNA, 22 nt, Human
ugcaggaauagcuacagagcug

SEQ ID NO: 436945 - RNA, 22 nt, Human
uucaugaauggaaucaaugcuc

SEQ ID NO: 436946 - RNA, 22 nt, Human
caggcugaggcaguaggguuug

SEQ ID NO: 436947 - RNA, 22 nt, Human
gacacagcuuucugaagagcau

SEQ ID NO: 436948 - RNA, 22 nt, Human
ccaggcuggucugaauuucuag

SEQ ID NO: 436949 - RNA, 22 nt, Human
ucacuggggccuuuggucagga

SEQ ID NO: 436950 - RNA, 22 nt, Human
cagagucaugggccgucaggca

SEQ ID NO: 436951 - RNA, 22 nt, Human
caggccuuucuggggaagugag

SEQ ID NO: 436952 - RNA, 22 nt, Human
aaagcagacugauuugcaucac

SEQ ID NO: 436953 - RNA, 22 nt, Human
aaaguuuuauaugcugcagcga

SEQ ID NO: 436954 - RNA, 22 nt, Human
cugaggccguuggugggccuua

SEQ ID NO: 436955 - RNA, 22 nt, Human
auuuagcaaaaaaugaugaagc

SEQ ID NO: 436956 - RNA, 22 nt, Human
cacaggagggagcgggcagcca

SEQ ID NO: 436957 - RNA, 22 nt, Human
uucuuuuuaaaguguguaugca

SEQ ID NO: 436958 - RNA, 22 nt, Human
cccugccuugggguccacaccg

SEQ ID NO: 436959 - RNA, 22 nt, Human
gcagagcuaucuucuggauuug

SEQ ID NO: 436960 - RNA, 22 nt, Human
ccgggagcaggcgccaccgcca

SEQ ID NO: 436961 - RNA, 22 nt, Human
aagggcaggugggcauuucugg

SEQ ID NO: 436962 - RNA, 22 nt, Human
uuaacauacaucaugaacaaug

SEQ ID NO: 436963 - RNA, 22 nt, Human
gucugucaucugagauggagug

SEQ ID NO: 436964 - RNA, 22 nt, Human
auuuaccagcugugcacugaua

SEQ ID NO: 436965 - RNA, 22 nt, Human
uucaaacuaguuaaaagucaga

SEQ ID NO: 436966 - RNA, 22 nt, Human
uggucucuucuuccaagauggc

SEQ ID NO: 436967 - RNA, 22 nt, Human
ugaugauugggagacauuuggg

SEQ ID NO: 436968 - RNA, 22 nt, Human
caaguacuuugaaaaguugaau

SEQ ID NO: 436969 - RNA, 22 nt, Human
cacauuuaucucucuccgguga

SEQ ID NO: 436970 - RNA, 22 nt, Human
ugcugccacauuuaaagagggg

SEQ ID NO: 436971 - RNA, 22 nt, Human
aggcgagaggcuugggcuagua

SEQ ID NO: 436972 - RNA, 22 nt, Human
caguaauuccaagugcuuauac

SEQ ID NO: 436973 - RNA, 22 nt, Human
uggugagacaggaucaaccccu

SEQ ID NO: 436974 - RNA, 22 nt, Human
gacagcaacacaugcuuagugc

SEQ ID NO: 436975 - RNA, 22 nt, Human
gcucagggaaggccacgugaga

SEQ ID NO: 436976 - RNA, 22 nt, Human
cugaggaccccacaggaggccc

SEQ ID NO: 436977 - RNA, 22 nt, Human
gcagcuguggguuccaagucua

SEQ ID NO: 436978 - RNA, 22 nt, Human
aagaacaugaacacaauguuua

SEQ ID NO: 436979 - RNA, 22 nt, Human
uuucuugaccacuauguugaua

SEQ ID NO: 436980 - RNA, 22 nt, Human
ugggggcagccaggcugucaag

SEQ ID NO: 436981 - RNA, 22 nt, Human
ccagcagaagcucccgcugggu

SEQ ID NO: 436982 - RNA, 22 nt, Human
uaagauaauaaguaugucuaug

SEQ ID NO: 436983 - RNA, 22 nt, Human
uucucugcauuguaaagagcca

SEQ ID NO: 436984 - RNA, 23 nt, Human
agcuggguggccugcgugaagcu

SEQ ID NO: 436985 - RNA, 22 nt, Human
ccaggagccacucaggcccaca

SEQ ID NO: 436986 - RNA, 22 nt, Human
gaggucuucacaaagaacagca

SEQ ID NO: 436987 - RNA, 22 nt, Human
uaguccuggauugguggaggca

SEQ ID NO: 436988 - RNA, 22 nt, Human
agacuccaggagggaggcugcu

SEQ ID NO: 436989 - RNA, 22 nt, Human
cugagcugguggaagcaugcag

SEQ ID NO: 436990 - RNA, 22 nt, Human
cagcccugcugacacugucuga

SEQ ID NO: 436991 - RNA, 19 nt, Human
ccugggccuccaucacccc

SEQ ID NO: 436992 - RNA, 22 nt, Human
gggcuccaguuuggccaggaag

SEQ ID NO: 436993 - RNA, 22 nt, Human
cugcccaggaaccagaggggca

SEQ ID NO: 436994 - RNA, 22 nt, Human
aaguguauuaagcaacguuauu

SEQ ID NO: 436995 - RNA, 22 nt, Human
agccagcugccuuucacaucug

SEQ ID NO: 436996 - RNA, 22 nt, Human
uccugccucuuuucuuauucca

SEQ ID NO: 436997 - RNA, 22 nt, Human
cacaggaacuuacuggccacuu

SEQ ID NO: 436998 - RNA, 22 nt, Human
gccucuggucccucaugcugug

SEQ ID NO: 436999 - RNA, 22 nt, Human
cuguuucagaacuucuuaaaaa

SEQ ID NO: 437000 - RNA, 22 nt, Human
aaagccuucugucuagcagaua

SEQ ID NO: 437001 - RNA, 22 nt, Human
uaugugcaaaaugcuagacuag

SEQ ID NO: 437002 - RNA, 22 nt, Human
uaacaguugguguaauuucuug

SEQ ID NO: 437003 - RNA, 18 nt, Human
gaggcacauaguuggggc

SEQ ID NO: 437004 - RNA, 22 nt, Human
cuaagacaugcccugcaugaua

SEQ ID NO: 437005 - RNA, 21 nt, Human
uggcaggcagcuggaagcuug

SEQ ID NO: 437006 - RNA, 22 nt, Human
caagcaggguuuaugcauggag

SEQ ID NO: 437007 - RNA, 22 nt, Human
agguaacagcuucagcuucaga

SEQ ID NO: 437008 - RNA, 23 nt, Human
aaaugcacaguauugauuuuuaa

SEQ ID NO: 437009 - RNA, 22 nt, Human
agccugggcaugggacgggagg

SEQ ID NO: 437010 - RNA, 22 nt, Human
acaggccuagcuaaugcuuucc

SEQ ID NO: 437011 - RNA, 22 nt, Human
agagcugggugaagugccauca

SEQ ID NO: 437012 - RNA, 22 nt, Human
aauuauauguuaaucuucaauu

SEQ ID NO: 437013 - RNA, 22 nt, Human
caaacuauuguucacaagacaa

SEQ ID NO: 437014 - RNA, 22 nt, Human
caugggggucuggacaacaggc

SEQ ID NO: 437015 - RNA, 20 nt, Human
agagagcacaggcaggaaag

SEQ ID NO: 437016 - RNA, 22 nt, Human
aggcagcuuuaacugguaguag

SEQ ID NO: 437017 - RNA, 22 nt, Human
gcugucuucacuuccugguuuc

SEQ ID NO: 437018 - RNA, 22 nt, Human
ugggacagugugccuugcuccu

SEQ ID NO: 437019 - RNA, 22 nt, Human
gagcugagaucauguacacuag

SEQ ID NO: 437020 - RNA, 22 nt, Human
agggcagagaaauguaguugag

SEQ ID NO: 437021 - RNA, 16 nt, Human
cagcccugaggaagaa

SEQ ID NO: 437022 - RNA, 22 nt, Human
uuugcauuuugauaagaucacu

SEQ ID NO: 437023 - RNA, 22 nt, Human
aggcaggugggucacuugaguc

SEQ ID NO: 437024 - RNA, 20 nt, Human
aggcuuggcuuggcaggaac

SEQ ID NO: 437025 - RNA, 21 nt, Human
agugugugauaggcaggaaga

SEQ ID NO: 437026 - RNA, 22 nt, Human
gcaggaguguggugggacaucc

SEQ ID NO: 437027 - RNA, 22 nt, Human
agcaacaggguggucuucagaa

SEQ ID NO: 437028 - RNA, 22 nt, Human
aagcaaaugaaccagagguaau

SEQ ID NO: 437029 - RNA, 22 nt, Human
ggaaggcagugaaggggcugau

SEQ ID NO: 437030 - RNA, 22 nt, Human
augaggcagcugcuggagaacg

SEQ ID NO: 437031 - RNA, 22 nt, Human
gacuauuuauuuacagaaagcu

SEQ ID NO: 437032 - RNA, 22 nt, Human
uagcugccuuugggcuccugcu

SEQ ID NO: 437033 - RNA, 22 nt, Human
cugcccagaagcuuagagcuua

SEQ ID NO: 437034 - RNA, 22 nt, Human
gaggcagcagggcugguuccuu

SEQ ID NO: 437035 - RNA, 22 nt, Human
agggagccaggaacgcaggucg

SEQ ID NO: 437036 - RNA, 22 nt, Human
gcagcuguaucacuuuuaaaca

SEQ ID NO: 437037 - RNA, 22 nt, Human
ccugugucagccccugccucca

SEQ ID NO: 437038 - RNA, 22 nt, Human
gcuggccauggggagugaggag

SEQ ID NO: 437039 - RNA, 22 nt, Human
uggggcuggggaucuugagccu

SEQ ID NO: 437040 - RNA, 22 nt, Human
ugaacaaauggaaauaaccagu

SEQ ID NO: 437041 - RNA, 22 nt, Human
agaggcuccaccuucucugucc

SEQ ID NO: 437042 - RNA, 18 nt, Human
aggaagcaggaggaaggc

SEQ ID NO: 437043 - RNA, 22 nt, Human
ccaggcccccgagcagaagaca

SEQ ID NO: 437044 - RNA, 22 nt, Human
caagccugucucaccagugcua

SEQ ID NO: 437045 - RNA, 22 nt, Human
ccauuugguauagugaaaagga

SEQ ID NO: 437046 - RNA, 21 nt, Human
aaccagagccaggcucucagc

SEQ ID NO: 437047 - RNA, 20 nt, Human
uugcaaauaucuauugauug

SEQ ID NO: 437048 - RNA, 22 nt, Human
ucaaaacacuauuaccuuuaau

SEQ ID NO: 437049 - RNA, 22 nt, Human
ugugaggguuuuaagggaauga

SEQ ID NO: 437050 - RNA, 22 nt, Human
gggcugagacgauggggucuuc

SEQ ID NO: 437051 - RNA, 22 nt, Human
gguuccugauagauuccuuuug

SEQ ID NO: 437052 - RNA, 22 nt, Human
cuuuggcuugcccuggcaguac

SEQ ID NO: 437053 - RNA, 22 nt, Human
auuauuuacagugugcucgaag

SEQ ID NO: 437054 - RNA, 22 nt, Human
uuccuuccgggcaccaggcacu

SEQ ID NO: 437055 - RNA, 22 nt, Human
uucugugugcugucuuggcuuu

SEQ ID NO: 437056 - RNA, 22 nt, Human
ccugggaggcagagguugcagu

SEQ ID NO: 437057 - RNA, 18 nt, Human
gcucuggcucaccuccag

SEQ ID NO: 437058 - RNA, 22 nt, Human
guccaugauucuguguaguaga

SEQ ID NO: 437059 - RNA, 21 nt, Human
gcucagaguauugcacuguuu

SEQ ID NO: 437060 - RNA, 22 nt, Human
cauuguuauagcauuacacacc

SEQ ID NO: 437061 - RNA, 22 nt, Human
ugcugccaagcccgugcuccug

SEQ ID NO: 437062 - RNA, 22 nt, Human
gcuccaggcgagcuggaccaga

SEQ ID NO: 437063 - RNA, 22 nt, Human
gcagggacgccagggacagcaa

SEQ ID NO: 437064 - RNA, 23 nt, Human
ccagcucccaggucugaggacug

SEQ ID NO: 437065 - RNA, 20 nt, Human
gagagcuggggaugaggcug

SEQ ID NO: 437066 - RNA, 20 nt, Human
ccaggcuggcaaaugggggc

SEQ ID NO: 437067 - RNA, 22 nt, Human
caauuucacuaauaauauuuac

SEQ ID NO: 437068 - RNA, 22 nt, Human
uuagcacuggauuaaucaaagu

SEQ ID NO: 437069 - RNA, 22 nt, Human
ucacaacucuuuccauuuaaua

SEQ ID NO: 437070 - RNA, 16 nt, Human
agcagggcgggaagga

SEQ ID NO: 437071 - RNA, 22 nt, Human
aacaugcauguuauuuaucagu

SEQ ID NO: 437072 - RNA, 22 nt, Human
uucucccagaccaaaggcagca

SEQ ID NO: 437073 - RNA, 22 nt, Human
auuucucucauuguuagcuagg

SEQ ID NO: 437074 - RNA, 22 nt, Human
cagccagaaccuaggaugagcu

SEQ ID NO: 437075 - RNA, 22 nt, Human
uuuacuacuugugauaacugaa

SEQ ID NO: 437076 - RNA, 22 nt, Human
ugcacacagcugggccuggcug

SEQ ID NO: 437077 - RNA, 22 nt, Human
ccucaggcugucuuccuucugg

SEQ ID NO: 437078 - RNA, 22 nt, Human
aaguccugagaccagaaaaugg

SEQ ID NO: 437079 - RNA, 20 nt, Human
auuccucagccccagccuca

SEQ ID NO: 437080 - RNA, 22 nt, Human
agaggaauuucuggaaggaggc

SEQ ID NO: 437081 - RNA, 22 nt, Human
uucacauugaaggugcuuucuu

SEQ ID NO: 437082 - RNA, 22 nt, Human
guggacagagcuagaaaaugug

SEQ ID NO: 437083 - RNA, 22 nt, Human
cagcccugucuaugacugauga

SEQ ID NO: 437084 - RNA, 22 nt, Human
acagauacuauaauguaaagug

SEQ ID NO: 437085 - RNA, 22 nt, Human
aaggccucuucucucuggagau

SEQ ID NO: 437086 - RNA, 22 nt, Human
ucuuggcuaguaccuuccugcc

SEQ ID NO: 437087 - RNA, 22 nt, Human
uggcucagcuuacuuuugaggg

SEQ ID NO: 437088 - RNA, 22 nt, Human
uuuaucugcauucugaccaucu

SEQ ID NO: 437089 - RNA, 22 nt, Human
cagagguuugaucgaguagguc

SEQ ID NO: 437090 - RNA, 22 nt, Human
ucucucccaaaucugcagauag

SEQ ID NO: 437091 - RNA, 23 nt, Human
gccagccuugcucuccugcagcc

SEQ ID NO: 437092 - RNA, 22 nt, Human
aggugccuaucuggucucugca

SEQ ID NO: 437093 - RNA, 22 nt, Human
auguguguacacacgugacucu

SEQ ID NO: 437094 - RNA, 22 nt, Human
ucugacagggccaaacaugaca

SEQ ID NO: 437095 - RNA, 22 nt, Human
caauuucaugccauguauugcu

SEQ ID NO: 437096 - RNA, 17 nt, Human
acaggccugcuugcacu

SEQ ID NO: 437097 - RNA, 22 nt, Human
agccucugaugaucacaggggg

SEQ ID NO: 437098 - RNA, 22 nt, Human
uucacagucacccuucuccaug

SEQ ID NO: 437099 - RNA, 22 nt, Human
acagaguaucuaucaggaguau

SEQ ID NO: 437100 - RNA, 23 nt, Human
cauuucaacgaauuuuccuucug

SEQ ID NO: 437101 - RNA, 22 nt, Human
uucaaacugaggagaggauggc

SEQ ID NO: 437102 - RNA, 19 nt, Human
gaggagcuaucggagacag

SEQ ID NO: 437103 - RNA, 17 nt, Human
aggaagcgagcuggccu

SEQ ID NO: 437104 - RNA, 22 nt, Human
uuucuaaaauagauuuuauggu

SEQ ID NO: 437105 - RNA, 22 nt, Human
cuucugagauguuguuuuacag

SEQ ID NO: 437106 - RNA, 23 nt, Human
uccagccucuugcucucacaugc

SEQ ID NO: 437107 - RNA, 21 nt, Human
aggaaaggaaguccccagggu

SEQ ID NO: 437108 - RNA, 22 nt, Human
gggcuucucuuuagugagcuga

SEQ ID NO: 437109 - RNA, 22 nt, Human
uaaauugcauaaguacaaauga

SEQ ID NO: 437110 - RNA, 22 nt, Human
cccucagcuucucccugcagcu

SEQ ID NO: 437111 - RNA, 22 nt, Human
aggaaguuaguaaauuaugugc

SEQ ID NO: 437112 - RNA, 22 nt, Human
aaugaugaacucagagggaacc

SEQ ID NO: 437113 - RNA, 22 nt, Human
ucugccugccagucugguccuc

SEQ ID NO: 437114 - RNA, 22 nt, Human
gucugcccucacgccagcuggg

SEQ ID NO: 437115 - RNA, 22 nt, Human
ccugagcuggaagagcuugugc

SEQ ID NO: 437116 - RNA, 22 nt, Human
uggagcagagaugguggccuuc

SEQ ID NO: 437117 - RNA, 22 nt, Human
cugugugcugaaaugcagugag

SEQ ID NO: 437118 - RNA, 22 nt, Human
uugcccacucaugcuuuugaua

SEQ ID NO: 437119 - RNA, 22 nt, Human
gagcugccuacauugccaagag

SEQ ID NO: 437120 - RNA, 22 nt, Human
aaacugcagccuugaguucagg

SEQ ID NO: 437121 - RNA, 17 nt, Human
aggcagauguuuuauuu

SEQ ID NO: 437122 - RNA, 22 nt, Human
uagugccaccuuccaaguauca

SEQ ID NO: 437123 - RNA, 22 nt, Human
uucuuuuuggauagcugaugaa

SEQ ID NO: 437124 - RNA, 22 nt, Human
ggcacagcaagaagggaaauga

SEQ ID NO: 437125 - RNA, 21 nt, Human
gccuggcagguggaagggcuc

SEQ ID NO: 437126 - RNA, 22 nt, Human
cccaggagguagagguugcagu

SEQ ID NO: 437127 - RNA, 22 nt, Human
agcaacagcagguuugcacucc

SEQ ID NO: 437128 - RNA, 22 nt, Human
aacaggaaauacuuaugaggua

SEQ ID NO: 437129 - RNA, 22 nt, Human
cacagcugcccuacuccaugug

SEQ ID NO: 437130 - RNA, 22 nt, Human
uacagaggagaccaaggcucag

SEQ ID NO: 437131 - RNA, 22 nt, Human
ugaauagauuuuuaacauauaa

SEQ ID NO: 437132 - RNA, 22 nt, Human
ucugaggcugaauggacuccgu

SEQ ID NO: 437133 - RNA, 18 nt, Human
agugugugcccuuucagg

SEQ ID NO: 437134 - RNA, 22 nt, Human
ugaggcaggagaaucacaugaa

SEQ ID NO: 437135 - RNA, 22 nt, Human
cacugcaaccucugccaccugg

SEQ ID NO: 437136 - RNA, 22 nt, Human
uuuuuauaacucuuuugugaca

SEQ ID NO: 437137 - RNA, 22 nt, Human
guugauuuagugagugagcagu

SEQ ID NO: 437138 - RNA, 23 nt, Human
uggaggaaacacaucagaagacc

SEQ ID NO: 437139 - RNA, 22 nt, Human
cuucccuuuuuaugucuucagc

SEQ ID NO: 437140 - RNA, 22 nt, Human
gggcccuggacguggcggcaga

SEQ ID NO: 437141 - RNA, 20 nt, Human
cacaggaaagcuacucaguu

SEQ ID NO: 437142 - RNA, 22 nt, Human
acucucccugagagggaggcau

SEQ ID NO: 437143 - RNA, 22 nt, Human
cugggcaggauacuucauggga

SEQ ID NO: 437144 - RNA, 22 nt, Human
agcagcuggaacuaauaguggu

SEQ ID NO: 437145 - RNA, 22 nt, Human
uauuuaauuugcucauugugau

SEQ ID NO: 437146 - RNA, 20 nt, Human
uuucaaacugcaccuuugcu

SEQ ID NO: 437147 - RNA, 22 nt, Human
uuucuacaugucaguaacugau

SEQ ID NO: 437148 - RNA, 22 nt, Human
cauuucuaccaaaugugacugg

SEQ ID NO: 437149 - RNA, 22 nt, Human
ucaggacacuuggcacaagguc

SEQ ID NO: 437150 - RNA, 22 nt, Human
acuuugcaggccuuuucuugug

SEQ ID NO: 437151 - RNA, 22 nt, Human
aggccagcuguuacuagagcca

SEQ ID NO: 437152 - RNA, 22 nt, Human
caauacuuccuuguuagaggca

SEQ ID NO: 437153 - RNA, 22 nt, Human
uuagaaaaaggcuguggucuua

SEQ ID NO: 437154 - RNA, 22 nt, Human
ggccucuggcaggcaggcccuc

SEQ ID NO: 437155 - RNA, 22 nt, Human
caggcacugugcaagggucucg

SEQ ID NO: 437156 - RNA, 22 nt, Human
agccacagucaaccuguccaua

SEQ ID NO: 437157 - RNA, 23 nt, Human
acagacaacacugaugagagaaa

SEQ ID NO: 437158 - RNA, 22 nt, Human
caacaggcuuuauguuuaaagu

SEQ ID NO: 437159 - RNA, 22 nt, Human
cccagcaguuugcuuagaguga

SEQ ID NO: 437160 - RNA, 22 nt, Human
agcugcagauucuaucuagaag

SEQ ID NO: 437161 - RNA, 22 nt, Human
cccagcacuuugaauaugucac

SEQ ID NO: 437162 - RNA, 22 nt, Human
cacaugaagagagucuaguaau

SEQ ID NO: 437163 - RNA, 22 nt, Human
acaugcaugucaucagcccuuu

SEQ ID NO: 437164 - RNA, 16 nt, Human
ccuuucucugccuucc

SEQ ID NO: 437165 - RNA, 18 nt, Human
gccugccuagagcuugcc

SEQ ID NO: 437166 - RNA, 22 nt, Human
agacaagagcugaggacauauu

SEQ ID NO: 437167 - RNA, 22 nt, Human
caggcccucaggcaagggcucu

SEQ ID NO: 437168 - RNA, 22 nt, Human
ucugacccacaagcauccugga

SEQ ID NO: 437169 - RNA, 23 nt, Human
ugcucccaggugacgcugcuguu

SEQ ID NO: 437170 - RNA, 23 nt, Human
acaagauagggauaaaaagauaa

SEQ ID NO: 437171 - RNA, 22 nt, Human
cagggcccagucccugcuguca

SEQ ID NO: 437172 - RNA, 22 nt, Human
uccauuuuagagaugaagaaac

SEQ ID NO: 437173 - RNA, 22 nt, Human
ugagacagucccaugaucugca

SEQ ID NO: 437174 - RNA, 22 nt, Human
augcauauuucuuggagcaccu

SEQ ID NO: 437175 - RNA, 22 nt, Human
gcacagcucagcaugggaggac

SEQ ID NO: 437176 - RNA, 22 nt, Human
uuuauccauaucauuaaaaucu

SEQ ID NO: 437177 - RNA, 22 nt, Human
ccugaggcccuggcugugcuga

SEQ ID NO: 437178 - RNA, 22 nt, Human
aauauguuccacuuaaagcugg

SEQ ID NO: 437179 - RNA, 22 nt, Human
ucugaauuuuaacuacacaaag

SEQ ID NO: 437180 - RNA, 22 nt, Human
aggaaugauucaagacuuggcu

SEQ ID NO: 437181 - RNA, 23 nt, Human
gcuguuucacaacagccguguuu

SEQ ID NO: 437182 - RNA, 22 nt, Human
uaaagacaauaggaaaguuguu

SEQ ID NO: 437183 - RNA, 22 nt, Human
agcugagccagcagcaacagga

SEQ ID NO: 437184 - RNA, 22 nt, Human
acuaaguaguuucacauauaau

SEQ ID NO: 437185 - RNA, 22 nt, Human
uuuuaugugucaaagcaguggu

SEQ ID NO: 437186 - RNA, 22 nt, Human
uauucagaggugaaguagggag

SEQ ID NO: 437187 - RNA, 22 nt, Human
gcccucagcuccuggacacaug

SEQ ID NO: 437188 - RNA, 22 nt, Human
agcugcagcccuccugcauggc

SEQ ID NO: 437189 - RNA, 22 nt, Human
cagguccccuccccuaccaggc

SEQ ID NO: 437190 - RNA, 22 nt, Human
augcauuuuugaguaugaauga

SEQ ID NO: 437191 - RNA, 22 nt, Human
acagaggaagcauauagcacaa

SEQ ID NO: 437192 - RNA, 22 nt, Human
caggcacucagucuggaucccu

SEQ ID NO: 437193 - RNA, 19 nt, Human
agcacaguuuccacaugca

SEQ ID NO: 437194 - RNA, 18 nt, Human
ucuccacuucugugagaa

SEQ ID NO: 437195 - RNA, 22 nt, Human
cagagguagaaggcaugcagug

SEQ ID NO: 437196 - RNA, 22 nt, Human
gcaguggcuaagcucgcaugca

SEQ ID NO: 437197 - RNA, 22 nt, Human
ccugggcauaaaucacuccaag

SEQ ID NO: 437198 - RNA, 22 nt, Human
agcccuccucacaucagcgucc

SEQ ID NO: 437199 - RNA, 21 nt, Human
uggagcugccacuuguccucc

SEQ ID NO: 437200 - RNA, 22 nt, Human
ugcagcaguguuccuuggcuug

SEQ ID NO: 437201 - RNA, 22 nt, Human
aggagcugggcugcugcuggga

SEQ ID NO: 437202 - RNA, 22 nt, Human
ggacagaggguugacagaguau

SEQ ID NO: 437203 - RNA, 22 nt, Human
ggcugcugcccaccccugcaug

SEQ ID NO: 437204 - RNA, 22 nt, Human
guccugagucaagugugggcag

SEQ ID NO: 437205 - RNA, 22 nt, Human
gccaaggcugaggcccugggcu

SEQ ID NO: 437206 - RNA, 22 nt, Human
cagacagaggcuguaugagggc

SEQ ID NO: 437207 - RNA, 22 nt, Human
uauuuucuguggaggaccagau

SEQ ID NO: 437208 - RNA, 22 nt, Human
gcuccuggcuucacugacauca

SEQ ID NO: 437209 - RNA, 22 nt, Human
aagaugcuuauugcuccugcag

SEQ ID NO: 437210 - RNA, 22 nt, Human
caguacuuauuucuauuuaggg

SEQ ID NO: 437211 - RNA, 22 nt, Human
aacaguuuaugauaaauucuua

SEQ ID NO: 437212 - RNA, 23 nt, Human
agggcugaugccauugcagcucu

SEQ ID NO: 437213 - RNA, 22 nt, Human
aaauugccugaguaugucacau

SEQ ID NO: 437214 - RNA, 22 nt, Human
cuggacagaaagggcugcugug

SEQ ID NO: 437215 - RNA, 22 nt, Human
gcugccaguaguuggagcucca

SEQ ID NO: 437216 - RNA, 22 nt, Human
cuucacagccaacaugggcaca

SEQ ID NO: 437217 - RNA, 22 nt, Human
aagacagugugucaggcaggug

SEQ ID NO: 437218 - RNA, 22 nt, Human
cuuugcaaacgauuaccacaug

SEQ ID NO: 437219 - RNA, 22 nt, Human
cuguuucacguguuuaagccca

SEQ ID NO: 437220 - RNA, 22 nt, Human
acuuuguuccuuucacaaagaa

SEQ ID NO: 437221 - RNA, 18 nt, Human
agguuugguggaaacaua

SEQ ID NO: 437222 - RNA, 22 nt, Human
ggcacagggaggcccuggugug

SEQ ID NO: 437223 - RNA, 22 nt, Human
agccagcaggugagugcagccu

SEQ ID NO: 437224 - RNA, 22 nt, Human
agcccaggucucaaaguacagg

SEQ ID NO: 437225 - RNA, 22 nt, Human
gggccaggucggugaaugguca

SEQ ID NO: 437226 - RNA, 22 nt, Human
cagcccugggaguuggggccga

SEQ ID NO: 437227 - RNA, 21 nt, Human
caguccugcaaauaauucuuu

SEQ ID NO: 437228 - RNA, 22 nt, Human
agccuggguggggguucggaga

SEQ ID NO: 437229 - RNA, 22 nt, Human
uuugacaucuaagaauucuuac

SEQ ID NO: 437230 - RNA, 20 nt, Human
uccugggguaagccaugguc

SEQ ID NO: 437231 - RNA, 22 nt, Human
agcagcugguucccgagggcgu

SEQ ID NO: 437232 - RNA, 22 nt, Human
cuccucuggcuuccuggaggca

SEQ ID NO: 437233 - RNA, 22 nt, Human
gccugggugaauuugauccuaa

SEQ ID NO: 437234 - RNA, 22 nt, Human
ggcucuggugcccuggcuccca

SEQ ID NO: 437235 - RNA, 22 nt, Human
cagcagagacgguaagcagaac

SEQ ID NO: 437236 - RNA, 22 nt, Human
gcaauaaagauuuuacugucag

SEQ ID NO: 437237 - RNA, 22 nt, Human
ucugggcagcagcagcuaguag

SEQ ID NO: 437238 - RNA, 22 nt, Human
uacugaaagacugaauauuuag

SEQ ID NO: 437239 - RNA, 22 nt, Human
ucaugcagguuuccagccagau

SEQ ID NO: 437240 - RNA, 22 nt, Human
uacuuuuugucucuuugaaugu

SEQ ID NO: 437241 - RNA, 20 nt, Human
ccugggcuccaggagccccg

SEQ ID NO: 437242 - RNA, 22 nt, Human
gagcacagcuggagguagcauu

SEQ ID NO: 437243 - RNA, 22 nt, Human
cugcccugagggccuguguguu

SEQ ID NO: 437244 - RNA, 22 nt, Human
ggcaauaaaaguauccaguuuc

SEQ ID NO: 437245 - RNA, 22 nt, Human
ugacacaggggaaggagucugg

SEQ ID NO: 437246 - RNA, 22 nt, Human
caggcuccuucccagggauggu

SEQ ID NO: 437247 - RNA, 22 nt, Human
agauaacauguugcagauucug

SEQ ID NO: 437248 - RNA, 22 nt, Human
uguugcaggccccugggguaug

SEQ ID NO: 437249 - RNA, 22 nt, Human
gacugaaggucucagcauguga

SEQ ID NO: 437250 - RNA, 22 nt, Human
gacaauacagaaagggacaugc

SEQ ID NO: 437251 - RNA, 22 nt, Human
agguccugucuaucacccucgc

SEQ ID NO: 437252 - RNA, 22 nt, Human
agucugggagggaugccagugu

SEQ ID NO: 437253 - RNA, 22 nt, Human
caggccuuuuuuccugcagugu

SEQ ID NO: 437254 - RNA, 22 nt, Human
cuauucaguugugggcaacaau

SEQ ID NO: 437255 - RNA, 22 nt, Human
uucuauaaaugaauguguauau

SEQ ID NO: 437256 - RNA, 22 nt, Human
gccuggagcuacuggacacuga

SEQ ID NO: 437257 - RNA, 19 nt, Human
cugcucagagcagcuccag

SEQ ID NO: 437258 - RNA, 22 nt, Human
uuucagagucuggcugcagccu

SEQ ID NO: 437259 - RNA, 22 nt, Human
uauuuuguuuuguauccacugu

SEQ ID NO: 437260 - RNA, 22 nt, Human
ugagcccuaagggucaagcagg

SEQ ID NO: 437261 - RNA, 22 nt, Human
auaaauuaugaauggcccuuuu

SEQ ID NO: 437262 - RNA, 22 nt, Human
agcaggcuuacuuucugauuag

SEQ ID NO: 437263 - RNA, 22 nt, Human
ugcuaucaccaacucugcuaag

SEQ ID NO: 437264 - RNA, 22 nt, Human
gcaggccugcagguauggccgg

SEQ ID NO: 437265 - RNA, 22 nt, Human
agaggguagaagacaggguugc

SEQ ID NO: 437266 - RNA, 22 nt, Human
accagagcuuacaugcuagaaa

SEQ ID NO: 437267 - RNA, 23 nt, Human
aacauacuguuuaauauucacag

SEQ ID NO: 437268 - RNA, 22 nt, Human
ccugaagcacaaaagcacagcu

SEQ ID NO: 437269 - RNA, 22 nt, Human
aggagacaucuaacuguagguu

SEQ ID NO: 437270 - RNA, 22 nt, Human
aacaggaacuauuuguauucca

SEQ ID NO: 437271 - RNA, 22 nt, Human
gcugggacugagacagugaccu

SEQ ID NO: 437272 - RNA, 22 nt, Human
gacauucagccaauuacuuucu

SEQ ID NO: 437273 - RNA, 22 nt, Human
ugccaccuggacaaccuuaugc

SEQ ID NO: 437274 - RNA, 22 nt, Human
acaggcugaaaguuaaguucug

SEQ ID NO: 437275 - RNA, 22 nt, Human
acacucuacagagcaaucuacc

SEQ ID NO: 437276 - RNA, 22 nt, Human
acauggaucaaccuauuuucuu

SEQ ID NO: 437277 - RNA, 22 nt, Human
uggaaacagaucauaacuaagc

SEQ ID NO: 437278 - RNA, 22 nt, Human
cuaggcuguaaccccugccagg

SEQ ID NO: 437279 - RNA, 22 nt, Human
uuaacagacauauauauuugua

SEQ ID NO: 437280 - RNA, 19 nt, Human
aggggcacugucucuagag

SEQ ID NO: 437281 - RNA, 22 nt, Human
uaacagucaugugcuacugcua

SEQ ID NO: 437282 - RNA, 22 nt, Human
gccacugcacuccagcccaggc

SEQ ID NO: 437283 - RNA, 22 nt, Human
ucuguaguuuacaguauuucag

SEQ ID NO: 437284 - RNA, 22 nt, Human
ugcccagcaauaaaccagaaga

SEQ ID NO: 437285 - RNA, 22 nt, Human
cuggugcaaaaguaauuguggu

SEQ ID NO: 437286 - RNA, 22 nt, Human
gaggaaggagggaaagcgcgcg

SEQ ID NO: 437287 - RNA, 22 nt, Human
uaggcugggagccugaggcuag

SEQ ID NO: 437288 - RNA, 22 nt, Human
ugcuccugcugcaugcaucucc

SEQ ID NO: 437289 - RNA, 22 nt, Human
ucacaaaucauuuuaucugugu

SEQ ID NO: 437290 - RNA, 19 nt, Human
cccuggcaggcaagccugg

SEQ ID NO: 437291 - RNA, 22 nt, Human
uucaagaggcuuaauucuggau

SEQ ID NO: 437292 - RNA, 22 nt, Human
uauugcuuaaaaaauaugugag

SEQ ID NO: 437293 - RNA, 22 nt, Human
auacaucaugcuccauauauuu

SEQ ID NO: 437294 - RNA, 22 nt, Human
auuuauugagacuuaacaaccc

SEQ ID NO: 437295 - RNA, 21 nt, Human
aaaguucaugcuuuaauauuc

SEQ ID NO: 437296 - RNA, 22 nt, Human
caaguauuuccugauggccugu

SEQ ID NO: 437297 - RNA, 19 nt, Human
uccugcagguggcuugcag

SEQ ID NO: 437298 - RNA, 22 nt, Human
aggcagcccacaggacacagga

SEQ ID NO: 437299 - RNA, 22 nt, Human
agugaaauagcauuuaugaagc

SEQ ID NO: 437300 - RNA, 22 nt, Human
gugcccugguccccagcauaua

SEQ ID NO: 437301 - RNA, 22 nt, Human
ugccugaugcaggaguaucaga

SEQ ID NO: 437302 - RNA, 22 nt, Human
uucuuuuaaugucuggcuuuca

SEQ ID NO: 437303 - RNA, 22 nt, Human
uacugcauaacuggcauguggg

SEQ ID NO: 437304 - RNA, 20 nt, Human
uggaugucaaauuaggcugg

SEQ ID NO: 437305 - RNA, 22 nt, Human
cuccaugggggcuggccugugu

SEQ ID NO: 437306 - RNA, 23 nt, Human
uggagcugggcucagacccuggg

SEQ ID NO: 437307 - RNA, 21 nt, Human
cgcagcugagaaauauacaga

SEQ ID NO: 437308 - RNA, 23 nt, Human
ucucugguuaggggagauuggug

SEQ ID NO: 437309 - RNA, 22 nt, Human
ugcucccaaacgaccuacugug

SEQ ID NO: 437310 - RNA, 22 nt, Human
gaagcuaaaccacagcuaagaa

SEQ ID NO: 437311 - RNA, 22 nt, Human
aggcuuuggggcauucuguguu

SEQ ID NO: 437312 - RNA, 22 nt, Human
uauguacagggauagaacuuga

SEQ ID NO: 437313 - RNA, 22 nt, Human
cuccucagaagaggguaacaca

SEQ ID NO: 437314 - RNA, 22 nt, Human
auuugaaaucuggguuacucug

SEQ ID NO: 437315 - RNA, 22 nt, Human
guguuaaacauguucacagcau

SEQ ID NO: 437316 - RNA, 22 nt, Human
aggcuaggggcagugccagcau

SEQ ID NO: 437317 - RNA, 22 nt, Human
uuccugaacauuucuaaguuga

SEQ ID NO: 437318 - RNA, 19 nt, Human
acuuguuuuggaggugaug

SEQ ID NO: 437319 - RNA, 22 nt, Human
ugcugcagcagugcgggcagcu

SEQ ID NO: 437320 - RNA, 22 nt, Human
auugaaugcuugcuaacacuuu

SEQ ID NO: 437321 - RNA, 22 nt, Human
acagagguuaggauggguugua

SEQ ID NO: 437322 - RNA, 23 nt, Human
uggcagcuguguaagagaaagca

SEQ ID NO: 437323 - RNA, 22 nt, Human
gguguagcucugugucccacug

SEQ ID NO: 437324 - RNA, 22 nt, Human
aagucacagaacccauuguaac

SEQ ID NO: 437325 - RNA, 22 nt, Human
agcagguguuuguaucauaagg

SEQ ID NO: 437326 - RNA, 20 nt, Human
ccagagcugauggcugcccg

SEQ ID NO: 437327 - RNA, 22 nt, Human
agccacagcauguguguaugua

SEQ ID NO: 437328 - RNA, 22 nt, Human
ugaucugguccuacugugggca

SEQ ID NO: 437329 - RNA, 22 nt, Human
gugcccugagcuuaugcauucu

SEQ ID NO: 437330 - RNA, 22 nt, Human
aaaaugauauccugacuuuuau

SEQ ID NO: 437331 - RNA, 22 nt, Human
cugagguguugaugaccuaugc

SEQ ID NO: 437332 - RNA, 22 nt, Human
aaaauguaaagcuugaguguag

SEQ ID NO: 437333 - RNA, 22 nt, Human
ucaaacuguuuacagugagaua

SEQ ID NO: 437334 - RNA, 22 nt, Human
gcagcugucauuuacaacaggg

SEQ ID NO: 437335 - RNA, 22 nt, Human
uccugggcugcagggaagagca

SEQ ID NO: 437336 - RNA, 22 nt, Human
cagagcagggguuucccagguu

SEQ ID NO: 437337 - RNA, 22 nt, Human
uguccugugccaccuuccugag

SEQ ID NO: 437338 - RNA, 20 nt, Human
acaaggaaccaggagguggc

SEQ ID NO: 437339 - RNA, 22 nt, Human
gcagugccuugcuucucugucu

SEQ ID NO: 437340 - RNA, 19 nt, Human
agacacuggauggaaaaug

SEQ ID NO: 437341 - RNA, 22 nt, Human
uccauuuucuaaguaucacuua

SEQ ID NO: 437342 - RNA, 22 nt, Human
acaggccucccauccggagccc

SEQ ID NO: 437343 - RNA, 22 nt, Human
gcccuggaaucucuccauggga

SEQ ID NO: 437344 - RNA, 22 nt, Human
agagcaagugacagaaacaggg

SEQ ID NO: 437345 - RNA, 22 nt, Human
ucugcagcuucuugccagagag

SEQ ID NO: 437346 - RNA, 22 nt, Human
uccucuggauauaagccucacc

SEQ ID NO: 437347 - RNA, 22 nt, Human
cugggcacacagugacucugca

SEQ ID NO: 437348 - RNA, 22 nt, Human
ggcucagugggaacaagcugag

SEQ ID NO: 437349 - RNA, 22 nt, Human
uagcaggcucgcaauaaaaugu

SEQ ID NO: 437350 - RNA, 22 nt, Human
gaauuucagggucugguaggaa

SEQ ID NO: 437351 - RNA, 22 nt, Human
uuuucauugagcaccugaguaa

SEQ ID NO: 437352 - RNA, 22 nt, Human
agggcuggccacaugauuuggu

SEQ ID NO: 437353 - RNA, 22 nt, Human
uuuccucagaagugucuacuau

SEQ ID NO: 437354 - RNA, 18 nt, Human
uggccuggagacaacucu

SEQ ID NO: 437355 - RNA, 22 nt, Human
gugcauauguguguauacaaac

SEQ ID NO: 437356 - RNA, 22 nt, Human
gggccagaccucuucucaggga

SEQ ID NO: 437357 - RNA, 20 nt, Human
gagcugaguguggucauggg

SEQ ID NO: 437358 - RNA, 22 nt, Human
cugaggcugcccagggccaggu

SEQ ID NO: 437359 - RNA, 22 nt, Human
uaaauugcugauuuuagaugcu

SEQ ID NO: 437360 - RNA, 22 nt, Human
cuccuucccuucaaguguuccu

SEQ ID NO: 437361 - RNA, 22 nt, Human
ggcagggaggaggugaaaguga

SEQ ID NO: 437362 - RNA, 17 nt, Human
gcugagugcagggaguc

SEQ ID NO: 437363 - RNA, 22 nt, Human
gcuucaaacugagcuucaagug

SEQ ID NO: 437364 - RNA, 22 nt, Human
gcugcagcuuuaggauccagug

SEQ ID NO: 437365 - RNA, 18 nt, Human
agcaacaggaucccaggg

SEQ ID NO: 437366 - RNA, 22 nt, Human
cagcuguuccugguugguggga

SEQ ID NO: 437367 - RNA, 19 nt, Human
ucuaacagcuuucauucua

SEQ ID NO: 437368 - RNA, 22 nt, Human
uuugcuuucccuuguagaaagu

SEQ ID NO: 437369 - RNA, 22 nt, Human
augcacaggaaguguccccauu

SEQ ID NO: 437370 - RNA, 22 nt, Human
acagaaauucugggacagaaaa

SEQ ID NO: 437371 - RNA, 22 nt, Human
cucuuauacauauuuuuaggcg

SEQ ID NO: 437372 - RNA, 22 nt, Human
gcagagcagaggugcagguugg

SEQ ID NO: 437373 - RNA, 21 nt, Human
guauucuuuaugaagugaaaa

SEQ ID NO: 437374 - RNA, 22 nt, Human
cccagccugucuuucccaauga

SEQ ID NO: 437375 - RNA, 22 nt, Human
uaugaauauaccacaauuuagg

SEQ ID NO: 437376 - RNA, 22 nt, Human
cugggcuaauuaagcacagcug

SEQ ID NO: 437377 - RNA, 22 nt, Human
cacaggaagagguauacaauuc

SEQ ID NO: 437378 - RNA, 22 nt, Human
caugcauuuggaguuuucaagu

SEQ ID NO: 437379 - RNA, 22 nt, Human
agaugcugugaggaagcuagga

SEQ ID NO: 437380 - RNA, 22 nt, Human
cuggagccggcgagccccagcc

SEQ ID NO: 437381 - RNA, 22 nt, Human
uaggcugggaagaaagauucuc

SEQ ID NO: 437382 - RNA, 22 nt, Human
uuucucccccaugauaauuucu

SEQ ID NO: 437383 - RNA, 22 nt, Human
ggcacagcacuguaggccuggg

SEQ ID NO: 437384 - RNA, 22 nt, Human
cccagggcugcagauggaggcu

SEQ ID NO: 437385 - RNA, 22 nt, Human
ugacagagucggggcaagcugu

SEQ ID NO: 437386 - RNA, 22 nt, Human
cagcuguucacauuuccaaaac

SEQ ID NO: 437387 - RNA, 22 nt, Human
uugaacauaaaucacuggucag

SEQ ID NO: 437388 - RNA, 22 nt, Human
acucugagcaucccaagucuua

SEQ ID NO: 437389 - RNA, 22 nt, Human
acugccauugguucuggaaaau

SEQ ID NO: 437390 - RNA, 22 nt, Human
caugcagcagaauaaugacuau

SEQ ID NO: 437391 - RNA, 22 nt, Human
uggcagcauuaauuauucaggu

SEQ ID NO: 437392 - RNA, 22 nt, Human
caguccuggggaccaggcugag

SEQ ID NO: 437393 - RNA, 22 nt, Human
agcaaacauucagcagauuggc

SEQ ID NO: 437394 - RNA, 22 nt, Human
ggagcuaggcaaagcucacgga

SEQ ID NO: 437395 - RNA, 22 nt, Human
aaggcaaugacugauuuagaau

SEQ ID NO: 437396 - RNA, 22 nt, Human
agggggcauuaugaggcuuuuc

SEQ ID NO: 437397 - RNA, 22 nt, Human
cugccagaagagaacaccaguu

SEQ ID NO: 437398 - RNA, 22 nt, Human
ggcaggcuuugagaaagagcau

SEQ ID NO: 437399 - RNA, 22 nt, Human
cuuuacaaauagggagggagug

SEQ ID NO: 437400 - RNA, 22 nt, Human
uuucucaaguucagauauuuga

SEQ ID NO: 437401 - RNA, 22 nt, Human
gauuuuacugucuguguaucuc

SEQ ID NO: 437402 - RNA, 22 nt, Human
ggaggccuugaggccaggagcu

SEQ ID NO: 437403 - RNA, 22 nt, Human
uugcccacucuguuucccaaga

SEQ ID NO: 437404 - RNA, 22 nt, Human
ucccugggguaucgcugaggca

SEQ ID NO: 437405 - RNA, 22 nt, Human
ccugugugcugaugacgacaga

SEQ ID NO: 437406 - RNA, 22 nt, Human
gcacaggcuguuggccuucaga

SEQ ID NO: 437407 - RNA, 22 nt, Human
uaccauuugagagagaacauaa

SEQ ID NO: 437408 - RNA, 22 nt, Human
caagcuggaguuccucagagug

SEQ ID NO: 437409 - RNA, 22 nt, Human
acuguguccuauuuccuugaca

SEQ ID NO: 437410 - RNA, 20 nt, Human
acaguggguggggagcacug

SEQ ID NO: 437411 - RNA, 22 nt, Human
gaggggcacaguaaaggguccc

SEQ ID NO: 437412 - RNA, 22 nt, Human
cagcugaguaugcauucaagca

SEQ ID NO: 437413 - RNA, 22 nt, Human
uuccugaagucaaagaucuaaa

SEQ ID NO: 437414 - RNA, 22 nt, Human
cuuugcuucuccaaccugcuca

SEQ ID NO: 437415 - RNA, 22 nt, Human
caggaaaggugugucaugaugg

SEQ ID NO: 437416 - RNA, 22 nt, Human
aucuagaaguggcaugaauuac

SEQ ID NO: 437417 - RNA, 22 nt, Human
cacuaguaauucuugugcugga

SEQ ID NO: 437418 - RNA, 22 nt, Human
gcugccugcacagagcugcuuu

SEQ ID NO: 437419 - RNA, 22 nt, Human
cucagucucuugggcugugaag

SEQ ID NO: 437420 - RNA, 22 nt, Human
acaggcaggagcuccccauucc

SEQ ID NO: 437421 - RNA, 22 nt, Human
ugucccagucaaggcugucauc

SEQ ID NO: 437422 - RNA, 22 nt, Human
uuugcaaagucccugggaugga

SEQ ID NO: 437423 - RNA, 22 nt, Human
agguaaaauagauaguauuucu

SEQ ID NO: 437424 - RNA, 22 nt, Human
ugcugccaaaugcgagcucugu

SEQ ID NO: 437425 - RNA, 22 nt, Human
uguuuucagucauauagcaggu

SEQ ID NO: 437426 - RNA, 22 nt, Human
caguucaaaguuaagcagcagu

SEQ ID NO: 437427 - RNA, 22 nt, Human
ucacagccuggucacucugccc

SEQ ID NO: 437428 - RNA, 22 nt, Human
uucuaacucuguuauguguuuc

SEQ ID NO: 437429 - RNA, 22 nt, Human
uugagcaaugcugcaaagagau

SEQ ID NO: 437430 - RNA, 22 nt, Human
aaaguugauaagguaucguagu

SEQ ID NO: 437431 - RNA, 22 nt, Human
ggcuuugacaugcugaauuaaa

SEQ ID NO: 437432 - RNA, 22 nt, Human
aaagguuagacagcucugcaua

SEQ ID NO: 437433 - RNA, 22 nt, Human
gaaggcaagugagccaagagaa

SEQ ID NO: 437434 - RNA, 22 nt, Human
ggguggaguagaaagaugaauu

SEQ ID NO: 437435 - RNA, 22 nt, Human
aguguguguuugggcgguuuau

SEQ ID NO: 437436 - RNA, 22 nt, Human
ccucauguugcucgcaucugca

SEQ ID NO: 437437 - RNA, 22 nt, Human
aauuaagaaaauguuuuaugau

SEQ ID NO: 437438 - RNA, 18 nt, Human
gcaguaggcgcgcaggac

SEQ ID NO: 437439 - RNA, 22 nt, Human
ggcagaggaagcuggaaguggg

SEQ ID NO: 437440 - RNA, 22 nt, Human
cugggccaucagaggggcugga

SEQ ID NO: 437441 - RNA, 22 nt, Human
gcagaagggaauaaggagcuuu

SEQ ID NO: 437442 - RNA, 22 nt, Human
agguaauuuuguguuaaugauu

SEQ ID NO: 437443 - RNA, 22 nt, Human
ccaggacuucgaggcuacagug

SEQ ID NO: 437444 - RNA, 22 nt, Human
gccagagcagaauagaguggcc

SEQ ID NO: 437445 - RNA, 22 nt, Human
ccuggugccacuagagaauguc

SEQ ID NO: 437446 - RNA, 22 nt, Human
cugguccuugacgcgugggagg

SEQ ID NO: 437447 - RNA, 20 nt, Human
aaguccugaccuagucuaaa

SEQ ID NO: 437448 - RNA, 22 nt, Human
ccaggagcuggagggugcagug

SEQ ID NO: 437449 - RNA, 22 nt, Human
cuagagaauggcaaagauuaga

SEQ ID NO: 437450 - RNA, 22 nt, Human
gaggacagcucuaacuaaaguc

SEQ ID NO: 437451 - RNA, 20 nt, Human
cuccaaggcuugcaggaggc

SEQ ID NO: 437452 - RNA, 20 nt, Human
gggaggccccagaguccagg

SEQ ID NO: 437453 - RNA, 20 nt, Human
aggcagcuggccaggcaggu

SEQ ID NO: 437454 - RNA, 22 nt, Human
uguccacaucacucacuuguca

SEQ ID NO: 437455 - RNA, 22 nt, Human
gugcuccuggccacaugaagcu

SEQ ID NO: 437456 - RNA, 22 nt, Human
gccccaggggaggugcccugca

SEQ ID NO: 437457 - RNA, 22 nt, Human
cccagagaauuccacauagagg

SEQ ID NO: 437458 - RNA, 23 nt, Human
acucagagaccccgggaagugac

SEQ ID NO: 437459 - RNA, 22 nt, Human
caguauuuggaauauagcuaag

SEQ ID NO: 437460 - RNA, 22 nt, Human
aagcccuggauuaaagaugcca

SEQ ID NO: 437461 - RNA, 22 nt, Human
gcagcugggacacugaggccag

SEQ ID NO: 437462 - RNA, 22 nt, Human
aagcacuaauauuuuggcaccu

SEQ ID NO: 437463 - RNA, 22 nt, Human
uaugagaaaggagaaugacuuu

SEQ ID NO: 437464 - RNA, 22 nt, Human
acacaguaugaaaagucuaguu

SEQ ID NO: 437465 - RNA, 22 nt, Human
gcaggcuguagacaccaaacua

SEQ ID NO: 437466 - RNA, 22 nt, Human
cccacaggcccugcugccuuga

SEQ ID NO: 437467 - RNA, 22 nt, Human
uggcugaacuaaugugcuguuu

SEQ ID NO: 437468 - RNA, 22 nt, Human
uuaaguacaggguuagugacgg

SEQ ID NO: 437469 - RNA, 22 nt, Human
acuaaauggaaugauuacuaua

SEQ ID NO: 437470 - RNA, 22 nt, Human
ggaagcuaguuguguuucagga

SEQ ID NO: 437471 - RNA, 22 nt, Human
uuggaaacuuucaagcauaaug

SEQ ID NO: 437472 - RNA, 22 nt, Human
guuucagacuauucuguuucug

SEQ ID NO: 437473 - RNA, 22 nt, Human
cagcugucuaaguugagcagga

SEQ ID NO: 437474 - RNA, 22 nt, Human
agcugcccccagggcugugcuu

SEQ ID NO: 437475 - RNA, 21 nt, Human
gccuggcuucacaggcacuga

SEQ ID NO: 437476 - RNA, 22 nt, Human
uggcccagugcuuaugcucuga

SEQ ID NO: 437477 - RNA, 22 nt, Human
gcaggcagguggcaucuuguga

SEQ ID NO: 437478 - RNA, 22 nt, Human
acagaggucauggagaguucuc

SEQ ID NO: 437479 - RNA, 22 nt, Human
gacagacauuuccugauccaau

SEQ ID NO: 437480 - RNA, 22 nt, Human
acugguaccugucuugaauuuu

SEQ ID NO: 437481 - RNA, 22 nt, Human
aagacauucaugaagaagggau

SEQ ID NO: 437482 - RNA, 22 nt, Human
acaguucaagucuuagacaaca

SEQ ID NO: 437483 - RNA, 22 nt, Human
uuuuccucuguaugcgugagau

SEQ ID NO: 437484 - RNA, 22 nt, Human
acauaaugagcucuuuauaaau

SEQ ID NO: 437485 - RNA, 22 nt, Human
ccaggaagaaacagucuuuaua

SEQ ID NO: 437486 - RNA, 22 nt, Human
aacugcauucagaaagcucacu

SEQ ID NO: 437487 - RNA, 22 nt, Human
aggcuccagucuccucuggcag

SEQ ID NO: 437488 - RNA, 21 nt, Human
ugccagggauuuacagagccu

SEQ ID NO: 437489 - RNA, 22 nt, Human
ccuugggacagccagcuucaga

SEQ ID NO: 437490 - RNA, 22 nt, Human
gcagguggugggggagccguuc

SEQ ID NO: 437491 - RNA, 21 nt, Human
acaaaggaagucucuuuuaag

SEQ ID NO: 437492 - RNA, 22 nt, Human
agagccuguuuugugggagaug

SEQ ID NO: 437493 - RNA, 22 nt, Human
gagaagcaauuuccaacugugc

SEQ ID NO: 437494 - RNA, 22 nt, Human
cagcaacuccuguagcuuaugc

SEQ ID NO: 437495 - RNA, 22 nt, Human
uggccugggccugccggugcaa

SEQ ID NO: 437496 - RNA, 22 nt, Human
ccaggcugcuuagccuuaucuu

SEQ ID NO: 437497 - RNA, 20 nt, Human
ugaagcagccuugauucugu

SEQ ID NO: 437498 - RNA, 21 nt, Human
auuuucucuggaugaugguca

SEQ ID NO: 437499 - RNA, 19 nt, Human
uaaugcacuuaacacaugg

SEQ ID NO: 437500 - RNA, 22 nt, Human
acaggcugauagaccauaaaua

SEQ ID NO: 437501 - RNA, 22 nt, Human
acucuugucucaacuuuuguau

SEQ ID NO: 437502 - RNA, 22 nt, Human
uucaaguauauuuaacaucgua

SEQ ID NO: 437503 - RNA, 22 nt, Human
ugaggcuguucuaccagggcca

SEQ ID NO: 437504 - RNA, 22 nt, Human
ccaaggcuucccagagaugcuc

SEQ ID NO: 437505 - RNA, 22 nt, Human
agucaggcugacaggcuaggag

SEQ ID NO: 437506 - RNA, 22 nt, Human
uaaagugaaggucauaaugauu

SEQ ID NO: 437507 - RNA, 17 nt, Human
acagagcuacauauucu

SEQ ID NO: 437508 - RNA, 22 nt, Human
cugagccaaggggacagugaca

SEQ ID NO: 437509 - RNA, 22 nt, Human
ggcagugguuagaaacaugagc

SEQ ID NO: 437510 - RNA, 22 nt, Human
ucaggccccaucccagacuuau

SEQ ID NO: 437511 - RNA, 22 nt, Human
ucccucagucccuggacaggca

SEQ ID NO: 437512 - RNA, 22 nt, Human
aagauggcugcagcaauuccaa

SEQ ID NO: 437513 - RNA, 22 nt, Human
ggcagguggaaguuggcagagc

SEQ ID NO: 437514 - RNA, 22 nt, Human
gcuguuggcgaggagcucagcu

SEQ ID NO: 437515 - RNA, 22 nt, Human
gcccuggccuccuggaacaggc

SEQ ID NO: 437516 - RNA, 22 nt, Human
gaucacaugaguuaucuaacuu

SEQ ID NO: 437517 - RNA, 22 nt, Human
ucuggccaacaaaaacuaaguc

SEQ ID NO: 437518 - RNA, 22 nt, Human
gccagcuggagugagagugggc

SEQ ID NO: 437519 - RNA, 22 nt, Human
aaguugauuaaucuuucgagaa

SEQ ID NO: 437520 - RNA, 23 nt, Human
uuucaaauuacucugcagaugac

SEQ ID NO: 437521 - RNA, 22 nt, Human
cagcagcucagucucucaguag

SEQ ID NO: 437522 - RNA, 22 nt, Human
agaaacaucauuguuugguauu

SEQ ID NO: 437523 - RNA, 22 nt, Human
cacaggaagcaagccuggggcc

SEQ ID NO: 437524 - RNA, 22 nt, Human
acagcuguggggacucuugccc

SEQ ID NO: 437525 - RNA, 22 nt, Human
gcacuggaggguguaguugcug

SEQ ID NO: 437526 - RNA, 22 nt, Human
gguuccugugcccaugucaugg

SEQ ID NO: 437527 - RNA, 22 nt, Human
gcagcuggccccuuuccuuguu

SEQ ID NO: 437528 - RNA, 22 nt, Human
cuguugcucugaacaggucuug

SEQ ID NO: 437529 - RNA, 22 nt, Human
aagacugaguucaaaucacagc

SEQ ID NO: 437530 - RNA, 22 nt, Human
uuauaauugcuuauuagaccca

SEQ ID NO: 437531 - RNA, 23 nt, Human
ggacccacggucuuugaggcucu

SEQ ID NO: 437532 - RNA, 22 nt, Human
ucuaaagacacuuuuuacaggg

SEQ ID NO: 437533 - RNA, 22 nt, Human
ucaaacugcuaccuuuuaugug

SEQ ID NO: 437534 - RNA, 22 nt, Human
aacuuugcuggaaaauuggagc

SEQ ID NO: 437535 - RNA, 17 nt, Human
agcuagggccuagaauc

SEQ ID NO: 437536 - RNA, 22 nt, Human
auuauuguuagugacaggguga

SEQ ID NO: 437537 - RNA, 21 nt, Human
ugcuuuaugggaaaaauguca

SEQ ID NO: 437538 - RNA, 22 nt, Human
ugacaaguacauaauuucaugu

SEQ ID NO: 437539 - RNA, 21 nt, Human
ugggccagaucugaguuucua

SEQ ID NO: 437540 - RNA, 22 nt, Human
cagaggaaaugggaaggagaua

SEQ ID NO: 437541 - RNA, 22 nt, Human
gccagcaguauguccuggcagu

SEQ ID NO: 437542 - RNA, 22 nt, Human
cccaggcagccccagaagcuug

SEQ ID NO: 437543 - RNA, 22 nt, Human
ucccuggcagcuaagggugguc

SEQ ID NO: 437544 - RNA, 22 nt, Human
agguccugacgcccuuugaaau

SEQ ID NO: 437545 - RNA, 22 nt, Human
auaaagccuuucuguuuucagg

SEQ ID NO: 437546 - RNA, 22 nt, Human
guucucccuguccccugagcuu

SEQ ID NO: 437547 - RNA, 22 nt, Human
guggccagaagacugcaaugcu

SEQ ID NO: 437548 - RNA, 20 nt, Human
auccaugagagucuggauuc

SEQ ID NO: 437549 - RNA, 22 nt, Human
agcagaaccugcagaccugucu

SEQ ID NO: 437550 - RNA, 22 nt, Human
uuucaaaauuuugcagugguaa

SEQ ID NO: 437551 - RNA, 22 nt, Human
ggagccaguuuagaccucaguu

SEQ ID NO: 437552 - RNA, 22 nt, Human
agugacaagguaguuaguugga

SEQ ID NO: 437553 - RNA, 22 nt, Human
cagggcucaggaaaucagacgu

SEQ ID NO: 437554 - RNA, 22 nt, Human
cuggcuggccggagcgaggcgg

SEQ ID NO: 437555 - RNA, 22 nt, Human
caggcugagcucuggccugggc

SEQ ID NO: 437556 - RNA, 22 nt, Human
caagagagaugcagcucacuca

SEQ ID NO: 437557 - RNA, 22 nt, Human
aaauggcuuugaggguaggaca

SEQ ID NO: 437558 - RNA, 22 nt, Human
caagauucagagucuucuaacc

SEQ ID NO: 437559 - RNA, 22 nt, Human
auugaagaaacccaaauaaugg

SEQ ID NO: 437560 - RNA, 23 nt, Human
aggcccugccugucccucuuuuu

SEQ ID NO: 437561 - RNA, 22 nt, Human
agguccuggugaccauggaguu

SEQ ID NO: 437562 - RNA, 22 nt, Human
uugacaauguccuuugaauuuc

SEQ ID NO: 437563 - RNA, 22 nt, Human
uugggcuuuaauuccagagagg

SEQ ID NO: 437564 - RNA, 22 nt, Human
auucaagagcuggcuuugaaau

SEQ ID NO: 437565 - RNA, 22 nt, Human
uucuacaaauauuuacuguucc

SEQ ID NO: 437566 - RNA, 17 nt, Human
gcuguuucuccagaagu

SEQ ID NO: 437567 - RNA, 19 nt, Human
uccaccccagccagcucug

SEQ ID NO: 437568 - RNA, 22 nt, Human
acuggggcaggaaaguaugcug

SEQ ID NO: 437569 - RNA, 22 nt, Human
ggcuguccuuggccaaggcacu

SEQ ID NO: 437570 - RNA, 22 nt, Human
gccugguggugugcucaagugg

SEQ ID NO: 437571 - RNA, 22 nt, Human
uuggcuuguuaaaaaugcaauu

SEQ ID NO: 437572 - RNA, 22 nt, Human
ggccccagcagacccuccucug

SEQ ID NO: 437573 - RNA, 22 nt, Human
cugcugagguccuugcucagac

SEQ ID NO: 437574 - RNA, 22 nt, Human
ccccagccagcaggaccucuga

SEQ ID NO: 437575 - RNA, 22 nt, Human
uacauauucaacguucaguauu

SEQ ID NO: 437576 - RNA, 22 nt, Human
cuggagaggcugggaacagguu

SEQ ID NO: 437577 - RNA, 22 nt, Human
acuccaggauguagaaucagag

SEQ ID NO: 437578 - RNA, 22 nt, Human
gcauccaaauguuucauuucuu

SEQ ID NO: 437579 - RNA, 19 nt, Human
uaacucuuuccuuuucccc

SEQ ID NO: 437580 - RNA, 22 nt, Human
aaagugcaccugcuucuucuug

SEQ ID NO: 437581 - RNA, 22 nt, Human
gggaggacgguccagggcaaag

SEQ ID NO: 437582 - RNA, 22 nt, Human
ugagccagaguggagugugccu

SEQ ID NO: 437583 - RNA, 22 nt, Human
cccagcucucucaguucugcuu

SEQ ID NO: 437584 - RNA, 22 nt, Human
acagaccaaaaaaggauauugg

SEQ ID NO: 437585 - RNA, 22 nt, Human
aucaugcauuguauugaguuga

SEQ ID NO: 437586 - RNA, 21 nt, Human
ugcugccauagaccugaggga

SEQ ID NO: 437587 - RNA, 22 nt, Human
ccaggcagagugcuccagaaag

SEQ ID NO: 437588 - RNA, 20 nt, Human
uauaaauucagagcuuuggu

SEQ ID NO: 437589 - RNA, 22 nt, Human
agcagcaguugcugacguucua

SEQ ID NO: 437590 - RNA, 22 nt, Human
uauucagaaaauaaauuggauu

SEQ ID NO: 437591 - RNA, 22 nt, Human
acagaacuucaguaguauuccc

SEQ ID NO: 437592 - RNA, 22 nt, Human
uuugcagccucccuggcagaag

SEQ ID NO: 437593 - RNA, 23 nt, Human
ugcugggcagagcuggugcugag

SEQ ID NO: 437594 - RNA, 20 nt, Human
ugccaggcacggagugcaug

SEQ ID NO: 437595 - RNA, 22 nt, Human
ccugccuggcugucagcagagc

SEQ ID NO: 437596 - RNA, 22 nt, Human
acaauucaagaagagagaugaa

SEQ ID NO: 437597 - RNA, 18 nt, Human
aggcccuggccucgaaca

SEQ ID NO: 437598 - RNA, 22 nt, Human
augaagcuugaggugagagcug

SEQ ID NO: 437599 - RNA, 22 nt, Human
auuugcuaguggaauuuuccug

SEQ ID NO: 437600 - RNA, 18 nt, Human
ucaggcugggccuccuuc

SEQ ID NO: 437601 - RNA, 22 nt, Human
auuaaagaaacccagcauguga

SEQ ID NO: 437602 - RNA, 22 nt, Human
cagaaggcaaggccugccacgc

SEQ ID NO: 437603 - RNA, 22 nt, Human
cugaagcagauguggcugagau

SEQ ID NO: 437604 - RNA, 22 nt, Human
cuggagcuaggaaguccaagau

SEQ ID NO: 437605 - RNA, 22 nt, Human
aaaaaugugaccacaggguguu

SEQ ID NO: 437606 - RNA, 20 nt, Human
cuguagggugcagcaggcuc

SEQ ID NO: 437607 - RNA, 22 nt, Human
ugagcccagagaucugagcuau

SEQ ID NO: 437608 - RNA, 22 nt, Human
acaguucuuuggauggaagaau

SEQ ID NO: 437609 - RNA, 22 nt, Human
uuuuauugggaguccucuacug

SEQ ID NO: 437610 - RNA, 22 nt, Human
gcagggccagggcucaggcugu

SEQ ID NO: 437611 - RNA, 22 nt, Human
ugcacacauguauguauaugug

SEQ ID NO: 437612 - RNA, 22 nt, Human
caacugaacugauaucaacuau

SEQ ID NO: 437613 - RNA, 22 nt, Human
acaggaagugcuggcacuuaca

SEQ ID NO: 437614 - RNA, 22 nt, Human
augugcuugaagccucagagaa

SEQ ID NO: 437615 - RNA, 17 nt, Human
uggcagcugaaagcucu

SEQ ID NO: 437616 - RNA, 19 nt, Human
uacauacuuauucuaaaag

SEQ ID NO: 437617 - RNA, 22 nt, Human
agcagcugcuuuucuucauugg

SEQ ID NO: 437618 - RNA, 22 nt, Human
ugggcagaggcagcagaaaccu

SEQ ID NO: 437619 - RNA, 22 nt, Human
agucaguuaaccucacagcauc

SEQ ID NO: 437620 - RNA, 22 nt, Human
agccccaguccgcugcgggcgg

SEQ ID NO: 437621 - RNA, 22 nt, Human
augugggccgugcggguguccu

SEQ ID NO: 437622 - RNA, 22 nt, Human
accuggagaaagccucucccug

SEQ ID NO: 437623 - RNA, 22 nt, Human
uucucugcucucacauacagaa

SEQ ID NO: 437624 - RNA, 22 nt, Human
gaggcugggaaguccaauauca

SEQ ID NO: 437625 - RNA, 22 nt, Human
gcaugcugcaccagagccucuc

SEQ ID NO: 437626 - RNA, 20 nt, Human
cccaggagugagcagcuuua

SEQ ID NO: 437627 - RNA, 23 nt, Human
agcccagcagagaaccuaggucc

SEQ ID NO: 437628 - RNA, 22 nt, Human
agcagcugagccccagcuguga

SEQ ID NO: 437629 - RNA, 22 nt, Human
ggccccagauucugggcugggu

SEQ ID NO: 437630 - RNA, 22 nt, Human
uggcccugugugcaggcugcac

SEQ ID NO: 437631 - RNA, 22 nt, Human
gcaauuauuaugugacuuuuac

SEQ ID NO: 437632 - RNA, 22 nt, Human
cugcagcuuaaaggaguucaau

SEQ ID NO: 437633 - RNA, 22 nt, Human
aguguccuugagguuccuagga

SEQ ID NO: 437634 - RNA, 22 nt, Human
ggagucugacccuuagagauga

SEQ ID NO: 437635 - RNA, 22 nt, Human
agcuggugauggccuaagaagg

SEQ ID NO: 437636 - RNA, 22 nt, Human
agcugucuaccugcagaguccu

SEQ ID NO: 437637 - RNA, 22 nt, Human
gaauuucaagcagugcaauguu

SEQ ID NO: 437638 - RNA, 23 nt, Human
agacacuguaaagaauugcaguu

SEQ ID NO: 437639 - RNA, 22 nt, Human
ucagaauugauuuucaaaacag

SEQ ID NO: 437640 - RNA, 19 nt, Human
uaauauacagacccaucug

SEQ ID NO: 437641 - RNA, 22 nt, Human
cagccugacuauggcugcaggu

SEQ ID NO: 437642 - RNA, 22 nt, Human
uacagagggauuaucuaagggu

SEQ ID NO: 437643 - RNA, 22 nt, Human
acuguauuccuacuagaaucua

SEQ ID NO: 437644 - RNA, 22 nt, Human
cccugccuuguuggagccuaug

SEQ ID NO: 437645 - RNA, 22 nt, Human
uugcugauuuguuucuauucca

SEQ ID NO: 437646 - RNA, 22 nt, Human
ugcaggacaguuuggaagagag

SEQ ID NO: 437647 - RNA, 22 nt, Human
ugcaggaaacagaggcucaaau

SEQ ID NO: 437648 - RNA, 22 nt, Human
cugaagagaaagggagcucuuc

SEQ ID NO: 437649 - RNA, 21 nt, Human
ugacagcauagagcagggagg

SEQ ID NO: 437650 - RNA, 22 nt, Human
gggcuccagcagaggcagccgg

SEQ ID NO: 437651 - RNA, 22 nt, Human
aaggcacaugaccuaggccugg

SEQ ID NO: 437652 - RNA, 22 nt, Human
auaguuuuauagauauugugua

SEQ ID NO: 437653 - RNA, 22 nt, Human
gcaggcagucaucuuucauauu

SEQ ID NO: 437654 - RNA, 22 nt, Human
gcucagagauguucaguagcuu

SEQ ID NO: 437655 - RNA, 22 nt, Human
uggaugcuguaggacacgcucu

SEQ ID NO: 437656 - RNA, 22 nt, Human
cugccucuauucacugaggcag

SEQ ID NO: 437657 - RNA, 22 nt, Human
ggcuccugaggaccaggcacag

SEQ ID NO: 437658 - RNA, 23 nt, Human
gaggcagcuccugcagugcccug

SEQ ID NO: 437659 - RNA, 22 nt, Human
gcucagagaauuuacugcugcc

SEQ ID NO: 437660 - RNA, 22 nt, Human
acuuugcagggcuugauaucca

SEQ ID NO: 437661 - RNA, 22 nt, Human
auggaaaaggcugauuucauua

SEQ ID NO: 437662 - RNA, 22 nt, Human
guccagcccgggcuccgccagc

SEQ ID NO: 437663 - RNA, 22 nt, Human
guuuuauaauugcuucauaaga

SEQ ID NO: 437664 - RNA, 22 nt, Human
uaaggcaguagugucuguaggg

SEQ ID NO: 437665 - RNA, 22 nt, Human
ucugucacucccugaugaugaa

SEQ ID NO: 437666 - RNA, 22 nt, Human
uggcaggaaauacccugccuag

SEQ ID NO: 437667 - RNA, 22 nt, Human
uugcagcugcaguaaauguuca

SEQ ID NO: 437668 - RNA, 22 nt, Human
agcagcaggcugggaugagucu

SEQ ID NO: 437669 - RNA, 22 nt, Human
uuucagagaauuagaagcugau

SEQ ID NO: 437670 - RNA, 22 nt, Human
gaaucaggauucaagaucagcu

SEQ ID NO: 437671 - RNA, 22 nt, Human
ugggacagugaccccagagguc

SEQ ID NO: 437672 - RNA, 21 nt, Human
gacacaaaggguaguaauggu

SEQ ID NO: 437673 - RNA, 22 nt, Human
uucacagugagcuaugucuugu

SEQ ID NO: 437674 - RNA, 22 nt, Human
gcagacaggauuggguuaauag

SEQ ID NO: 437675 - RNA, 22 nt, Human
gcucaaugcucaaugcugcaaa

SEQ ID NO: 437676 - RNA, 22 nt, Human
uugcccugcagcggugaguggu

SEQ ID NO: 437677 - RNA, 22 nt, Human
gccaggcucucagugacugccc

SEQ ID NO: 437678 - RNA, 22 nt, Human
augcacagaacaauuuuaagag

SEQ ID NO: 437679 - RNA, 22 nt, Human
aucuuuuacuacaaaucaggug

SEQ ID NO: 437680 - RNA, 22 nt, Human
ugccaggccacguagcuucaag

SEQ ID NO: 437681 - RNA, 22 nt, Human
ugcauugagauuuuaaaauuca

SEQ ID NO: 437682 - RNA, 22 nt, Human
uucucuccuccuagaggcuuuu

SEQ ID NO: 437683 - RNA, 22 nt, Human
cugaagcugaaaacuuccagca

SEQ ID NO: 437684 - RNA, 22 nt, Human
ccuguucagagcuaagcaucau

SEQ ID NO: 437685 - RNA, 22 nt, Human
aauguggccacuuuuuucuggg

SEQ ID NO: 437686 - RNA, 22 nt, Human
gcaggccucuguugagggccuu

SEQ ID NO: 437687 - RNA, 22 nt, Human
cugcagagcauaaaucugaaua

SEQ ID NO: 437688 - RNA, 20 nt, Human
ggcagcaggaguuuccucuu

SEQ ID NO: 437689 - RNA, 22 nt, Human
uugcaaaugaccauugccacau

SEQ ID NO: 437690 - RNA, 20 nt, Human
uacaggaaucaagacugcau

SEQ ID NO: 437691 - RNA, 18 nt, Human
ucaggcugcccugugucu

SEQ ID NO: 437692 - RNA, 22 nt, Human
uaagaaacauuuuuaugacagu

SEQ ID NO: 437693 - RNA, 22 nt, Human
ggcccagguccagcgaguaccu

SEQ ID NO: 437694 - RNA, 22 nt, Human
uguauuuuuaggaaugcgcuau

SEQ ID NO: 437695 - RNA, 22 nt, Human
ggucccaguccucucccugcua

SEQ ID NO: 437696 - RNA, 23 nt, Human
cucagggauagaaaggaagacag

SEQ ID NO: 437697 - RNA, 22 nt, Human
aggcuggcuggggaugcgucuu

SEQ ID NO: 437698 - RNA, 22 nt, Human
cagcacuucagcauucagauuu

SEQ ID NO: 437699 - RNA, 22 nt, Human
gcucugucaacagcuagcugug

SEQ ID NO: 437700 - RNA, 22 nt, Human
acucagagugcaucuccuauuu

SEQ ID NO: 437701 - RNA, 22 nt, Human
gaaggagagggucaaggauaau

SEQ ID NO: 437702 - RNA, 22 nt, Human
ccugggcaggaugggcccggug

SEQ ID NO: 437703 - RNA, 22 nt, Human
uuucagagccugcaaucccaau

SEQ ID NO: 437704 - RNA, 22 nt, Human
ccagaaagacuuuuuagguacg

SEQ ID NO: 437705 - RNA, 22 nt, Human
caguacuuaguucucaugguuu

SEQ ID NO: 437706 - RNA, 22 nt, Human
agaguuaagacguacaugagug

SEQ ID NO: 437707 - RNA, 22 nt, Human
caaguuuaaggcacugauaagu

SEQ ID NO: 437708 - RNA, 22 nt, Human
ugagcacuuuaaaauauuccca

SEQ ID NO: 437709 - RNA, 22 nt, Human
uagacacuguaugagcugggug

SEQ ID NO: 437710 - RNA, 22 nt, Human
uggccuggugucugcgaggccu

SEQ ID NO: 437711 - RNA, 22 nt, Human
cugaguccagggacagaggcgu

SEQ ID NO: 437712 - RNA, 22 nt, Human
cagccugcuagggcaaugccuu

SEQ ID NO: 437713 - RNA, 22 nt, Human
auccuggcgccacacggcucua

SEQ ID NO: 437714 - RNA, 20 nt, Human
ccaggccugggccugcucua

SEQ ID NO: 437715 - RNA, 19 nt, Human
cccagagcauccugaacuu

SEQ ID NO: 437716 - RNA, 22 nt, Human
gauaccagacagggagggagaa

SEQ ID NO: 437717 - RNA, 22 nt, Human
aacagaguuucaaauaacaucu

SEQ ID NO: 437718 - RNA, 22 nt, Human
agcagcugccacuggaauagga

SEQ ID NO: 437719 - RNA, 22 nt, Human
auuuuguuuccuuuggaguaga

SEQ ID NO: 437720 - RNA, 22 nt, Human
uccagccuaauguucuucccac

SEQ ID NO: 437721 - RNA, 22 nt, Human
uugcccugcguuaccaucucuu

SEQ ID NO: 437722 - RNA, 22 nt, Human
uggcccugaggacccagugugg

SEQ ID NO: 437723 - RNA, 22 nt, Human
acagggaagcucaggggcucug

SEQ ID NO: 437724 - RNA, 22 nt, Human
acaauucauuaaugugagguag

SEQ ID NO: 437725 - RNA, 22 nt, Human
uucagaaugcuauuucugaaau

SEQ ID NO: 437726 - RNA, 22 nt, Human
ugucccaguucccaggguugcu

SEQ ID NO: 437727 - RNA, 22 nt, Human
uucugucacuuaggaggucaua

SEQ ID NO: 437728 - RNA, 22 nt, Human
guucaagucuggggcugccagu

SEQ ID NO: 437729 - RNA, 22 nt, Human
ugucccaggccucauguugcca

SEQ ID NO: 437730 - RNA, 22 nt, Human
gaaaaaugagcugaugucaggg

SEQ ID NO: 437731 - RNA, 22 nt, Human
agccacagcccacaggacucuu

SEQ ID NO: 437732 - RNA, 22 nt, Human
gugaauaauuuuuuaguauaag

SEQ ID NO: 437733 - RNA, 22 nt, Human
ucucugucugagccuggcagac

SEQ ID NO: 437734 - RNA, 22 nt, Human
uggcacugggaugcuacuguua

SEQ ID NO: 437735 - RNA, 22 nt, Human
ccuguggcuuccacgaccuaau

SEQ ID NO: 437736 - RNA, 22 nt, Human
ccaggccuggacggguggccug

SEQ ID NO: 437737 - RNA, 22 nt, Human
aauggcaacaugguauagugag

SEQ ID NO: 437738 - RNA, 22 nt, Human
caaauucacaugauugcuucug

SEQ ID NO: 437739 - RNA, 22 nt, Human
ucuuauaauguugaaggguugg

SEQ ID NO: 437740 - RNA, 21 nt, Human
uccucugcagugagguggccu

SEQ ID NO: 437741 - RNA, 22 nt, Human
acagagcugggaucugaaccca

SEQ ID NO: 437742 - RNA, 20 nt, Human
gcccucugccucccucagcg

SEQ ID NO: 437743 - RNA, 22 nt, Human
aguuuaacuuuguaaacgugag

SEQ ID NO: 437744 - RNA, 19 nt, Human
cuuugcaggggauggguga

SEQ ID NO: 437745 - RNA, 23 nt, Human
ucagcagcagaagugcugggaug

SEQ ID NO: 437746 - RNA, 23 nt, Human
uggccuggagagaaaagaugagu

SEQ ID NO: 437747 - RNA, 22 nt, Human
agaauauugaaaguucuugaca

SEQ ID NO: 437748 - RNA, 22 nt, Human
ggugcccagagccaggaaugag

SEQ ID NO: 437749 - RNA, 22 nt, Human
uacugcauagacacugggauau

SEQ ID NO: 437750 - RNA, 22 nt, Human
ccaggaggcagagguuacagug

SEQ ID NO: 437751 - RNA, 22 nt, Human
gcuuugcacaaccuuuaagaca

SEQ ID NO: 437752 - RNA, 18 nt, Human
gcaggccuagaacuuggu

SEQ ID NO: 437753 - RNA, 22 nt, Human
aaaugcauguagaauaauagag

SEQ ID NO: 437754 - RNA, 22 nt, Human
cugagggccugaggaccuagau

SEQ ID NO: 437755 - RNA, 22 nt, Human
aacuuugcuuuuguggguaaag

SEQ ID NO: 437756 - RNA, 22 nt, Human
agcaggcaggcugccagugaau

SEQ ID NO: 437757 - RNA, 21 nt, Human
gaggccucagccucagcuccu

SEQ ID NO: 437758 - RNA, 22 nt, Human
aaugcauaaugguuugugacaa

SEQ ID NO: 437759 - RNA, 18 nt, Human
agagcagcggcaucacac

SEQ ID NO: 437760 - RNA, 20 nt, Human
uacugggcaagcccacagac

SEQ ID NO: 437761 - RNA, 22 nt, Human
agcauguguggagaaauauuuu

SEQ ID NO: 437762 - RNA, 20 nt, Human
ggagagcagggaagacagua

SEQ ID NO: 437763 - RNA, 23 nt, Human
acacagaagaagacccaaggaag

SEQ ID NO: 437764 - RNA, 22 nt, Human
ggcagggagagcaugcugauaa

SEQ ID NO: 437765 - RNA, 22 nt, Human
auggcuuguucauugguaccug

SEQ ID NO: 437766 - RNA, 22 nt, Human
gcaggccuuuaucccugccuca

SEQ ID NO: 437767 - RNA, 22 nt, Human
aacaucauccuuugaguauuua

SEQ ID NO: 437768 - RNA, 20 nt, Human
cuuugcaggagaacagagaa

SEQ ID NO: 437769 - RNA, 22 nt, Human
uacaguuuagaaccauagaugg

SEQ ID NO: 437770 - RNA, 22 nt, Human
uacaaugcugugcauguaaugg

SEQ ID NO: 437771 - RNA, 22 nt, Human
aaaccauugcaucuuucuuaau

SEQ ID NO: 437772 - RNA, 22 nt, Human
aagagaggacauggugaaccug

SEQ ID NO: 437773 - RNA, 20 nt, Human
ggccggggagcucuccaggg

SEQ ID NO: 437774 - RNA, 22 nt, Human
aaggcagccuuuugaguugauu

SEQ ID NO: 437775 - RNA, 22 nt, Human
uagcaacaauggaaguaacuuc

SEQ ID NO: 437776 - RNA, 22 nt, Human
uagagcaguuggcagcuguauu

SEQ ID NO: 437777 - RNA, 22 nt, Human
ucugucacugagcucaggauuc

SEQ ID NO: 437778 - RNA, 22 nt, Human
agcccuggcucccagcagcgcu

SEQ ID NO: 437779 - RNA, 22 nt, Human
gcucucugaggugcuggcagag

SEQ ID NO: 437780 - RNA, 22 nt, Human
cagcaguguacaaggugucaga

SEQ ID NO: 437781 - RNA, 22 nt, Human
aagacauuuuagagauagggaa

SEQ ID NO: 437782 - RNA, 22 nt, Human
cugcccuggucccauggcugau

SEQ ID NO: 437783 - RNA, 22 nt, Human
cccagcaggcauguugggagga

SEQ ID NO: 437784 - RNA, 22 nt, Human
agcaucuaaacuaucaguuuga

SEQ ID NO: 437785 - RNA, 18 nt, Human
uugcuuuguaagcuugca

SEQ ID NO: 437786 - RNA, 22 nt, Human
uugcuuugguagcagcuauaga

SEQ ID NO: 437787 - RNA, 22 nt, Human
aggguggcaguuacuggagcaa

SEQ ID NO: 437788 - RNA, 22 nt, Human
uuuuucuugugcuggaucuaau

SEQ ID NO: 437789 - RNA, 22 nt, Human
cuggguuuuauuacagugagcu

SEQ ID NO: 437790 - RNA, 22 nt, Human
uggccugguuguugcugccguu

SEQ ID NO: 437791 - RNA, 22 nt, Human
uuuagcauguuccuuucauaga

SEQ ID NO: 437792 - RNA, 22 nt, Human
gggcuggucuggcuuagucagg

SEQ ID NO: 437793 - RNA, 22 nt, Human
aggaagcccuugucauuucugu

SEQ ID NO: 437794 - RNA, 22 nt, Human
caggaaggggcucacucuggcc

SEQ ID NO: 437795 - RNA, 20 nt, Human
ucuaauuaaaauugucuagu

SEQ ID NO: 437796 - RNA, 22 nt, Human
gcccucuguuauugcauccuua

SEQ ID NO: 437797 - RNA, 22 nt, Human
agguaauuucuccaaacaugcu

SEQ ID NO: 437798 - RNA, 22 nt, Human
uccugaagaugaaaagagaggu

SEQ ID NO: 437799 - RNA, 22 nt, Human
uauugugaagggaaaaauagug

SEQ ID NO: 437800 - RNA, 22 nt, Human
gaggccuggucuaugagauguu

SEQ ID NO: 437801 - RNA, 22 nt, Human
cagcccuuuccuucucagcuuu

SEQ ID NO: 437802 - RNA, 22 nt, Human
uucuuuaugcuucuguuuaggc

SEQ ID NO: 437803 - RNA, 22 nt, Human
gcagccugaugaucuggguugu

SEQ ID NO: 437804 - RNA, 22 nt, Human
ccuuucucuaucgacccaucgc

SEQ ID NO: 437805 - RNA, 20 nt, Human
cacugcauugauggaaacag

SEQ ID NO: 437806 - RNA, 22 nt, Human
cccucagggaccacugacuuca

SEQ ID NO: 437807 - RNA, 22 nt, Human
ugugaggcuggcaggggccagg

SEQ ID NO: 437808 - RNA, 22 nt, Human
gugcccucaugaaacgaaggau

SEQ ID NO: 437809 - RNA, 22 nt, Human
cagucccagacccagaaggugg

SEQ ID NO: 437810 - RNA, 22 nt, Human
ccucaggcugcucacacuuguc

SEQ ID NO: 437811 - RNA, 22 nt, Human
guuuuauaguucgggaccuguu

SEQ ID NO: 437812 - RNA, 22 nt, Human
agcuugccucuuaaucaccuca

SEQ ID NO: 437813 - RNA, 22 nt, Human
cacuauaucuguucuuguuuau

SEQ ID NO: 437814 - RNA, 20 nt, Human
cacaguauucuuccuuaaaa

SEQ ID NO: 437815 - RNA, 22 nt, Human
cugggcucuagaaaggaaagaa

SEQ ID NO: 437816 - RNA, 23 nt, Human
cacaacuaaucagaaucucuagg

SEQ ID NO: 437817 - RNA, 20 nt, Human
ugauuuucugaaacagcaca

SEQ ID NO: 437818 - RNA, 22 nt, Human
guuccucaguuguaaaaaaugu

SEQ ID NO: 437819 - RNA, 22 nt, Human
agccaacagccagcaucaacca

SEQ ID NO: 437820 - RNA, 22 nt, Human
cagaauccaugacagacguuga

SEQ ID NO: 437821 - RNA, 22 nt, Human
ccaggaagacacaugcucaucc

SEQ ID NO: 437822 - RNA, 22 nt, Human
aaggcagcaccgccuccugaaa

SEQ ID NO: 437823 - RNA, 22 nt, Human
ggucccaguugcccaggucagg

SEQ ID NO: 437824 - RNA, 22 nt, Human
gggauggggagcuggaaagggg

SEQ ID NO: 437825 - RNA, 22 nt, Human
cagcaggacauggaggaguaaa

SEQ ID NO: 437826 - RNA, 22 nt, Human
gacagcagggaaaguccagacc

SEQ ID NO: 437827 - RNA, 22 nt, Human
aggaccagaggccagagucagc

SEQ ID NO: 437828 - RNA, 22 nt, Human
guugcuuuucuccaucacaugg

SEQ ID NO: 437829 - RNA, 22 nt, Human
aagcacagaugcaagggggacc

SEQ ID NO: 437830 - RNA, 23 nt, Human
aggaggccugaaacugaggcuga

SEQ ID NO: 437831 - RNA, 22 nt, Human
uuucagagaugucuagccuauu

SEQ ID NO: 437832 - RNA, 20 nt, Human
cccacacccuucccacuugg

SEQ ID NO: 437833 - RNA, 22 nt, Human
aauuuauauguaauuaggcaca

SEQ ID NO: 437834 - RNA, 22 nt, Human
gcuuccagaucccaugcucuua

SEQ ID NO: 437835 - RNA, 22 nt, Human
aggagcugcuuaaaugguuggu

SEQ ID NO: 437836 - RNA, 22 nt, Human
acagcagaguggagaugagcac

SEQ ID NO: 437837 - RNA, 20 nt, Human
ccugugcuuaucacuugcug

SEQ ID NO: 437838 - RNA, 22 nt, Human
agagcagauggccagggggccu

SEQ ID NO: 437839 - RNA, 22 nt, Human
agcccugcaggaggugggagag

SEQ ID NO: 437840 - RNA, 22 nt, Human
uuauauuaguuagacuugcugu

SEQ ID NO: 437841 - RNA, 22 nt, Human
ugcaggugguuuggacacugcu

SEQ ID NO: 437842 - RNA, 22 nt, Human
agauuuuaguuuggggaggugc

SEQ ID NO: 437843 - RNA, 22 nt, Human
ucaguguaaguuauguagaugu

SEQ ID NO: 437844 - RNA, 22 nt, Human
ugcuuuuuaguacugucuuauu

SEQ ID NO: 437845 - RNA, 22 nt, Human
cauguaaaccauugugagcauc

SEQ ID NO: 437846 - RNA, 22 nt, Human
aucaggccagcaaucccugggc

SEQ ID NO: 437847 - RNA, 22 nt, Human
cuggcugggagcgagcugcuca

SEQ ID NO: 437848 - RNA, 22 nt, Human
cacugcaguuccccagugcgca

SEQ ID NO: 437849 - RNA, 22 nt, Human
caggacagagcccagacugugu

SEQ ID NO: 437850 - RNA, 22 nt, Human
ggcaagguacucuagagcacau

SEQ ID NO: 437851 - RNA, 22 nt, Human
ugcaugcaacaauucuucuaua

SEQ ID NO: 437852 - RNA, 22 nt, Human
aaaugcagaaugauuucaucua

SEQ ID NO: 437853 - RNA, 22 nt, Human
guguguguguaaaaauccagag

SEQ ID NO: 437854 - RNA, 22 nt, Human
acagcagcacuauugacauuuu

SEQ ID NO: 437855 - RNA, 22 nt, Human
agcugccaucagccuuuggaug

SEQ ID NO: 437856 - RNA, 22 nt, Human
uggcaaaguaucugucccagcu

SEQ ID NO: 437857 - RNA, 22 nt, Human
ugaggcaguauucuccauucca

SEQ ID NO: 437858 - RNA, 22 nt, Human
cuaggcuguucaugcucagacc

SEQ ID NO: 437859 - RNA, 22 nt, Human
gaaggcugcgaggggagugccg

SEQ ID NO: 437860 - RNA, 22 nt, Human
uuucuguuaggcaucauuuuaa

SEQ ID NO: 437861 - RNA, 22 nt, Human
ccuccuggaggcucuaagggag

SEQ ID NO: 437862 - RNA, 22 nt, Human
augacaauacuucaauaagcug

SEQ ID NO: 437863 - RNA, 22 nt, Human
gagagcaauggggacgggcagg

SEQ ID NO: 437864 - RNA, 23 nt, Human
auuugaaacuuucuuguuuccag

SEQ ID NO: 437865 - RNA, 22 nt, Human
agcagggcuugccgcuuguccu

SEQ ID NO: 437866 - RNA, 22 nt, Human
ggccugaggcgucccagcugug

SEQ ID NO: 437867 - RNA, 22 nt, Human
gcugcaggagcuggagcugugg

SEQ ID NO: 437868 - RNA, 17 nt, Human
ugaaggaaggaugaugu

SEQ ID NO: 437869 - RNA, 19 nt, Human
cuacuuuauaauaugccuc

SEQ ID NO: 437870 - RNA, 22 nt, Human
aaauguacacuuugcaucuuga

SEQ ID NO: 437871 - RNA, 19 nt, Human
gcucucccucucaguugag

SEQ ID NO: 437872 - RNA, 22 nt, Human
acagaugaaacccagcuaguug

SEQ ID NO: 437873 - RNA, 22 nt, Human
agagcagccugugaugaugcac

SEQ ID NO: 437874 - RNA, 22 nt, Human
cugcccaggaaggagaggaugg

SEQ ID NO: 437875 - RNA, 22 nt, Human
ggaauaaaaauuguuuacugua

SEQ ID NO: 437876 - RNA, 22 nt, Human
gucagcugggcaucugcagaug

SEQ ID NO: 437877 - RNA, 22 nt, Human
agccuggaggaggaguugagca

SEQ ID NO: 437878 - RNA, 22 nt, Human
aauguacaaaagucagccaacu

SEQ ID NO: 437879 - RNA, 22 nt, Human
ccagaggaguugaggcuuuggg

SEQ ID NO: 437880 - RNA, 22 nt, Human
agacacaguuugggauggguug

SEQ ID NO: 437881 - RNA, 22 nt, Human
gagagcugugguuugaccaggc

SEQ ID NO: 437882 - RNA, 22 nt, Human
ccugucaguugcugucagggau

SEQ ID NO: 437883 - RNA, 20 nt, Human
uagagagaggauauuaaagu

SEQ ID NO: 437884 - RNA, 22 nt, Human
ccaggcugggcggggaaccugg

SEQ ID NO: 437885 - RNA, 22 nt, Human
uuuugacaaugcuaaucucaau

SEQ ID NO: 437886 - RNA, 22 nt, Human
ugcaggccggcccuaggccuca

SEQ ID NO: 437887 - RNA, 22 nt, Human
ugcaggcucugugugugccugg

SEQ ID NO: 437888 - RNA, 22 nt, Human
auguguguaugugccuauaucu

SEQ ID NO: 437889 - RNA, 22 nt, Human
ggccucuguuuggagccaggau

SEQ ID NO: 437890 - RNA, 22 nt, Human
cuauucaguaagccaaaaccau

SEQ ID NO: 437891 - RNA, 22 nt, Human
agaaaauaauuucuuggcuggu

SEQ ID NO: 437892 - RNA, 22 nt, Human
auggccugggcccgcuucagau

SEQ ID NO: 437893 - RNA, 22 nt, Human
acugugugggccgcucacuggg

SEQ ID NO: 437894 - RNA, 22 nt, Human
aaggccagauucucucuagggg

SEQ ID NO: 437895 - RNA, 22 nt, Human
cugggcacaggggagcagaguc

SEQ ID NO: 437896 - RNA, 22 nt, Human
aggcugaggugugcugugaucg

SEQ ID NO: 437897 - RNA, 22 nt, Human
gucagugucuuaacagagauua

SEQ ID NO: 437898 - RNA, 22 nt, Human
aaaacacugcaaagcugauugg

SEQ ID NO: 437899 - RNA, 22 nt, Human
caaaugaagagggcaacuucug

SEQ ID NO: 437900 - RNA, 22 nt, Human
ucaagacagugugauacuggcc

SEQ ID NO: 437901 - RNA, 20 nt, Human
aggagccauugacugcagca

SEQ ID NO: 437902 - RNA, 22 nt, Human
ugccugggccucugaggaaggc

SEQ ID NO: 437903 - RNA, 22 nt, Human
aucacaaucccucucucugaua

SEQ ID NO: 437904 - RNA, 22 nt, Human
ugcagcugccuagggcuggcuu

SEQ ID NO: 437905 - RNA, 22 nt, Human
cagcaacccgggggaccuuucu

SEQ ID NO: 437906 - RNA, 22 nt, Human
auuuagcaccuccaucucaaca

SEQ ID NO: 437907 - RNA, 22 nt, Human
aagacaggaacauagcaaaucc

SEQ ID NO: 437908 - RNA, 22 nt, Human
ugauucaagcuacuguuacugg

SEQ ID NO: 437909 - RNA, 22 nt, Human
cacuaauuccaucuccuuuucc

SEQ ID NO: 437910 - RNA, 22 nt, Human
caaugacaucucccugcucuaa

SEQ ID NO: 437911 - RNA, 22 nt, Human
uguaugaagccagaaucuguuu

SEQ ID NO: 437912 - RNA, 22 nt, Human
ccaggagagcaaaggucacucu

SEQ ID NO: 437913 - RNA, 23 nt, Human
agcagcuguggaguuuugcauuu

SEQ ID NO: 437914 - RNA, 22 nt, Human
cacacaguggaguauuacucag

SEQ ID NO: 437915 - RNA, 22 nt, Human
ggacacaguggaagacagcuug

SEQ ID NO: 437916 - RNA, 22 nt, Human
ugggcagcagcaaagccagacu

SEQ ID NO: 437917 - RNA, 22 nt, Human
aggcagcuaagauggauaauga

SEQ ID NO: 437918 - RNA, 22 nt, Human
acaggcugccacuugcauccaa

SEQ ID NO: 437919 - RNA, 22 nt, Human
ccagagaaaaaugugucccugu

SEQ ID NO: 437920 - RNA, 22 nt, Human
acaaggcaguacaaugaugaca

SEQ ID NO: 437921 - RNA, 22 nt, Human
cugaggcugaagagggccuacg

SEQ ID NO: 437922 - RNA, 22 nt, Human
ccucucccaggcgcggcggcag

SEQ ID NO: 437923 - RNA, 22 nt, Human
ggacagagcccugguggccuaa

SEQ ID NO: 437924 - RNA, 22 nt, Human
caaggcagcuauugucuccaua

SEQ ID NO: 437925 - RNA, 22 nt, Human
ucccagccuuccagucugguuu

SEQ ID NO: 437926 - RNA, 22 nt, Human
uugacccaaggcccuggaauug

SEQ ID NO: 437927 - RNA, 23 nt, Human
agaugaggcuucuccauguuggu

SEQ ID NO: 437928 - RNA, 22 nt, Human
cuggagcugucuucacaggccu

SEQ ID NO: 437929 - RNA, 22 nt, Human
gggcaaggcagaagaguuggag

SEQ ID NO: 437930 - RNA, 22 nt, Human
uccuuccuggggucucugcugc

SEQ ID NO: 437931 - RNA, 22 nt, Human
cugcauuacaauucugcucuau

SEQ ID NO: 437932 - RNA, 22 nt, Human
gcccauggcuucccuaggcaca

SEQ ID NO: 437933 - RNA, 22 nt, Human
aggaggagguaagaaaagcaua

SEQ ID NO: 437934 - RNA, 22 nt, Human
ugcaaauauugggacagucuag

SEQ ID NO: 437935 - RNA, 22 nt, Human
cagagcagaagcgguccucaca

SEQ ID NO: 437936 - RNA, 22 nt, Human
ccugcagagccacgugccagcg

SEQ ID NO: 437937 - RNA, 22 nt, Human
ccagggcaacgcugucucagag

SEQ ID NO: 437938 - RNA, 22 nt, Human
guggcucuguaaaaugccugca

SEQ ID NO: 437939 - RNA, 18 nt, Human
uuugcugaugagcaucau

SEQ ID NO: 437940 - RNA, 22 nt, Human
gaaggaaaucugugauuuaugc

SEQ ID NO: 437941 - RNA, 22 nt, Human
aagcacuuagaagagugccugc

SEQ ID NO: 437942 - RNA, 22 nt, Human
ggccucugguucacagggagga

SEQ ID NO: 437943 - RNA, 22 nt, Human
gaaggaagauucuguuggaauc

SEQ ID NO: 437944 - RNA, 22 nt, Human
acagaaguuggaauuagauacu

SEQ ID NO: 437945 - RNA, 22 nt, Human
gagcugaguguccuaggcaugg

SEQ ID NO: 437946 - RNA, 22 nt, Human
cagugcugccaaagggaccuug

SEQ ID NO: 437947 - RNA, 22 nt, Human
cccagagaucuacugagcccag

SEQ ID NO: 437948 - RNA, 22 nt, Human
gggccuguguguucaggagccu

SEQ ID NO: 437949 - RNA, 22 nt, Human
gugaauauucuuugugcaguau

SEQ ID NO: 437950 - RNA, 21 nt, Human
agcagaacagucgagcacugc

SEQ ID NO: 437951 - RNA, 22 nt, Human
gagcaacaggugauggggcugu

SEQ ID NO: 437952 - RNA, 22 nt, Human
ugaagcuguaggcaugggcagc

SEQ ID NO: 437953 - RNA, 22 nt, Human
cuauuaaacacuacugugcacu

SEQ ID NO: 437954 - RNA, 22 nt, Human
uauaaauuaaugugcccaugag

SEQ ID NO: 437955 - RNA, 22 nt, Human
gggcacagagggucuugaagaa

SEQ ID NO: 437956 - RNA, 22 nt, Human
agaggggaguccuaaucugauu

SEQ ID NO: 437957 - RNA, 22 nt, Human
gcacugccacauaaucucagca

SEQ ID NO: 437958 - RNA, 22 nt, Human
ucagcaggcaggaggcaugcca

SEQ ID NO: 437959 - RNA, 22 nt, Human
acuauucaccuuucaugcagga

SEQ ID NO: 437960 - RNA, 18 nt, Human
cccagccucuccuuucua

SEQ ID NO: 437961 - RNA, 21 nt, Human
guucuacaguuuuagaauucc

SEQ ID NO: 437962 - RNA, 22 nt, Human
ugggcaaaugcuuuuuagucaa

SEQ ID NO: 437963 - RNA, 22 nt, Human
cagagcugagaauguugaugcu

SEQ ID NO: 437964 - RNA, 22 nt, Human
ucacaguaucacacaaggauua

SEQ ID NO: 437965 - RNA, 22 nt, Human
aguucacauaucuguuuuauuu

SEQ ID NO: 437966 - RNA, 22 nt, Human
ccacaggcggaguggcgggcag

SEQ ID NO: 437967 - RNA, 22 nt, Human
ugccucagucuaaagucucuca

SEQ ID NO: 437968 - RNA, 22 nt, Human
ucugagaaaguacuguauguuc

SEQ ID NO: 437969 - RNA, 22 nt, Human
gagcuaaggcacaggcaggcuu

SEQ ID NO: 437970 - RNA, 22 nt, Human
aacaggaauugaugggaguccu

SEQ ID NO: 437971 - RNA, 20 nt, Human
agguccugggacuggcagag

SEQ ID NO: 437972 - RNA, 22 nt, Human
ugcccaggcuggaaugcagugg

SEQ ID NO: 437973 - RNA, 22 nt, Human
gucccuggagcugagcagugcu

SEQ ID NO: 437974 - RNA, 17 nt, Human
cccagggaccacugcuu

SEQ ID NO: 437975 - RNA, 22 nt, Human
aaacacuuuaagugaggaggau

SEQ ID NO: 437976 - RNA, 22 nt, Human
auucagaaagauaugccugguu

SEQ ID NO: 437977 - RNA, 22 nt, Human
cccagcugcaccucuauggccu

SEQ ID NO: 437978 - RNA, 22 nt, Human
gaugaugggauccagcaaugua

SEQ ID NO: 437979 - RNA, 22 nt, Human
ccugaggagauuguggcugggg

SEQ ID NO: 437980 - RNA, 22 nt, Human
ugcacugcuuugcaaagcugag

SEQ ID NO: 437981 - RNA, 22 nt, Human
uaggccagcccuuaguccuguc

SEQ ID NO: 437982 - RNA, 22 nt, Human
agacacagcugcaggagguggg

SEQ ID NO: 437983 - RNA, 22 nt, Human
ucucccaggugggugccuggag

SEQ ID NO: 437984 - RNA, 19 nt, Human
ccuggcucugagcccagcc

SEQ ID NO: 437985 - RNA, 19 nt, Human
aaaaggaauauucuuuggg

SEQ ID NO: 437986 - RNA, 22 nt, Human
ugcauucaaauccugauccugc

SEQ ID NO: 437987 - RNA, 22 nt, Human
cccagcaucccagugggcagca

SEQ ID NO: 437988 - RNA, 22 nt, Human
gcaguaggggcuggagggcugu

SEQ ID NO: 437989 - RNA, 22 nt, Human
gggagccacaguagcagcuacu

SEQ ID NO: 437990 - RNA, 22 nt, Human
caccgcggagugauggagaaac

SEQ ID NO: 437991 - RNA, 22 nt, Human
agccacagugcaagagagaaaa

SEQ ID NO: 437992 - RNA, 22 nt, Human
auucacaaauaacaggugcaga

SEQ ID NO: 437993 - RNA, 21 nt, Human
ccccagcaccuugccagccug

SEQ ID NO: 437994 - RNA, 22 nt, Human
uagcagcauuaauuccauuugc

SEQ ID NO: 437995 - RNA, 22 nt, Human
ggccucugguucguggugaccu

SEQ ID NO: 437996 - RNA, 18 nt, Human
cuagagaagguuacuaug

SEQ ID NO: 437997 - RNA, 22 nt, Human
aaaguugaguaggguuugggcc

SEQ ID NO: 437998 - RNA, 22 nt, Human
aaauauagcaauuaugccuacu

SEQ ID NO: 437999 - RNA, 22 nt, Human
ggaugcugcuaucaggcuucga

SEQ ID NO: 438000 - RNA, 22 nt, Human
ucuucaaacccuggcucuuccu

SEQ ID NO: 438001 - RNA, 22 nt, Human
uucagugugugauaccugcugu

SEQ ID NO: 438002 - RNA, 22 nt, Human
agcuggcauacuuugcuaggaa

SEQ ID NO: 438003 - RNA, 21 nt, Human
uuccacaguccugaggauuca

SEQ ID NO: 438004 - RNA, 22 nt, Human
caaacugcaacaugaagugucc

SEQ ID NO: 438005 - RNA, 22 nt, Human
agcacuauuccaaugauccaau

SEQ ID NO: 438006 - RNA, 22 nt, Human
ggcaggaacacagauggugccg

SEQ ID NO: 438007 - RNA, 22 nt, Human
aauaacuucaguucuuacauua

SEQ ID NO: 438008 - RNA, 22 nt, Human
aaacuucauuuucaacugcaaa

SEQ ID NO: 438009 - RNA, 22 nt, Human
uucuaacaaguggcuuguuagu

SEQ ID NO: 438010 - RNA, 22 nt, Human
aacagaggcucccugcacuugu

SEQ ID NO: 438011 - RNA, 22 nt, Human
aguagaaauguaguguagagaa

SEQ ID NO: 438012 - RNA, 22 nt, Human
cagccugggcuccagagucccu

SEQ ID NO: 438013 - RNA, 22 nt, Human
gcugggcagcugaggccucuca

SEQ ID NO: 438014 - RNA, 22 nt, Human
caugaggauccaggugacaggc

SEQ ID NO: 438015 - RNA, 22 nt, Human
gugcagcaaaguuugagauaua

SEQ ID NO: 438016 - RNA, 22 nt, Human
uguccucuuccagugcuccuuc

SEQ ID NO: 438017 - RNA, 22 nt, Human
agucuauacuggacuguuguga

SEQ ID NO: 438018 - RNA, 22 nt, Human
ggcacugggcaccggcugaggg

SEQ ID NO: 438019 - RNA, 22 nt, Human
auaauacaugguuaaccucuuu

SEQ ID NO: 438020 - RNA, 22 nt, Human
ccaggaguuggagguugcagug

SEQ ID NO: 438021 - RNA, 22 nt, Human
cccaagcagggugcagaggcau

SEQ ID NO: 438022 - RNA, 22 nt, Human
gugcagcugccgaucagauagg

SEQ ID NO: 438023 - RNA, 22 nt, Human
ugggccucuguuuccucaucug

SEQ ID NO: 438024 - RNA, 21 nt, Human
caguuuaauaacaaagaagga

SEQ ID NO: 438025 - RNA, 22 nt, Human
agagaauccccagacagaguua

SEQ ID NO: 438026 - RNA, 22 nt, Human
caaguucauuguagcauuauug

SEQ ID NO: 438027 - RNA, 22 nt, Human
acaggcugaggaugauugcauc

SEQ ID NO: 438028 - RNA, 22 nt, Human
agcaggcaagcgugaguucucu

SEQ ID NO: 438029 - RNA, 22 nt, Human
uuuucuccaacucaaaggaaag

SEQ ID NO: 438030 - RNA, 22 nt, Human
acuuugaaauguguaagagaga

SEQ ID NO: 438031 - RNA, 19 nt, Human
augaaugagcugugagguu

SEQ ID NO: 438032 - RNA, 17 nt, Human
aggcauggucuggggug

SEQ ID NO: 438033 - RNA, 22 nt, Human
gcucuguccagcgugcacagaa

SEQ ID NO: 438034 - RNA, 22 nt, Human
uugcuuuugugugcucucugga

SEQ ID NO: 438035 - RNA, 18 nt, Human
cugcccagagcacuugug

SEQ ID NO: 438036 - RNA, 22 nt, Human
ugggaaaguguagccugcaggc

SEQ ID NO: 438037 - RNA, 22 nt, Human
acaugagaggcuguggaguaca

SEQ ID NO: 438038 - RNA, 23 nt, Human
ggcugagaagucccaugauaggu

SEQ ID NO: 438039 - RNA, 22 nt, Human
gcacagaggaugaggcagcucu

SEQ ID NO: 438040 - RNA, 22 nt, Human
guacaauaacuagucuuauagu

SEQ ID NO: 438041 - RNA, 22 nt, Human
gcccuagcgccagcucagcacc

SEQ ID NO: 438042 - RNA, 22 nt, Human
ucacaguagccauuucaugagu

SEQ ID NO: 438043 - RNA, 22 nt, Human
guccugguccugccuccccaug

SEQ ID NO: 438044 - RNA, 23 nt, Human
agaucugauguuaccaagaauug

SEQ ID NO: 438045 - RNA, 22 nt, Human
aaggcagcagugcacgacugau

SEQ ID NO: 438046 - RNA, 22 nt, Human
gacugcaugauguuccagagga

SEQ ID NO: 438047 - RNA, 22 nt, Human
uugcugggugcuauuaugaaca

SEQ ID NO: 438048 - RNA, 22 nt, Human
gcugucccgcugacuuccagcu

SEQ ID NO: 438049 - RNA, 22 nt, Human
cugcagccucaaccuccugagc

SEQ ID NO: 438050 - RNA, 22 nt, Human
agcaggcaggaaggcagcacug

SEQ ID NO: 438051 - RNA, 22 nt, Human
cagcaccuuccuauccaggaga

SEQ ID NO: 438052 - RNA, 22 nt, Human
gccaguuccuguggagucagag

SEQ ID NO: 438053 - RNA, 22 nt, Human
agcagggcuucugugccugugc

SEQ ID NO: 438054 - RNA, 22 nt, Human
caggcagcucaaccuugggagc

SEQ ID NO: 438055 - RNA, 22 nt, Human
cuuugcagugaauccauaaaua

SEQ ID NO: 438056 - RNA, 22 nt, Human
uggaaaaaaauuggcuagcuuc

SEQ ID NO: 438057 - RNA, 22 nt, Human
uuuuauguugcuauaauaggua

SEQ ID NO: 438058 - RNA, 22 nt, Human
cuguauuuguccucuauuuauu

SEQ ID NO: 438059 - RNA, 22 nt, Human
uucaacuuuaggcaaagaaaac

SEQ ID NO: 438060 - RNA, 22 nt, Human
uucauacauuuuuacuaacagc

SEQ ID NO: 438061 - RNA, 22 nt, Human
gaagaagggagugacaaaugca

SEQ ID NO: 438062 - RNA, 22 nt, Human
uaauuucuagggacuaaggugc

SEQ ID NO: 438063 - RNA, 22 nt, Human
auaacauggaguuugucauuua

SEQ ID NO: 438064 - RNA, 22 nt, Human
gcagcccuggccuggccuacuu

SEQ ID NO: 438065 - RNA, 22 nt, Human
gugugccaggaacuggcugcug

SEQ ID NO: 438066 - RNA, 22 nt, Human
uucaaacucugaguaguucugc

SEQ ID NO: 438067 - RNA, 22 nt, Human
aaguaaacuuacacauaguaaa

SEQ ID NO: 438068 - RNA, 22 nt, Human
cugggcugucaauggcccucug

SEQ ID NO: 438069 - RNA, 22 nt, Human
cagcccuuguuucuaaagcugc

SEQ ID NO: 438070 - RNA, 22 nt, Human
cuuucucuuacccaaggaucug

SEQ ID NO: 438071 - RNA, 22 nt, Human
uugcauugaaugcacauuuuua

SEQ ID NO: 438072 - RNA, 22 nt, Human
acuuuaucaggaaucacacagc

SEQ ID NO: 438073 - RNA, 22 nt, Human
ccugagcuuuaaaagccaugua

SEQ ID NO: 438074 - RNA, 22 nt, Human
gggcacaggagaaggaucuggc

SEQ ID NO: 438075 - RNA, 22 nt, Human
ggacccagcucugagacccugc

SEQ ID NO: 438076 - RNA, 22 nt, Human
uuuccagaugcuagguugaaag

SEQ ID NO: 438077 - RNA, 22 nt, Human
gagcagcagcugggccagguuc

SEQ ID NO: 438078 - RNA, 22 nt, Human
aggcagggucuugcuauguugc

SEQ ID NO: 438079 - RNA, 22 nt, Human
uuguguguuuguagaaaaucca

SEQ ID NO: 438080 - RNA, 22 nt, Human
acaaagagggaccagugacuug

SEQ ID NO: 438081 - RNA, 22 nt, Human
ugaucuuuucaaagacaagcuu

SEQ ID NO: 438082 - RNA, 22 nt, Human
acuccagggcuucuaugauggu

SEQ ID NO: 438083 - RNA, 22 nt, Human
ucauaaauugauuaugugcuuu

SEQ ID NO: 438084 - RNA, 22 nt, Human
gaaguagaaaacucaguuucaa

SEQ ID NO: 438085 - RNA, 18 nt, Human
accugccuguucuucucu

SEQ ID NO: 438086 - RNA, 22 nt, Human
uugauacaggcucuauuucauc

SEQ ID NO: 438087 - RNA, 22 nt, Human
cagaaugagauaacccagauug

SEQ ID NO: 438088 - RNA, 22 nt, Human
gcugagcuagaaaaggaccaca

SEQ ID NO: 438089 - RNA, 22 nt, Human
cccuggagucagguuggccugg

SEQ ID NO: 438090 - RNA, 22 nt, Human
ccaggcuggagugcaguagugu

SEQ ID NO: 438091 - RNA, 22 nt, Human
uaaggcagccgcucagagaggu

SEQ ID NO: 438092 - RNA, 22 nt, Human
acaguacugaguacugaguugg

SEQ ID NO: 438093 - RNA, 17 nt, Human
ucugggcuucagugguc

SEQ ID NO: 438094 - RNA, 22 nt, Human
gaugauuuuaugucuugucauu

SEQ ID NO: 438095 - RNA, 22 nt, Human
cuggggaugggaccuggcauaa

SEQ ID NO: 438096 - RNA, 20 nt, Human
aggcugccaggucucacauc

SEQ ID NO: 438097 - RNA, 22 nt, Human
cucugcagaauuugagcugcuc

SEQ ID NO: 438098 - RNA, 22 nt, Human
ucugucaccauucagcuugaau

SEQ ID NO: 438099 - RNA, 22 nt, Human
aguucagcuucccaggucacug

SEQ ID NO: 438100 - RNA, 22 nt, Human
uugcaaauguuauacugccagu

SEQ ID NO: 438101 - RNA, 22 nt, Human
agcuguuuccauucuugaguag

SEQ ID NO: 438102 - RNA, 22 nt, Human
gccaccagccccaugcgcugug

SEQ ID NO: 438103 - RNA, 22 nt, Human
augagguuuugauuggcacagg

SEQ ID NO: 438104 - RNA, 22 nt, Human
cugcacaguguuggaagcugcc

SEQ ID NO: 438105 - RNA, 22 nt, Human
aauguacaggcuggcuaugggg

SEQ ID NO: 438106 - RNA, 22 nt, Human
caacauuugaguaaagaaaugg

SEQ ID NO: 438107 - RNA, 22 nt, Human
acagcagccuuguugguuucga

SEQ ID NO: 438108 - RNA, 22 nt, Human
ucaaauucagugugacaacauu

SEQ ID NO: 438109 - RNA, 22 nt, Human
aguccugugcaaaugcaucuga

SEQ ID NO: 438110 - RNA, 22 nt, Human
cuccaggacugaggacagagcu

SEQ ID NO: 438111 - RNA, 22 nt, Human
aggaaagguucagugauugaaa

SEQ ID NO: 438112 - RNA, 22 nt, Human
cuugccuuugucuucaaaggcu

SEQ ID NO: 438113 - RNA, 22 nt, Human
aaucuuuuaggggauccugagg

SEQ ID NO: 438114 - RNA, 22 nt, Human
aguguugucaaacggcucagca

SEQ ID NO: 438115 - RNA, 22 nt, Human
ggggcaccuccucuuggcaauu

SEQ ID NO: 438116 - RNA, 22 nt, Human
caagagcucaccggagagcauu

SEQ ID NO: 438117 - RNA, 22 nt, Human
gaggggcuguggagcucucugg

SEQ ID NO: 438118 - RNA, 22 nt, Human
caagauuuauauuuucacacaa

SEQ ID NO: 438119 - RNA, 22 nt, Human
aaaucgcuugaacccaggaagu

SEQ ID NO: 438120 - RNA, 22 nt, Human
ugagguuauuuauuaugcauga

SEQ ID NO: 438121 - RNA, 22 nt, Human
cccagggaagccauuucugacu

SEQ ID NO: 438122 - RNA, 22 nt, Human
cagcuugggucaggugccugcu

SEQ ID NO: 438123 - RNA, 22 nt, Human
auugaacauacauauccacacc

SEQ ID NO: 438124 - RNA, 22 nt, Human
cccuggaggaaaaucugaggcu

SEQ ID NO: 438125 - RNA, 22 nt, Human
cuggguucuuggcacagcagga

SEQ ID NO: 438126 - RNA, 22 nt, Human
cagcugguuuuagcacaguuag

SEQ ID NO: 438127 - RNA, 19 nt, Human
gcaggucauuaggcuaggu

SEQ ID NO: 438128 - RNA, 22 nt, Human
auaggacagcagacaauuagua

SEQ ID NO: 438129 - RNA, 22 nt, Human
agggagcaugggugaagcaggc

SEQ ID NO: 438130 - RNA, 22 nt, Human
cugcccugucugcagccuggcu

SEQ ID NO: 438131 - RNA, 20 nt, Human
gcuccaggucagagaggacg

SEQ ID NO: 438132 - RNA, 22 nt, Human
ucaacacuggcuacaguuaugc

SEQ ID NO: 438133 - RNA, 22 nt, Human
gcuggccaguguggugaccacc

SEQ ID NO: 438134 - RNA, 22 nt, Human
ggccucaggguugggcccauua

SEQ ID NO: 438135 - RNA, 22 nt, Human
agcaguuuuagggagacacauu

SEQ ID NO: 438136 - RNA, 22 nt, Human
ccaaagaaacccaagcucaggg

SEQ ID NO: 438137 - RNA, 17 nt, Human
ucagagggaugagcagg

SEQ ID NO: 438138 - RNA, 22 nt, Human
ugcaggaccuugauccuggacu

SEQ ID NO: 438139 - RNA, 22 nt, Human
gccuggagugcaguggcgugau

SEQ ID NO: 438140 - RNA, 22 nt, Human
agcaggcuaagggaccuguuua

SEQ ID NO: 438141 - RNA, 22 nt, Human
uauuuugugccaugcacugccu

SEQ ID NO: 438142 - RNA, 22 nt, Human
ugcagcugccuccuucccuugu

SEQ ID NO: 438143 - RNA, 22 nt, Human
uuaacaauagaguuucuucagg

SEQ ID NO: 438144 - RNA, 22 nt, Human
ccugaggaugccagcaugggug

SEQ ID NO: 438145 - RNA, 22 nt, Human
uuugaaagaauuuauguacuuu

SEQ ID NO: 438146 - RNA, 22 nt, Human
agccugguguggggcugcagag

SEQ ID NO: 438147 - RNA, 22 nt, Human
ugcccuggcucuccacuaguuu

SEQ ID NO: 438148 - RNA, 21 nt, Human
ccaggcuggccaugguauuga

SEQ ID NO: 438149 - RNA, 22 nt, Human
ugcagcccugugcacauccccu

SEQ ID NO: 438150 - RNA, 22 nt, Human
ggcagccccagaaacaguucag

SEQ ID NO: 438151 - RNA, 22 nt, Human
ucuuugcaguucugauuaaaua

SEQ ID NO: 438152 - RNA, 22 nt, Human
gacccaggaagcuacuucuggu

SEQ ID NO: 438153 - RNA, 22 nt, Human
uacagacauucaauuuugaccc

SEQ ID NO: 438154 - RNA, 22 nt, Human
ugugugugcacaugcauauaca

SEQ ID NO: 438155 - RNA, 22 nt, Human
cugagccaguagucagggacaa

SEQ ID NO: 438156 - RNA, 22 nt, Human
ccuggagcacucucccuggcug

SEQ ID NO: 438157 - RNA, 22 nt, Human
agagcuguggauaguccuggau

SEQ ID NO: 438158 - RNA, 22 nt, Human
cacaggaaaauaaaagaucuaa

SEQ ID NO: 438159 - RNA, 22 nt, Human
uuuaucuggacugugauauaaa

SEQ ID NO: 438160 - RNA, 22 nt, Human
ucacucuguuuuacucacuguu

SEQ ID NO: 438161 - RNA, 22 nt, Human
aggacacacaaagagugagaac

SEQ ID NO: 438162 - RNA, 22 nt, Human
gcagaggaggacccaggaauua

SEQ ID NO: 438163 - RNA, 22 nt, Human
cagcagcaguggcugcagaaca

SEQ ID NO: 438164 - RNA, 19 nt, Human
gaguccugugcuccuuguu

SEQ ID NO: 438165 - RNA, 22 nt, Human
gcugccacucugagcuugcuuc

SEQ ID NO: 438166 - RNA, 22 nt, Human
aagaagcauggcuguagauucc

SEQ ID NO: 438167 - RNA, 22 nt, Human
uccuggaggcaaaugagcacau

SEQ ID NO: 438168 - RNA, 22 nt, Human
uccagcagaccaucaaggcuca

SEQ ID NO: 438169 - RNA, 22 nt, Human
ugccaggcauuugacagacacu

SEQ ID NO: 438170 - RNA, 22 nt, Human
accccagcccugcuucugggag

SEQ ID NO: 438171 - RNA, 22 nt, Human
acuuagcaauuugauuaaaaga

SEQ ID NO: 438172 - RNA, 19 nt, Human
ggaaacaggggccagagga

SEQ ID NO: 438173 - RNA, 22 nt, Human
aaacacaauguuucuuuguucu

SEQ ID NO: 438174 - RNA, 22 nt, Human
ccacaguaaagaaacaacuucg

SEQ ID NO: 438175 - RNA, 20 nt, Human
cuccaugacuugaauuagua

SEQ ID NO: 438176 - RNA, 22 nt, Human
uuuguaaauagcaguacucaug

SEQ ID NO: 438177 - RNA, 19 nt, Human
ccaccagugugaucuaaga

SEQ ID NO: 438178 - RNA, 22 nt, Human
acuauugcuuagagcaaugggg

SEQ ID NO: 438179 - RNA, 22 nt, Human
cugggaggacaacuuggagcuc

SEQ ID NO: 438180 - RNA, 22 nt, Human
ccugcagaccacacucaguccu

SEQ ID NO: 438181 - RNA, 22 nt, Human
ugugaggccucugcaggagcag

SEQ ID NO: 438182 - RNA, 22 nt, Human
ucccagccuuucuuuucugcug

SEQ ID NO: 438183 - RNA, 22 nt, Human
agagaccaagggaauagucuca

SEQ ID NO: 438184 - RNA, 22 nt, Human
auuuaauaccacuuggugcuuu

SEQ ID NO: 438185 - RNA, 22 nt, Human
uggugagaaguuuugagauucu

SEQ ID NO: 438186 - RNA, 21 nt, Human
gugcacaguccugcacacagg

SEQ ID NO: 438187 - RNA, 22 nt, Human
agcuuuuacauaaugaucuuga

SEQ ID NO: 438188 - RNA, 23 nt, Human
uguguguguauucuacgcaaggu

SEQ ID NO: 438189 - RNA, 22 nt, Human
aggugcagaaaaaaguccuuua

SEQ ID NO: 438190 - RNA, 22 nt, Human
agagcuguagcuuccuagagcc

SEQ ID NO: 438191 - RNA, 22 nt, Human
agcuguuuuccugguuagagac

SEQ ID NO: 438192 - RNA, 22 nt, Human
gcagagcugcagcgaggccugg

SEQ ID NO: 438193 - RNA, 22 nt, Human
gacaaggaaauuacuagcugga

SEQ ID NO: 438194 - RNA, 22 nt, Human
agccugagccccauccagcuga

SEQ ID NO: 438195 - RNA, 22 nt, Human
gcagggugugucucauacaguu

SEQ ID NO: 438196 - RNA, 22 nt, Human
aaggccucccucuuucauggga

SEQ ID NO: 438197 - RNA, 22 nt, Human
ccaggauggggagcagauagaa

SEQ ID NO: 438198 - RNA, 22 nt, Human
agcugccaaguuggaguagcaa

SEQ ID NO: 438199 - RNA, 22 nt, Human
gggcagaggcucuggcccaucc

SEQ ID NO: 438200 - RNA, 22 nt, Human
acaggcagggaccucuugaguu

SEQ ID NO: 438201 - RNA, 22 nt, Human
ggcaccaggaucagucugucau

SEQ ID NO: 438202 - RNA, 22 nt, Human
cuggguggcuguccagccagcc

SEQ ID NO: 438203 - RNA, 22 nt, Human
ccuuagcaacugucauagagca

SEQ ID NO: 438204 - RNA, 17 nt, Human
aucugcauuucuaauga

SEQ ID NO: 438205 - RNA, 22 nt, Human
ccugagguggcugcagcacugc

SEQ ID NO: 438206 - RNA, 22 nt, Human
cauguacaguuuuucuguccug

SEQ ID NO: 438207 - RNA, 22 nt, Human
ugguccugucucaaggagccuu

SEQ ID NO: 438208 - RNA, 22 nt, Human
ucuaccuggaguccguuguuaa

SEQ ID NO: 438209 - RNA, 22 nt, Human
agcagagcagaaugugaaggug

SEQ ID NO: 438210 - RNA, 22 nt, Human
cacagaacugguuaauagcaga

SEQ ID NO: 438211 - RNA, 22 nt, Human
gcccagcccagaaagguucgga

SEQ ID NO: 438212 - RNA, 22 nt, Human
agcaguuuggaaaauacuagaa

SEQ ID NO: 438213 - RNA, 22 nt, Human
ugaggccaaugacccugggcag

SEQ ID NO: 438214 - RNA, 22 nt, Human
cccaggaggaggaaaaagcucg

SEQ ID NO: 438215 - RNA, 22 nt, Human
ccugggucccugagagaugauu

SEQ ID NO: 438216 - RNA, 22 nt, Human
gcuguuucuaagcugguuccua

SEQ ID NO: 438217 - RNA, 22 nt, Human
caccuuccaucuccuuggcuag

SEQ ID NO: 438218 - RNA, 22 nt, Human
ccaauucaccuccuaugcacau

SEQ ID NO: 438219 - RNA, 18 nt, Human
acaggcuauugcaggaga

SEQ ID NO: 438220 - RNA, 22 nt, Human
uucacaguggcugugccauuug

SEQ ID NO: 438221 - RNA, 22 nt, Human
gucccuggggaaucagcuggag

SEQ ID NO: 438222 - RNA, 22 nt, Human
aaaauaacuucuacuauuugca

SEQ ID NO: 438223 - RNA, 23 nt, Human
auacaaaccuugcaggacauguu

SEQ ID NO: 438224 - RNA, 22 nt, Human
uucagaaugauuacauucuggu

SEQ ID NO: 438225 - RNA, 22 nt, Human
ccuccagcugccucagucucuu

SEQ ID NO: 438226 - RNA, 22 nt, Human
acagcagcuaaaggugucuccu

SEQ ID NO: 438227 - RNA, 22 nt, Human
aauuuuacuaaucugaguguga

SEQ ID NO: 438228 - RNA, 22 nt, Human
gcugggcaccggagagacccca

SEQ ID NO: 438229 - RNA, 22 nt, Human
acgcagaagggccuggcgugcc

SEQ ID NO: 438230 - RNA, 21 nt, Human
gcugccaccgcgugcuccagg

SEQ ID NO: 438231 - RNA, 22 nt, Human
ggcaggcaccagcucagcaaua

SEQ ID NO: 438232 - RNA, 22 nt, Human
gcugggcagccccuacagagag

SEQ ID NO: 438233 - RNA, 22 nt, Human
cugagcagcaacccagagccuc

SEQ ID NO: 438234 - RNA, 22 nt, Human
gggaagauaguguugagggccc

SEQ ID NO: 438235 - RNA, 22 nt, Human
cugagggcaugaacauuccaua

SEQ ID NO: 438236 - RNA, 22 nt, Human
ggggcagaguagcuggggugug

SEQ ID NO: 438237 - RNA, 22 nt, Human
cugggacccacaccuggaaucu

SEQ ID NO: 438238 - RNA, 22 nt, Human
agggcacuccuuggcagcucug

SEQ ID NO: 438239 - RNA, 19 nt, Human
aacaucauggcucuuucca

SEQ ID NO: 438240 - RNA, 19 nt, Human
uaaggcagcagugacaggc

SEQ ID NO: 438241 - RNA, 22 nt, Human
aaaguugagugcugaucugauu

SEQ ID NO: 438242 - RNA, 22 nt, Human
caagaucuuccucaauagaccu

SEQ ID NO: 438243 - RNA, 21 nt, Human
gggcagaggggccuccugggu

SEQ ID NO: 438244 - RNA, 22 nt, Human
ugaagcuggaagcaugcagacu

SEQ ID NO: 438245 - RNA, 22 nt, Human
uuguuuguaugcugagaagaau

SEQ ID NO: 438246 - RNA, 22 nt, Human
agggaugacucuuggcugauuc

SEQ ID NO: 438247 - RNA, 22 nt, Human
cagagcaguagaaaacagccuu

SEQ ID NO: 438248 - RNA, 20 nt, Human
aagaggugauaacaggugag

SEQ ID NO: 438249 - RNA, 22 nt, Human
aguggcaguggggcagggcccu

SEQ ID NO: 438250 - RNA, 22 nt, Human
ccugcaggcugcaggccaguuc

SEQ ID NO: 438251 - RNA, 22 nt, Human
gcagcugguuaaugggagaauu

SEQ ID NO: 438252 - RNA, 22 nt, Human
auacuuuggggguuaguguaga

SEQ ID NO: 438253 - RNA, 22 nt, Human
cagcccugaaacaaccuccucu

SEQ ID NO: 438254 - RNA, 21 nt, Human
ccaggcugggagggcaguucc

SEQ ID NO: 438255 - RNA, 23 nt, Human
uuugcaaauuggacacaaccaca

SEQ ID NO: 438256 - RNA, 22 nt, Human
ugcccuggcacacacacagcug

SEQ ID NO: 438257 - RNA, 22 nt, Human
uagcccugcugugaugugaagu

SEQ ID NO: 438258 - RNA, 22 nt, Human
cauuugcagagggugacacucu

SEQ ID NO: 438259 - RNA, 22 nt, Human
ggcuuugcccuggacugaggca

SEQ ID NO: 438260 - RNA, 20 nt, Human
cccagagguugcggcaggag

SEQ ID NO: 438261 - RNA, 22 nt, Human
caaauagacucuagaauuuauu

SEQ ID NO: 438262 - RNA, 22 nt, Human
auuuagcaagaguacaaaauaa

SEQ ID NO: 438263 - RNA, 22 nt, Human
uuugcuauuuuucugugcagcu

SEQ ID NO: 438264 - RNA, 22 nt, Human
guuuuauaggugaaauauuacu

SEQ ID NO: 438265 - RNA, 22 nt, Human
ccagggaguuuccaaucugaga

SEQ ID NO: 438266 - RNA, 22 nt, Human
guggccaggccgacugccaggc

SEQ ID NO: 438267 - RNA, 22 nt, Human
guccugggagaugggacccuga

SEQ ID NO: 438268 - RNA, 22 nt, Human
gggcuccagccaggugucccca

SEQ ID NO: 438269 - RNA, 22 nt, Human
uacaguacccugaugaacuaaa

SEQ ID NO: 438270 - RNA, 22 nt, Human
ccagccuuugcaucccccaucu

SEQ ID NO: 438271 - RNA, 21 nt, Human
acuuugcaucuaccuuggguu

SEQ ID NO: 438272 - RNA, 22 nt, Human
agcuaaugauacaugcuccaca

SEQ ID NO: 438273 - RNA, 20 nt, Human
augauuuugcacuaacuuca

SEQ ID NO: 438274 - RNA, 22 nt, Human
gggagcugagcuggaagagaau

SEQ ID NO: 438275 - RNA, 22 nt, Human
gagccaagggcgugcuggagag

SEQ ID NO: 438276 - RNA, 22 nt, Human
aggagcugaagucucugcacuc

SEQ ID NO: 438277 - RNA, 22 nt, Human
ucuuuauguuugaaaguacaau

SEQ ID NO: 438278 - RNA, 22 nt, Human
acaggacagucuaguaacagua

SEQ ID NO: 438279 - RNA, 22 nt, Human
ucucccaggcuggagugcagug

SEQ ID NO: 438280 - RNA, 22 nt, Human
ucacugcaaggaggcuucucaa

SEQ ID NO: 438281 - RNA, 22 nt, Human
ccggcaaaggccccuuccccag

SEQ ID NO: 438282 - RNA, 23 nt, Human
acagcugcaccuggccgccuggc

SEQ ID NO: 438283 - RNA, 22 nt, Human
uggagcuggaauuucugggccu

SEQ ID NO: 438284 - RNA, 22 nt, Human
uucuggagaggaacagaaaggu

SEQ ID NO: 438285 - RNA, 22 nt, Human
cucacucagacauccagugcag

SEQ ID NO: 438286 - RNA, 22 nt, Human
aauucagaaaaauucacuccua

SEQ ID NO: 438287 - RNA, 22 nt, Human
acaaagaucuugcuuuccuacu

SEQ ID NO: 438288 - RNA, 22 nt, Human
cauggcccucuucuggagcaau

SEQ ID NO: 438289 - RNA, 22 nt, Human
ugggcagaaaucaguaucagau

SEQ ID NO: 438290 - RNA, 22 nt, Human
uuaaauuagucaagcuucucug

SEQ ID NO: 438291 - RNA, 21 nt, Human
gaggaaugguuugcaaagcac

SEQ ID NO: 438292 - RNA, 22 nt, Human
uggccagcacuuagcccuuacc

SEQ ID NO: 438293 - RNA, 22 nt, Human
ucucuaaagauauuuauggcaa

SEQ ID NO: 438294 - RNA, 22 nt, Human
aaaugcauuaagucagaacaau

SEQ ID NO: 438295 - RNA, 22 nt, Human
ugcacacagaugguacaugcau

SEQ ID NO: 438296 - RNA, 22 nt, Human
acauuuuucacauuuguagggu

SEQ ID NO: 438297 - RNA, 22 nt, Human
ggccucacccaucggugccuuu

SEQ ID NO: 438298 - RNA, 20 nt, Human
ccacagaggacagggcugug

SEQ ID NO: 438299 - RNA, 22 nt, Human
uggcccugacuuggaggccuga

SEQ ID NO: 438300 - RNA, 22 nt, Human
agcagcaugaugacagagucuc

SEQ ID NO: 438301 - RNA, 22 nt, Human
aggccuggguguucaccagaag

SEQ ID NO: 438302 - RNA, 22 nt, Human
aguucuuugugauggaaauuua

SEQ ID NO: 438303 - RNA, 22 nt, Human
aguuuugauacuuucucuucau

SEQ ID NO: 438304 - RNA, 22 nt, Human
aaauaacuugguuucaucagag

SEQ ID NO: 438305 - RNA, 23 nt, Human
cagcccuggagaugugggaggca

SEQ ID NO: 438306 - RNA, 22 nt, Human
ugcacacacucguguauaugag

SEQ ID NO: 438307 - RNA, 19 nt, Human
ucuaacagaagugucgucc

SEQ ID NO: 438308 - RNA, 22 nt, Human
auguacaauucuccuugguagg

SEQ ID NO: 438309 - RNA, 22 nt, Human
cucacaggcaucucaucaggcu

SEQ ID NO: 438310 - RNA, 22 nt, Human
ccagagucauuuugagucauaa

SEQ ID NO: 438311 - RNA, 22 nt, Human
guuuuucuagacugggaguuug

SEQ ID NO: 438312 - RNA, 22 nt, Human
cagcagcagagauacugguuuc

SEQ ID NO: 438313 - RNA, 22 nt, Human
cagcugccccauaaaucacagu

SEQ ID NO: 438314 - RNA, 22 nt, Human
caggaugugaggaggccauuug

SEQ ID NO: 438315 - RNA, 22 nt, Human
cugguacauaguaagaacacaa

SEQ ID NO: 438316 - RNA, 23 nt, Human
auauggcuguuguguguuaacau

SEQ ID NO: 438317 - RNA, 22 nt, Human
uuucaaacauagaucugaauau

SEQ ID NO: 438318 - RNA, 22 nt, Human
auuaaauuggaucugcauaguu

SEQ ID NO: 438319 - RNA, 22 nt, Human
ccagcaagugcagauggccaag

SEQ ID NO: 438320 - RNA, 22 nt, Human
ggcugggcaggucugcacaggg

SEQ ID NO: 438321 - RNA, 18 nt, Human
ggccagccccaggccagc

SEQ ID NO: 438322 - RNA, 22 nt, Human
ggggggcagcuguccuggccau

SEQ ID NO: 438323 - RNA, 22 nt, Human
aggcagcucuguggccucccag

SEQ ID NO: 438324 - RNA, 22 nt, Human
caggccagagcgcgugguuggg

SEQ ID NO: 438325 - RNA, 22 nt, Human
gcucacugccauucucuagaug

SEQ ID NO: 438326 - RNA, 22 nt, Human
cuguacaaaagaaaguuccuau

SEQ ID NO: 438327 - RNA, 22 nt, Human
ucuuugcugaguacaucuccaa

SEQ ID NO: 438328 - RNA, 22 nt, Human
uauucaaaguaccuucauugcc

SEQ ID NO: 438329 - RNA, 22 nt, Human
ucugcuuucuugcgcagaugug

SEQ ID NO: 438330 - RNA, 22 nt, Human
agggaagcugcuggguccaccu

SEQ ID NO: 438331 - RNA, 22 nt, Human
uggaaagugcucuagacuuucu

SEQ ID NO: 438332 - RNA, 22 nt, Human
gccuucugugcuccuggccuuu

SEQ ID NO: 438333 - RNA, 16 nt, Human
ucaggccuggacgagc

SEQ ID NO: 438334 - RNA, 22 nt, Human
cccaggccagaacuugguugcu

SEQ ID NO: 438335 - RNA, 22 nt, Human
ggcagugcaaggcagccuggau

SEQ ID NO: 438336 - RNA, 22 nt, Human
aaugcacuuaguaugaaugccu

SEQ ID NO: 438337 - RNA, 22 nt, Human
caggacagaccaagaucgugcu

SEQ ID NO: 438338 - RNA, 22 nt, Human
gagcuaagagucuagaaaggcu

SEQ ID NO: 438339 - RNA, 19 nt, Human
ucucacaagcaacauuguu

SEQ ID NO: 438340 - RNA, 22 nt, Human
gcacacaucuuguaauccugag

SEQ ID NO: 438341 - RNA, 22 nt, Human
aggaaggggagaaguuaaagcu

SEQ ID NO: 438342 - RNA, 22 nt, Human
agagaccagaauccagcugccu

SEQ ID NO: 438343 - RNA, 22 nt, Human
ucucagaggugcccuggcaucu

SEQ ID NO: 438344 - RNA, 22 nt, Human
caggcuccacuguaggcagcuc

SEQ ID NO: 438345 - RNA, 22 nt, Human
cacugcagaucagaggcugaga

SEQ ID NO: 438346 - RNA, 22 nt, Human
ggccuguccagccugccuggcu

SEQ ID NO: 438347 - RNA, 22 nt, Human
cugaggcuggggaagggaagug

SEQ ID NO: 438348 - RNA, 22 nt, Human
gcccugguuuuagaggagcagg

SEQ ID NO: 438349 - RNA, 22 nt, Human
aacagaggauguuugaaauuca

SEQ ID NO: 438350 - RNA, 22 nt, Human
agcuggcuaugcccugugaacc

SEQ ID NO: 438351 - RNA, 22 nt, Human
cagccucugacaccacagucgu

SEQ ID NO: 438352 - RNA, 22 nt, Human
aaggcaauggcaagagaaagca

SEQ ID NO: 438353 - RNA, 22 nt, Human
auguagaagugggcauuauaga

SEQ ID NO: 438354 - RNA, 22 nt, Human
cugggcagaauuuuaggauggc

SEQ ID NO: 438355 - RNA, 22 nt, Human
uuuuuagauuacucagccacca

SEQ ID NO: 438356 - RNA, 22 nt, Human
ucuuuggcaucagggccagcua

SEQ ID NO: 438357 - RNA, 22 nt, Human
ugcaguggugguaaagaugcuc

SEQ ID NO: 438358 - RNA, 22 nt, Human
cugcucuguuucuuagcugggu

SEQ ID NO: 438359 - RNA, 22 nt, Human
ucaugccaaaauccaguggcuu

SEQ ID NO: 438360 - RNA, 22 nt, Human
ucucuuuaaaaauagugaaaua

SEQ ID NO: 438361 - RNA, 22 nt, Human
cagagacaguuucacagggucu

SEQ ID NO: 438362 - RNA, 22 nt, Human
agcagcuuccugcucuucgccu

SEQ ID NO: 438363 - RNA, 22 nt, Human
auuguauuuaggagaaaagggu

SEQ ID NO: 438364 - RNA, 22 nt, Human
guuucagaacaccccauuuggg

SEQ ID NO: 438365 - RNA, 20 nt, Human
acuccagguggcaugaggac

SEQ ID NO: 438366 - RNA, 22 nt, Human
cagagaacauucagagcuguag

SEQ ID NO: 438367 - RNA, 22 nt, Human
gcaucuaaaucacuuuaaugua

SEQ ID NO: 438368 - RNA, 22 nt, Human
cagugcuguguuugcugccugg

SEQ ID NO: 438369 - RNA, 22 nt, Human
uagcugccuaugugauaagaga

SEQ ID NO: 438370 - RNA, 22 nt, Human
auuaaggcugcacuggccuuaa

SEQ ID NO: 438371 - RNA, 22 nt, Human
uuugcaaaguuauuuagacuca

SEQ ID NO: 438372 - RNA, 22 nt, Human
agggacagucuacuguucacug

SEQ ID NO: 438373 - RNA, 22 nt, Human
ccagcaccuugaucuuggaguu

SEQ ID NO: 438374 - RNA, 22 nt, Human
ccacaggcugcugcaggucccg

SEQ ID NO: 438375 - RNA, 22 nt, Human
gaggcaggcacuguuaucagca

SEQ ID NO: 438376 - RNA, 22 nt, Human
ggcccuguuagagcucccacaa

SEQ ID NO: 438377 - RNA, 22 nt, Human
agaggcagcagucauacuacag

SEQ ID NO: 438378 - RNA, 22 nt, Human
uuugauaacagugaauaucaug

SEQ ID NO: 438379 - RNA, 22 nt, Human
uuuucuuaugugcagcuauaug

SEQ ID NO: 438380 - RNA, 22 nt, Human
ucagaggagcugcagaacgcug

SEQ ID NO: 438381 - RNA, 23 nt, Human
aggcagcagguuguccaggguga

SEQ ID NO: 438382 - RNA, 22 nt, Human
aaggcacagccacuugaucauc

SEQ ID NO: 438383 - RNA, 22 nt, Human
ggaggcagaauagagugugggu

SEQ ID NO: 438384 - RNA, 22 nt, Human
ugggcuccagcaccugugcucu

SEQ ID NO: 438385 - RNA, 22 nt, Human
ccugaggcuggcccuuccaucc

SEQ ID NO: 438386 - RNA, 20 nt, Human
ugcagguguuggagaaggua

SEQ ID NO: 438387 - RNA, 22 nt, Human
cagagacauuaagugccaugau

SEQ ID NO: 438388 - RNA, 22 nt, Human
agucccagugacuuggccagaa

SEQ ID NO: 438389 - RNA, 22 nt, Human
uaccauuuugaaacauuucauc

SEQ ID NO: 438390 - RNA, 22 nt, Human
caacagagggaauggaucucau

SEQ ID NO: 438391 - RNA, 22 nt, Human
cugccaggacugacgucuucag

SEQ ID NO: 438392 - RNA, 22 nt, Human
uucuaacuggugcagugcugca

SEQ ID NO: 438393 - RNA, 22 nt, Human
aauuuucuaaggugaugaucug

SEQ ID NO: 438394 - RNA, 22 nt, Human
agaauacaguaugcaaaaagau

SEQ ID NO: 438395 - RNA, 22 nt, Human
gcaguuuuauuaugauggaaau

SEQ ID NO: 438396 - RNA, 22 nt, Human
uaacugcagaggaaaugcaucu

SEQ ID NO: 438397 - RNA, 22 nt, Human
agcaggaguguccccuggcugu

SEQ ID NO: 438398 - RNA, 18 nt, Human
uacaggaagggguucucg

SEQ ID NO: 438399 - RNA, 22 nt, Human
uugaagcugucuuucagaauca

SEQ ID NO: 438400 - RNA, 22 nt, Human
ugugugaauggauuauucuauu

SEQ ID NO: 438401 - RNA, 22 nt, Human
ggcaggcauggggucugccauu

SEQ ID NO: 438402 - RNA, 22 nt, Human
gccugccugcugucaucugccu

SEQ ID NO: 438403 - RNA, 22 nt, Human
ccagccuggagggcaguggugg

SEQ ID NO: 438404 - RNA, 22 nt, Human
acaaaccagcuuaagcaagaug

SEQ ID NO: 438405 - RNA, 22 nt, Human
ccuccagacuuuggccauccuc

SEQ ID NO: 438406 - RNA, 22 nt, Human
uuccaugggucugggggcucca

SEQ ID NO: 438407 - RNA, 23 nt, Human
gggcagguuuuuauaggcuucag

SEQ ID NO: 438408 - RNA, 22 nt, Human
uucaaaguuucaaucuguauca

SEQ ID NO: 438409 - RNA, 22 nt, Human
aauggcaaaaggauaacaagga

SEQ ID NO: 438410 - RNA, 22 nt, Human
uugcuuuuuaauuaggaggcag

SEQ ID NO: 438411 - RNA, 22 nt, Human
ugagaagcucugaaacaguauc

SEQ ID NO: 438412 - RNA, 22 nt, Human
uacugcauguguuugaugaugg

SEQ ID NO: 438413 - RNA, 22 nt, Human
ugggggcagaggauucaggaau

SEQ ID NO: 438414 - RNA, 22 nt, Human
uuuuuauaugaaggauagugcg

SEQ ID NO: 438415 - RNA, 22 nt, Human
uucuagaaacacaugcaaacag

SEQ ID NO: 438416 - RNA, 22 nt, Human
caguacuugggaaugcugggga

SEQ ID NO: 438417 - RNA, 22 nt, Human
uggagcugauacagcuggcuuu

SEQ ID NO: 438418 - RNA, 20 nt, Human
ugcagcugcaggaggguggg

SEQ ID NO: 438419 - RNA, 17 nt, Human
gaacuuuuauuaaauuc

SEQ ID NO: 438420 - RNA, 22 nt, Human
aaggcugagacagcacaggucc

SEQ ID NO: 438421 - RNA, 22 nt, Human
gcuuugcauugugaugggaugc

SEQ ID NO: 438422 - RNA, 22 nt, Human
ugaggaagggugugacggcacc

SEQ ID NO: 438423 - RNA, 22 nt, Human
ucuaggaaccugacaucucuca

SEQ ID NO: 438424 - RNA, 22 nt, Human
cagcaaccuaaauccacuaacu

SEQ ID NO: 438425 - RNA, 22 nt, Human
ucucacuggguauaaaugagua

SEQ ID NO: 438426 - RNA, 22 nt, Human
cccaggcagcggggucuccuug

SEQ ID NO: 438427 - RNA, 20 nt, Human
caaggcagaccagagugagu

SEQ ID NO: 438428 - RNA, 22 nt, Human
ucagaauucugaccuuggguca

SEQ ID NO: 438429 - RNA, 22 nt, Human
cagaaugcaaauuuuauaauau

SEQ ID NO: 438430 - RNA, 22 nt, Human
ggcagaggagcuggaaacaugg

SEQ ID NO: 438431 - RNA, 22 nt, Human
gcaggagcccuggcauguucuu

SEQ ID NO: 438432 - RNA, 22 nt, Human
aagcccugggguugcacaaggc

SEQ ID NO: 438433 - RNA, 22 nt, Human
ucuggcagggguucugcacuug

SEQ ID NO: 438434 - RNA, 22 nt, Human
aacacuuuggaauagagauagg

SEQ ID NO: 438435 - RNA, 22 nt, Human
uccuggagccaaugugcugcug

SEQ ID NO: 438436 - RNA, 15 nt, Human
aaaguugauggcucu

SEQ ID NO: 438437 - RNA, 22 nt, Human
agcacagugcugggcacacagu

SEQ ID NO: 438438 - RNA, 22 nt, Human
uccuggacagauccccaucauc

SEQ ID NO: 438439 - RNA, 22 nt, Human
gaaggcaaggagggaagccacc

SEQ ID NO: 438440 - RNA, 22 nt, Human
cagcagcaacaauagcggucac

SEQ ID NO: 438441 - RNA, 22 nt, Human
acagcagguuauuguuauggca

SEQ ID NO: 438442 - RNA, 22 nt, Human
aaugcuuugagggaagaugaaa

SEQ ID NO: 438443 - RNA, 19 nt, Human
ugcuuugccuugauuagcu

SEQ ID NO: 438444 - RNA, 22 nt, Human
aucuaagauguauugagcacuu

SEQ ID NO: 438445 - RNA, 23 nt, Human
agcagcccaauggcaagcucugg

SEQ ID NO: 438446 - RNA, 22 nt, Human
gagggccacguucagggcucuc

SEQ ID NO: 438447 - RNA, 22 nt, Human
uauaauuuggggaaaguggugu

SEQ ID NO: 438448 - RNA, 22 nt, Human
gcucaggggaaugggcugccgu

SEQ ID NO: 438449 - RNA, 22 nt, Human
ccuccagaggguuucccaugaa

SEQ ID NO: 438450 - RNA, 22 nt, Human
ugggcagggucucuguuaucag

SEQ ID NO: 438451 - RNA, 22 nt, Human
agcugccugcuuaugagcucca

SEQ ID NO: 438452 - RNA, 20 nt, Human
agacaaugagugacagaguu

SEQ ID NO: 438453 - RNA, 22 nt, Human
ccuggagacgaggcuggaccau

SEQ ID NO: 438454 - RNA, 22 nt, Human
agcaggguuccaggaguugcag

SEQ ID NO: 438455 - RNA, 22 nt, Human
agcagcagauuauggucuacau

SEQ ID NO: 438456 - RNA, 22 nt, Human
ccaggccagcaggcacaccugc

SEQ ID NO: 438457 - RNA, 22 nt, Human
cccagcaucuccaggcauggcc

SEQ ID NO: 438458 - RNA, 22 nt, Human
ucuuugcaucccuuccauaguu

SEQ ID NO: 438459 - RNA, 21 nt, Human
agacuuugcuugcagagaguc

SEQ ID NO: 438460 - RNA, 22 nt, Human
uauaggaaacauacgugacuag

SEQ ID NO: 438461 - RNA, 22 nt, Human
aggcagcagggccacuggcuga

SEQ ID NO: 438462 - RNA, 22 nt, Human
uagugcauaccuaacauuuuug

SEQ ID NO: 438463 - RNA, 22 nt, Human
uuacacaguauccaagguucuu

SEQ ID NO: 438464 - RNA, 22 nt, Human
gccuggugcuaugagggccagc

SEQ ID NO: 438465 - RNA, 22 nt, Human
aaaauuauucauggcuuuugga

SEQ ID NO: 438466 - RNA, 22 nt, Human
gcuggccagggcugcucgcgga

SEQ ID NO: 438467 - RNA, 22 nt, Human
caucuaauaccucauuuaaucu

SEQ ID NO: 438468 - RNA, 22 nt, Human
cagugcuauuuggacacaggga

SEQ ID NO: 438469 - RNA, 21 nt, Human
ccaggaaggacugagcucccu

SEQ ID NO: 438470 - RNA, 22 nt, Human
aaugauaccgccaauauuacca

SEQ ID NO: 438471 - RNA, 22 nt, Human
caggcuaaagcuuugagcaugu

SEQ ID NO: 438472 - RNA, 22 nt, Human
cagcccuuuuuugguacaaccg

SEQ ID NO: 438473 - RNA, 21 nt, Human
uccuccuguagaggguccugg

SEQ ID NO: 438474 - RNA, 16 nt, Human
gaggcuggcagauguc

SEQ ID NO: 438475 - RNA, 22 nt, Human
ccagcagcccucuuccaagacu

SEQ ID NO: 438476 - RNA, 22 nt, Human
cuguggagaugcagaccaggcc

SEQ ID NO: 438477 - RNA, 22 nt, Human
cuccacagccccuccaguggca

SEQ ID NO: 438478 - RNA, 22 nt, Human
acaaugcaccuauuuuaaaacu

SEQ ID NO: 438479 - RNA, 22 nt, Human
uacauacuuuuucuugcaagca

SEQ ID NO: 438480 - RNA, 21 nt, Human
agaugaggauacugaggccua

SEQ ID NO: 438481 - RNA, 22 nt, Human
uggccuggcugcccugucugga

SEQ ID NO: 438482 - RNA, 22 nt, Human
cugcugggaaggucugcucagu

SEQ ID NO: 438483 - RNA, 22 nt, Human
ggcuuccagugaugccucuuug

SEQ ID NO: 438484 - RNA, 22 nt, Human
ggccccagcuucaaccccgugg

SEQ ID NO: 438485 - RNA, 22 nt, Human
auuugcaauuacucaugucauu

SEQ ID NO: 438486 - RNA, 22 nt, Human
ugcacaaaggcucccugcugag

SEQ ID NO: 438487 - RNA, 22 nt, Human
gcugucaguuuuacccacagac

SEQ ID NO: 438488 - RNA, 22 nt, Human
cucugcugcuuugccaguggaa

SEQ ID NO: 438489 - RNA, 22 nt, Human
agcugggcuggagcuccaagcg

SEQ ID NO: 438490 - RNA, 22 nt, Human
gagcagaacaggccggguggga

SEQ ID NO: 438491 - RNA, 22 nt, Human
uaugugcaaauuaauugcuaga

SEQ ID NO: 438492 - RNA, 22 nt, Human
gcagggcuguggacacuuuggu

SEQ ID NO: 438493 - RNA, 22 nt, Human
uggagcccagacacuggcauug

SEQ ID NO: 438494 - RNA, 22 nt, Human
uuugacaaccaggcagguaaga

SEQ ID NO: 438495 - RNA, 22 nt, Human
ugcuaaggacugggaggcaggg

SEQ ID NO: 438496 - RNA, 19 nt, Human
gcauccauggaggccgcuu

SEQ ID NO: 438497 - RNA, 22 nt, Human
gggaagaguaacuagcccaugu

SEQ ID NO: 438498 - RNA, 22 nt, Human
ccugcagguugcagaggcggaa

SEQ ID NO: 438499 - RNA, 22 nt, Human
aagcugccaccagcccagggca

SEQ ID NO: 438500 - RNA, 21 nt, Human
guucugaguuagaguuggcca

SEQ ID NO: 438501 - RNA, 19 nt, Human
gaggcaguagucaaagcuu

SEQ ID NO: 438502 - RNA, 22 nt, Human
uuggggcaccuccccagcauuu

SEQ ID NO: 438503 - RNA, 22 nt, Human
ccauguugucaaacuuagagua

SEQ ID NO: 438504 - RNA, 22 nt, Human
uuaaaugaggcugauguagauu

SEQ ID NO: 438505 - RNA, 22 nt, Human
uauggcaauauguaucaagauc

SEQ ID NO: 438506 - RNA, 22 nt, Human
uuucuuaugggguaguccuuua

SEQ ID NO: 438507 - RNA, 22 nt, Human
cucagcaagacccccaccgugu

SEQ ID NO: 438508 - RNA, 22 nt, Human
cugccccugccaggcagcuguc

SEQ ID NO: 438509 - RNA, 22 nt, Human
aggcauggcuuuaggcaggcgu

SEQ ID NO: 438510 - RNA, 22 nt, Human
aacuuuuagacuuggguauaaa

SEQ ID NO: 438511 - RNA, 22 nt, Human
gaagagagagcccugggguccg

SEQ ID NO: 438512 - RNA, 22 nt, Human
cagaaguaagauuacugugaga

SEQ ID NO: 438513 - RNA, 22 nt, Human
gugcucuguguauuaggauguc

SEQ ID NO: 438514 - RNA, 22 nt, Human
gagacauucuuaggaacaaugu

SEQ ID NO: 438515 - RNA, 22 nt, Human
agcucccagcagagcuggccac

SEQ ID NO: 438516 - RNA, 22 nt, Human
ggaggugggauuaggaccuaaa

SEQ ID NO: 438517 - RNA, 22 nt, Human
agagggccauaggugcauaguu

SEQ ID NO: 438518 - RNA, 22 nt, Human
ugcugagacaguggauaggggc

SEQ ID NO: 438519 - RNA, 22 nt, Human
gaaguagauucguugcaucuug

SEQ ID NO: 438520 - RNA, 22 nt, Human
uggaaauacuugccauaaaacu

SEQ ID NO: 438521 - RNA, 22 nt, Human
aagagguucuccuuggaguggg

SEQ ID NO: 438522 - RNA, 20 nt, Human
uccaguuuuggagacauucu

SEQ ID NO: 438523 - RNA, 22 nt, Human
agaggaaacauagguuuuuaaa

SEQ ID NO: 438524 - RNA, 22 nt, Human
cugugugucauuugucaauccu

SEQ ID NO: 438525 - RNA, 22 nt, Human
cuucccagacgggguggcagcc

SEQ ID NO: 438526 - RNA, 21 nt, Human
aggcucccagaaaugggcauc

SEQ ID NO: 438527 - RNA, 22 nt, Human
acccagagcugggcuuggcaaa

SEQ ID NO: 438528 - RNA, 22 nt, Human
aaaaucacaagcuugggucacu

SEQ ID NO: 438529 - RNA, 23 nt, Human
ccaggcaguagcuauugaaguga

SEQ ID NO: 438530 - RNA, 22 nt, Human
cagggcucagggacugcagaaa

SEQ ID NO: 438531 - RNA, 22 nt, Human
ucccuagucgcaucuguggaga

SEQ ID NO: 438532 - RNA, 22 nt, Human
aacugcacuguucuuuucuaca

SEQ ID NO: 438533 - RNA, 22 nt, Human
aagcagggugucuugacccaug

SEQ ID NO: 438534 - RNA, 22 nt, Human
gagcugagaagcagcgcuugau

SEQ ID NO: 438535 - RNA, 22 nt, Human
cagaggccucacuuccagccag

SEQ ID NO: 438536 - RNA, 22 nt, Human
aaggcaugauguaaucaaugau

SEQ ID NO: 438537 - RNA, 23 nt, Human
cagagcuggcucagagcugccug

SEQ ID NO: 438538 - RNA, 22 nt, Human
ggagcugucuguagggcacagg

SEQ ID NO: 438539 - RNA, 22 nt, Human
agacacaguacuugcccucaug

SEQ ID NO: 438540 - RNA, 22 nt, Human
agggccugugaauucucccugc

SEQ ID NO: 438541 - RNA, 22 nt, Human
agucaauaaaagcuuuagauuc

SEQ ID NO: 438542 - RNA, 22 nt, Human
auuacaaucgagagaaacaaau

SEQ ID NO: 438543 - RNA, 22 nt, Human
aagcaaaagguuacacuucugg

SEQ ID NO: 438544 - RNA, 22 nt, Human
auauccaagaaacaauuaauuc

SEQ ID NO: 438545 - RNA, 21 nt, Human
ggcaacagauauuuugcuuag

SEQ ID NO: 438546 - RNA, 22 nt, Human
ugcugccaccccucaccagagc

SEQ ID NO: 438547 - RNA, 22 nt, Human
acaggcagcgucauugcugcuc

SEQ ID NO: 438548 - RNA, 22 nt, Human
augcacagacccaaaggccauc

SEQ ID NO: 438549 - RNA, 22 nt, Human
aagcacauuaaggaacauugaa

SEQ ID NO: 438550 - RNA, 22 nt, Human
aagcccuguaaauugcccuuaa

SEQ ID NO: 438551 - RNA, 22 nt, Human
gcagaggaucaggcucuggaaa

SEQ ID NO: 438552 - RNA, 22 nt, Human
gugcuccucacaguguggcccu

SEQ ID NO: 438553 - RNA, 22 nt, Human
ccagcucugcuugcccagucag

SEQ ID NO: 438554 - RNA, 22 nt, Human
cuuuggcugacagguuucuggu

SEQ ID NO: 438555 - RNA, 20 nt, Human
uaaggcaucaaguuugggua

SEQ ID NO: 438556 - RNA, 22 nt, Human
agggcacaagacucugagcccc

SEQ ID NO: 438557 - RNA, 22 nt, Human
gcagcacugauccuaaacuuag

SEQ ID NO: 438558 - RNA, 22 nt, Human
ucaaacuggggaacuuauuuau

SEQ ID NO: 438559 - RNA, 22 nt, Human
ugaauacuauuucauaaugugg

SEQ ID NO: 438560 - RNA, 22 nt, Human
cagagcaguccuugucaaucag

SEQ ID NO: 438561 - RNA, 22 nt, Human
uuuaacccaaauaaccacagga

SEQ ID NO: 438562 - RNA, 22 nt, Human
uuuauccauucaccaguugaac

SEQ ID NO: 438563 - RNA, 22 nt, Human
caguggcgugaucucugcucac

SEQ ID NO: 438564 - RNA, 22 nt, Human
acaggacaaaaaucuggauggc

SEQ ID NO: 438565 - RNA, 22 nt, Human
agacaaagacagcaucucaggu

SEQ ID NO: 438566 - RNA, 22 nt, Human
gccccagcccuguggaccaugg

SEQ ID NO: 438567 - RNA, 22 nt, Human
ucccuguauaucacaagggcua

SEQ ID NO: 438568 - RNA, 22 nt, Human
auuauaggcuugagccaccgug

SEQ ID NO: 438569 - RNA, 22 nt, Human
ucugggagccugaaagugaaug

SEQ ID NO: 438570 - RNA, 22 nt, Human
ugcccuggagucaguggcuauu

SEQ ID NO: 438571 - RNA, 22 nt, Human
ccuccugguccagcaucucuuu

SEQ ID NO: 438572 - RNA, 22 nt, Human
aggcgcugcgcuggggccagaa

SEQ ID NO: 438573 - RNA, 21 nt, Human
aaggcuggagaugcaggucug

SEQ ID NO: 438574 - RNA, 22 nt, Human
aggggccucgcaggaccgcucc

SEQ ID NO: 438575 - RNA, 22 nt, Human
cuuucucuguguuucacaugcu

SEQ ID NO: 438576 - RNA, 22 nt, Human
cagagcuguccaaacccugaca

SEQ ID NO: 438577 - RNA, 22 nt, Human
uucaaguaaaucacuuuuuguc

SEQ ID NO: 438578 - RNA, 22 nt, Human
uguaugaauauguauuuucaua

SEQ ID NO: 438579 - RNA, 22 nt, Human
uuccugagggccccagaggagg

SEQ ID NO: 438580 - RNA, 22 nt, Human
uggccagcagaguucacucucu

SEQ ID NO: 438581 - RNA, 22 nt, Human
gacacagaugaucaggugugga

SEQ ID NO: 438582 - RNA, 22 nt, Human
uccagccaagggagguuacuag

SEQ ID NO: 438583 - RNA, 22 nt, Human
uuuucuaacaucuaguaauuug

SEQ ID NO: 438584 - RNA, 22 nt, Human
ggaggccaucagggagggcauu

SEQ ID NO: 438585 - RNA, 22 nt, Human
auccccacugcugcugguguag

SEQ ID NO: 438586 - RNA, 22 nt, Human
cagggaagaauaguuagcaaag

SEQ ID NO: 438587 - RNA, 21 nt, Human
agccugggaggcggagguugc

SEQ ID NO: 438588 - RNA, 22 nt, Human
ucacugguuagaagaaguaagc

SEQ ID NO: 438589 - RNA, 22 nt, Human
cccaggagagaggccaguuggc

SEQ ID NO: 438590 - RNA, 22 nt, Human
uuucagagucagcuccucucua

SEQ ID NO: 438591 - RNA, 22 nt, Human
cucacugcaaguuccaccuacc

SEQ ID NO: 438592 - RNA, 22 nt, Human
ucaggcugaaggaggccuaucu

SEQ ID NO: 438593 - RNA, 22 nt, Human
gcucucacuuuagguuggaccg

SEQ ID NO: 438594 - RNA, 22 nt, Human
cacuguggugugagggcugaug

SEQ ID NO: 438595 - RNA, 22 nt, Human
cuccccacacacuaggccugau

SEQ ID NO: 438596 - RNA, 22 nt, Human
auuuagcaagcaggcaaauuca

SEQ ID NO: 438597 - RNA, 20 nt, Human
aggcacaguuccuaguuggg

SEQ ID NO: 438598 - RNA, 22 nt, Human
aauuagaagggaguuauugaua

SEQ ID NO: 438599 - RNA, 20 nt, Human
gcugcuuucaaaugacacgu

SEQ ID NO: 438600 - RNA, 22 nt, Human
cccacaggcaggugcaugggcu

SEQ ID NO: 438601 - RNA, 22 nt, Human
cucagggacggcaucucauuuc

SEQ ID NO: 438602 - RNA, 22 nt, Human
cugccucagcguuguggcccua

SEQ ID NO: 438603 - RNA, 22 nt, Human
uaggcuggggguaggaauugag

SEQ ID NO: 438604 - RNA, 22 nt, Human
guuacaauguccuuacaugaaa

SEQ ID NO: 438605 - RNA, 22 nt, Human
cugggccugggaggccaggucu

SEQ ID NO: 438606 - RNA, 22 nt, Human
ugguacaauggcaucuaucuau

SEQ ID NO: 438607 - RNA, 22 nt, Human
aauugcccauauuugagaauga

SEQ ID NO: 438608 - RNA, 22 nt, Human
uggccuggugcucaggcaguag

SEQ ID NO: 438609 - RNA, 22 nt, Human
uggccagcccucuucccacacu

SEQ ID NO: 438610 - RNA, 22 nt, Human
uacaggaagcacucaagaaaug

SEQ ID NO: 438611 - RNA, 22 nt, Human
guuuguuuguagggaagccgug

SEQ ID NO: 438612 - RNA, 22 nt, Human
uucuuguuccaugaaagacaga

SEQ ID NO: 438613 - RNA, 19 nt, Human
uccugaagauuuccucagc

SEQ ID NO: 438614 - RNA, 16 nt, Human
caccaguccuuccugc

SEQ ID NO: 438615 - RNA, 22 nt, Human
ucaguauuccuggaaauacaag

SEQ ID NO: 438616 - RNA, 22 nt, Human
ucgcucaggcuugaguguagug

SEQ ID NO: 438617 - RNA, 22 nt, Human
cagagcugauuggauccagaga

SEQ ID NO: 438618 - RNA, 22 nt, Human
gagagcuguccggcugagcagc

SEQ ID NO: 438619 - RNA, 22 nt, Human
ggcacagcucaggucccagcuc

SEQ ID NO: 438620 - RNA, 17 nt, Human
gccuuccuuccuccaca

SEQ ID NO: 438621 - RNA, 22 nt, Human
augcauaugcauggacacucag

SEQ ID NO: 438622 - RNA, 22 nt, Human
gaauuucagaucagagaccauu

SEQ ID NO: 438623 - RNA, 22 nt, Human
agcccugcaggaugagggaggu

SEQ ID NO: 438624 - RNA, 22 nt, Human
agggcagagacaugcuuccuga

SEQ ID NO: 438625 - RNA, 22 nt, Human
ucugcccagggacccacaggga

SEQ ID NO: 438626 - RNA, 22 nt, Human
cuuugcaauagaggcacacaug

SEQ ID NO: 438627 - RNA, 22 nt, Human
gagcuaagcuauguuaugcagc

SEQ ID NO: 438628 - RNA, 22 nt, Human
cguguggucccggcaaggcaag

SEQ ID NO: 438629 - RNA, 22 nt, Human
gcaggcugauagaggauuccau

SEQ ID NO: 438630 - RNA, 22 nt, Human
acacugaauauacaaugaauau

SEQ ID NO: 438631 - RNA, 22 nt, Human
aacauaauguggccaaagucac

SEQ ID NO: 438632 - RNA, 21 nt, Human
cuuugcauacagaugccaauu

SEQ ID NO: 438633 - RNA, 22 nt, Human
ucuuggcuccucacagcaucag

SEQ ID NO: 438634 - RNA, 22 nt, Human
aaagguugaauucaggauccac

SEQ ID NO: 438635 - RNA, 22 nt, Human
uuuggcggacugagaacgcggg

SEQ ID NO: 438636 - RNA, 22 nt, Human
agcuccugcacccagccuugag

SEQ ID NO: 438637 - RNA, 22 nt, Human
ugagaaaauuacuauaauuguc

SEQ ID NO: 438638 - RNA, 22 nt, Human
gguacaaaguuagauuuaacuu

SEQ ID NO: 438639 - RNA, 22 nt, Human
cacugguacacugaauggcguu

SEQ ID NO: 438640 - RNA, 22 nt, Human
cugggcugcaggaguggggcaa

SEQ ID NO: 438641 - RNA, 22 nt, Human
uuaauuaauuaguuaagcaugu

SEQ ID NO: 438642 - RNA, 22 nt, Human
agcuguggaagacugucagggu

SEQ ID NO: 438643 - RNA, 22 nt, Human
auuacaauaagguuuauuugua

SEQ ID NO: 438644 - RNA, 22 nt, Human
ugccugucagggggagugggaa

SEQ ID NO: 438645 - RNA, 22 nt, Human
ugggcucuagacuuuagugugg

SEQ ID NO: 438646 - RNA, 22 nt, Human
uggagcuggaauuugagcugga

SEQ ID NO: 438647 - RNA, 22 nt, Human
aggcuccuaucgcuuucagcaa

SEQ ID NO: 438648 - RNA, 22 nt, Human
acaaauucuuucugccuauugg

SEQ ID NO: 438649 - RNA, 22 nt, Human
cuucaaaagccagaagccugcg

SEQ ID NO: 438650 - RNA, 22 nt, Human
ugagccagcaggccuccagugg

SEQ ID NO: 438651 - RNA, 22 nt, Human
gcuuugcagacaaaauuccagc

SEQ ID NO: 438652 - RNA, 22 nt, Human
cauuaaauaucaaccuagacua

SEQ ID NO: 438653 - RNA, 22 nt, Human
ugaggccaggaucccaggcucu

SEQ ID NO: 438654 - RNA, 22 nt, Human
agcucccugagaugccacagca

SEQ ID NO: 438655 - RNA, 22 nt, Human
uacagcagagugggaugcaucu

SEQ ID NO: 438656 - RNA, 22 nt, Human
guccuggguccccgcaggucag

SEQ ID NO: 438657 - RNA, 22 nt, Human
gauauuuucgcagggagaauuc

SEQ ID NO: 438658 - RNA, 22 nt, Human
aaaaugaauaaguuaacccagg

SEQ ID NO: 438659 - RNA, 22 nt, Human
acugcauucuuuaucccacaac

SEQ ID NO: 438660 - RNA, 22 nt, Human
aguuuaacuuuggaaaacuaua

SEQ ID NO: 438661 - RNA, 22 nt, Human
cagacccucgggugaguuggcc

SEQ ID NO: 438662 - RNA, 22 nt, Human
cuucuugauugcuuucaaacca

SEQ ID NO: 438663 - RNA, 22 nt, Human
uauugcagaauucgcuggaaca

SEQ ID NO: 438664 - RNA, 22 nt, Human
uccucagcaggucuguguacca

SEQ ID NO: 438665 - RNA, 22 nt, Human
uucguugcuuuaagccacuacg

SEQ ID NO: 438666 - RNA, 22 nt, Human
gguuccuguguacuguggcuua

SEQ ID NO: 438667 - RNA, 22 nt, Human
aggggauggagcuggaaggcag

SEQ ID NO: 438668 - RNA, 22 nt, Human
caguggcaugguugacugcagu

SEQ ID NO: 438669 - RNA, 22 nt, Human
aggccuuccucggagacaggga

SEQ ID NO: 438670 - RNA, 22 nt, Human
ccuggaaaacaugggaaucaca

SEQ ID NO: 438671 - RNA, 22 nt, Human
uccuccucuaucagacagugcc

SEQ ID NO: 438672 - RNA, 21 nt, Human
aaguaaaucagagaaauaacc

SEQ ID NO: 438673 - RNA, 22 nt, Human
ucagccuggcaggauggccugg

SEQ ID NO: 438674 - RNA, 22 nt, Human
augcuuuauacaaaacacuuaa

SEQ ID NO: 438675 - RNA, 18 nt, Human
agcaguagcgccaggugc

SEQ ID NO: 438676 - RNA, 22 nt, Human
cagaggaggccaccgcauaggc

SEQ ID NO: 438677 - RNA, 22 nt, Human
gcuggccauauauuuugcuguu

SEQ ID NO: 438678 - RNA, 22 nt, Human
ccucuggcaacuucacagccca

SEQ ID NO: 438679 - RNA, 23 nt, Human
ggcuggcccggggcugcuccuga

SEQ ID NO: 438680 - RNA, 22 nt, Human
aaguccuguuccucauacuucc

SEQ ID NO: 438681 - RNA, 19 nt, Human
aaguauucuuuguuagcag

SEQ ID NO: 438682 - RNA, 22 nt, Human
uuacaguagauuuugaaugugg

SEQ ID NO: 438683 - RNA, 21 nt, Human
ugcucacagaugugcucagug

SEQ ID NO: 438684 - RNA, 22 nt, Human
guccacauaggaacccagcuuc

SEQ ID NO: 438685 - RNA, 22 nt, Human
ugaaggcaaaacauguuacacc

SEQ ID NO: 438686 - RNA, 22 nt, Human
acuauuuacucaaaugagguug

SEQ ID NO: 438687 - RNA, 22 nt, Human
uagaucugauacaauucaucug

SEQ ID NO: 438688 - RNA, 18 nt, Human
acuuugcaggcucccauu

SEQ ID NO: 438689 - RNA, 22 nt, Human
auugaguaguaggaaaauaacu

SEQ ID NO: 438690 - RNA, 22 nt, Human
uucaacauuugaaaugaaugaa

SEQ ID NO: 438691 - RNA, 22 nt, Human
guccugguggagucucugggga

SEQ ID NO: 438692 - RNA, 22 nt, Human
ccagccuggggaggcagcuucu

SEQ ID NO: 438693 - RNA, 22 nt, Human
agcaggcuaggaaccucacugc

SEQ ID NO: 438694 - RNA, 22 nt, Human
caguggguggcuaaguggcuga

SEQ ID NO: 438695 - RNA, 22 nt, Human
uacaaaggagaauaggguagca

SEQ ID NO: 438696 - RNA, 23 nt, Human
ugggccuggccucccaguccagc

SEQ ID NO: 438697 - RNA, 22 nt, Human
ucagagacuggucugcagaugc

SEQ ID NO: 438698 - RNA, 22 nt, Human
ucuaaagauuuggauucauuug

SEQ ID NO: 438699 - RNA, 22 nt, Human
uucugaauuucuguguaucuua

SEQ ID NO: 438700 - RNA, 22 nt, Human
ggcaguggguuccccaaggcac

SEQ ID NO: 438701 - RNA, 22 nt, Human
aaguugauugcuucaaauuucu

SEQ ID NO: 438702 - RNA, 22 nt, Human
caggaagagaacauggaggcug

SEQ ID NO: 438703 - RNA, 22 nt, Human
cagacaaagcggaaacuguuua

SEQ ID NO: 438704 - RNA, 22 nt, Human
agggcacaggcuggcaggaucu

SEQ ID NO: 438705 - RNA, 22 nt, Human
uuaauaaacaggugcagcugaa

SEQ ID NO: 438706 - RNA, 22 nt, Human
uugauccaguugaaagugauga

SEQ ID NO: 438707 - RNA, 22 nt, Human
uuuaucaguagcaaaguuuuaa

SEQ ID NO: 438708 - RNA, 23 nt, Human
aggcuccacucccugggaugugg

SEQ ID NO: 438709 - RNA, 22 nt, Human
ggccuccucacccugcucaggc

SEQ ID NO: 438710 - RNA, 22 nt, Human
gggcacagucugcagcccccca

SEQ ID NO: 438711 - RNA, 22 nt, Human
cuuugcaguuagccuaggauug

SEQ ID NO: 438712 - RNA, 22 nt, Human
gcccagagagaugaagugaugg

SEQ ID NO: 438713 - RNA, 22 nt, Human
gagugcagaugccagccccagu

SEQ ID NO: 438714 - RNA, 22 nt, Human
acagggcagaaauguugcaucu

SEQ ID NO: 438715 - RNA, 22 nt, Human
acaugaaacccagccguggucc

SEQ ID NO: 438716 - RNA, 22 nt, Human
aagaaagcauuagacaggcauu

SEQ ID NO: 438717 - RNA, 22 nt, Human
cagaagaauggugucugagcuc

SEQ ID NO: 438718 - RNA, 22 nt, Human
ugaggaaggaauugagguuuua

SEQ ID NO: 438719 - RNA, 22 nt, Human
acccagagcccuuagcacagac

SEQ ID NO: 438720 - RNA, 22 nt, Human
augccuguaaucccagugcuuu

SEQ ID NO: 438721 - RNA, 22 nt, Human
cugcccugugcacaggaaacug

SEQ ID NO: 438722 - RNA, 22 nt, Human
uuuuuauaccaccucucacuua

SEQ ID NO: 438723 - RNA, 18 nt, Human
agcuggugaaauccagua

SEQ ID NO: 438724 - RNA, 23 nt, Human
ggagccuccggugugugagaggc

SEQ ID NO: 438725 - RNA, 22 nt, Human
gacaggaggcagagcucaggug

SEQ ID NO: 438726 - RNA, 22 nt, Human
agguccugucuuaucucuguaa

SEQ ID NO: 438727 - RNA, 21 nt, Human
cuugacauagccugucagcuu

SEQ ID NO: 438728 - RNA, 22 nt, Human
ggcucacgcaauuaucccggcc

SEQ ID NO: 438729 - RNA, 22 nt, Human
cucugagcugaaacaugagcau

SEQ ID NO: 438730 - RNA, 22 nt, Human
gcaggcaguuugcuuuucccuc

SEQ ID NO: 438731 - RNA, 22 nt, Human
aggccagcagacgugggacuga

SEQ ID NO: 438732 - RNA, 22 nt, Human
agcauucuguggucuucuaugg

SEQ ID NO: 438733 - RNA, 22 nt, Human
acugucucucuagcaguucagg

SEQ ID NO: 438734 - RNA, 22 nt, Human
gcaagcaggguuccuuagggca

SEQ ID NO: 438735 - RNA, 22 nt, Human
uguauucucucaauauuucaua

SEQ ID NO: 438736 - RNA, 22 nt, Human
ggccuggccuccagaugugggc

SEQ ID NO: 438737 - RNA, 22 nt, Human
aacagcaagggcggggucaaga

SEQ ID NO: 438738 - RNA, 22 nt, Human
cuguugcagaggggcggagagg

SEQ ID NO: 438739 - RNA, 23 nt, Human
agcagcuggggugcucuuuuguc

SEQ ID NO: 438740 - RNA, 22 nt, Human
acaaguucauggugcuuuccug

SEQ ID NO: 438741 - RNA, 22 nt, Human
caccagcuacagacuacugugu

SEQ ID NO: 438742 - RNA, 22 nt, Human
gcccagagggaagaggugucau

SEQ ID NO: 438743 - RNA, 22 nt, Human
ggaaaagacagaauucuagaau

SEQ ID NO: 438744 - RNA, 22 nt, Human
ucuggccaggauggcaagacca

SEQ ID NO: 438745 - RNA, 22 nt, Human
gccuccaccgaacgcucucuug

SEQ ID NO: 438746 - RNA, 22 nt, Human
cugggagagaagcgaagcuggg

SEQ ID NO: 438747 - RNA, 21 nt, Human
caucacauuacucaaaguccu

SEQ ID NO: 438748 - RNA, 22 nt, Human
ugcccuggcgcugucucuaugg

SEQ ID NO: 438749 - RNA, 23 nt, Human
agggcccaagccuggacagcagg

SEQ ID NO: 438750 - RNA, 22 nt, Human
uacagaaaucacaucgcuuuga

SEQ ID NO: 438751 - RNA, 20 nt, Human
agugucuggugcagggccuc

SEQ ID NO: 438752 - RNA, 18 nt, Human
gcugagguggugucagag

SEQ ID NO: 438753 - RNA, 22 nt, Human
augcauaucuccuaucuccuca

SEQ ID NO: 438754 - RNA, 22 nt, Human
uaagcacuuuauaugcuuuauc

SEQ ID NO: 438755 - RNA, 22 nt, Human
ucagcauuccugaagacaagca

SEQ ID NO: 438756 - RNA, 22 nt, Human
gagcugaggcucaggcuggcgu

SEQ ID NO: 438757 - RNA, 19 nt, Human
acaggcagaauugggugug

SEQ ID NO: 438758 - RNA, 22 nt, Human
agagggcuggacgcagguugga

SEQ ID NO: 438759 - RNA, 22 nt, Human
cuggugugauugagcccaggug

SEQ ID NO: 438760 - RNA, 22 nt, Human
cuuugacuuuguccucaggaaa

SEQ ID NO: 438761 - RNA, 22 nt, Human
caggcacuggggaugcugggau

SEQ ID NO: 438762 - RNA, 18 nt, Human
agaagcagguaaaauucu

SEQ ID NO: 438763 - RNA, 18 nt, Human
cagaugagaugcaaucuc

SEQ ID NO: 438764 - RNA, 22 nt, Human
acuccagggcugaacgaggccc

SEQ ID NO: 438765 - RNA, 22 nt, Human
ggccaaggaugguggcucuggu

SEQ ID NO: 438766 - RNA, 22 nt, Human
aaaaugaagcaaaggcauucag

SEQ ID NO: 438767 - RNA, 22 nt, Human
aaacauucacauuugcuaguaa

SEQ ID NO: 438768 - RNA, 22 nt, Human
augcacaggugcugaugcacgc

SEQ ID NO: 438769 - RNA, 22 nt, Human
gguccuugggucuccuguguuu

SEQ ID NO: 438770 - RNA, 22 nt, Human
acccaggagcaggcugggcagu

SEQ ID NO: 438771 - RNA, 22 nt, Human
uuugcagcuaagcacaguaauu

SEQ ID NO: 438772 - RNA, 22 nt, Human
caggguagacaguaggugucug

SEQ ID NO: 438773 - RNA, 22 nt, Human
ucucccagugucuggcagucag

SEQ ID NO: 438774 - RNA, 22 nt, Human
uaaaggaggaguuaaugagacu

SEQ ID NO: 438775 - RNA, 22 nt, Human
ggcaguuuggcaggauggaggg

SEQ ID NO: 438776 - RNA, 22 nt, Human
gucagcgugcucagccuauuau

SEQ ID NO: 438777 - RNA, 20 nt, Human
uuucaaaggcaccuaugaag

SEQ ID NO: 438778 - RNA, 22 nt, Human
cagcugguuggaagggagcuga

SEQ ID NO: 438779 - RNA, 22 nt, Human
gcucccugccuacacggaccuu

SEQ ID NO: 438780 - RNA, 22 nt, Human
aggagccaaauuacuagcucug

SEQ ID NO: 438781 - RNA, 22 nt, Human
acacagagccagggaauacagu

SEQ ID NO: 438782 - RNA, 22 nt, Human
gcaaauucuuaacuggacugug

SEQ ID NO: 438783 - RNA, 22 nt, Human
uggcucugcaccucaguguacc

SEQ ID NO: 438784 - RNA, 22 nt, Human
uuugguauugcacacugucuuc

SEQ ID NO: 438785 - RNA, 22 nt, Human
agccacagcuccuugguggaga

SEQ ID NO: 438786 - RNA, 18 nt, Human
uccucucuuuccccaggg

SEQ ID NO: 438787 - RNA, 22 nt, Human
gaugaaaaauugcugugucaua

SEQ ID NO: 438788 - RNA, 22 nt, Human
agguucaggcugcacaccugag

SEQ ID NO: 438789 - RNA, 22 nt, Human
acaggcuggugguccuggccau

SEQ ID NO: 438790 - RNA, 22 nt, Human
ugagaacauugggaaagcuaug

SEQ ID NO: 438791 - RNA, 22 nt, Human
gccuccuguuaugccaugugcc

SEQ ID NO: 438792 - RNA, 22 nt, Human
cagcuguucggggcuggcaugu

SEQ ID NO: 438793 - RNA, 22 nt, Human
agaaucucuacucaaguacuug

SEQ ID NO: 438794 - RNA, 22 nt, Human
cacauuuaaaaaauccacgauc

SEQ ID NO: 438795 - RNA, 22 nt, Human
caaacauuuuaaauaagggaua

SEQ ID NO: 438796 - RNA, 22 nt, Human
agugacuucuccuaaugucaua

SEQ ID NO: 438797 - RNA, 21 nt, Human
gccacugcacuccagccuggg

SEQ ID NO: 438798 - RNA, 22 nt, Human
gggcuggcaggaccugggcuga

SEQ ID NO: 438799 - RNA, 22 nt, Human
cgcaacagagcagguuugauga

SEQ ID NO: 438800 - RNA, 22 nt, Human
aaggcaauaguauuaaacugga

SEQ ID NO: 438801 - RNA, 22 nt, Human
uggaugaguucaaugaggcaga

SEQ ID NO: 438802 - RNA, 22 nt, Human
cugguucauauaggcaaguuua

SEQ ID NO: 438803 - RNA, 22 nt, Human
cuggcucccgaagcccucagug

SEQ ID NO: 438804 - RNA, 22 nt, Human
gugggccacaucccagggcucu

SEQ ID NO: 438805 - RNA, 22 nt, Human
gacaggcaugcuuucaggacua

SEQ ID NO: 438806 - RNA, 22 nt, Human
aaguugauagcauguuaagcuc

SEQ ID NO: 438807 - RNA, 22 nt, Human
gcugcaggggggucuggacuug

SEQ ID NO: 438808 - RNA, 22 nt, Human
ugaggcaguugagcuuccugag

SEQ ID NO: 438809 - RNA, 22 nt, Human
ggcagggcaggaaagucaggaa

SEQ ID NO: 438810 - RNA, 22 nt, Human
ggaagagagguucagcccuaag

SEQ ID NO: 438811 - RNA, 22 nt, Human
cagcaggcggcccgcgggcccg

SEQ ID NO: 438812 - RNA, 22 nt, Human
cagcagugaugugugaggguuc

SEQ ID NO: 438813 - RNA, 22 nt, Human
ucuagagacuauaauguguccu

SEQ ID NO: 438814 - RNA, 22 nt, Human
uuugacaaauauuuauuggcac

SEQ ID NO: 438815 - RNA, 22 nt, Human
cucagcaacccacacacggucu

SEQ ID NO: 438816 - RNA, 22 nt, Human
uuugaacaggaguaucuauagu

SEQ ID NO: 438817 - RNA, 22 nt, Human
uuuauuguugggucuuaagcug

SEQ ID NO: 438818 - RNA, 22 nt, Human
gcugucccuuucacaagguuuu

SEQ ID NO: 438819 - RNA, 22 nt, Human
cucagcaacagcgacuuaaggg

SEQ ID NO: 438820 - RNA, 20 nt, Human
ugacaaaugaucugauuuuc

SEQ ID NO: 438821 - RNA, 22 nt, Human
uuggccagaaucuuccuaguga

SEQ ID NO: 438822 - RNA, 22 nt, Human
ccugggcaaaugccagagacaa

SEQ ID NO: 438823 - RNA, 22 nt, Human
ggagcugcauuuagggagccuu

SEQ ID NO: 438824 - RNA, 22 nt, Human
agauuuuaguguagaggacuug

SEQ ID NO: 438825 - RNA, 22 nt, Human
ggauguagugcaaggagugaau

SEQ ID NO: 438826 - RNA, 22 nt, Human
agucaacaccugguucuauuac

SEQ ID NO: 438827 - RNA, 22 nt, Human
ccagagaagguggagcuugugu

SEQ ID NO: 438828 - RNA, 22 nt, Human
aacagucuuccuacggccauua

SEQ ID NO: 438829 - RNA, 22 nt, Human
uguauuuugugaggaucacucu

SEQ ID NO: 438830 - RNA, 22 nt, Human
ucuccggguggcggcgaaggga

SEQ ID NO: 438831 - RNA, 22 nt, Human
aaggcccuaauagagcacauau

SEQ ID NO: 438832 - RNA, 22 nt, Human
cacaggcugcccgcagcuggga

SEQ ID NO: 438833 - RNA, 22 nt, Human
ccuggcaggcuggggacagugc

SEQ ID NO: 438834 - RNA, 22 nt, Human
cauguacaaggaugcucagagu

SEQ ID NO: 438835 - RNA, 22 nt, Human
caggaaugggugacagucagcu

SEQ ID NO: 438836 - RNA, 22 nt, Human
ucaagcuacaaccauauucauu

SEQ ID NO: 438837 - RNA, 22 nt, Human
ggcagcaggcgacuucccuauu

SEQ ID NO: 438838 - RNA, 22 nt, Human
uccuucuuugacaaguggcaga

SEQ ID NO: 438839 - RNA, 22 nt, Human
ucaggaaggcaaauugcaugau

SEQ ID NO: 438840 - RNA, 22 nt, Human
agaagcaggccucacagaucug

SEQ ID NO: 438841 - RNA, 22 nt, Human
uugcaaagugucaugcaaagua

SEQ ID NO: 438842 - RNA, 22 nt, Human
ugggcagaggcucugaagucca

SEQ ID NO: 438843 - RNA, 22 nt, Human
agagcacacugacgucagucug

SEQ ID NO: 438844 - RNA, 22 nt, Human
ccaggccaaauucagucagcag

SEQ ID NO: 438845 - RNA, 22 nt, Human
caauucauguuaaacagaagca

SEQ ID NO: 438846 - RNA, 22 nt, Human
gcaaaaguacagccggauuucu

SEQ ID NO: 438847 - RNA, 22 nt, Human
uuuuaucaaucauuaagacauu

SEQ ID NO: 438848 - RNA, 22 nt, Human
agcagaaccacagcacuguuga

SEQ ID NO: 438849 - RNA, 22 nt, Human
agacauguccacaaagcauuca

SEQ ID NO: 438850 - RNA, 22 nt, Human
uuuacacaaaauguuaguagau

SEQ ID NO: 438851 - RNA, 22 nt, Human
agugacauuugcaccagcugcu

SEQ ID NO: 438852 - RNA, 22 nt, Human
gagcuaagaacugugccaggug

SEQ ID NO: 438853 - RNA, 22 nt, Human
acugcagcaaagcccgugucuu

SEQ ID NO: 438854 - RNA, 23 nt, Human
acagcaagaggaccagaugugag

SEQ ID NO: 438855 - RNA, 22 nt, Human
aauguauaauauuuaaugcuuu

SEQ ID NO: 438856 - RNA, 22 nt, Human
aacaggcaaacugugggauccc

SEQ ID NO: 438857 - RNA, 22 nt, Human
cugcccugugguuguggguucu

SEQ ID NO: 438858 - RNA, 22 nt, Human
uauucagauuacuugugccugc

SEQ ID NO: 438859 - RNA, 22 nt, Human
ucagagaacacagaggugaugu

SEQ ID NO: 438860 - RNA, 22 nt, Human
uugcauauauuucuaaggaggu

SEQ ID NO: 438861 - RNA, 22 nt, Human
augcauauguacccauguucug

SEQ ID NO: 438862 - RNA, 19 nt, Human
ugcaggaggacugagcaga

SEQ ID NO: 438863 - RNA, 22 nt, Human
gacagcaaagcagagccaaggc

SEQ ID NO: 438864 - RNA, 22 nt, Human
cuccaagggcucccagacgucu

SEQ ID NO: 438865 - RNA, 22 nt, Human
gagaggcagaggccugaaaccg

SEQ ID NO: 438866 - RNA, 22 nt, Human
acaggccugggguacaaguucu

SEQ ID NO: 438867 - RNA, 22 nt, Human
gccuggguuccaugaucuccag

SEQ ID NO: 438868 - RNA, 22 nt, Human
cacuggaaccauccacauagug

SEQ ID NO: 438869 - RNA, 18 nt, Human
ggacacagauagguacag

SEQ ID NO: 438870 - RNA, 22 nt, Human
cuggcccagagagcagagcuua

SEQ ID NO: 438871 - RNA, 22 nt, Human
agcucccaauugacuugaacua

SEQ ID NO: 438872 - RNA, 21 nt, Human
ccuggcugcacaguugcuggu

SEQ ID NO: 438873 - RNA, 22 nt, Human
uuuucauuagaaugacugagaa

SEQ ID NO: 438874 - RNA, 22 nt, Human
uacagaaagggaugauugaucu

SEQ ID NO: 438875 - RNA, 22 nt, Human
ugggccuggacaaggccacuag

SEQ ID NO: 438876 - RNA, 22 nt, Human
cagucaaacuuauaggcacauu

SEQ ID NO: 438877 - RNA, 17 nt, Human
cagacagauauccuggg

SEQ ID NO: 438878 - RNA, 22 nt, Human
auaaaggcuggcugcugugagc

SEQ ID NO: 438879 - RNA, 22 nt, Human
uccucacagcugguucauucag

SEQ ID NO: 438880 - RNA, 22 nt, Human
ccuuccuggagcccaugcagau

SEQ ID NO: 438881 - RNA, 22 nt, Human
uguacaaagccagaacucccaa

SEQ ID NO: 438882 - RNA, 22 nt, Human
cugagacacggagaggcugugu

SEQ ID NO: 438883 - RNA, 22 nt, Human
cacagguccuuccugcccuggg

SEQ ID NO: 438884 - RNA, 22 nt, Human
gggccuggggugacguaccccu

SEQ ID NO: 438885 - RNA, 22 nt, Human
cccagcaguuguuggugcacau

SEQ ID NO: 438886 - RNA, 22 nt, Human
gccuggagggauagaaugcaag

SEQ ID NO: 438887 - RNA, 20 nt, Human
accuugggugagugacgguc

SEQ ID NO: 438888 - RNA, 17 nt, Human
agacagaccucugcauc

SEQ ID NO: 438889 - RNA, 22 nt, Human
cagagcagcagagcuuccaugg

SEQ ID NO: 438890 - RNA, 22 nt, Human
ugagcccaggaguaugaggcug

SEQ ID NO: 438891 - RNA, 22 nt, Human
aaggccaggccuagcacggagg

SEQ ID NO: 438892 - RNA, 22 nt, Human
cugcccagaaucacucacucga

SEQ ID NO: 438893 - RNA, 22 nt, Human
aggccagggcacugcucuuuag

SEQ ID NO: 438894 - RNA, 19 nt, Human
uuuauuugagacaugccuu

SEQ ID NO: 438895 - RNA, 22 nt, Human
ccagcccugccucucagggccc

SEQ ID NO: 438896 - RNA, 22 nt, Human
ugaugagggcaguucuuguugc

SEQ ID NO: 438897 - RNA, 22 nt, Human
uuugcuuaacugguagaaugcg

SEQ ID NO: 438898 - RNA, 22 nt, Human
ccaggcagagggauccccaucc

SEQ ID NO: 438899 - RNA, 22 nt, Human
aacagagaggccaccucagcag

SEQ ID NO: 438900 - RNA, 22 nt, Human
agugcuggauuacaggcgugag

SEQ ID NO: 438901 - RNA, 22 nt, Human
gacaggcaguuuuccagaucag

SEQ ID NO: 438902 - RNA, 22 nt, Human
agaauuuccuaugagagauucc

SEQ ID NO: 438903 - RNA, 22 nt, Human
uaggcugggcauucuggccagg

SEQ ID NO: 438904 - RNA, 22 nt, Human
acugcacugauuuaucauccca

SEQ ID NO: 438905 - RNA, 23 nt, Human
ucaguacucugcuggguauagag

SEQ ID NO: 438906 - RNA, 22 nt, Human
auuauuguuuuaauaguagaga

SEQ ID NO: 438907 - RNA, 22 nt, Human
cugaggcaugaaugugggcuuu

SEQ ID NO: 438908 - RNA, 22 nt, Human
ggucccugcccaccugggagcu

SEQ ID NO: 438909 - RNA, 22 nt, Human
cugcugcaacucuuuagagggu

SEQ ID NO: 438910 - RNA, 22 nt, Human
aggcacguggcgccaggaguga

SEQ ID NO: 438911 - RNA, 22 nt, Human
caggaauguuugugcuccuuua

SEQ ID NO: 438912 - RNA, 22 nt, Human
acacaggagauauguaauggcu

SEQ ID NO: 438913 - RNA, 22 nt, Human
uagcacaagcaacuacugaagu

SEQ ID NO: 438914 - RNA, 22 nt, Human
gagagcugggggacuguggaug

SEQ ID NO: 438915 - RNA, 22 nt, Human
acacauaagccuaaucaucucc

SEQ ID NO: 438916 - RNA, 22 nt, Human
agagccuguaacaucuuucuua

SEQ ID NO: 438917 - RNA, 22 nt, Human
agcagagucugugugcacuuua

SEQ ID NO: 438918 - RNA, 22 nt, Human
cagcaaaguaagcugacaugua

SEQ ID NO: 438919 - RNA, 18 nt, Human
gugagcagagagcaucac

SEQ ID NO: 438920 - RNA, 22 nt, Human
acuuugcaaaauaaugcugauu

SEQ ID NO: 438921 - RNA, 22 nt, Human
aaugagcuagaccugcuuccuc

SEQ ID NO: 438922 - RNA, 19 nt, Human
aagaagcaauaagcuguga

SEQ ID NO: 438923 - RNA, 22 nt, Human
agaaauguauagugaauuuuuc

SEQ ID NO: 438924 - RNA, 22 nt, Human
cccagagacuuuguccgacgac

SEQ ID NO: 438925 - RNA, 20 nt, Human
ucugggcuucccccagcucc

SEQ ID NO: 438926 - RNA, 21 nt, Human
uuugaauagaaauagugcuua

SEQ ID NO: 438927 - RNA, 22 nt, Human
cacaggaaucugcauuuugacc

SEQ ID NO: 438928 - RNA, 22 nt, Human
aauagcaaaugcucauuugaaa

SEQ ID NO: 438929 - RNA, 22 nt, Human
uagagcuggaauuugcagcaag

SEQ ID NO: 438930 - RNA, 23 nt, Human
gaacauucauugguugcuuuaga

SEQ ID NO: 438931 - RNA, 22 nt, Human
gcugcugcaagagccagcucuu

SEQ ID NO: 438932 - RNA, 22 nt, Human
uacugcauuaaauuuagguuau

SEQ ID NO: 438933 - RNA, 22 nt, Human
caucugaagugaauugcuuuuu

SEQ ID NO: 438934 - RNA, 22 nt, Human
uuucacauaugguuguugauug

SEQ ID NO: 438935 - RNA, 22 nt, Human
ucauuuugggguuugucaucuu

SEQ ID NO: 438936 - RNA, 22 nt, Human
ugaugacagcaaaaaaugcuag

SEQ ID NO: 438937 - RNA, 22 nt, Human
ccagcucugcagggccuggggu

SEQ ID NO: 438938 - RNA, 22 nt, Human
cugaagcuuuacuucaaauaca

SEQ ID NO: 438939 - RNA, 22 nt, Human
gccaggcugacucccccggccu

SEQ ID NO: 438940 - RNA, 22 nt, Human
caggcagagacccucuccuaaa

SEQ ID NO: 438941 - RNA, 22 nt, Human
aaaguguugauaugugacaucc

SEQ ID NO: 438942 - RNA, 22 nt, Human
ugcucccaggcauucucuguug

SEQ ID NO: 438943 - RNA, 22 nt, Human
uggcagauuuugaagacagaga

SEQ ID NO: 438944 - RNA, 22 nt, Human
gacacaguagccagugcaguga

SEQ ID NO: 438945 - RNA, 20 nt, Human
uggaauggguccuugaaaaa

SEQ ID NO: 438946 - RNA, 22 nt, Human
aggccuggcuuugguuugcuga

SEQ ID NO: 438947 - RNA, 22 nt, Human
gugcccugacacaccuggugug

SEQ ID NO: 438948 - RNA, 22 nt, Human
uuucaaacugcccagcacaccu

SEQ ID NO: 438949 - RNA, 22 nt, Human
ugggcagagucguggggaauag

SEQ ID NO: 438950 - RNA, 22 nt, Human
aauaugcauguauacaugugua

SEQ ID NO: 438951 - RNA, 22 nt, Human
uaaggcaugaguuuauuucaua

SEQ ID NO: 438952 - RNA, 22 nt, Human
gucuuguuugggauguggaugg

SEQ ID NO: 438953 - RNA, 22 nt, Human
gcuuggcugccuuuggauguug

SEQ ID NO: 438954 - RNA, 21 nt, Human
ugcacagccauacccuccuug

SEQ ID NO: 438955 - RNA, 22 nt, Human
aggccugggcaagaaggggcgu

SEQ ID NO: 438956 - RNA, 22 nt, Human
cuguuucaugucuuccgcagcu

SEQ ID NO: 438957 - RNA, 22 nt, Human
agugucacagacccaaucagga

SEQ ID NO: 438958 - RNA, 22 nt, Human
augcaacaaauugugugcaaua

SEQ ID NO: 438959 - RNA, 22 nt, Human
uguuaaaaaugcagauuccuau

SEQ ID NO: 438960 - RNA, 22 nt, Human
agggcucugugacuaucacugc

SEQ ID NO: 438961 - RNA, 22 nt, Human
caguccuguuccuggaguaguu

SEQ ID NO: 438962 - RNA, 22 nt, Human
ucaacagacauuuuuaagcacu

SEQ ID NO: 438963 - RNA, 22 nt, Human
agccaggccagacucacacccu

SEQ ID NO: 438964 - RNA, 22 nt, Human
cccagcaguacccaagcccuug

SEQ ID NO: 438965 - RNA, 22 nt, Human
agcugccaaguuucucaguuua

SEQ ID NO: 438966 - RNA, 22 nt, Human
aggcaggcugcuauggaguaga

SEQ ID NO: 438967 - RNA, 22 nt, Human
agaaguggucugucuuccagau

SEQ ID NO: 438968 - RNA, 19 nt, Human
accaggcuuauggucagug

SEQ ID NO: 438969 - RNA, 22 nt, Human
gcagggcucauucuaguacaau

SEQ ID NO: 438970 - RNA, 22 nt, Human
gcugucacaaauauuucucagc

SEQ ID NO: 438971 - RNA, 22 nt, Human
cagcagugugcaggugugcugg

SEQ ID NO: 438972 - RNA, 22 nt, Human
uuuauccaaggguuuuaacugu

SEQ ID NO: 438973 - RNA, 22 nt, Human
ugauucagaccugucagacuuc

SEQ ID NO: 438974 - RNA, 22 nt, Human
ccugggcauucuuugaguucuc

SEQ ID NO: 438975 - RNA, 22 nt, Human
aaccaugcuagcaucaaaaugu

SEQ ID NO: 438976 - RNA, 22 nt, Human
agagcagcacguuguccccaca

SEQ ID NO: 438977 - RNA, 22 nt, Human
ugaggauggggagauggugucu

SEQ ID NO: 438978 - RNA, 22 nt, Human
cccuggagcaucucugcugucu

SEQ ID NO: 438979 - RNA, 22 nt, Human
uggcuccugcagaccaucugga

SEQ ID NO: 438980 - RNA, 22 nt, Human
uugcaaauguuucauaacagua

SEQ ID NO: 438981 - RNA, 22 nt, Human
accugagccuagggagguugag

SEQ ID NO: 438982 - RNA, 22 nt, Human
ggccccaggaccuccacggucc

SEQ ID NO: 438983 - RNA, 22 nt, Human
cuguggcucucagaggcugcug

SEQ ID NO: 438984 - RNA, 22 nt, Human
gagcugaggauacaucagugaa

SEQ ID NO: 438985 - RNA, 22 nt, Human
cauuuguacagaacagcuuuau

SEQ ID NO: 438986 - RNA, 22 nt, Human
aaucuuuugauucuagggcugu

SEQ ID NO: 438987 - RNA, 22 nt, Human
auuugcuggugaauguauagcu

SEQ ID NO: 438988 - RNA, 22 nt, Human
uuucuacaguacugauuucaua

SEQ ID NO: 438989 - RNA, 22 nt, Human
augagguuuuacugccauuuuc

SEQ ID NO: 438990 - RNA, 22 nt, Human
aaagcagaacugagagagcugg

SEQ ID NO: 438991 - RNA, 22 nt, Human
aaaugacacuaggcuuuuugca

SEQ ID NO: 438992 - RNA, 18 nt, Human
aggcuucccaggcaggcc

SEQ ID NO: 438993 - RNA, 22 nt, Human
cugcaaauaggggugugaauaa

SEQ ID NO: 438994 - RNA, 22 nt, Human
uacagaguauuuuuaauauggu

SEQ ID NO: 438995 - RNA, 22 nt, Human
uaaugacauuguauccacagag

SEQ ID NO: 438996 - RNA, 22 nt, Human
augcauugcugcuuucaaaaca

SEQ ID NO: 438997 - RNA, 20 nt, Human
ugugagcagaugcugaguga

SEQ ID NO: 438998 - RNA, 22 nt, Human
uaauacaauggaguugggcccc

SEQ ID NO: 438999 - RNA, 22 nt, Human
aggagacagccaggggccugag

SEQ ID NO: 439000 - RNA, 22 nt, Human
ggcacagcgacuaccaucgaaa

SEQ ID NO: 439001 - RNA, 22 nt, Human
augcccuguggcaguacauauu

SEQ ID NO: 439002 - RNA, 22 nt, Human
gccuucagcggccgcucgcugc

SEQ ID NO: 439003 - RNA, 22 nt, Human
gccugagcuacuagggagucug

SEQ ID NO: 439004 - RNA, 22 nt, Human
ugucccaggcugaaguacagug

SEQ ID NO: 439005 - RNA, 18 nt, Human
cuggagucacagugggga

SEQ ID NO: 439006 - RNA, 21 nt, Human
auacauucuauuaagcauuua

SEQ ID NO: 439007 - RNA, 22 nt, Human
agcagccaggaaucugcagagc

SEQ ID NO: 439008 - RNA, 22 nt, Human
guuuugaauacuacuagaacuu

SEQ ID NO: 439009 - RNA, 22 nt, Human
auuuugacagaagaggcccuaa

SEQ ID NO: 439010 - RNA, 22 nt, Human
cugcauuacagccuccuuagga

SEQ ID NO: 439011 - RNA, 22 nt, Human
cagagcugcacauucuaugaug

SEQ ID NO: 439012 - RNA, 22 nt, Human
acaaaugcaaguuuuaugucaa

SEQ ID NO: 439013 - RNA, 22 nt, Human
gcauuucauguagauugagaac

SEQ ID NO: 439014 - RNA, 22 nt, Human
aagaacauuuaugauggcauuu

SEQ ID NO: 439015 - RNA, 22 nt, Human
cagccugacaccagcuuugggc

SEQ ID NO: 439016 - RNA, 22 nt, Human
gaggcugggggcugccuuccuc

SEQ ID NO: 439017 - RNA, 22 nt, Human
gagaaagcuucuuucccacagg

SEQ ID NO: 439018 - RNA, 21 nt, Human
ugcaggcugugcgcuccugcc

SEQ ID NO: 439019 - RNA, 22 nt, Human
ugaauauguauuucuuauuuac

SEQ ID NO: 439020 - RNA, 22 nt, Human
gcugcucugugacagccuccgg

SEQ ID NO: 439021 - RNA, 22 nt, Human
gcucuggccagacccucagugg

SEQ ID NO: 439022 - RNA, 22 nt, Human
ucccagagacaucauuucuccg

SEQ ID NO: 439023 - RNA, 22 nt, Human
gcugauccuuuuaugucuagcu

SEQ ID NO: 439024 - RNA, 22 nt, Human
gcuguuucuaccagaagaauca

SEQ ID NO: 439025 - RNA, 22 nt, Human
gccaggcuggccagcaccuucu

SEQ ID NO: 439026 - RNA, 22 nt, Human
agcucagggcaaagacucaaau

SEQ ID NO: 439027 - RNA, 22 nt, Human
gaucggguggguucugccauca

SEQ ID NO: 439028 - RNA, 22 nt, Human
uuguuaaaauauuggagaaagg

SEQ ID NO: 439029 - RNA, 22 nt, Human
caaggaaacaugaaaugcauug

SEQ ID NO: 439030 - RNA, 22 nt, Human
cagguggggcagcugugggagc

SEQ ID NO: 439031 - RNA, 22 nt, Human
ugcaauaaguauugcuuacaug

SEQ ID NO: 439032 - RNA, 22 nt, Human
gagagcuggauucuggauaggu

SEQ ID NO: 439033 - RNA, 22 nt, Human
accuggagucauuugaggagua

SEQ ID NO: 439034 - RNA, 20 nt, Human
uauuuguauuugggaaaguu

SEQ ID NO: 439035 - RNA, 22 nt, Human
auguguccacaggugugagaga

SEQ ID NO: 439036 - RNA, 22 nt, Human
ggggcagagagaaggaagcuug

SEQ ID NO: 439037 - RNA, 22 nt, Human
agcagaacugaugagacuugag

SEQ ID NO: 439038 - RNA, 22 nt, Human
ccuggagaggcgcugcagagga

SEQ ID NO: 439039 - RNA, 22 nt, Human
agcagccauagauagcaugcaa

SEQ ID NO: 439040 - RNA, 22 nt, Human
gccugggagggcagcagugugg

SEQ ID NO: 439041 - RNA, 22 nt, Human
gaaguucaaugucagcaucuau

SEQ ID NO: 439042 - RNA, 22 nt, Human
cccagcaggugccaucacucug

SEQ ID NO: 439043 - RNA, 22 nt, Human
gcagagguggcaucugggcucu

SEQ ID NO: 439044 - RNA, 22 nt, Human
uuuacugaccuccaaucccacu

SEQ ID NO: 439045 - RNA, 22 nt, Human
aggacaaaggaccagaucugga

SEQ ID NO: 439046 - RNA, 22 nt, Human
cuggcuccagugacaagucgau

SEQ ID NO: 439047 - RNA, 22 nt, Human
ggcuuugcuucuccagaugcuu

SEQ ID NO: 439048 - RNA, 22 nt, Human
aaguuccucaaauaaaacauga

SEQ ID NO: 439049 - RNA, 22 nt, Human
aucaggugaagucacugagugg

SEQ ID NO: 439050 - RNA, 22 nt, Human
gaagaagcauucugcuguuuug

SEQ ID NO: 439051 - RNA, 22 nt, Human
ucagcuccucaugcaggggaua

SEQ ID NO: 439052 - RNA, 22 nt, Human
gggcagagaaauggacaguugg

SEQ ID NO: 439053 - RNA, 22 nt, Human
cagggcucccugcagccucugu

SEQ ID NO: 439054 - RNA, 22 nt, Human
ucugggcuugccugguugugca

SEQ ID NO: 439055 - RNA, 22 nt, Human
gagcugaggugauguggucguu

SEQ ID NO: 439056 - RNA, 22 nt, Human
ugagccugcugucgcuggaccc

SEQ ID NO: 439057 - RNA, 22 nt, Human
ucagcuggagaugagaaccgaa

SEQ ID NO: 439058 - RNA, 19 nt, Human
ggcagacacaguugacaug

SEQ ID NO: 439059 - RNA, 22 nt, Human
gaggcagcaggcugaggaggau

SEQ ID NO: 439060 - RNA, 22 nt, Human
gucucacacagaguagauuuug

SEQ ID NO: 439061 - RNA, 22 nt, Human
cugggcaggagggcucuaugga

SEQ ID NO: 439062 - RNA, 17 nt, Human
gggacucaagauggggu

SEQ ID NO: 439063 - RNA, 22 nt, Human
ugcagugggccggaggccaggg

SEQ ID NO: 439064 - RNA, 22 nt, Human
uggagcugacucacaccagcua

SEQ ID NO: 439065 - RNA, 22 nt, Human
caggcugccaaggcuggggagg

SEQ ID NO: 439066 - RNA, 22 nt, Human
ugcauuauaacugaauguuguu

SEQ ID NO: 439067 - RNA, 21 nt, Human
cagugcucaaucugacagugg

SEQ ID NO: 439068 - RNA, 22 nt, Human
guuauugacauguauuaagcac

SEQ ID NO: 439069 - RNA, 22 nt, Human
ucuccaggcuuuuugugaauug

SEQ ID NO: 439070 - RNA, 22 nt, Human
uauaggaaguguagugcuugga

SEQ ID NO: 439071 - RNA, 18 nt, Human
cuuugcaguuacagggca

SEQ ID NO: 439072 - RNA, 22 nt, Human
aagagacuguaaaggcgugagu

SEQ ID NO: 439073 - RNA, 22 nt, Human
ucagagacuguaggagcagccu

SEQ ID NO: 439074 - RNA, 22 nt, Human
aucugaauaaauuucuuuuagu

SEQ ID NO: 439075 - RNA, 22 nt, Human
gccucagcuguugcaggggccc

SEQ ID NO: 439076 - RNA, 18 nt, Human
ggaagaaaaggaacucag

SEQ ID NO: 439077 - RNA, 22 nt, Human
cuccauggaaccggggcugcuu

SEQ ID NO: 439078 - RNA, 19 nt, Human
uggcuaauuuuauagaggc

SEQ ID NO: 439079 - RNA, 22 nt, Human
uuugaagauaaauauggagaaa

SEQ ID NO: 439080 - RNA, 18 nt, Human
aggaaagaaaggcaggug

SEQ ID NO: 439081 - RNA, 22 nt, Human
ccaggcugaauauguuccaggg

SEQ ID NO: 439082 - RNA, 22 nt, Human
uuuuaguaccaaccagaagaug

SEQ ID NO: 439083 - RNA, 22 nt, Human
cgcaacagcguggcgcccagcu

SEQ ID NO: 439084 - RNA, 22 nt, Human
auuaacaugcagccagacacac

SEQ ID NO: 439085 - RNA, 22 nt, Human
agcagagccaggucucucugua

SEQ ID NO: 439086 - RNA, 22 nt, Human
gacagaaggcaucuagggcacg

SEQ ID NO: 439087 - RNA, 22 nt, Human
ucaggcuguuccuguccaaaau

SEQ ID NO: 439088 - RNA, 23 nt, Human
ucauaaauauuagcacaguagga

SEQ ID NO: 439089 - RNA, 18 nt, Human
auugcuuuuguaccaacc

SEQ ID NO: 439090 - RNA, 22 nt, Human
ucaaaauuaaaccaacguccag

SEQ ID NO: 439091 - RNA, 22 nt, Human
ggugcccuguaaaagccaugca

SEQ ID NO: 439092 - RNA, 22 nt, Human
aaaugugcuucuuacucucaau

SEQ ID NO: 439093 - RNA, 22 nt, Human
gcaugggcaagaggacuggggg

SEQ ID NO: 439094 - RNA, 22 nt, Human
cagcccuuguuugggaaggaug

SEQ ID NO: 439095 - RNA, 22 nt, Human
cagacagaccugcaagggcaca

SEQ ID NO: 439096 - RNA, 19 nt, Human
aggguacacgagagaagag

SEQ ID NO: 439097 - RNA, 20 nt, Human
uccugcaaaaggacaaguuu

SEQ ID NO: 439098 - RNA, 18 nt, Human
cagaagcaggcagugcag

SEQ ID NO: 439099 - RNA, 22 nt, Human
gcucuugaaauaauggcuaaug

SEQ ID NO: 439100 - RNA, 22 nt, Human
gcagcuggagaaauaccacccu

SEQ ID NO: 439101 - RNA, 22 nt, Human
acagaggaaggcugagcugccc

SEQ ID NO: 439102 - RNA, 22 nt, Human
augccaaauucuacuuucagca

SEQ ID NO: 439103 - RNA, 22 nt, Human
auuugucaauaagaugaacaua

SEQ ID NO: 439104 - RNA, 22 nt, Human
uuuuuuguagcaagcgcagaua

SEQ ID NO: 439105 - RNA, 22 nt, Human
uagcccuguccuuggccugugc

SEQ ID NO: 439106 - RNA, 22 nt, Human
acaugcaacuaaagggugccac

SEQ ID NO: 439107 - RNA, 22 nt, Human
cccaggcuggauuucgguggca

SEQ ID NO: 439108 - RNA, 22 nt, Human
cuucugaggcagcuauucaguu

SEQ ID NO: 439109 - RNA, 22 nt, Human
auaaggcagaaaugauucuagu

SEQ ID NO: 439110 - RNA, 22 nt, Human
cagaaauggagcccaggaaucu

SEQ ID NO: 439111 - RNA, 22 nt, Human
cacaacuuuaggaaccacauuc

SEQ ID NO: 439112 - RNA, 22 nt, Human
ucuuagcagugcugagaagaau

SEQ ID NO: 439113 - RNA, 21 nt, Human
cugcagcaaaacuuugcuccu

SEQ ID NO: 439114 - RNA, 22 nt, Human
agaccacuaaaacuuucucuau

SEQ ID NO: 439115 - RNA, 22 nt, Human
cagcccuuggcccagggcacag

SEQ ID NO: 439116 - RNA, 22 nt, Human
ggcaggcugcuugggucauguc

SEQ ID NO: 439117 - RNA, 22 nt, Human
ggccagaggccacagcuguguc

SEQ ID NO: 439118 - RNA, 22 nt, Human
caaggaaaagaaguauuucaga

SEQ ID NO: 439119 - RNA, 22 nt, Human
aggcugagggcuccugagggca

SEQ ID NO: 439120 - RNA, 22 nt, Human
uaaguagaugcaaaauggaguu

SEQ ID NO: 439121 - RNA, 22 nt, Human
aguccguggccagacucaagag

SEQ ID NO: 439122 - RNA, 22 nt, Human
gcaauaaaauguaaugauuggg

SEQ ID NO: 439123 - RNA, 22 nt, Human
uccaggcccagacggggugagg

SEQ ID NO: 439124 - RNA, 23 nt, Human
aagcccugaagguuucaggcccu

SEQ ID NO: 439125 - RNA, 22 nt, Human
aaauaaaggaacuguuuuccca

SEQ ID NO: 439126 - RNA, 22 nt, Human
gcucagggcuaaggcugagggg

SEQ ID NO: 439127 - RNA, 21 nt, Human
ugaggcuguuguaccagggag

SEQ ID NO: 439128 - RNA, 22 nt, Human
ggcaccuggagguuuacuggau

SEQ ID NO: 439129 - RNA, 22 nt, Human
caauugcaauagagaaaagagu

SEQ ID NO: 439130 - RNA, 22 nt, Human
cccuggguucuggcugggcugc

SEQ ID NO: 439131 - RNA, 22 nt, Human
ggcucugaggcagaucgauggg

SEQ ID NO: 439132 - RNA, 22 nt, Human
gcuguuucucucccaccccuuc

SEQ ID NO: 439133 - RNA, 22 nt, Human
ggagccccaauugagcaguacg

SEQ ID NO: 439134 - RNA, 22 nt, Human
gccuccugagaagccacaggcu

SEQ ID NO: 439135 - RNA, 22 nt, Human
uggcagugccccuugaccagug

SEQ ID NO: 439136 - RNA, 22 nt, Human
uuugcucugcuguugccaggug

SEQ ID NO: 439137 - RNA, 22 nt, Human
uuauuguuuaaagccauguaaa

SEQ ID NO: 439138 - RNA, 22 nt, Human
gaggaggcuaagugggcucugg

SEQ ID NO: 439139 - RNA, 22 nt, Human
gauggacaccuccugagguucu

SEQ ID NO: 439140 - RNA, 22 nt, Human
cugagccaaaaagcagagcuug

SEQ ID NO: 439141 - RNA, 22 nt, Human
ggagccuguuaguugagugcuc

SEQ ID NO: 439142 - RNA, 22 nt, Human
gcagcaggaauaggauaagcaa

SEQ ID NO: 439143 - RNA, 22 nt, Human
ucagaauuuuaaaccaaggaaa

SEQ ID NO: 439144 - RNA, 22 nt, Human
cacaauuuccaagucauguuau

SEQ ID NO: 439145 - RNA, 22 nt, Human
ucuaagaauacucauaucuucu

SEQ ID NO: 439146 - RNA, 19 nt, Human
ccuggguccacucagacua

SEQ ID NO: 439147 - RNA, 22 nt, Human
gcugagagugggugcagugcuu

SEQ ID NO: 439148 - RNA, 22 nt, Human
agagguucaaacuucauaauuu

SEQ ID NO: 439149 - RNA, 20 nt, Human
aguuuucagcagaacaccca

SEQ ID NO: 439150 - RNA, 22 nt, Human
accuucugaccaguuaucuuga

SEQ ID NO: 439151 - RNA, 22 nt, Human
uugcccugcggguccugcgcaa

SEQ ID NO: 439152 - RNA, 22 nt, Human
caggagcccagaguccucagcu

SEQ ID NO: 439153 - RNA, 22 nt, Human
ggauuuuagaguaccuaagugu

SEQ ID NO: 439154 - RNA, 22 nt, Human
gcagcuggggaggucgugggga

SEQ ID NO: 439155 - RNA, 22 nt, Human
acccagagcacagaugcaacgu

SEQ ID NO: 439156 - RNA, 22 nt, Human
agggugaaucucacaacucuua

SEQ ID NO: 439157 - RNA, 22 nt, Human
ggcacagaguuggcagagcugc

SEQ ID NO: 439158 - RNA, 22 nt, Human
aaauucaguuucuguccuggga

SEQ ID NO: 439159 - RNA, 22 nt, Human
gcuuugcugaggucugaggauu

SEQ ID NO: 439160 - RNA, 22 nt, Human
aaaaagggauuugugauccagg

SEQ ID NO: 439161 - RNA, 22 nt, Human
uuuagacaagauccuucugaau

SEQ ID NO: 439162 - RNA, 22 nt, Human
caagagcauuuaguuagcuggu

SEQ ID NO: 439163 - RNA, 22 nt, Human
uaggcaggugugcacugcccac

SEQ ID NO: 439164 - RNA, 22 nt, Human
gcccagcuggcuuccagcacau

SEQ ID NO: 439165 - RNA, 22 nt, Human
uuuauaguuauauacagauguu

SEQ ID NO: 439166 - RNA, 22 nt, Human
uuucacauuuaggcgugaauug

SEQ ID NO: 439167 - RNA, 20 nt, Human
gccugccucagcuagcugag

SEQ ID NO: 439168 - RNA, 22 nt, Human
augcccugcucucgggaaggga

SEQ ID NO: 439169 - RNA, 22 nt, Human
agcugguguggauuuuugaaug

SEQ ID NO: 439170 - RNA, 22 nt, Human
aguccuggguccagcagguccu

SEQ ID NO: 439171 - RNA, 22 nt, Human
caugggcccgugagaggcaggg

SEQ ID NO: 439172 - RNA, 22 nt, Human
aaaacauuuuacugccaucuca

SEQ ID NO: 439173 - RNA, 22 nt, Human
agucacauggacucaggaugac

SEQ ID NO: 439174 - RNA, 22 nt, Human
cuuucucuucacugucaugauc

SEQ ID NO: 439175 - RNA, 22 nt, Human
ugggcuacucugggagccuaac

SEQ ID NO: 439176 - RNA, 22 nt, Human
aggccuggugaaugaaguaucu

SEQ ID NO: 439177 - RNA, 19 nt, Human
gaauuuuaggacuucagca

SEQ ID NO: 439178 - RNA, 20 nt, Human
cugcugugugugccucagcc

SEQ ID NO: 439179 - RNA, 22 nt, Human
uagguuuaggagugaaggugaa

SEQ ID NO: 439180 - RNA, 22 nt, Human
gcagggcucaacaggacacccc

SEQ ID NO: 439181 - RNA, 22 nt, Human
uuuagggugauguaugugcagc

SEQ ID NO: 439182 - RNA, 21 nt, Human
uuaagacacacagauuaagga

SEQ ID NO: 439183 - RNA, 22 nt, Human
aagggcccauucucucagaaaa

SEQ ID NO: 439184 - RNA, 22 nt, Human
cagcagcauugcucuggauucc

SEQ ID NO: 439185 - RNA, 18 nt, Human
aguuucagggcaggaaac

SEQ ID NO: 439186 - RNA, 22 nt, Human
cccagccugaucucggccagcu

SEQ ID NO: 439187 - RNA, 22 nt, Human
gugcauauaugugcagcaucaa

SEQ ID NO: 439188 - RNA, 22 nt, Human
uggagcaggcaucuuucucucu

SEQ ID NO: 439189 - RNA, 22 nt, Human
gacuccagguguccaggccucc

SEQ ID NO: 439190 - RNA, 22 nt, Human
aucacauggaaugauuuuagac

SEQ ID NO: 439191 - RNA, 22 nt, Human
ugaagcaguuacuggguguuaa

SEQ ID NO: 439192 - RNA, 22 nt, Human
gaggcccugguaggucagagug

SEQ ID NO: 439193 - RNA, 22 nt, Human
ugggccugugaugcugggcuau

SEQ ID NO: 439194 - RNA, 22 nt, Human
aggcuggcggugacugcucuga

SEQ ID NO: 439195 - RNA, 22 nt, Human
aacauuucugagaauaucaguu

SEQ ID NO: 439196 - RNA, 22 nt, Human
caguccugggagacuuacccag

SEQ ID NO: 439197 - RNA, 22 nt, Human
aguccuguaucugagcugaguc

SEQ ID NO: 439198 - RNA, 22 nt, Human
auuccucaaagguagcccauua

SEQ ID NO: 439199 - RNA, 22 nt, Human
uugcaaaugugaauaauuacac

SEQ ID NO: 439200 - RNA, 22 nt, Human
ugggccugacucaccugccucc

SEQ ID NO: 439201 - RNA, 22 nt, Human
aaccaggagauuaaagaaaggu

SEQ ID NO: 439202 - RNA, 22 nt, Human
auuauugcugacaugguguuga

SEQ ID NO: 439203 - RNA, 22 nt, Human
cuggugagacucagggaugcuu

SEQ ID NO: 439204 - RNA, 19 nt, Human
augagcaauaguuuuaauc

SEQ ID NO: 439205 - RNA, 22 nt, Human
augcagcugacauuuucauguu

SEQ ID NO: 439206 - RNA, 22 nt, Human
ccagccaggcuggcuguggagg

SEQ ID NO: 439207 - RNA, 22 nt, Human
uauaggaaauuuaucuccuggg

SEQ ID NO: 439208 - RNA, 22 nt, Human
augcccugagcaggccuucaag

SEQ ID NO: 439209 - RNA, 22 nt, Human
ugcauuaucuuuaauguucuca

SEQ ID NO: 439210 - RNA, 22 nt, Human
uugaugaucuuacggcagagga

SEQ ID NO: 439211 - RNA, 22 nt, Human
ggagccuggcccggcccuuggc

SEQ ID NO: 439212 - RNA, 22 nt, Human
cggagcugcgccgggacacggg

SEQ ID NO: 439213 - RNA, 22 nt, Human
ggccaggagcaagccaggcucu

SEQ ID NO: 439214 - RNA, 22 nt, Human
caagucugucugcuccugugug

SEQ ID NO: 439215 - RNA, 22 nt, Human
aaggcaaugagggagauagagu

SEQ ID NO: 439216 - RNA, 22 nt, Human
acagagcauauaaagugcuuug

SEQ ID NO: 439217 - RNA, 22 nt, Human
ucaggagcuauggacugucaaa

SEQ ID NO: 439218 - RNA, 22 nt, Human
cugcagcuuauuugcuguguga

SEQ ID NO: 439219 - RNA, 22 nt, Human
ccuggagcuuuuccauccugga

SEQ ID NO: 439220 - RNA, 22 nt, Human
gcuuugcacuccagcuguggcc

SEQ ID NO: 439221 - RNA, 22 nt, Human
cucagagcccaggguacacccg

SEQ ID NO: 439222 - RNA, 22 nt, Human
aggacuaaaaagaugcucuccc

SEQ ID NO: 439223 - RNA, 22 nt, Human
ggacacaggcagcugggugggu

SEQ ID NO: 439224 - RNA, 22 nt, Human
gccugccuggagcuugagguga

SEQ ID NO: 439225 - RNA, 22 nt, Human
uuugcaaauucuugucuagccu

SEQ ID NO: 439226 - RNA, 18 nt, Human
ugggagugggaguggaua

SEQ ID NO: 439227 - RNA, 23 nt, Human
agcuaaugggacagauuccaugg

SEQ ID NO: 439228 - RNA, 22 nt, Human
gaaggccauugcguccugggau

SEQ ID NO: 439229 - RNA, 22 nt, Human
uaagaggcaaaagauacucaga

SEQ ID NO: 439230 - RNA, 22 nt, Human
cacaaaugugcagaaaugugag

SEQ ID NO: 439231 - RNA, 22 nt, Human
gccucacugcagccccaggaag

SEQ ID NO: 439232 - RNA, 22 nt, Human
acagagcucccagccaucuccu

SEQ ID NO: 439233 - RNA, 22 nt, Human
agaugcuauacauuguaagaca

SEQ ID NO: 439234 - RNA, 22 nt, Human
aggcagccaaucagaggcugac

SEQ ID NO: 439235 - RNA, 22 nt, Human
uacauuaaggauauggacauga

SEQ ID NO: 439236 - RNA, 22 nt, Human
ugcucacagcccagaacauaau

SEQ ID NO: 439237 - RNA, 22 nt, Human
aauaaagacucagaggcccagg

SEQ ID NO: 439238 - RNA, 22 nt, Human
uccugccucaggcucuggagua

SEQ ID NO: 439239 - RNA, 22 nt, Human
uuucagaguuggggaaaagcag

SEQ ID NO: 439240 - RNA, 22 nt, Human
auauacaggugguauguguaaa

SEQ ID NO: 439241 - RNA, 22 nt, Human
ggcacagcccucucuguggaca

SEQ ID NO: 439242 - RNA, 22 nt, Human
agccuggaauuaaggaaaugca

SEQ ID NO: 439243 - RNA, 22 nt, Human
gagagcugucagcguagcaccg

SEQ ID NO: 439244 - RNA, 22 nt, Human
ugcuauuucucugcuguaaaau

SEQ ID NO: 439245 - RNA, 22 nt, Human
guucaaauuuuggcuguacugc

SEQ ID NO: 439246 - RNA, 22 nt, Human
cauucuaaaguguuuuauaccu

SEQ ID NO: 439247 - RNA, 22 nt, Human
agccaagguaucaugagaggca

SEQ ID NO: 439248 - RNA, 22 nt, Human
ugugugacccccagugaagccu

SEQ ID NO: 439249 - RNA, 22 nt, Human
uuuauccaguguuggaauuuuu

SEQ ID NO: 439250 - RNA, 22 nt, Human
aagcccagaugugagaacugag

SEQ ID NO: 439251 - RNA, 22 nt, Human
cugccucucagccugaccgcca

SEQ ID NO: 439252 - RNA, 22 nt, Human
cuggucccagcucugccaccaa

SEQ ID NO: 439253 - RNA, 22 nt, Human
gcagggcagcugaagcuaggug

SEQ ID NO: 439254 - RNA, 22 nt, Human
gcuggcugcuaggacagcuaca

SEQ ID NO: 439255 - RNA, 22 nt, Human
gggccccaguccucccacgugg

SEQ ID NO: 439256 - RNA, 22 nt, Human
uguaccauauagaugguaccuu

SEQ ID NO: 439257 - RNA, 22 nt, Human
ucaggccugcaaggagaguccc

SEQ ID NO: 439258 - RNA, 22 nt, Human
ggagccugugcccaagcccaga

SEQ ID NO: 439259 - RNA, 17 nt, Human
gcacugaacaauccugu

SEQ ID NO: 439260 - RNA, 21 nt, Human
gcacagcaugaguguuggcau

SEQ ID NO: 439261 - RNA, 22 nt, Human
cugcccugcuugaugacagcga

SEQ ID NO: 439262 - RNA, 22 nt, Human
aagccgaggccacacagcagga

SEQ ID NO: 439263 - RNA, 22 nt, Human
aacaugaugugaagcaugaacu

SEQ ID NO: 439264 - RNA, 22 nt, Human
ucagaacuacauggacauguua

SEQ ID NO: 439265 - RNA, 21 nt, Human
ugggcacugagggugcugcuc

SEQ ID NO: 439266 - RNA, 22 nt, Human
cggcucagcuagcuuggcccca

SEQ ID NO: 439267 - RNA, 22 nt, Human
ucccugagcugagcucaacagc

SEQ ID NO: 439268 - RNA, 22 nt, Human
ggaagggcaaaagagaugaacu

SEQ ID NO: 439269 - RNA, 22 nt, Human
ucuuagcaaauacuacuuagaa

SEQ ID NO: 439270 - RNA, 22 nt, Human
guuucacagucugcagaauuuu

SEQ ID NO: 439271 - RNA, 22 nt, Human
aggcagguuggugagaagacug

SEQ ID NO: 439272 - RNA, 22 nt, Human
acaaucacacaugcaauuauac

SEQ ID NO: 439273 - RNA, 22 nt, Human
agaagcacaccaguagacaggg

SEQ ID NO: 439274 - RNA, 22 nt, Human
ccucagagaaaugucuauucaa

SEQ ID NO: 439275 - RNA, 18 nt, Human
uugagaaauaagcacuaa

SEQ ID NO: 439276 - RNA, 21 nt, Human
aggguccuacagggcucagga

SEQ ID NO: 439277 - RNA, 22 nt, Human
gucagcugucuccccagagugg

SEQ ID NO: 439278 - RNA, 22 nt, Human
ugucaccaguuccaggaaauaa

SEQ ID NO: 439279 - RNA, 22 nt, Human
gccuggccgcuccgagcuccgc

SEQ ID NO: 439280 - RNA, 22 nt, Human
gccuggcucacagagcagccuu

SEQ ID NO: 439281 - RNA, 22 nt, Human
caguggccugagccaggcuucc

SEQ ID NO: 439282 - RNA, 22 nt, Human
ucugggagagucacaggcauug

SEQ ID NO: 439283 - RNA, 22 nt, Human
gcacagccggaccgaggaaaag

SEQ ID NO: 439284 - RNA, 22 nt, Human
auuguuaaacugaagcauuacu

SEQ ID NO: 439285 - RNA, 22 nt, Human
uuaguuuucccaucuuuauggu

SEQ ID NO: 439286 - RNA, 22 nt, Human
guggcagggcaaugcucccucu

SEQ ID NO: 439287 - RNA, 22 nt, Human
caggcagcgcucguggccuggc

SEQ ID NO: 439288 - RNA, 22 nt, Human
cccuccucaacucuggcuucca

SEQ ID NO: 439289 - RNA, 22 nt, Human
aaaaagauguccugaaguuuag

SEQ ID NO: 439290 - RNA, 22 nt, Human
gaucugaagaguuauuuucuga

SEQ ID NO: 439291 - RNA, 22 nt, Human
agcauucaugaugacaacagga

SEQ ID NO: 439292 - RNA, 22 nt, Human
agaauuucaaaaggaagccagc

SEQ ID NO: 439293 - RNA, 22 nt, Human
uuugcaaagugcuugcagagua

SEQ ID NO: 439294 - RNA, 22 nt, Human
aggagaaguaaggcuagaugau

SEQ ID NO: 439295 - RNA, 22 nt, Human
uacagaggcacaugcaauuuuc

SEQ ID NO: 439296 - RNA, 22 nt, Human
uggagagaaaguugaauggagg

SEQ ID NO: 439297 - RNA, 22 nt, Human
ucagcacuuuuacucucuuugc

SEQ ID NO: 439298 - RNA, 22 nt, Human
ccaaacuguuucguauuuaugc

SEQ ID NO: 439299 - RNA, 18 nt, Human
gcuuugcacucauguugu

SEQ ID NO: 439300 - RNA, 19 nt, Human
gccugccuggguuucugag

SEQ ID NO: 439301 - RNA, 22 nt, Human
cugucucugucuuaacucccag

SEQ ID NO: 439302 - RNA, 22 nt, Human
agggaaggagguuagaacccac

SEQ ID NO: 439303 - RNA, 22 nt, Human
agcuagggcaaauaugagauac

SEQ ID NO: 439304 - RNA, 19 nt, Human
uagcccuggccaucaugag

SEQ ID NO: 439305 - RNA, 22 nt, Human
agcaacagggggauggccacug

SEQ ID NO: 439306 - RNA, 22 nt, Human
auaacuuaaugggucaugcucu

SEQ ID NO: 439307 - RNA, 22 nt, Human
ugcugccaugcagagcaacaga

SEQ ID NO: 439308 - RNA, 22 nt, Human
cuauugcauuugcaucuucauc

SEQ ID NO: 439309 - RNA, 22 nt, Human
cucaggccagguuucucccaca

SEQ ID NO: 439310 - RNA, 22 nt, Human
cucuguagaaacagggcagaag

SEQ ID NO: 439311 - RNA, 22 nt, Human
cccugggcaccaggccugguaa

SEQ ID NO: 439312 - RNA, 22 nt, Human
aaaaggaggcaaacagccuaga

SEQ ID NO: 439313 - RNA, 22 nt, Human
ucuguagucugugccauagcug

SEQ ID NO: 439314 - RNA, 22 nt, Human
aggaugagauugcuguguugua

SEQ ID NO: 439315 - RNA, 22 nt, Human
gggagggguugcauguuugagu

SEQ ID NO: 439316 - RNA, 23 nt, Human
ugguccugccaacggugccccuc

SEQ ID NO: 439317 - RNA, 20 nt, Human
uggugagagcaccugauggg

SEQ ID NO: 439318 - RNA, 20 nt, Human
gcuuccagaggaggccccgu

SEQ ID NO: 439319 - RNA, 17 nt, Human
ugcaggcuccugucccu

SEQ ID NO: 439320 - RNA, 21 nt, Human
aaaguugauuuagauugguga

SEQ ID NO: 439321 - RNA, 22 nt, Human
ucuccaggagaaauaugaagga

SEQ ID NO: 439322 - RNA, 22 nt, Human
gccuggagaagauggaacuagc

SEQ ID NO: 439323 - RNA, 22 nt, Human
gcugucaggaacaugccuuggu

SEQ ID NO: 439324 - RNA, 22 nt, Human
gcuggcagguaaagccccgggg

SEQ ID NO: 439325 - RNA, 22 nt, Human
agguccugaagauuuuacuaga

SEQ ID NO: 439326 - RNA, 22 nt, Human
cagcuguugaucucuuaagccu

SEQ ID NO: 439327 - RNA, 21 nt, Human
agaugcugugcuccaggagca

SEQ ID NO: 439328 - RNA, 22 nt, Human
cuugacaacuggcagauauaua

SEQ ID NO: 439329 - RNA, 22 nt, Human
gucuccuccauggagaugguau

SEQ ID NO: 439330 - RNA, 22 nt, Human
aggcagguuacaaaaacuuuau

SEQ ID NO: 439331 - RNA, 22 nt, Human
agcaaggccgagaggaugcuau

SEQ ID NO: 439332 - RNA, 22 nt, Human
cccugccuucuuggccuuuaaa

SEQ ID NO: 439333 - RNA, 22 nt, Human
aagagacuucuagauuuguuga

SEQ ID NO: 439334 - RNA, 23 nt, Human
cccagcagauuguaaagugucca

SEQ ID NO: 439335 - RNA, 19 nt, Human
agcagagcagggccguggg

SEQ ID NO: 439336 - RNA, 22 nt, Human
aaggcaauguuagcaacauaau

SEQ ID NO: 439337 - RNA, 22 nt, Human
uccccagguccugucggcuccu

SEQ ID NO: 439338 - RNA, 22 nt, Human
ugcaaauuucuuuaguacauaa

SEQ ID NO: 439339 - RNA, 22 nt, Human
acaagauuuaaugcaacccaag

SEQ ID NO: 439340 - RNA, 22 nt, Human
gccccucccagucaggagcacu

SEQ ID NO: 439341 - RNA, 22 nt, Human
uuuucauuuacauuagggaaga

SEQ ID NO: 439342 - RNA, 22 nt, Human
ugagaaaacaguuuguaauaau

SEQ ID NO: 439343 - RNA, 22 nt, Human
gcaguaagauguuucccagagc

SEQ ID NO: 439344 - RNA, 22 nt, Human
guuuuucucugaaauaguugac

SEQ ID NO: 439345 - RNA, 22 nt, Human
uaauuuaugguauguguguaau

SEQ ID NO: 439346 - RNA, 22 nt, Human
ugggcacuggaagccugcugug

SEQ ID NO: 439347 - RNA, 22 nt, Human
aucuuuuacauuacugcccaga

SEQ ID NO: 439348 - RNA, 22 nt, Human
gagaaggccaggaacccagugu

SEQ ID NO: 439349 - RNA, 22 nt, Human
aggcaccucagcugagccuggg

SEQ ID NO: 439350 - RNA, 22 nt, Human
gcagcugcagguggucccaugc

SEQ ID NO: 439351 - RNA, 22 nt, Human
uuuaagaugguauuuuauaaag

SEQ ID NO: 439352 - RNA, 22 nt, Human
acauucaaaauuagguuaguug

SEQ ID NO: 439353 - RNA, 22 nt, Human
cagucuugcuuuacugagaugg

SEQ ID NO: 439354 - RNA, 17 nt, Human
ccuuucucuuucaucuc

SEQ ID NO: 439355 - RNA, 22 nt, Human
uugcagcuucuaacagcuucag

SEQ ID NO: 439356 - RNA, 19 nt, Human
uauucaggaugauggcaca

SEQ ID NO: 439357 - RNA, 22 nt, Human
gcuggccauggccugcgccauc

SEQ ID NO: 439358 - RNA, 22 nt, Human
gaagaggcuuuccuagggcaag

SEQ ID NO: 439359 - RNA, 22 nt, Human
ccuggguuaguaucuguuucca

SEQ ID NO: 439360 - RNA, 22 nt, Human
caauuucaagauucuguucuuu

SEQ ID NO: 439361 - RNA, 22 nt, Human
ucccucagaugagcuccuagca

SEQ ID NO: 439362 - RNA, 22 nt, Human
uuaaaucaggcaucauuucagu

SEQ ID NO: 439363 - RNA, 22 nt, Human
gcacauauguaaauagcugccu

SEQ ID NO: 439364 - RNA, 22 nt, Human
auugaaaaaugacuauugcuua

SEQ ID NO: 439365 - RNA, 22 nt, Human
agcuaacacauuccagcuauuu

SEQ ID NO: 439366 - RNA, 22 nt, Human
ugcaucagcugugcuucuugac

SEQ ID NO: 439367 - RNA, 22 nt, Human
gaauuuggaucuuugauagagu

SEQ ID NO: 439368 - RNA, 22 nt, Human
acaggcaggcgggacagcccga

SEQ ID NO: 439369 - RNA, 22 nt, Human
aguugaauaauuagacauaucu

SEQ ID NO: 439370 - RNA, 22 nt, Human
ugcauauccacaccuuaucucu

SEQ ID NO: 439371 - RNA, 22 nt, Human
gcuuagcagugugugcuuuuga

SEQ ID NO: 439372 - RNA, 22 nt, Human
ugcagcagggcccaggcacaga

SEQ ID NO: 439373 - RNA, 22 nt, Human
uguuugaaaaguggagauuuau

SEQ ID NO: 439374 - RNA, 22 nt, Human
uugagcaaagcagccauucauu

SEQ ID NO: 439375 - RNA, 22 nt, Human
ggacaagccugugaguggguuu

SEQ ID NO: 439376 - RNA, 22 nt, Human
guaccauaaugagucucuuaaa

SEQ ID NO: 439377 - RNA, 22 nt, Human
caggcuggagugcagugucgcc

SEQ ID NO: 439378 - RNA, 22 nt, Human
uuacaguaugaucaacuuuuca

SEQ ID NO: 439379 - RNA, 22 nt, Human
augagggcagcuauguaagugu

SEQ ID NO: 439380 - RNA, 22 nt, Human
auuugcuucauagaucugugga

SEQ ID NO: 439381 - RNA, 22 nt, Human
agagaaucugggaagauguuaa

SEQ ID NO: 439382 - RNA, 22 nt, Human
caguuuaaagaaggaugggagu

SEQ ID NO: 439383 - RNA, 22 nt, Human
uuugaaauuaagauauugucca

SEQ ID NO: 439384 - RNA, 22 nt, Human
ggcagcugauuagcaucaagga

SEQ ID NO: 439385 - RNA, 22 nt, Human
acugggccggugcagaguaguu

SEQ ID NO: 439386 - RNA, 22 nt, Human
ugucccagcagcuggguucucu

SEQ ID NO: 439387 - RNA, 19 nt, Human
agcuccaggccuggaugcu

SEQ ID NO: 439388 - RNA, 22 nt, Human
auagcacugguuuuucuugguu

SEQ ID NO: 439389 - RNA, 22 nt, Human
ggcagcugcaaaucugcucugu

SEQ ID NO: 439390 - RNA, 22 nt, Human
uggccuccccuaacagccucuu

SEQ ID NO: 439391 - RNA, 22 nt, Human
aacauaaguggcacuuugccca

SEQ ID NO: 439392 - RNA, 22 nt, Human
acagagcuaauguugcauaggc

SEQ ID NO: 439393 - RNA, 22 nt, Human
ggcagccauggacacuggcuag

SEQ ID NO: 439394 - RNA, 22 nt, Human
uggcacugagcagccgcggcag

SEQ ID NO: 439395 - RNA, 22 nt, Human
cuuuacaaccuaaguugaagcu

SEQ ID NO: 439396 - RNA, 22 nt, Human
ccagcuccaaguuugggcauca

SEQ ID NO: 439397 - RNA, 22 nt, Human
gccaggcagcugggagggugcc

SEQ ID NO: 439398 - RNA, 22 nt, Human
gaaaggagugcuuuccaggucu

SEQ ID NO: 439399 - RNA, 22 nt, Human
uaguguuuaguacauaugcaua

SEQ ID NO: 439400 - RNA, 21 nt, Human
aacuuugcuuaacugugugga

SEQ ID NO: 439401 - RNA, 22 nt, Human
gcugagugagguccagagcuug

SEQ ID NO: 439402 - RNA, 22 nt, Human
aacaucuacagugagauguuag

SEQ ID NO: 439403 - RNA, 19 nt, Human
auguuuacacucaggggcu

SEQ ID NO: 439404 - RNA, 22 nt, Human
agagagguuggcuaggauguuu

SEQ ID NO: 439405 - RNA, 22 nt, Human
ugcuggcucuaggcugagacag

SEQ ID NO: 439406 - RNA, 22 nt, Human
ugcuuugcucucacuguaaggu

SEQ ID NO: 439407 - RNA, 22 nt, Human
agguccuguccuuggucucuga

SEQ ID NO: 439408 - RNA, 23 nt, Human
cucucccccuuugauguuagcuc

SEQ ID NO: 439409 - RNA, 22 nt, Human
gcccagcuccucugcagacccu

SEQ ID NO: 439410 - RNA, 22 nt, Human
ugccugggguuggcaaacugcu

SEQ ID NO: 439411 - RNA, 22 nt, Human
ucugucuccugccagugccucu

SEQ ID NO: 439412 - RNA, 22 nt, Human
gcugcucucagagcucaugcug

SEQ ID NO: 439413 - RNA, 22 nt, Human
uaguuuaauggucaacuaauga

SEQ ID NO: 439414 - RNA, 22 nt, Human
cuugccuucagugucccuuugc

SEQ ID NO: 439415 - RNA, 22 nt, Human
cugccuggggaaugugaggauu

SEQ ID NO: 439416 - RNA, 22 nt, Human
uagcugccauugcuccaggaag

SEQ ID NO: 439417 - RNA, 22 nt, Human
aaagccagcaaggugaguuuca

SEQ ID NO: 439418 - RNA, 22 nt, Human
agcugagcucaggcugauguaa

SEQ ID NO: 439419 - RNA, 21 nt, Human
ucaggaagagccaguucaugc

SEQ ID NO: 439420 - RNA, 22 nt, Human
aggaccagccuccaggucucuu

SEQ ID NO: 439421 - RNA, 22 nt, Human
ccagaagggcuauugcagugac

SEQ ID NO: 439422 - RNA, 18 nt, Human
uagauuaaaauugaauuc

SEQ ID NO: 439423 - RNA, 22 nt, Human
cugggccuagaggaagcugaca

SEQ ID NO: 439424 - RNA, 22 nt, Human
aguauauggggaauugcauaau

SEQ ID NO: 439425 - RNA, 22 nt, Human
cugagagguaagcagcgcagug

SEQ ID NO: 439426 - RNA, 22 nt, Human
uccucuccagcaaacuggcuau

SEQ ID NO: 439427 - RNA, 22 nt, Human
caggcugcggucggcucugguc

SEQ ID NO: 439428 - RNA, 22 nt, Human
cacugguagcaguuaaguuagg

SEQ ID NO: 439429 - RNA, 22 nt, Human
cagcaaauuuuaauacugcuuu

SEQ ID NO: 439430 - RNA, 21 nt, Human
agucacauuggggguuuaggg

SEQ ID NO: 439431 - RNA, 22 nt, Human
cccaguccuaaagcagacgcca

SEQ ID NO: 439432 - RNA, 22 nt, Human
caggaaugccaaccagugcaug

SEQ ID NO: 439433 - RNA, 22 nt, Human
gagcacagauccuggagccaca

SEQ ID NO: 439434 - RNA, 22 nt, Human
cucaggcuaagaaggccaagug

SEQ ID NO: 439435 - RNA, 22 nt, Human
ugaggauuuaaugggacucauu

SEQ ID NO: 439436 - RNA, 22 nt, Human
gucccugacacccggguggagg

SEQ ID NO: 439437 - RNA, 22 nt, Human
uuucacauuggcuucuauuucu

SEQ ID NO: 439438 - RNA, 22 nt, Human
aggcagcaugcucugcuucuac

SEQ ID NO: 439439 - RNA, 22 nt, Human
uuuggcacauucugucacauuc

SEQ ID NO: 439440 - RNA, 22 nt, Human
ggcaaacaggagaguaaagaga

SEQ ID NO: 439441 - RNA, 19 nt, Human
ugucacugucauggcccag

SEQ ID NO: 439442 - RNA, 22 nt, Human
aggaugaggcuggcaggucuug

SEQ ID NO: 439443 - RNA, 22 nt, Human
uugagacagugggguguugccg

SEQ ID NO: 439444 - RNA, 22 nt, Human
agaccacagucaggcuccuggu

SEQ ID NO: 439445 - RNA, 22 nt, Human
auaaauugugcuuuugacaucu

SEQ ID NO: 439446 - RNA, 22 nt, Human
uucuaacuuuugaggcaaugug

SEQ ID NO: 439447 - RNA, 22 nt, Human
cagagacaggaaucagcugcag

SEQ ID NO: 439448 - RNA, 22 nt, Human
uucuggcuuauccuaacucuaa

SEQ ID NO: 439449 - RNA, 22 nt, Human
agcaaggcuaaauuucaguuau

SEQ ID NO: 439450 - RNA, 20 nt, Human
guuuauacagaagaccccaa

SEQ ID NO: 439451 - RNA, 22 nt, Human
gcaaauaauauacuuugaucuc

SEQ ID NO: 439452 - RNA, 22 nt, Human
agauucaaagugaagaacuuaa

SEQ ID NO: 439453 - RNA, 22 nt, Human
gacaggcagaccugugcccugg

SEQ ID NO: 439454 - RNA, 22 nt, Human
agaguucacacucagugcaccc

SEQ ID NO: 439455 - RNA, 22 nt, Human
ugauacagagaaagcaucuuuu

SEQ ID NO: 439456 - RNA, 22 nt, Human
ccagaaaaggagcugcaggaug

SEQ ID NO: 439457 - RNA, 22 nt, Human
uuugcagaguaccugaagagga

SEQ ID NO: 439458 - RNA, 22 nt, Human
ggcaccagggaaggaaggcugg

SEQ ID NO: 439459 - RNA, 22 nt, Human
augggaggaucacuugaggcca

SEQ ID NO: 439460 - RNA, 22 nt, Human
auacaaguugugauaauguaaa

SEQ ID NO: 439461 - RNA, 22 nt, Human
ggagucaccugggaggacuggg

SEQ ID NO: 439462 - RNA, 20 nt, Human
caguccugccccuuggggac

SEQ ID NO: 439463 - RNA, 22 nt, Human
acauuacuuaccuuggguucua

SEQ ID NO: 439464 - RNA, 22 nt, Human
uucauucauguauugucuaugg

SEQ ID NO: 439465 - RNA, 19 nt, Human
uaaaguugaaaucaagucc

SEQ ID NO: 439466 - RNA, 22 nt, Human
agucccagccuaggcugugcug

SEQ ID NO: 439467 - RNA, 22 nt, Human
auuuuccucaagccucuggaag

SEQ ID NO: 439468 - RNA, 22 nt, Human
acacuuugaagauggaaacuug

SEQ ID NO: 439469 - RNA, 22 nt, Human
gugucacaugguuuacugcagc

SEQ ID NO: 439470 - RNA, 18 nt, Human
uccaguuuucccagcauc

SEQ ID NO: 439471 - RNA, 22 nt, Human
aagaggcgcuccucacuuccua

SEQ ID NO: 439472 - RNA, 22 nt, Human
gcagauggcagcccaggcuggg

SEQ ID NO: 439473 - RNA, 22 nt, Human
ggaaaaauagaguauacuuuaa

SEQ ID NO: 439474 - RNA, 22 nt, Human
gaagccaaguccucgaguuuca

SEQ ID NO: 439475 - RNA, 22 nt, Human
gggucaggccucaaggugggcu

SEQ ID NO: 439476 - RNA, 22 nt, Human
cccaggguagcugagcuggcag

SEQ ID NO: 439477 - RNA, 22 nt, Human
aggcuugggucagaaggcuugu

SEQ ID NO: 439478 - RNA, 22 nt, Human
aacucucauuuuagguguaagg

SEQ ID NO: 439479 - RNA, 22 nt, Human
acuuugcagguacaugagcauc

SEQ ID NO: 439480 - RNA, 22 nt, Human
uucuucccagccagcacagccc

SEQ ID NO: 439481 - RNA, 22 nt, Human
gaauucuagucacacacauuca

SEQ ID NO: 439482 - RNA, 22 nt, Human
uucaaacuaugacuucagcuac

SEQ ID NO: 439483 - RNA, 22 nt, Human
uuucuagaaauagagauagagu

SEQ ID NO: 439484 - RNA, 22 nt, Human
agggucugaccaccaguaggga

SEQ ID NO: 439485 - RNA, 22 nt, Human
gaguuaaauagcuuaggauuca

SEQ ID NO: 439486 - RNA, 22 nt, Human
uucuuauguucacauaauucca

SEQ ID NO: 439487 - RNA, 22 nt, Human
gaaggcugaugacagauucugc

SEQ ID NO: 439488 - RNA, 22 nt, Human
ucugggagguaaccaugcugau

SEQ ID NO: 439489 - RNA, 22 nt, Human
cagagccuuccuagcagacucu

SEQ ID NO: 439490 - RNA, 22 nt, Human
guguguguauauauacacacac

SEQ ID NO: 439491 - RNA, 22 nt, Human
uuuggaagauaguucggcaguu

SEQ ID NO: 439492 - RNA, 22 nt, Human
uuuacagcagcaugauuuauaa

SEQ ID NO: 439493 - RNA, 21 nt, Human
uccuggcuuuaugcuaccucu

SEQ ID NO: 439494 - RNA, 22 nt, Human
gaugccugcauuucaggagagu

SEQ ID NO: 439495 - RNA, 22 nt, Human
ugcaaaaaggcagacuggugau

SEQ ID NO: 439496 - RNA, 22 nt, Human
ugcugggcuugaaagcugcuaa

SEQ ID NO: 439497 - RNA, 19 nt, Human
ugaaggagggggauggcca

SEQ ID NO: 439498 - RNA, 22 nt, Human
agaguggguuauaggcagacuu

SEQ ID NO: 439499 - RNA, 22 nt, Human
cuggucccugaguaguuaugca

SEQ ID NO: 439500 - RNA, 22 nt, Human
aagagacuaagaaagggcaaua

SEQ ID NO: 439501 - RNA, 22 nt, Human
ggcagcaguggcugcuauuguc

SEQ ID NO: 439502 - RNA, 22 nt, Human
agcuggugccugcuuuugugug

SEQ ID NO: 439503 - RNA, 22 nt, Human
gccuggcaaggcccuguugacu

SEQ ID NO: 439504 - RNA, 22 nt, Human
uucuaaagccuguccuaucaga

SEQ ID NO: 439505 - RNA, 22 nt, Human
aaguccugccaccuauaagccu

SEQ ID NO: 439506 - RNA, 22 nt, Human
ucacacuuagagcgaauuguuu

SEQ ID NO: 439507 - RNA, 22 nt, Human
ugcaggcuggaggagggacuaa

SEQ ID NO: 439508 - RNA, 19 nt, Human
uccugcagaccagaccugu

SEQ ID NO: 439509 - RNA, 22 nt, Human
uguacuaaugcauuuaacuaac

SEQ ID NO: 439510 - RNA, 22 nt, Human
ccaggcugugcuuuucauaaau

SEQ ID NO: 439511 - RNA, 22 nt, Human
uacaggcacugaaaugcuuauu

SEQ ID NO: 439512 - RNA, 22 nt, Human
uggccuggcagagcaaggccug

SEQ ID NO: 439513 - RNA, 22 nt, Human
uaauuuauauggaauuguugcu

SEQ ID NO: 439514 - RNA, 22 nt, Human
ccuuagcauggcugugcugugu

SEQ ID NO: 439515 - RNA, 21 nt, Human
ccuggcagaagccugauaugc

SEQ ID NO: 439516 - RNA, 22 nt, Human
aucacuaugggcauuauauuua

SEQ ID NO: 439517 - RNA, 22 nt, Human
caauaacugcuaaauucccugu

SEQ ID NO: 439518 - RNA, 22 nt, Human
uuucagaggugcuuggaaugcu

SEQ ID NO: 439519 - RNA, 22 nt, Human
aucaaauacaaagggcauaagg

SEQ ID NO: 439520 - RNA, 22 nt, Human
ucacugcaaccucugccuuccg

SEQ ID NO: 439521 - RNA, 22 nt, Human
ugaaccagagucuccagugguu

SEQ ID NO: 439522 - RNA, 22 nt, Human
cuauuaaauacucuucaaauug

SEQ ID NO: 439523 - RNA, 22 nt, Human
gugcaugucggggugcauguca

SEQ ID NO: 439524 - RNA, 22 nt, Human
ccaggaaaauaccaagcuuuaa

SEQ ID NO: 439525 - RNA, 22 nt, Human
uggauaaaugugcagaugacau

SEQ ID NO: 439526 - RNA, 22 nt, Human
ggaagccagagugcugggcagg

SEQ ID NO: 439527 - RNA, 22 nt, Human
ugugugaaggaauauauacuca

SEQ ID NO: 439528 - RNA, 22 nt, Human
ucucagagcaucauuuucuuag

SEQ ID NO: 439529 - RNA, 22 nt, Human
uuuuccuuuggaagaugcauau

SEQ ID NO: 439530 - RNA, 20 nt, Human
uguaccauaaugacuggcuc

SEQ ID NO: 439531 - RNA, 22 nt, Human
uuccuuccauagcaaaacaugc

SEQ ID NO: 439532 - RNA, 22 nt, Human
agcaggcaggcccagcggcugg

SEQ ID NO: 439533 - RNA, 22 nt, Human
ucuacacuguagaauuauaagg

SEQ ID NO: 439534 - RNA, 22 nt, Human
ugcucaggccagccggacagag

SEQ ID NO: 439535 - RNA, 22 nt, Human
ucaggcugguccccacagugga

SEQ ID NO: 439536 - RNA, 22 nt, Human
aagagcauuuuguaaaauccuu

SEQ ID NO: 439537 - RNA, 22 nt, Human
cuccucagucaggucuaggguc

SEQ ID NO: 439538 - RNA, 22 nt, Human
ugugaauaaugccgcaauaaac

SEQ ID NO: 439539 - RNA, 23 nt, Human
agcuguuucauuauuacaacacc

SEQ ID NO: 439540 - RNA, 22 nt, Human
uucuggauauaacauucagucc

SEQ ID NO: 439541 - RNA, 22 nt, Human
gaguccugcccuuguguagucc

SEQ ID NO: 439542 - RNA, 22 nt, Human
auuuugaagggaauugaaguuc

SEQ ID NO: 439543 - RNA, 22 nt, Human
caguucuaauuaauaggaguaa

SEQ ID NO: 439544 - RNA, 22 nt, Human
uggccagccacaauauaaagua

SEQ ID NO: 439545 - RNA, 22 nt, Human
acagauuuuugguaaauaauuu

SEQ ID NO: 439546 - RNA, 22 nt, Human
cagccuccugggacacucaccg

SEQ ID NO: 439547 - RNA, 22 nt, Human
guuucagauuugguuucagaag

SEQ ID NO: 439548 - RNA, 22 nt, Human
uccucagcauuagcacagacau

SEQ ID NO: 439549 - RNA, 22 nt, Human
ugaugagggaacugguucauac

SEQ ID NO: 439550 - RNA, 22 nt, Human
auaaagcaucuagucugucacu

SEQ ID NO: 439551 - RNA, 22 nt, Human
uggaggcccacacuggguagau

SEQ ID NO: 439552 - RNA, 22 nt, Human
gugugugugcauauaacauaua

SEQ ID NO: 439553 - RNA, 22 nt, Human
gugcccuguucauuucucuccc

SEQ ID NO: 439554 - RNA, 22 nt, Human
ccuuagcagggagucuguccag

SEQ ID NO: 439555 - RNA, 22 nt, Human
uugcaaaugugguuagggcuuu

SEQ ID NO: 439556 - RNA, 22 nt, Human
ccagugcacagccaggcaggug

SEQ ID NO: 439557 - RNA, 20 nt, Human
uggaagacacugaagggcca

SEQ ID NO: 439558 - RNA, 22 nt, Human
uacaguaccagaaaugcuaaga

SEQ ID NO: 439559 - RNA, 22 nt, Human
augcuuuaaacuauaaauccac

SEQ ID NO: 439560 - RNA, 22 nt, Human
agugauauuagcaaaugguuau

SEQ ID NO: 439561 - RNA, 22 nt, Human
gagcucccaggccccagcaagg

SEQ ID NO: 439562 - RNA, 22 nt, Human
gcagcccagguguagcucuuug

SEQ ID NO: 439563 - RNA, 22 nt, Human
aaggcagauauaaagacuagag

SEQ ID NO: 439564 - RNA, 22 nt, Human
gcagaggugaccagcagcaggg

SEQ ID NO: 439565 - RNA, 22 nt, Human
gcaggagcugcucuccugacga

SEQ ID NO: 439566 - RNA, 22 nt, Human
ugcauuucacagacugagaaau

SEQ ID NO: 439567 - RNA, 22 nt, Human
ucagugucuugaccugggugug

SEQ ID NO: 439568 - RNA, 22 nt, Human
cugagccagcgggcucacuuuu

SEQ ID NO: 439569 - RNA, 22 nt, Human
ggccuuccuucccagccuacug

SEQ ID NO: 439570 - RNA, 22 nt, Human
cauaggaaaagcauucuucuug

SEQ ID NO: 439571 - RNA, 22 nt, Human
gagcaggaacugaaaaugagac

SEQ ID NO: 439572 - RNA, 22 nt, Human
ccagcuccccucagcagguaau

SEQ ID NO: 439573 - RNA, 22 nt, Human
ugagacaggcuuccuucuuggg

SEQ ID NO: 439574 - RNA, 22 nt, Human
ugagacagcccuucugcacagg

SEQ ID NO: 439575 - RNA, 22 nt, Human
uuucuaaacuggauucagccug

SEQ ID NO: 439576 - RNA, 22 nt, Human
gaaggcuguggcuggucucagu

SEQ ID NO: 439577 - RNA, 22 nt, Human
ugcuucacaagaauucaggacc

SEQ ID NO: 439578 - RNA, 22 nt, Human
cuggcucccucgcugaggugcu

SEQ ID NO: 439579 - RNA, 22 nt, Human
agaggggaaguaaugaaugaua

SEQ ID NO: 439580 - RNA, 22 nt, Human
acagucuaaucuuguguucugu

SEQ ID NO: 439581 - RNA, 22 nt, Human
ccaguccagugccaugcauggc

SEQ ID NO: 439582 - RNA, 22 nt, Human
cuggcuccaccccaggaggaug

SEQ ID NO: 439583 - RNA, 22 nt, Human
ugagaaggcucaggcuuagaga

SEQ ID NO: 439584 - RNA, 20 nt, Human
uccugcaguuccuaggaggg

SEQ ID NO: 439585 - RNA, 22 nt, Human
gcccaggggcagcgcauagugg

SEQ ID NO: 439586 - RNA, 23 nt, Human
gcucuggcagcuugugucagcac

SEQ ID NO: 439587 - RNA, 22 nt, Human
uuuauccacucauccaugccuc

SEQ ID NO: 439588 - RNA, 22 nt, Human
auuucaaggacuacuuuucaau

SEQ ID NO: 439589 - RNA, 22 nt, Human
uuucagaggaggaaggcaguua

SEQ ID NO: 439590 - RNA, 22 nt, Human
auuguauaagucuauuuacaau

SEQ ID NO: 439591 - RNA, 22 nt, Human
ucacgugagggaccugugucug

SEQ ID NO: 439592 - RNA, 19 nt, Human
acccucugccacaagccuc

SEQ ID NO: 439593 - RNA, 22 nt, Human
gaugcuuuggccccaucaugag

SEQ ID NO: 439594 - RNA, 22 nt, Human
gaggcucuuucuuuggacuuca

SEQ ID NO: 439595 - RNA, 22 nt, Human
gcuacagagcucugugaagaga

SEQ ID NO: 439596 - RNA, 17 nt, Human
guguacaagcagaaggc

SEQ ID NO: 439597 - RNA, 22 nt, Human
auucagaagcaaucacagugag

SEQ ID NO: 439598 - RNA, 22 nt, Human
agcuccaagguugaggagugag

SEQ ID NO: 439599 - RNA, 22 nt, Human
agccagcuggugggucagcugg

SEQ ID NO: 439600 - RNA, 22 nt, Human
gacuuucucuccucccaggugu

SEQ ID NO: 439601 - RNA, 22 nt, Human
gagccuguguuuccuguagcca

SEQ ID NO: 439602 - RNA, 22 nt, Human
gagcugggauuugaaccuggga

SEQ ID NO: 439603 - RNA, 22 nt, Human
cagcacuucaaugagcauuuca

SEQ ID NO: 439604 - RNA, 22 nt, Human
cauguacacucauguaacuaua

SEQ ID NO: 439605 - RNA, 22 nt, Human
gccuucucugugagcuccuagg

SEQ ID NO: 439606 - RNA, 22 nt, Human
acagagccacuuuggugccuac

SEQ ID NO: 439607 - RNA, 18 nt, Human
agcagcaauuugggauga

SEQ ID NO: 439608 - RNA, 22 nt, Human
uggagcugagagccaggcuggc

SEQ ID NO: 439609 - RNA, 22 nt, Human
gagccaggagauaccuaagggg

SEQ ID NO: 439610 - RNA, 22 nt, Human
ccugggauuuccugagcacucu

SEQ ID NO: 439611 - RNA, 22 nt, Human
agcaggcuccaggcuggccauc

SEQ ID NO: 439612 - RNA, 20 nt, Human
cucuggcaaaggaugccuau

SEQ ID NO: 439613 - RNA, 22 nt, Human
gcccuucugcuguuagguagcc

SEQ ID NO: 439614 - RNA, 22 nt, Human
aagacuuucccucaucagaacg

SEQ ID NO: 439615 - RNA, 22 nt, Human
cagcccagccuugucucuuuau

SEQ ID NO: 439616 - RNA, 19 nt, Human
ccaggagagcuuggagaag

SEQ ID NO: 439617 - RNA, 22 nt, Human
ugcacacacucugcauauacuu

SEQ ID NO: 439618 - RNA, 22 nt, Human
ggcaggcauugcaacauguaca

SEQ ID NO: 439619 - RNA, 22 nt, Human
uuuucaaagacuggaggcugau

SEQ ID NO: 439620 - RNA, 22 nt, Human
ugacagggccaugcugcacugc

SEQ ID NO: 439621 - RNA, 21 nt, Human
ugggagagggcucagcuaccc

SEQ ID NO: 439622 - RNA, 22 nt, Human
uaauuuauuucaacugccaagg

SEQ ID NO: 439623 - RNA, 18 nt, Human
ugacucacccugucagug

SEQ ID NO: 439624 - RNA, 22 nt, Human
aggcuguguuuccccuggagcu

SEQ ID NO: 439625 - RNA, 22 nt, Human
gcccaggaguugaagggcugac

SEQ ID NO: 439626 - RNA, 22 nt, Human
gugcucacugugagacguccug

SEQ ID NO: 439627 - RNA, 22 nt, Human
uuuggcacucacuuaucauugg

SEQ ID NO: 439628 - RNA, 22 nt, Human
uggcaauuuguagaguaaauua

SEQ ID NO: 439629 - RNA, 22 nt, Human
aguccugugaguuuuucuaguu

SEQ ID NO: 439630 - RNA, 22 nt, Human
aggcuaggguaacagauguggc

SEQ ID NO: 439631 - RNA, 22 nt, Human
cuucuugagcauggguaguacu

SEQ ID NO: 439632 - RNA, 22 nt, Human
auauagcacuuguuuugcaugu

SEQ ID NO: 439633 - RNA, 22 nt, Human
augcacaguauguagggucuau

SEQ ID NO: 439634 - RNA, 22 nt, Human
gccuggcaggggccugggagug

SEQ ID NO: 439635 - RNA, 22 nt, Human
agcuggccuuagugagcaccug

SEQ ID NO: 439636 - RNA, 22 nt, Human
cuggugucugcucccucacagc

SEQ ID NO: 439637 - RNA, 22 nt, Human
gagcuagguuuuccagucgcau

SEQ ID NO: 439638 - RNA, 22 nt, Human
agggcagauggaacuuccccga

SEQ ID NO: 439639 - RNA, 22 nt, Human
gaucuggaaucugaaggcugag

SEQ ID NO: 439640 - RNA, 22 nt, Human
gagacugauggggcucccagaa

SEQ ID NO: 439641 - RNA, 22 nt, Human
aguuccaccauuuaggaucugu

SEQ ID NO: 439642 - RNA, 22 nt, Human
gaagaggaugacaggagccggu

SEQ ID NO: 439643 - RNA, 19 nt, Human
cauguuaugcuguaguauc

SEQ ID NO: 439644 - RNA, 22 nt, Human
ggcagcugagcauggcuaccuu

SEQ ID NO: 439645 - RNA, 22 nt, Human
gcccuggccuucaucucagaca

SEQ ID NO: 439646 - RNA, 22 nt, Human
caaguucacguugcuuuuugag

SEQ ID NO: 439647 - RNA, 22 nt, Human
gaaggcccuguuuucccuauuu

SEQ ID NO: 439648 - RNA, 22 nt, Human
ucuagagaaaaaacucaaguga

SEQ ID NO: 439649 - RNA, 22 nt, Human
gccugccuuuuggaggcacauu

SEQ ID NO: 439650 - RNA, 22 nt, Human
ccaggcugagcaugauuggagc

SEQ ID NO: 439651 - RNA, 22 nt, Human
agagacugcuuuauauuguacu

SEQ ID NO: 439652 - RNA, 22 nt, Human
aaucagagcccucugagcuuca

SEQ ID NO: 439653 - RNA, 21 nt, Human
cuuaacauuuuaaaugaaagg

SEQ ID NO: 439654 - RNA, 22 nt, Human
acaaaugagaauguagacagag

SEQ ID NO: 439655 - RNA, 22 nt, Human
caggcuggucccagagcauugc

SEQ ID NO: 439656 - RNA, 22 nt, Human
cacauuuaagcagauguggacc

SEQ ID NO: 439657 - RNA, 22 nt, Human
agagucagcuuaugacacaguc

SEQ ID NO: 439658 - RNA, 22 nt, Human
aggccuccugcagggaugagug

SEQ ID NO: 439659 - RNA, 22 nt, Human
aggcacugaagaacucuuuuug

SEQ ID NO: 439660 - RNA, 22 nt, Human
ggcucuggagcacagacgucug

SEQ ID NO: 439661 - RNA, 23 nt, Human
ucucucuggcaaauuucacauau

SEQ ID NO: 439662 - RNA, 22 nt, Human
agugccaggagcaaggagcucc

SEQ ID NO: 439663 - RNA, 19 nt, Human
cccaggguuuccucucucc

SEQ ID NO: 439664 - RNA, 22 nt, Human
acacuuuacucuuacaccauug

SEQ ID NO: 439665 - RNA, 22 nt, Human
caggguccggcugccuggcugu

SEQ ID NO: 439666 - RNA, 22 nt, Human
gcuggcaccugcaccaagcagg

SEQ ID NO: 439667 - RNA, 22 nt, Human
ggugccagccuagugcaguggu

SEQ ID NO: 439668 - RNA, 22 nt, Human
ggcacagcacagagcacaugua

SEQ ID NO: 439669 - RNA, 22 nt, Human
caggaugagaggcccagggaag

SEQ ID NO: 439670 - RNA, 22 nt, Human
gagcccugugaggaaagagggu

SEQ ID NO: 439671 - RNA, 22 nt, Human
augucccagcugagagacaacu

SEQ ID NO: 439672 - RNA, 22 nt, Human
aggcagcugcccucuccuuccu

SEQ ID NO: 439673 - RNA, 22 nt, Human
agcagcugauggggaaggaguu

SEQ ID NO: 439674 - RNA, 22 nt, Human
gagucaggcuagggugacaggc

SEQ ID NO: 439675 - RNA, 22 nt, Human
gugccugguuuggggaguguuc

SEQ ID NO: 439676 - RNA, 22 nt, Human
ccagucugugugccagccugcg

SEQ ID NO: 439677 - RNA, 22 nt, Human
gagcuguccgccccugggccga

SEQ ID NO: 439678 - RNA, 22 nt, Human
cacuugaguucuuaauagucag

SEQ ID NO: 439679 - RNA, 22 nt, Human
acuuagcauuauguaauuacua

SEQ ID NO: 439680 - RNA, 22 nt, Human
uggcccagggucuacagccuca

SEQ ID NO: 439681 - RNA, 22 nt, Human
uacaagacgagggaaguucuuu

SEQ ID NO: 439682 - RNA, 22 nt, Human
aggcugagacugugcauuagug

SEQ ID NO: 439683 - RNA, 22 nt, Human
agcaggcaguguagagccuuca

SEQ ID NO: 439684 - RNA, 22 nt, Human
uguuucaggcuucugggauuuu

SEQ ID NO: 439685 - RNA, 20 nt, Human
ugugacaaaggcauauuuua

SEQ ID NO: 439686 - RNA, 22 nt, Human
ucuaggaauuucaucuaguucu

SEQ ID NO: 439687 - RNA, 22 nt, Human
agcuuugggccacuggcuggau

SEQ ID NO: 439688 - RNA, 22 nt, Human
ugcagugguguccagguguacu

SEQ ID NO: 439689 - RNA, 22 nt, Human
ucccacucacugucucugacac

SEQ ID NO: 439690 - RNA, 22 nt, Human
uaaaggccuaguaaguugagac

SEQ ID NO: 439691 - RNA, 22 nt, Human
cugacuucagggauaaaaagua

SEQ ID NO: 439692 - RNA, 22 nt, Human
auacacugaguccuuuucucau

SEQ ID NO: 439693 - RNA, 22 nt, Human
ucaggcuguggcuuugaccgca

SEQ ID NO: 439694 - RNA, 20 nt, Human
uuucuuguacuuggagaagg

SEQ ID NO: 439695 - RNA, 22 nt, Human
cagcauggagacaaagugggca

SEQ ID NO: 439696 - RNA, 22 nt, Human
gcgcaagccacacagccugggg

SEQ ID NO: 439697 - RNA, 22 nt, Human
cugccuguuagucuagcaguua

SEQ ID NO: 439698 - RNA, 22 nt, Human
cugccucuccccagaguggccc

SEQ ID NO: 439699 - RNA, 22 nt, Human
uguaccauaauguguauuuuaa

SEQ ID NO: 439700 - RNA, 22 nt, Human
gcaggcaccgcggcggcagguu

SEQ ID NO: 439701 - RNA, 22 nt, Human
acaucuuuauacuaguccuuga

SEQ ID NO: 439702 - RNA, 23 nt, Human
acugagccagggccugggucagc

SEQ ID NO: 439703 - RNA, 18 nt, Human
agaagcagguucucccag

SEQ ID NO: 439704 - RNA, 19 nt, Human
ccacuuugcuucucugggu

SEQ ID NO: 439705 - RNA, 22 nt, Human
aggcuaggccuugcccuggaac

SEQ ID NO: 439706 - RNA, 22 nt, Human
gccuguggccgacugagagccu

SEQ ID NO: 439707 - RNA, 22 nt, Human
uuacaauugagucuauuguaug

SEQ ID NO: 439708 - RNA, 22 nt, Human
gcaggcugaguugggaaaccaa

SEQ ID NO: 439709 - RNA, 22 nt, Human
ggaggcacaccucagacuggga

SEQ ID NO: 439710 - RNA, 22 nt, Human
uuguacaaguauuaugugaaca

SEQ ID NO: 439711 - RNA, 22 nt, Human
gugcacagaagcagaagcuaga

SEQ ID NO: 439712 - RNA, 22 nt, Human
acaggccuggaaaggaaggagu

SEQ ID NO: 439713 - RNA, 22 nt, Human
agcuguguaagucauguaggug

SEQ ID NO: 439714 - RNA, 22 nt, Human
gccugagcaggcguggaccaug

SEQ ID NO: 439715 - RNA, 18 nt, Human
agcaggcguugccuggga

SEQ ID NO: 439716 - RNA, 22 nt, Human
acauuugacuguagauacuugc

SEQ ID NO: 439717 - RNA, 22 nt, Human
ccugguguugugaaguagccgu

SEQ ID NO: 439718 - RNA, 22 nt, Human
agcaggcaggaggcuacuaagg

SEQ ID NO: 439719 - RNA, 22 nt, Human
agccuggguuuuuauuaaggag

SEQ ID NO: 439720 - RNA, 22 nt, Human
guggccaggagaccuugggcau

SEQ ID NO: 439721 - RNA, 22 nt, Human
gaggcagagguuguugcaguga

SEQ ID NO: 439722 - RNA, 22 nt, Human
gagaaggcuggucuuaagucga

SEQ ID NO: 439723 - RNA, 22 nt, Human
cgaggaagaaguuugagucaag

SEQ ID NO: 439724 - RNA, 22 nt, Human
uuauugaaggaacugaaauaaa

SEQ ID NO: 439725 - RNA, 22 nt, Human
uucugaggcauagaggaugaga

SEQ ID NO: 439726 - RNA, 22 nt, Human
uaaugaggcaagagucauggcu

SEQ ID NO: 439727 - RNA, 22 nt, Human
ugcagcuguuacggacccuguc

SEQ ID NO: 439728 - RNA, 22 nt, Human
aaggcugagagucacaguccua

SEQ ID NO: 439729 - RNA, 22 nt, Human
auguuuucuagaguuuaaaauc

SEQ ID NO: 439730 - RNA, 19 nt, Human
cgcaggagccgaggugacc

SEQ ID NO: 439731 - RNA, 22 nt, Human
ucuuuuuauauugacaaaaggu

SEQ ID NO: 439732 - RNA, 22 nt, Human
gaggcagcugggauacaaggga

SEQ ID NO: 439733 - RNA, 22 nt, Human
ccugaggcuccaccuccagaga

SEQ ID NO: 439734 - RNA, 22 nt, Human
acagagacugggagcaagaggc

SEQ ID NO: 439735 - RNA, 22 nt, Human
augcauauaaggcacauguauu

SEQ ID NO: 439736 - RNA, 22 nt, Human
caggcuggagugcaguugugca

SEQ ID NO: 439737 - RNA, 22 nt, Human
ccugagugaauucccucacugu

SEQ ID NO: 439738 - RNA, 19 nt, Human
gagcugccuuuugaagacc

SEQ ID NO: 439739 - RNA, 22 nt, Human
cuugcuuuccaaaugacucacu

SEQ ID NO: 439740 - RNA, 22 nt, Human
ugccagccagggaagcucaccc

SEQ ID NO: 439741 - RNA, 22 nt, Human
cauguacaugccuacuaucaau

SEQ ID NO: 439742 - RNA, 22 nt, Human
ggcugcagagcugggugggccu

SEQ ID NO: 439743 - RNA, 21 nt, Human
cagcuccacuaaagcagcugu

SEQ ID NO: 439744 - RNA, 23 nt, Human
gaggacacagcccagacagccgu

SEQ ID NO: 439745 - RNA, 22 nt, Human
ggcugagccuggagcaucuggu

SEQ ID NO: 439746 - RNA, 21 nt, Human
ucugggcuuucuuauaaggca

SEQ ID NO: 439747 - RNA, 23 nt, Human
cagaagcaccuguugacugcugc

SEQ ID NO: 439748 - RNA, 22 nt, Human
ugagacagccucugcacucaug

SEQ ID NO: 439749 - RNA, 22 nt, Human
accagcagccuagagcguucuu

SEQ ID NO: 439750 - RNA, 22 nt, Human
cagcaguggccaucuguguggu

SEQ ID NO: 439751 - RNA, 22 nt, Human
uagaaaugcccagauucugcua

SEQ ID NO: 439752 - RNA, 22 nt, Human
ucccugagggcagcucaagucc

SEQ ID NO: 439753 - RNA, 22 nt, Human
uuuaacauguucaagaaacaua

SEQ ID NO: 439754 - RNA, 20 nt, Human
ugaauaugaccuuauuugga

SEQ ID NO: 439755 - RNA, 22 nt, Human
aaguguauauaugacuuauaaa

SEQ ID NO: 439756 - RNA, 22 nt, Human
ucccugggccuaucuuagcucc

SEQ ID NO: 439757 - RNA, 22 nt, Human
gagcagcaggccagguugcagg

SEQ ID NO: 439758 - RNA, 22 nt, Human
ucugaggcauaaccuguucugc

SEQ ID NO: 439759 - RNA, 21 nt, Human
cacaagacacauaggguguuu

SEQ ID NO: 439760 - RNA, 23 nt, Human
agaauuucuaacucuagcucugu

SEQ ID NO: 439761 - RNA, 22 nt, Human
gggaucugggccucacacacau

SEQ ID NO: 439762 - RNA, 22 nt, Human
cagugggcugugauggauucac

SEQ ID NO: 439763 - RNA, 22 nt, Human
uucagagaguuugugaguccuu

SEQ ID NO: 439764 - RNA, 22 nt, Human
ggugggcaggucacucugccuc

SEQ ID NO: 439765 - RNA, 22 nt, Human
ggcaccaggacaugacucccag

SEQ ID NO: 439766 - RNA, 22 nt, Human
gagacacucaacaaagauauga

SEQ ID NO: 439767 - RNA, 22 nt, Human
uacaagagaacuaauguaaguc

SEQ ID NO: 439768 - RNA, 22 nt, Human
gcagucagacaggaggagcucc

SEQ ID NO: 439769 - RNA, 22 nt, Human
gaggcagcugaaggagugacag

SEQ ID NO: 439770 - RNA, 22 nt, Human
gcagggagguuugcugaccugg

SEQ ID NO: 439771 - RNA, 22 nt, Human
cuuagcuagugcucagcuguca

SEQ ID NO: 439772 - RNA, 22 nt, Human
ggcaggcuagcacugauguccu

SEQ ID NO: 439773 - RNA, 22 nt, Human
guacaauagcaguuuucccuuu

SEQ ID NO: 439774 - RNA, 22 nt, Human
uauggcuuuuuauucaucuuac

SEQ ID NO: 439775 - RNA, 22 nt, Human
gagcagaugugugccaggaugc

SEQ ID NO: 439776 - RNA, 22 nt, Human
gcucccagggcagcgcagaaga

SEQ ID NO: 439777 - RNA, 22 nt, Human
ucauugcauuuauucacuggca

SEQ ID NO: 439778 - RNA, 18 nt, Human
caggccucuugaucuucc

SEQ ID NO: 439779 - RNA, 22 nt, Human
cuguggugagcaacugacugaa

SEQ ID NO: 439780 - RNA, 22 nt, Human
agggaaauuaaugugagcaaug

SEQ ID NO: 439781 - RNA, 22 nt, Human
aggagacauggaauagugaggc

SEQ ID NO: 439782 - RNA, 23 nt, Human
gagcugaguguagggagacuagg

SEQ ID NO: 439783 - RNA, 22 nt, Human
ucaaaaauggucuuugagcugc

SEQ ID NO: 439784 - RNA, 22 nt, Human
gcagagcuucuguccuucagga

SEQ ID NO: 439785 - RNA, 22 nt, Human
acuuagcacgaacauuuacuuu

SEQ ID NO: 439786 - RNA, 22 nt, Human
gggcuccagcuguuugccauga

SEQ ID NO: 439787 - RNA, 22 nt, Human
aagcugccacacggugaguacu

SEQ ID NO: 439788 - RNA, 22 nt, Human
gagacacaggcacagaagaggc

SEQ ID NO: 439789 - RNA, 22 nt, Human
ugaagcaggaaccagcagcauu

SEQ ID NO: 439790 - RNA, 18 nt, Human
uucuaaauucuguuuuua

SEQ ID NO: 439791 - RNA, 22 nt, Human
ucuccccaaccauggcacucac

SEQ ID NO: 439792 - RNA, 22 nt, Human
uguguguauaauaaugucugca

SEQ ID NO: 439793 - RNA, 22 nt, Human
gagggaaggagaguuguagcug

SEQ ID NO: 439794 - RNA, 22 nt, Human
gugccugguuuggggaauguuc

SEQ ID NO: 439795 - RNA, 22 nt, Human
ggcaacaugggaaaauuaaccu

SEQ ID NO: 439796 - RNA, 22 nt, Human
ucuccacuauuuucuagcucuu

SEQ ID NO: 439797 - RNA, 22 nt, Human
ucuuugcaggagcccuuugaac

SEQ ID NO: 439798 - RNA, 22 nt, Human
ccaggaagccugugucucugga

SEQ ID NO: 439799 - RNA, 21 nt, Human
uggcagguucaaaggccuauc

SEQ ID NO: 439800 - RNA, 22 nt, Human
aauucagaagcacaaaaccuag

SEQ ID NO: 439801 - RNA, 18 nt, Human
caaauucagugcuggaag

SEQ ID NO: 439802 - RNA, 22 nt, Human
uuauugcacuauugauuuucua

SEQ ID NO: 439803 - RNA, 22 nt, Human
gggccugggaacuugcauuuag

SEQ ID NO: 439804 - RNA, 23 nt, Human
agcuguguggccuugggcaaguu

SEQ ID NO: 439805 - RNA, 22 nt, Human
auguacaaaaugccacugaauu

SEQ ID NO: 439806 - RNA, 22 nt, Human
uccccagaugacaucaaaaggc

SEQ ID NO: 439807 - RNA, 22 nt, Human
uucagaauauuauuuuaaaggc

SEQ ID NO: 439808 - RNA, 22 nt, Human
augcuuggccccuuuauagccu

SEQ ID NO: 439809 - RNA, 22 nt, Human
gaauuucauugcucugcugugu

SEQ ID NO: 439810 - RNA, 22 nt, Human
uugaugaugcacauuuauaauu

SEQ ID NO: 439811 - RNA, 22 nt, Human
aagaacaugauggccaugugca

SEQ ID NO: 439812 - RNA, 17 nt, Human
gccuuccagcauguggg

SEQ ID NO: 439813 - RNA, 22 nt, Human
ggagcugaugacgucaccaugg

SEQ ID NO: 439814 - RNA, 22 nt, Human
caguguguggauccucccagga

SEQ ID NO: 439815 - RNA, 22 nt, Human
agagauacuuuucuuuggaugc

SEQ ID NO: 439816 - RNA, 22 nt, Human
uucuuaagucaguaagaugcaa

SEQ ID NO: 439817 - RNA, 22 nt, Human
uguuuccuaagugucucugaag

SEQ ID NO: 439818 - RNA, 22 nt, Human
uacaggcauguagcauggugau

SEQ ID NO: 439819 - RNA, 19 nt, Human
uggggccuccugucccugg

SEQ ID NO: 439820 - RNA, 22 nt, Human
ucuccucuccuuucauguuguu

SEQ ID NO: 439821 - RNA, 22 nt, Human
uguaugaaaaggaauagauuga

SEQ ID NO: 439822 - RNA, 23 nt, Human
ucugggcugagacuuggaagguc

SEQ ID NO: 439823 - RNA, 22 nt, Human
cugucaccuguucacugcagca

SEQ ID NO: 439824 - RNA, 22 nt, Human
ucuccaggcccacugauuuaua

SEQ ID NO: 439825 - RNA, 22 nt, Human
cagccucuaagcacagccucuc

SEQ ID NO: 439826 - RNA, 22 nt, Human
aacagucuacugaauaucugcg

SEQ ID NO: 439827 - RNA, 22 nt, Human
ccagagaaagcucacaggcagu

SEQ ID NO: 439828 - RNA, 19 nt, Human
cagaguacaccagauagga

SEQ ID NO: 439829 - RNA, 22 nt, Human
ucagcagugugcccagaggcug

SEQ ID NO: 439830 - RNA, 22 nt, Human
cuagagaaaaugauagcaggaa

SEQ ID NO: 439831 - RNA, 22 nt, Human
cugcccugucuuuuucugauga

SEQ ID NO: 439832 - RNA, 19 nt, Human
agaggccucagcagcuggc

SEQ ID NO: 439833 - RNA, 22 nt, Human
agcucccauuaucuucugaaac

SEQ ID NO: 439834 - RNA, 22 nt, Human
cagcccuguccaaugucugcuc

SEQ ID NO: 439835 - RNA, 22 nt, Human
acauggaagauaaaaauacuca

SEQ ID NO: 439836 - RNA, 22 nt, Human
caggcccugccuuggcaugugu

SEQ ID NO: 439837 - RNA, 22 nt, Human
cagcugccuguauuguccucau

SEQ ID NO: 439838 - RNA, 22 nt, Human
aacaggaauugcaggcagaucu

SEQ ID NO: 439839 - RNA, 22 nt, Human
agcuugacagacagaugguagc

SEQ ID NO: 439840 - RNA, 17 nt, Human
agcugagcuggccaggg

SEQ ID NO: 439841 - RNA, 22 nt, Human
agcagcugagaugguaagauuc

SEQ ID NO: 439842 - RNA, 22 nt, Human
ucuuuaugcacauaaagaaacu

SEQ ID NO: 439843 - RNA, 22 nt, Human
cccagcauggagugaggacuca

SEQ ID NO: 439844 - RNA, 22 nt, Human
cugcccugcuucugagggaagc

SEQ ID NO: 439845 - RNA, 22 nt, Human
agccagcuggagaccacuguuu

SEQ ID NO: 439846 - RNA, 22 nt, Human
agcagagcccuuccauggccuu

SEQ ID NO: 439847 - RNA, 22 nt, Human
cagcaagggauaaacaaggacg

SEQ ID NO: 439848 - RNA, 22 nt, Human
uuuauugucuucguggugccua

SEQ ID NO: 439849 - RNA, 22 nt, Human
uuuuucucuucuguaaaguggu

SEQ ID NO: 439850 - RNA, 22 nt, Human
cacaggaaaaauggguccuuua

SEQ ID NO: 439851 - RNA, 22 nt, Human
ggcaaacagacuugaccaucuu

SEQ ID NO: 439852 - RNA, 22 nt, Human
guccagcauuuaggcuugcuga

SEQ ID NO: 439853 - RNA, 20 nt, Human
aagcagaagcugcucucagc

SEQ ID NO: 439854 - RNA, 22 nt, Human
cugaggugcuagggucccugcu

SEQ ID NO: 439855 - RNA, 22 nt, Human
ugguaucagagccaucuguauu

SEQ ID NO: 439856 - RNA, 22 nt, Human
cugcccuguccuucccgccggc

SEQ ID NO: 439857 - RNA, 22 nt, Human
uuacaguauuggucacguuugu

SEQ ID NO: 439858 - RNA, 22 nt, Human
ucuggcucacuucaggcuucac

SEQ ID NO: 439859 - RNA, 20 nt, Human
uggcccaguggggcagggug

SEQ ID NO: 439860 - RNA, 20 nt, Human
ugugcccaauguccagguuc

SEQ ID NO: 439861 - RNA, 22 nt, Human
cagaauuucccacacugggacu

SEQ ID NO: 439862 - RNA, 20 nt, Human
ggccugagcauggcuggcag

SEQ ID NO: 439863 - RNA, 22 nt, Human
uuugagaaaaccagaaagaucu

SEQ ID NO: 439864 - RNA, 22 nt, Human
ggagaggaaaugccagcacuuc

SEQ ID NO: 439865 - RNA, 22 nt, Human
cugaggcucugggugucacugu

SEQ ID NO: 439866 - RNA, 19 nt, Human
cuucagcaucuccggagcu

SEQ ID NO: 439867 - RNA, 22 nt, Human
aggugacugguuuaucuggcag

SEQ ID NO: 439868 - RNA, 22 nt, Human
aggauuuggggaagaaaacacu

SEQ ID NO: 439869 - RNA, 22 nt, Human
acaguucuuaaaacuugaauua

SEQ ID NO: 439870 - RNA, 22 nt, Human
augcauauggcuugagggaaua

SEQ ID NO: 439871 - RNA, 22 nt, Human
cugcccuguuuggacagcccgg

SEQ ID NO: 439872 - RNA, 22 nt, Human
agggccacaguggggccugaga

SEQ ID NO: 439873 - RNA, 22 nt, Human
agcugguggaagggagcccaaa

SEQ ID NO: 439874 - RNA, 22 nt, Human
acuauucacagauucaguguuc

SEQ ID NO: 439875 - RNA, 22 nt, Human
cccaggagguggagguugcagc

SEQ ID NO: 439876 - RNA, 22 nt, Human
caggcaaggaggcacugaggga

SEQ ID NO: 439877 - RNA, 22 nt, Human
cugcucagcggaaggaagagcg

SEQ ID NO: 439878 - RNA, 22 nt, Human
auuaaggcucccauuuccaauu

SEQ ID NO: 439879 - RNA, 22 nt, Human
aggcuccaugcaaaggcuguuu

SEQ ID NO: 439880 - RNA, 23 nt, Human
agagggagauguuuuucucaaga

SEQ ID NO: 439881 - RNA, 22 nt, Human
agccauuguugucuucaucuuc

SEQ ID NO: 439882 - RNA, 22 nt, Human
aaacugcaaugacagguaggag

SEQ ID NO: 439883 - RNA, 22 nt, Human
uaugacaagguggaguaugagu

SEQ ID NO: 439884 - RNA, 22 nt, Human
uggcagggucuugcuguguugc

SEQ ID NO: 439885 - RNA, 22 nt, Human
ggcucagcaaugaugagccccu

SEQ ID NO: 439886 - RNA, 19 nt, Human
caucuggaugauucuccug

SEQ ID NO: 439887 - RNA, 22 nt, Human
agcuccugugugcccaccugcu

SEQ ID NO: 439888 - RNA, 22 nt, Human
cuccuccagugggucccucagg

SEQ ID NO: 439889 - RNA, 22 nt, Human
ggcaggcuccaagcauccuaug

SEQ ID NO: 439890 - RNA, 23 nt, Human
gcucagagguuuuucucuggaug

SEQ ID NO: 439891 - RNA, 22 nt, Human
agugcacaccuuaguacaaagu

SEQ ID NO: 439892 - RNA, 22 nt, Human
gaaguuccucguaggagucucu

SEQ ID NO: 439893 - RNA, 22 nt, Human
ucacauuuguuccucugcacuu

SEQ ID NO: 439894 - RNA, 22 nt, Human
uagacagauuucuuguuagaca

SEQ ID NO: 439895 - RNA, 22 nt, Human
aggcccaguuauccuacuuguu

SEQ ID NO: 439896 - RNA, 22 nt, Human
ugggaugauagguaaguaauua

SEQ ID NO: 439897 - RNA, 18 nt, Human
uaacauguuuucauuaag

SEQ ID NO: 439898 - RNA, 22 nt, Human
uccaggcaugucugaguccuuc

SEQ ID NO: 439899 - RNA, 22 nt, Human
uacugcauuaucaaggggaagg

SEQ ID NO: 439900 - RNA, 22 nt, Human
uagaguccugugugcucugugg

SEQ ID NO: 439901 - RNA, 22 nt, Human
gguggcagaggugcaucagccc

SEQ ID NO: 439902 - RNA, 22 nt, Human
augucaaaucaguuuuaucaga

SEQ ID NO: 439903 - RNA, 22 nt, Human
ucaaauaccagcuuuuccagaa

SEQ ID NO: 439904 - RNA, 22 nt, Human
acaugaggugcuauaggucuac

SEQ ID NO: 439905 - RNA, 22 nt, Human
aggccuggccugggcggcauug

SEQ ID NO: 439906 - RNA, 22 nt, Human
gcacagccacguaaugugguca

SEQ ID NO: 439907 - RNA, 22 nt, Human
uguuugcauuguuaauucaguc

SEQ ID NO: 439908 - RNA, 22 nt, Human
uuucuccccagucuaaucugga

SEQ ID NO: 439909 - RNA, 22 nt, Human
acuugcucaaugcuugaagcca

SEQ ID NO: 439910 - RNA, 22 nt, Human
caggcugggaacgccacccgcu

SEQ ID NO: 439911 - RNA, 22 nt, Human
aauaauguuuauuuguauucuc

SEQ ID NO: 439912 - RNA, 22 nt, Human
agcugagcuaguaguuccagug

SEQ ID NO: 439913 - RNA, 22 nt, Human
aggcuaagaggccuucagauac

SEQ ID NO: 439914 - RNA, 22 nt, Human
caaacaucugcaccuugaccgg

SEQ ID NO: 439915 - RNA, 22 nt, Human
cagaaguaagauuacugugagu

SEQ ID NO: 439916 - RNA, 22 nt, Human
aguuuauuucuccauuuaccua

SEQ ID NO: 439917 - RNA, 22 nt, Human
uguaguguagcagggugggaca

SEQ ID NO: 439918 - RNA, 22 nt, Human
ugaacaaaugaaucaguguagc

SEQ ID NO: 439919 - RNA, 20 nt, Human
uccagcugucuuucagagac

SEQ ID NO: 439920 - RNA, 22 nt, Human
aggcaggaggaucauggaugca

SEQ ID NO: 439921 - RNA, 22 nt, Human
auccaguuccaaagaucauuua

SEQ ID NO: 439922 - RNA, 22 nt, Human
augcacaggcugugggcugguu

SEQ ID NO: 439923 - RNA, 22 nt, Human
gcugagguaggagguugcagug

SEQ ID NO: 439924 - RNA, 22 nt, Human
ugagacaguuuuucuauuucca

SEQ ID NO: 439925 - RNA, 22 nt, Human
auucuuuaguuggcuucuugcc

SEQ ID NO: 439926 - RNA, 22 nt, Human
uaaauucagugaguaauuucug

SEQ ID NO: 439927 - RNA, 22 nt, Human
gcucaugggcccagagcagccc

SEQ ID NO: 439928 - RNA, 22 nt, Human
ccagcagagcauggggaggaag

SEQ ID NO: 439929 - RNA, 22 nt, Human
cugcccaggcugaaggaacauc

SEQ ID NO: 439930 - RNA, 22 nt, Human
uguccuguucuugcuguguccu

SEQ ID NO: 439931 - RNA, 17 nt, Human
acacagagauuaacaca

SEQ ID NO: 439932 - RNA, 22 nt, Human
agaaggaguguacaggucaugc

SEQ ID NO: 439933 - RNA, 22 nt, Human
aagcccugauaggaaaaugcug

SEQ ID NO: 439934 - RNA, 22 nt, Human
guccugggcccaggggcugccu

SEQ ID NO: 439935 - RNA, 22 nt, Human
ugugccugucacccucagagag

SEQ ID NO: 439936 - RNA, 22 nt, Human
ucuggauggucagcucuuccug

SEQ ID NO: 439937 - RNA, 22 nt, Human
cugugccuuuguagcugugccu

SEQ ID NO: 439938 - RNA, 22 nt, Human
ugcaucauuuauaaugucuuug

SEQ ID NO: 439939 - RNA, 17 nt, Human
agcuccugcccauggcu

SEQ ID NO: 439940 - RNA, 22 nt, Human
gucugaggcgaggccugagaac

SEQ ID NO: 439941 - RNA, 21 nt, Human
ccagacuggccuaugugguag

SEQ ID NO: 439942 - RNA, 22 nt, Human
ccagaggggcugagcaggucac

SEQ ID NO: 439943 - RNA, 21 nt, Human
auucagaaagggaauaaacuc

SEQ ID NO: 439944 - RNA, 17 nt, Human
ucaggcugggugcagug

SEQ ID NO: 439945 - RNA, 22 nt, Human
acagcagggaauaugggaauug

SEQ ID NO: 439946 - RNA, 22 nt, Human
ucagaguuccucauagauccag

SEQ ID NO: 439947 - RNA, 23 nt, Human
ugugcacaucugacgggugaagg

SEQ ID NO: 439948 - RNA, 22 nt, Human
agcaacaggaccauggagccca

SEQ ID NO: 439949 - RNA, 22 nt, Human
caauuucucuuuauaucucaca

SEQ ID NO: 439950 - RNA, 22 nt, Human
uauuucaacguaugaaaagcug

SEQ ID NO: 439951 - RNA, 22 nt, Human
gaaguacaaaggacauggaaac

SEQ ID NO: 439952 - RNA, 22 nt, Human
cacaagauggucacauaagugc

SEQ ID NO: 439953 - RNA, 22 nt, Human
ugccaggcugucaauucaccca

SEQ ID NO: 439954 - RNA, 22 nt, Human
uaaggaaaguacauguuuugac

SEQ ID NO: 439955 - RNA, 22 nt, Human
agacuggguuugagacuuagca

SEQ ID NO: 439956 - RNA, 21 nt, Human
ccccugggagcccugucagua

SEQ ID NO: 439957 - RNA, 22 nt, Human
cuccugggagcagggauggaug

SEQ ID NO: 439958 - RNA, 22 nt, Human
uuccaugaaauguguuaugcuu

SEQ ID NO: 439959 - RNA, 22 nt, Human
augucuuucucauacaagccca

SEQ ID NO: 439960 - RNA, 22 nt, Human
ccagagugacgugaagugugaa

SEQ ID NO: 439961 - RNA, 22 nt, Human
ucaaauaccagcaauuucaugu

SEQ ID NO: 439962 - RNA, 22 nt, Human
gccugggagugcacagugaggu

SEQ ID NO: 439963 - RNA, 22 nt, Human
agaggccuccgaaaggugggcu

SEQ ID NO: 439964 - RNA, 20 nt, Human
gcaacuagggagacacagcu

SEQ ID NO: 439965 - RNA, 22 nt, Human
ucaaaauucuagggagaauggu

SEQ ID NO: 439966 - RNA, 22 nt, Human
aacuuugcaagggggcccugcg

SEQ ID NO: 439967 - RNA, 22 nt, Human
aaggaagagucuagaacaggca

SEQ ID NO: 439968 - RNA, 22 nt, Human
uaacacuuuggauuaaaauucu

SEQ ID NO: 439969 - RNA, 20 nt, Human
aguacaauguaugauucaga

SEQ ID NO: 439970 - RNA, 22 nt, Human
caugcagccugugaacaguguc

SEQ ID NO: 439971 - RNA, 22 nt, Human
ucuuuuuuuccugugcagagcu

SEQ ID NO: 439972 - RNA, 22 nt, Human
uccccagacagcgggaggccug

SEQ ID NO: 439973 - RNA, 22 nt, Human
cccuuucuccagaacugucuga

SEQ ID NO: 439974 - RNA, 22 nt, Human
gggccuggggacaccaccauga

SEQ ID NO: 439975 - RNA, 22 nt, Human
gccccagauggaggaagcuggg

SEQ ID NO: 439976 - RNA, 22 nt, Human
auaauggcuugugguguuauuc

SEQ ID NO: 439977 - RNA, 22 nt, Human
agucugaguaucucugagccag

SEQ ID NO: 439978 - RNA, 22 nt, Human
gucuccucuucauauaccuguu

SEQ ID NO: 439979 - RNA, 22 nt, Human
uucccugguuaaccauuuucug

SEQ ID NO: 439980 - RNA, 22 nt, Human
uuaauacagucuccagaaguaa

SEQ ID NO: 439981 - RNA, 22 nt, Human
uguacaaauucauugaacugua

SEQ ID NO: 439982 - RNA, 22 nt, Human
acuauugcaauacgugucagca

SEQ ID NO: 439983 - RNA, 22 nt, Human
cacugugggguuuggcuggaac

SEQ ID NO: 439984 - RNA, 22 nt, Human
uuauagaaggagcauucacuua

SEQ ID NO: 439985 - RNA, 22 nt, Human
aaagcacagggugcuagagagu

SEQ ID NO: 439986 - RNA, 22 nt, Human
acaggcccagcucuucaccaga

SEQ ID NO: 439987 - RNA, 22 nt, Human
gauuucuaguaagucaugaagg

SEQ ID NO: 439988 - RNA, 22 nt, Human
uuuuuacagucauggucacuca

SEQ ID NO: 439989 - RNA, 21 nt, Human
guuuacaaggcuuugcuccug

SEQ ID NO: 439990 - RNA, 22 nt, Human
uggcccaggucucucugagccc

SEQ ID NO: 439991 - RNA, 22 nt, Human
gcagcagcccagggcucucaga

SEQ ID NO: 439992 - RNA, 22 nt, Human
cugucaguucuuccagauagag

SEQ ID NO: 439993 - RNA, 19 nt, Human
auguaccauuugaaguucu

SEQ ID NO: 439994 - RNA, 21 nt, Human
agagacugucacugcaguacc

SEQ ID NO: 439995 - RNA, 22 nt, Human
gcaggagaaaugaagauugggu

SEQ ID NO: 439996 - RNA, 22 nt, Human
gaaggcaacaccaggaugcacu

SEQ ID NO: 439997 - RNA, 22 nt, Human
ccucucccacguggcagaggcu

SEQ ID NO: 439998 - RNA, 21 nt, Human
cccuucuugggucaaaguaua

SEQ ID NO: 439999 - RNA, 22 nt, Human
aaagagaaacuuagaagccuga

SEQ ID NO: 440000 - RNA, 22 nt, Human
cacagggaaccaaggcugggcc

SEQ ID NO: 440001 - RNA, 22 nt, Human
cugaggcugggcauggggucca

SEQ ID NO: 440002 - RNA, 22 nt, Human
ucaccagggcuccagccagccu

SEQ ID NO: 440003 - RNA, 23 nt, Human
ugcauuauccucucugaagacca

SEQ ID NO: 440004 - RNA, 22 nt, Human
ucuagaugaaugugaggauauc

SEQ ID NO: 440005 - RNA, 22 nt, Human
ucaggaaagguuuguugaaugg

SEQ ID NO: 440006 - RNA, 22 nt, Human
cagcaaagcuuaauuuauaucu

SEQ ID NO: 440007 - RNA, 22 nt, Human
cagcccugcagagggcgcuccu

SEQ ID NO: 440008 - RNA, 22 nt, Human
agggccuggaacuggagaccac

SEQ ID NO: 440009 - RNA, 22 nt, Human
uuacaguuuaguccaagccaga

SEQ ID NO: 440010 - RNA, 22 nt, Human
uucucccaucucagucuuacau

SEQ ID NO: 440011 - RNA, 22 nt, Human
cacaguauucacugggcagauu

SEQ ID NO: 440012 - RNA, 22 nt, Human
ggcagcagggcugucucccuac

SEQ ID NO: 440013 - RNA, 22 nt, Human
caggcagagacgucaguguagg

SEQ ID NO: 440014 - RNA, 22 nt, Human
gucuuaccgcaccucaugaacu

SEQ ID NO: 440015 - RNA, 22 nt, Human
ccuggcagcuguuuggcuuggc

SEQ ID NO: 440016 - RNA, 23 nt, Human
agcuucugguucaggucaagcag

SEQ ID NO: 440017 - RNA, 22 nt, Human
gcagggcagaaggugcugagga

SEQ ID NO: 440018 - RNA, 22 nt, Human
acaccauacucauguugguucc

SEQ ID NO: 440019 - RNA, 22 nt, Human
gauuucuaaguuuuaccacaaa

SEQ ID NO: 440020 - RNA, 22 nt, Human
uggaagcucaaggcagggugag

SEQ ID NO: 440021 - RNA, 21 nt, Human
aaaauguagacuuuucccuga

SEQ ID NO: 440022 - RNA, 22 nt, Human
cagagucagagcuccauggagu

SEQ ID NO: 440023 - RNA, 22 nt, Human
ccagggugugagaaggaaguag

SEQ ID NO: 440024 - RNA, 22 nt, Human
augcccugggagugcuguacca

SEQ ID NO: 440025 - RNA, 22 nt, Human
uccugugugggcaggaugagaa

SEQ ID NO: 440026 - RNA, 22 nt, Human
uuccaugacugaagcaggggcg

SEQ ID NO: 440027 - RNA, 23 nt, Human
uuauugcaagguaaaauugcuga

SEQ ID NO: 440028 - RNA, 22 nt, Human
gucuggcuuuauauuugcuauu

SEQ ID NO: 440029 - RNA, 22 nt, Human
caagagcuggagaggcagucua

SEQ ID NO: 440030 - RNA, 22 nt, Human
uucuagaauccuugucuacuuu

SEQ ID NO: 440031 - RNA, 22 nt, Human
uggcagccuggaaucucucagc

SEQ ID NO: 440032 - RNA, 22 nt, Human
cggucaggugcagcguuggcac

SEQ ID NO: 440033 - RNA, 22 nt, Human
ucuggccagugaaaugcagaau

SEQ ID NO: 440034 - RNA, 22 nt, Human
uuucucccagucuccugagaca

SEQ ID NO: 440035 - RNA, 22 nt, Human
aaggcacaacacaagaggguga

SEQ ID NO: 440036 - RNA, 22 nt, Human
ccugggcugcaugauggcauuu

SEQ ID NO: 440037 - RNA, 21 nt, Human
uacaagauagagguaauauau

SEQ ID NO: 440038 - RNA, 22 nt, Human
ucaugcaggacuuacaagagau

SEQ ID NO: 440039 - RNA, 22 nt, Human
ucucuucccuuuaugguaugug

SEQ ID NO: 440040 - RNA, 22 nt, Human
accacagaggaauuugaagagg

SEQ ID NO: 440041 - RNA, 21 nt, Human
uggcacugcuuagcagguucc

SEQ ID NO: 440042 - RNA, 22 nt, Human
aaggacugaauaauucucuuuc

SEQ ID NO: 440043 - RNA, 22 nt, Human
gccuugggccagcugcucugga

SEQ ID NO: 440044 - RNA, 22 nt, Human
uuugcuuugacugucagcaagu

SEQ ID NO: 440045 - RNA, 22 nt, Human
uugucaaauccuugucaucugc

SEQ ID NO: 440046 - RNA, 17 nt, Human
ggcagcugugugcaugc

SEQ ID NO: 440047 - RNA, 22 nt, Human
uggcaggaaggagacucagccc

SEQ ID NO: 440048 - RNA, 22 nt, Human
ucuuggaaucuccauagaguga

SEQ ID NO: 440049 - RNA, 22 nt, Human
ucuaaacuaggguuaaaggaaa

SEQ ID NO: 440050 - RNA, 22 nt, Human
gugcccuggagggguugaaggg

SEQ ID NO: 440051 - RNA, 22 nt, Human
ucaggcuguuagccaccuccuc

SEQ ID NO: 440052 - RNA, 22 nt, Human
agcaaauuaggucaaggagaug

SEQ ID NO: 440053 - RNA, 21 nt, Human
ggcagcccgcccucuccuggc

SEQ ID NO: 440054 - RNA, 22 nt, Human
agagaaucuagaauguuuauac

SEQ ID NO: 440055 - RNA, 22 nt, Human
acaggccuggugcugcugacag

SEQ ID NO: 440056 - RNA, 22 nt, Human
uuaguugaucauucaacauggg

SEQ ID NO: 440057 - RNA, 18 nt, Human
gcagggacacagggucac

SEQ ID NO: 440058 - RNA, 23 nt, Human
gaagucagcccuacagagagcag

SEQ ID NO: 440059 - RNA, 22 nt, Human
gcagccagaagacucagaacaa

SEQ ID NO: 440060 - RNA, 22 nt, Human
ucagaggauagaaauacuuauu

SEQ ID NO: 440061 - RNA, 22 nt, Human
agcaggaggguuuuguagaguc

SEQ ID NO: 440062 - RNA, 22 nt, Human
aaggagcugggagggacacaug

SEQ ID NO: 440063 - RNA, 22 nt, Human
ucccagaggucucugcugguuc

SEQ ID NO: 440064 - RNA, 22 nt, Human
auguggcuccuuacucaucagc

SEQ ID NO: 440065 - RNA, 22 nt, Human
aaauucagcagugaaaugcccc

SEQ ID NO: 440066 - RNA, 22 nt, Human
gcccauggacacccaagugcca

SEQ ID NO: 440067 - RNA, 19 nt, Human
guucaaacacugauucagc

SEQ ID NO: 440068 - RNA, 22 nt, Human
aaaucucaguguucuaagcauu

SEQ ID NO: 440069 - RNA, 22 nt, Human
auuuguuucagggccuugguau

SEQ ID NO: 440070 - RNA, 22 nt, Human
ucagaauuacacagggccuuga

SEQ ID NO: 440071 - RNA, 22 nt, Human
ugguacaauuaaaauaauuuug

SEQ ID NO: 440072 - RNA, 22 nt, Human
ggcuuugcuuuggcuguuucag

SEQ ID NO: 440073 - RNA, 22 nt, Human
ccagcucuagccccauguggcu

SEQ ID NO: 440074 - RNA, 22 nt, Human
augcauaugccguagaauaagu

SEQ ID NO: 440075 - RNA, 22 nt, Human
aagucacaagcauauaugcauu

SEQ ID NO: 440076 - RNA, 22 nt, Human
gcagacagccagacugcacugg

SEQ ID NO: 440077 - RNA, 22 nt, Human
ccagggugugggcgucggcacg

SEQ ID NO: 440078 - RNA, 22 nt, Human
cugggaggcacuauucaggagg

SEQ ID NO: 440079 - RNA, 22 nt, Human
ggugagaaagggauuccuguuc

SEQ ID NO: 440080 - RNA, 22 nt, Human
cucugggcuccuucagcccuuu

SEQ ID NO: 440081 - RNA, 22 nt, Human
cuuauaaaguccaucugaacaa

SEQ ID NO: 440082 - RNA, 22 nt, Human
gaggcaguggucugaugcaagg

SEQ ID NO: 440083 - RNA, 22 nt, Human
uuugugaacaaacaugaagaug

SEQ ID NO: 440084 - RNA, 22 nt, Human
agcuggugaggguugaggggua

SEQ ID NO: 440085 - RNA, 22 nt, Human
auuaaggcguuggcgugcuuau

SEQ ID NO: 440086 - RNA, 22 nt, Human
uacuuucuagcucuccccaguu

SEQ ID NO: 440087 - RNA, 22 nt, Human
gcaacagcauucucauugacau

SEQ ID NO: 440088 - RNA, 19 nt, Human
uccugggcugggccagguc

SEQ ID NO: 440089 - RNA, 22 nt, Human
ugggcagaguagcucagaagaa

SEQ ID NO: 440090 - RNA, 22 nt, Human
gacauucauugaugucuuccuc

SEQ ID NO: 440091 - RNA, 22 nt, Human
aaggcuggaguacagugcagug

SEQ ID NO: 440092 - RNA, 22 nt, Human
cagagcuguugcggggcuuggc

SEQ ID NO: 440093 - RNA, 22 nt, Human
cagucccaaggaggaagcaguc

SEQ ID NO: 440094 - RNA, 22 nt, Human
gcagagcugucuaagucacuuc

SEQ ID NO: 440095 - RNA, 22 nt, Human
ucaggaagugguaaaggauguu

SEQ ID NO: 440096 - RNA, 22 nt, Human
ugccagccuccugauaucaucc

SEQ ID NO: 440097 - RNA, 22 nt, Human
cagggagcacugcgagcggcag

SEQ ID NO: 440098 - RNA, 20 nt, Human
acacaguagcaauuagugca

SEQ ID NO: 440099 - RNA, 20 nt, Human
aggaggaaaaaaugacgagc

SEQ ID NO: 440100 - RNA, 22 nt, Human
uauauucaaugauuaguaucag

SEQ ID NO: 440101 - RNA, 22 nt, Human
gcuguuucuugaggcuacuccu

SEQ ID NO: 440102 - RNA, 22 nt, Human
cagcccaggacugcagguguuu

SEQ ID NO: 440103 - RNA, 22 nt, Human
acuaaugauuauugucauugug

SEQ ID NO: 440104 - RNA, 22 nt, Human
ccacaaguuucagcacccagag

SEQ ID NO: 440105 - RNA, 21 nt, Human
agcaggcuuuggaguggggcu

SEQ ID NO: 440106 - RNA, 22 nt, Human
uccaccagcagccugucagccu

SEQ ID NO: 440107 - RNA, 22 nt, Human
aaggcagagggcuggaucagag

SEQ ID NO: 440108 - RNA, 22 nt, Human
uucuggauagggguauggagcu

SEQ ID NO: 440109 - RNA, 22 nt, Human
gucugggcucccagggucggcg

SEQ ID NO: 440110 - RNA, 22 nt, Human
cagcugccccuccagggcuggg

SEQ ID NO: 440111 - RNA, 22 nt, Human
gcaugcaggaagggcuugggga

SEQ ID NO: 440112 - RNA, 22 nt, Human
uccccaccuacacacugcuccu

SEQ ID NO: 440113 - RNA, 22 nt, Human
ugcagcccuuccuuccucuggg

SEQ ID NO: 440114 - RNA, 22 nt, Human
uaggccaguggcagguugugug

SEQ ID NO: 440115 - RNA, 22 nt, Human
uuuucuaagggaaacguccucc

SEQ ID NO: 440116 - RNA, 22 nt, Human
guggccucuguuggcuccuagg

SEQ ID NO: 440117 - RNA, 22 nt, Human
gagcugaggccagagucuucug

SEQ ID NO: 440118 - RNA, 22 nt, Human
aaauuuuaguaaggaaguugag

SEQ ID NO: 440119 - RNA, 22 nt, Human
agaggccaccacugucagggac

SEQ ID NO: 440120 - RNA, 22 nt, Human
aauuuuacauaggggauauggg

SEQ ID NO: 440121 - RNA, 22 nt, Human
uguauuucgcuagguacucccu

SEQ ID NO: 440122 - RNA, 22 nt, Human
aacagaaaucauuuagggcucu

SEQ ID NO: 440123 - RNA, 22 nt, Human
uggagcugagaaguggagcucu

SEQ ID NO: 440124 - RNA, 22 nt, Human
ucugggcugucuacagguuggc

SEQ ID NO: 440125 - RNA, 22 nt, Human
uuccugaauugagcuuuagaaa

SEQ ID NO: 440126 - RNA, 22 nt, Human
ccaggaaggcaggccuccccgc

SEQ ID NO: 440127 - RNA, 22 nt, Human
acaugaaaagacuaucugauua

SEQ ID NO: 440128 - RNA, 22 nt, Human
gaaggcaagcagcauaaauguc

SEQ ID NO: 440129 - RNA, 22 nt, Human
caggccucuauggucagcugag

SEQ ID NO: 440130 - RNA, 19 nt, Human
gccaggcuccauagccggc

SEQ ID NO: 440131 - RNA, 22 nt, Human
uggaguccccgagaggccugca

SEQ ID NO: 440132 - RNA, 22 nt, Human
ucaagacauauuaaaugugcga

SEQ ID NO: 440133 - RNA, 22 nt, Human
acaggaguuucugacagagaca

SEQ ID NO: 440134 - RNA, 22 nt, Human
uaugacauuuucccagauuuau

SEQ ID NO: 440135 - RNA, 22 nt, Human
aagcugccugccacgcuagaua

SEQ ID NO: 440136 - RNA, 22 nt, Human
cugggacacccaaggaaagagc

SEQ ID NO: 440137 - RNA, 22 nt, Human
agcagacauaucucaugucaca

SEQ ID NO: 440138 - RNA, 22 nt, Human
ggagaagcagcuucuugaugaa

SEQ ID NO: 440139 - RNA, 22 nt, Human
gaggcagcauucgcauagacag

SEQ ID NO: 440140 - RNA, 22 nt, Human
gagggcucaacuacuacuaggc

SEQ ID NO: 440141 - RNA, 22 nt, Human
cuggccagcauuuuugcuuuag

SEQ ID NO: 440142 - RNA, 22 nt, Human
aaauacucucaauaaagaaagu

SEQ ID NO: 440143 - RNA, 22 nt, Human
ggcggcccugcacgugcugagg

SEQ ID NO: 440144 - RNA, 22 nt, Human
ccaggccugcaucugcugcgca

SEQ ID NO: 440145 - RNA, 22 nt, Human
ucauuguuucugcuuuucauga

SEQ ID NO: 440146 - RNA, 22 nt, Human
auuauucaacacuugagaaauu

SEQ ID NO: 440147 - RNA, 22 nt, Human
cucacugucuguacuagcugau

SEQ ID NO: 440148 - RNA, 22 nt, Human
cagccagcugaauguaccauga

SEQ ID NO: 440149 - RNA, 22 nt, Human
uauuccaaaaucccaaacugcc

SEQ ID NO: 440150 - RNA, 23 nt, Human
gaggcuugaucagcuuccuccac

SEQ ID NO: 440151 - RNA, 21 nt, Human
aaugaugaaagaugacagagu

SEQ ID NO: 440152 - RNA, 22 nt, Human
gcuggugcucugggcccugagg

SEQ ID NO: 440153 - RNA, 22 nt, Human
ccagcccugaacccugcugcau

SEQ ID NO: 440154 - RNA, 22 nt, Human
caaaggaaauacuaaucuggaa

SEQ ID NO: 440155 - RNA, 22 nt, Human
cugcccuguaucuucucccaau

SEQ ID NO: 440156 - RNA, 22 nt, Human
ugcugcagcuaaggugaggugc

SEQ ID NO: 440157 - RNA, 22 nt, Human
aaaguguugggaagaaagugca

SEQ ID NO: 440158 - RNA, 22 nt, Human
agcaguggcuggauggugugcu

SEQ ID NO: 440159 - RNA, 22 nt, Human
cuccauggggaaaugaaggugg

SEQ ID NO: 440160 - RNA, 21 nt, Human
ugcaggcaggcagagaugcug

SEQ ID NO: 440161 - RNA, 22 nt, Human
ccugggagagccaucuguggcc

SEQ ID NO: 440162 - RNA, 22 nt, Human
uggagcagagaugggagcccaa

SEQ ID NO: 440163 - RNA, 22 nt, Human
uucacaacugccauagccagug

SEQ ID NO: 440164 - RNA, 22 nt, Human
cagcuguggcugccacugcucc

SEQ ID NO: 440165 - RNA, 22 nt, Human
agcagguggauuuagacgggag

SEQ ID NO: 440166 - RNA, 22 nt, Human
gagagcacggucuugggcaugg

SEQ ID NO: 440167 - RNA, 22 nt, Human
gccagcaguccugcugugugcc

SEQ ID NO: 440168 - RNA, 21 nt, Human
uucaauacuauuucaauaguc

SEQ ID NO: 440169 - RNA, 22 nt, Human
aggcugagauagguggaucauu

SEQ ID NO: 440170 - RNA, 22 nt, Human
ccagccuggacugggucuugug

SEQ ID NO: 440171 - RNA, 22 nt, Human
gcaggcaguuauuuaguagaau

SEQ ID NO: 440172 - RNA, 22 nt, Human
auuuuaacccucuuauauauac

SEQ ID NO: 440173 - RNA, 22 nt, Human
agcacagguaauacagaguaac

SEQ ID NO: 440174 - RNA, 22 nt, Human
cauucaaaagcuccauguuugu

SEQ ID NO: 440175 - RNA, 22 nt, Human
cuuggcuguugggcauugagaa

SEQ ID NO: 440176 - RNA, 22 nt, Human
ugggugggagcacccugucugg

SEQ ID NO: 440177 - RNA, 23 nt, Human
ccagcccuccaccagcucuaggc

SEQ ID NO: 440178 - RNA, 22 nt, Human
guggccagucccgaugcuuguu

SEQ ID NO: 440179 - RNA, 22 nt, Human
guggcaggucccauuggagcag

SEQ ID NO: 440180 - RNA, 22 nt, Human
acuuagcagguggugacucgaa

SEQ ID NO: 440181 - RNA, 22 nt, Human
ugcauugagucauuucaguaug

SEQ ID NO: 440182 - RNA, 22 nt, Human
auucaacauauucugaguaaaa

SEQ ID NO: 440183 - RNA, 22 nt, Human
uggcucaggggucuggcucugu

SEQ ID NO: 440184 - RNA, 22 nt, Human
aaguuuuugauucuaagagaga

SEQ ID NO: 440185 - RNA, 22 nt, Human
cauuuuaccuagaagcugaaag

SEQ ID NO: 440186 - RNA, 22 nt, Human
uugugagcaggcugcacaaacc

SEQ ID NO: 440187 - RNA, 22 nt, Human
uuggcuuuagaccugagacugu

SEQ ID NO: 440188 - RNA, 22 nt, Human
ccacagcugaccgcaggugagc

SEQ ID NO: 440189 - RNA, 22 nt, Human
ucucccagaggaucccagugga

SEQ ID NO: 440190 - RNA, 22 nt, Human
gagggaaggacccauuuuaagu

SEQ ID NO: 440191 - RNA, 22 nt, Human
ugcagccaggaaauauuugcug

SEQ ID NO: 440192 - RNA, 22 nt, Human
acuuugcaaauaaacucucuaa

SEQ ID NO: 440193 - RNA, 22 nt, Human
ugagacagggucuugcucuguu

SEQ ID NO: 440194 - RNA, 19 nt, Human
uggcauugguccagauaaa

SEQ ID NO: 440195 - RNA, 22 nt, Human
uagaaaagccccagcuggaggg

SEQ ID NO: 440196 - RNA, 22 nt, Human
cugcccuggccacugugcccag

SEQ ID NO: 440197 - RNA, 22 nt, Human
cagggccacuguagaugaggag

SEQ ID NO: 440198 - RNA, 22 nt, Human
uuugggcaggcuuuucccuaga

SEQ ID NO: 440199 - RNA, 22 nt, Human
uucagaaugacuuauguaaggc

SEQ ID NO: 440200 - RNA, 22 nt, Human
ugaacacacacaucuuaauaau

SEQ ID NO: 440201 - RNA, 22 nt, Human
uuuguguguauauguauauaga

SEQ ID NO: 440202 - RNA, 22 nt, Human
ccacagagagugucagccuuug

SEQ ID NO: 440203 - RNA, 22 nt, Human
ucagcuggugccacucagucaa

SEQ ID NO: 440204 - RNA, 19 nt, Human
aaaguugagaaacaaugga

SEQ ID NO: 440205 - RNA, 20 nt, Human
uauuuagauucaaguaugga

SEQ ID NO: 440206 - RNA, 22 nt, Human
uggccugggccggcagauauac

SEQ ID NO: 440207 - RNA, 22 nt, Human
acaaaauuguguuaaacuuuau

SEQ ID NO: 440208 - RNA, 22 nt, Human
acaggcugguuuguaaaagaug

SEQ ID NO: 440209 - RNA, 23 nt, Human
gccugggacugguagugugaccu

SEQ ID NO: 440210 - RNA, 22 nt, Human
aucuaagauuuugcuaagauca

SEQ ID NO: 440211 - RNA, 22 nt, Human
ccauucaauaccuuagagaaaa

SEQ ID NO: 440212 - RNA, 22 nt, Human
cugggucugggccuccuggagu

SEQ ID NO: 440213 - RNA, 22 nt, Human
agaccagcugccucccagggcc

SEQ ID NO: 440214 - RNA, 22 nt, Human
gcaggcucccuugcagagcagg

SEQ ID NO: 440215 - RNA, 22 nt, Human
uuguacaaauaggaaccucuga

SEQ ID NO: 440216 - RNA, 22 nt, Human
agccucugcuggcccuggcacu

SEQ ID NO: 440217 - RNA, 22 nt, Human
ccuuugcaauccuguaggccuu

SEQ ID NO: 440218 - RNA, 19 nt, Human
ugccagcauuaggcugaag

SEQ ID NO: 440219 - RNA, 22 nt, Human
cggacaggcuccuggagcuccu

SEQ ID NO: 440220 - RNA, 22 nt, Human
cucuuuuaauugucauaacaac

SEQ ID NO: 440221 - RNA, 22 nt, Human
agugucugaaccaccggggcau

SEQ ID NO: 440222 - RNA, 21 nt, Human
accagucccuagucuuauccu

SEQ ID NO: 440223 - RNA, 20 nt, Human
ucugugugccaucaccuaac

SEQ ID NO: 440224 - RNA, 21 nt, Human
ucaugcaggcagaguuuggua

SEQ ID NO: 440225 - RNA, 20 nt, Human
aucaaaggcugauucagucc

SEQ ID NO: 440226 - RNA, 22 nt, Human
aaggccugggaggccucucuuc

SEQ ID NO: 440227 - RNA, 22 nt, Human
gcaauaaaguagcagcucauca

SEQ ID NO: 440228 - RNA, 22 nt, Human
uacaggcaugaaugaaaucugu

SEQ ID NO: 440229 - RNA, 22 nt, Human
ucagaggagaccaaggggaaua

SEQ ID NO: 440230 - RNA, 22 nt, Human
ucagcagggaggcucugugccc

SEQ ID NO: 440231 - RNA, 22 nt, Human
ucagaagacuacuaggacacau

SEQ ID NO: 440232 - RNA, 21 nt, Human
uucuucuuggacuguuuuggc

SEQ ID NO: 440233 - RNA, 22 nt, Human
uggagcagcaucacuuugagcu

SEQ ID NO: 440234 - RNA, 23 nt, Human
cuggcucuguagguggcauccuu

SEQ ID NO: 440235 - RNA, 22 nt, Human
gucuggaagcucuaggggagaa

SEQ ID NO: 440236 - RNA, 22 nt, Human
ugcagcagucagucaggccugg

SEQ ID NO: 440237 - RNA, 22 nt, Human
cacacaugaaucccuaguaccu

SEQ ID NO: 440238 - RNA, 22 nt, Human
aaacuccagugaauacuagaau

SEQ ID NO: 440239 - RNA, 22 nt, Human
cagggagccccaauuccaugcc

SEQ ID NO: 440240 - RNA, 22 nt, Human
agacacugauguucagcucaau

SEQ ID NO: 440241 - RNA, 22 nt, Human
gacagcagagcagacuaaugga

SEQ ID NO: 440242 - RNA, 22 nt, Human
uccagaggcagcugcggucagg

SEQ ID NO: 440243 - RNA, 22 nt, Human
auaaggcauauagucacuuuuu

SEQ ID NO: 440244 - RNA, 22 nt, Human
agcagcaggcuuaaggaaaagu

SEQ ID NO: 440245 - RNA, 22 nt, Human
gcaggaguuaggcgucguggau

SEQ ID NO: 440246 - RNA, 22 nt, Human
aguucaauagaaaaauauauua

SEQ ID NO: 440247 - RNA, 22 nt, Human
uaguuaaaauaauggagauguu

SEQ ID NO: 440248 - RNA, 22 nt, Human
uccccagggucccugcuuccau

SEQ ID NO: 440249 - RNA, 22 nt, Human
cuugaugaaugaccuggguggu

SEQ ID NO: 440250 - RNA, 22 nt, Human
gaggcuaaggugccagacgaau

SEQ ID NO: 440251 - RNA, 22 nt, Human
aaaugccucauuuucucucacu

SEQ ID NO: 440252 - RNA, 21 nt, Human
ggcugguguuuagcugugaua

SEQ ID NO: 440253 - RNA, 22 nt, Human
augauacaagcaaaacuaauca

SEQ ID NO: 440254 - RNA, 22 nt, Human
agcuggcugccuucuccuuagg

SEQ ID NO: 440255 - RNA, 22 nt, Human
aaggcagcacagcaacugcuca

SEQ ID NO: 440256 - RNA, 22 nt, Human
cugcaucuuagucaaaaucugu

SEQ ID NO: 440257 - RNA, 22 nt, Human
ugaggacauugagacuggagac

SEQ ID NO: 440258 - RNA, 22 nt, Human
ugcuucagcacuuugagagccu

SEQ ID NO: 440259 - RNA, 22 nt, Human
ggccuagggaguggccaugccu

SEQ ID NO: 440260 - RNA, 22 nt, Human
guccuuccugcagggauggaug

SEQ ID NO: 440261 - RNA, 22 nt, Human
aggaaaaauaaggcagcagggc

SEQ ID NO: 440262 - RNA, 22 nt, Human
cagcucccagagugaccagcag

SEQ ID NO: 440263 - RNA, 22 nt, Human
aguagaaaguugcaggaggaau

SEQ ID NO: 440264 - RNA, 22 nt, Human
uuugacaaauccuucagcaaug

SEQ ID NO: 440265 - RNA, 22 nt, Human
ccagcccuucccaacuggccag

SEQ ID NO: 440266 - RNA, 22 nt, Human
cccagugucaccaacaggacac

SEQ ID NO: 440267 - RNA, 18 nt, Human
gcagcugcaguuguagcu

SEQ ID NO: 440268 - RNA, 22 nt, Human
ccagcugcagguguuccagaug

SEQ ID NO: 440269 - RNA, 22 nt, Human
aauaaauguuuguuggauguuu

SEQ ID NO: 440270 - RNA, 22 nt, Human
aagcccugaccugagaguccgu

SEQ ID NO: 440271 - RNA, 22 nt, Human
gagcugcagcggcugacgcaac

SEQ ID NO: 440272 - RNA, 22 nt, Human
cccaggagcuucucucugccuc

SEQ ID NO: 440273 - RNA, 22 nt, Human
cugcagugcaagcccagaugga

SEQ ID NO: 440274 - RNA, 22 nt, Human
cagcagugcuucagugugagau

SEQ ID NO: 440275 - RNA, 22 nt, Human
ucagaggagaaguugggaaaau

SEQ ID NO: 440276 - RNA, 22 nt, Human
uucacauaggagcaugguuuuu

SEQ ID NO: 440277 - RNA, 22 nt, Human
cuguggcuuucucugccuccuu

SEQ ID NO: 440278 - RNA, 22 nt, Human
ugcaggcuguaaucugaggcua

SEQ ID NO: 440279 - RNA, 22 nt, Human
uuguacaaaugcauauuccugg

SEQ ID NO: 440280 - RNA, 22 nt, Human
cauuaaauuccuuguucucaaa

SEQ ID NO: 440281 - RNA, 22 nt, Human
aguuuacaugacguguauuuca

SEQ ID NO: 440282 - RNA, 22 nt, Human
uuaugcaaggacuuauuacagu

SEQ ID NO: 440283 - RNA, 22 nt, Human
gcuguuucugugguguauagcc

SEQ ID NO: 440284 - RNA, 21 nt, Human
agcaggcaaaggugaagucuu

SEQ ID NO: 440285 - RNA, 23 nt, Human
uucauauguugcugaaaacagca

SEQ ID NO: 440286 - RNA, 23 nt, Human
cagcucagcacauaggagguacu

SEQ ID NO: 440287 - RNA, 20 nt, Human
uguguguguacuucuaaaua

SEQ ID NO: 440288 - RNA, 22 nt, Human
uaaaggcaaacucuccaaggau

SEQ ID NO: 440289 - RNA, 22 nt, Human
agggcacaggcuccggguccag

SEQ ID NO: 440290 - RNA, 22 nt, Human
uauuuuacagacuacuuuagau

SEQ ID NO: 440291 - RNA, 22 nt, Human
aggggcacuucucaggcugugg

SEQ ID NO: 440292 - RNA, 22 nt, Human
cuucuuauuaauccuucucugu

SEQ ID NO: 440293 - RNA, 22 nt, Human
agccuucuaggaugucaucugc

SEQ ID NO: 440294 - RNA, 22 nt, Human
uuaaauuuuagaaacagacucu

SEQ ID NO: 440295 - RNA, 22 nt, Human
guuuacaacaugccaacugggc

SEQ ID NO: 440296 - RNA, 22 nt, Human
uggaaggaagccaaggaagguu

SEQ ID NO: 440297 - RNA, 22 nt, Human
agagccugugauugucaucacc

SEQ ID NO: 440298 - RNA, 22 nt, Human
agcuagagaaugacagagucug

SEQ ID NO: 440299 - RNA, 22 nt, Human
gcacagccugucccuguccugg

SEQ ID NO: 440300 - RNA, 22 nt, Human
acaggaaagagcuaggcauagg

SEQ ID NO: 440301 - RNA, 22 nt, Human
ucuuugcaaacuauggagugug

SEQ ID NO: 440302 - RNA, 22 nt, Human
ggcucuggcguccaauggagcg

SEQ ID NO: 440303 - RNA, 22 nt, Human
cccaggagaccugugaaaggac

SEQ ID NO: 440304 - RNA, 19 nt, Human
agcagcuguagauagacac

SEQ ID NO: 440305 - RNA, 22 nt, Human
ccugccugauuccaggauggcu

SEQ ID NO: 440306 - RNA, 22 nt, Human
uuaagacauucagauauuucua

SEQ ID NO: 440307 - RNA, 22 nt, Human
uggagcccaggagaggauaaac

SEQ ID NO: 440308 - RNA, 22 nt, Human
agagugcuagccugagggaggu

SEQ ID NO: 440309 - RNA, 21 nt, Human
agcugccacccuagcuucuga

SEQ ID NO: 440310 - RNA, 22 nt, Human
uauucccacuccucagcaauuu

SEQ ID NO: 440311 - RNA, 22 nt, Human
gaguccugaauccuguggcaac

SEQ ID NO: 440312 - RNA, 22 nt, Human
ugagccugggagauggaggcug

SEQ ID NO: 440313 - RNA, 22 nt, Human
uggcaggcagugugggagcugg

SEQ ID NO: 440314 - RNA, 21 nt, Human
agucuucuccagaggcugggg

SEQ ID NO: 440315 - RNA, 22 nt, Human
cacagaggaaugcaucagcaga

SEQ ID NO: 440316 - RNA, 21 nt, Human
uacacaaagcgugguccagag

SEQ ID NO: 440317 - RNA, 22 nt, Human
ugggaacaccugcugcccagug

SEQ ID NO: 440318 - RNA, 22 nt, Human
accagcuguguccuggcugcag

SEQ ID NO: 440319 - RNA, 22 nt, Human
gaucaugcuggcugcccuguug

SEQ ID NO: 440320 - RNA, 22 nt, Human
cagagaacuccaguggcuggcg

SEQ ID NO: 440321 - RNA, 22 nt, Human
cagaguccugcaccagcuccag

SEQ ID NO: 440322 - RNA, 22 nt, Human
agcaggagcccuuaucaccagg

SEQ ID NO: 440323 - RNA, 22 nt, Human
acagcaauaggaaauacuugca

SEQ ID NO: 440324 - RNA, 22 nt, Human
aggagaggcaucaagaaaaucg

SEQ ID NO: 440325 - RNA, 22 nt, Human
caaauucaaauuucaucagugu

SEQ ID NO: 440326 - RNA, 22 nt, Human
ccugagcuggcagugaccugga

SEQ ID NO: 440327 - RNA, 22 nt, Human
cugaggcugggcugaggguaua

SEQ ID NO: 440328 - RNA, 22 nt, Human
acauggagaccagauggaagua

SEQ ID NO: 440329 - RNA, 22 nt, Human
caucuuuugguaggagccgggc

SEQ ID NO: 440330 - RNA, 22 nt, Human
ugugccagccucuggcuguguc

SEQ ID NO: 440331 - RNA, 22 nt, Human
ccucacuggccagccaggggug

SEQ ID NO: 440332 - RNA, 22 nt, Human
guuucagagguguucauuuuca

SEQ ID NO: 440333 - RNA, 22 nt, Human
gcagcaggcuuuucauaccuug

SEQ ID NO: 440334 - RNA, 22 nt, Human
ggcagggacuuugcaaaucuuu

SEQ ID NO: 440335 - RNA, 22 nt, Human
cuggcucucugagauauugagu

SEQ ID NO: 440336 - RNA, 21 nt, Human
gcugagagguugggaaguuca

SEQ ID NO: 440337 - RNA, 22 nt, Human
auauuacuuccugguauaaaau

SEQ ID NO: 440338 - RNA, 22 nt, Human
ccagcugcgggcaucgagaguu

SEQ ID NO: 440339 - RNA, 22 nt, Human
ccugggguauauaggugaauau

SEQ ID NO: 440340 - RNA, 22 nt, Human
gcagggucuugagaggcagcca

SEQ ID NO: 440341 - RNA, 22 nt, Human
cccuccucucccuaagagucac

SEQ ID NO: 440342 - RNA, 22 nt, Human
caggcagagcugaagauagaug

SEQ ID NO: 440343 - RNA, 22 nt, Human
augagggaggcaaggagaugcu

SEQ ID NO: 440344 - RNA, 19 nt, Human
gcagccaggugcucuaccu

SEQ ID NO: 440345 - RNA, 22 nt, Human
gagccgaggcgcacagcucggg

SEQ ID NO: 440346 - RNA, 22 nt, Human
agagcagcuggggcagagacca

SEQ ID NO: 440347 - RNA, 23 nt, Human
agacagaggcugaggcuggccgc

SEQ ID NO: 440348 - RNA, 22 nt, Human
uagagcuggaaaacugcaggua

SEQ ID NO: 440349 - RNA, 22 nt, Human
gcagucaguaaggcagccagaa

SEQ ID NO: 440350 - RNA, 22 nt, Human
cauccaaagcaaauaucuuaaa

SEQ ID NO: 440351 - RNA, 22 nt, Human
cugaagcuaggucaaaaaaggg

SEQ ID NO: 440352 - RNA, 22 nt, Human
uugugaauagugccgcaauaaa

SEQ ID NO: 440353 - RNA, 22 nt, Human
guuuuauaugucucugcugaca

SEQ ID NO: 440354 - RNA, 22 nt, Human
aggagcuggaguccaggcaagu

SEQ ID NO: 440355 - RNA, 22 nt, Human
ggcugcaggcuucccuccagca

SEQ ID NO: 440356 - RNA, 22 nt, Human
aacugcauuugcauaaguccau

SEQ ID NO: 440357 - RNA, 22 nt, Human
aucuagaagccugagccaagau

SEQ ID NO: 440358 - RNA, 22 nt, Human
aaggcagucaguuguuuugaaa

SEQ ID NO: 440359 - RNA, 22 nt, Human
ucuggccucuugggaugcuccc

SEQ ID NO: 440360 - RNA, 22 nt, Human
auuauccagcaccaaugucaga

SEQ ID NO: 440361 - RNA, 22 nt, Human
gccuggagugguccugcugccc

SEQ ID NO: 440362 - RNA, 22 nt, Human
uugauuuuaaaauagugacacu

SEQ ID NO: 440363 - RNA, 22 nt, Human
acauucaacauggcuggucuag

SEQ ID NO: 440364 - RNA, 23 nt, Human
ggcagcugggcagcacucauggg

SEQ ID NO: 440365 - RNA, 22 nt, Human
aagaacauuuuguagaaugaca

SEQ ID NO: 440366 - RNA, 22 nt, Human
uguaccauaggucuaucauucu

SEQ ID NO: 440367 - RNA, 22 nt, Human
aaguucaaggaagccuccaguu

SEQ ID NO: 440368 - RNA, 22 nt, Human
acagcagggggagcuguuggac

SEQ ID NO: 440369 - RNA, 22 nt, Human
aaugugaggccuugguaguuau

SEQ ID NO: 440370 - RNA, 20 nt, Human
cagccuccacucacucagcu

SEQ ID NO: 440371 - RNA, 22 nt, Human
gcacaggaugauggguugaggg

SEQ ID NO: 440372 - RNA, 22 nt, Human
ggcacagcuacuugcucacucu

SEQ ID NO: 440373 - RNA, 22 nt, Human
cuuaaauuggaugaguuaaguu

SEQ ID NO: 440374 - RNA, 22 nt, Human
auaaucuggucuuuguaugagu

SEQ ID NO: 440375 - RNA, 22 nt, Human
uaugugcauaugcauacacaca

SEQ ID NO: 440376 - RNA, 20 nt, Human
uugcaaagugaauagcaauu

SEQ ID NO: 440377 - RNA, 22 nt, Human
gagagcugggcuuugggugaag

SEQ ID NO: 440378 - RNA, 22 nt, Human
cuugcuuuugcugaugauuaag

SEQ ID NO: 440379 - RNA, 22 nt, Human
cagcugcccaggccaccuggag

SEQ ID NO: 440380 - RNA, 22 nt, Human
guccucaggcuugaguguuuau

SEQ ID NO: 440381 - RNA, 22 nt, Human
cauggcaggaaaaugaacaggc

SEQ ID NO: 440382 - RNA, 22 nt, Human
ggcuccaguuugugccuucagc

SEQ ID NO: 440383 - RNA, 22 nt, Human
aggaagcuuggggcagggcuac

SEQ ID NO: 440384 - RNA, 22 nt, Human
cauuucaccuuagagaauuauu

SEQ ID NO: 440385 - RNA, 22 nt, Human
gggcccagcacuggcugggauc

SEQ ID NO: 440386 - RNA, 22 nt, Human
auuccagagagguucuggaggu

SEQ ID NO: 440387 - RNA, 22 nt, Human
cugagccaaccacagcaggagc

SEQ ID NO: 440388 - RNA, 22 nt, Human
acacauuaucucauuaaauacu

SEQ ID NO: 440389 - RNA, 22 nt, Human
cacagggaggcagccaugcucc

SEQ ID NO: 440390 - RNA, 22 nt, Human
ucugaggcaaacagaggagugu

SEQ ID NO: 440391 - RNA, 22 nt, Human
gagaguggauggagcugcgaag

SEQ ID NO: 440392 - RNA, 22 nt, Human
uugaaugaauucuacuuccaga

SEQ ID NO: 440393 - RNA, 22 nt, Human
uccuccaggucuaggguggcuu

SEQ ID NO: 440394 - RNA, 22 nt, Human
uggagaggagcaccauggccau

SEQ ID NO: 440395 - RNA, 19 nt, Human
uacaggcaguuucuacaau

SEQ ID NO: 440396 - RNA, 22 nt, Human
ugagccuggcggaagcagcgug

SEQ ID NO: 440397 - RNA, 22 nt, Human
ucaggccuuugaacuuggagug

SEQ ID NO: 440398 - RNA, 22 nt, Human
ugcaggcagcugaaaggugccu

SEQ ID NO: 440399 - RNA, 22 nt, Human
caccacuucauaggcuuuaagg

SEQ ID NO: 440400 - RNA, 22 nt, Human
cugggaggugcagcaaaaauca

SEQ ID NO: 440401 - RNA, 22 nt, Human
uauagcaagcucuuuguaacca

SEQ ID NO: 440402 - RNA, 22 nt, Human
agcauucauugcuagaauguaa

SEQ ID NO: 440403 - RNA, 22 nt, Human
agacaggacacaagcugcauaa

SEQ ID NO: 440404 - RNA, 22 nt, Human
ugggcagagucauacaggagac

SEQ ID NO: 440405 - RNA, 22 nt, Human
ugaggucuguccugucuuugga

SEQ ID NO: 440406 - RNA, 22 nt, Human
ucccagagacagagccuccucc

SEQ ID NO: 440407 - RNA, 20 nt, Human
cugccgaccacagccaugga

SEQ ID NO: 440408 - RNA, 22 nt, Human
caacagaaggaagcagggucag

SEQ ID NO: 440409 - RNA, 22 nt, Human
aguugaaaauuaagugaauuuc

SEQ ID NO: 440410 - RNA, 21 nt, Human
gcagcaaaugacaacagugag

SEQ ID NO: 440411 - RNA, 22 nt, Human
uuuuuguucccagagaauuugu

SEQ ID NO: 440412 - RNA, 22 nt, Human
agaggaauguauuucccugcaa

SEQ ID NO: 440413 - RNA, 22 nt, Human
auacacuuguacauuuuuuaau

SEQ ID NO: 440414 - RNA, 22 nt, Human
gugugccaccagucaaggugaa

SEQ ID NO: 440415 - RNA, 22 nt, Human
ccucagagguguggcaucucug

SEQ ID NO: 440416 - RNA, 22 nt, Human
agguuaggaagauacagaaugu

SEQ ID NO: 440417 - RNA, 19 nt, Human
gaggcgaggcgugcaggag

SEQ ID NO: 440418 - RNA, 22 nt, Human
uguccucacaggaaugaacuuu

SEQ ID NO: 440419 - RNA, 22 nt, Human
gccagacacuccccugggcagg

SEQ ID NO: 440420 - RNA, 22 nt, Human
acccacgaagaugagcggcaug

SEQ ID NO: 440421 - RNA, 20 nt, Human
ugcacacacccuguccucca

SEQ ID NO: 440422 - RNA, 22 nt, Human
ugugaggcgaggccagugagcu

SEQ ID NO: 440423 - RNA, 22 nt, Human
uccccagaggugaggcagcuuu

SEQ ID NO: 440424 - RNA, 22 nt, Human
aucugggccagccccaagagac

SEQ ID NO: 440425 - RNA, 22 nt, Human
ucaguacuucaguagauggagc

SEQ ID NO: 440426 - RNA, 22 nt, Human
cagcuccugcagcugcugccgu

SEQ ID NO: 440427 - RNA, 22 nt, Human
agagaagcauucuucucagggc

SEQ ID NO: 440428 - RNA, 22 nt, Human
uuucaaauggaucccucagccu

SEQ ID NO: 440429 - RNA, 22 nt, Human
gccuggagggcucuagagaggc

SEQ ID NO: 440430 - RNA, 22 nt, Human
ugccugggggacuaaggccaaa

SEQ ID NO: 440431 - RNA, 22 nt, Human
uccgggagcugaacgucuugcg

SEQ ID NO: 440432 - RNA, 22 nt, Human
gacaauaaagugauacauggga

SEQ ID NO: 440433 - RNA, 22 nt, Human
ucacaguacaugauucaguggu

SEQ ID NO: 440434 - RNA, 22 nt, Human
uucaauacaaagaaaggaauuu

SEQ ID NO: 440435 - RNA, 22 nt, Human
agccuggaagaaccugaagucu

SEQ ID NO: 440436 - RNA, 22 nt, Human
gcacagaacacuggugaguccc

SEQ ID NO: 440437 - RNA, 22 nt, Human
cuucaaauacaaguagauuaug

SEQ ID NO: 440438 - RNA, 22 nt, Human
uauugcuuauaauuuguugcaa

SEQ ID NO: 440439 - RNA, 22 nt, Human
uuugggcaagcucacugauuca

SEQ ID NO: 440440 - RNA, 22 nt, Human
ucagaauuugauuccugggaua

SEQ ID NO: 440441 - RNA, 22 nt, Human
ucaaguauaucuagucauuagg

SEQ ID NO: 440442 - RNA, 22 nt, Human
uggcuccugcauuugugcuaac

SEQ ID NO: 440443 - RNA, 22 nt, Human
ugcaguggaaucuggagagcag

SEQ ID NO: 440444 - RNA, 19 nt, Human
gcucagagggcccugugcu

SEQ ID NO: 440445 - RNA, 22 nt, Human
aggcauggauggauccagggcu

SEQ ID NO: 440446 - RNA, 18 nt, Human
agcagcugucagaaugcc

SEQ ID NO: 440447 - RNA, 22 nt, Human
gcccucccuacagccuauuucu

SEQ ID NO: 440448 - RNA, 22 nt, Human
gcagagcagugcuugcccagcg

SEQ ID NO: 440449 - RNA, 22 nt, Human
uccacagaauguaagauccaca

SEQ ID NO: 440450 - RNA, 22 nt, Human
aguaacaucuuugacauuuguu

SEQ ID NO: 440451 - RNA, 22 nt, Human
ucaaacugaauuaaacacuugu

SEQ ID NO: 440452 - RNA, 22 nt, Human
aggccuagaggaauggccaggg

SEQ ID NO: 440453 - RNA, 22 nt, Human
agcagcauauugugucuucaua

SEQ ID NO: 440454 - RNA, 22 nt, Human
uccuggaguauuucuguggugu

SEQ ID NO: 440455 - RNA, 22 nt, Human
ggcugcaggcaggguauccacu

SEQ ID NO: 440456 - RNA, 22 nt, Human
aggggaauggguagacuguuga

SEQ ID NO: 440457 - RNA, 22 nt, Human
cagcacuaugacauuuaauucu

SEQ ID NO: 440458 - RNA, 22 nt, Human
uucacaguggcccucucugagu

SEQ ID NO: 440459 - RNA, 22 nt, Human
gcaaacaugcugagaaauaaga

SEQ ID NO: 440460 - RNA, 22 nt, Human
ugcagccccuaucgcggacagg

SEQ ID NO: 440461 - RNA, 17 nt, Human
ugcagcaguucccaucu

SEQ ID NO: 440462 - RNA, 22 nt, Human
uaaggcaaaggggaaguuauca

SEQ ID NO: 440463 - RNA, 22 nt, Human
aguuucucucaguauagaauag

SEQ ID NO: 440464 - RNA, 22 nt, Human
gcugccaccguggagaugagug

SEQ ID NO: 440465 - RNA, 22 nt, Human
gaggcagcaucuauggugggaa

SEQ ID NO: 440466 - RNA, 22 nt, Human
agcaggcuugguccccagccuc

SEQ ID NO: 440467 - RNA, 22 nt, Human
uuuugcagaaugggaagguagu

SEQ ID NO: 440468 - RNA, 22 nt, Human
auggcagggacuguggcccuug

SEQ ID NO: 440469 - RNA, 22 nt, Human
auuuugaaucaccuuggaagaa

SEQ ID NO: 440470 - RNA, 22 nt, Human
cagaccuggaaaacaggcuugc

SEQ ID NO: 440471 - RNA, 22 nt, Human
gggcccuggggccugauuugca

SEQ ID NO: 440472 - RNA, 22 nt, Human
uuuaucagaggcuauguuucau

SEQ ID NO: 440473 - RNA, 22 nt, Human
agagaauccucuacauguuuuu

SEQ ID NO: 440474 - RNA, 22 nt, Human
gagcagcugagcuggaaugaga

SEQ ID NO: 440475 - RNA, 22 nt, Human
aaguccugaagacacagaaaag

SEQ ID NO: 440476 - RNA, 20 nt, Human
agguccuguuccuugucucc

SEQ ID NO: 440477 - RNA, 22 nt, Human
agcuccugauacaugcaggaau

SEQ ID NO: 440478 - RNA, 22 nt, Human
ugaaacagaguggauacaguga

SEQ ID NO: 440479 - RNA, 22 nt, Human
uaguauuuccuguaagcuauag

SEQ ID NO: 440480 - RNA, 22 nt, Human
ugaaagaacuagcaucuucaag

SEQ ID NO: 440481 - RNA, 22 nt, Human
auccugagcuacaccugcuccu

SEQ ID NO: 440482 - RNA, 22 nt, Human
cuggcccucggaguccagcugc

SEQ ID NO: 440483 - RNA, 22 nt, Human
ggguacaguucuuccaguguca

SEQ ID NO: 440484 - RNA, 22 nt, Human
ugaauucugggucagcagcuug

SEQ ID NO: 440485 - RNA, 22 nt, Human
agguaagggucacaguucauau

SEQ ID NO: 440486 - RNA, 22 nt, Human
ggcagcugcacguugucccguc

SEQ ID NO: 440487 - RNA, 22 nt, Human
ccagccaguccagcauuggugu

SEQ ID NO: 440488 - RNA, 22 nt, Human
agauauacagagaauuauucac

SEQ ID NO: 440489 - RNA, 19 nt, Human
uugcauuucauguuugauu

SEQ ID NO: 440490 - RNA, 22 nt, Human
cuggccuggggccucagcugcu

SEQ ID NO: 440491 - RNA, 22 nt, Human
uuucacaauuuuaaggagcaaa

SEQ ID NO: 440492 - RNA, 22 nt, Human
gucuggcuuugcucagaugcug

SEQ ID NO: 440493 - RNA, 22 nt, Human
ucuugaugcuuuuucuaaaugu

SEQ ID NO: 440494 - RNA, 22 nt, Human
ccagccagucccgcaugaccgc

SEQ ID NO: 440495 - RNA, 22 nt, Human
ugugugaacucucugauguaca

SEQ ID NO: 440496 - RNA, 21 nt, Human
uggcucugcucagagcagucc

SEQ ID NO: 440497 - RNA, 22 nt, Human
aagagacuuugcagugucccua

SEQ ID NO: 440498 - RNA, 22 nt, Human
cagcugagaagugauagcugca

SEQ ID NO: 440499 - RNA, 22 nt, Human
aucuggaagucagagguuugca

SEQ ID NO: 440500 - RNA, 22 nt, Human
agucagugaaggcauugcucaa

SEQ ID NO: 440501 - RNA, 17 nt, Human
aggugcuggagcaucag

SEQ ID NO: 440502 - RNA, 22 nt, Human
uugcagcuucaagcagguugac

SEQ ID NO: 440503 - RNA, 22 nt, Human
aaaguuugcaauuuauguuaau

SEQ ID NO: 440504 - RNA, 22 nt, Human
cugugccuggggggcagagcug

SEQ ID NO: 440505 - RNA, 22 nt, Human
ucuuugcaaaauacaacaaugg

SEQ ID NO: 440506 - RNA, 22 nt, Human
gacauagucucugucuucaugg

SEQ ID NO: 440507 - RNA, 22 nt, Human
acugggcugcuugagugccuuc

SEQ ID NO: 440508 - RNA, 20 nt, Human
ccugucuggagacaaagaga

SEQ ID NO: 440509 - RNA, 22 nt, Human
guccucaguaagagggccucug

SEQ ID NO: 440510 - RNA, 22 nt, Human
uggagggaacaaaggaguccca

SEQ ID NO: 440511 - RNA, 20 nt, Human
auaggaaagggaggggcuuu

SEQ ID NO: 440512 - RNA, 22 nt, Human
aggcagauuuaggagaaaagaa

SEQ ID NO: 440513 - RNA, 20 nt, Human
uggggccuguuucugugguu

SEQ ID NO: 440514 - RNA, 22 nt, Human
gugccuggcaugcgccggugcu

SEQ ID NO: 440515 - RNA, 22 nt, Human
ggcagcuggccuccucgcccac

SEQ ID NO: 440516 - RNA, 22 nt, Human
gcaggcagagagggguuuccag

SEQ ID NO: 440517 - RNA, 22 nt, Human
acacacaacucauuguguaaua

SEQ ID NO: 440518 - RNA, 22 nt, Human
agccuauuccaggaugagcuca

SEQ ID NO: 440519 - RNA, 22 nt, Human
gcugcagggcucucacaggggg

SEQ ID NO: 440520 - RNA, 22 nt, Human
gagcaacaaauuagggggauuu

SEQ ID NO: 440521 - RNA, 19 nt, Human
ugcagccacgugagagacu

SEQ ID NO: 440522 - RNA, 22 nt, Human
gaguagaacugguuaucuaaua

SEQ ID NO: 440523 - RNA, 22 nt, Human
ucagaggacagcagcuaaauaa

SEQ ID NO: 440524 - RNA, 22 nt, Human
ucccagccuuucuuucuccagc

SEQ ID NO: 440525 - RNA, 22 nt, Human
uguguguguaaaagcauuuaua

SEQ ID NO: 440526 - RNA, 22 nt, Human
cugcccugcagcuccacggacu

SEQ ID NO: 440527 - RNA, 22 nt, Human
cacauguacagaagcaggcugg

SEQ ID NO: 440528 - RNA, 22 nt, Human
ucugcaacauuccucuccccac

SEQ ID NO: 440529 - RNA, 22 nt, Human
gaggcagaaguugcagugagca

SEQ ID NO: 440530 - RNA, 22 nt, Human
ugcacacauucuauggggcuga

SEQ ID NO: 440531 - RNA, 22 nt, Human
gcugccuggagcucagccugcc

SEQ ID NO: 440532 - RNA, 19 nt, Human
cccagagagaucucuugcc

SEQ ID NO: 440533 - RNA, 22 nt, Human
auuccucauuauuuacugagga

SEQ ID NO: 440534 - RNA, 22 nt, Human
gcagccaggaaagcuggacccu

SEQ ID NO: 440535 - RNA, 22 nt, Human
agcuugccaguugaagaucuuc

SEQ ID NO: 440536 - RNA, 22 nt, Human
ugcaauuuuaauacauuagagg

SEQ ID NO: 440537 - RNA, 22 nt, Human
gaggccugggagaacuguuuuu

SEQ ID NO: 440538 - RNA, 22 nt, Human
ucuucuuuggaugaaagaauau

SEQ ID NO: 440539 - RNA, 21 nt, Human
cagugccagccacaggacgcc

SEQ ID NO: 440540 - RNA, 22 nt, Human
aaaggcuuugagaaguccugca

SEQ ID NO: 440541 - RNA, 20 nt, Human
aauuuacucacagaaugaau

SEQ ID NO: 440542 - RNA, 22 nt, Human
ugccaggcauguaguagacuug

SEQ ID NO: 440543 - RNA, 22 nt, Human
auauaguuuagguucgaauggg

SEQ ID NO: 440544 - RNA, 22 nt, Human
cagacacaccaggcccauucug

SEQ ID NO: 440545 - RNA, 23 nt, Human
ucugggcugagcucgaguguaga

SEQ ID NO: 440546 - RNA, 19 nt, Human
ucuagcaacccacugcaug

SEQ ID NO: 440547 - RNA, 22 nt, Human
gugacccagaggcugacuaaca

SEQ ID NO: 440548 - RNA, 22 nt, Human
uaaauggcaaccccuagagcug

SEQ ID NO: 440549 - RNA, 22 nt, Human
aggaagcaguuuauaaugcauu

SEQ ID NO: 440550 - RNA, 22 nt, Human
gacagacaggagcucacaggca

SEQ ID NO: 440551 - RNA, 22 nt, Human
uugcccacucagcccuguggag

SEQ ID NO: 440552 - RNA, 22 nt, Human
guauucuuauacucagugagcu

SEQ ID NO: 440553 - RNA, 21 nt, Human
cugaggcagcacagcuaguca

SEQ ID NO: 440554 - RNA, 22 nt, Human
ugcuuuaaaauggacuguuuug

SEQ ID NO: 440555 - RNA, 22 nt, Human
uggaugaggcuggguuaggcag

SEQ ID NO: 440556 - RNA, 22 nt, Human
gcagcugucgcuaggagcugug

SEQ ID NO: 440557 - RNA, 22 nt, Human
aguguccccuccaagggccugg

SEQ ID NO: 440558 - RNA, 18 nt, Human
uacaggaaaaguguuaca

SEQ ID NO: 440559 - RNA, 22 nt, Human
ccugcugggccugagcaaugag

SEQ ID NO: 440560 - RNA, 22 nt, Human
agaggcuccuucacucuggcac

SEQ ID NO: 440561 - RNA, 22 nt, Human
ucuguguccugcuagcugucuu

SEQ ID NO: 440562 - RNA, 22 nt, Human
uucaaaucccugcuccacuauu

SEQ ID NO: 440563 - RNA, 22 nt, Human
cuggaaggagaaggaggcugug

SEQ ID NO: 440564 - RNA, 19 nt, Human
aggccugggguuuugcacu

SEQ ID NO: 440565 - RNA, 23 nt, Human
aaugugcuguauucauuucugga

SEQ ID NO: 440566 - RNA, 22 nt, Human
gagcccugcugggccuugucuc

SEQ ID NO: 440567 - RNA, 22 nt, Human
cugggaggcaccgcgucgugcu

SEQ ID NO: 440568 - RNA, 19 nt, Human
augauacaggugaaaauug

SEQ ID NO: 440569 - RNA, 22 nt, Human
cucacauuccacuugugccaac

SEQ ID NO: 440570 - RNA, 22 nt, Human
cccagcagccagaaugaggagc

SEQ ID NO: 440571 - RNA, 22 nt, Human
ugcccucccacauuauggcugu

SEQ ID NO: 440572 - RNA, 22 nt, Human
aaggcugguuuccuugauguuu

SEQ ID NO: 440573 - RNA, 22 nt, Human
aaggcaauguaaauuacagcuu

SEQ ID NO: 440574 - RNA, 22 nt, Human
cgaggcagaggcugaaacggcu

SEQ ID NO: 440575 - RNA, 19 nt, Human
auuccucaaggacagaaau

SEQ ID NO: 440576 - RNA, 22 nt, Human
gagguggcacugugaggagcac

SEQ ID NO: 440577 - RNA, 22 nt, Human
gucagggauccacugcucuucu

SEQ ID NO: 440578 - RNA, 22 nt, Human
cacaggaaguggucagugccag

SEQ ID NO: 440579 - RNA, 22 nt, Human
uccagccaagccuugguagcug

SEQ ID NO: 440580 - RNA, 22 nt, Human
gaguaagagcuggcuuuggugu

SEQ ID NO: 440581 - RNA, 22 nt, Human
aauccuggcaugugccuuggga

SEQ ID NO: 440582 - RNA, 22 nt, Human
auuagaaugaaguauaggauuu

SEQ ID NO: 440583 - RNA, 22 nt, Human
acauucaaaauugugguuuaga

SEQ ID NO: 440584 - RNA, 22 nt, Human
guauuuauaggggaaugagagu

SEQ ID NO: 440585 - RNA, 22 nt, Human
aggaaagguagcgugccagcag

SEQ ID NO: 440586 - RNA, 22 nt, Human
ggaagggccucgggcgugggac

SEQ ID NO: 440587 - RNA, 22 nt, Human
ggguccugcgugggcccaggac

SEQ ID NO: 440588 - RNA, 22 nt, Human
ccagagaaauaaggggaaaaug

SEQ ID NO: 440589 - RNA, 22 nt, Human
gcagugcuuuagucuguccuuu

SEQ ID NO: 440590 - RNA, 23 nt, Human
agcagcugugguuuaccuuagua

SEQ ID NO: 440591 - RNA, 22 nt, Human
gcuggaggauggacuggaagaa

SEQ ID NO: 440592 - RNA, 22 nt, Human
uaaggcagugagaagaaacagg

SEQ ID NO: 440593 - RNA, 22 nt, Human
uucauuaauucauucagugacu

SEQ ID NO: 440594 - RNA, 22 nt, Human
ucccugggguuccuccagccac

SEQ ID NO: 440595 - RNA, 22 nt, Human
gaaugcuaagcaugugggaguu

SEQ ID NO: 440596 - RNA, 22 nt, Human
caguaucuccacauguaaagug

SEQ ID NO: 440597 - RNA, 22 nt, Human
gguggcaggcccugagcauccc

SEQ ID NO: 440598 - RNA, 22 nt, Human
ugacaagucacuguucuucaau

SEQ ID NO: 440599 - RNA, 22 nt, Human
cagcagcagcuuaguggucccc

SEQ ID NO: 440600 - RNA, 22 nt, Human
gaugauggguugaugugaaggg

SEQ ID NO: 440601 - RNA, 22 nt, Human
uauuuucuggggagagugaacc

SEQ ID NO: 440602 - RNA, 22 nt, Human
guagaaauauuuaucucugaga

SEQ ID NO: 440603 - RNA, 22 nt, Human
auuguaauuuuagagaaagugg

SEQ ID NO: 440604 - RNA, 22 nt, Human
aucccugcccucauggagcuua

SEQ ID NO: 440605 - RNA, 22 nt, Human
acaggcaggcuucggccagagc

SEQ ID NO: 440606 - RNA, 22 nt, Human
aagagcugauuaagucaugagg

SEQ ID NO: 440607 - RNA, 22 nt, Human
caguuccaucuucaucuuuccc

SEQ ID NO: 440608 - RNA, 22 nt, Human
guccaggccaugguggacacag

SEQ ID NO: 440609 - RNA, 21 nt, Human
agggccagaucaccaaggagc

SEQ ID NO: 440610 - RNA, 22 nt, Human
aacagucuaaauuauacccuuu

SEQ ID NO: 440611 - RNA, 22 nt, Human
ccuggcagcauugguagagauu

SEQ ID NO: 440612 - RNA, 22 nt, Human
cucuacucuuaacacagcuagg

SEQ ID NO: 440613 - RNA, 22 nt, Human
agaaauaugcugauuagaugaa

SEQ ID NO: 440614 - RNA, 22 nt, Human
ggagcugcucagagccaguccc

SEQ ID NO: 440615 - RNA, 19 nt, Human
agagaaggauccuaugguu

SEQ ID NO: 440616 - RNA, 22 nt, Human
ccagcauggcaccugagaugag

SEQ ID NO: 440617 - RNA, 22 nt, Human
cacugaacuccuuguuuguccu

SEQ ID NO: 440618 - RNA, 22 nt, Human
gugccugugccaggggugugcu

SEQ ID NO: 440619 - RNA, 22 nt, Human
caguacuuguccucagguguua

SEQ ID NO: 440620 - RNA, 22 nt, Human
gugccagcaguuauggugauuu

SEQ ID NO: 440621 - RNA, 22 nt, Human
acaggacauguaccaggugguc

SEQ ID NO: 440622 - RNA, 20 nt, Human
ugggccucuggugccucugg

SEQ ID NO: 440623 - RNA, 18 nt, Human
acccucuggcuucugagc

SEQ ID NO: 440624 - RNA, 22 nt, Human
uuccucagcuguuugggcucau

SEQ ID NO: 440625 - RNA, 19 nt, Human
ggcucagugacauaggugc

SEQ ID NO: 440626 - RNA, 22 nt, Human
agggccugacacccuugccagc

SEQ ID NO: 440627 - RNA, 22 nt, Human
aggcugaggcagguggaucacu

SEQ ID NO: 440628 - RNA, 22 nt, Human
aauuuuauuaacuggauguagc

SEQ ID NO: 440629 - RNA, 22 nt, Human
gauauuuacauuaagcacauug

SEQ ID NO: 440630 - RNA, 22 nt, Human
cuccugggagcuguggcagagc

SEQ ID NO: 440631 - RNA, 22 nt, Human
cgcaccacugaauuccagccug

SEQ ID NO: 440632 - RNA, 22 nt, Human
cugcagcagccuccagccuugg

SEQ ID NO: 440633 - RNA, 22 nt, Human
aaguuaaguaguacucucuuca

SEQ ID NO: 440634 - RNA, 22 nt, Human
uacuuccuguuuccaugucugu

SEQ ID NO: 440635 - RNA, 22 nt, Human
cuuugcagcaauuucuguuaaa

SEQ ID NO: 440636 - RNA, 22 nt, Human
augugcaugcacuuacaugugu

SEQ ID NO: 440637 - RNA, 22 nt, Human
uagaaacaugagagaaacucuu

SEQ ID NO: 440638 - RNA, 22 nt, Human
uuugcaaacggcccugaguccc

SEQ ID NO: 440639 - RNA, 22 nt, Human
caauucauuacauugcaaagac

SEQ ID NO: 440640 - RNA, 22 nt, Human
agcuguuuuacucagaaacaua

SEQ ID NO: 440641 - RNA, 22 nt, Human
aggucccaggcauagcuggucu

SEQ ID NO: 440642 - RNA, 22 nt, Human
ggagggcagaguccccugcuga

SEQ ID NO: 440643 - RNA, 22 nt, Human
gucuggcuagagacacccuccc

SEQ ID NO: 440644 - RNA, 22 nt, Human
uugcaaguuaaaaauuauuagu

SEQ ID NO: 440645 - RNA, 22 nt, Human
ccaggaggcagagguuguagug

SEQ ID NO: 440646 - RNA, 21 nt, Human
cuggagucuggggguggcagu

SEQ ID NO: 440647 - RNA, 22 nt, Human
ccugggcucaagugauccuccu

SEQ ID NO: 440648 - RNA, 21 nt, Human
aaggcagaagcauggaaugag

SEQ ID NO: 440649 - RNA, 22 nt, Human
gccuguggccacugcgucugca

SEQ ID NO: 440650 - RNA, 22 nt, Human
ucuuuauugcuacugguuuguc

SEQ ID NO: 440651 - RNA, 23 nt, Human
ucacacagcuggucagguacaga

SEQ ID NO: 440652 - RNA, 22 nt, Human
cuagcacuuagggauuguuaug

SEQ ID NO: 440653 - RNA, 19 nt, Human
aggcacagguugucuggac

SEQ ID NO: 440654 - RNA, 22 nt, Human
auaggugaaauauucaaaaugu

SEQ ID NO: 440655 - RNA, 22 nt, Human
uguucacacacggaggccacag

SEQ ID NO: 440656 - RNA, 22 nt, Human
agcccugggcagccaaggaagc

SEQ ID NO: 440657 - RNA, 22 nt, Human
agggugcagaaggagccuagga

SEQ ID NO: 440658 - RNA, 22 nt, Human
cuggcuccaggucaugcacuca

SEQ ID NO: 440659 - RNA, 22 nt, Human
uccugaaguauuguuugaguaa

SEQ ID NO: 440660 - RNA, 22 nt, Human
aggcaguuuauccccagagccu

SEQ ID NO: 440661 - RNA, 22 nt, Human
aauaucuuggcccaacuccaga

SEQ ID NO: 440662 - RNA, 23 nt, Human
uaugugcauauguguaagaauac

SEQ ID NO: 440663 - RNA, 22 nt, Human
uuuuauguuccugaagcuaucu

SEQ ID NO: 440664 - RNA, 22 nt, Human
agaaaauauucauugagaggcu

SEQ ID NO: 440665 - RNA, 22 nt, Human
aagagcuggauugugcugcaga

SEQ ID NO: 440666 - RNA, 22 nt, Human
caucugcuguuccuuggacuca

SEQ ID NO: 440667 - RNA, 22 nt, Human
cccagcccacgguccugggugg

SEQ ID NO: 440668 - RNA, 22 nt, Human
acagagcuuaggaugacuccca

SEQ ID NO: 440669 - RNA, 22 nt, Human
gaauauaggaccucugggaaca

SEQ ID NO: 440670 - RNA, 22 nt, Human
ggaccaucucuagccagagcuu

SEQ ID NO: 440671 - RNA, 22 nt, Human
acaauacuagccaagguuauua

SEQ ID NO: 440672 - RNA, 22 nt, Human
uaaaaaguagugagaauggcgc

SEQ ID NO: 440673 - RNA, 22 nt, Human
gaggcgagaagcuggagauggu

SEQ ID NO: 440674 - RNA, 22 nt, Human
ucacaggcuccagggccuggau

SEQ ID NO: 440675 - RNA, 19 nt, Human
gcuggggccugaccagaca

SEQ ID NO: 440676 - RNA, 22 nt, Human
aucuuuuuacuaacacugcuua

SEQ ID NO: 440677 - RNA, 22 nt, Human
gcuguuucugaguagcuaggcu

SEQ ID NO: 440678 - RNA, 22 nt, Human
ucccugggucauucucuggcac

SEQ ID NO: 440679 - RNA, 22 nt, Human
caaagggcucuagacucagcag

SEQ ID NO: 440680 - RNA, 22 nt, Human
agagcuuguaauugagucaggu

SEQ ID NO: 440681 - RNA, 22 nt, Human
gugcauauguaccugugaucau

SEQ ID NO: 440682 - RNA, 22 nt, Human
uaacacuaagaaucuaaauuua

SEQ ID NO: 440683 - RNA, 22 nt, Human
gggcacugcuggaggcucccug

SEQ ID NO: 440684 - RNA, 22 nt, Human
auugaguauuguaaauaaaaca

SEQ ID NO: 440685 - RNA, 22 nt, Human
ucugucacuuauuaagauggau

SEQ ID NO: 440686 - RNA, 22 nt, Human
uugcccuguggggccuccagcc

SEQ ID NO: 440687 - RNA, 22 nt, Human
uguaguguggccuaucuuugcc

SEQ ID NO: 440688 - RNA, 22 nt, Human
acaaacugaauggguuuucugu

SEQ ID NO: 440689 - RNA, 22 nt, Human
agcaagauuuuucagguuagua

SEQ ID NO: 440690 - RNA, 22 nt, Human
ggagcugcuuugaucugaagaa

SEQ ID NO: 440691 - RNA, 22 nt, Human
ugggcaaaugucacuuucuuuu

SEQ ID NO: 440692 - RNA, 22 nt, Human
gccuugggaaagugggaggaga

SEQ ID NO: 440693 - RNA, 22 nt, Human
uuugcaaagugacuauuauaug

SEQ ID NO: 440694 - RNA, 22 nt, Human
ugcugagcgcauccggcggccg

SEQ ID NO: 440695 - RNA, 22 nt, Human
cugggcacaaguggcccuggau

SEQ ID NO: 440696 - RNA, 22 nt, Human
uggagcaggugggaugucguga

SEQ ID NO: 440697 - RNA, 22 nt, Human
cauuuaauccucacaagccuau

SEQ ID NO: 440698 - RNA, 22 nt, Human
gcagcugcuggaaguuccugcc

SEQ ID NO: 440699 - RNA, 22 nt, Human
uuaauacaagcauaugcacaca

SEQ ID NO: 440700 - RNA, 22 nt, Human
acuuucucaggaauucacagac

SEQ ID NO: 440701 - RNA, 22 nt, Human
uugcuucauuuugggacucuag

SEQ ID NO: 440702 - RNA, 21 nt, Human
agcuggugucagagcucuggg

SEQ ID NO: 440703 - RNA, 22 nt, Human
uuacaguauuguuaaacucuuu

SEQ ID NO: 440704 - RNA, 22 nt, Human
cacugcauggcugugaggcagc

SEQ ID NO: 440705 - RNA, 22 nt, Human
augcuuuuccaggagaaauaua

SEQ ID NO: 440706 - RNA, 22 nt, Human
cuguggagugcuuggcucagug

SEQ ID NO: 440707 - RNA, 18 nt, Human
aggaaagacgaagagggc

SEQ ID NO: 440708 - RNA, 22 nt, Human
aaggcccagcgugaccucagug

SEQ ID NO: 440709 - RNA, 22 nt, Human
cacagaggcaaccuucuggggu

SEQ ID NO: 440710 - RNA, 22 nt, Human
agaacauuugucgaucaauuug

SEQ ID NO: 440711 - RNA, 22 nt, Human
aaggacagaaacagauugcugg

SEQ ID NO: 440712 - RNA, 22 nt, Human
ccagcccuguuuaugugucacu

SEQ ID NO: 440713 - RNA, 23 nt, Human
ugccucaguggaaugugagggug

SEQ ID NO: 440714 - RNA, 17 nt, Human
gcagccagugcagcagg

SEQ ID NO: 440715 - RNA, 22 nt, Human
gauuuucaugauaaacuuguga

SEQ ID NO: 440716 - RNA, 22 nt, Human
cugugcuggagaugggccagag

SEQ ID NO: 440717 - RNA, 22 nt, Human
auugcaaauaacuguacugaau

SEQ ID NO: 440718 - RNA, 22 nt, Human
cagcucugggugacaggagggc

SEQ ID NO: 440719 - RNA, 22 nt, Human
gggcacugcuuugcucugucac

SEQ ID NO: 440720 - RNA, 22 nt, Human
guggucaggggcugaggugccc

SEQ ID NO: 440721 - RNA, 22 nt, Human
ugcaugcaaagugucugcuuug

SEQ ID NO: 440722 - RNA, 22 nt, Human
ggccucugggguccugagccca

SEQ ID NO: 440723 - RNA, 22 nt, Human
uaguuuaguaagaggagagcug

SEQ ID NO: 440724 - RNA, 22 nt, Human
ucaugcagcuuuuccauucagc

SEQ ID NO: 440725 - RNA, 22 nt, Human
uaaauugaaaaucuacagaaca

SEQ ID NO: 440726 - RNA, 23 nt, Human
gagcagagcgggcggggguccug

SEQ ID NO: 440727 - RNA, 22 nt, Human
caggguggaaaagcuaguugga

SEQ ID NO: 440728 - RNA, 22 nt, Human
gcaggagaacaaagcaagcugc

SEQ ID NO: 440729 - RNA, 22 nt, Human
uucagauaucauuaauuuagua

SEQ ID NO: 440730 - RNA, 19 nt, Human
ugcagcuguaugagcuuaa

SEQ ID NO: 440731 - RNA, 22 nt, Human
uucuagaaauccguaagugaau

SEQ ID NO: 440732 - RNA, 22 nt, Human
cagagcugguguuacaagucca

SEQ ID NO: 440733 - RNA, 22 nt, Human
uaauggcagagucaugcuuucu

SEQ ID NO: 440734 - RNA, 22 nt, Human
gcaggggcugagcaccagcggg

SEQ ID NO: 440735 - RNA, 22 nt, Human
cuaggcugagcugggcugagcu

SEQ ID NO: 440736 - RNA, 22 nt, Human
gcuggccauagaagccaaagag

SEQ ID NO: 440737 - RNA, 22 nt, Human
agaagaaaugugaaggccacug

SEQ ID NO: 440738 - RNA, 22 nt, Human
uuucugaagggcagcagacucu

SEQ ID NO: 440739 - RNA, 22 nt, Human
agugugugccuuuggauaccug

SEQ ID NO: 440740 - RNA, 17 nt, Human
ugauucaacuagaaacu

SEQ ID NO: 440741 - RNA, 22 nt, Human
caggaaggaccguccagaucag

SEQ ID NO: 440742 - RNA, 20 nt, Human
uaggcagagcugugcagccu

SEQ ID NO: 440743 - RNA, 22 nt, Human
acuuguguaacacagaaagaac

SEQ ID NO: 440744 - RNA, 22 nt, Human
gaccaggcccaggugcaaggga

SEQ ID NO: 440745 - RNA, 22 nt, Human
agagcuggccagggaucacucu

SEQ ID NO: 440746 - RNA, 18 nt, Human
caauagaaacaguaggaa

SEQ ID NO: 440747 - RNA, 22 nt, Human
cagcuguuaugagguguacaug

SEQ ID NO: 440748 - RNA, 22 nt, Human
aagagaauaucgauagcacucu

SEQ ID NO: 440749 - RNA, 22 nt, Human
augcccugugguucaugugaga

SEQ ID NO: 440750 - RNA, 22 nt, Human
ggcaccagcaggcaccgaugcc

SEQ ID NO: 440751 - RNA, 22 nt, Human
uccagccaccaccuugauugcc

SEQ ID NO: 440752 - RNA, 22 nt, Human
uggaccugcuggaugggcaggu

SEQ ID NO: 440753 - RNA, 22 nt, Human
ccacccugagccgcaagagcag

SEQ ID NO: 440754 - RNA, 22 nt, Human
uccugagggcgauucagcaggu

SEQ ID NO: 440755 - RNA, 22 nt, Human
ucaaauacauggucaaucaacu

SEQ ID NO: 440756 - RNA, 23 nt, Human
ccaggccucucagagggugugcc

SEQ ID NO: 440757 - RNA, 22 nt, Human
aagggccuccuggggagccugg

SEQ ID NO: 440758 - RNA, 22 nt, Human
ucuuugcagaauuuaacuuugc

SEQ ID NO: 440759 - RNA, 21 nt, Human
aauaaccacuaauauaguggc

SEQ ID NO: 440760 - RNA, 22 nt, Human
ggcuagggacuccuccucaggg

SEQ ID NO: 440761 - RNA, 19 nt, Human
aggcaggugcagagguccc

SEQ ID NO: 440762 - RNA, 19 nt, Human
gggcacagccuccccccag

SEQ ID NO: 440763 - RNA, 22 nt, Human
gaggaaggaaugcaguguaugc

SEQ ID NO: 440764 - RNA, 22 nt, Human
gccaccagggggcuccagugag

SEQ ID NO: 440765 - RNA, 22 nt, Human
agaaaagggcaggagggauaca

SEQ ID NO: 440766 - RNA, 22 nt, Human
acuagauuuuggccauuauaca

SEQ ID NO: 440767 - RNA, 22 nt, Human
ugcuuugcagugucuaacagaa

SEQ ID NO: 440768 - RNA, 22 nt, Human
uguggaagugccaaugacaaau

SEQ ID NO: 440769 - RNA, 22 nt, Human
cagcagcugggaaggaggcuga

SEQ ID NO: 440770 - RNA, 18 nt, Human
gaugaggcugucugagaa

SEQ ID NO: 440771 - RNA, 22 nt, Human
ugaaggcaaccucugugguccu

SEQ ID NO: 440772 - RNA, 22 nt, Human
aggcagccauccaggaggcuca

SEQ ID NO: 440773 - RNA, 22 nt, Human
ugcaaauugcgauuuuuauuag

SEQ ID NO: 440774 - RNA, 22 nt, Human
gacacagcuugaugagggcuuu

SEQ ID NO: 440775 - RNA, 22 nt, Human
uuuugugacagaaagauuaagu

SEQ ID NO: 440776 - RNA, 22 nt, Human
guuaaggcugagcaggacacug

SEQ ID NO: 440777 - RNA, 22 nt, Human
gaguguggugaacaggagcacc

SEQ ID NO: 440778 - RNA, 22 nt, Human
cagagucagagcaccugggauu

SEQ ID NO: 440779 - RNA, 20 nt, Human
ggcagccaaucagcgugccg

SEQ ID NO: 440780 - RNA, 22 nt, Human
gagcaggcucugccuguguguc

SEQ ID NO: 440781 - RNA, 22 nt, Human
cuguccugauggugccacuggu

SEQ ID NO: 440782 - RNA, 22 nt, Human
caagggcagauagcugguccaa

SEQ ID NO: 440783 - RNA, 18 nt, Human
cugaggcuuagagagguu

SEQ ID NO: 440784 - RNA, 22 nt, Human
cccaagaucuuucgugcacuaa

SEQ ID NO: 440785 - RNA, 22 nt, Human
gcauccagagguagccacugug

SEQ ID NO: 440786 - RNA, 22 nt, Human
gccagagaggccuuagaaucca

SEQ ID NO: 440787 - RNA, 22 nt, Human
gucaggcccuggcagccgugac

SEQ ID NO: 440788 - RNA, 22 nt, Human
ugucaguguauacauacaguau

SEQ ID NO: 440789 - RNA, 23 nt, Human
aaguucaagucacagccugucuu

SEQ ID NO: 440790 - RNA, 22 nt, Human
ggugugguuugaagggagaugg

SEQ ID NO: 440791 - RNA, 22 nt, Human
acaguguccuuguggucccugu

SEQ ID NO: 440792 - RNA, 22 nt, Human
cugccagcaaugugaccaugcu

SEQ ID NO: 440793 - RNA, 22 nt, Human
caaauugcuaacugucagacua

SEQ ID NO: 440794 - RNA, 22 nt, Human
uuucugaagucuucuaacagau

SEQ ID NO: 440795 - RNA, 22 nt, Human
uuuauaccucauucuuagcaaa

SEQ ID NO: 440796 - RNA, 20 nt, Human
cauuauuguaaucagcugua

SEQ ID NO: 440797 - RNA, 22 nt, Human
agggcagagggugccucaccug

SEQ ID NO: 440798 - RNA, 22 nt, Human
uuucacaacugcuuauuugaga

SEQ ID NO: 440799 - RNA, 21 nt, Human
agcugagcccagaagacuggu

SEQ ID NO: 440800 - RNA, 22 nt, Human
aguggcagagcaggugcuggaa

SEQ ID NO: 440801 - RNA, 22 nt, Human
gcuuugcauuguuuaaucagga

SEQ ID NO: 440802 - RNA, 22 nt, Human
ucaccaggcuggaaugcagugg

SEQ ID NO: 440803 - RNA, 22 nt, Human
cacaugcaggagccaauguaca

SEQ ID NO: 440804 - RNA, 22 nt, Human
gucuggaaagagcugagguuca

SEQ ID NO: 440805 - RNA, 22 nt, Human
ugcccacauggugccauggcca

SEQ ID NO: 440806 - RNA, 22 nt, Human
guugcuuuacagcuggugacag

SEQ ID NO: 440807 - RNA, 22 nt, Human
cucagagcaaugaacaugcaaa

SEQ ID NO: 440808 - RNA, 22 nt, Human
augcaauuuacuguacauaaau

SEQ ID NO: 440809 - RNA, 22 nt, Human
uugcaaauugcaagaguuggau

SEQ ID NO: 440810 - RNA, 22 nt, Human
ugccuggaugugcuggccucac

SEQ ID NO: 440811 - RNA, 22 nt, Human
gugugugugccugcacacacac

SEQ ID NO: 440812 - RNA, 20 nt, Human
cucucccagcacagcuuccu

SEQ ID NO: 440813 - RNA, 22 nt, Human
uccagccuucucaaggcuggcu

SEQ ID NO: 440814 - RNA, 21 nt, Human
ugucagaaauaagcaugugau

SEQ ID NO: 440815 - RNA, 19 nt, Human
cauuuagaaguacauauua

SEQ ID NO: 440816 - RNA, 17 nt, Human
gucaauauuguugacag

SEQ ID NO: 440817 - RNA, 20 nt, Human
cacaggccuugugagcagac

SEQ ID NO: 440818 - RNA, 19 nt, Human
agcugggcugucacaguga

SEQ ID NO: 440819 - RNA, 22 nt, Human
ugguaauuauggauacuuaaau

SEQ ID NO: 440820 - RNA, 22 nt, Human
cagcugccuucugcgggaaguc

SEQ ID NO: 440821 - RNA, 22 nt, Human
gugaggugguacaauauuaacu

SEQ ID NO: 440822 - RNA, 22 nt, Human
gagugcagaaauucccuuccug

SEQ ID NO: 440823 - RNA, 22 nt, Human
uguauuuucugaagauaaucaa

SEQ ID NO: 440824 - RNA, 18 nt, Human
aaggcaguaugauugcac

SEQ ID NO: 440825 - RNA, 22 nt, Human
acagacagauuuugucugaugu

SEQ ID NO: 440826 - RNA, 22 nt, Human
cagcucccuauggugaggcgac

SEQ ID NO: 440827 - RNA, 22 nt, Human
ugcacacaaguuggagaaugaa

SEQ ID NO: 440828 - RNA, 22 nt, Human
cuuuuuguuguauaagcccuuu

SEQ ID NO: 440829 - RNA, 22 nt, Human
agggcuggagccacagcuggga

SEQ ID NO: 440830 - RNA, 22 nt, Human
aguuuucuguucuacaauuuga

SEQ ID NO: 440831 - RNA, 22 nt, Human
ugugccuggaucucugugacaa

SEQ ID NO: 440832 - RNA, 23 nt, Human
acaacaggaaaucagaccugaac

SEQ ID NO: 440833 - RNA, 22 nt, Human
auugaguaccuccagauucaua

SEQ ID NO: 440834 - RNA, 22 nt, Human
aagacaauuugauacuaguugc

SEQ ID NO: 440835 - RNA, 22 nt, Human
agcagcuggugcaacucuaaga

SEQ ID NO: 440836 - RNA, 22 nt, Human
agucccagaucuacaggaggga

SEQ ID NO: 440837 - RNA, 22 nt, Human
ucagcaguucaaccccgucaga

SEQ ID NO: 440838 - RNA, 22 nt, Human
ccuggccucgugcucacggcuc

SEQ ID NO: 440839 - RNA, 17 nt, Human
uacaggagagcaggaac

SEQ ID NO: 440840 - RNA, 19 nt, Human
aaggcugguaccauagguu

SEQ ID NO: 440841 - RNA, 22 nt, Human
uggccagccuugucaucgcuuu

SEQ ID NO: 440842 - RNA, 22 nt, Human
uuaaaggcgauaaggcaguguu

SEQ ID NO: 440843 - RNA, 22 nt, Human
aggaagaggguggcagauaauc

SEQ ID NO: 440844 - RNA, 17 nt, Human
uggcacagaggugcuau

SEQ ID NO: 440845 - RNA, 22 nt, Human
agcauguugggaugagaaggaa

SEQ ID NO: 440846 - RNA, 22 nt, Human
auuaucuauguagaaugauuuu

SEQ ID NO: 440847 - RNA, 22 nt, Human
uaugcaaacaguucaggugaca

SEQ ID NO: 440848 - RNA, 17 nt, Human
ugcagcugcucccaggc

SEQ ID NO: 440849 - RNA, 22 nt, Human
ugacacagaauuuggcuaucac

SEQ ID NO: 440850 - RNA, 22 nt, Human
aaaaguaauugcaauuuuguag

SEQ ID NO: 440851 - RNA, 22 nt, Human
agcagcuggugagcaagcucag

SEQ ID NO: 440852 - RNA, 22 nt, Human
ccagucuguacuuugcucuguu

SEQ ID NO: 440853 - RNA, 22 nt, Human
cccugcccaccacaugcuggga

SEQ ID NO: 440854 - RNA, 22 nt, Human
aacaucauuauguccauuaaug

SEQ ID NO: 440855 - RNA, 22 nt, Human
uucagcaaauggacuguucagg

SEQ ID NO: 440856 - RNA, 22 nt, Human
cccugcccuggagacacuuaaa

SEQ ID NO: 440857 - RNA, 22 nt, Human
aaugcauacguguuuguggcaa

SEQ ID NO: 440858 - RNA, 22 nt, Human
aucaggaaaaauugugaaaggg

SEQ ID NO: 440859 - RNA, 22 nt, Human
gggcuaggcuuggccagcacug

SEQ ID NO: 440860 - RNA, 22 nt, Human
agggacccugaugacugaggag

SEQ ID NO: 440861 - RNA, 22 nt, Human
ugcugccauggucgcugguguc

SEQ ID NO: 440862 - RNA, 23 nt, Human
ugcagcugccucuggcgggccgg

SEQ ID NO: 440863 - RNA, 22 nt, Human
uuagggaaggacagugaagaaa

SEQ ID NO: 440864 - RNA, 22 nt, Human
gcagaaggucuggcacuucagg

SEQ ID NO: 440865 - RNA, 22 nt, Human
uagcacuuguguuaugccuugu

SEQ ID NO: 440866 - RNA, 22 nt, Human
gcugucacaucaaggcacuaaa

SEQ ID NO: 440867 - RNA, 22 nt, Human
uucaucaccuugguagcacucc

SEQ ID NO: 440868 - RNA, 22 nt, Human
caggccuugaaggccugcggga

SEQ ID NO: 440869 - RNA, 22 nt, Human
ugcaggcaggggaugagcagcc

SEQ ID NO: 440870 - RNA, 22 nt, Human
gagacagagaucuugcugaguc

SEQ ID NO: 440871 - RNA, 22 nt, Human
auuucagaguagaucguuauuu

SEQ ID NO: 440872 - RNA, 22 nt, Human
ggcaggcucagcagccaaggag

SEQ ID NO: 440873 - RNA, 22 nt, Human
ucuuuaagccaagauauauuua

SEQ ID NO: 440874 - RNA, 22 nt, Human
cugcaggggccucgagcacagg

SEQ ID NO: 440875 - RNA, 22 nt, Human
gagacacaagacgcaacucugu

SEQ ID NO: 440876 - RNA, 20 nt, Human
auuagcucaggugaggucau

SEQ ID NO: 440877 - RNA, 22 nt, Human
ggucccagcugcucaagaggcu

SEQ ID NO: 440878 - RNA, 22 nt, Human
cccaaagaaaacaguaccucag

SEQ ID NO: 440879 - RNA, 22 nt, Human
agggacuccgugcacagugguu

SEQ ID NO: 440880 - RNA, 22 nt, Human
acaggccuacgaagucaggugc

SEQ ID NO: 440881 - RNA, 22 nt, Human
ucccaggcaggugacaggggga

SEQ ID NO: 440882 - RNA, 20 nt, Human
uccagacaucuagcucaguu

SEQ ID NO: 440883 - RNA, 22 nt, Human
acugaaacauauauuugaguuu

SEQ ID NO: 440884 - RNA, 22 nt, Human
cagaauuuagaaaacaacauaa

SEQ ID NO: 440885 - RNA, 22 nt, Human
aaaugccuguguaaauucuagc

SEQ ID NO: 440886 - RNA, 22 nt, Human
agagaggcugggcguagggcuu

SEQ ID NO: 440887 - RNA, 22 nt, Human
uguuuuuccaugugcagaacaa

SEQ ID NO: 440888 - RNA, 22 nt, Human
cuucuggggauggagcccagaa

SEQ ID NO: 440889 - RNA, 22 nt, Human
aaggccucccugugugcaggug

SEQ ID NO: 440890 - RNA, 22 nt, Human
ccaggcaggcagcguucucagg

SEQ ID NO: 440891 - RNA, 22 nt, Human
ccaugccuggacuccacucuca

SEQ ID NO: 440892 - RNA, 22 nt, Human
aagcccugacuaugaagacaua

SEQ ID NO: 440893 - RNA, 22 nt, Human
gagcaggcauucuaguggcuga

SEQ ID NO: 440894 - RNA, 22 nt, Human
cagagcugugauaaauagauau

SEQ ID NO: 440895 - RNA, 22 nt, Human
ucugggagagcugcugucagag

SEQ ID NO: 440896 - RNA, 22 nt, Human
gcagcagugugggcugaaccua

SEQ ID NO: 440897 - RNA, 22 nt, Human
cugggcuggagugcaauggcgc

SEQ ID NO: 440898 - RNA, 17 nt, Human
gaaaggaggcaacacug

SEQ ID NO: 440899 - RNA, 22 nt, Human
cugugaggccuuuggccagaua

SEQ ID NO: 440900 - RNA, 23 nt, Human
cuucagcagaaacauaaauucuc

SEQ ID NO: 440901 - RNA, 22 nt, Human
cuguuucaaaggguacugugag

SEQ ID NO: 440902 - RNA, 22 nt, Human
gcucagggagagagggcagccg

SEQ ID NO: 440903 - RNA, 22 nt, Human
augcuuggaugcugccauggga

SEQ ID NO: 440904 - RNA, 22 nt, Human
cuggguuuagggucuccccuug

SEQ ID NO: 440905 - RNA, 22 nt, Human
cugagucucccggcaguggagg

SEQ ID NO: 440906 - RNA, 22 nt, Human
gcagcccucgcuagcucucccc

SEQ ID NO: 440907 - RNA, 22 nt, Human
cagaugcaggucugcucaccug

SEQ ID NO: 440908 - RNA, 22 nt, Human
aagacauugucauuuuauaauu

SEQ ID NO: 440909 - RNA, 22 nt, Human
gaaauguaggcauaauuauuuu

SEQ ID NO: 440910 - RNA, 22 nt, Human
gacaagacugguuuauuuaagg

SEQ ID NO: 440911 - RNA, 22 nt, Human
uucuuuauagcuauuggaugag

SEQ ID NO: 440912 - RNA, 22 nt, Human
aaauggcaggcucuuugcuagu

SEQ ID NO: 440913 - RNA, 22 nt, Human
agccuggagaagauguguauug

SEQ ID NO: 440914 - RNA, 22 nt, Human
agggccagccccacccucucug

SEQ ID NO: 440915 - RNA, 22 nt, Human
gcaagcugugccuucucaggau

SEQ ID NO: 440916 - RNA, 22 nt, Human
cagagguugagcaaaaaugaua

SEQ ID NO: 440917 - RNA, 22 nt, Human
ccugggagguggagguugcagc

SEQ ID NO: 440918 - RNA, 22 nt, Human
gggugcaggcagcccaggcagg

SEQ ID NO: 440919 - RNA, 22 nt, Human
agcugaggcauggacaggcugc

SEQ ID NO: 440920 - RNA, 22 nt, Human
ugcagugccucggcagugcagc

SEQ ID NO: 440921 - RNA, 22 nt, Human
cugcccugagucaugccagaug

SEQ ID NO: 440922 - RNA, 22 nt, Human
auuuugaaauacuugaaggaaa

SEQ ID NO: 440923 - RNA, 22 nt, Human
gcagacuguaucaaugucagua

SEQ ID NO: 440924 - RNA, 22 nt, Human
aagugaauuucauuccaauucu

SEQ ID NO: 440925 - RNA, 22 nt, Human
aggcagcuuucagugucucuca

SEQ ID NO: 440926 - RNA, 22 nt, Human
aggagacauaacuaugaugaga

SEQ ID NO: 440927 - RNA, 22 nt, Human
ucucucagaggaagaggcagug

SEQ ID NO: 440928 - RNA, 22 nt, Human
ggcaccugcucaucuggacuca

SEQ ID NO: 440929 - RNA, 22 nt, Human
agcacauuaagugaguucaugu

SEQ ID NO: 440930 - RNA, 22 nt, Human
uaggcugggcugagcuggacgg

SEQ ID NO: 440931 - RNA, 22 nt, Human
agccacagcgaaccucucuucc

SEQ ID NO: 440932 - RNA, 22 nt, Human
aagaguuuucuauaaucuuggc

SEQ ID NO: 440933 - RNA, 22 nt, Human
acauuucucagggaguuuugcu

SEQ ID NO: 440934 - RNA, 22 nt, Human
aacaucuaguuccuauauaaua

SEQ ID NO: 440935 - RNA, 22 nt, Human
uagagcuguaucaaagagccuu

SEQ ID NO: 440936 - RNA, 22 nt, Human
uccucggcugggccccaggcuu

SEQ ID NO: 440937 - RNA, 22 nt, Human
uucaaacacagacagcagcaug

SEQ ID NO: 440938 - RNA, 22 nt, Human
caggcagcaggagcccugcucg

SEQ ID NO: 440939 - RNA, 22 nt, Human
gguuucuagcagagucucuuua

SEQ ID NO: 440940 - RNA, 22 nt, Human
ccaggagguggagauugcagug

SEQ ID NO: 440941 - RNA, 22 nt, Human
gagcccugugauucuguugugu

SEQ ID NO: 440942 - RNA, 22 nt, Human
gcuggcugaguucugucgucug

SEQ ID NO: 440943 - RNA, 22 nt, Human
aaauguaccuugauaguuuggu

SEQ ID NO: 440944 - RNA, 22 nt, Human
ugcaggcuggggaggcagacuu

SEQ ID NO: 440945 - RNA, 23 nt, Human
cagcuccagugcacucagguagc

SEQ ID NO: 440946 - RNA, 22 nt, Human
cugacaggguagacagagggca

SEQ ID NO: 440947 - RNA, 22 nt, Human
acuuagcaccuauggcauuuuu

SEQ ID NO: 440948 - RNA, 22 nt, Human
gaggcacaguguuuggucagug

SEQ ID NO: 440949 - RNA, 22 nt, Human
aauaacuucauguaacauuuaa

SEQ ID NO: 440950 - RNA, 22 nt, Human
uaucuagaacuccagaauguag

SEQ ID NO: 440951 - RNA, 22 nt, Human
cagcugccccgcuggcugacca

SEQ ID NO: 440952 - RNA, 22 nt, Human
cccagcagggucucugugucua

SEQ ID NO: 440953 - RNA, 22 nt, Human
agcagguuguuuuguggccagg

SEQ ID NO: 440954 - RNA, 22 nt, Human
aggaauuuuguauggauacugu

SEQ ID NO: 440955 - RNA, 22 nt, Human
cagagcaggaauaggguguuga

SEQ ID NO: 440956 - RNA, 20 nt, Human
gaugagacccaugcaugaga

SEQ ID NO: 440957 - RNA, 22 nt, Human
cauaaugaacauuagcuacugu

SEQ ID NO: 440958 - RNA, 22 nt, Human
aggcauggauguagcagugacc

SEQ ID NO: 440959 - RNA, 21 nt, Human
gcagacugcccugcugucccc

SEQ ID NO: 440960 - RNA, 15 nt, Human
ucugggcugugagca

SEQ ID NO: 440961 - RNA, 23 nt, Human
gggcaccaggagcaccggacagg

SEQ ID NO: 440962 - RNA, 22 nt, Human
ucccagcauuaaugccugucag

SEQ ID NO: 440963 - RNA, 20 nt, Human
aggcaugggaugcccagauu

SEQ ID NO: 440964 - RNA, 22 nt, Human
acugaaguguagguguuuuccu

SEQ ID NO: 440965 - RNA, 22 nt, Human
ccucagaggugaacaucagugc

SEQ ID NO: 440966 - RNA, 22 nt, Human
caaaauucugcauuucuaauaa

SEQ ID NO: 440967 - RNA, 22 nt, Human
guuccacagagucucacuauga

SEQ ID NO: 440968 - RNA, 22 nt, Human
ugugugccugagccgugccugg

SEQ ID NO: 440969 - RNA, 23 nt, Human
ugagcccaggaggucaaggcugc

SEQ ID NO: 440970 - RNA, 22 nt, Human
gaauacaaauaauaccaaggug

SEQ ID NO: 440971 - RNA, 22 nt, Human
uauuuauaacagugagaacggg

SEQ ID NO: 440972 - RNA, 22 nt, Human
ugggccuggcccuguggaggag

SEQ ID NO: 440973 - RNA, 22 nt, Human
agugggcagcccaggaggucuu

SEQ ID NO: 440974 - RNA, 22 nt, Human
cagggcccaggccacuggguug

SEQ ID NO: 440975 - RNA, 22 nt, Human
aaguucaaguguaaucuuuauu

SEQ ID NO: 440976 - RNA, 22 nt, Human
gaaaccuuugccgauggggucc

SEQ ID NO: 440977 - RNA, 20 nt, Human
ccagacagcaccugccuggu

SEQ ID NO: 440978 - RNA, 22 nt, Human
ugcagcugguuuagaacuagau

SEQ ID NO: 440979 - RNA, 22 nt, Human
agcagggcaaagucaggcuaac

SEQ ID NO: 440980 - RNA, 22 nt, Human
aaagcacuugaaaucuggcagu

SEQ ID NO: 440981 - RNA, 22 nt, Human
agggcuggcaucucuaaugcug

SEQ ID NO: 440982 - RNA, 21 nt, Human
agaggaagugauuggucuggc

SEQ ID NO: 440983 - RNA, 22 nt, Human
gccaggcuccaggcccuccuga

SEQ ID NO: 440984 - RNA, 18 nt, Human
uaucuuuuccagugguau

SEQ ID NO: 440985 - RNA, 22 nt, Human
gaggcaguuccugagugacaag

SEQ ID NO: 440986 - RNA, 22 nt, Human
cagcccuuaaauagauauacag

SEQ ID NO: 440987 - RNA, 18 nt, Human
augcauauuuuaaguugu

SEQ ID NO: 440988 - RNA, 22 nt, Human
agaugagggguagaaaggacuu

SEQ ID NO: 440989 - RNA, 22 nt, Human
uacagaguggugagaucuuuug

SEQ ID NO: 440990 - RNA, 22 nt, Human
gagcccuggcagucugggaugg

SEQ ID NO: 440991 - RNA, 22 nt, Human
cuucaaaucccccugaguuuga

SEQ ID NO: 440992 - RNA, 22 nt, Human
uguugcagagcuggggagggug

SEQ ID NO: 440993 - RNA, 22 nt, Human
gccugccucaaaaucccaguuc

SEQ ID NO: 440994 - RNA, 22 nt, Human
gaggccuugggaugugccacgg

SEQ ID NO: 440995 - RNA, 22 nt, Human
gcugucacucuccggccuuccc

SEQ ID NO: 440996 - RNA, 22 nt, Human
agcacugauuuaaacuggauuu

SEQ ID NO: 440997 - RNA, 22 nt, Human
aaggcaauaucaagagaauucg

SEQ ID NO: 440998 - RNA, 23 nt, Human
gcagcugguuagaagggaaggag

SEQ ID NO: 440999 - RNA, 22 nt, Human
caacaguuuauaguguuaucuu

SEQ ID NO: 441000 - RNA, 22 nt, Human
ucagaggugcaagaaguucuga

SEQ ID NO: 441001 - RNA, 22 nt, Human
ucauugaagugacugaaagauu

SEQ ID NO: 441002 - RNA, 22 nt, Human
cuguugcuaaguagugcaggua

SEQ ID NO: 441003 - RNA, 22 nt, Human
guagcccaccuggggagggcga

SEQ ID NO: 441004 - RNA, 22 nt, Human
cuggagcccaggccuggugucu

SEQ ID NO: 441005 - RNA, 22 nt, Human
gcuguuuccauuuaagugaauc

SEQ ID NO: 441006 - RNA, 22 nt, Human
ugcauauuauguguaucugucu

SEQ ID NO: 441007 - RNA, 22 nt, Human
agccuugaaugcgcugcauugg

SEQ ID NO: 441008 - RNA, 22 nt, Human
uuugcucugacagugccagaga

SEQ ID NO: 441009 - RNA, 18 nt, Human
gagcugagaagaggaugc

SEQ ID NO: 441010 - RNA, 22 nt, Human
cagccagggagcaaagaguuga

SEQ ID NO: 441011 - RNA, 21 nt, Human
gagacagacuuucguccccug

SEQ ID NO: 441012 - RNA, 22 nt, Human
cugcagcauccuagggucugug

SEQ ID NO: 441013 - RNA, 23 nt, Human
ggaggcacuuaggcagagcagag

SEQ ID NO: 441014 - RNA, 22 nt, Human
acauagaacuucccagugagca

SEQ ID NO: 441015 - RNA, 22 nt, Human
ccagcugcugugaggaccacag

SEQ ID NO: 441016 - RNA, 20 nt, Human
ucaggcuggugggcuuuccc

SEQ ID NO: 441017 - RNA, 22 nt, Human
cagggagaaaucuccaggaggu

SEQ ID NO: 441018 - RNA, 22 nt, Human
gcacagggagcaggucucuggu

SEQ ID NO: 441019 - RNA, 22 nt, Human
aggcacaggaggugguaagaag

SEQ ID NO: 441020 - RNA, 22 nt, Human
aaguuucaaauguugauuaugc

SEQ ID NO: 441021 - RNA, 22 nt, Human
gcuggguuuccagcaggcagga

SEQ ID NO: 441022 - RNA, 22 nt, Human
guacauauuaaaggucuauaaa

SEQ ID NO: 441023 - RNA, 19 nt, Human
uauaggaagugugguuaag

SEQ ID NO: 441024 - RNA, 22 nt, Human
aaggcagcaugaaucccuguac

SEQ ID NO: 441025 - RNA, 22 nt, Human
ucagagugcagggaguagcagc

SEQ ID NO: 441026 - RNA, 22 nt, Human
agccucugguccucccucagcu

SEQ ID NO: 441027 - RNA, 22 nt, Human
cuuugcagaaauaaacuugaug

SEQ ID NO: 441028 - RNA, 23 nt, Human
cugaggccugcugcguucagguu

SEQ ID NO: 441029 - RNA, 23 nt, Human
gagagcugacugucaagacuguu

SEQ ID NO: 441030 - RNA, 21 nt, Human
gcucugccacuuaccagauuu

SEQ ID NO: 441031 - RNA, 22 nt, Human
ucaggcugcagcugucagcagc

SEQ ID NO: 441032 - RNA, 22 nt, Human
gguuaaaacugauauuaugggu

SEQ ID NO: 441033 - RNA, 23 nt, Human
aaguacauauauuuagauaguga

SEQ ID NO: 441034 - RNA, 17 nt, Human
gguacaaacccauuuuu

SEQ ID NO: 441035 - RNA, 22 nt, Human
cccuggagaucgggagaggaag

SEQ ID NO: 441036 - RNA, 22 nt, Human
ucccuggcacaagaaggcuguc

SEQ ID NO: 441037 - RNA, 22 nt, Human
uggggcuggcacagucucuauu

SEQ ID NO: 441038 - RNA, 22 nt, Human
gccaccagguuagauccagccu

SEQ ID NO: 441039 - RNA, 22 nt, Human
uggagcaggacugcugcccuca

SEQ ID NO: 441040 - RNA, 22 nt, Human
aaguugaucaaguagcgaguuc

SEQ ID NO: 441041 - RNA, 22 nt, Human
gcugccugauguccagcaggac

SEQ ID NO: 441042 - RNA, 22 nt, Human
caggcaggagccagggauucca

SEQ ID NO: 441043 - RNA, 22 nt, Human
cagcuguuguguaucaggcaga

SEQ ID NO: 441044 - RNA, 18 nt, Human
ucugucucuguccuugcu

SEQ ID NO: 441045 - RNA, 22 nt, Human
accugccuauggagccacaugg

SEQ ID NO: 441046 - RNA, 22 nt, Human
gaggcacaucacuuggugcauu

SEQ ID NO: 441047 - RNA, 22 nt, Human
cagagagggcggcccuggcuuc

SEQ ID NO: 441048 - RNA, 18 nt, Human
cccagcccaccauuucuc

SEQ ID NO: 441049 - RNA, 22 nt, Human
auauuuuguaacuuggaauagg

SEQ ID NO: 441050 - RNA, 22 nt, Human
agccucugggggagcugggagc

SEQ ID NO: 441051 - RNA, 22 nt, Human
aauuggcaagcagauuuccacu

SEQ ID NO: 441052 - RNA, 22 nt, Human
agagaagacuuacagccacagu

SEQ ID NO: 441053 - RNA, 22 nt, Human
aacaaauuaguugcaagacugg

SEQ ID NO: 441054 - RNA, 17 nt, Human
accagccucuccugggg

SEQ ID NO: 441055 - RNA, 22 nt, Human
agcagcugguaggaguggccac

SEQ ID NO: 441056 - RNA, 22 nt, Human
cauuuuacgacauagggcaggc

SEQ ID NO: 441057 - RNA, 20 nt, Human
aggaagcugagauguagagg

SEQ ID NO: 441058 - RNA, 22 nt, Human
aaacugcaauuauuuuugcaau

SEQ ID NO: 441059 - RNA, 22 nt, Human
aaggaagaugcuggccugggga

SEQ ID NO: 441060 - RNA, 22 nt, Human
ggagccuggccuggcucugugu

SEQ ID NO: 441061 - RNA, 22 nt, Human
ccuuucucuuggauaccgauug

SEQ ID NO: 441062 - RNA, 22 nt, Human
acugggcaauaaauucagagaa

SEQ ID NO: 441063 - RNA, 22 nt, Human
cuuuaacaguuccauucaauuu

SEQ ID NO: 441064 - RNA, 22 nt, Human
aucaugcagguuucuccuuucu

SEQ ID NO: 441065 - RNA, 21 nt, Human
agaguuacugucauccuaggu

SEQ ID NO: 441066 - RNA, 20 nt, Human
agcccaucucccacagcuac

SEQ ID NO: 441067 - RNA, 22 nt, Human
cccagcuccgagcuccgagccg

SEQ ID NO: 441068 - RNA, 22 nt, Human
aggcagaaaauagucauccaaa

SEQ ID NO: 441069 - RNA, 22 nt, Human
ggaagagaaaugagucaagacu

SEQ ID NO: 441070 - RNA, 18 nt, Human
ucacaugacagcuguugc

SEQ ID NO: 441071 - RNA, 22 nt, Human
gcugugcugauucauucccugc

SEQ ID NO: 441072 - RNA, 17 nt, Human
agcacuaaaaugcuucc

SEQ ID NO: 441073 - RNA, 22 nt, Human
aguugauuuuucuggcucagcc

SEQ ID NO: 441074 - RNA, 22 nt, Human
ucuaaagauguuuauugacaua

SEQ ID NO: 441075 - RNA, 22 nt, Human
accccagcucugagccacacca

SEQ ID NO: 441076 - RNA, 22 nt, Human
cuggucccagcagagcucugag

SEQ ID NO: 441077 - RNA, 22 nt, Human
augcugagacuggagcagcugg

SEQ ID NO: 441078 - RNA, 22 nt, Human
ggucccagcuggucacugucag

SEQ ID NO: 441079 - RNA, 22 nt, Human
aacauucuuaagauuugugucu

SEQ ID NO: 441080 - RNA, 22 nt, Human
ucucagaguuugaaucuggagu

SEQ ID NO: 441081 - RNA, 19 nt, Human
gcucagagccaugggggcu

SEQ ID NO: 441082 - RNA, 22 nt, Human
guuauauugccaaguauauugu

SEQ ID NO: 441083 - RNA, 22 nt, Human
gcagcagcagggagucugacuu

SEQ ID NO: 441084 - RNA, 22 nt, Human
gcucaggcucucccaggggaau

SEQ ID NO: 441085 - RNA, 22 nt, Human
ucucagaguuuagagcugagcc

SEQ ID NO: 441086 - RNA, 23 nt, Human
ggacagggcccugcccuauggcc

SEQ ID NO: 441087 - RNA, 22 nt, Human
ugagugccuaccaagugcugga

SEQ ID NO: 441088 - RNA, 22 nt, Human
cagcagcuuugccaagucagcc

SEQ ID NO: 441089 - RNA, 21 nt, Human
agcagacagaugcacgcacac

SEQ ID NO: 441090 - RNA, 22 nt, Human
ggaacauuuccuggcagagagg

SEQ ID NO: 441091 - RNA, 22 nt, Human
gagggaagucauaauguucuag

SEQ ID NO: 441092 - RNA, 22 nt, Human
cugcugagcccuggcacaggug

SEQ ID NO: 441093 - RNA, 22 nt, Human
agcuccuccugugccaggccag

SEQ ID NO: 441094 - RNA, 22 nt, Human
cugaacuuauugagugcuugcu

SEQ ID NO: 441095 - RNA, 22 nt, Human
ucugagaagcaccuucuggaca

SEQ ID NO: 441096 - RNA, 22 nt, Human
uuuucuaaaauauccaggacag

SEQ ID NO: 441097 - RNA, 22 nt, Human
auucuuuaauucaauugaagga

SEQ ID NO: 441098 - RNA, 22 nt, Human
aauucagagacaugaagugaca

SEQ ID NO: 441099 - RNA, 22 nt, Human
gagcuagcuucuuccagguuuc

SEQ ID NO: 441100 - RNA, 23 nt, Human
auggaagucacuguuuucuuguc

SEQ ID NO: 441101 - RNA, 22 nt, Human
ucagacagauuuugacacuugc

SEQ ID NO: 441102 - RNA, 22 nt, Human
cacauuuauuugaggcuaauug

SEQ ID NO: 441103 - RNA, 19 nt, Human
aggaaaggaucaaaauagc

SEQ ID NO: 441104 - RNA, 22 nt, Human
gcacagcccuggucggggcccc

SEQ ID NO: 441105 - RNA, 22 nt, Human
gagccuggauugucaccgacuu

SEQ ID NO: 441106 - RNA, 22 nt, Human
uauuucuauuccccaggcaagu

SEQ ID NO: 441107 - RNA, 22 nt, Human
gacagcaaccucaugagaaacu

SEQ ID NO: 441108 - RNA, 22 nt, Human
gacacugaccccaagcuguccu

SEQ ID NO: 441109 - RNA, 22 nt, Human
cccuccaggccugucauguucc

SEQ ID NO: 441110 - RNA, 17 nt, Human
gcugagaggcagcacag

SEQ ID NO: 441111 - RNA, 17 nt, Human
ucagcaggggccaagcu

SEQ ID NO: 441112 - RNA, 22 nt, Human
auguguguguauauacacacau

SEQ ID NO: 441113 - RNA, 22 nt, Human
aggcauggcauggggcagaugu

SEQ ID NO: 441114 - RNA, 22 nt, Human
ggcaccagccaccuauuucuag

SEQ ID NO: 441115 - RNA, 22 nt, Human
acacuaaucuuuuauuugguuu

SEQ ID NO: 441116 - RNA, 22 nt, Human
cgcugccaggucaccaggggua

SEQ ID NO: 441117 - RNA, 22 nt, Human
cagggagcagcgcuggggccuc

SEQ ID NO: 441118 - RNA, 22 nt, Human
uucaaguacuguagauuucagg

SEQ ID NO: 441119 - RNA, 22 nt, Human
accugccucagugcagcuggau

SEQ ID NO: 441120 - RNA, 22 nt, Human
ccacaguaggaacaaguugucg

SEQ ID NO: 441121 - RNA, 22 nt, Human
aguccaauaaccucuuuccuuc

SEQ ID NO: 441122 - RNA, 22 nt, Human
aacccacaagcagcuguagccc

SEQ ID NO: 441123 - RNA, 22 nt, Human
gcuccuggcaggcagugugugu

SEQ ID NO: 441124 - RNA, 22 nt, Human
ugacaaaccaguagcaauaaag

SEQ ID NO: 441125 - RNA, 22 nt, Human
cagcccuggccucuucgcuuuc

SEQ ID NO: 441126 - RNA, 22 nt, Human
gaauuucaacaguccucaaaug

SEQ ID NO: 441127 - RNA, 22 nt, Human
gauggcacacagacauccccgc

SEQ ID NO: 441128 - RNA, 22 nt, Human
ccccagcagacucagggcaggu

SEQ ID NO: 441129 - RNA, 22 nt, Human
cccaggaggcagaaguugcagu

SEQ ID NO: 441130 - RNA, 21 nt, Human
auuguucuggaggaaaggauu

SEQ ID NO: 441131 - RNA, 22 nt, Human
augcagcuagauuuuccagugu

SEQ ID NO: 441132 - RNA, 22 nt, Human
ugcagcugcucauucucucagu

SEQ ID NO: 441133 - RNA, 22 nt, Human
uuuucuucuaccugcuguccaa

SEQ ID NO: 441134 - RNA, 22 nt, Human
ccauccauguggcagggcuggc

SEQ ID NO: 441135 - RNA, 22 nt, Human
ggcccuguccuggcugucuccg

SEQ ID NO: 441136 - RNA, 21 nt, Human
agcagaggggacauguuugau

SEQ ID NO: 441137 - RNA, 20 nt, Human
aacagggggcugcagagggc

SEQ ID NO: 441138 - RNA, 22 nt, Human
uuuggcagaggaagaaggcaca

SEQ ID NO: 441139 - RNA, 22 nt, Human
aggaagagcuggaccagaggac

SEQ ID NO: 441140 - RNA, 22 nt, Human
gcaggcuggaggcuguucuggg

SEQ ID NO: 441141 - RNA, 22 nt, Human
uaccauaacguaaugaacuuga

SEQ ID NO: 441142 - RNA, 22 nt, Human
acauagaguucaauuuucaguc

SEQ ID NO: 441143 - RNA, 22 nt, Human
gcaaacauaauaugaagacacu

SEQ ID NO: 441144 - RNA, 22 nt, Human
aaacugcaauuauguuugcaga

SEQ ID NO: 441145 - RNA, 22 nt, Human
acaacauuauacauagaaagcu

SEQ ID NO: 441146 - RNA, 22 nt, Human
ugcauuaucgucuugauccucu

SEQ ID NO: 441147 - RNA, 22 nt, Human
uauauucaacaggcuaauguca

SEQ ID NO: 441148 - RNA, 22 nt, Human
augacaauauagcuuugauuuu

SEQ ID NO: 441149 - RNA, 22 nt, Human
aagcugccauagaacgagaggu

SEQ ID NO: 441150 - RNA, 22 nt, Human
aaguugauuuaaacuacuaguc

SEQ ID NO: 441151 - RNA, 20 nt, Human
uuuauucacagagaagaguu

SEQ ID NO: 441152 - RNA, 22 nt, Human
cucuuuuucagccuuaccaaag

SEQ ID NO: 441153 - RNA, 21 nt, Human
aggagcuguguuagcuggucg

SEQ ID NO: 441154 - RNA, 22 nt, Human
cagcugacaagaguccuuggag

SEQ ID NO: 441155 - RNA, 22 nt, Human
ccagggaggagcauuucauggu

SEQ ID NO: 441156 - RNA, 22 nt, Human
uggaugagauuaaagugagguu

SEQ ID NO: 441157 - RNA, 22 nt, Human
uucaaguagucacacaugauau

SEQ ID NO: 441158 - RNA, 22 nt, Human
aagauucuuaccuauacccagu

SEQ ID NO: 441159 - RNA, 22 nt, Human
ccagcucuuggugcacuuacau

SEQ ID NO: 441160 - RNA, 22 nt, Human
ucagcacugauguuucagaaga

SEQ ID NO: 441161 - RNA, 22 nt, Human
uccuggauucugcccugaaggc

SEQ ID NO: 441162 - RNA, 22 nt, Human
ugguacaaguucuggcauguga

SEQ ID NO: 441163 - RNA, 22 nt, Human
caaugcuucucauuagccaaug

SEQ ID NO: 441164 - RNA, 22 nt, Human
auuauuuagaaaucgauugaaa

SEQ ID NO: 441165 - RNA, 22 nt, Human
auguacaagcuguuuuacugca

SEQ ID NO: 441166 - RNA, 22 nt, Human
uugucugaaucuggagcucucu

SEQ ID NO: 441167 - RNA, 22 nt, Human
agcagcuggguccggcggagca

SEQ ID NO: 441168 - RNA, 22 nt, Human
uccugaagagguugucuuuaua

SEQ ID NO: 441169 - RNA, 22 nt, Human
uuauaacaucaaucagaguuaa

SEQ ID NO: 441170 - RNA, 22 nt, Human
ccgggccucgggacaccgggua

SEQ ID NO: 441171 - RNA, 22 nt, Human
aaaggaagugccacucuucuuc

SEQ ID NO: 441172 - RNA, 22 nt, Human
agcugguguccuccuggagcug

SEQ ID NO: 441173 - RNA, 22 nt, Human
cauuggucuucuaacagagaga

SEQ ID NO: 441174 - RNA, 16 nt, Human
uucagaauuuguagaa

SEQ ID NO: 441175 - RNA, 22 nt, Human
aauucagaguccuggccccacg

SEQ ID NO: 441176 - RNA, 22 nt, Human
cccagggagagcgcggaggcgg

SEQ ID NO: 441177 - RNA, 22 nt, Human
aaaaguuuaagacucauucuag

SEQ ID NO: 441178 - RNA, 22 nt, Human
agacagggucuugaucagagcu

SEQ ID NO: 441179 - RNA, 22 nt, Human
uuuauucauuguuucgucgcag

SEQ ID NO: 441180 - RNA, 19 nt, Human
ccauggcaaugaucugaug

SEQ ID NO: 441181 - RNA, 22 nt, Human
uuacaguacagaaaauaacaga

SEQ ID NO: 441182 - RNA, 22 nt, Human
ugaaggagaaauggaaaguggg

SEQ ID NO: 441183 - RNA, 22 nt, Human
ugccacagaggugaagcccacu

SEQ ID NO: 441184 - RNA, 22 nt, Human
aauaacuuaagaaauuucccca

SEQ ID NO: 441185 - RNA, 22 nt, Human
ugcugccacaaauucagcugcc

SEQ ID NO: 441186 - RNA, 22 nt, Human
ggcuuugcaaaaucggcuucug

SEQ ID NO: 441187 - RNA, 22 nt, Human
caggcuggaguacaauugugug

SEQ ID NO: 441188 - RNA, 22 nt, Human
uccuuccagguccagggaugug

SEQ ID NO: 441189 - RNA, 22 nt, Human
agggaagaggaccagagucucu

SEQ ID NO: 441190 - RNA, 22 nt, Human
caaguauucuguaaaaagucaa

SEQ ID NO: 441191 - RNA, 22 nt, Human
ucaguccucacuugguucuaag

SEQ ID NO: 441192 - RNA, 22 nt, Human
gagggggcgugcaaggcuccgc

SEQ ID NO: 441193 - RNA, 22 nt, Human
uagauggaggcuagaugcaggg

SEQ ID NO: 441194 - RNA, 22 nt, Human
guggccugggguuuguucugag

SEQ ID NO: 441195 - RNA, 22 nt, Human
caaguauuugcggaguuccacg

SEQ ID NO: 441196 - RNA, 22 nt, Human
agcuaaggccgcguugggguaa

SEQ ID NO: 441197 - RNA, 22 nt, Human
aggugccaauuuucagugaaca

SEQ ID NO: 441198 - RNA, 22 nt, Human
aagagcccugguugaaaauaac

SEQ ID NO: 441199 - RNA, 22 nt, Human
ucuggagauaagacagacagau

SEQ ID NO: 441200 - RNA, 22 nt, Human
caggccugagacaucugagaua

SEQ ID NO: 441201 - RNA, 22 nt, Human
cuggcugguccucggggacagc

SEQ ID NO: 441202 - RNA, 22 nt, Human
caacagucucuauagcuccuug

SEQ ID NO: 441203 - RNA, 22 nt, Human
auauucaaauuacauuuacuaa

SEQ ID NO: 441204 - RNA, 22 nt, Human
agccugagugcuuaggacuguu

SEQ ID NO: 441205 - RNA, 22 nt, Human
uuccugaaaauacagggagaga

SEQ ID NO: 441206 - RNA, 22 nt, Human
agacccugguaaacacuccagg

SEQ ID NO: 441207 - RNA, 22 nt, Human
ccacacagucaguuuccaagaa

SEQ ID NO: 441208 - RNA, 22 nt, Human
caggccugacccugagcuucac

SEQ ID NO: 441209 - RNA, 23 nt, Human
ugggccagggaguccgguuucuu

SEQ ID NO: 441210 - RNA, 22 nt, Human
ccugugccauccugagcauccc

SEQ ID NO: 441211 - RNA, 22 nt, Human
aaagacauauuucuaaguuuau

SEQ ID NO: 441212 - RNA, 22 nt, Human
aaacugcaggucaugacccauu

SEQ ID NO: 441213 - RNA, 22 nt, Human
uuugcaaacauucagggcucca

SEQ ID NO: 441214 - RNA, 22 nt, Human
agcaagcuaccuagauagucua

SEQ ID NO: 441215 - RNA, 22 nt, Human
ggagcuguaacgagccauugcu

SEQ ID NO: 441216 - RNA, 22 nt, Human
gcagggaccuugcccacccucc

SEQ ID NO: 441217 - RNA, 22 nt, Human
gcugcagcuguaggacacaauu

SEQ ID NO: 441218 - RNA, 22 nt, Human
ggaggagacggagugauuagug

SEQ ID NO: 441219 - RNA, 21 nt, Human
ucacuggacgugagccagggg

SEQ ID NO: 441220 - RNA, 22 nt, Human
agggcagcucucaccucuggcc

SEQ ID NO: 441221 - RNA, 22 nt, Human
ucacagcaaaagugugcagagc

SEQ ID NO: 441222 - RNA, 22 nt, Human
gcacacaggcaguuuccagcca

SEQ ID NO: 441223 - RNA, 22 nt, Human
gccuguucugcccugagagccu

SEQ ID NO: 441224 - RNA, 21 nt, Human
ucaggcugucugcugguucca

SEQ ID NO: 441225 - RNA, 22 nt, Human
agucccagugagaugaaccagg

SEQ ID NO: 441226 - RNA, 22 nt, Human
aacauguaaccagcauucaucu

SEQ ID NO: 441227 - RNA, 22 nt, Human
agagaaugcagggcuucggaca

SEQ ID NO: 441228 - RNA, 23 nt, Human
guuaacaugguccauggaagagc

SEQ ID NO: 441229 - RNA, 22 nt, Human
auauauuuugcggucacguggc

SEQ ID NO: 441230 - RNA, 22 nt, Human
caucagucccacggagcagccc

SEQ ID NO: 441231 - RNA, 22 nt, Human
aaauggcaauuuaguuuauuua

SEQ ID NO: 441232 - RNA, 22 nt, Human
aaggcugaguaaaacagagaac

SEQ ID NO: 441233 - RNA, 22 nt, Human
uuuucuuauagagcuuaaaguu

SEQ ID NO: 441234 - RNA, 22 nt, Human
aggggccuggacauggacgcgc

SEQ ID NO: 441235 - RNA, 22 nt, Human
cagcuggggcagccacgugcgg

SEQ ID NO: 441236 - RNA, 22 nt, Human
uuuuguuuguguccacugcagu

SEQ ID NO: 441237 - RNA, 22 nt, Human
uuuguacacugucuacuaugaa

SEQ ID NO: 441238 - RNA, 22 nt, Human
gagguggcuggcucagagccag

SEQ ID NO: 441239 - RNA, 22 nt, Human
cagcagugucuccagcaucaca

SEQ ID NO: 441240 - RNA, 22 nt, Human
gcacugcagguggguggagagg

SEQ ID NO: 441241 - RNA, 22 nt, Human
ugcagcagacugaguaugagaa

SEQ ID NO: 441242 - RNA, 22 nt, Human
uaaaaaguugaaaggacuuauc

SEQ ID NO: 441243 - RNA, 22 nt, Human
ccauggccugaaggagugcauc

SEQ ID NO: 441244 - RNA, 22 nt, Human
ucccaggcuggggccaggugac

SEQ ID NO: 441245 - RNA, 22 nt, Human
caguccugugucccuugguggg

SEQ ID NO: 441246 - RNA, 22 nt, Human
auguacaaucuaucacaagaag

SEQ ID NO: 441247 - RNA, 22 nt, Human
ucggagcuguagaugaaacccu

SEQ ID NO: 441248 - RNA, 22 nt, Human
gggcacaguacuccaaucaacu

SEQ ID NO: 441249 - RNA, 22 nt, Human
ccugagcaacuucaagggccug

SEQ ID NO: 441250 - RNA, 22 nt, Human
cuuuauucugcaaauugccuug

SEQ ID NO: 441251 - RNA, 22 nt, Human
accaggaacaagccauggagga

SEQ ID NO: 441252 - RNA, 22 nt, Human
ccacugucagaggggcugugcc

SEQ ID NO: 441253 - RNA, 22 nt, Human
agcaacaggaauauuauggcaa

SEQ ID NO: 441254 - RNA, 22 nt, Human
gcugaggcaaaccaagaaugua

SEQ ID NO: 441255 - RNA, 21 nt, Human
agccagauccauuuugcaugg

SEQ ID NO: 441256 - RNA, 21 nt, Human
ugcagcuggguucugguuugc

SEQ ID NO: 441257 - RNA, 22 nt, Human
augcaacauacauucugaagcu

SEQ ID NO: 441258 - RNA, 22 nt, Human
aggcaauagaauaugccugagg

SEQ ID NO: 441259 - RNA, 22 nt, Human
cacugccauguugauagaugug

SEQ ID NO: 441260 - RNA, 22 nt, Human
ucuaaugagggugaaggcccag

SEQ ID NO: 441261 - RNA, 22 nt, Human
aggcucuccuccccaggaccau

SEQ ID NO: 441262 - RNA, 22 nt, Human
ucauugaaugagaugcaauaga

SEQ ID NO: 441263 - RNA, 22 nt, Human
agucugcacucagguggagguc

SEQ ID NO: 441264 - RNA, 22 nt, Human
aucaugcagcaacaagcaaggc

SEQ ID NO: 441265 - RNA, 22 nt, Human
agggacaguuacaucaucagac

SEQ ID NO: 441266 - RNA, 21 nt, Human
ucccagagugcuugggacugc

SEQ ID NO: 441267 - RNA, 22 nt, Human
cauguucagugacaguuauuga

SEQ ID NO: 441268 - RNA, 22 nt, Human
ggccuggaaugcuuuccuacca

SEQ ID NO: 441269 - RNA, 22 nt, Human
ugauuuuauugaaacuucacuu

SEQ ID NO: 441270 - RNA, 22 nt, Human
uuuauucacucauucagccagu

SEQ ID NO: 441271 - RNA, 22 nt, Human
auacuuaugauaaauaauugcu

SEQ ID NO: 441272 - RNA, 22 nt, Human
aaguccugugcuagagacaccu

SEQ ID NO: 441273 - RNA, 22 nt, Human
caggcagcaucagucugcugua

SEQ ID NO: 441274 - RNA, 22 nt, Human
uacaugaauuugagucagagga

SEQ ID NO: 441275 - RNA, 22 nt, Human
ggcugagcucaggggcagcagg

SEQ ID NO: 441276 - RNA, 22 nt, Human
uuaacauuguccuuagcagauu

SEQ ID NO: 441277 - RNA, 22 nt, Human
cugugucccccucagccaggug

SEQ ID NO: 441278 - RNA, 17 nt, Human
cucagagcaggacagaa

SEQ ID NO: 441279 - RNA, 22 nt, Human
cccaggagacauauagaaggac

SEQ ID NO: 441280 - RNA, 22 nt, Human
uuuuuuguuggguagaacggaa

SEQ ID NO: 441281 - RNA, 22 nt, Human
uucaaguaacacaaaugcaccc

SEQ ID NO: 441282 - RNA, 19 nt, Human
cacauuuugagucugagau

SEQ ID NO: 441283 - RNA, 22 nt, Human
gcccacaguuaguuugcauggc

SEQ ID NO: 441284 - RNA, 22 nt, Human
uaauuacagguccaaaacaauc

SEQ ID NO: 441285 - RNA, 22 nt, Human
aaugcauaccaugucaucuuug

SEQ ID NO: 441286 - RNA, 22 nt, Human
gccuggcccagggcucuuguug

SEQ ID NO: 441287 - RNA, 22 nt, Human
cuuauuguguguauuuucuagu

SEQ ID NO: 441288 - RNA, 22 nt, Human
ggcuaggggaauaaucuguggu

SEQ ID NO: 441289 - RNA, 22 nt, Human
uuuauugucuaugaacugcuug

SEQ ID NO: 441290 - RNA, 22 nt, Human
uuugggcauauagcuguucccu

SEQ ID NO: 441291 - RNA, 20 nt, Human
ugcagagcuggcuggcuccu

SEQ ID NO: 441292 - RNA, 22 nt, Human
ggcuuauguuugucaagcaauc

SEQ ID NO: 441293 - RNA, 22 nt, Human
cagaagcaagagccggagcuag

SEQ ID NO: 441294 - RNA, 22 nt, Human
ccauggcaaaggagauguuuuc

SEQ ID NO: 441295 - RNA, 22 nt, Human
ggcagcugagaucaugcuguug

SEQ ID NO: 441296 - RNA, 21 nt, Human
guggccugauuaugaaugggu

SEQ ID NO: 441297 - RNA, 22 nt, Human
guuuuucugugagcgguaaagg

SEQ ID NO: 441298 - RNA, 22 nt, Human
acagcagccugcagcccugugu

SEQ ID NO: 441299 - RNA, 22 nt, Human
caauauucaguggaaaagccau

SEQ ID NO: 441300 - RNA, 22 nt, Human
uguuuuaagcucuagaagggga

SEQ ID NO: 441301 - RNA, 22 nt, Human
gcagagccccauugcuggcggg

SEQ ID NO: 441302 - RNA, 22 nt, Human
gcucagggaacuuuuugcaggc

SEQ ID NO: 441303 - RNA, 22 nt, Human
uuggccagacugaggugcuggg

SEQ ID NO: 441304 - RNA, 22 nt, Human
uucucccacuccgugcuucagu

SEQ ID NO: 441305 - RNA, 23 nt, Human
cagggccaggcagcagcugucac

SEQ ID NO: 441306 - RNA, 22 nt, Human
uuuaaccugucaauuugcaugc

SEQ ID NO: 441307 - RNA, 22 nt, Human
gagcacugauuuauuuuugucu

SEQ ID NO: 441308 - RNA, 22 nt, Human
augcauauuggauuagcagcca

SEQ ID NO: 441309 - RNA, 22 nt, Human
cccagguggguuggccucuguc

SEQ ID NO: 441310 - RNA, 22 nt, Human
gagcuccaccaccuucaggcag

SEQ ID NO: 441311 - RNA, 22 nt, Human
uuugggcaguagauguaucacu

SEQ ID NO: 441312 - RNA, 22 nt, Human
uuagacauguuugcuaaaauga

SEQ ID NO: 441313 - RNA, 20 nt, Human
ugcccacaucacucaggagu

SEQ ID NO: 441314 - RNA, 22 nt, Human
uuacaauaguuccuucuuuugu

SEQ ID NO: 441315 - RNA, 22 nt, Human
ugagcccuugacaucgcccacu

SEQ ID NO: 441316 - RNA, 22 nt, Human
agggaagccaagccuuagagaa

SEQ ID NO: 441317 - RNA, 22 nt, Human
cuucugugcuucacaguugcca

SEQ ID NO: 441318 - RNA, 22 nt, Human
gcucuggcuacuguggcuaccg

SEQ ID NO: 441319 - RNA, 21 nt, Human
gggcuccagagauguagcuuc

SEQ ID NO: 441320 - RNA, 22 nt, Human
ugaagccagcuuuggaagacac

SEQ ID NO: 441321 - RNA, 22 nt, Human
uuuauccagaaucaggauuuuu

SEQ ID NO: 441322 - RNA, 22 nt, Human
cugucccaggagcuguaagaca

SEQ ID NO: 441323 - RNA, 22 nt, Human
ccagagaagucuugccuggauu

SEQ ID NO: 441324 - RNA, 22 nt, Human
gcugucccaugguugcaagaug

SEQ ID NO: 441325 - RNA, 22 nt, Human
ccuaggcccucaaagagcauaa

SEQ ID NO: 441326 - RNA, 22 nt, Human
uaaagucaagguacuguuucac

SEQ ID NO: 441327 - RNA, 22 nt, Human
aauacuauguagccaaaauaau

SEQ ID NO: 441328 - RNA, 22 nt, Human
uuuccuuugggagcaugaauuu

SEQ ID NO: 441329 - RNA, 22 nt, Human
ccaggcuggagugcaauggugc

SEQ ID NO: 441330 - RNA, 22 nt, Human
agcagcagaagggagacccagg

SEQ ID NO: 441331 - RNA, 22 nt, Human
aaagaggcaaucaauguagcaa

SEQ ID NO: 441332 - RNA, 22 nt, Human
gcacagggagacagccguggcc

SEQ ID NO: 441333 - RNA, 22 nt, Human
agaacagcaguuaugguucauu

SEQ ID NO: 441334 - RNA, 22 nt, Human
cuuugcagcucuagguggaagc

SEQ ID NO: 441335 - RNA, 22 nt, Human
ccucccagugccggggccggcu

SEQ ID NO: 441336 - RNA, 22 nt, Human
ggcagaaggccucccagcuccu

SEQ ID NO: 441337 - RNA, 21 nt, Human
uaauuuauucagcacaguguu

SEQ ID NO: 441338 - RNA, 22 nt, Human
guuccuuagaguugauauggua

SEQ ID NO: 441339 - RNA, 19 nt, Human
ccaggccuccugggagguc

SEQ ID NO: 441340 - RNA, 22 nt, Human
ugaggcagaaaauagcaguuca

SEQ ID NO: 441341 - RNA, 22 nt, Human
cagcaggccaugcugcuuuuca

SEQ ID NO: 441342 - RNA, 22 nt, Human
gcagcugggucugugugggcug

SEQ ID NO: 441343 - RNA, 22 nt, Human
aaaauucauuccucagacugcc

SEQ ID NO: 441344 - RNA, 22 nt, Human
agcucccagaaggcccugcgcc

SEQ ID NO: 441345 - RNA, 22 nt, Human
cagcucugaugaaauguaccag

SEQ ID NO: 441346 - RNA, 20 nt, Human
uuucagagugucuuuccauu

SEQ ID NO: 441347 - RNA, 22 nt, Human
uccugcagugugucuccugcac

SEQ ID NO: 441348 - RNA, 22 nt, Human
uugcaaaagccgaggcacucca

SEQ ID NO: 441349 - RNA, 22 nt, Human
aacagcuauuagaacuucaugg

SEQ ID NO: 441350 - RNA, 22 nt, Human
auucagagucugcacaacagca

SEQ ID NO: 441351 - RNA, 22 nt, Human
cagcuguccaaacacauuaacu

SEQ ID NO: 441352 - RNA, 18 nt, Human
agcagagcccaugcauuc

SEQ ID NO: 441353 - RNA, 22 nt, Human
ccacuuugagaagcugaugaaa

SEQ ID NO: 441354 - RNA, 22 nt, Human
uguaugaagacuucuucugugu

SEQ ID NO: 441355 - RNA, 19 nt, Human
cuuugcaaagcccugugua

SEQ ID NO: 441356 - RNA, 22 nt, Human
cugcugggucuaugcaagugga

SEQ ID NO: 441357 - RNA, 22 nt, Human
acugggcuagaguggaagcugg

SEQ ID NO: 441358 - RNA, 22 nt, Human
agugggugauaagaccaaggag

SEQ ID NO: 441359 - RNA, 22 nt, Human
uccucagacacccugcuggcuu

SEQ ID NO: 441360 - RNA, 22 nt, Human
aggcaauauuccauguggaacu

SEQ ID NO: 441361 - RNA, 22 nt, Human
cagaaugcauugcuucugaugg

SEQ ID NO: 441362 - RNA, 22 nt, Human
ucccagagucagagguggggcc

SEQ ID NO: 441363 - RNA, 22 nt, Human
ugcagccaucgcagagucugua

SEQ ID NO: 441364 - RNA, 22 nt, Human
uaacaugaaacuccaaauggua

SEQ ID NO: 441365 - RNA, 22 nt, Human
cuaggcugcagaugcauggaau

SEQ ID NO: 441366 - RNA, 22 nt, Human
acauuucucagguaagucauuu

SEQ ID NO: 441367 - RNA, 22 nt, Human
aacagugucaggauuacagaua

SEQ ID NO: 441368 - RNA, 22 nt, Human
agcuguuuaugcacuccugccu

SEQ ID NO: 441369 - RNA, 22 nt, Human
ggugagaaaaaugaguaugauu

SEQ ID NO: 441370 - RNA, 20 nt, Human
ccugucuccucuuaccuggc

SEQ ID NO: 441371 - RNA, 22 nt, Human
ugcagcugcugguggcugaaag

SEQ ID NO: 441372 - RNA, 23 nt, Human
gcacagagcaguuaggggaagau

SEQ ID NO: 441373 - RNA, 22 nt, Human
uuauacgcucaauccuaucauc

SEQ ID NO: 441374 - RNA, 22 nt, Human
cuauuacauuucuggacauuca

SEQ ID NO: 441375 - RNA, 23 nt, Human
acagggcauugcuggccucgagg

SEQ ID NO: 441376 - RNA, 22 nt, Human
uucagaauguacugauagaaca

SEQ ID NO: 441377 - RNA, 23 nt, Human
cagcccuuccugcauguuuuugu

SEQ ID NO: 441378 - RNA, 22 nt, Human
ugagauaguauauggaaagagu

SEQ ID NO: 441379 - RNA, 22 nt, Human
uugaaugaaugguccauauaga

SEQ ID NO: 441380 - RNA, 22 nt, Human
ggcaauaaugacauuuuaaaaa

SEQ ID NO: 441381 - RNA, 22 nt, Human
augggaggguggaaaggcucug

SEQ ID NO: 441382 - RNA, 22 nt, Human
ccugggaagagcugacaggagg

SEQ ID NO: 441383 - RNA, 22 nt, Human
caacauuucaaggucuuuagga

SEQ ID NO: 441384 - RNA, 22 nt, Human
gcacagcacagcaacauguuuu

SEQ ID NO: 441385 - RNA, 19 nt, Human
cagagcagugguuccugaa

SEQ ID NO: 441386 - RNA, 23 nt, Human
uuucacauuaauguuuagcagga

SEQ ID NO: 441387 - RNA, 22 nt, Human
gcaggcaccucguggaguggaa

SEQ ID NO: 441388 - RNA, 22 nt, Human
ucaggcuggagugcaguggcgc

SEQ ID NO: 441389 - RNA, 22 nt, Human
gccucagccggcggacgccagg

SEQ ID NO: 441390 - RNA, 22 nt, Human
gcccuggaugcucauggcauca

SEQ ID NO: 441391 - RNA, 22 nt, Human
cuuauugugucuuugaauaagu

SEQ ID NO: 441392 - RNA, 23 nt, Human
ucugucacuuucugcuguggagu

SEQ ID NO: 441393 - RNA, 22 nt, Human
auaaugcauuuagaauaauuca

SEQ ID NO: 441394 - RNA, 22 nt, Human
gcugguccagggccucuguggg

SEQ ID NO: 441395 - RNA, 22 nt, Human
aacaggcuuuuggaaaguuaca

SEQ ID NO: 441396 - RNA, 22 nt, Human
gcuggagccuucugcucuguug

SEQ ID NO: 441397 - RNA, 22 nt, Human
agacacaguauaagcacaacaa

SEQ ID NO: 441398 - RNA, 22 nt, Human
agaggggagagcuaagcaauuc

SEQ ID NO: 441399 - RNA, 22 nt, Human
ucugggcucuuaguguacccuc

SEQ ID NO: 441400 - RNA, 22 nt, Human
cagaggccuuucuacagugaua

SEQ ID NO: 441401 - RNA, 22 nt, Human
ccagcagcucccucaggguccg

SEQ ID NO: 441402 - RNA, 22 nt, Human
aggcccuggcccccagagauuc

SEQ ID NO: 441403 - RNA, 22 nt, Human
cccuggaguagcacugggucgc

SEQ ID NO: 441404 - RNA, 20 nt, Human
auuuguuucuacucucugac

SEQ ID NO: 441405 - RNA, 22 nt, Human
cugaagcucuccaguuuguuuc

SEQ ID NO: 441406 - RNA, 22 nt, Human
cuugaugagguaugaaccucuc

SEQ ID NO: 441407 - RNA, 22 nt, Human
ugccuggguguaaagggccaac

SEQ ID NO: 441408 - RNA, 22 nt, Human
aagcccugcagucucugccaca

SEQ ID NO: 441409 - RNA, 22 nt, Human
gggucaggcucagcagggcagc

SEQ ID NO: 441410 - RNA, 22 nt, Human
gaggccucaggcgugggaaggg

SEQ ID NO: 441411 - RNA, 22 nt, Human
aguuucacacaacauuugcaug

SEQ ID NO: 441412 - RNA, 22 nt, Human
ucuuuggaugcguuacuuuuac

SEQ ID NO: 441413 - RNA, 22 nt, Human
agcugagguugaagagugaacg

SEQ ID NO: 441414 - RNA, 22 nt, Human
aaaguuuuuaagcaagacccuu

SEQ ID NO: 441415 - RNA, 22 nt, Human
ggguccccucaucauggagacu

SEQ ID NO: 441416 - RNA, 22 nt, Human
aguauucuggaauucuauguga

SEQ ID NO: 441417 - RNA, 19 nt, Human
augcuuuauguuauuucuu

SEQ ID NO: 441418 - RNA, 22 nt, Human
aauucaaauuacaauaguuguu

SEQ ID NO: 441419 - RNA, 22 nt, Human
uuugcagcuucugguggccucu

SEQ ID NO: 441420 - RNA, 22 nt, Human
cacaggagagcugggaggugcc

SEQ ID NO: 441421 - RNA, 22 nt, Human
uguuucaggaccuaucuuuuag

SEQ ID NO: 441422 - RNA, 22 nt, Human
auucugucuuuuuaaaauaaua

SEQ ID NO: 441423 - RNA, 22 nt, Human
aaggcaauuuguugugaggauu

SEQ ID NO: 441424 - RNA, 22 nt, Human
uuaacacuugaacucuacaugu

SEQ ID NO: 441425 - RNA, 22 nt, Human
ccaggaagccucagaugcugag

SEQ ID NO: 441426 - RNA, 22 nt, Human
ucaaacuggcagacuucuacuu

SEQ ID NO: 441427 - RNA, 22 nt, Human
caggcagagaacucauccguga

SEQ ID NO: 441428 - RNA, 22 nt, Human
ugaggacauuaggaagugaagg

SEQ ID NO: 441429 - RNA, 21 nt, Human
cacugcauuaagucuguaggu

SEQ ID NO: 441430 - RNA, 22 nt, Human
cugcugagcaucagggcugccc

SEQ ID NO: 441431 - RNA, 22 nt, Human
aacaaucaaguuucuaaaugac

SEQ ID NO: 441432 - RNA, 23 nt, Human
uagcagcauuuuuagccucuguc

SEQ ID NO: 441433 - RNA, 22 nt, Human
aaaaugcaugagaaugugcucg

SEQ ID NO: 441434 - RNA, 22 nt, Human
acagaguagcucaagaagauug

SEQ ID NO: 441435 - RNA, 21 nt, Human
uccagaggaggacagacucag

SEQ ID NO: 441436 - RNA, 22 nt, Human
gaggauggaggugugagcuaug

SEQ ID NO: 441437 - RNA, 22 nt, Human
ucugccuggguguggagcagag

SEQ ID NO: 441438 - RNA, 22 nt, Human
ccucaugaguucuucugcccau

SEQ ID NO: 441439 - RNA, 22 nt, Human
uuccugggugguccugguagag

SEQ ID NO: 441440 - RNA, 22 nt, Human
acuuuggaggguguuguagaug

SEQ ID NO: 441441 - RNA, 22 nt, Human
uugcaaaugggcaaagcagauc

SEQ ID NO: 441442 - RNA, 22 nt, Human
acaggcagcacuaaucucuggu

SEQ ID NO: 441443 - RNA, 22 nt, Human
gcuggguggaucggaggcucug

SEQ ID NO: 441444 - RNA, 22 nt, Human
ccagcccuugcugaaggguggc

SEQ ID NO: 441445 - RNA, 22 nt, Human
agccuggauccuaggcucagcu

SEQ ID NO: 441446 - RNA, 22 nt, Human
aaggcaaugaauacuguuuuug

SEQ ID NO: 441447 - RNA, 22 nt, Human
uggugagagcagaccuucuuuu

SEQ ID NO: 441448 - RNA, 22 nt, Human
aggcagucuaguccccaggcaa

SEQ ID NO: 441449 - RNA, 22 nt, Human
gcaagagcgcucucuuucauua

SEQ ID NO: 441450 - RNA, 22 nt, Human
ucacugcagacaaccucaguca

SEQ ID NO: 441451 - RNA, 22 nt, Human
aggaaaaaagucugugauuaua

SEQ ID NO: 441452 - RNA, 22 nt, Human
ucauucagguugggcaaguguc

SEQ ID NO: 441453 - RNA, 22 nt, Human
ucaaucacguguuccauguucu

SEQ ID NO: 441454 - RNA, 22 nt, Human
ugcauauuguccuugauauuau

SEQ ID NO: 441455 - RNA, 22 nt, Human
uggcucugagacacaggcucuc

SEQ ID NO: 441456 - RNA, 22 nt, Human
ggcugagggucccagacccuaa

SEQ ID NO: 441457 - RNA, 22 nt, Human
agggcugagacuaaggccagau

SEQ ID NO: 441458 - RNA, 23 nt, Human
agguuaugauuauagagcgagga

SEQ ID NO: 441459 - RNA, 22 nt, Human
cuauuauuagauaaucuacuug

SEQ ID NO: 441460 - RNA, 19 nt, Human
ugacacagcuagguuugcu

SEQ ID NO: 441461 - RNA, 22 nt, Human
aauaauuuugagagccuggaaa

SEQ ID NO: 441462 - RNA, 22 nt, Human
ucuggccaggggucccugaagg

SEQ ID NO: 441463 - RNA, 22 nt, Human
gcucagagagaggcucaccauu

SEQ ID NO: 441464 - RNA, 18 nt, Human
gccagugcccuggcucac

SEQ ID NO: 441465 - RNA, 22 nt, Human
ucacaguaguuguucucuguuu

SEQ ID NO: 441466 - RNA, 22 nt, Human
uuaaaugagauguucagauauu

SEQ ID NO: 441467 - RNA, 22 nt, Human
gcaggccugcccagcaggaugg

SEQ ID NO: 441468 - RNA, 22 nt, Human
auauuguacuaggguuacaugu

SEQ ID NO: 441469 - RNA, 22 nt, Human
cauguaaugcugggagcugggc

SEQ ID NO: 441470 - RNA, 22 nt, Human
ucccagagcucugacaccagcu

SEQ ID NO: 441471 - RNA, 22 nt, Human
ggcagaagaaaggcuaagucuc

SEQ ID NO: 441472 - RNA, 22 nt, Human
ugcagaccucccauggcugccu

SEQ ID NO: 441473 - RNA, 22 nt, Human
ccaggucuuguuugacaucaau

SEQ ID NO: 441474 - RNA, 22 nt, Human
gcugucacacaugggaucucag

SEQ ID NO: 441475 - RNA, 22 nt, Human
gccugagcccaggugugcagag

SEQ ID NO: 441476 - RNA, 22 nt, Human
aggcucccaugguguggcagga

SEQ ID NO: 441477 - RNA, 22 nt, Human
ccaguacugucuccaauauucc

SEQ ID NO: 441478 - RNA, 22 nt, Human
gcucagggaaugagaagauguu

SEQ ID NO: 441479 - RNA, 22 nt, Human
auguacaaucuaggguuugcau

SEQ ID NO: 441480 - RNA, 22 nt, Human
aaacugcagagccaugguucaa

SEQ ID NO: 441481 - RNA, 22 nt, Human
cagcaggguuaagugacucacc

SEQ ID NO: 441482 - RNA, 22 nt, Human
uaaggcagagguaccacuaggc

SEQ ID NO: 441483 - RNA, 22 nt, Human
acuucaaauuuucagaagaaau

SEQ ID NO: 441484 - RNA, 22 nt, Human
uuuuacaaaugaggagcuggag

SEQ ID NO: 441485 - RNA, 23 nt, Human
agcagcaaaaauuuaucuuucug

SEQ ID NO: 441486 - RNA, 22 nt, Human
cugggacaugauagaaacagau

SEQ ID NO: 441487 - RNA, 22 nt, Human
uggccagcugagauuuagcaca

SEQ ID NO: 441488 - RNA, 22 nt, Human
ccagcugcaggggagcagugga

SEQ ID NO: 441489 - RNA, 22 nt, Human
uugagaaacaucuaaucuuugu

SEQ ID NO: 441490 - RNA, 22 nt, Human
gcuggagcugcagccugggccu

SEQ ID NO: 441491 - RNA, 22 nt, Human
ucaacauuuaugaagcuguggc

SEQ ID NO: 441492 - RNA, 22 nt, Human
uccagaguacggaagagucauc

SEQ ID NO: 441493 - RNA, 22 nt, Human
ccuccuggugggcgcuucuggc

SEQ ID NO: 441494 - RNA, 22 nt, Human
ugcagccccccagauggccgua

SEQ ID NO: 441495 - RNA, 22 nt, Human
ucuuucucucuaaucaagcaca

SEQ ID NO: 441496 - RNA, 22 nt, Human
cgucccagcagauaaaugagga

SEQ ID NO: 441497 - RNA, 22 nt, Human
augagcugugggauuccagagg

SEQ ID NO: 441498 - RNA, 22 nt, Human
ugcaaauuggugaggaccacuu

SEQ ID NO: 441499 - RNA, 22 nt, Human
gauuuuauuagcccaaacuuug

SEQ ID NO: 441500 - RNA, 22 nt, Human
cauguacacacaaagggacaau

SEQ ID NO: 441501 - RNA, 19 nt, Human
uaugacaaguacuaguucu

SEQ ID NO: 441502 - RNA, 18 nt, Human
gagaaggccacuuguuuu

SEQ ID NO: 441503 - RNA, 22 nt, Human
acagagaaagugggcugaagau

SEQ ID NO: 441504 - RNA, 22 nt, Human
aagcacuggguauagcaaugau

SEQ ID NO: 441505 - RNA, 22 nt, Human
guguguguucaauaaauuuaag

SEQ ID NO: 441506 - RNA, 22 nt, Human
gaccacugaaugcacuucuaau

SEQ ID NO: 441507 - RNA, 22 nt, Human
cacugguagagagaagacaagg

SEQ ID NO: 441508 - RNA, 20 nt, Human
agcuggugaauuaaagacug

SEQ ID NO: 441509 - RNA, 22 nt, Human
gccagcagcugugggguggcca

SEQ ID NO: 441510 - RNA, 22 nt, Human
auacauacauguacacauaaau

SEQ ID NO: 441511 - RNA, 22 nt, Human
ggcagagacuggguuggcagag

SEQ ID NO: 441512 - RNA, 22 nt, Human
ucugaggccccugggcaggaug

SEQ ID NO: 441513 - RNA, 22 nt, Human
uggaguugugucaucuuuguaa

SEQ ID NO: 441514 - RNA, 22 nt, Human
gagcaggaaggccagaaggguc

SEQ ID NO: 441515 - RNA, 22 nt, Human
ugcaguggaggccgugagacag

SEQ ID NO: 441516 - RNA, 22 nt, Human
augcauaucagugauuguuugc

SEQ ID NO: 441517 - RNA, 22 nt, Human
cagcaguaauuagugcugcaug

SEQ ID NO: 441518 - RNA, 22 nt, Human
gccagcugccaaguugugagau

SEQ ID NO: 441519 - RNA, 22 nt, Human
gcagcuggucuggccuagagua

SEQ ID NO: 441520 - RNA, 22 nt, Human
auuagcaauugugcaucuagua

SEQ ID NO: 441521 - RNA, 22 nt, Human
ggacccacagauucuucauucu

SEQ ID NO: 441522 - RNA, 22 nt, Human
aaacuuuuuuagguucauaggc

SEQ ID NO: 441523 - RNA, 22 nt, Human
augcccugccaagcaggcuaaa

SEQ ID NO: 441524 - RNA, 22 nt, Human
aucauaauugcuccagugauau

SEQ ID NO: 441525 - RNA, 22 nt, Human
ggcuccaacacuaaauguguuu

SEQ ID NO: 441526 - RNA, 22 nt, Human
augcaauaccuucugaaaauaa

SEQ ID NO: 441527 - RNA, 22 nt, Human
cuugcuuuaucugguuucucau

SEQ ID NO: 441528 - RNA, 22 nt, Human
agcagggguaacagaaggaaag

SEQ ID NO: 441529 - RNA, 22 nt, Human
ccaggguggggcaggcccacug

SEQ ID NO: 441530 - RNA, 22 nt, Human
cagcagcugguugaauccuucu

SEQ ID NO: 441531 - RNA, 22 nt, Human
ugucccaguuuugcagguuaga

SEQ ID NO: 441532 - RNA, 22 nt, Human
uuucaaacauaucuucauuacu

SEQ ID NO: 441533 - RNA, 20 nt, Human
cccagggaccugagcuccau

SEQ ID NO: 441534 - RNA, 22 nt, Human
ugcagcugcuggcccaggugcu

SEQ ID NO: 441535 - RNA, 22 nt, Human
ggaagggcggauaguauaaguu

SEQ ID NO: 441536 - RNA, 22 nt, Human
guguauccuuauucacacacau

SEQ ID NO: 441537 - RNA, 21 nt, Human
gcccacagugaggaggauccc

SEQ ID NO: 441538 - RNA, 22 nt, Human
gagggcucacugagaaagcagu

SEQ ID NO: 441539 - RNA, 22 nt, Human
ugaaacaggcaaaacugcagau

SEQ ID NO: 441540 - RNA, 18 nt, Human
cugaggcuggcaggagcc

SEQ ID NO: 441541 - RNA, 22 nt, Human
ggcuccucucuggccgcucccg

SEQ ID NO: 441542 - RNA, 22 nt, Human
uggcagauuuucucuggaggag

SEQ ID NO: 441543 - RNA, 22 nt, Human
cugcccuggaaaacguaucuua

SEQ ID NO: 441544 - RNA, 22 nt, Human
cccagcuaccucugcuaggaga

SEQ ID NO: 441545 - RNA, 22 nt, Human
ugcccaggcuucacccucagag

SEQ ID NO: 441546 - RNA, 20 nt, Human
agugaauagagacauugccc

SEQ ID NO: 441547 - RNA, 22 nt, Human
cagcagcagccccaggaagguu

SEQ ID NO: 441548 - RNA, 22 nt, Human
uccagggaguuggcuggauagu

SEQ ID NO: 441549 - RNA, 22 nt, Human
cauuucacuauucacuaaaagg

SEQ ID NO: 441550 - RNA, 22 nt, Human
uugagcuguauaccuaugacug

SEQ ID NO: 441551 - RNA, 22 nt, Human
ugaucuuugggccauuaauaaa

SEQ ID NO: 441552 - RNA, 22 nt, Human
uugcaaauuaaagaggauagca

SEQ ID NO: 441553 - RNA, 22 nt, Human
aaauacauaaagguuguaccag

SEQ ID NO: 441554 - RNA, 22 nt, Human
uuuguuuacucauucauugaug

SEQ ID NO: 441555 - RNA, 22 nt, Human
cagcucuggcuuuggggagcuu

SEQ ID NO: 441556 - RNA, 22 nt, Human
cauaauuacugauaugcugauu

SEQ ID NO: 441557 - RNA, 22 nt, Human
agucccagcuacucaagaggcu

SEQ ID NO: 441558 - RNA, 22 nt, Human
aaggccugcucagcugucugug

SEQ ID NO: 441559 - RNA, 22 nt, Human
ccuggcucugggaucuucgcuu

SEQ ID NO: 441560 - RNA, 22 nt, Human
gaugcugcucgggugccuggga

SEQ ID NO: 441561 - RNA, 22 nt, Human
accugccuaucagcugccugcu

SEQ ID NO: 441562 - RNA, 22 nt, Human
auuuugaugcuaucuaaugaau

SEQ ID NO: 441563 - RNA, 22 nt, Human
gcuuagcacagaaugagaguuc

SEQ ID NO: 441564 - RNA, 22 nt, Human
ugguggcagucuccuggcugug

SEQ ID NO: 441565 - RNA, 22 nt, Human
ccacccuggacaggccucugag

SEQ ID NO: 441566 - RNA, 22 nt, Human
agacacuguucucacaugcuug

SEQ ID NO: 441567 - RNA, 22 nt, Human
augaagcuguuuauuuuagcag

SEQ ID NO: 441568 - RNA, 22 nt, Human
augggucccuggccgcccucgg

SEQ ID NO: 441569 - RNA, 22 nt, Human
guuccugaaagaugaguaauua

SEQ ID NO: 441570 - RNA, 22 nt, Human
gaucugggcuggagacugagaa

SEQ ID NO: 441571 - RNA, 18 nt, Human
ucaagacaucaugaaaua

SEQ ID NO: 441572 - RNA, 22 nt, Human
ggaugugaaucugggcugagac

SEQ ID NO: 441573 - RNA, 22 nt, Human
cucccagagagcaggugggccg

SEQ ID NO: 441574 - RNA, 22 nt, Human
caggcugggcagccuccccggc

SEQ ID NO: 441575 - RNA, 22 nt, Human
caugaaauguguuaaucucuug

SEQ ID NO: 441576 - RNA, 23 nt, Human
agcaacagugggugaguguugcu

SEQ ID NO: 441577 - RNA, 22 nt, Human
guguguguaucugccuaucaca

SEQ ID NO: 441578 - RNA, 22 nt, Human
uugcaauagccuuauuuccaaa

SEQ ID NO: 441579 - RNA, 22 nt, Human
uacaguacacagguaccaagcu

SEQ ID NO: 441580 - RNA, 22 nt, Human
ugggcagacgggagcuugccuu

SEQ ID NO: 441581 - RNA, 22 nt, Human
guggaaggaauuaacagacuag

SEQ ID NO: 441582 - RNA, 22 nt, Human
ggcucagggaaugaggaagaau

SEQ ID NO: 441583 - RNA, 22 nt, Human
gugcccaggcccaaggcaccac

SEQ ID NO: 441584 - RNA, 22 nt, Human
agcugccgaugcccagcugcau

SEQ ID NO: 441585 - RNA, 22 nt, Human
cacaggaaaugauucugcagca

SEQ ID NO: 441586 - RNA, 21 nt, Human
aggcagcuggaaggccuggcu

SEQ ID NO: 441587 - RNA, 22 nt, Human
cccaggaauuggaggcugcagu

SEQ ID NO: 441588 - RNA, 22 nt, Human
ccaguggguaggccauggugag

SEQ ID NO: 441589 - RNA, 22 nt, Human
uguaugaaucucauuuguuuaa

SEQ ID NO: 441590 - RNA, 22 nt, Human
aaaggcaugcauggucugcucc

SEQ ID NO: 441591 - RNA, 22 nt, Human
aaggcacauauuuuagagucac

SEQ ID NO: 441592 - RNA, 17 nt, Human
cccagagaugcugccuu

SEQ ID NO: 441593 - RNA, 22 nt, Human
cugcagcuguagaggacagugg

SEQ ID NO: 441594 - RNA, 19 nt, Human
agcagagcccugaagaucc

SEQ ID NO: 441595 - RNA, 22 nt, Human
auuuuacuuugugaauauugac

SEQ ID NO: 441596 - RNA, 22 nt, Human
auuuuuuauauaccaagguggg

SEQ ID NO: 441597 - RNA, 21 nt, Human
ucuugaaaaguuagauucucu

SEQ ID NO: 441598 - RNA, 22 nt, Human
aaguucaaggcagguccugagg

SEQ ID NO: 441599 - RNA, 22 nt, Human
aauguauaaaguguuaauaacu

SEQ ID NO: 441600 - RNA, 22 nt, Human
augggacacguuuuaaggaaaa

SEQ ID NO: 441601 - RNA, 22 nt, Human
gcucagagaaaacuggggcuug

SEQ ID NO: 441602 - RNA, 22 nt, Human
cagugggugaaagauggcuaag

SEQ ID NO: 441603 - RNA, 22 nt, Human
cugaggcucccucgggucugcu

SEQ ID NO: 441604 - RNA, 22 nt, Human
ugcccagccuaaacuuggcaag

SEQ ID NO: 441605 - RNA, 22 nt, Human
agagcagugcugaagaguaggg

SEQ ID NO: 441606 - RNA, 22 nt, Human
acagccagaggugguccugggu

SEQ ID NO: 441607 - RNA, 22 nt, Human
guucaaguuucugagcuuuaau

SEQ ID NO: 441608 - RNA, 22 nt, Human
gcugcccaggguggagccggcu

SEQ ID NO: 441609 - RNA, 22 nt, Human
ucaggccucagcagcccacagg

SEQ ID NO: 441610 - RNA, 22 nt, Human
aaggcuggucagauguggugaa

SEQ ID NO: 441611 - RNA, 22 nt, Human
uucaaaucagaccgaaggcaac

SEQ ID NO: 441612 - RNA, 22 nt, Human
agucaguggcuccgagccuggu

SEQ ID NO: 441613 - RNA, 22 nt, Human
cagugguuucugaacagugugc

SEQ ID NO: 441614 - RNA, 22 nt, Human
auaacuuagaguaggcaaaagu

SEQ ID NO: 441615 - RNA, 22 nt, Human
ggcagauggaagaggcuggguc

SEQ ID NO: 441616 - RNA, 22 nt, Human
gccucuggggcagcugagucau

SEQ ID NO: 441617 - RNA, 22 nt, Human
ucccugggaccggcagcucaca

SEQ ID NO: 441618 - RNA, 22 nt, Human
agcugggccugagcuggaagcu

SEQ ID NO: 441619 - RNA, 22 nt, Human
gcagagcaguacucucuugacu

SEQ ID NO: 441620 - RNA, 22 nt, Human
aauacauaauaaguuuugucug

SEQ ID NO: 441621 - RNA, 22 nt, Human
uuguuuaaaauguagcaagaaa

SEQ ID NO: 441622 - RNA, 22 nt, Human
gaggacaaggccuugcaauucu

SEQ ID NO: 441623 - RNA, 22 nt, Human
uucacacuguuuuucauagugg

SEQ ID NO: 441624 - RNA, 18 nt, Human
agcagcuuugugcuugau

SEQ ID NO: 441625 - RNA, 22 nt, Human
ugaggcagugcugggaagccug

SEQ ID NO: 441626 - RNA, 18 nt, Human
ugaagacaugagguuagu

SEQ ID NO: 441627 - RNA, 22 nt, Human
cccugggacccgcugcagaggc

SEQ ID NO: 441628 - RNA, 22 nt, Human
cagacauggcgccaagugcuag

SEQ ID NO: 441629 - RNA, 18 nt, Human
uuugcuuuccuucuucag

SEQ ID NO: 441630 - RNA, 22 nt, Human
caaugcauuauucucccacuuc

SEQ ID NO: 441631 - RNA, 22 nt, Human
gagcaacagggcgaggagaacu

SEQ ID NO: 441632 - RNA, 22 nt, Human
ggcauccaguucugaucaacaa

SEQ ID NO: 441633 - RNA, 22 nt, Human
uauacagucuuuugcuauauuc

SEQ ID NO: 441634 - RNA, 22 nt, Human
aauguuacgaucaacaacacau

SEQ ID NO: 441635 - RNA, 17 nt, Human
ggcaccagacggagagu

SEQ ID NO: 441636 - RNA, 22 nt, Human
ucccaggaucugagggcagaga

SEQ ID NO: 441637 - RNA, 22 nt, Human
cuucuugaaaguggugacccuc

SEQ ID NO: 441638 - RNA, 19 nt, Human
ggccccagccaggguauca

SEQ ID NO: 441639 - RNA, 18 nt, Human
agccucuggcagagagaa

SEQ ID NO: 441640 - RNA, 22 nt, Human
ggcaggacauugacuacaguga

SEQ ID NO: 441641 - RNA, 19 nt, Human
uccagccugcuguuucucu

SEQ ID NO: 441642 - RNA, 22 nt, Human
gagucaggcaugaagguaauua

SEQ ID NO: 441643 - RNA, 22 nt, Human
aguuuacaucuucaaucucauu

SEQ ID NO: 441644 - RNA, 22 nt, Human
gcugcuuuuuggauuuggcaca

SEQ ID NO: 441645 - RNA, 22 nt, Human
cuuggccugacauguggcaggg

SEQ ID NO: 441646 - RNA, 22 nt, Human
cauuuuggcuauuguaaauagu

SEQ ID NO: 441647 - RNA, 22 nt, Human
gcaaacauguugugagauacca

SEQ ID NO: 441648 - RNA, 22 nt, Human
cuggucccugcagugugcuggg

SEQ ID NO: 441649 - RNA, 22 nt, Human
ggggcagaaagcccacagagug

SEQ ID NO: 441650 - RNA, 22 nt, Human
ucaauacuuaagcuuaauucua

SEQ ID NO: 441651 - RNA, 22 nt, Human
gcauauuuucacaagcucuugg

SEQ ID NO: 441652 - RNA, 22 nt, Human
uuguuaaaauuggagccgagag

SEQ ID NO: 441653 - RNA, 17 nt, Human
agauggcaggaggcaga

SEQ ID NO: 441654 - RNA, 22 nt, Human
cagcacugcuucgcagccaggg

SEQ ID NO: 441655 - RNA, 22 nt, Human
agcuucuggaaggcaaggcuug

SEQ ID NO: 441656 - RNA, 22 nt, Human
agacaaguucugugggucaccu

SEQ ID NO: 441657 - RNA, 22 nt, Human
uggaaggaaagguagcagagaa

SEQ ID NO: 441658 - RNA, 20 nt, Human
uucagaguuuacucaaacug

SEQ ID NO: 441659 - RNA, 22 nt, Human
uccucagcuuuuauuucacuug

SEQ ID NO: 441660 - RNA, 22 nt, Human
guacagagguugcuggaggcuc

SEQ ID NO: 441661 - RNA, 22 nt, Human
ccagcagacacacaggcguggg

SEQ ID NO: 441662 - RNA, 22 nt, Human
ucuccccuguuggccagguuuu

SEQ ID NO: 441663 - RNA, 22 nt, Human
aggcuggcagccaccucagcag

SEQ ID NO: 441664 - RNA, 22 nt, Human
gugucccagccccacaggccug

SEQ ID NO: 441665 - RNA, 21 nt, Human
cagagggcuuuucucuguucu

SEQ ID NO: 441666 - RNA, 22 nt, Human
ucacaccuguaaucccaggccu

SEQ ID NO: 441667 - RNA, 22 nt, Human
augcuuuacaguuuuccaaaca

SEQ ID NO: 441668 - RNA, 22 nt, Human
gacacuuuauuaagcuguuguu

SEQ ID NO: 441669 - RNA, 22 nt, Human
gcaaggaagcagaguugcuauc

SEQ ID NO: 441670 - RNA, 22 nt, Human
cuguggcuggccugucugacau

SEQ ID NO: 441671 - RNA, 22 nt, Human
gagcaguugggcucuaggaagu

SEQ ID NO: 441672 - RNA, 22 nt, Human
ugggcagaauugugguaguuaa

SEQ ID NO: 441673 - RNA, 22 nt, Human
cuuuacaaauuagcucucggga

SEQ ID NO: 441674 - RNA, 22 nt, Human
ucagggaccccucugaguggag

SEQ ID NO: 441675 - RNA, 22 nt, Human
ccagcuggagcucgcagauagg

SEQ ID NO: 441676 - RNA, 22 nt, Human
aagcaacauucucuguggcauu

SEQ ID NO: 441677 - RNA, 22 nt, Human
aguacuuuagcauaaagcaguu

SEQ ID NO: 441678 - RNA, 22 nt, Human
augucccaagauacagcuagag

SEQ ID NO: 441679 - RNA, 22 nt, Human
ucagcagggcugggagcuguga

SEQ ID NO: 441680 - RNA, 22 nt, Human
ccccaccuugcaauuguucccu

SEQ ID NO: 441681 - RNA, 22 nt, Human
aaaagaggagugguuuaugaca

SEQ ID NO: 441682 - RNA, 22 nt, Human
gugcaauagacugugguauuaa

SEQ ID NO: 441683 - RNA, 22 nt, Human
cuggcuccaaggaagagguuuu

SEQ ID NO: 441684 - RNA, 22 nt, Human
ucagaggaaaggucagauggcu

SEQ ID NO: 441685 - RNA, 23 nt, Human
aauuaaauugcuagauccagggc

SEQ ID NO: 441686 - RNA, 22 nt, Human
gcacacagccagcugagggcua

SEQ ID NO: 441687 - RNA, 22 nt, Human
ucacugcucucuaagcaucgcc

SEQ ID NO: 441688 - RNA, 22 nt, Human
cacauguaguaagcaggcaaug

SEQ ID NO: 441689 - RNA, 22 nt, Human
cagagccagcuguccuuggcau

SEQ ID NO: 441690 - RNA, 22 nt, Human
ucagggaaaagucacacugggu

SEQ ID NO: 441691 - RNA, 22 nt, Human
cgucuccuguguucgagccauu

SEQ ID NO: 441692 - RNA, 22 nt, Human
cagucuaagacucacgccaaga

SEQ ID NO: 441693 - RNA, 22 nt, Human
cugagaucuuuauacgaggcac

SEQ ID NO: 441694 - RNA, 22 nt, Human
gcuuugcauucuugugugauca

SEQ ID NO: 441695 - RNA, 22 nt, Human
uuaguacauugauucauuaugu

SEQ ID NO: 441696 - RNA, 22 nt, Human
uggagcaggugcucaggguaau

SEQ ID NO: 441697 - RNA, 22 nt, Human
ugcccuguggguaucugauggc

SEQ ID NO: 441698 - RNA, 22 nt, Human
ugcuuugcucugucucuagcua

SEQ ID NO: 441699 - RNA, 23 nt, Human
uggaagcagaaguuucaauaucc

SEQ ID NO: 441700 - RNA, 22 nt, Human
agcaggcacgcucccugcgcga

SEQ ID NO: 441701 - RNA, 22 nt, Human
ucuuauaagcaaacugcugaga

SEQ ID NO: 441702 - RNA, 22 nt, Human
gucccagaaacauauugcuggu

SEQ ID NO: 441703 - RNA, 22 nt, Human
ucucagagaggggccgggccuu

SEQ ID NO: 441704 - RNA, 22 nt, Human
cagcccugagagaaccaucuau

SEQ ID NO: 441705 - RNA, 22 nt, Human
aggagcagaccguaguccugca

SEQ ID NO: 441706 - RNA, 21 nt, Human
agcugcuccagggagcucagg

SEQ ID NO: 441707 - RNA, 22 nt, Human
agcuuuaccugaaauuugaucc

SEQ ID NO: 441708 - RNA, 23 nt, Human
aggaaguuaugaagggagaauag

SEQ ID NO: 441709 - RNA, 20 nt, Human
cagucccaauccagggccag

SEQ ID NO: 441710 - RNA, 22 nt, Human
aaaguauucaaaaauauuuggu

SEQ ID NO: 441711 - RNA, 22 nt, Human
agaauaaacugcuuuagggcag

SEQ ID NO: 441712 - RNA, 22 nt, Human
aaggguggauuucugagcucua

SEQ ID NO: 441713 - RNA, 22 nt, Human
uuuuguuuucuuagaaaccugg

SEQ ID NO: 441714 - RNA, 22 nt, Human
uauugacaauaggcaacugagg

SEQ ID NO: 441715 - RNA, 22 nt, Human
gacagcaaugacggggcagcug

SEQ ID NO: 441716 - RNA, 22 nt, Human
agauucauuaucuucuuuguac

SEQ ID NO: 441717 - RNA, 22 nt, Human
acuuugcaaaaggaaaucaccu

SEQ ID NO: 441718 - RNA, 22 nt, Human
gcuuaugauguuuacauaaaag

SEQ ID NO: 441719 - RNA, 22 nt, Human
cagaagcuuugcucauaaccau

SEQ ID NO: 441720 - RNA, 22 nt, Human
cugccuccucacguccacagug

SEQ ID NO: 441721 - RNA, 22 nt, Human
agaagcaaggucugucaguaua

SEQ ID NO: 441722 - RNA, 22 nt, Human
aagggcaggaaaagauggaugu

SEQ ID NO: 441723 - RNA, 22 nt, Human
aacagaaucuuggguucuuuuc

SEQ ID NO: 441724 - RNA, 22 nt, Human
agcugcagccgcagcuguggcc

SEQ ID NO: 441725 - RNA, 22 nt, Human
gaggaccacagaugagccugca

SEQ ID NO: 441726 - RNA, 22 nt, Human
ugcaaaaagagcgaggagcccu

SEQ ID NO: 441727 - RNA, 22 nt, Human
caaguaugagaaagcuauuacc

SEQ ID NO: 441728 - RNA, 22 nt, Human
cuuauuguucagauagagauga

SEQ ID NO: 441729 - RNA, 22 nt, Human
cucagaggucaagagcagagcu

SEQ ID NO: 441730 - RNA, 22 nt, Human
uggccuggggaagaccaugggc

SEQ ID NO: 441731 - RNA, 22 nt, Human
gaggacagcuuagggcuuccug

SEQ ID NO: 441732 - RNA, 22 nt, Human
cugggcugucccaaccccaucc

SEQ ID NO: 441733 - RNA, 22 nt, Human
agccacaggaaacagagacagc

SEQ ID NO: 441734 - RNA, 22 nt, Human
acaaguuuuggaagucuuaagg

SEQ ID NO: 441735 - RNA, 22 nt, Human
cuguuauuucugaaugccaucc

SEQ ID NO: 441736 - RNA, 22 nt, Human
uuuuccuucuagagcagauuuc

SEQ ID NO: 441737 - RNA, 22 nt, Human
auucuaacacaugcucuaagaa

SEQ ID NO: 441738 - RNA, 22 nt, Human
cacccccaccugugggcuccug

SEQ ID NO: 441739 - RNA, 22 nt, Human
cagccagcuucagauccaagcc

SEQ ID NO: 441740 - RNA, 22 nt, Human
auuagacaucauaugauucagc

SEQ ID NO: 441741 - RNA, 22 nt, Human
auucagcaaugagcuuggauuu

SEQ ID NO: 441742 - RNA, 22 nt, Human
aacagggacaaggauagagaaa

SEQ ID NO: 441743 - RNA, 22 nt, Human
uuucuacagcuggugcaacuuu

SEQ ID NO: 441744 - RNA, 22 nt, Human
ucagaggaucaugucccuacuc

SEQ ID NO: 441745 - RNA, 17 nt, Human
gagagcugcugcuuccg

SEQ ID NO: 441746 - RNA, 22 nt, Human
ggugugugaggagucacuuagu

SEQ ID NO: 441747 - RNA, 22 nt, Human
gcagcaaacuuccacaaguaga

SEQ ID NO: 441748 - RNA, 22 nt, Human
cauguaaaaaauuaggucaucu

SEQ ID NO: 441749 - RNA, 22 nt, Human
auguccaggaagucuuaacuca

SEQ ID NO: 441750 - RNA, 22 nt, Human
caauagaaaacucaauacuuaa

SEQ ID NO: 441751 - RNA, 22 nt, Human
cuuauuaauggaauccuaauga

SEQ ID NO: 441752 - RNA, 22 nt, Human
uuuucuuacugucugugauccu

SEQ ID NO: 441753 - RNA, 22 nt, Human
gaggcuucccgcccaugcugga

SEQ ID NO: 441754 - RNA, 22 nt, Human
gaugauuuuguuggugauucaa

SEQ ID NO: 441755 - RNA, 22 nt, Human
guccucagggaauguggcgggu

SEQ ID NO: 441756 - RNA, 22 nt, Human
gccuggcaggccugggccagca

SEQ ID NO: 441757 - RNA, 22 nt, Human
ggagaggcgaugagucacagcc

SEQ ID NO: 441758 - RNA, 22 nt, Human
uuuuguuuaaaauccuggaugg

SEQ ID NO: 441759 - RNA, 22 nt, Human
ggagugugggauggagcucagg

SEQ ID NO: 441760 - RNA, 22 nt, Human
cagggcuccaugcagggacucc

SEQ ID NO: 441761 - RNA, 22 nt, Human
gcaaggcugaccucucuagacu

SEQ ID NO: 441762 - RNA, 22 nt, Human
cagggacagcgggacucugaca

SEQ ID NO: 441763 - RNA, 22 nt, Human
agaacagccaauaaaagagggg

SEQ ID NO: 441764 - RNA, 22 nt, Human
guggugcauccuugaguaagcu

SEQ ID NO: 441765 - RNA, 22 nt, Human
gcaggcuccaaggccugggaga

SEQ ID NO: 441766 - RNA, 19 nt, Human
ugcuauuugaagaagugua

SEQ ID NO: 441767 - RNA, 22 nt, Human
uauuuguugaguuguuaugucu

SEQ ID NO: 441768 - RNA, 22 nt, Human
cuguggcucucugcaggguccc

SEQ ID NO: 441769 - RNA, 22 nt, Human
agcagguggccacgaggaggag

SEQ ID NO: 441770 - RNA, 22 nt, Human
auagaaacagggaagcaaagca

SEQ ID NO: 441771 - RNA, 22 nt, Human
cagcaggcagccauuucacugu

SEQ ID NO: 441772 - RNA, 22 nt, Human
ggggggugacaaguagagguug

SEQ ID NO: 441773 - RNA, 22 nt, Human
agcugccauccuguucagcacc

SEQ ID NO: 441774 - RNA, 22 nt, Human
ugugcaaucuugagcaauuuau

SEQ ID NO: 441775 - RNA, 22 nt, Human
gggcacuguacacugugcaugg

SEQ ID NO: 441776 - RNA, 17 nt, Human
auuuccucagggcugag

SEQ ID NO: 441777 - RNA, 22 nt, Human
aguuuauuuuugauaagucuug

SEQ ID NO: 441778 - RNA, 22 nt, Human
uuuucauuguuacuaugagcua

SEQ ID NO: 441779 - RNA, 22 nt, Human
ugggcacagaauagauggccca

SEQ ID NO: 441780 - RNA, 22 nt, Human
agccagacauggcuccugcucc

SEQ ID NO: 441781 - RNA, 22 nt, Human
gccuggcacauugcaguggauu

SEQ ID NO: 441782 - RNA, 22 nt, Human
cugguguccagcauguguggaa

SEQ ID NO: 441783 - RNA, 22 nt, Human
ccugcccuaugaccagcuucac

SEQ ID NO: 441784 - RNA, 22 nt, Human
gaagcagagccuaaggcagaca

SEQ ID NO: 441785 - RNA, 23 nt, Human
ugggcaucuccucugugccaggc

SEQ ID NO: 441786 - RNA, 22 nt, Human
uugaagcuccgguguauaggaa

SEQ ID NO: 441787 - RNA, 22 nt, Human
uaggacaggaucaugaugcugg

SEQ ID NO: 441788 - RNA, 22 nt, Human
ugcccuccacaguggcuccacc

SEQ ID NO: 441789 - RNA, 22 nt, Human
uuccaguaaugugacuuugagc

SEQ ID NO: 441790 - RNA, 22 nt, Human
agauauacacccauaucacaua

SEQ ID NO: 441791 - RNA, 22 nt, Human
gucacuguauccagguuccagc

SEQ ID NO: 441792 - RNA, 22 nt, Human
cagcagcaaggugaggguggag

SEQ ID NO: 441793 - RNA, 22 nt, Human
gcagcauuuguggaaugggccc

SEQ ID NO: 441794 - RNA, 22 nt, Human
uuugcagcaaggagagagcauu

SEQ ID NO: 441795 - RNA, 22 nt, Human
cccuggcaaaaucccugguaca

SEQ ID NO: 441796 - RNA, 20 nt, Human
ucaugcagguguucuagguu

SEQ ID NO: 441797 - RNA, 22 nt, Human
uuccaugaaagugaaauggagc

SEQ ID NO: 441798 - RNA, 21 nt, Human
uggagcugaauuuuuggcauc

SEQ ID NO: 441799 - RNA, 22 nt, Human
accuuccucuaagacauuuagc

SEQ ID NO: 441800 - RNA, 22 nt, Human
uuagagacaggcuucccaagga

SEQ ID NO: 441801 - RNA, 22 nt, Human
gcccagcugcacccuggugggu

SEQ ID NO: 441802 - RNA, 22 nt, Human
uggcccuguggaggucagugag

SEQ ID NO: 441803 - RNA, 22 nt, Human
ccuggcucugcgugcagcuccg

SEQ ID NO: 441804 - RNA, 22 nt, Human
uggccagcuguagguugugcag

SEQ ID NO: 441805 - RNA, 22 nt, Human
gaaauauacauugcaggaagag

SEQ ID NO: 441806 - RNA, 22 nt, Human
ucugacccagauggcaccgugg

SEQ ID NO: 441807 - RNA, 22 nt, Human
uccugcagccaagggucaucga

SEQ ID NO: 441808 - RNA, 22 nt, Human
ugcucaguucaaggaaggugga

SEQ ID NO: 441809 - RNA, 19 nt, Human
uuuauucaccuuuaccuug

SEQ ID NO: 441810 - RNA, 22 nt, Human
gcaguggcaugaugugggcuca

SEQ ID NO: 441811 - RNA, 22 nt, Human
cagcacagugaccagacccacu

SEQ ID NO: 441812 - RNA, 22 nt, Human
aaaaauguuaucuacuguccga

SEQ ID NO: 441813 - RNA, 22 nt, Human
agucacauaguguuuuggaauc

SEQ ID NO: 441814 - RNA, 22 nt, Human
ucccuguaguucguggucuuug

SEQ ID NO: 441815 - RNA, 22 nt, Human
ggugagaggcagugcuguggaa

SEQ ID NO: 441816 - RNA, 22 nt, Human
uguacacaguaugaggcaucuu

SEQ ID NO: 441817 - RNA, 22 nt, Human
aggaagcauguuggauccacuu

SEQ ID NO: 441818 - RNA, 22 nt, Human
gaggcugcggggaggagccugc

SEQ ID NO: 441819 - RNA, 22 nt, Human
ccagggugcucuguggcgucgc

SEQ ID NO: 441820 - RNA, 20 nt, Human
gccugagcuccgccuccugu

SEQ ID NO: 441821 - RNA, 22 nt, Human
aggccagcuaugacucugcucc

SEQ ID NO: 441822 - RNA, 22 nt, Human
cuuccugaaggauggcagccuc

SEQ ID NO: 441823 - RNA, 22 nt, Human
auuugcugugugcuuuagagac

SEQ ID NO: 441824 - RNA, 22 nt, Human
cauuuguaucugggcugcugug

SEQ ID NO: 441825 - RNA, 17 nt, Human
acacagccagguucucc

SEQ ID NO: 441826 - RNA, 22 nt, Human
aaggcugauuagacugauagcu

SEQ ID NO: 441827 - RNA, 18 nt, Human
ggccucuggacuggcagc

SEQ ID NO: 441828 - RNA, 22 nt, Human
aagacauuccaaaguggcuaau

SEQ ID NO: 441829 - RNA, 22 nt, Human
cagggcacagaucggggcgcac

SEQ ID NO: 441830 - RNA, 22 nt, Human
uuggccagagguuucucucaug

SEQ ID NO: 441831 - RNA, 22 nt, Human
ucuccaggugagggugguuaga

SEQ ID NO: 441832 - RNA, 20 nt, Human
aauuuuacuguccuauagag

SEQ ID NO: 441833 - RNA, 22 nt, Human
gaagcagaaguacgauuuacua

SEQ ID NO: 441834 - RNA, 22 nt, Human
cagcugaacauguagagcaucu

SEQ ID NO: 441835 - RNA, 22 nt, Human
aagauuuuuuuccacagacuca

SEQ ID NO: 441836 - RNA, 22 nt, Human
gcacugguuuauuuaagaacaa

SEQ ID NO: 441837 - RNA, 22 nt, Human
agugucugccagcugccaggug

SEQ ID NO: 441838 - RNA, 22 nt, Human
gcuggagcugaguucccugggc

SEQ ID NO: 441839 - RNA, 22 nt, Human
acccagcucuuugauggucuug

SEQ ID NO: 441840 - RNA, 23 nt, Human
cagcccugaaaucgaggugacac

SEQ ID NO: 441841 - RNA, 22 nt, Human
cugucacacugauaucaggcuu

SEQ ID NO: 441842 - RNA, 22 nt, Human
acagagcuucccagccugagca

SEQ ID NO: 441843 - RNA, 22 nt, Human
aaacacuucuuaggucuuaagu

SEQ ID NO: 441844 - RNA, 22 nt, Human
ggcucuuguucguaccauggcu

SEQ ID NO: 441845 - RNA, 22 nt, Human
gcuguauuccugcacuguauag

SEQ ID NO: 441846 - RNA, 20 nt, Human
gccuguccugagugucaugg

SEQ ID NO: 441847 - RNA, 22 nt, Human
agcaggcuacuccuguguucgu

SEQ ID NO: 441848 - RNA, 23 nt, Human
ucucagaaaggagaaguaauuug

SEQ ID NO: 441849 - RNA, 22 nt, Human
gcacugcagccucagauggugg

SEQ ID NO: 441850 - RNA, 18 nt, Human
agcaccagucacuaacag

SEQ ID NO: 441851 - RNA, 22 nt, Human
cuuugcaguuucagaacccuga

SEQ ID NO: 441852 - RNA, 19 nt, Human
gagcaggccacacaugugu

SEQ ID NO: 441853 - RNA, 22 nt, Human
uuuacagagaauguacauaaag

SEQ ID NO: 441854 - RNA, 22 nt, Human
agucuccacaacagcccugaua

SEQ ID NO: 441855 - RNA, 20 nt, Human
gcuguggcaagugcucacug

SEQ ID NO: 441856 - RNA, 22 nt, Human
agccaacuaggagauuaaggua

SEQ ID NO: 441857 - RNA, 22 nt, Human
caggaagggaaaauaguucggg

SEQ ID NO: 441858 - RNA, 22 nt, Human
uaguuuaggucguacaagcaaa

SEQ ID NO: 441859 - RNA, 22 nt, Human
cuaaggcagacagaauauuugg

SEQ ID NO: 441860 - RNA, 19 nt, Human
agcagccaucgaccaugga

SEQ ID NO: 441861 - RNA, 22 nt, Human
ucugggagguguuuugagaacu

SEQ ID NO: 441862 - RNA, 22 nt, Human
cgcagcuguccauguguggggg

SEQ ID NO: 441863 - RNA, 17 nt, Human
agaaaagagaccagcag

SEQ ID NO: 441864 - RNA, 22 nt, Human
ggcuggagugggcuccagaguu

SEQ ID NO: 441865 - RNA, 22 nt, Human
cacauuuaaagguugaagcuga

SEQ ID NO: 441866 - RNA, 22 nt, Human
cccuggaggcggagcuugcagu

SEQ ID NO: 441867 - RNA, 22 nt, Human
uaugcaauucucuuaauauucu

SEQ ID NO: 441868 - RNA, 22 nt, Human
ggccucggcccacugcugcggu

SEQ ID NO: 441869 - RNA, 22 nt, Human
acaggcagagaacucagccaga

SEQ ID NO: 441870 - RNA, 22 nt, Human
aguauucugguuuuucaggugg

SEQ ID NO: 441871 - RNA, 21 nt, Human
caggccccaggccuggggugc

SEQ ID NO: 441872 - RNA, 22 nt, Human
cauuuauauaaaauguccagaa

SEQ ID NO: 441873 - RNA, 22 nt, Human
ugacaaguuggaaagcagugca

SEQ ID NO: 441874 - RNA, 22 nt, Human
uucagcaaugggauggugcagg

SEQ ID NO: 441875 - RNA, 22 nt, Human
cuggggccacaacggcgcacgc

SEQ ID NO: 441876 - RNA, 23 nt, Human
ugcaaauuaggccgggacucagc

SEQ ID NO: 441877 - RNA, 20 nt, Human
augcauauauguggugucug

SEQ ID NO: 441878 - RNA, 22 nt, Human
ggcaggaaaugggauaagggcu

SEQ ID NO: 441879 - RNA, 22 nt, Human
cugagccauaagggaggcuggg

SEQ ID NO: 441880 - RNA, 22 nt, Human
guuauccauagaauaagucauc

SEQ ID NO: 441881 - RNA, 22 nt, Human
cccagagagcacaggugguggg

SEQ ID NO: 441882 - RNA, 22 nt, Human
uaauuuuaugacaguguauuuu

SEQ ID NO: 441883 - RNA, 22 nt, Human
aggcagcaugggccccagcucc

SEQ ID NO: 441884 - RNA, 22 nt, Human
cagcugacacuuugaccuagag

SEQ ID NO: 441885 - RNA, 22 nt, Human
aaguaaauaucuguuuauagca

SEQ ID NO: 441886 - RNA, 22 nt, Human
caggcuggcaaugcgucaagca

SEQ ID NO: 441887 - RNA, 22 nt, Human
guucucaguggggagcaggguu

SEQ ID NO: 441888 - RNA, 22 nt, Human
uuacaaacaacagacauuuauu

SEQ ID NO: 441889 - RNA, 22 nt, Human
aagcaggcauuccagagacaau

SEQ ID NO: 441890 - RNA, 22 nt, Human
cacagcccccuugacacucugg

SEQ ID NO: 441891 - RNA, 22 nt, Human
uggcagcuggaucccaaggcag

SEQ ID NO: 441892 - RNA, 22 nt, Human
uuuacagauguggaaagugagc

SEQ ID NO: 441893 - RNA, 22 nt, Human
cagcuucccuuggcugagcaga

SEQ ID NO: 441894 - RNA, 18 nt, Human
uugcaaauucuucccugu

SEQ ID NO: 441895 - RNA, 22 nt, Human
aggaguuuauccgagggcauaa

SEQ ID NO: 441896 - RNA, 21 nt, Human
cauuucaaagagcuggaaauc

SEQ ID NO: 441897 - RNA, 22 nt, Human
acacugaaucagaaauuguugg

SEQ ID NO: 441898 - RNA, 22 nt, Human
gcuccugaaggcucugcagggu

SEQ ID NO: 441899 - RNA, 22 nt, Human
ucuaaugaggacuuuauagaga

SEQ ID NO: 441900 - RNA, 22 nt, Human
ccuccugggacaggcuggcaca

SEQ ID NO: 441901 - RNA, 22 nt, Human
uauuuauucauucagcaagcau

SEQ ID NO: 441902 - RNA, 19 nt, Human
cuggaaggagggacuguuc

SEQ ID NO: 441903 - RNA, 22 nt, Human
cugcgcagggguggcgccagaa

SEQ ID NO: 441904 - RNA, 22 nt, Human
gcaggggcugcugggaacucgg

SEQ ID NO: 441905 - RNA, 19 nt, Human
ugccugucaguagaucuca

SEQ ID NO: 441906 - RNA, 22 nt, Human
ccaggccauucccagaguugcu

SEQ ID NO: 441907 - RNA, 22 nt, Human
cugggccugguagggcuugaaa

SEQ ID NO: 441908 - RNA, 22 nt, Human
aacacuuagauuuuuaagguuu

SEQ ID NO: 441909 - RNA, 22 nt, Human
gugcugagaacaaaaguggaca

SEQ ID NO: 441910 - RNA, 22 nt, Human
cacauaauaaauguuccugaug

SEQ ID NO: 441911 - RNA, 22 nt, Human
ugaggcagcccacuuuccuuag

SEQ ID NO: 441912 - RNA, 22 nt, Human
acuuugcagagccagaagagaa

SEQ ID NO: 441913 - RNA, 22 nt, Human
ccaggagaugggagcaucuaaa

SEQ ID NO: 441914 - RNA, 22 nt, Human
uacuauuuuugcaacguauaca

SEQ ID NO: 441915 - RNA, 23 nt, Human
ccaggaagaggccauccacaguc

SEQ ID NO: 441916 - RNA, 22 nt, Human
ccuggcuccugccucugcaggg

SEQ ID NO: 441917 - RNA, 22 nt, Human
cgucccaguuccagccgcgcug

SEQ ID NO: 441918 - RNA, 22 nt, Human
ucagugcuucggcgagcaccua

SEQ ID NO: 441919 - RNA, 22 nt, Human
aacacugagaggggaguggcac

SEQ ID NO: 441920 - RNA, 22 nt, Human
ugagcccauguagcacuuccau

SEQ ID NO: 441921 - RNA, 22 nt, Human
gcacaggcucucuuggggacac

SEQ ID NO: 441922 - RNA, 18 nt, Human
cugccuguugcugagagg

SEQ ID NO: 441923 - RNA, 22 nt, Human
ucccagaggacuguuggugcua

SEQ ID NO: 441924 - RNA, 22 nt, Human
ugagcaguaggucugaauagug

SEQ ID NO: 441925 - RNA, 20 nt, Human
agcauucauucagcaagccu

SEQ ID NO: 441926 - RNA, 22 nt, Human
cagcuguuacucugaguaaaug

SEQ ID NO: 441927 - RNA, 22 nt, Human
ggcagcugcugcauuacguugu

SEQ ID NO: 441928 - RNA, 22 nt, Human
uagcagcauguaagugaguaga

SEQ ID NO: 441929 - RNA, 22 nt, Human
gcagggcagcuuagucccuguc

SEQ ID NO: 441930 - RNA, 22 nt, Human
uagcugagaggccaauugaacu

SEQ ID NO: 441931 - RNA, 22 nt, Human
uaugagaacaagaacaaucucc

SEQ ID NO: 441932 - RNA, 22 nt, Human
cagagcuguuacuauucaugaa

SEQ ID NO: 441933 - RNA, 22 nt, Human
gaaaaaggauaaauacaguguu

SEQ ID NO: 441934 - RNA, 22 nt, Human
uaggcuggaggaagcagugccu

SEQ ID NO: 441935 - RNA, 21 nt, Human
ugcuuugcagguggauuuagu

SEQ ID NO: 441936 - RNA, 21 nt, Human
uccucuccaugaucuguuugu

SEQ ID NO: 441937 - RNA, 22 nt, Human
ucauucccuccagcuguggcua

SEQ ID NO: 441938 - RNA, 22 nt, Human
agucaguguagaaagcccaggc

SEQ ID NO: 441939 - RNA, 22 nt, Human
uuggaaagaccgaauuccuguu

SEQ ID NO: 441940 - RNA, 22 nt, Human
cauacugucagagccugaaggg

SEQ ID NO: 441941 - RNA, 21 nt, Human
ugcagcagaagucucuguguc

SEQ ID NO: 441942 - RNA, 22 nt, Human
ugggugccaaccucugguggcc

SEQ ID NO: 441943 - RNA, 22 nt, Human
cugccugcuucugagccagagg

SEQ ID NO: 441944 - RNA, 22 nt, Human
cccaguggggagcugagguuca

SEQ ID NO: 441945 - RNA, 22 nt, Human
ugaggccugcccuggggaaguu

SEQ ID NO: 441946 - RNA, 22 nt, Human
ucugauuucucuuguggaugcu

SEQ ID NO: 441947 - RNA, 22 nt, Human
cugcagcuuuggaaaccuguuu

SEQ ID NO: 441948 - RNA, 22 nt, Human
cuggguggcagagccugcagug

SEQ ID NO: 441949 - RNA, 22 nt, Human
agcuaaugggagacccuuucac

SEQ ID NO: 441950 - RNA, 22 nt, Human
gaaggaagucauuagugcagac

SEQ ID NO: 441951 - RNA, 22 nt, Human
aacugcauaauauaucaugcag

SEQ ID NO: 441952 - RNA, 22 nt, Human
gguccuggaaauugacggaaag

SEQ ID NO: 441953 - RNA, 18 nt, Human
ucauuuguuuugcaugaa

SEQ ID NO: 441954 - RNA, 22 nt, Human
cagcugugagagugcauugaag

SEQ ID NO: 441955 - RNA, 22 nt, Human
cagguucccuagcagcaaagcc

SEQ ID NO: 441956 - RNA, 22 nt, Human
cuggagcuccagggucuccucu

SEQ ID NO: 441957 - RNA, 22 nt, Human
uauauuaaagugcuuugcagug

SEQ ID NO: 441958 - RNA, 22 nt, Human
cucucuguuaugcuuucaugaa

SEQ ID NO: 441959 - RNA, 22 nt, Human
ugggcugcacccucagccucug

SEQ ID NO: 441960 - RNA, 22 nt, Human
uuuauucaucaucuguucauau

SEQ ID NO: 441961 - RNA, 22 nt, Human
gcuagccugcaguggcuauggu

SEQ ID NO: 441962 - RNA, 22 nt, Human
agagggaaaaacucaugucauu

SEQ ID NO: 441963 - RNA, 22 nt, Human
ucaggcugauuucuuuugaggg

SEQ ID NO: 441964 - RNA, 22 nt, Human
gacaguacagguagaagucacu

SEQ ID NO: 441965 - RNA, 22 nt, Human
uuccagagcaguuuucagauca

SEQ ID NO: 441966 - RNA, 22 nt, Human
aaguucaaucagaugaaaaagc

SEQ ID NO: 441967 - RNA, 22 nt, Human
gaggcaggcccugaaugaguca

SEQ ID NO: 441968 - RNA, 22 nt, Human
gcaggcagagaaggaacauuua

SEQ ID NO: 441969 - RNA, 22 nt, Human
uuuccaaagguggcaggaacaa

SEQ ID NO: 441970 - RNA, 22 nt, Human
gaggggagacagggaaaucagu

SEQ ID NO: 441971 - RNA, 22 nt, Human
caaagagguuuugagggcagcu

SEQ ID NO: 441972 - RNA, 21 nt, Human
uuuucuccagcugugauuuua

SEQ ID NO: 441973 - RNA, 22 nt, Human
gcagcccuucaggugaggggca

SEQ ID NO: 441974 - RNA, 22 nt, Human
cagcugccaugacauguccugc

SEQ ID NO: 441975 - RNA, 22 nt, Human
cugcccugauaugauuuagaac

SEQ ID NO: 441976 - RNA, 22 nt, Human
cauuucaauacuaucugagaau

SEQ ID NO: 441977 - RNA, 22 nt, Human
ucugaggccugaagcagcagag

SEQ ID NO: 441978 - RNA, 22 nt, Human
gcaaagcaagauucagauguag

SEQ ID NO: 441979 - RNA, 21 nt, Human
uucaaaguuugccuaaagauu

SEQ ID NO: 441980 - RNA, 22 nt, Human
gcugugcagccaagugccucug

SEQ ID NO: 441981 - RNA, 20 nt, Human
ucagagaaggagcuuuccug

SEQ ID NO: 441982 - RNA, 22 nt, Human
gaacaugaaaagucuuacacgc

SEQ ID NO: 441983 - RNA, 22 nt, Human
caguacugcuugugggagcaga

SEQ ID NO: 441984 - RNA, 22 nt, Human
auuauugugauaggugucagug

SEQ ID NO: 441985 - RNA, 22 nt, Human
gcuuuggaaauauagacucaag

SEQ ID NO: 441986 - RNA, 22 nt, Human
ucagagaagguaagugaccugc

SEQ ID NO: 441987 - RNA, 22 nt, Human
aagcacuaggucacacaaguua

SEQ ID NO: 441988 - RNA, 22 nt, Human
aaguuuauguugguaagauauc

SEQ ID NO: 441989 - RNA, 22 nt, Human
cccuggcucuucaccaccugcc

SEQ ID NO: 441990 - RNA, 22 nt, Human
ugcaggcuggcagugcugaaau

SEQ ID NO: 441991 - RNA, 22 nt, Human
gaacuuuaccauuuagguaacu

SEQ ID NO: 441992 - RNA, 22 nt, Human
uaaggcaaagugauuucuuaaa

SEQ ID NO: 441993 - RNA, 22 nt, Human
ugaauaugauugcaaauuuggc

SEQ ID NO: 441994 - RNA, 22 nt, Human
ugggaggcagguaggugaugau

SEQ ID NO: 441995 - RNA, 22 nt, Human
uuaaaugaacgagauaugcaac

SEQ ID NO: 441996 - RNA, 22 nt, Human
cugggcucagcaggccaaggcc

SEQ ID NO: 441997 - RNA, 22 nt, Human
ccuuucucauuuuaagcauuag

SEQ ID NO: 441998 - RNA, 22 nt, Human
uucuggagucccacagccaggg

SEQ ID NO: 441999 - RNA, 19 nt, Human
gcccugcaggagguggggc

SEQ ID NO: 442000 - RNA, 22 nt, Human
ucaguacuucugcaucuuccag

SEQ ID NO: 442001 - RNA, 22 nt, Human
cagcugguugaagaggagcugg

SEQ ID NO: 442002 - RNA, 22 nt, Human
uaccuauagguacaauuacaag

SEQ ID NO: 442003 - RNA, 22 nt, Human
ggagccuggcaaugcugcgucc

SEQ ID NO: 442004 - RNA, 22 nt, Human
gagcagugggaaggaacagggu

SEQ ID NO: 442005 - RNA, 22 nt, Human
uguccugugaccuggcaccaca

SEQ ID NO: 442006 - RNA, 22 nt, Human
uucuaaauggggauccuuucug

SEQ ID NO: 442007 - RNA, 22 nt, Human
acagaguaggugcugucgacug

SEQ ID NO: 442008 - RNA, 21 nt, Human
cacugguagauggcccgcagg

SEQ ID NO: 442009 - RNA, 20 nt, Human
uguucacaguaguugcugcu

SEQ ID NO: 442010 - RNA, 22 nt, Human
aauguaaacagcaagagaaggg

SEQ ID NO: 442011 - RNA, 22 nt, Human
cccagggacagaugggcagcua

SEQ ID NO: 442012 - RNA, 22 nt, Human
cuggagucagcaaggacgaggc

SEQ ID NO: 442013 - RNA, 23 nt, Human
ucccagccucuucucuugcauac

SEQ ID NO: 442014 - RNA, 22 nt, Human
aucucuuugauggcuccuguga

SEQ ID NO: 442015 - RNA, 22 nt, Human
ucuggcaguuccuuguugauau

SEQ ID NO: 442016 - RNA, 22 nt, Human
auuugcaagaguaagaauuucu

SEQ ID NO: 442017 - RNA, 22 nt, Human
uugcuuuguuuaaaagugguau

SEQ ID NO: 442018 - RNA, 22 nt, Human
uuugaucagcaagauaaauaga

SEQ ID NO: 442019 - RNA, 22 nt, Human
aauuucaaagcucacuggcaua

SEQ ID NO: 442020 - RNA, 22 nt, Human
caggagaggaggcuacuucuua

SEQ ID NO: 442021 - RNA, 22 nt, Human
ucagaauugucuggggaauguu

SEQ ID NO: 442022 - RNA, 22 nt, Human
ccagcagcuguggcuuugccuc

SEQ ID NO: 442023 - RNA, 22 nt, Human
uugugaaguguucugagacagg

SEQ ID NO: 442024 - RNA, 22 nt, Human
aggcucagaggugagcaucugc

SEQ ID NO: 442025 - RNA, 22 nt, Human
cugcagcaaauguuaagugacu

SEQ ID NO: 442026 - RNA, 22 nt, Human
agcaguggcugaagauguuccu

SEQ ID NO: 442027 - RNA, 17 nt, Human
gaacaguguaagacacu

SEQ ID NO: 442028 - RNA, 22 nt, Human
ccaguacuuugugcaacaaaug

SEQ ID NO: 442029 - RNA, 22 nt, Human
uccugagguggauugagcagag

SEQ ID NO: 442030 - RNA, 22 nt, Human
ugaggccucugaggccuaggcu

SEQ ID NO: 442031 - RNA, 22 nt, Human
acagccagggcauugucgccga

SEQ ID NO: 442032 - RNA, 22 nt, Human
ggugggugagcccugggagcug

SEQ ID NO: 442033 - RNA, 22 nt, Human
ugggcuauuaggaccaggccau

SEQ ID NO: 442034 - RNA, 22 nt, Human
uugcauuugagaaaguucuccu

SEQ ID NO: 442035 - RNA, 17 nt, Human
gcugcagcgguaggcag

SEQ ID NO: 442036 - RNA, 23 nt, Human
guggccuccccggaaugccucgc

SEQ ID NO: 442037 - RNA, 22 nt, Human
agccugguuuaagcauuuuaua

SEQ ID NO: 442038 - RNA, 22 nt, Human
gcacagggcccugugcguaggu

SEQ ID NO: 442039 - RNA, 22 nt, Human
ccugaguggugcuaagcagaua

SEQ ID NO: 442040 - RNA, 22 nt, Human
uacugcaugaaggcaccuauuu

SEQ ID NO: 442041 - RNA, 22 nt, Human
cagcaagggauaaagaguuacu

SEQ ID NO: 442042 - RNA, 22 nt, Human
gagggcaccuucaguaauagcu

SEQ ID NO: 442043 - RNA, 22 nt, Human
aaacaucauaggcaugcaugau

SEQ ID NO: 442044 - RNA, 22 nt, Human
uugcagcuagaagauucacugu

SEQ ID NO: 442045 - RNA, 22 nt, Human
gaggaaaauaacaacuaagggc

SEQ ID NO: 442046 - RNA, 23 nt, Human
uauucagcagugggauuuguugu

SEQ ID NO: 442047 - RNA, 22 nt, Human
aaggaaagacaggacggaauuc

SEQ ID NO: 442048 - RNA, 22 nt, Human
caggccuggcccccggcacacc

SEQ ID NO: 442049 - RNA, 22 nt, Human
guuuaauaauguugaauuacua

SEQ ID NO: 442050 - RNA, 22 nt, Human
augugugugaugggcgccgcca

SEQ ID NO: 442051 - RNA, 22 nt, Human
aauuugaaacauagucaccacu

SEQ ID NO: 442052 - RNA, 22 nt, Human
gacuuugcugugucagcuucag

SEQ ID NO: 442053 - RNA, 22 nt, Human
gccuggagcccaguguggggcu

SEQ ID NO: 442054 - RNA, 22 nt, Human
cugggagucaccaggagcaagg

SEQ ID NO: 442055 - RNA, 22 nt, Human
ugguaauuuacgcauuucugua

SEQ ID NO: 442056 - RNA, 22 nt, Human
ccuggagcacauggcaggaggc

SEQ ID NO: 442057 - RNA, 22 nt, Human
ucucccaguggugcagaaagca

SEQ ID NO: 442058 - RNA, 22 nt, Human
augcugaggacaaagagaucaa

SEQ ID NO: 442059 - RNA, 22 nt, Human
ggcagcugggucacaccgaucu

SEQ ID NO: 442060 - RNA, 17 nt, Human
gcccacccuuaggagcu

SEQ ID NO: 442061 - RNA, 22 nt, Human
ucccaccccuugacucuuuaag

SEQ ID NO: 442062 - RNA, 22 nt, Human
agagaguuguaccacacucaua

SEQ ID NO: 442063 - RNA, 21 nt, Human
uacuuugcaauguaucuccuu

SEQ ID NO: 442064 - RNA, 22 nt, Human
ccugggagggcaagugcugaug

SEQ ID NO: 442065 - RNA, 22 nt, Human
aggagcugggagaaggacuaaa

SEQ ID NO: 442066 - RNA, 22 nt, Human
ggcuuccaagguccucuccacc

SEQ ID NO: 442067 - RNA, 22 nt, Human
guaaaggcccauucaaacagcu

SEQ ID NO: 442068 - RNA, 22 nt, Human
auuaagacuauugauauuuaca

SEQ ID NO: 442069 - RNA, 22 nt, Human
cccuaggcccaaagggugacau

SEQ ID NO: 442070 - RNA, 22 nt, Human
aucugggcucgaauccuagcuc

SEQ ID NO: 442071 - RNA, 22 nt, Human
cuggaagaccccccaggacuca

SEQ ID NO: 442072 - RNA, 22 nt, Human
agcaggacacgaugcggcagga

SEQ ID NO: 442073 - RNA, 22 nt, Human
agcagacaggcugccacagugc

SEQ ID NO: 442074 - RNA, 22 nt, Human
aguguccuccucugggagccag

SEQ ID NO: 442075 - RNA, 22 nt, Human
aggcuggcuuugguagcauggu

SEQ ID NO: 442076 - RNA, 18 nt, Human
cugcccagagcauuucau

SEQ ID NO: 442077 - RNA, 22 nt, Human
agccuggagguaaugaggaaac

SEQ ID NO: 442078 - RNA, 19 nt, Human
gagcugagaguagcacugg

SEQ ID NO: 442079 - RNA, 22 nt, Human
uauauucauauuguugucucuc

SEQ ID NO: 442080 - RNA, 22 nt, Human
uugcaaauuauuuuagucccuu

SEQ ID NO: 442081 - RNA, 22 nt, Human
uucuaguccuagaaacuacaug

SEQ ID NO: 442082 - RNA, 22 nt, Human
uccuggguccauggcagccgaa

SEQ ID NO: 442083 - RNA, 22 nt, Human
gugcaaaagcaauugcaguuuu

SEQ ID NO: 442084 - RNA, 22 nt, Human
caggcacacaggcucccugggc

SEQ ID NO: 442085 - RNA, 22 nt, Human
caacagucagaaugaagcugag

SEQ ID NO: 442086 - RNA, 22 nt, Human
agaugauauacuacauggcuuc

SEQ ID NO: 442087 - RNA, 22 nt, Human
ggcugcccucggggucgcaggc

SEQ ID NO: 442088 - RNA, 18 nt, Human
gcagagcaucaaggguua

SEQ ID NO: 442089 - RNA, 22 nt, Human
uuucacaucagagguagauuag

SEQ ID NO: 442090 - RNA, 22 nt, Human
agcaacauugagacugcaguug

SEQ ID NO: 442091 - RNA, 20 nt, Human
gaaaggagugucccugugag

SEQ ID NO: 442092 - RNA, 21 nt, Human
aaagagguuaauauuguaagu

SEQ ID NO: 442093 - RNA, 22 nt, Human
ugucccaguuuaucugggacug

SEQ ID NO: 442094 - RNA, 22 nt, Human
ucuaaacuucacuuuaagugcu

SEQ ID NO: 442095 - RNA, 22 nt, Human
cacacaguaggcacucauuaau

SEQ ID NO: 442096 - RNA, 22 nt, Human
gggcugccaagccugccugccu

SEQ ID NO: 442097 - RNA, 22 nt, Human
uagacagaauccagcccacgcc

SEQ ID NO: 442098 - RNA, 22 nt, Human
aggucgaguuucggggcuacuu

SEQ ID NO: 442099 - RNA, 22 nt, Human
cagcugucugaagcaggagucc

SEQ ID NO: 442100 - RNA, 23 nt, Human
gcagcuugugguuuaguagaggg

SEQ ID NO: 442101 - RNA, 22 nt, Human
accucuaaaaaauuagaagccu

SEQ ID NO: 442102 - RNA, 19 nt, Human
cagagcugcuggccucguc

SEQ ID NO: 442103 - RNA, 22 nt, Human
ugccuugggauauauggacacu

SEQ ID NO: 442104 - RNA, 22 nt, Human
gguggcaggcuggcauuggcaa

SEQ ID NO: 442105 - RNA, 22 nt, Human
cugcauuauuggggccuguuuc

SEQ ID NO: 442106 - RNA, 20 nt, Human
guuaaaagaguaauuugagg

SEQ ID NO: 442107 - RNA, 22 nt, Human
ucacauuugcaauugcauuguu

SEQ ID NO: 442108 - RNA, 21 nt, Human
ggccucugccuugccccacuc

SEQ ID NO: 442109 - RNA, 22 nt, Human
gauaaagcagguaggagaagau

SEQ ID NO: 442110 - RNA, 22 nt, Human
uuuucuaacuuuacacucgaaa

SEQ ID NO: 442111 - RNA, 22 nt, Human
cagcccuucagggggcugcagg

SEQ ID NO: 442112 - RNA, 22 nt, Human
aggcagcugugaggacuggauu

SEQ ID NO: 442113 - RNA, 22 nt, Human
aguacuuuuuugauaucugagu

SEQ ID NO: 442114 - RNA, 20 nt, Human
gcagcugugcauucuuagga

SEQ ID NO: 442115 - RNA, 22 nt, Human
aagccagauagaagaacucauu

SEQ ID NO: 442116 - RNA, 22 nt, Human
ucuggagaagcccagggagcug

SEQ ID NO: 442117 - RNA, 22 nt, Human
auuuguagugaagugaaaauaa

SEQ ID NO: 442118 - RNA, 22 nt, Human
ucagcagugugcuuggaaugga

SEQ ID NO: 442119 - RNA, 22 nt, Human
gaaggcaagaucucaguggagg

SEQ ID NO: 442120 - RNA, 22 nt, Human
uccugaagcucucuuaaggaaa

SEQ ID NO: 442121 - RNA, 22 nt, Human
cagcugagcucccaggccauca

SEQ ID NO: 442122 - RNA, 22 nt, Human
uuguuuccauugcagacugugu

SEQ ID NO: 442123 - RNA, 22 nt, Human
agagcacaggcucaccauuguu

SEQ ID NO: 442124 - RNA, 22 nt, Human
agccugagagccaagcugugca

SEQ ID NO: 442125 - RNA, 22 nt, Human
cugagcagcagggagacuggug

SEQ ID NO: 442126 - RNA, 22 nt, Human
uccugccucuccaugcuaacua

SEQ ID NO: 442127 - RNA, 22 nt, Human
agcuguuuuugugggcauguga

SEQ ID NO: 442128 - RNA, 22 nt, Human
aagagagggguugcauggaaau

SEQ ID NO: 442129 - RNA, 22 nt, Human
gaggccugguuuccagcauccu

SEQ ID NO: 442130 - RNA, 22 nt, Human
auucagacuaugaacacgucag

SEQ ID NO: 442131 - RNA, 22 nt, Human
aggagcugcauggauaccuggu

SEQ ID NO: 442132 - RNA, 22 nt, Human
ucaaguauuauauucucauuuu

SEQ ID NO: 442133 - RNA, 22 nt, Human
aauaguuguaguaucuaucucg

SEQ ID NO: 442134 - RNA, 22 nt, Human
gagcaacacuccacauugcuag

SEQ ID NO: 442135 - RNA, 22 nt, Human
acaggccuuggcaggcauguga

SEQ ID NO: 442136 - RNA, 22 nt, Human
gaugcaaagauaaaacagacgc

SEQ ID NO: 442137 - RNA, 22 nt, Human
gacaggaauguguggaugcgga

SEQ ID NO: 442138 - RNA, 22 nt, Human
uuugagaagauaggggaauacu

SEQ ID NO: 442139 - RNA, 18 nt, Human
auauccaauaaugaacac

SEQ ID NO: 442140 - RNA, 22 nt, Human
ugugggcucccccucacucugu

SEQ ID NO: 442141 - RNA, 22 nt, Human
acuucucugcuaccugcaaaga

SEQ ID NO: 442142 - RNA, 22 nt, Human
auaucuuucaaagccaaaagua

SEQ ID NO: 442143 - RNA, 22 nt, Human
ggaugaggaagauuacugagaa

SEQ ID NO: 442144 - RNA, 22 nt, Human
ugaggacauuggucaggacaug

SEQ ID NO: 442145 - RNA, 22 nt, Human
ugaccaaagaguugcuuguauu

SEQ ID NO: 442146 - RNA, 22 nt, Human
gauuucuaguucauuaucuauu

SEQ ID NO: 442147 - RNA, 22 nt, Human
ucuuugcacugugcaagcagaa

SEQ ID NO: 442148 - RNA, 22 nt, Human
gaagcacaaaguguaguuccga

SEQ ID NO: 442149 - RNA, 22 nt, Human
uauauucacuuguguccaacca

SEQ ID NO: 442150 - RNA, 22 nt, Human
guucaaauuuucuaggugggug

SEQ ID NO: 442151 - RNA, 21 nt, Human
ggaagggcucugaggacggcu

SEQ ID NO: 442152 - RNA, 22 nt, Human
ugcucccagggacucuggcugg

SEQ ID NO: 442153 - RNA, 18 nt, Human
cagagcaguaugaauguu

SEQ ID NO: 442154 - RNA, 23 nt, Human
ugucccagagggagggauaggcu

SEQ ID NO: 442155 - RNA, 22 nt, Human
ugacagagugacacucuugucu

SEQ ID NO: 442156 - RNA, 22 nt, Human
augggaagguuuugagagcggg

SEQ ID NO: 442157 - RNA, 18 nt, Human
ugagacagcuaccacuug

SEQ ID NO: 442158 - RNA, 20 nt, Human
uggcuccuggcuccucccuc

SEQ ID NO: 442159 - RNA, 22 nt, Human
cuggagaguuggaagauggacu

SEQ ID NO: 442160 - RNA, 22 nt, Human
ccuggugcaccaaguaagggug

SEQ ID NO: 442161 - RNA, 22 nt, Human
ccuggcuccagcugccuguccu

SEQ ID NO: 442162 - RNA, 19 nt, Human
ugggaguggggaagguccu

SEQ ID NO: 442163 - RNA, 22 nt, Human
uaugugcauuaucuaguucauu

SEQ ID NO: 442164 - RNA, 22 nt, Human
cucagcaagauuaagcagcuug

SEQ ID NO: 442165 - RNA, 22 nt, Human
gaggcacagaguaggugcacac

SEQ ID NO: 442166 - RNA, 22 nt, Human
gggccugcagguucugagaggc

SEQ ID NO: 442167 - RNA, 22 nt, Human
ccagagaaaagaggccaaggau

SEQ ID NO: 442168 - RNA, 22 nt, Human
ccagagaaccaucugcuugagg

SEQ ID NO: 442169 - RNA, 22 nt, Human
ugugcucuugucugugacuaac

SEQ ID NO: 442170 - RNA, 22 nt, Human
acucucucacagcuuggcugau

SEQ ID NO: 442171 - RNA, 22 nt, Human
ugccugucuuggaguccuggcc

SEQ ID NO: 442172 - RNA, 22 nt, Human
uucauacucuucccugggcaaa

SEQ ID NO: 442173 - RNA, 22 nt, Human
ccucuggguaucuguggaagua

SEQ ID NO: 442174 - RNA, 22 nt, Human
uuauuauagauuaugcaagauu

SEQ ID NO: 442175 - RNA, 22 nt, Human
gaggcccuccagcugucagcug

SEQ ID NO: 442176 - RNA, 22 nt, Human
ggguguguuccuaaggaaacca

SEQ ID NO: 442177 - RNA, 22 nt, Human
acagggcaaccucugggagacu

SEQ ID NO: 442178 - RNA, 22 nt, Human
auauagaaggugcuauuuacau

SEQ ID NO: 442179 - RNA, 22 nt, Human
cugggaggauucauugagguga

SEQ ID NO: 442180 - RNA, 22 nt, Human
uguuuaaccaccauucuauucu

SEQ ID NO: 442181 - RNA, 22 nt, Human
acuaggggcucaggcccaggga

SEQ ID NO: 442182 - RNA, 22 nt, Human
cugagcagugguucuugagcgc

SEQ ID NO: 442183 - RNA, 22 nt, Human
gccuggagacaaggacaaaggg

SEQ ID NO: 442184 - RNA, 19 nt, Human
ugcaaauucuaaaaacuga

SEQ ID NO: 442185 - RNA, 22 nt, Human
aaggaaagacauauaaaugacu

SEQ ID NO: 442186 - RNA, 22 nt, Human
aucauuuuauggcugagaggac

SEQ ID NO: 442187 - RNA, 22 nt, Human
aaggaagguacucagugauucu

SEQ ID NO: 442188 - RNA, 22 nt, Human
gcacagagagcagugggggaca

SEQ ID NO: 442189 - RNA, 20 nt, Human
ucuggcaggugaacgagcug

SEQ ID NO: 442190 - RNA, 23 nt, Human
augaaugaauaaggcaggaaagc

SEQ ID NO: 442191 - RNA, 22 nt, Human
gccuggagacagcagaggcggc

SEQ ID NO: 442192 - RNA, 19 nt, Human
gugggccaggcagaaggcu

SEQ ID NO: 442193 - RNA, 22 nt, Human
augcacuuucuagagauucuga

SEQ ID NO: 442194 - RNA, 18 nt, Human
cacaggaaggggaauauc

SEQ ID NO: 442195 - RNA, 22 nt, Human
ggcagcugucucauucacaccu

SEQ ID NO: 442196 - RNA, 22 nt, Human
uugaacaguuuugucagguuca

SEQ ID NO: 442197 - RNA, 22 nt, Human
gugagagggcugggcucaugau

SEQ ID NO: 442198 - RNA, 22 nt, Human
cugcccugcuuguuuccagugg

SEQ ID NO: 442199 - RNA, 22 nt, Human
ucccagagcccaaguuggagag

SEQ ID NO: 442200 - RNA, 22 nt, Human
ugcugggcuagaagcugaggcc

SEQ ID NO: 442201 - RNA, 22 nt, Human
gcccuggggaaggugucuccaa

SEQ ID NO: 442202 - RNA, 22 nt, Human
acuuguuuacaagcaguucuga

SEQ ID NO: 442203 - RNA, 22 nt, Human
gaauuucacaaggugaggauaa

SEQ ID NO: 442204 - RNA, 22 nt, Human
aggagaaggaagugcaucacua

SEQ ID NO: 442205 - RNA, 20 nt, Human
aggaggggauagaaucaaag

SEQ ID NO: 442206 - RNA, 22 nt, Human
uugcccugucaguagaagugca

SEQ ID NO: 442207 - RNA, 22 nt, Human
ugcccugguuacacuggagucc

SEQ ID NO: 442208 - RNA, 22 nt, Human
agcagggccaacaguaaacacc

SEQ ID NO: 442209 - RNA, 22 nt, Human
ggcugcagguugguuggcagcu

SEQ ID NO: 442210 - RNA, 22 nt, Human
agcaguggagcgagauguuuaa

SEQ ID NO: 442211 - RNA, 22 nt, Human
uccugaaguauggguauggagu

SEQ ID NO: 442212 - RNA, 22 nt, Human
auacaguaaccacauucuauag

SEQ ID NO: 442213 - RNA, 22 nt, Human
ugcaccugagaggucucugagg

SEQ ID NO: 442214 - RNA, 21 nt, Human
cugggcuuucucucaaagaca

SEQ ID NO: 442215 - RNA, 22 nt, Human
uucuugaugaaugcuaagaacu

SEQ ID NO: 442216 - RNA, 22 nt, Human
cuccuggggccauggaaggaac

SEQ ID NO: 442217 - RNA, 22 nt, Human
agcugucugucuccugaggaga

SEQ ID NO: 442218 - RNA, 22 nt, Human
agcuguuuucuaaugcauuuga

SEQ ID NO: 442219 - RNA, 22 nt, Human
acagguaccggucagauuacgg

SEQ ID NO: 442220 - RNA, 22 nt, Human
ggcaggaggaagaguuagcacc

SEQ ID NO: 442221 - RNA, 22 nt, Human
aagaacauugacuaagaggggc

SEQ ID NO: 442222 - RNA, 22 nt, Human
aggcacaggaaugucauccagu

SEQ ID NO: 442223 - RNA, 21 nt, Human
ggcagaaguagcauggacggg

SEQ ID NO: 442224 - RNA, 22 nt, Human
gugucccaggagaggagacaau

SEQ ID NO: 442225 - RNA, 18 nt, Human
gaggcagcuagcaauuuu

SEQ ID NO: 442226 - RNA, 22 nt, Human
agugccuggaccccaugacaua

SEQ ID NO: 442227 - RNA, 22 nt, Human
auauuuauaaggcaggcaagua

SEQ ID NO: 442228 - RNA, 22 nt, Human
cagggccucgaagccucugggc

SEQ ID NO: 442229 - RNA, 22 nt, Human
cuggcuccaaauucugauguuc

SEQ ID NO: 442230 - RNA, 22 nt, Human
ugcugugagguugagaaggaag

SEQ ID NO: 442231 - RNA, 22 nt, Human
ggcugcagggcagcuggugugg

SEQ ID NO: 442232 - RNA, 22 nt, Human
aaaugcuagggagaaacucucc

SEQ ID NO: 442233 - RNA, 22 nt, Human
uauaauuuuucuguggccaguu

SEQ ID NO: 442234 - RNA, 23 nt, Human
aggcuggcuucaggagccucucc

SEQ ID NO: 442235 - RNA, 22 nt, Human
cagcaucuuucucuucuggagu

SEQ ID NO: 442236 - RNA, 22 nt, Human
uuuggcggggcaauucugaagc

SEQ ID NO: 442237 - RNA, 22 nt, Human
uuuguuuugaacuagcucagaa

SEQ ID NO: 442238 - RNA, 17 nt, Human
uccaggagaggcaaugg

SEQ ID NO: 442239 - RNA, 23 nt, Human
uuuuaauuuggacauaagaagau

SEQ ID NO: 442240 - RNA, 22 nt, Human
agccucugucaagcuuuucaaa

SEQ ID NO: 442241 - RNA, 23 nt, Human
aggugccaacugagagcugagag

SEQ ID NO: 442242 - RNA, 22 nt, Human
ccugggcuuucaaaaccagccu

SEQ ID NO: 442243 - RNA, 22 nt, Human
ugcccucagcagcagcuccugc

SEQ ID NO: 442244 - RNA, 22 nt, Human
ccugugaggucuugcaugugaa

SEQ ID NO: 442245 - RNA, 22 nt, Human
aagcaggcaggguggagaguuu

SEQ ID NO: 442246 - RNA, 22 nt, Human
uugcaaauggaggccuggcagc

SEQ ID NO: 442247 - RNA, 22 nt, Human
uuggaaaagugaaacuagaugc

SEQ ID NO: 442248 - RNA, 22 nt, Human
agcuccugggccaagcccaugc

SEQ ID NO: 442249 - RNA, 22 nt, Human
gagagcugcauucucagacaca

SEQ ID NO: 442250 - RNA, 22 nt, Human
ccagcucuggcuucuugcuggg

SEQ ID NO: 442251 - RNA, 20 nt, Human
cguguguggcuauuuugggu

SEQ ID NO: 442252 - RNA, 22 nt, Human
augcaaaugcuagagaauguug

SEQ ID NO: 442253 - RNA, 22 nt, Human
ucaaaggaaacacaagcuucug

SEQ ID NO: 442254 - RNA, 22 nt, Human
ccaggccuagccccugagggua

SEQ ID NO: 442255 - RNA, 22 nt, Human
acccagcaugacaccugcacau

SEQ ID NO: 442256 - RNA, 22 nt, Human
acgauguggccugaaucaggca

SEQ ID NO: 442257 - RNA, 22 nt, Human
acagcucugguccuuuagagag

SEQ ID NO: 442258 - RNA, 22 nt, Human
ugcaaaaacugcaauugcuuuu

SEQ ID NO: 442259 - RNA, 22 nt, Human
ugauuuuacuuagcaugauguu

SEQ ID NO: 442260 - RNA, 22 nt, Human
auaauauuuggauaggacagua

SEQ ID NO: 442261 - RNA, 22 nt, Human
uaaggcagccucaggguagggu

SEQ ID NO: 442262 - RNA, 22 nt, Human
accucagcuauuucaaaacaga

SEQ ID NO: 442263 - RNA, 22 nt, Human
aagagcuggucacagguccauu

SEQ ID NO: 442264 - RNA, 22 nt, Human
gaguccuguaacuuucuuccua

SEQ ID NO: 442265 - RNA, 23 nt, Human
gcagacagagcagacuaagacaa

SEQ ID NO: 442266 - RNA, 18 nt, Human
gggcacuggggacuggag

SEQ ID NO: 442267 - RNA, 22 nt, Human
gcacccagaauaaggacaggac

SEQ ID NO: 442268 - RNA, 22 nt, Human
aauggcaagcugaacucagaag

SEQ ID NO: 442269 - RNA, 22 nt, Human
aggaugaggcuggacacuucuu

SEQ ID NO: 442270 - RNA, 22 nt, Human
auuagcugaccucuaaggagcc

SEQ ID NO: 442271 - RNA, 22 nt, Human
acccacacaucucuaauucagu

SEQ ID NO: 442272 - RNA, 22 nt, Human
gucccugcaucaccacgggacu

SEQ ID NO: 442273 - RNA, 19 nt, Human
ccugcagggaugagagguu

SEQ ID NO: 442274 - RNA, 22 nt, Human
uuaugacauaugaguacaagua

SEQ ID NO: 442275 - RNA, 22 nt, Human
aaacagagggccacugaggcuc

SEQ ID NO: 442276 - RNA, 21 nt, Human
uucaugagauaaccagcugua

SEQ ID NO: 442277 - RNA, 23 nt, Human
cucagaggccuguccaggguggu

SEQ ID NO: 442278 - RNA, 22 nt, Human
ggcagcgcccgaguccgcagcu

SEQ ID NO: 442279 - RNA, 22 nt, Human
cagcauggugccagugagucca

SEQ ID NO: 442280 - RNA, 22 nt, Human
cuguacaaguccuucaucaggg

SEQ ID NO: 442281 - RNA, 20 nt, Human
cugagcgucuaagaggugag

SEQ ID NO: 442282 - RNA, 22 nt, Human
uguugauuaguguuuagacuua

SEQ ID NO: 442283 - RNA, 22 nt, Human
ucaugcaggaccaccccagcau

SEQ ID NO: 442284 - RNA, 22 nt, Human
cuccucccacggucucaggaag

SEQ ID NO: 442285 - RNA, 22 nt, Human
ccaggcuguaaacaccuucaaa

SEQ ID NO: 442286 - RNA, 18 nt, Human
cugagggcaacagaggcu

SEQ ID NO: 442287 - RNA, 22 nt, Human
ccugccugcaccuucucugggg

SEQ ID NO: 442288 - RNA, 23 nt, Human
auucagaauuguguguuuguaua

SEQ ID NO: 442289 - RNA, 22 nt, Human
aacacuuugggcauggccuucc

SEQ ID NO: 442290 - RNA, 22 nt, Human
agcuguguggugucugacagcu

SEQ ID NO: 442291 - RNA, 20 nt, Human
ugcagcagaagcccaugcuc

SEQ ID NO: 442292 - RNA, 22 nt, Human
ugcaaauuuaaugaaacuaugu

SEQ ID NO: 442293 - RNA, 22 nt, Human
ugggccuguggcuuggcucuag

SEQ ID NO: 442294 - RNA, 22 nt, Human
uccuguguaaauagaucugguu

SEQ ID NO: 442295 - RNA, 22 nt, Human
uuuaagacuuagauuuauuggg

SEQ ID NO: 442296 - RNA, 22 nt, Human
uuguacagaaaaaauucuuggu

SEQ ID NO: 442297 - RNA, 22 nt, Human
gagcaggcaaagaugaaaggag

SEQ ID NO: 442298 - RNA, 22 nt, Human
gcagggacuuuggcaacaggug

SEQ ID NO: 442299 - RNA, 22 nt, Human
agaaggaagccaggagggugca

SEQ ID NO: 442300 - RNA, 22 nt, Human
guuccucaaaaaggagagcccc

SEQ ID NO: 442301 - RNA, 23 nt, Human
ucaaacuguuauauugccagagu

SEQ ID NO: 442302 - RNA, 22 nt, Human
aggcagucagcccugcuagggu

SEQ ID NO: 442303 - RNA, 22 nt, Human
agaaggcacucacacuggcacg

SEQ ID NO: 442304 - RNA, 22 nt, Human
uuggaaaugcaaauauauugaa

SEQ ID NO: 442305 - RNA, 22 nt, Human
cugggcacagcguugggcucuu

SEQ ID NO: 442306 - RNA, 22 nt, Human
uggcacagacauuuaauagccu

SEQ ID NO: 442307 - RNA, 21 nt, Human
guucaagugauccuccugucu

SEQ ID NO: 442308 - RNA, 22 nt, Human
accccagaggcggaggcugcag

SEQ ID NO: 442309 - RNA, 22 nt, Human
uauauuaaccauaggguucuag

SEQ ID NO: 442310 - RNA, 22 nt, Human
gccugucaauuuuguguacaau

SEQ ID NO: 442311 - RNA, 22 nt, Human
ucucugggugauggcagggcac

SEQ ID NO: 442312 - RNA, 23 nt, Human
ugcaauaugucagugcaaagugg

SEQ ID NO: 442313 - RNA, 23 nt, Human
agucaguguaaguuuggaaugca

SEQ ID NO: 442314 - RNA, 22 nt, Human
augcagcuucaggauuaugaug

SEQ ID NO: 442315 - RNA, 22 nt, Human
aggugcaccugagggugucauc

SEQ ID NO: 442316 - RNA, 22 nt, Human
cugguacaguguuacaaaaugg

SEQ ID NO: 442317 - RNA, 22 nt, Human
agagauuuacacaugccuuuuc

SEQ ID NO: 442318 - RNA, 22 nt, Human
cuuuggcuacaagcgcugcaau

SEQ ID NO: 442319 - RNA, 21 nt, Human
ugcagccauucagcccuaugc

SEQ ID NO: 442320 - RNA, 22 nt, Human
gccuggcaggccucaugagggg

SEQ ID NO: 442321 - RNA, 22 nt, Human
ccagguggaaggucugugcucu

SEQ ID NO: 442322 - RNA, 22 nt, Human
uuccuuccacuucaggauuuug

SEQ ID NO: 442323 - RNA, 22 nt, Human
ggcacagagcuccagccuuggc

SEQ ID NO: 442324 - RNA, 22 nt, Human
ccagccagcugcccuuggggcc

SEQ ID NO: 442325 - RNA, 22 nt, Human
gggcaagcacagcgagcgugcg

SEQ ID NO: 442326 - RNA, 22 nt, Human
ugggcacaggggaauggaugaa

SEQ ID NO: 442327 - RNA, 22 nt, Human
cucaggcucuggccauccaagg

SEQ ID NO: 442328 - RNA, 22 nt, Human
aaaguucagugccuucuauaca

SEQ ID NO: 442329 - RNA, 22 nt, Human
ucugaggcuauguucaggcuaa

SEQ ID NO: 442330 - RNA, 18 nt, Human
gcacagcuaggagggucc

SEQ ID NO: 442331 - RNA, 22 nt, Human
caggguuucaccauguuagcag

SEQ ID NO: 442332 - RNA, 22 nt, Human
cuuagaaauaaugguuucaguu

SEQ ID NO: 442333 - RNA, 22 nt, Human
aaguucaaguaguguuacaugg

SEQ ID NO: 442334 - RNA, 22 nt, Human
ggggccuuggaucugugccccg

SEQ ID NO: 442335 - RNA, 22 nt, Human
cuguacaauguuaccuauuuau

SEQ ID NO: 442336 - RNA, 22 nt, Human
aggagccaggaaaccugcucug

SEQ ID NO: 442337 - RNA, 19 nt, Human
uugagaacaccaaguacug

SEQ ID NO: 442338 - RNA, 22 nt, Human
agggcagaaaucgauuacaccu

SEQ ID NO: 442339 - RNA, 22 nt, Human
ggcucucuggaggagcucaccc

SEQ ID NO: 442340 - RNA, 20 nt, Human
gcucagggccugggucugga

SEQ ID NO: 442341 - RNA, 22 nt, Human
auacagaagccuguauuucugg

SEQ ID NO: 442342 - RNA, 22 nt, Human
ucacaguaacuuuguugcuuuu

SEQ ID NO: 442343 - RNA, 22 nt, Human
ugcaggcugggaagagggacaa

SEQ ID NO: 442344 - RNA, 22 nt, Human
cccagcuccagagccagaaaca

SEQ ID NO: 442345 - RNA, 22 nt, Human
uaguggaggggaugcaaagcuu

SEQ ID NO: 442346 - RNA, 22 nt, Human
uuccuacauuuguacaauaaga

SEQ ID NO: 442347 - RNA, 18 nt, Human
gaggauggaaggagaugc

SEQ ID NO: 442348 - RNA, 22 nt, Human
agcagcaaaguauugggcaaga

SEQ ID NO: 442349 - RNA, 22 nt, Human
uggagacagagauagccaauug

SEQ ID NO: 442350 - RNA, 22 nt, Human
gcaggagccacuucagggaugc

SEQ ID NO: 442351 - RNA, 22 nt, Human
ucaaaacaacacucagguguaa

SEQ ID NO: 442352 - RNA, 21 nt, Human
cucugcccagggccuccugcc

SEQ ID NO: 442353 - RNA, 22 nt, Human
uuacuuuaucuccuagauucca

SEQ ID NO: 442354 - RNA, 22 nt, Human
ugccugucucugacugccauua

SEQ ID NO: 442355 - RNA, 22 nt, Human
ucugucuccucugaggugccag

SEQ ID NO: 442356 - RNA, 22 nt, Human
aguccuagacuuuucugccacu

SEQ ID NO: 442357 - RNA, 22 nt, Human
gggcacuguggggcccaugcug

SEQ ID NO: 442358 - RNA, 22 nt, Human
cucuggggaagcagccagcugg

SEQ ID NO: 442359 - RNA, 22 nt, Human
aaguggcucauguggcuucugc

SEQ ID NO: 442360 - RNA, 22 nt, Human
ucucuaaagccuggaagaggag

SEQ ID NO: 442361 - RNA, 22 nt, Human
cagagugaaaacugagcucaaa

SEQ ID NO: 442362 - RNA, 22 nt, Human
uagguuuacugaauuaguggaa

SEQ ID NO: 442363 - RNA, 22 nt, Human
aggcuggggaauugaauuugcu

SEQ ID NO: 442364 - RNA, 22 nt, Human
uggcucuggugcgggcuccugc

SEQ ID NO: 442365 - RNA, 22 nt, Human
uccagcagccacaccucuggac

SEQ ID NO: 442366 - RNA, 22 nt, Human
uuugacaacagcaaaugucaca

SEQ ID NO: 442367 - RNA, 22 nt, Human
aaucuagauucggaucaaaggg

SEQ ID NO: 442368 - RNA, 22 nt, Human
acaggacuuaagucauuuauaa

SEQ ID NO: 442369 - RNA, 22 nt, Human
agaaugucaacagccucucaag

SEQ ID NO: 442370 - RNA, 22 nt, Human
gccugugcuuaacugacgugag

SEQ ID NO: 442371 - RNA, 22 nt, Human
gcccacagucuaucaguuugcg

SEQ ID NO: 442372 - RNA, 22 nt, Human
aaguacuuuaggauauguaacu

SEQ ID NO: 442373 - RNA, 22 nt, Human
agguccugaggguucgucugca

SEQ ID NO: 442374 - RNA, 22 nt, Human
ccuccugggccuugcucuguga

SEQ ID NO: 442375 - RNA, 21 nt, Human
uaucagaagagaaagaaugau

SEQ ID NO: 442376 - RNA, 22 nt, Human
ggcugccauaacagaguaccac

SEQ ID NO: 442377 - RNA, 22 nt, Human
uacuguaugaauuauguuauuu

SEQ ID NO: 442378 - RNA, 22 nt, Human
aggggagguggcagaaaugugc

SEQ ID NO: 442379 - RNA, 17 nt, Human
uaucuguguuccuggcu

SEQ ID NO: 442380 - RNA, 22 nt, Human
uuucagagcucagcagcuagag

SEQ ID NO: 442381 - RNA, 22 nt, Human
gaaauauuguacuggagauguu

SEQ ID NO: 442382 - RNA, 22 nt, Human
gggcuucucucaggggcaugag

SEQ ID NO: 442383 - RNA, 19 nt, Human
ucuugaugagguuucucca

SEQ ID NO: 442384 - RNA, 22 nt, Human
ugcacacaguucucaggaaaga

SEQ ID NO: 442385 - RNA, 22 nt, Human
aacagcgucuuuccagcuguuc

SEQ ID NO: 442386 - RNA, 19 nt, Human
ugcccccagcaccucccug

SEQ ID NO: 442387 - RNA, 22 nt, Human
caauuucaauacaaaauacauu

SEQ ID NO: 442388 - RNA, 21 nt, Human
aggcauggaaauggcacacug

SEQ ID NO: 442389 - RNA, 22 nt, Human
uucuuuauuaguuuagugagcu

SEQ ID NO: 442390 - RNA, 22 nt, Human
cucccagguuccgacgccucuu

SEQ ID NO: 442391 - RNA, 22 nt, Human
uucuccuugguuuaugggacau

SEQ ID NO: 442392 - RNA, 22 nt, Human
acccagcuggaugcauggaggc

SEQ ID NO: 442393 - RNA, 22 nt, Human
ugcccacaggaagacaccagcg

SEQ ID NO: 442394 - RNA, 22 nt, Human
gaaguucucaaggaucacagaa

SEQ ID NO: 442395 - RNA, 22 nt, Human
acagccugagaguggagcuggc

SEQ ID NO: 442396 - RNA, 22 nt, Human
uaaggcauuagagugaaagcaa

SEQ ID NO: 442397 - RNA, 22 nt, Human
gcuuuagauacucccaaugucc

SEQ ID NO: 442398 - RNA, 22 nt, Human
uugacccaguuguaaaagagcu

SEQ ID NO: 442399 - RNA, 22 nt, Human
ccagcuccgggaguugcugcug

SEQ ID NO: 442400 - RNA, 22 nt, Human
uacuuuaaaaacugauaauuca

SEQ ID NO: 442401 - RNA, 22 nt, Human
aacacuuaaggagagaucaaau

SEQ ID NO: 442402 - RNA, 22 nt, Human
uagaguccuucauucugugcag

SEQ ID NO: 442403 - RNA, 22 nt, Human
gaagguccagcguggccaaguc

SEQ ID NO: 442404 - RNA, 22 nt, Human
agggccagcacuccuggcagga

SEQ ID NO: 442405 - RNA, 22 nt, Human
aggcucucagaucagccacauu

SEQ ID NO: 442406 - RNA, 22 nt, Human
uugacaaauacccauuagacca

SEQ ID NO: 442407 - RNA, 22 nt, Human
aagucagaaauaucugccauca

SEQ ID NO: 442408 - RNA, 22 nt, Human
caggaaagguagucacaaugua

SEQ ID NO: 442409 - RNA, 20 nt, Human
uggcuccugcgguggaacca

SEQ ID NO: 442410 - RNA, 22 nt, Human
agcaguagugauggccccugag

SEQ ID NO: 442411 - RNA, 22 nt, Human
cagcagcaugaauucgagccac

SEQ ID NO: 442412 - RNA, 22 nt, Human
ggaugcaggacggcauggaugu

SEQ ID NO: 442413 - RNA, 22 nt, Human
cagacagguagggacagaacau

SEQ ID NO: 442414 - RNA, 22 nt, Human
acagcagguuuuaacuuugaag

SEQ ID NO: 442415 - RNA, 18 nt, Human
uaggcugggggcuguagu

SEQ ID NO: 442416 - RNA, 22 nt, Human
ggcaggugcaccugagccaucu

SEQ ID NO: 442417 - RNA, 22 nt, Human
uagcaacauaagaaacauuuug

SEQ ID NO: 442418 - RNA, 22 nt, Human
agacagcagcagaggggcuccc

SEQ ID NO: 442419 - RNA, 22 nt, Human
cucugagguccuucccagcucu

SEQ ID NO: 442420 - RNA, 22 nt, Human
ugggcacaaacaucugccuguu

SEQ ID NO: 442421 - RNA, 22 nt, Human
aaauacaaaaauuagccaggca

SEQ ID NO: 442422 - RNA, 22 nt, Human
agguccuguuucuucccugggg

SEQ ID NO: 442423 - RNA, 22 nt, Human
acacaaguucuaaagauugcgc

SEQ ID NO: 442424 - RNA, 22 nt, Human
cagcuguugucaccucacaucc

SEQ ID NO: 442425 - RNA, 22 nt, Human
uacaaacuuguuuuaaguaagu

SEQ ID NO: 442426 - RNA, 22 nt, Human
ucagcaguggcucucaugcagu

SEQ ID NO: 442427 - RNA, 22 nt, Human
cauuucuaagaagaucugggua

SEQ ID NO: 442428 - RNA, 22 nt, Human
uuaguacaagagauuaauuacu

SEQ ID NO: 442429 - RNA, 21 nt, Human
agacagcagauagucgaaagg

SEQ ID NO: 442430 - RNA, 22 nt, Human
ucuggccugaaaguccaugcuu

SEQ ID NO: 442431 - RNA, 22 nt, Human
auuucagaauguccuaauuuag

SEQ ID NO: 442432 - RNA, 22 nt, Human
aaggcagcuuuaaaaaagaugc

SEQ ID NO: 442433 - RNA, 22 nt, Human
ggagggaaugucuagcauucuu

SEQ ID NO: 442434 - RNA, 22 nt, Human
agcucccagagcucgagaguaa

SEQ ID NO: 442435 - RNA, 22 nt, Human
uuguuuuggaagaacuuacucu

SEQ ID NO: 442436 - RNA, 22 nt, Human
ccagcucccugaagccuggucu

SEQ ID NO: 442437 - RNA, 22 nt, Human
uucagcaagaccaccauguacc

SEQ ID NO: 442438 - RNA, 22 nt, Human
cagagcugcucaugguggccag

SEQ ID NO: 442439 - RNA, 22 nt, Human
aauucagauggaagauucuggc

SEQ ID NO: 442440 - RNA, 22 nt, Human
uuacaauguaaggcaugguucu

SEQ ID NO: 442441 - RNA, 22 nt, Human
cuaaggcagguccauuccagga

SEQ ID NO: 442442 - RNA, 22 nt, Human
acugcaggagacacagcugcug

SEQ ID NO: 442443 - RNA, 22 nt, Human
guacuuuguuaccauagcucca

SEQ ID NO: 442444 - RNA, 21 nt, Human
cagaggccuaucacagacucc

SEQ ID NO: 442445 - RNA, 22 nt, Human
caggaagccacaggacagguag

SEQ ID NO: 442446 - RNA, 19 nt, Human
agccuggcuuugcucugcu

SEQ ID NO: 442447 - RNA, 23 nt, Human
gugacccaaggaccuuccagaau

SEQ ID NO: 442448 - RNA, 22 nt, Human
gagggaauggugugcaagaggu

SEQ ID NO: 442449 - RNA, 22 nt, Human
cccagccucuggauucugcccu

SEQ ID NO: 442450 - RNA, 22 nt, Human
gcaggccuaagagaaggcauug

SEQ ID NO: 442451 - RNA, 23 nt, Human
gugcgccaggacaaccugacgga

SEQ ID NO: 442452 - RNA, 22 nt, Human
caguauucaucuaaggagcuug

SEQ ID NO: 442453 - RNA, 22 nt, Human
cagcccugcucuuagugucucc

SEQ ID NO: 442454 - RNA, 22 nt, Human
caauaagauguauugagcagag

SEQ ID NO: 442455 - RNA, 22 nt, Human
caggcaugagccaggccccucc

SEQ ID NO: 442456 - RNA, 22 nt, Human
uuuggccacuucauagaucauu

SEQ ID NO: 442457 - RNA, 22 nt, Human
cagcauaggauguggagccagg

SEQ ID NO: 442458 - RNA, 22 nt, Human
gcagcagcagcaauuuucuguc

SEQ ID NO: 442459 - RNA, 22 nt, Human
ucaggcugcuggccagcaggcu

SEQ ID NO: 442460 - RNA, 22 nt, Human
cucugugggggagaggcagcug

SEQ ID NO: 442461 - RNA, 22 nt, Human
ugccauccugugucaugcucau

SEQ ID NO: 442462 - RNA, 22 nt, Human
augucauuaaaauugugcugca

SEQ ID NO: 442463 - RNA, 22 nt, Human
ccaggaaaaacacauugaagag

SEQ ID NO: 442464 - RNA, 22 nt, Human
auuuuucucuuuccacugagau

SEQ ID NO: 442465 - RNA, 22 nt, Human
ucagacaggccucuccagccuc

SEQ ID NO: 442466 - RNA, 22 nt, Human
gcuuugcacagugcuguguuaa

SEQ ID NO: 442467 - RNA, 22 nt, Human
ugaggccuggagggaggaguuu

SEQ ID NO: 442468 - RNA, 22 nt, Human
cccuggugguacggcacuggca

SEQ ID NO: 442469 - RNA, 22 nt, Human
ugaggcaggacugagcgggaug

SEQ ID NO: 442470 - RNA, 22 nt, Human
cccaggaaguugagacugcagu

SEQ ID NO: 442471 - RNA, 22 nt, Human
gaggcugcccaacuggagugga

SEQ ID NO: 442472 - RNA, 22 nt, Human
gugcauauauaugggagggagc

SEQ ID NO: 442473 - RNA, 22 nt, Human
uucacauuuacugguuuguccg

SEQ ID NO: 442474 - RNA, 22 nt, Human
auuauuguguaaaaugaggcuu

SEQ ID NO: 442475 - RNA, 22 nt, Human
agauucagaaaugaggagggcc

SEQ ID NO: 442476 - RNA, 23 nt, Human
agguagguuauugcugcuaccug

SEQ ID NO: 442477 - RNA, 22 nt, Human
uuucuaaacaaagggaguuugg

SEQ ID NO: 442478 - RNA, 22 nt, Human
cccaggaggugugcccaacucg

SEQ ID NO: 442479 - RNA, 22 nt, Human
auuccagagaaaggccuggcug

SEQ ID NO: 442480 - RNA, 22 nt, Human
caggcagcguccugcuuccugu

SEQ ID NO: 442481 - RNA, 22 nt, Human
uaacauuccauggaucugcaga

SEQ ID NO: 442482 - RNA, 19 nt, Human
aggcagcauucuggggcuu

SEQ ID NO: 442483 - RNA, 22 nt, Human
cucuggcucccgcagcccccau

SEQ ID NO: 442484 - RNA, 22 nt, Human
agugcaauagcaaagaacaaca

SEQ ID NO: 442485 - RNA, 22 nt, Human
agcccaagcuaugaggugaccu

SEQ ID NO: 442486 - RNA, 22 nt, Human
uggcuccuggcagguguuucaa

SEQ ID NO: 442487 - RNA, 22 nt, Human
auuuuccuucuaagaggaaggu

SEQ ID NO: 442488 - RNA, 19 nt, Human
acacugaauguagaauugg

SEQ ID NO: 442489 - RNA, 22 nt, Human
uagcacaagaaguacacauaga

SEQ ID NO: 442490 - RNA, 22 nt, Human
ucaggcuguggcuucaguucuu

SEQ ID NO: 442491 - RNA, 21 nt, Human
auccuugaucagaagagugcu

SEQ ID NO: 442492 - RNA, 19 nt, Human
gcaccagauugagugacac

SEQ ID NO: 442493 - RNA, 22 nt, Human
ggagaggagauuguggcauuuu

SEQ ID NO: 442494 - RNA, 22 nt, Human
gggcacagccuaacuauggaga

SEQ ID NO: 442495 - RNA, 22 nt, Human
aagcugcccaagacugaagcau

SEQ ID NO: 442496 - RNA, 18 nt, Human
agcuccuggucucaggga

SEQ ID NO: 442497 - RNA, 22 nt, Human
cagcccugagaaggaggaucuc

SEQ ID NO: 442498 - RNA, 22 nt, Human
uacaauucuuuguaaggugguc

SEQ ID NO: 442499 - RNA, 22 nt, Human
gugggccaguuccucacaggua

SEQ ID NO: 442500 - RNA, 22 nt, Human
ggcaucaggguaggaagguauc

SEQ ID NO: 442501 - RNA, 22 nt, Human
caagggaaggcuaagggcaaca

SEQ ID NO: 442502 - RNA, 23 nt, Human
aaauuauugcucuucaauugccu

SEQ ID NO: 442503 - RNA, 22 nt, Human
gccaggcaaauuaaggaaugca

SEQ ID NO: 442504 - RNA, 22 nt, Human
cccagggagcuuggagaacggg

SEQ ID NO: 442505 - RNA, 22 nt, Human
aagagcuggauggaaucuggga

SEQ ID NO: 442506 - RNA, 22 nt, Human
uugcugagagcgugucaacaag

SEQ ID NO: 442507 - RNA, 22 nt, Human
uaaggcagguaugguaccaggc

SEQ ID NO: 442508 - RNA, 22 nt, Human
uugaagcuaggcugugcauaug

SEQ ID NO: 442509 - RNA, 22 nt, Human
agcagggccucuggcacugguc

SEQ ID NO: 442510 - RNA, 20 nt, Human
ugcuugucaugcacucaggc

SEQ ID NO: 442511 - RNA, 22 nt, Human
aggacacagguaagccagugga

SEQ ID NO: 442512 - RNA, 22 nt, Human
cacagggaggcggucacuggcu

SEQ ID NO: 442513 - RNA, 22 nt, Human
agucagugaaaacuagaauguu

SEQ ID NO: 442514 - RNA, 22 nt, Human
aggcuccauuuuccugcagcug

SEQ ID NO: 442515 - RNA, 22 nt, Human
ggccugccucacagucagcacc

SEQ ID NO: 442516 - RNA, 18 nt, Human
uaaggcauucuuauguga

SEQ ID NO: 442517 - RNA, 22 nt, Human
agggcagcacaaggcauggacu

SEQ ID NO: 442518 - RNA, 22 nt, Human
ccuagggagccugagagcagug

SEQ ID NO: 442519 - RNA, 22 nt, Human
cugccaaggcuggggaggacaa

SEQ ID NO: 442520 - RNA, 22 nt, Human
ggcugccucaaagcucaagcuc

SEQ ID NO: 442521 - RNA, 22 nt, Human
cagcaagagaggcagggcaaau

SEQ ID NO: 442522 - RNA, 22 nt, Human
acaugcacacgauucagucugg

SEQ ID NO: 442523 - RNA, 22 nt, Human
cagcccuggcuagggcgagggc

SEQ ID NO: 442524 - RNA, 20 nt, Human
ucuguagucuaugaggcuua

SEQ ID NO: 442525 - RNA, 22 nt, Human
ugggcagcaaagacugugugcu

SEQ ID NO: 442526 - RNA, 22 nt, Human
gaauugcucugccuggccagcc

SEQ ID NO: 442527 - RNA, 22 nt, Human
ugaagcaguucucagaaguggg

SEQ ID NO: 442528 - RNA, 22 nt, Human
cugccugugccaaugcuccuuu

SEQ ID NO: 442529 - RNA, 22 nt, Human
gaguauucaauauauacaaaug

SEQ ID NO: 442530 - RNA, 22 nt, Human
gggcuggaucuccugcaggcag

SEQ ID NO: 442531 - RNA, 22 nt, Human
ugcauuaucaucuggaagcuug

SEQ ID NO: 442532 - RNA, 22 nt, Human
uaacaucuuauuggcaaagaua

SEQ ID NO: 442533 - RNA, 22 nt, Human
cugugugugagaagcagguuga

SEQ ID NO: 442534 - RNA, 22 nt, Human
gccagugcuuguggagcuggca

SEQ ID NO: 442535 - RNA, 22 nt, Human
uucuggaagccccagagucaga

SEQ ID NO: 442536 - RNA, 18 nt, Human
cccagaggaaugccugga

SEQ ID NO: 442537 - RNA, 22 nt, Human
cuguggcacucaagaagccucc

SEQ ID NO: 442538 - RNA, 22 nt, Human
uacugaggguaugaagccaagg

SEQ ID NO: 442539 - RNA, 22 nt, Human
uccugagggacugguuccucgc

SEQ ID NO: 442540 - RNA, 22 nt, Human
agccaaggagugcagguggcuu

SEQ ID NO: 442541 - RNA, 22 nt, Human
ucaucuuuguaucccuaacaca

SEQ ID NO: 442542 - RNA, 22 nt, Human
ccugcuggccaguggagggcug

SEQ ID NO: 442543 - RNA, 22 nt, Human
aacaggcaacaguugacucuga

SEQ ID NO: 442544 - RNA, 22 nt, Human
cauuaaaucuuccagaccucac

SEQ ID NO: 442545 - RNA, 22 nt, Human
acacaggaagagagauaauaau

SEQ ID NO: 442546 - RNA, 22 nt, Human
cuccucagcugggaggaguccc

SEQ ID NO: 442547 - RNA, 22 nt, Human
ccaggcccugcuccucacacca

SEQ ID NO: 442548 - RNA, 22 nt, Human
aaauuuuagaccaggcaaaacu

SEQ ID NO: 442549 - RNA, 22 nt, Human
uucacauuauaaucaguucugc

SEQ ID NO: 442550 - RNA, 22 nt, Human
uagagcuggccgggacagcugg

SEQ ID NO: 442551 - RNA, 22 nt, Human
agauggcuuagccuggcuccca

SEQ ID NO: 442552 - RNA, 22 nt, Human
aagugaugcuacgacuuugaca

SEQ ID NO: 442553 - RNA, 22 nt, Human
acaauuuuaagccagagugggu

SEQ ID NO: 442554 - RNA, 22 nt, Human
cacuguguaagaagaugggcuu

SEQ ID NO: 442555 - RNA, 22 nt, Human
cagcugguucagugucugguga

SEQ ID NO: 442556 - RNA, 22 nt, Human
uucaaguacauuguguuuuccu

SEQ ID NO: 442557 - RNA, 22 nt, Human
gucugggcaccuggccugggaa

SEQ ID NO: 442558 - RNA, 22 nt, Human
cagggcuucgcuccuggugcac

SEQ ID NO: 442559 - RNA, 22 nt, Human
uuucagagccuuuaucucucua

SEQ ID NO: 442560 - RNA, 22 nt, Human
agcaguggccuggggcucugug

SEQ ID NO: 442561 - RNA, 22 nt, Human
uaggaauuuuuguaaugguacu

SEQ ID NO: 442562 - RNA, 22 nt, Human
cggcugagcagugcugauggaa

SEQ ID NO: 442563 - RNA, 22 nt, Human
aaacugcaauuacuuuugcacc

SEQ ID NO: 442564 - RNA, 21 nt, Human
ucccugcuuucuggcccaguc

SEQ ID NO: 442565 - RNA, 22 nt, Human
ugcauuuggggcagacuagcag

SEQ ID NO: 442566 - RNA, 22 nt, Human
uaaggcagcugagcuucuaaca

SEQ ID NO: 442567 - RNA, 22 nt, Human
ggcagggaaacagcugauccca

SEQ ID NO: 442568 - RNA, 22 nt, Human
acaggccugaugccuuggcugg

SEQ ID NO: 442569 - RNA, 22 nt, Human
ggaaggucgagcugcaucuggc

SEQ ID NO: 442570 - RNA, 22 nt, Human
uuggaauuucauguaagugacu

SEQ ID NO: 442571 - RNA, 22 nt, Human
aggccugcagcaggagcaaacc

SEQ ID NO: 442572 - RNA, 18 nt, Human
uuuggccaugaccuggcu

SEQ ID NO: 442573 - RNA, 22 nt, Human
ugguccagacauuucugaggua

SEQ ID NO: 442574 - RNA, 22 nt, Human
gggccuggugcuucugacuccu

SEQ ID NO: 442575 - RNA, 19 nt, Human
cacuuuauuucuguuuugu

SEQ ID NO: 442576 - RNA, 22 nt, Human
aagcaacagaaacauucuaaua

SEQ ID NO: 442577 - RNA, 22 nt, Human
ucaggccuggagaaaggaauga

SEQ ID NO: 442578 - RNA, 21 nt, Human
ugggcagauggcaguguggcu

SEQ ID NO: 442579 - RNA, 22 nt, Human
aaaggcuacgggggccgugugc

SEQ ID NO: 442580 - RNA, 22 nt, Human
ggcugccacgucgaggguccaa

SEQ ID NO: 442581 - RNA, 22 nt, Human
cgaggcagacaaaaguuggaag

SEQ ID NO: 442582 - RNA, 22 nt, Human
acugauuaugcguacucucuac

SEQ ID NO: 442583 - RNA, 22 nt, Human
gaggccuggaccagccacagag

SEQ ID NO: 442584 - RNA, 22 nt, Human
cugagcuggucuauggacuugg

SEQ ID NO: 442585 - RNA, 22 nt, Human
ucagagaaaugcugagcucaug

SEQ ID NO: 442586 - RNA, 22 nt, Human
aauggcaagagccacagaggcg

SEQ ID NO: 442587 - RNA, 22 nt, Human
uuucaaacuaugugucaggcag

SEQ ID NO: 442588 - RNA, 22 nt, Human
agugaaaacacuaguucuugcc

SEQ ID NO: 442589 - RNA, 22 nt, Human
aaauuagucgguuuaggaauuu

SEQ ID NO: 442590 - RNA, 22 nt, Human
gaguccugcuuucaauucuuuu

SEQ ID NO: 442591 - RNA, 19 nt, Human
aucagcaagguaggaugug

SEQ ID NO: 442592 - RNA, 22 nt, Human
uugcuuugccaccagaagucua

SEQ ID NO: 442593 - RNA, 22 nt, Human
ugagccuggagucguggagggg

SEQ ID NO: 442594 - RNA, 22 nt, Human
caaagggcauuuuagugaacug

SEQ ID NO: 442595 - RNA, 22 nt, Human
cccuggagggacagcugcucua

SEQ ID NO: 442596 - RNA, 17 nt, Human
agcacuugaaaauuucu

SEQ ID NO: 442597 - RNA, 22 nt, Human
uuauguguaccucaaucugagg

SEQ ID NO: 442598 - RNA, 22 nt, Human
aacuuuaucggaacagguacuc

SEQ ID NO: 442599 - RNA, 20 nt, Human
agcaguccaaaagggcagac

SEQ ID NO: 442600 - RNA, 22 nt, Human
auacacauguguaugugcaugc

SEQ ID NO: 442601 - RNA, 17 nt, Human
uggagcugcguguguuc

SEQ ID NO: 442602 - RNA, 22 nt, Human
gucuggaaccaagacguguagc

SEQ ID NO: 442603 - RNA, 22 nt, Human
cuuguggcccauggcuuccugc

SEQ ID NO: 442604 - RNA, 23 nt, Human
uacuauaacgcugugucagcucc

SEQ ID NO: 442605 - RNA, 22 nt, Human
gggccugugcacaguucuguua

SEQ ID NO: 442606 - RNA, 22 nt, Human
ggcagcccuuucuggccagcuc

SEQ ID NO: 442607 - RNA, 22 nt, Human
ucaggccuuucuucagagcuuc

SEQ ID NO: 442608 - RNA, 22 nt, Human
ugagcccaggaguuggagaccg

SEQ ID NO: 442609 - RNA, 22 nt, Human
guucugaguccuccuuugaagg

SEQ ID NO: 442610 - RNA, 22 nt, Human
agcagcaaggaagcgaggaugg

SEQ ID NO: 442611 - RNA, 22 nt, Human
ccugccugcguccucugagggc

SEQ ID NO: 442612 - RNA, 19 nt, Human
cuauugcacauagcugaag

SEQ ID NO: 442613 - RNA, 22 nt, Human
gcucagagaaguugugccuggc

SEQ ID NO: 442614 - RNA, 22 nt, Human
ugggcagaguugugaugaacug

SEQ ID NO: 442615 - RNA, 22 nt, Human
uggcucugaucagauguccagu

SEQ ID NO: 442616 - RNA, 22 nt, Human
gggcagccugcuuucugaucca

SEQ ID NO: 442617 - RNA, 22 nt, Human
gcagcccuuucugggcagggga

SEQ ID NO: 442618 - RNA, 22 nt, Human
ugcagaagauggucugagcacc

SEQ ID NO: 442619 - RNA, 22 nt, Human
aagaccuugucuaaacauguag

SEQ ID NO: 442620 - RNA, 22 nt, Human
aaguucaaaaauguaaucagug

SEQ ID NO: 442621 - RNA, 22 nt, Human
gagcugccaagauuacaaucag

SEQ ID NO: 442622 - RNA, 22 nt, Human
aagcugccagauucagucugcu

SEQ ID NO: 442623 - RNA, 22 nt, Human
aggcuggcuucccaagcguccu

SEQ ID NO: 442624 - RNA, 22 nt, Human
agacgagggcccccaggacagc

SEQ ID NO: 442625 - RNA, 22 nt, Human
uuuacagaugaggauacugagg

SEQ ID NO: 442626 - RNA, 22 nt, Human
cagaguaaaccugucaucaaga

SEQ ID NO: 442627 - RNA, 22 nt, Human
ucaagacaucacugugcauuuu

SEQ ID NO: 442628 - RNA, 23 nt, Human
aggagccaggugcagcccuugug

SEQ ID NO: 442629 - RNA, 22 nt, Human
gcagacagaugagggugcuggg

SEQ ID NO: 442630 - RNA, 22 nt, Human
gagagcugauagaugagcuacu

SEQ ID NO: 442631 - RNA, 22 nt, Human
ugucagugaguuaguugcaagu

SEQ ID NO: 442632 - RNA, 22 nt, Human
ugggccuggagcccuggagagu

SEQ ID NO: 442633 - RNA, 22 nt, Human
accauacuugaaauggauagga

SEQ ID NO: 442634 - RNA, 22 nt, Human
ugucccauggauaccaggcuau

SEQ ID NO: 442635 - RNA, 22 nt, Human
uauuggaugaagaaaggaagga

SEQ ID NO: 442636 - RNA, 22 nt, Human
aggcaaaucugagacauuuaaa

SEQ ID NO: 442637 - RNA, 22 nt, Human
ggagccagaggcugcugcugug

SEQ ID NO: 442638 - RNA, 22 nt, Human
ucuuugcagucugggcuuguuu

SEQ ID NO: 442639 - RNA, 22 nt, Human
aggacuaaggaacagcugauuc

SEQ ID NO: 442640 - RNA, 22 nt, Human
caaaagucuguccuuuaacuuc

SEQ ID NO: 442641 - RNA, 19 nt, Human
cuucuugauaagguucuuu

SEQ ID NO: 442642 - RNA, 22 nt, Human
guuccugaagggacuggugcag

SEQ ID NO: 442643 - RNA, 22 nt, Human
uugugagagccaaacauguaag

SEQ ID NO: 442644 - RNA, 22 nt, Human
gcuuugcuggaaucaacgaaug

SEQ ID NO: 442645 - RNA, 22 nt, Human
aauacuugucagaugaauaaga

SEQ ID NO: 442646 - RNA, 22 nt, Human
aggauuuggccauggcuucggg

SEQ ID NO: 442647 - RNA, 22 nt, Human
gcugugcagucuuuggugugcc

SEQ ID NO: 442648 - RNA, 22 nt, Human
ucaguguagcagacuuguagcc

SEQ ID NO: 442649 - RNA, 22 nt, Human
cccagcucuuuuagcggcaucu

SEQ ID NO: 442650 - RNA, 22 nt, Human
ugcauugaggggcucucuuccu

SEQ ID NO: 442651 - RNA, 22 nt, Human
agguuccucuuccucuggccug

SEQ ID NO: 442652 - RNA, 22 nt, Human
acaaucuuauuaguaguauaga

SEQ ID NO: 442653 - RNA, 22 nt, Human
cauugguugucauggcaggagg

SEQ ID NO: 442654 - RNA, 22 nt, Human
uugaaauauggauugaccuuga

SEQ ID NO: 442655 - RNA, 22 nt, Human
ccagcagcccacaggcgucccu

SEQ ID NO: 442656 - RNA, 22 nt, Human
ggcauccaaauaccaagaugua

SEQ ID NO: 442657 - RNA, 23 nt, Human
agaagcagcuucuggaguaucgg

SEQ ID NO: 442658 - RNA, 22 nt, Human
agacaggcagaggcugcagagg

SEQ ID NO: 442659 - RNA, 22 nt, Human
ugcagcaggagccaggccuggu

SEQ ID NO: 442660 - RNA, 22 nt, Human
gaggccugguuugcaugagaau

SEQ ID NO: 442661 - RNA, 22 nt, Human
ggcuagaugguauauaaggaug

SEQ ID NO: 442662 - RNA, 22 nt, Human
cuggcuggccggaggcaucccu

SEQ ID NO: 442663 - RNA, 22 nt, Human
ugcaauuucaaauaucagaaag

SEQ ID NO: 442664 - RNA, 22 nt, Human
gagccuggagcuggaacgaagc

SEQ ID NO: 442665 - RNA, 22 nt, Human
ugaggcacugggagagcacacu

SEQ ID NO: 442666 - RNA, 22 nt, Human
aggcuucugugagcucauacaa

SEQ ID NO: 442667 - RNA, 22 nt, Human
agagacaggaauggcauuaaga

SEQ ID NO: 442668 - RNA, 22 nt, Human
gccagggugagggcugagaggu

SEQ ID NO: 442669 - RNA, 22 nt, Human
ccccaacccugguuccguggcg

SEQ ID NO: 442670 - RNA, 22 nt, Human
aaacagagagauguauguggag

SEQ ID NO: 442671 - RNA, 21 nt, Human
ugcauauucuucugguggcug

SEQ ID NO: 442672 - RNA, 22 nt, Human
cagcaggucucagcagcuccuu

SEQ ID NO: 442673 - RNA, 22 nt, Human
cugagccacugcuuguucagug

SEQ ID NO: 442674 - RNA, 22 nt, Human
guuaugauggcaccacugcacu

SEQ ID NO: 442675 - RNA, 22 nt, Human
uggucaggauucucagcccuuc

SEQ ID NO: 442676 - RNA, 18 nt, Human
aggccugggaagcugagg

SEQ ID NO: 442677 - RNA, 22 nt, Human
agcucccagcuccuuugagaga

SEQ ID NO: 442678 - RNA, 22 nt, Human
acuggcuuugccucugccucuc

SEQ ID NO: 442679 - RNA, 22 nt, Human
cugcccuguagcuguucuagca

SEQ ID NO: 442680 - RNA, 22 nt, Human
ugagaaggguuggagaaauaau

SEQ ID NO: 442681 - RNA, 22 nt, Human
acagauggaauguguuauggga

SEQ ID NO: 442682 - RNA, 17 nt, Human
gcaggcacugcugccug

SEQ ID NO: 442683 - RNA, 22 nt, Human
gcucccaggaagagaagggcca

SEQ ID NO: 442684 - RNA, 22 nt, Human
cagcccagcagucuuagccugc

SEQ ID NO: 442685 - RNA, 22 nt, Human
agcaccugcacaguggaggaaa

SEQ ID NO: 442686 - RNA, 22 nt, Human
ucugggcucacgagucuggaca

SEQ ID NO: 442687 - RNA, 22 nt, Human
uauuuaauaaaacuauggcaug

SEQ ID NO: 442688 - RNA, 22 nt, Human
acagaauacuacagacugguua

SEQ ID NO: 442689 - RNA, 22 nt, Human
uuacaguaauguauuauuuaac

SEQ ID NO: 442690 - RNA, 22 nt, Human
ggccauggaccccgagcugacc

SEQ ID NO: 442691 - RNA, 22 nt, Human
cauuuguauguuccuccuuagg

SEQ ID NO: 442692 - RNA, 22 nt, Human
ugaggcagaaauuccuguuuuc

SEQ ID NO: 442693 - RNA, 19 nt, Human
acagcagguguggggauaa

SEQ ID NO: 442694 - RNA, 22 nt, Human
ucagccuugcuucuggacuggu

SEQ ID NO: 442695 - RNA, 22 nt, Human
ggcaguuucaucaggagaaaag

SEQ ID NO: 442696 - RNA, 22 nt, Human
cugagccauccauaccagcuua

SEQ ID NO: 442697 - RNA, 22 nt, Human
gaugcagggcuggcaggagcuu

SEQ ID NO: 442698 - RNA, 22 nt, Human
ggagggcaucaaucaggccugg

SEQ ID NO: 442699 - RNA, 22 nt, Human
uuuucuuauggugaagcacaaa

SEQ ID NO: 442700 - RNA, 22 nt, Human
uaauacaaggcaggaagcagua

SEQ ID NO: 442701 - RNA, 22 nt, Human
aagaacaugcuauaauuaucuu

SEQ ID NO: 442702 - RNA, 22 nt, Human
ccagcuggaacggcagcccagc

SEQ ID NO: 442703 - RNA, 22 nt, Human
auuuuugagcugugaacauagc

SEQ ID NO: 442704 - RNA, 22 nt, Human
acaauacaggcuucuggacuua

SEQ ID NO: 442705 - RNA, 22 nt, Human
uuguacaauggaugccagauga

SEQ ID NO: 442706 - RNA, 22 nt, Human
cccuccagcucaaagcaaccgg

SEQ ID NO: 442707 - RNA, 22 nt, Human
gggaaagagagguggacgcagg

SEQ ID NO: 442708 - RNA, 22 nt, Human
gagcaggcuugcagagaagggg

SEQ ID NO: 442709 - RNA, 22 nt, Human
acagcagguuacaguggcacag

SEQ ID NO: 442710 - RNA, 22 nt, Human
aggcagcauccagaggagaaug

SEQ ID NO: 442711 - RNA, 22 nt, Human
agaugaauccacacauggcaaa

SEQ ID NO: 442712 - RNA, 23 nt, Human
auguuauuauuagcagucuugcc

SEQ ID NO: 442713 - RNA, 19 nt, Human
gcucagagacaccuguugc

SEQ ID NO: 442714 - RNA, 22 nt, Human
ggcuccaaagggcagugugagg

SEQ ID NO: 442715 - RNA, 22 nt, Human
cacagaggagugcacacucucu

SEQ ID NO: 442716 - RNA, 22 nt, Human
ccugggaguggcacucacagca

SEQ ID NO: 442717 - RNA, 22 nt, Human
uggagcugaacuuugaggccag

SEQ ID NO: 442718 - RNA, 23 nt, Human
cuggggcuuucaaaucugggcag

SEQ ID NO: 442719 - RNA, 22 nt, Human
uucaugaaagacagcaacugug

SEQ ID NO: 442720 - RNA, 20 nt, Human
caauagaauguggagauaag

SEQ ID NO: 442721 - RNA, 22 nt, Human
aaguucaauggaaaagcuuuag

SEQ ID NO: 442722 - RNA, 22 nt, Human
agaaaugcauuagcacauauag

SEQ ID NO: 442723 - RNA, 22 nt, Human
gagcaacacauugaaugaggau

SEQ ID NO: 442724 - RNA, 22 nt, Human
aggcagcuuuguaguaaagcua

SEQ ID NO: 442725 - RNA, 22 nt, Human
cccagcagcuugcacagugcug

SEQ ID NO: 442726 - RNA, 22 nt, Human
ucagaggaacacuguuucaugc

SEQ ID NO: 442727 - RNA, 22 nt, Human
ugcaggcugugucauuuaguga

SEQ ID NO: 442728 - RNA, 22 nt, Human
auugcaaagaaauacaugcuua

SEQ ID NO: 442729 - RNA, 22 nt, Human
gaggcagcggcucacagagaaa

SEQ ID NO: 442730 - RNA, 22 nt, Human
aaaacaguuuaggcaucacagu

SEQ ID NO: 442731 - RNA, 22 nt, Human
aauacuuugccaaguucgaaga

SEQ ID NO: 442732 - RNA, 23 nt, Human
ggucccaguggagaggccucacc

SEQ ID NO: 442733 - RNA, 22 nt, Human
gucucugagcucugagcuggcu

SEQ ID NO: 442734 - RNA, 22 nt, Human
ggcugccaggagggaggccagu

SEQ ID NO: 442735 - RNA, 22 nt, Human
cacaggagguuaggaagugguc

SEQ ID NO: 442736 - RNA, 22 nt, Human
acugugugaaacaucaaugugu

SEQ ID NO: 442737 - RNA, 22 nt, Human
ugcacagcugccuccucucugc

SEQ ID NO: 442738 - RNA, 22 nt, Human
ccagcagagggucuuggccauu

SEQ ID NO: 442739 - RNA, 22 nt, Human
ccaccagcuucagcagccgcgg

SEQ ID NO: 442740 - RNA, 22 nt, Human
uugcagcuucuaccacuguuuc

SEQ ID NO: 442741 - RNA, 22 nt, Human
caaaugcagucccuuuguugcu

SEQ ID NO: 442742 - RNA, 22 nt, Human
aagacacacacauaugcugagu

SEQ ID NO: 442743 - RNA, 22 nt, Human
cuucaaaugugauuuuaauaac

SEQ ID NO: 442744 - RNA, 22 nt, Human
uauuauuauauuggaugagacu

SEQ ID NO: 442745 - RNA, 22 nt, Human
cagcagaggcacgucugugaau

SEQ ID NO: 442746 - RNA, 22 nt, Human
ggcccugucccuggccgucugu

SEQ ID NO: 442747 - RNA, 22 nt, Human
gcuguuucuuugaugauggaau

SEQ ID NO: 442748 - RNA, 22 nt, Human
cuuauugucuuacaguaauaga

SEQ ID NO: 442749 - RNA, 17 nt, Human
gagauggguggaucacc

SEQ ID NO: 442750 - RNA, 22 nt, Human
uuuaaugaauaauucaaaucug

SEQ ID NO: 442751 - RNA, 22 nt, Human
gcuggccacauugugccguccu

SEQ ID NO: 442752 - RNA, 22 nt, Human
cugggcucaguggcucauggcu

SEQ ID NO: 442753 - RNA, 22 nt, Human
gaggccagaaugagcugaaugc

SEQ ID NO: 442754 - RNA, 22 nt, Human
uugcaaaucagaaguauagauu

SEQ ID NO: 442755 - RNA, 22 nt, Human
acaugaaauucuagcugaaccc

SEQ ID NO: 442756 - RNA, 22 nt, Human
gacagcagacagccuggccccu

SEQ ID NO: 442757 - RNA, 22 nt, Human
ucagaccauccugcuguuagug

SEQ ID NO: 442758 - RNA, 22 nt, Human
agagcugugcuuugcaccacgu

SEQ ID NO: 442759 - RNA, 22 nt, Human
gccucccuguuuccugcuccaa

SEQ ID NO: 442760 - RNA, 22 nt, Human
ucugacccguggcucugccucc

SEQ ID NO: 442761 - RNA, 17 nt, Human
uuacacaggagagcucu

SEQ ID NO: 442762 - RNA, 22 nt, Human
ucacaggacccugaggguggcg

SEQ ID NO: 442763 - RNA, 23 nt, Human
ugauuuuaaaaaguaaguuauca

SEQ ID NO: 442764 - RNA, 23 nt, Human
gugcaugugucuuuacaguagca

SEQ ID NO: 442765 - RNA, 22 nt, Human
acagcagcuaaccccugggcca

SEQ ID NO: 442766 - RNA, 22 nt, Human
uggaaaaaacccagacucuaga

SEQ ID NO: 442767 - RNA, 21 nt, Human
gugugaguagcaugugucuca

SEQ ID NO: 442768 - RNA, 22 nt, Human
cagaggcucagauggcccuggc

SEQ ID NO: 442769 - RNA, 22 nt, Human
augccaaagcccaaguucauca

SEQ ID NO: 442770 - RNA, 22 nt, Human
auuucagauucagaaauguagg

SEQ ID NO: 442771 - RNA, 22 nt, Human
gcagcccucggguacucacgug

SEQ ID NO: 442772 - RNA, 22 nt, Human
ucauugaggaaagguaguggcu

SEQ ID NO: 442773 - RNA, 23 nt, Human
ugggauggauucaccagugugcu

SEQ ID NO: 442774 - RNA, 22 nt, Human
cagggcagaacauauagauagu

SEQ ID NO: 442775 - RNA, 22 nt, Human
aggaaagggguagguguggacg

SEQ ID NO: 442776 - RNA, 22 nt, Human
gauggacagccuggaaggaaag

SEQ ID NO: 442777 - RNA, 20 nt, Human
uuguuagaggaaugccauag

SEQ ID NO: 442778 - RNA, 23 nt, Human
aaacuacaacgccaggcacugag

SEQ ID NO: 442779 - RNA, 21 nt, Human
ucugucucuccacugcccugc

SEQ ID NO: 442780 - RNA, 23 nt, Human
acagaggcuuaaaugaguggcag

SEQ ID NO: 442781 - RNA, 17 nt, Human
guuugcaugguguuaac

SEQ ID NO: 442782 - RNA, 22 nt, Human
cccagggacucgggauucuagg

SEQ ID NO: 442783 - RNA, 22 nt, Human
gauuucaaagguucugcaugcc

SEQ ID NO: 442784 - RNA, 22 nt, Human
caugcagcggcguuugguuuaa

SEQ ID NO: 442785 - RNA, 22 nt, Human
uucauacucacuccaauaacug

SEQ ID NO: 442786 - RNA, 22 nt, Human
gcaggaugagugaguacauuua

SEQ ID NO: 442787 - RNA, 22 nt, Human
acaggccugugugcacacgagg

SEQ ID NO: 442788 - RNA, 22 nt, Human
aaacugcaauuacuuuugcagc

SEQ ID NO: 442789 - RNA, 21 nt, Human
agacagcuuuaaagacacagg

SEQ ID NO: 442790 - RNA, 22 nt, Human
ugucacuucaggaaugcaggga

SEQ ID NO: 442791 - RNA, 22 nt, Human
uuccaugaguagcaguauuucc

SEQ ID NO: 442792 - RNA, 22 nt, Human
uggcuccucccugugugugcgu

SEQ ID NO: 442793 - RNA, 22 nt, Human
gaggcagcucuucugaaugggg

SEQ ID NO: 442794 - RNA, 22 nt, Human
ucccucagcuugucuccaugca

SEQ ID NO: 442795 - RNA, 23 nt, Human
agagaaagggauaacacguugaa

SEQ ID NO: 442796 - RNA, 22 nt, Human
aguuuacaguucucaucgcaac

SEQ ID NO: 442797 - RNA, 22 nt, Human
ucuaagacacuguacuuucagu

SEQ ID NO: 442798 - RNA, 22 nt, Human
cugggcuggcgcauccgacacg

SEQ ID NO: 442799 - RNA, 22 nt, Human
gaggggcagaaugugaucaggg

SEQ ID NO: 442800 - RNA, 22 nt, Human
cacuauaucucuuucaucuuuu

SEQ ID NO: 442801 - RNA, 22 nt, Human
gggcuggcucugucuagaaagg

SEQ ID NO: 442802 - RNA, 22 nt, Human
cucagcuccagcccucagcagc

SEQ ID NO: 442803 - RNA, 22 nt, Human
ugguacaaucacagcucacugu

SEQ ID NO: 442804 - RNA, 22 nt, Human
agugcuaaugugcaauauagag

SEQ ID NO: 442805 - RNA, 22 nt, Human
ccucaggcugggcugccccugg

SEQ ID NO: 442806 - RNA, 22 nt, Human
gccagccuucuguggccugcaa

SEQ ID NO: 442807 - RNA, 22 nt, Human
uggcaggguacaccuuaacacc

SEQ ID NO: 442808 - RNA, 22 nt, Human
ggcaguuuuaacagagguagua

SEQ ID NO: 442809 - RNA, 22 nt, Human
uuauccaagcagaagcugcaca

SEQ ID NO: 442810 - RNA, 22 nt, Human
ucccagagcugauaagccuuua

SEQ ID NO: 442811 - RNA, 22 nt, Human
gagcagggagacaacucuggug

SEQ ID NO: 442812 - RNA, 22 nt, Human
ccugacccuuuccaguguuggc

SEQ ID NO: 442813 - RNA, 22 nt, Human
uggcacagggcuuggucgcuca

SEQ ID NO: 442814 - RNA, 22 nt, Human
ucugggcuuuguaaugggaggu

SEQ ID NO: 442815 - RNA, 22 nt, Human
cccagaggugacaucccauucu

SEQ ID NO: 442816 - RNA, 22 nt, Human
ucaucuaagagucuuacauuua

SEQ ID NO: 442817 - RNA, 22 nt, Human
aggcuggagguuuguugcggcu

SEQ ID NO: 442818 - RNA, 22 nt, Human
cgcugggggaacuucagccaau

SEQ ID NO: 442819 - RNA, 21 nt, Human
gagcccaggcaucucauuaau

SEQ ID NO: 442820 - RNA, 22 nt, Human
ugagcagagacgggggccucca

SEQ ID NO: 442821 - RNA, 22 nt, Human
agcauggggcaaugcaugugcu

SEQ ID NO: 442822 - RNA, 22 nt, Human
ggcaaaaaccacaauuacuuuu

SEQ ID NO: 442823 - RNA, 22 nt, Human
uuguauuugauugucauaucgu

SEQ ID NO: 442824 - RNA, 22 nt, Human
cauggcagcuuugggaggagga

SEQ ID NO: 442825 - RNA, 22 nt, Human
aauucaaucuguagauugugau

SEQ ID NO: 442826 - RNA, 22 nt, Human
gcuguuucuccaggucaggaag

SEQ ID NO: 442827 - RNA, 20 nt, Human
agucacauugagcuuuugga

SEQ ID NO: 442828 - RNA, 18 nt, Human
gcagagugcgucucugug

SEQ ID NO: 442829 - RNA, 21 nt, Human
gggccuggcugcgcaggacgg

SEQ ID NO: 442830 - RNA, 22 nt, Human
ggcccugggcagaggagugggc

SEQ ID NO: 442831 - RNA, 22 nt, Human
uccaggcccacucagcugaaau

SEQ ID NO: 442832 - RNA, 22 nt, Human
gcccacagguccuaccucuuuc

SEQ ID NO: 442833 - RNA, 22 nt, Human
caggccuggggcuggcuuccag

SEQ ID NO: 442834 - RNA, 22 nt, Human
cugaggcuuggaggggucuggu

SEQ ID NO: 442835 - RNA, 22 nt, Human
cuuauucagaaggagaaaugga

SEQ ID NO: 442836 - RNA, 23 nt, Human
agcacaaaguguuuuccuuguag

SEQ ID NO: 442837 - RNA, 22 nt, Human
aaguuaaggcacaugcuuugga

SEQ ID NO: 442838 - RNA, 22 nt, Human
cuuugcagagggggugggagcu

SEQ ID NO: 442839 - RNA, 22 nt, Human
guggccagaggucccauguguc

SEQ ID NO: 442840 - RNA, 19 nt, Human
agcuccuguucagcagcuc

SEQ ID NO: 442841 - RNA, 22 nt, Human
ccaggagacccagggaaggagc

SEQ ID NO: 442842 - RNA, 22 nt, Human
auuucaagggguccuugcuugg

SEQ ID NO: 442843 - RNA, 22 nt, Human
cuggucccauccuggcuucaug

SEQ ID NO: 442844 - RNA, 22 nt, Human
ugaugagggagauuugagccca

SEQ ID NO: 442845 - RNA, 22 nt, Human
uucuuaagcguaugauaaugaa

SEQ ID NO: 442846 - RNA, 22 nt, Human
cugagcugggaguagagacucu

SEQ ID NO: 442847 - RNA, 22 nt, Human
uagcaauagaaacauauaaagu

SEQ ID NO: 442848 - RNA, 22 nt, Human
ucagcugcucuguugagcugaa

SEQ ID NO: 442849 - RNA, 22 nt, Human
cuggggucagggaucagagagc

SEQ ID NO: 442850 - RNA, 23 nt, Human
aacacaaagcugauuccaguggc

SEQ ID NO: 442851 - RNA, 22 nt, Human
gucuccuggcugcagcuaagac

SEQ ID NO: 442852 - RNA, 22 nt, Human
cagagcccauccuauacucucc

SEQ ID NO: 442853 - RNA, 19 nt, Human
agaggcugucaccuguagc

SEQ ID NO: 442854 - RNA, 22 nt, Human
ugagcccagagcccuuguaggg

SEQ ID NO: 442855 - RNA, 22 nt, Human
aggggcugggacagagccaagc

SEQ ID NO: 442856 - RNA, 20 nt, Human
ccucucugaagaggucaucu

SEQ ID NO: 442857 - RNA, 22 nt, Human
ccagcagagucuaggaaggagg

SEQ ID NO: 442858 - RNA, 22 nt, Human
uaauuuuuccacguacacuggg

SEQ ID NO: 442859 - RNA, 22 nt, Human
gggacacagguaucucaaauga

SEQ ID NO: 442860 - RNA, 22 nt, Human
agcugguggagaagcagaccuc

SEQ ID NO: 442861 - RNA, 22 nt, Human
auguacaaaauguuuugaaaug

SEQ ID NO: 442862 - RNA, 22 nt, Human
agagaaggcauagaacuugagu

SEQ ID NO: 442863 - RNA, 22 nt, Human
cgcagcagccccgugguaggug

SEQ ID NO: 442864 - RNA, 22 nt, Human
ugagacagcagauuagcaauga

SEQ ID NO: 442865 - RNA, 22 nt, Human
aggucagcugugugugcaugag

SEQ ID NO: 442866 - RNA, 22 nt, Human
uuccagcccgcgacuuguucag

SEQ ID NO: 442867 - RNA, 21 nt, Human
gcugcagggcccagggcaccc

SEQ ID NO: 442868 - RNA, 22 nt, Human
cagcugcccaagccccagaugu

SEQ ID NO: 442869 - RNA, 22 nt, Human
gcaaauucaacagcacauucuc

SEQ ID NO: 442870 - RNA, 22 nt, Human
agccacagggggugagggacaa

SEQ ID NO: 442871 - RNA, 22 nt, Human
uacaugaagaugaauguauggc

SEQ ID NO: 442872 - RNA, 22 nt, Human
gcaggcagaucaccugucagga

SEQ ID NO: 442873 - RNA, 22 nt, Human
cagaggaaggcucugggaaugu

SEQ ID NO: 442874 - RNA, 22 nt, Human
aaggcugguuccaucccuggug

SEQ ID NO: 442875 - RNA, 22 nt, Human
acuguguguuugucuagcacag

SEQ ID NO: 442876 - RNA, 20 nt, Human
ucucccaggcucagggaaga

SEQ ID NO: 442877 - RNA, 21 nt, Human
ccucaaagaugaugggguuuc

SEQ ID NO: 442878 - RNA, 22 nt, Human
aagcucugggguacacaucugc

SEQ ID NO: 442879 - RNA, 22 nt, Human
accugccucuaagcagcaggug

SEQ ID NO: 442880 - RNA, 22 nt, Human
ccacaguacaggaaaucuuguu

SEQ ID NO: 442881 - RNA, 22 nt, Human
uuuguugggagaaacauuauuu

SEQ ID NO: 442882 - RNA, 22 nt, Human
caggccucaccagcggagcugc

SEQ ID NO: 442883 - RNA, 22 nt, Human
gcagagcagagccugcauuggc

SEQ ID NO: 442884 - RNA, 22 nt, Human
aggaacagaagagcaaugcagg

SEQ ID NO: 442885 - RNA, 22 nt, Human
acacaagaaguuaaugggcaaa

SEQ ID NO: 442886 - RNA, 22 nt, Human
gcuggcccagggucaccuagga

SEQ ID NO: 442887 - RNA, 22 nt, Human
uuccucuguaugcuuugcugcu

SEQ ID NO: 442888 - RNA, 22 nt, Human
cacuggugacuucugagcugga

SEQ ID NO: 442889 - RNA, 22 nt, Human
aggcaagcauugggaacagggc

SEQ ID NO: 442890 - RNA, 22 nt, Human
gcagggcuguucaggagggugg

SEQ ID NO: 442891 - RNA, 22 nt, Human
aaguccuggauauuaaauugau

SEQ ID NO: 442892 - RNA, 22 nt, Human
ucccuggguuaccuuucaaggu

SEQ ID NO: 442893 - RNA, 22 nt, Human
ucaggaagggugguccacaggg

SEQ ID NO: 442894 - RNA, 22 nt, Human
ugcauauuuuauaaagauggaa

SEQ ID NO: 442895 - RNA, 22 nt, Human
uuagcuuuuaagugugcuacau

SEQ ID NO: 442896 - RNA, 22 nt, Human
augauauuugcaaugugcuugc

SEQ ID NO: 442897 - RNA, 22 nt, Human
cagcuguuaccaaucuuagggc

SEQ ID NO: 442898 - RNA, 19 nt, Human
aacaccagagucaggaguc

SEQ ID NO: 442899 - RNA, 22 nt, Human
ucacaauggcauaguauaaaau

SEQ ID NO: 442900 - RNA, 22 nt, Human
auucacuggcagacagaacuca

SEQ ID NO: 442901 - RNA, 22 nt, Human
cauguacagccaggguugagaa

SEQ ID NO: 442902 - RNA, 22 nt, Human
aguacuuugcacuuugcucaga

SEQ ID NO: 442903 - RNA, 22 nt, Human
agagaugucgccuugcccaggg

SEQ ID NO: 442904 - RNA, 22 nt, Human
ccuuagcaacacuuagcaacug

SEQ ID NO: 442905 - RNA, 22 nt, Human
ugcauuauacuuuuagaaauuu

SEQ ID NO: 442906 - RNA, 21 nt, Human
ccugggagaauuggguguggc

SEQ ID NO: 442907 - RNA, 22 nt, Human
ggccuuggggaggauggugucc

SEQ ID NO: 442908 - RNA, 22 nt, Human
gugagcaggauuucauggugua

SEQ ID NO: 442909 - RNA, 22 nt, Human
cauuucaagcauugacuucuau

SEQ ID NO: 442910 - RNA, 22 nt, Human
gacagcaguccuggaguuccca

SEQ ID NO: 442911 - RNA, 20 nt, Human
uacagaaacaggacuuuugg

SEQ ID NO: 442912 - RNA, 22 nt, Human
gccuggucucuuucaugucagu

SEQ ID NO: 442913 - RNA, 22 nt, Human
ggccugucucacccccgggugc

SEQ ID NO: 442914 - RNA, 22 nt, Human
ggcaccuguguaagaucuggaa

SEQ ID NO: 442915 - RNA, 22 nt, Human
uucugggcaggacuggggaccc

SEQ ID NO: 442916 - RNA, 22 nt, Human
guucaaauugagaugguauaaa

SEQ ID NO: 442917 - RNA, 22 nt, Human
acagcagcuuccugacuguacu

SEQ ID NO: 442918 - RNA, 19 nt, Human
gguuccucacgcuaagggc

SEQ ID NO: 442919 - RNA, 22 nt, Human
uauacaauggcugaaucaucca

SEQ ID NO: 442920 - RNA, 22 nt, Human
agaggcuguuacacucccagau

SEQ ID NO: 442921 - RNA, 22 nt, Human
agaggccaccuucucuugagaa

SEQ ID NO: 442922 - RNA, 22 nt, Human
acagagguaggacaugagauau

SEQ ID NO: 442923 - RNA, 22 nt, Human
acaggaagaaagugcaguagau

SEQ ID NO: 442924 - RNA, 22 nt, Human
auucucuggcuaaaaccugaag

SEQ ID NO: 442925 - RNA, 22 nt, Human
ucuuauacagaagauguuuaau

SEQ ID NO: 442926 - RNA, 22 nt, Human
ucucugggaauucacaagcccu

SEQ ID NO: 442927 - RNA, 22 nt, Human
gcacaauaauucuuguuuugcu

SEQ ID NO: 442928 - RNA, 22 nt, Human
cuaggaaagacacagagaguuu

SEQ ID NO: 442929 - RNA, 21 nt, Human
acagaugggaugagcacacug

SEQ ID NO: 442930 - RNA, 22 nt, Human
cugcagcugggccagggccacc

SEQ ID NO: 442931 - RNA, 21 nt, Human
uagcaaauggagaguaagaga

SEQ ID NO: 442932 - RNA, 22 nt, Human
agcuccuggggguuccaagcag

SEQ ID NO: 442933 - RNA, 22 nt, Human
uguaucuuagugugaaaauauu

SEQ ID NO: 442934 - RNA, 22 nt, Human
uuccccaggcuggagugcagug

SEQ ID NO: 442935 - RNA, 22 nt, Human
gccgagcacagugcagcugccu

SEQ ID NO: 442936 - RNA, 22 nt, Human
agcuccuggcuuuccucucacc

SEQ ID NO: 442937 - RNA, 22 nt, Human
gacauucagguguucaaugcca

SEQ ID NO: 442938 - RNA, 22 nt, Human
agaggcugggaaggguccccgg

SEQ ID NO: 442939 - RNA, 15 nt, Human
gcuaaggcauuggua

SEQ ID NO: 442940 - RNA, 22 nt, Human
ccaggcuggaguguagucgcau

SEQ ID NO: 442941 - RNA, 22 nt, Human
gggccuggcaugcagccccguu

SEQ ID NO: 442942 - RNA, 22 nt, Human
gccuugggauucuuggaugcuc

SEQ ID NO: 442943 - RNA, 22 nt, Human
guggccaggacauugccaggca

SEQ ID NO: 442944 - RNA, 18 nt, Human
ucaggcuggaaguuugcc

SEQ ID NO: 442945 - RNA, 22 nt, Human
ucagcuggauguggaagugcua

SEQ ID NO: 442946 - RNA, 21 nt, Human
uuguuucccagagcucgcucc

SEQ ID NO: 442947 - RNA, 22 nt, Human
ugccaccuaguggucuuuaguc

SEQ ID NO: 442948 - RNA, 22 nt, Human
uugcagcuggugguggccgugu

SEQ ID NO: 442949 - RNA, 22 nt, Human
uggccuguggcuuaaggucugu

SEQ ID NO: 442950 - RNA, 22 nt, Human
ccaggcuguaagagugauguug

SEQ ID NO: 442951 - RNA, 22 nt, Human
cugaggcucaagggcagguggg

SEQ ID NO: 442952 - RNA, 22 nt, Human
gugcagugacccuggagagcug

SEQ ID NO: 442953 - RNA, 22 nt, Human
agacugguuuuuaacuucaccu

SEQ ID NO: 442954 - RNA, 22 nt, Human
guguguguacucuguauauaaa

SEQ ID NO: 442955 - RNA, 17 nt, Human
cccugccaccaggaagc

SEQ ID NO: 442956 - RNA, 18 nt, Human
ccugaagccugugucuuu

SEQ ID NO: 442957 - RNA, 22 nt, Human
cuuagcuagaggcaauuauguu

SEQ ID NO: 442958 - RNA, 22 nt, Human
augcccugaggaaugucacgcu

SEQ ID NO: 442959 - RNA, 22 nt, Human
ucagaggaccuuacugagaacc

SEQ ID NO: 442960 - RNA, 22 nt, Human
ggcucaggcuggagugcagugg

SEQ ID NO: 442961 - RNA, 22 nt, Human
uuccuuccagcuugugacaguc

SEQ ID NO: 442962 - RNA, 22 nt, Human
ccugggagccaagccucugugu

SEQ ID NO: 442963 - RNA, 22 nt, Human
gcaagcaaaaugggagauuccc

SEQ ID NO: 442964 - RNA, 22 nt, Human
gcccuccuuugcuucuccuagu

SEQ ID NO: 442965 - RNA, 20 nt, Human
ccagcauguacacaugugga

SEQ ID NO: 442966 - RNA, 22 nt, Human
gcugagagaucaaggcaggauu

SEQ ID NO: 442967 - RNA, 22 nt, Human
uugugugucuucuucacugccc

SEQ ID NO: 442968 - RNA, 21 nt, Human
aguuuucugaguuauaaaaua

SEQ ID NO: 442969 - RNA, 21 nt, Human
cacuccacuuagaacaggguu

SEQ ID NO: 442970 - RNA, 22 nt, Human
auuuaaaugcuuaagaggguuu

SEQ ID NO: 442971 - RNA, 22 nt, Human
auggacagugugaagcagauag

SEQ ID NO: 442972 - RNA, 22 nt, Human
auaaucugagcuauuucaugag

SEQ ID NO: 442973 - RNA, 22 nt, Human
agauuuauguggucacacucag

SEQ ID NO: 442974 - RNA, 22 nt, Human
gccacagggcgagcggaggcca

SEQ ID NO: 442975 - RNA, 22 nt, Human
auugcaaaugguuuggucaucu

SEQ ID NO: 442976 - RNA, 23 nt, Human
ucaugcagccuggaaccucccag

SEQ ID NO: 442977 - RNA, 22 nt, Human
cagcugggagcuccauuagaua

SEQ ID NO: 442978 - RNA, 22 nt, Human
ucuggcagugagcaacuugaca

SEQ ID NO: 442979 - RNA, 22 nt, Human
gacacaaaguuugucagaaauu

SEQ ID NO: 442980 - RNA, 22 nt, Human
cugaggcaggauggccuggcug

SEQ ID NO: 442981 - RNA, 22 nt, Human
cagcccugcugguuuugggcaa

SEQ ID NO: 442982 - RNA, 22 nt, Human
ccuuugcauuauccuugauuga

SEQ ID NO: 442983 - RNA, 22 nt, Human
aaaguuugaaugauauauuagu

SEQ ID NO: 442984 - RNA, 19 nt, Human
ugagaaggcaguggggagc

SEQ ID NO: 442985 - RNA, 20 nt, Human
gccuggaggcaaugggaaga

SEQ ID NO: 442986 - RNA, 22 nt, Human
ggcuagggaaaaugauuggaua

SEQ ID NO: 442987 - RNA, 22 nt, Human
aggcucugugaugugccaggca

SEQ ID NO: 442988 - RNA, 22 nt, Human
aagcccugccacccauucacug

SEQ ID NO: 442989 - RNA, 22 nt, Human
aggugccagaugcacagcugaa

SEQ ID NO: 442990 - RNA, 20 nt, Human
cccuccagcaaccaggacuu

SEQ ID NO: 442991 - RNA, 22 nt, Human
ggaaacagcucuuuggggcugu

SEQ ID NO: 442992 - RNA, 22 nt, Human
ucuuuauuuaagucuguuguaa

SEQ ID NO: 442993 - RNA, 22 nt, Human
uuaauuaagagauacugcagua

SEQ ID NO: 442994 - RNA, 22 nt, Human
auuuuacauaaggaagguuuaa

SEQ ID NO: 442995 - RNA, 22 nt, Human
ggacacagauaaucacacagau

SEQ ID NO: 442996 - RNA, 22 nt, Human
cagcuggcaaguggagcagggu

SEQ ID NO: 442997 - RNA, 22 nt, Human
uuguguccugauuugacacaau

SEQ ID NO: 442998 - RNA, 22 nt, Human
uaaggcagaaauaugagcaggg

SEQ ID NO: 442999 - RNA, 19 nt, Human
gccaggaaagaaucaggcg

SEQ ID NO: 443000 - RNA, 22 nt, Human
cuggagccacugggucuuguau

SEQ ID NO: 443001 - RNA, 22 nt, Human
gcugagguggagauugcaguga

SEQ ID NO: 443002 - RNA, 22 nt, Human
gaguccugauccuuagcucucc

SEQ ID NO: 443003 - RNA, 22 nt, Human
ggccuuggugcucuguguugca

SEQ ID NO: 443004 - RNA, 22 nt, Human
acaaauauuuacugaauccacu

SEQ ID NO: 443005 - RNA, 22 nt, Human
agcuagagcugagaagcacuug

SEQ ID NO: 443006 - RNA, 22 nt, Human
gggcuccuggcagucaugcuca

SEQ ID NO: 443007 - RNA, 22 nt, Human
gcugcccauuccacuggauggu

SEQ ID NO: 443008 - RNA, 22 nt, Human
aggcuguggcccuggucuagca

SEQ ID NO: 443009 - RNA, 22 nt, Human
agcugccacugagggugcacag

SEQ ID NO: 443010 - RNA, 22 nt, Human
ucacagagcacguaucaugccu

SEQ ID NO: 443011 - RNA, 23 nt, Human
ugcuggagacaagugugagaagg

SEQ ID NO: 443012 - RNA, 22 nt, Human
uucuggaacauagcaagaaguu

SEQ ID NO: 443013 - RNA, 22 nt, Human
gcugucucauacaaggcccugc

SEQ ID NO: 443014 - RNA, 22 nt, Human
ugaagcuagaauguccauauuu

SEQ ID NO: 443015 - RNA, 22 nt, Human
uugauuaaacaggcauauucaa

SEQ ID NO: 443016 - RNA, 22 nt, Human
gccagugccucgccgcgcuccu

SEQ ID NO: 443017 - RNA, 22 nt, Human
cagugucucaguuucacuugaa

SEQ ID NO: 443018 - RNA, 22 nt, Human
ugauuauauuaacuauguuccu

SEQ ID NO: 443019 - RNA, 19 nt, Human
cagaggccagaagcacagg

SEQ ID NO: 443020 - RNA, 22 nt, Human
aguggacccggaacagaggccc

SEQ ID NO: 443021 - RNA, 22 nt, Human
agcaggaccaagaaggggaaaa

SEQ ID NO: 443022 - RNA, 22 nt, Human
uuguacaaaggauuuggaagag

SEQ ID NO: 443023 - RNA, 22 nt, Human
gcagucagguuaaggccuuccc

SEQ ID NO: 443024 - RNA, 22 nt, Human
ucccucagagggcaagcgcaga

SEQ ID NO: 443025 - RNA, 22 nt, Human
ccaaauucuguguucaaacuca

SEQ ID NO: 443026 - RNA, 22 nt, Human
gguggccucgguggugcacagg

SEQ ID NO: 443027 - RNA, 22 nt, Human
ugcugccacugguagucucauu

SEQ ID NO: 443028 - RNA, 22 nt, Human
gagaaggcuucuuuuccucuga

SEQ ID NO: 443029 - RNA, 22 nt, Human
aagagcuggaagugaagauaac

SEQ ID NO: 443030 - RNA, 22 nt, Human
cagacaugagauacagcugcua

SEQ ID NO: 443031 - RNA, 19 nt, Human
agcuccugggcucugggcc

SEQ ID NO: 443032 - RNA, 22 nt, Human
uaucauuuguuauuauuagugg

SEQ ID NO: 443033 - RNA, 22 nt, Human
gagucccaugaugauagccaca

SEQ ID NO: 443034 - RNA, 23 nt, Human
uccggcaacuucacuccucccgc

SEQ ID NO: 443035 - RNA, 22 nt, Human
gaggcagcugaagcuucaaaga

SEQ ID NO: 443036 - RNA, 22 nt, Human
aggcugaggcagguggaucacc

SEQ ID NO: 443037 - RNA, 22 nt, Human
aguuucaguguugacagauggu

SEQ ID NO: 443038 - RNA, 22 nt, Human
uccuggaggagauccaaucuga

SEQ ID NO: 443039 - RNA, 19 nt, Human
agcauuuggaauucuacac

SEQ ID NO: 443040 - RNA, 22 nt, Human
gggcacaggaauuugggaugug

SEQ ID NO: 443041 - RNA, 22 nt, Human
aucuucuacuuugccaaucagg

SEQ ID NO: 443042 - RNA, 22 nt, Human
gcagagccugugucugagcaaa

SEQ ID NO: 443043 - RNA, 21 nt, Human
uccucagggccccagagcacu

SEQ ID NO: 443044 - RNA, 22 nt, Human
aaggcaauugcaguuuuugcca

SEQ ID NO: 443045 - RNA, 22 nt, Human
gaccacuggcgcugcgagaccc

SEQ ID NO: 443046 - RNA, 22 nt, Human
cuggcagguggagguugcagug

SEQ ID NO: 443047 - RNA, 22 nt, Human
gggcagguggagggcccagcca

SEQ ID NO: 443048 - RNA, 22 nt, Human
gugucacaagagcccaggaaac

SEQ ID NO: 443049 - RNA, 19 nt, Human
ggagaggcuggagggaugc

SEQ ID NO: 443050 - RNA, 22 nt, Human
gagggcugcaaugagacagaga

SEQ ID NO: 443051 - RNA, 22 nt, Human
gcaccugggacccagaggcacc

SEQ ID NO: 443052 - RNA, 22 nt, Human
cugcacaguggacagugaagau

SEQ ID NO: 443053 - RNA, 22 nt, Human
cuuuuguuaggagaaaacauca

SEQ ID NO: 443054 - RNA, 22 nt, Human
uucagcaccuggaauagcaccu

SEQ ID NO: 443055 - RNA, 22 nt, Human
acaaaaguguaggaauuccuua

SEQ ID NO: 443056 - RNA, 22 nt, Human
ucaggcaggcucagaggaaaac

SEQ ID NO: 443057 - RNA, 22 nt, Human
aagcauucugcauuuucaaaga

SEQ ID NO: 443058 - RNA, 22 nt, Human
agcagacaacccagaugaccca

SEQ ID NO: 443059 - RNA, 19 nt, Human
cuccuucccugguuucugu

SEQ ID NO: 443060 - RNA, 22 nt, Human
uucagagguaagggucucagaa

SEQ ID NO: 443061 - RNA, 22 nt, Human
aagcaggcaugggaggccaucc

SEQ ID NO: 443062 - RNA, 22 nt, Human
cccaggcagugcugaucccuca

SEQ ID NO: 443063 - RNA, 22 nt, Human
ucagaggagccaaaguucugag

SEQ ID NO: 443064 - RNA, 22 nt, Human
ugcugccagccaggccauggag

SEQ ID NO: 443065 - RNA, 22 nt, Human
agcaggcuuaugguugaaggga

SEQ ID NO: 443066 - RNA, 18 nt, Human
gaugggagcaagagaaga

SEQ ID NO: 443067 - RNA, 22 nt, Human
uggaauaugcaauugcauuuca

SEQ ID NO: 443068 - RNA, 22 nt, Human
acaggcagguccugucccagcu

SEQ ID NO: 443069 - RNA, 22 nt, Human
agcacuguggggaacucacaga

SEQ ID NO: 443070 - RNA, 22 nt, Human
cagcugccuaugaccuagccuc

SEQ ID NO: 443071 - RNA, 22 nt, Human
agcagcuggaacauaugaagaa

SEQ ID NO: 443072 - RNA, 22 nt, Human
uucuguuagaauuuugaaaaua

SEQ ID NO: 443073 - RNA, 22 nt, Human
uggcucagcgguggcagcagac

SEQ ID NO: 443074 - RNA, 22 nt, Human
uugcuuuaaugagauuuugcca

SEQ ID NO: 443075 - RNA, 22 nt, Human
uucaaacuguguaauuuauaaa

SEQ ID NO: 443076 - RNA, 22 nt, Human
aacacuuuccugccuuucugau

SEQ ID NO: 443077 - RNA, 22 nt, Human
uauuuuggcugauucaucaugu

SEQ ID NO: 443078 - RNA, 22 nt, Human
agccagaggucaugagcacagg

SEQ ID NO: 443079 - RNA, 18 nt, Human
uggcuccugccuccugca

SEQ ID NO: 443080 - RNA, 22 nt, Human
gcuuccagacgaucauguaaga

SEQ ID NO: 443081 - RNA, 22 nt, Human
gugcugagugcagagugcagag

SEQ ID NO: 443082 - RNA, 22 nt, Human
auugcuuuagaaagaaaaauau

SEQ ID NO: 443083 - RNA, 22 nt, Human
gccuggaguggacuuggccccu

SEQ ID NO: 443084 - RNA, 22 nt, Human
caguauaugcucuuucaucaaa

SEQ ID NO: 443085 - RNA, 22 nt, Human
uucagaaugugaccuuauuugg

SEQ ID NO: 443086 - RNA, 22 nt, Human
cugggcacauuuugacuagugu

SEQ ID NO: 443087 - RNA, 22 nt, Human
gcagggugaaggucacauagaa

SEQ ID NO: 443088 - RNA, 22 nt, Human
gugcaaaaguaauggcaguuuu

SEQ ID NO: 443089 - RNA, 22 nt, Human
aaauuucuaagucaagaagaac

SEQ ID NO: 443090 - RNA, 22 nt, Human
uaaggguucagaaugcaguggu

SEQ ID NO: 443091 - RNA, 22 nt, Human
ggagcuggagaguacagaguuu

SEQ ID NO: 443092 - RNA, 22 nt, Human
augcagcaguuuacaaagcaau

SEQ ID NO: 443093 - RNA, 22 nt, Human
uccuucccccucaagagaacuu

SEQ ID NO: 443094 - RNA, 22 nt, Human
gauuuacagguuagguccugua

SEQ ID NO: 443095 - RNA, 22 nt, Human
gcagauggacuguaugaccuga

SEQ ID NO: 443096 - RNA, 22 nt, Human
cucaccacagagccuguccagc

SEQ ID NO: 443097 - RNA, 22 nt, Human
cuuuggcuaacaaaucagcuug

SEQ ID NO: 443098 - RNA, 22 nt, Human
uagcacaaagagucuuucagag

SEQ ID NO: 443099 - RNA, 22 nt, Human
ucugagccaauuucugugucca

SEQ ID NO: 443100 - RNA, 22 nt, Human
cuuucauucuuagauauuagug

SEQ ID NO: 443101 - RNA, 22 nt, Human
ugggccugaguuugggaacugg

SEQ ID NO: 443102 - RNA, 22 nt, Human
ugaauauggcaacucuuguaac

SEQ ID NO: 443103 - RNA, 22 nt, Human
gcaggccuccccugcuggagcu

SEQ ID NO: 443104 - RNA, 22 nt, Human
ccugggucacucaggcaggcgg

SEQ ID NO: 443105 - RNA, 22 nt, Human
cacagcaauagcuaacugauac

SEQ ID NO: 443106 - RNA, 22 nt, Human
auaaauuuucuugcuguacuua

SEQ ID NO: 443107 - RNA, 22 nt, Human
agcuccagaagccugcaaggua

SEQ ID NO: 443108 - RNA, 22 nt, Human
gcagcuguagaggggagaaaga

SEQ ID NO: 443109 - RNA, 22 nt, Human
ccaaacugugucgucugcauag

SEQ ID NO: 443110 - RNA, 22 nt, Human
agaggaugauuuuaaggacacu

SEQ ID NO: 443111 - RNA, 22 nt, Human
ccaggaggcggaagguacagug

SEQ ID NO: 443112 - RNA, 22 nt, Human
uguauuuuuagaccuuuagacc

SEQ ID NO: 443113 - RNA, 22 nt, Human
acaauucaagcaagagagacaa

SEQ ID NO: 443114 - RNA, 22 nt, Human
cuagaucugcccacugaaguuc

SEQ ID NO: 443115 - RNA, 22 nt, Human
cugggcugagccugggcugugu

SEQ ID NO: 443116 - RNA, 22 nt, Human
ucugggugaugaaaugcacugu

SEQ ID NO: 443117 - RNA, 22 nt, Human
uuagaaaugucacagaucugau

SEQ ID NO: 443118 - RNA, 22 nt, Human
uuuauuguuguuagucauaagu

SEQ ID NO: 443119 - RNA, 22 nt, Human
ccaggcugcucacaagcugccc

SEQ ID NO: 443120 - RNA, 22 nt, Human
uugugaaauguuucaaaauagu

SEQ ID NO: 443121 - RNA, 22 nt, Human
ugagacaguaucgccccaaggc

SEQ ID NO: 443122 - RNA, 22 nt, Human
ugagccagccuugcagcugugc

SEQ ID NO: 443123 - RNA, 22 nt, Human
aaguugaaugcguacgugacau

SEQ ID NO: 443124 - RNA, 22 nt, Human
aagcacagauaaaacaggauuc

SEQ ID NO: 443125 - RNA, 22 nt, Human
uguggagcucagaaguagcagu

SEQ ID NO: 443126 - RNA, 22 nt, Human
uagcugccagaccauucuuacu

SEQ ID NO: 443127 - RNA, 22 nt, Human
agcuggugcugaagcucuugag

SEQ ID NO: 443128 - RNA, 22 nt, Human
ggccccaguucacuccuggccg

SEQ ID NO: 443129 - RNA, 22 nt, Human
ucagaagagcuggugcugccug

SEQ ID NO: 443130 - RNA, 18 nt, Human
uaaauugcuucaccugag

SEQ ID NO: 443131 - RNA, 22 nt, Human
uucacauuguuuuaaugugaau

SEQ ID NO: 443132 - RNA, 22 nt, Human
ccaggccuccugugaguggacc

SEQ ID NO: 443133 - RNA, 22 nt, Human
agagcagguggcaacucuggga

SEQ ID NO: 443134 - RNA, 22 nt, Human
guugaauaucguguucuuguuu

SEQ ID NO: 443135 - RNA, 22 nt, Human
cugcauaugagaauaggagaaa

SEQ ID NO: 443136 - RNA, 22 nt, Human
cuggguggcgucuggggccagu

SEQ ID NO: 443137 - RNA, 22 nt, Human
ggagugaaucacuagaugcaga

SEQ ID NO: 443138 - RNA, 22 nt, Human
agggcagcagcggcccaggccu

SEQ ID NO: 443139 - RNA, 21 nt, Human
aggcaggauucaaacacagag

SEQ ID NO: 443140 - RNA, 22 nt, Human
gcuggaggcuggagugcagugg

SEQ ID NO: 443141 - RNA, 22 nt, Human
ccugggugaaaucucuccugca

SEQ ID NO: 443142 - RNA, 22 nt, Human
cagggacagcacuaaacucuug

SEQ ID NO: 443143 - RNA, 22 nt, Human
acaggccucaaauagggugccu

SEQ ID NO: 443144 - RNA, 22 nt, Human
cuuugcaaagucuuuggcaaga

SEQ ID NO: 443145 - RNA, 17 nt, Human
gggcagggacuccuggg

SEQ ID NO: 443146 - RNA, 22 nt, Human
ccucucccgggugccgcugggc

SEQ ID NO: 443147 - RNA, 22 nt, Human
cacuuugcaggguggugggagg

SEQ ID NO: 443148 - RNA, 22 nt, Human
ugugaggccuagacagccuggg

SEQ ID NO: 443149 - RNA, 22 nt, Human
ugcuggagaagcuccugggacu

SEQ ID NO: 443150 - RNA, 22 nt, Human
gacccugccaugagugacaggg

SEQ ID NO: 443151 - RNA, 22 nt, Human
caaagaggugagaggagccuuu

SEQ ID NO: 443152 - RNA, 22 nt, Human
agauuccuaaaguaagauauca

SEQ ID NO: 443153 - RNA, 22 nt, Human
aucagagucagaggcuagagcu

SEQ ID NO: 443154 - RNA, 22 nt, Human
agggaagaaucacugggauguu

SEQ ID NO: 443155 - RNA, 22 nt, Human
acagaauaacucuugcuugagu

SEQ ID NO: 443156 - RNA, 22 nt, Human
agauacaacuguuuaaacauua

SEQ ID NO: 443157 - RNA, 22 nt, Human
caggagaugacagggaagaacc

SEQ ID NO: 443158 - RNA, 22 nt, Human
ggagacagugacuuagagacug

SEQ ID NO: 443159 - RNA, 21 nt, Human
ggcagcugaccgcgcggugca

SEQ ID NO: 443160 - RNA, 22 nt, Human
gcacuuaugcucaccuuguucu

SEQ ID NO: 443161 - RNA, 22 nt, Human
agaauuucaaauggaaguuuua

SEQ ID NO: 443162 - RNA, 22 nt, Human
augcauuugacgggauauauuu

SEQ ID NO: 443163 - RNA, 22 nt, Human
acucacagucccuguaggagug

SEQ ID NO: 443164 - RNA, 22 nt, Human
augagaugugucuaauggaacc

SEQ ID NO: 443165 - RNA, 22 nt, Human
agcacuuaacugacaguacuau

SEQ ID NO: 443166 - RNA, 22 nt, Human
gaggacagagccgccuggcaag

SEQ ID NO: 443167 - RNA, 22 nt, Human
ucuacagacuccuauguaacac

SEQ ID NO: 443168 - RNA, 22 nt, Human
auagcacuuauuguaugcugag

SEQ ID NO: 443169 - RNA, 22 nt, Human
cuggcugguuacuauuucuggu

SEQ ID NO: 443170 - RNA, 22 nt, Human
auggacagcuggccucaaggga

SEQ ID NO: 443171 - RNA, 22 nt, Human
gcuggccugggcagccugucgg

SEQ ID NO: 443172 - RNA, 22 nt, Human
uuauuacacugaaagaauugcg

SEQ ID NO: 443173 - RNA, 22 nt, Human
uuugcaaagaaauuauugcugu

SEQ ID NO: 443174 - RNA, 22 nt, Human
ggacugggucacuaagauagua

SEQ ID NO: 443175 - RNA, 22 nt, Human
ugcagccccugaaaauggcagc

SEQ ID NO: 443176 - RNA, 22 nt, Human
cucugcccgcggaugccacguc

SEQ ID NO: 443177 - RNA, 23 nt, Human
gggcuccagucucugcucaguug

SEQ ID NO: 443178 - RNA, 22 nt, Human
ugauucaauuaucugaugcuuu

SEQ ID NO: 443179 - RNA, 22 nt, Human
cugccucugcgucccacagagu

SEQ ID NO: 443180 - RNA, 22 nt, Human
aagcaggugugagccagugggc

SEQ ID NO: 443181 - RNA, 22 nt, Human
ugcaggcugaggcuggcucaac

SEQ ID NO: 443182 - RNA, 22 nt, Human
aacaugauuggaaaaugcuguc

SEQ ID NO: 443183 - RNA, 22 nt, Human
agaguccauauauugauuuguu

SEQ ID NO: 443184 - RNA, 18 nt, Human
agcaugagagaggcugug

SEQ ID NO: 443185 - RNA, 22 nt, Human
cugccucuauaggaguccacca

SEQ ID NO: 443186 - RNA, 22 nt, Human
ccaggaguuugaggcugcagug

SEQ ID NO: 443187 - RNA, 22 nt, Human
cacaaugcguacauauaucaaa

SEQ ID NO: 443188 - RNA, 22 nt, Human
aauucauacucuauauugcuuu

SEQ ID NO: 443189 - RNA, 22 nt, Human
agccuggaggccaggagacagu

SEQ ID NO: 443190 - RNA, 22 nt, Human
uucagaauauccguuuaaguuu

SEQ ID NO: 443191 - RNA, 22 nt, Human
ggcaaaaaccauaauuacuuuu

SEQ ID NO: 443192 - RNA, 22 nt, Human
agcccuuuccaauuugauuuau

SEQ ID NO: 443193 - RNA, 22 nt, Human
ccagggcaauuauuuggagggu

SEQ ID NO: 443194 - RNA, 22 nt, Human
uccaggcccgagaugggcugga

SEQ ID NO: 443195 - RNA, 22 nt, Human
ccugccuguaagauggguacaa

SEQ ID NO: 443196 - RNA, 22 nt, Human
ugcccuggaaccaucuacaguc

SEQ ID NO: 443197 - RNA, 22 nt, Human
cauuaugugcguacauguaucu

SEQ ID NO: 443198 - RNA, 22 nt, Human
augggaggcagacacuaaguuc

SEQ ID NO: 443199 - RNA, 22 nt, Human
ucuucccccgugcuccagugca

SEQ ID NO: 443200 - RNA, 22 nt, Human
ugccaggcauauggccucuuug

SEQ ID NO: 443201 - RNA, 22 nt, Human
acaaaaagggagaugagguaga

SEQ ID NO: 443202 - RNA, 22 nt, Human
gggccggagcugggucccgcgc

SEQ ID NO: 443203 - RNA, 22 nt, Human
caaaggaggugauaggcccucu

SEQ ID NO: 443204 - RNA, 22 nt, Human
cugggccuagcaacagaggagu

SEQ ID NO: 443205 - RNA, 22 nt, Human
uuauuuaaugugaucugaagag

SEQ ID NO: 443206 - RNA, 22 nt, Human
uucuaaagugcaaucugacaga

SEQ ID NO: 443207 - RNA, 22 nt, Human
agcuggugauguggucccucac

SEQ ID NO: 443208 - RNA, 19 nt, Human
aggcugcaagguggugggc

SEQ ID NO: 443209 - RNA, 22 nt, Human
uggccacagccucugccaguuc

SEQ ID NO: 443210 - RNA, 21 nt, Human
agggaaagaaaaugagcuaau

SEQ ID NO: 443211 - RNA, 22 nt, Human
acauguacauacacauauguaa

SEQ ID NO: 443212 - RNA, 22 nt, Human
ugcaggcugcucaagacuuagu

SEQ ID NO: 443213 - RNA, 22 nt, Human
cugcccugggugcuggggaucc

SEQ ID NO: 443214 - RNA, 22 nt, Human
ucaagacaggguuuaagguuga

SEQ ID NO: 443215 - RNA, 22 nt, Human
gaauacaagccugccaccugga

SEQ ID NO: 443216 - RNA, 22 nt, Human
acuugacuuugucauuugugcu

SEQ ID NO: 443217 - RNA, 22 nt, Human
cagugagggaagaucucagcac

SEQ ID NO: 443218 - RNA, 22 nt, Human
uaauauaccaaacuguaauuuu

SEQ ID NO: 443219 - RNA, 22 nt, Human
gugcacaggugggaaaaugagu

SEQ ID NO: 443220 - RNA, 22 nt, Human
cugguacaaaaugcugauauca

SEQ ID NO: 443221 - RNA, 22 nt, Human
cccagagggcugaggauaugaa

SEQ ID NO: 443222 - RNA, 22 nt, Human
gugaagcagggaaggaaaggau

SEQ ID NO: 443223 - RNA, 21 nt, Human
uuugagaauuggucagagugc

SEQ ID NO: 443224 - RNA, 20 nt, Human
gcagcagugcaaguccucuu

SEQ ID NO: 443225 - RNA, 22 nt, Human
uuucaaauagaaucuuuccaaa

SEQ ID NO: 443226 - RNA, 22 nt, Human
ggcugccauaacugauaccaua

SEQ ID NO: 443227 - RNA, 22 nt, Human
auaugcuuugggauuagaucau

SEQ ID NO: 443228 - RNA, 22 nt, Human
uggcagcucauuuggaaaugga

SEQ ID NO: 443229 - RNA, 22 nt, Human
ugccucuguggaaauggugguc

SEQ ID NO: 443230 - RNA, 22 nt, Human
uuugggcaauucagugggaccu

SEQ ID NO: 443231 - RNA, 22 nt, Human
acagugcuaaugaugccaagau

SEQ ID NO: 443232 - RNA, 22 nt, Human
aggaagaguguuaccuaugggu

SEQ ID NO: 443233 - RNA, 22 nt, Human
uugcugauucaugauuugagaa

SEQ ID NO: 443234 - RNA, 22 nt, Human
cauggccucaaaggacugcaga

SEQ ID NO: 443235 - RNA, 22 nt, Human
cuugaugauagcaggcagggaa

SEQ ID NO: 443236 - RNA, 22 nt, Human
augcauucauucauucuuucua

SEQ ID NO: 443237 - RNA, 22 nt, Human
acauagaacuucgaugucuuuu

SEQ ID NO: 443238 - RNA, 22 nt, Human
acauucuaacauuguacagaua

SEQ ID NO: 443239 - RNA, 23 nt, Human
uugaaaaauauagucccauuguc

SEQ ID NO: 443240 - RNA, 22 nt, Human
ccagcuggaagagugcagaacu

SEQ ID NO: 443241 - RNA, 22 nt, Human
ugugcacaaugugcagguuugu

SEQ ID NO: 443242 - RNA, 22 nt, Human
gcagugggagcuuaggcagugc

SEQ ID NO: 443243 - RNA, 22 nt, Human
gaugcugaagugaagugaucuu

SEQ ID NO: 443244 - RNA, 22 nt, Human
cuggagcccugaaugggcagga

SEQ ID NO: 443245 - RNA, 22 nt, Human
gcucagagggaacaaggggcug

SEQ ID NO: 443246 - RNA, 22 nt, Human
gccuggagcagacgugucccgg

SEQ ID NO: 443247 - RNA, 22 nt, Human
cacuugguuugggaguacauaa

SEQ ID NO: 443248 - RNA, 22 nt, Human
augcauaugcaucuguguacau

SEQ ID NO: 443249 - RNA, 22 nt, Human
ggcaggcaggagcgugcuuggg

SEQ ID NO: 443250 - RNA, 21 nt, Human
accuucugaauuaccuaccaa

SEQ ID NO: 443251 - RNA, 22 nt, Human
uucuaaagacucauggaagugg

SEQ ID NO: 443252 - RNA, 22 nt, Human
ugaggcaggaguuaaugugcuc

SEQ ID NO: 443253 - RNA, 22 nt, Human
gcagaggugugggaggggccac

SEQ ID NO: 443254 - RNA, 20 nt, Human
ugucagugccugaggcacag

SEQ ID NO: 443255 - RNA, 22 nt, Human
augcauauugucauuuaguccu

SEQ ID NO: 443256 - RNA, 19 nt, Human
ucugagggagcacgaaggc

SEQ ID NO: 443257 - RNA, 19 nt, Human
cugacccaggacaccacgg

SEQ ID NO: 443258 - RNA, 22 nt, Human
augcagcucauuuguuuaaaag

SEQ ID NO: 443259 - RNA, 22 nt, Human
agcucaagugcaagcauucuau

SEQ ID NO: 443260 - RNA, 22 nt, Human
acagggcagcaacuuugugccu

SEQ ID NO: 443261 - RNA, 23 nt, Human
uguuuguuucuaugagagauagc

SEQ ID NO: 443262 - RNA, 22 nt, Human
ggcagcugucucugaguuagca

SEQ ID NO: 443263 - RNA, 22 nt, Human
cagcccuguccagcagagggug

SEQ ID NO: 443264 - RNA, 22 nt, Human
aggaugagaagauuggaaucuu

SEQ ID NO: 443265 - RNA, 22 nt, Human
cuggggcuggugaggcaggcuc

SEQ ID NO: 443266 - RNA, 22 nt, Human
cagagagaggccacugcuauua

SEQ ID NO: 443267 - RNA, 22 nt, Human
ggccucugccccagccacaccu

SEQ ID NO: 443268 - RNA, 22 nt, Human
ggagguucugauuugucacaac

SEQ ID NO: 443269 - RNA, 22 nt, Human
ggcucuggugugaagcagccuc

SEQ ID NO: 443270 - RNA, 22 nt, Human
caggcugggcuccggagauaaa

SEQ ID NO: 443271 - RNA, 22 nt, Human
gaggcugguucccuugaucuuu

SEQ ID NO: 443272 - RNA, 22 nt, Human
uugcaaaucacaagagcagagc

SEQ ID NO: 443273 - RNA, 22 nt, Human
cauacuuucuuuuucacgcaua

SEQ ID NO: 443274 - RNA, 22 nt, Human
ucuauauuccagauacagauua

SEQ ID NO: 443275 - RNA, 22 nt, Human
agacaggccacucuggucuggu

SEQ ID NO: 443276 - RNA, 22 nt, Human
agcaggcagccuaggaagugaa

SEQ ID NO: 443277 - RNA, 22 nt, Human
ugaugagguggauucaaagcag

SEQ ID NO: 443278 - RNA, 22 nt, Human
uugggcagggaaaggacaggca

SEQ ID NO: 443279 - RNA, 22 nt, Human
aacugcauuagcuaacgugagu

SEQ ID NO: 443280 - RNA, 22 nt, Human
ccaccccaaaugaagaccucuc

SEQ ID NO: 443281 - RNA, 22 nt, Human
cuggagaacuaguuaaacacgu

SEQ ID NO: 443282 - RNA, 22 nt, Human
uuuagcaaguauuuacugacua

SEQ ID NO: 443283 - RNA, 19 nt, Human
uuuacaaguucuuuguaug

SEQ ID NO: 443284 - RNA, 22 nt, Human
guaacauuauucaugagauaca

SEQ ID NO: 443285 - RNA, 22 nt, Human
aagauauucaaagauuuauuag

SEQ ID NO: 443286 - RNA, 22 nt, Human
gagccuggauagccuuguucca

SEQ ID NO: 443287 - RNA, 22 nt, Human
agucaguugcaaacaucaggca

SEQ ID NO: 443288 - RNA, 22 nt, Human
gcugucacacauggccccagcu

SEQ ID NO: 443289 - RNA, 22 nt, Human
agucccagaugacccagcuacu

SEQ ID NO: 443290 - RNA, 22 nt, Human
augcaguuuucaaagacuauuc

SEQ ID NO: 443291 - RNA, 22 nt, Human
caaggccugacugcuugucuaa

SEQ ID NO: 443292 - RNA, 22 nt, Human
uggaggacaggacuggacagcc

SEQ ID NO: 443293 - RNA, 21 nt, Human
ucagcagcaucugccuagagu

SEQ ID NO: 443294 - RNA, 22 nt, Human
gcaggacauucagugaaugggc

SEQ ID NO: 443295 - RNA, 20 nt, Human
uccaggcagacagcuauggg

SEQ ID NO: 443296 - RNA, 22 nt, Human
aaagcacaugaguaguguagua

SEQ ID NO: 443297 - RNA, 22 nt, Human
cauggcagggcugugggcaggu

SEQ ID NO: 443298 - RNA, 22 nt, Human
ucaggaaggcgccccaucagga

SEQ ID NO: 443299 - RNA, 22 nt, Human
accugagcaugccaggagagug

SEQ ID NO: 443300 - RNA, 22 nt, Human
uccugaagccugagugaugacu

SEQ ID NO: 443301 - RNA, 22 nt, Human
agaacagcaacaucagacaaag

SEQ ID NO: 443302 - RNA, 22 nt, Human
acagugucaugucguguucccc

SEQ ID NO: 443303 - RNA, 22 nt, Human
uguggaggauucugaugccagc

SEQ ID NO: 443304 - RNA, 22 nt, Human
uagcugguuaaugcagaaggag

SEQ ID NO: 443305 - RNA, 22 nt, Human
aagcuccccgaaacccaccucu

SEQ ID NO: 443306 - RNA, 22 nt, Human
uggccugguccuugucaaggca

SEQ ID NO: 443307 - RNA, 22 nt, Human
aaggcacucauucaaggagaua

SEQ ID NO: 443308 - RNA, 22 nt, Human
ucagaauuaagcucuuggucag

SEQ ID NO: 443309 - RNA, 22 nt, Human
uccuggagaauccugccaccug

SEQ ID NO: 443310 - RNA, 22 nt, Human
ggccucugccucaucugggcac

SEQ ID NO: 443311 - RNA, 22 nt, Human
gcugcaggcucugcaggaauug

SEQ ID NO: 443312 - RNA, 22 nt, Human
ucugaggcccugcaggcagugu

SEQ ID NO: 443313 - RNA, 22 nt, Human
cagcugccugcaacacaagcuu

SEQ ID NO: 443314 - RNA, 22 nt, Human
uuguguguguaacuuuaugaga

SEQ ID NO: 443315 - RNA, 22 nt, Human
cugagcugcggcaggcaccugg

SEQ ID NO: 443316 - RNA, 22 nt, Human
gggugggccacugagcagcgug

SEQ ID NO: 443317 - RNA, 22 nt, Human
ccccacccucgcuccauuucgg

SEQ ID NO: 443318 - RNA, 20 nt, Human
aggaaaaauggaaacuggag

SEQ ID NO: 443319 - RNA, 22 nt, Human
uauuacaguucgaguuucuagg

SEQ ID NO: 443320 - RNA, 22 nt, Human
gcacaauggaccgugugcucug

SEQ ID NO: 443321 - RNA, 22 nt, Human
auggcuuuccugggacaugggc

SEQ ID NO: 443322 - RNA, 22 nt, Human
auuacagauagacuuugaagcu

SEQ ID NO: 443323 - RNA, 22 nt, Human
gugcaugugucuuuauaguagc

SEQ ID NO: 443324 - RNA, 22 nt, Human
ugagccuggggccugggcagcg

SEQ ID NO: 443325 - RNA, 19 nt, Human
gcagcagcauuugguaaua

SEQ ID NO: 443326 - RNA, 22 nt, Human
aaggcaauugagaagaaacaga

SEQ ID NO: 443327 - RNA, 22 nt, Human
agccagagacugugucuguaau

SEQ ID NO: 443328 - RNA, 23 nt, Human
ugagaagccauuagagcaggugg

SEQ ID NO: 443329 - RNA, 22 nt, Human
aaagacauugaagaaggacuua

SEQ ID NO: 443330 - RNA, 22 nt, Human
uggcucucagcucccagcagcc

SEQ ID NO: 443331 - RNA, 22 nt, Human
uggccagccuggugcuugcucc

SEQ ID NO: 443332 - RNA, 22 nt, Human
cagucccaggguugguucagcu

SEQ ID NO: 443333 - RNA, 22 nt, Human
cccagggucccugcucucugug

SEQ ID NO: 443334 - RNA, 23 nt, Human
ugaaagcaaugggucuauaguau

SEQ ID NO: 443335 - RNA, 22 nt, Human
acuccagguaggcacauugaca

SEQ ID NO: 443336 - RNA, 22 nt, Human
caggcucuuccauccugcugag

SEQ ID NO: 443337 - RNA, 22 nt, Human
uucaaaacaaucuguuugcauu

SEQ ID NO: 443338 - RNA, 22 nt, Human
ugcugagguuucugacuaugga

SEQ ID NO: 443339 - RNA, 23 nt, Human
agcuccagcugacgugggcagcc

SEQ ID NO: 443340 - RNA, 22 nt, Human
augcaaaaguaauugcaauuuu

SEQ ID NO: 443341 - RNA, 18 nt, Human
ggacccagggccucaccc

SEQ ID NO: 443342 - RNA, 19 nt, Human
aggcagcacccaguccuug

SEQ ID NO: 443343 - RNA, 22 nt, Human
gaagcuccguacuaugacuuuu

SEQ ID NO: 443344 - RNA, 22 nt, Human
cagagccucugcccugggcacu

SEQ ID NO: 443345 - RNA, 22 nt, Human
cagcuggcgacucuccucgaug

SEQ ID NO: 443346 - RNA, 22 nt, Human
aggcugaggcagguggaucauu

SEQ ID NO: 443347 - RNA, 22 nt, Human
cugagccccaucugaggugccc

SEQ ID NO: 443348 - RNA, 22 nt, Human
cugagaggaugcugcaguggag

SEQ ID NO: 443349 - RNA, 22 nt, Human
uguugcaguaaaaauggagagg

SEQ ID NO: 443350 - RNA, 22 nt, Human
guucagagacacuuauuggaaa

SEQ ID NO: 443351 - RNA, 21 nt, Human
agaaggcaaaagcagacaucu

SEQ ID NO: 443352 - RNA, 23 nt, Human
gcuguccccaugcuccaucccug

SEQ ID NO: 443353 - RNA, 22 nt, Human
cugcccugcuaaugaguuccaa

SEQ ID NO: 443354 - RNA, 22 nt, Human
uacacugaaagagaggauugaa

SEQ ID NO: 443355 - RNA, 22 nt, Human
agcugccugggcuuguacaccu

SEQ ID NO: 443356 - RNA, 22 nt, Human
auucagaauggcaaacuucuag

SEQ ID NO: 443357 - RNA, 22 nt, Human
aucuggugcuaacaaaugugga

SEQ ID NO: 443358 - RNA, 22 nt, Human
acauugaugugaugcagaagug

SEQ ID NO: 443359 - RNA, 22 nt, Human
gagggaagaggguuugaauuca

SEQ ID NO: 443360 - RNA, 22 nt, Human
aaagucacaguuuaggggauau

SEQ ID NO: 443361 - RNA, 22 nt, Human
acuuucuucuuaugcauuaagg

SEQ ID NO: 443362 - RNA, 22 nt, Human
cagggcucuuccggagcaggga

SEQ ID NO: 443363 - RNA, 22 nt, Human
cagagaacuuagcuaguuuucc

SEQ ID NO: 443364 - RNA, 22 nt, Human
aggcaaagaggauauuuugggg

SEQ ID NO: 443365 - RNA, 22 nt, Human
gaaggaaaaauacucuguaagg

SEQ ID NO: 443366 - RNA, 23 nt, Human
gcacugccaugugcucugcaggc

SEQ ID NO: 443367 - RNA, 22 nt, Human
ugagccagaggaggcugugugg

SEQ ID NO: 443368 - RNA, 22 nt, Human
uuggcacagagcugcagccugg

SEQ ID NO: 443369 - RNA, 22 nt, Human
ugagauaauuaaaucaaaaccu

SEQ ID NO: 443370 - RNA, 22 nt, Human
auauuuguaguggguaagaagu

SEQ ID NO: 443371 - RNA, 22 nt, Human
uggauaaaaugacauuaccuga

SEQ ID NO: 443372 - RNA, 22 nt, Human
ucccagaggcuccagucucuau

SEQ ID NO: 443373 - RNA, 22 nt, Human
cauuacaaccccaaauuacaaa

SEQ ID NO: 443374 - RNA, 22 nt, Human
ccaggcacugcucgaggugcua

SEQ ID NO: 443375 - RNA, 22 nt, Human
cagggccugcaagagaccuggg

SEQ ID NO: 443376 - RNA, 22 nt, Human
cagcacuuugagggcucuuaau

SEQ ID NO: 443377 - RNA, 22 nt, Human
gcuuccagagacugagcucuuc

SEQ ID NO: 443378 - RNA, 22 nt, Human
uuucaaacuuuacucuugaauc

SEQ ID NO: 443379 - RNA, 22 nt, Human
gacagcugcauccucagacaca

SEQ ID NO: 443380 - RNA, 22 nt, Human
agugcuguccaguuucacaggu

SEQ ID NO: 443381 - RNA, 22 nt, Human
gcagcuguggugcugagauagg

SEQ ID NO: 443382 - RNA, 22 nt, Human
uagcccagagucccaauuccag

SEQ ID NO: 443383 - RNA, 22 nt, Human
gcucugggauuaccagccuuag

SEQ ID NO: 443384 - RNA, 22 nt, Human
uaggaacaacugcagguacaag

SEQ ID NO: 443385 - RNA, 23 nt, Human
ccugugugcccuuaauucacagc

SEQ ID NO: 443386 - RNA, 22 nt, Human
cucaggcuugggaggaggccca

SEQ ID NO: 443387 - RNA, 22 nt, Human
ccucuuccacugggccccaucc

SEQ ID NO: 443388 - RNA, 22 nt, Human
ggcuguggucugggugcucccc

SEQ ID NO: 443389 - RNA, 22 nt, Human
acagacaguaaauaguguggcu

SEQ ID NO: 443390 - RNA, 21 nt, Human
ugcagacagggacagaaugga

SEQ ID NO: 443391 - RNA, 22 nt, Human
ugccuggguucccaccccaaag

SEQ ID NO: 443392 - RNA, 22 nt, Human
gagcugagcagggagccucacu

SEQ ID NO: 443393 - RNA, 17 nt, Human
uccagcccugcccgacg

SEQ ID NO: 443394 - RNA, 22 nt, Human
ccagcuccagguagaugggcag

SEQ ID NO: 443395 - RNA, 22 nt, Human
ugcccacauucugaagcucccu

SEQ ID NO: 443396 - RNA, 22 nt, Human
cagcugguagguagcagauuug

SEQ ID NO: 443397 - RNA, 22 nt, Human
acuuugacagcauuuuaauuau

SEQ ID NO: 443398 - RNA, 21 nt, Human
ccagcccagcugugucccagc

SEQ ID NO: 443399 - RNA, 22 nt, Human
cagugccaugucugagccccua

SEQ ID NO: 443400 - RNA, 22 nt, Human
uagcagcacagaaagccuggag

SEQ ID NO: 443401 - RNA, 22 nt, Human
agucccagacuccaguuuucug

SEQ ID NO: 443402 - RNA, 22 nt, Human
guguguccaggcgggagucaag

SEQ ID NO: 443403 - RNA, 22 nt, Human
cagcaacaugugguaguguagg

SEQ ID NO: 443404 - RNA, 22 nt, Human
uuuugaaagggugauuuggcuu

SEQ ID NO: 443405 - RNA, 22 nt, Human
gucugucucucuccagagugca

SEQ ID NO: 443406 - RNA, 22 nt, Human
ucagaggaagccuuggugggag

SEQ ID NO: 443407 - RNA, 22 nt, Human
ucaggcugcaucuguaagggug

SEQ ID NO: 443408 - RNA, 22 nt, Human
uuucaaaccuacuuguauguuu

SEQ ID NO: 443409 - RNA, 22 nt, Human
agcuguucccucacugcaguca

SEQ ID NO: 443410 - RNA, 22 nt, Human
gagggcaccagaagagccagau

SEQ ID NO: 443411 - RNA, 22 nt, Human
cugggaggugaacagaaaaacu

SEQ ID NO: 443412 - RNA, 22 nt, Human
ugcugaggcauuuggacagagu

SEQ ID NO: 443413 - RNA, 22 nt, Human
agaaugauaaugccaugaugga

SEQ ID NO: 443414 - RNA, 22 nt, Human
ucaaacugaacuaagauccaac

SEQ ID NO: 443415 - RNA, 22 nt, Human
ucagaggacuaccuucuccagu

SEQ ID NO: 443416 - RNA, 18 nt, Human
gcaaacauucuuccaguc

SEQ ID NO: 443417 - RNA, 22 nt, Human
uaaggaagagcuugguaauagg

SEQ ID NO: 443418 - RNA, 22 nt, Human
gggguuaacaguauugcucaug

SEQ ID NO: 443419 - RNA, 22 nt, Human
ucaggaacauaaugugagucag

SEQ ID NO: 443420 - RNA, 20 nt, Human
cugggaggucuuccaaauca

SEQ ID NO: 443421 - RNA, 22 nt, Human
uuucaacagaauaugaucagag

SEQ ID NO: 443422 - RNA, 22 nt, Human
ggcuccaggagaugcugggcag

SEQ ID NO: 443423 - RNA, 22 nt, Human
uggugagagcugaccgugcgag

SEQ ID NO: 443424 - RNA, 22 nt, Human
gcagggaggaagagaugcuucc

SEQ ID NO: 443425 - RNA, 20 nt, Human
uccugcagucgcuagcgccc

SEQ ID NO: 443426 - RNA, 22 nt, Human
cugccucuguugggcauggucu

SEQ ID NO: 443427 - RNA, 22 nt, Human
aaggaagaaaugaauaggugga

SEQ ID NO: 443428 - RNA, 22 nt, Human
cagcugccacaggacuuucuga

SEQ ID NO: 443429 - RNA, 22 nt, Human
uggcacagacagaucaggaguc

SEQ ID NO: 443430 - RNA, 22 nt, Human
aacacaaaaauucucaggggca

SEQ ID NO: 443431 - RNA, 22 nt, Human
cucuccccacacccucugcaug

SEQ ID NO: 443432 - RNA, 22 nt, Human
uauuuuacaugacagguguuua

SEQ ID NO: 443433 - RNA, 20 nt, Human
cugaaagacguaacagugca

SEQ ID NO: 443434 - RNA, 22 nt, Human
ugacagaggcugaguuagucug

SEQ ID NO: 443435 - RNA, 22 nt, Human
auuuucugaguccagaauuuac

SEQ ID NO: 443436 - RNA, 22 nt, Human
gcugugugacugagagccuggc

SEQ ID NO: 443437 - RNA, 23 nt, Human
cugugugugccgaggguggccac

SEQ ID NO: 443438 - RNA, 22 nt, Human
guuuuucuagaaaucuccuccu

SEQ ID NO: 443439 - RNA, 23 nt, Human
uccucagcauguuuugucaugua

SEQ ID NO: 443440 - RNA, 22 nt, Human
acaggcagagucagguuggguu

SEQ ID NO: 443441 - RNA, 22 nt, Human
auguccagaguguccuggaaag

SEQ ID NO: 443442 - RNA, 22 nt, Human
cuggguagaagauuccucagga

SEQ ID NO: 443443 - RNA, 22 nt, Human
uggugcaagucucugaggaggg

SEQ ID NO: 443444 - RNA, 22 nt, Human
agagucugaggcagcugcagcc

SEQ ID NO: 443445 - RNA, 22 nt, Human
auuuguuuaucgucgauuguag

SEQ ID NO: 443446 - RNA, 22 nt, Human
caggaagagguggggcuaaagu

SEQ ID NO: 443447 - RNA, 22 nt, Human
aacagcuauucacuacuauggg

SEQ ID NO: 443448 - RNA, 22 nt, Human
ccuggagcuuuuccaguugaca

SEQ ID NO: 443449 - RNA, 22 nt, Human
accuucuggucugccugacagc

SEQ ID NO: 443450 - RNA, 22 nt, Human
ugagcaguaacagcucacaggg

SEQ ID NO: 443451 - RNA, 22 nt, Human
aauagaaaggaggggcucuugu

SEQ ID NO: 443452 - RNA, 22 nt, Human
agaaggccuaacuugggggcaa

SEQ ID NO: 443453 - RNA, 22 nt, Human
cagcugagagacaaugagucau

SEQ ID NO: 443454 - RNA, 22 nt, Human
ugacagaaauaguucuuaauuu

SEQ ID NO: 443455 - RNA, 22 nt, Human
uagcagcauccuguggugaugg

SEQ ID NO: 443456 - RNA, 22 nt, Human
uggauaaauggugcuaucaccc

SEQ ID NO: 443457 - RNA, 22 nt, Human
agcagcugcagagggcuccccc

SEQ ID NO: 443458 - RNA, 22 nt, Human
aauucagagacucauucuggag

SEQ ID NO: 443459 - RNA, 22 nt, Human
cuuugcaaacugucacacuuuc

SEQ ID NO: 443460 - RNA, 22 nt, Human
ugcagcugauaauuacauguuc

SEQ ID NO: 443461 - RNA, 19 nt, Human
cacuuugcugaacucuucu

SEQ ID NO: 443462 - RNA, 22 nt, Human
gcagccuguuguaccagccugu

SEQ ID NO: 443463 - RNA, 22 nt, Human
gggcacagcccagugggguccc

SEQ ID NO: 443464 - RNA, 22 nt, Human
ggcaggugugagaucgaggcca

SEQ ID NO: 443465 - RNA, 22 nt, Human
uuuaacuuaaucugcuugauga

SEQ ID NO: 443466 - RNA, 22 nt, Human
augggaggaagagaagaugucu

SEQ ID NO: 443467 - RNA, 22 nt, Human
cagagccuggcgaugucaugga

SEQ ID NO: 443468 - RNA, 22 nt, Human
aggcugagugcuccccuagaug

SEQ ID NO: 443469 - RNA, 22 nt, Human
cuccucaggaaguagcaugugu

SEQ ID NO: 443470 - RNA, 22 nt, Human
gugaaguuuuaguauauguaga

SEQ ID NO: 443471 - RNA, 22 nt, Human
aauuucaaguggcaucuuugau

SEQ ID NO: 443472 - RNA, 22 nt, Human
acuggcaguggcagcagaaaga

SEQ ID NO: 443473 - RNA, 22 nt, Human
uggccuggcucacagugagauu

SEQ ID NO: 443474 - RNA, 22 nt, Human
gcaggcaggcuuccuugaacug

SEQ ID NO: 443475 - RNA, 22 nt, Human
cuggagccccagacagggagag

SEQ ID NO: 443476 - RNA, 22 nt, Human
uaugcaaacuaaguuguuuccu

SEQ ID NO: 443477 - RNA, 22 nt, Human
ugaaauacacaaauuuaguaag

SEQ ID NO: 443478 - RNA, 22 nt, Human
gccacaggucggcuagaggguc

SEQ ID NO: 443479 - RNA, 22 nt, Human
auucauuuagguauucacuuac

SEQ ID NO: 443480 - RNA, 22 nt, Human
aagcccuguccggggggaagaa

SEQ ID NO: 443481 - RNA, 22 nt, Human
aaaguuuucugccuucauuaga

SEQ ID NO: 443482 - RNA, 20 nt, Human
agcaccuguguagaagcauc

SEQ ID NO: 443483 - RNA, 22 nt, Human
ucagaaaagguagcugugacaa

SEQ ID NO: 443484 - RNA, 19 nt, Human
uuuacagggaauggagacc

SEQ ID NO: 443485 - RNA, 22 nt, Human
ccaggcccaccuuggccacuua

SEQ ID NO: 443486 - RNA, 22 nt, Human
guccagcaggaugcaagugcca

SEQ ID NO: 443487 - RNA, 22 nt, Human
gagguggcaauuuaaugcaguc

SEQ ID NO: 443488 - RNA, 20 nt, Human
uucaugguguauuucuuucu

SEQ ID NO: 443489 - RNA, 22 nt, Human
acuguauuuccaacagacaaau

SEQ ID NO: 443490 - RNA, 22 nt, Human
ugccucugguuaucugguaccu

SEQ ID NO: 443491 - RNA, 22 nt, Human
gcugccuguggcccuucugggu

SEQ ID NO: 443492 - RNA, 21 nt, Human
aggcccagcuuuccucuugcu

SEQ ID NO: 443493 - RNA, 19 nt, Human
uccucccuuugguguccug

SEQ ID NO: 443494 - RNA, 22 nt, Human
ggcaauaaucuacucugccacu

SEQ ID NO: 443495 - RNA, 17 nt, Human
auaaaggcaaguauuau

SEQ ID NO: 443496 - RNA, 22 nt, Human
gcucagggaguuucacagugua

SEQ ID NO: 443497 - RNA, 22 nt, Human
cacaggaagaucucccagaggu

SEQ ID NO: 443498 - RNA, 22 nt, Human
ucucacaggugcacguggcugu

SEQ ID NO: 443499 - RNA, 22 nt, Human
uggcuaauggcauuuccugggu

SEQ ID NO: 443500 - RNA, 22 nt, Human
gaggccucuucuuuguuaaccu

SEQ ID NO: 443501 - RNA, 22 nt, Human
gaggcuggacgugcauuucuac

SEQ ID NO: 443502 - RNA, 22 nt, Human
ucaacauuggaggcaacauuca

SEQ ID NO: 443503 - RNA, 22 nt, Human
ucaugcagauuuggagguauuu

SEQ ID NO: 443504 - RNA, 22 nt, Human
cugccagggcauccuguggugg

SEQ ID NO: 443505 - RNA, 20 nt, Human
agguccugguucucugggau

SEQ ID NO: 443506 - RNA, 21 nt, Human
gcagcuggucucagagcuugc

SEQ ID NO: 443507 - RNA, 22 nt, Human
acaucugaccauuacaagacau

SEQ ID NO: 443508 - RNA, 19 nt, Human
caggaacauggagggaggg

SEQ ID NO: 443509 - RNA, 22 nt, Human
uuccucagagggcgcuggggaa

SEQ ID NO: 443510 - RNA, 22 nt, Human
aggagcucugggcagggccucc

SEQ ID NO: 443511 - RNA, 22 nt, Human
gccucugcaugcucagcaccca

SEQ ID NO: 443512 - RNA, 21 nt, Human
ugcaggagucugugagucagg

SEQ ID NO: 443513 - RNA, 22 nt, Human
auugaacagaaaaacucagaga

SEQ ID NO: 443514 - RNA, 22 nt, Human
acagaguuaauggauaggcagg

SEQ ID NO: 443515 - RNA, 22 nt, Human
gcagcaguggucuguagaagga

SEQ ID NO: 443516 - RNA, 22 nt, Human
cccagagaaccuucugugccac

SEQ ID NO: 443517 - RNA, 22 nt, Human
ccaggcuggaaucaauauucug

SEQ ID NO: 443518 - RNA, 22 nt, Human
caaggcaggaagccugucuuau

SEQ ID NO: 443519 - RNA, 22 nt, Human
cagcugguguccagggaagugg

SEQ ID NO: 443520 - RNA, 22 nt, Human
ccagaggucuccugcacgggau

SEQ ID NO: 443521 - RNA, 22 nt, Human
ccugggcagccugcucaaggac

SEQ ID NO: 443522 - RNA, 22 nt, Human
gaagagagccgcgggacaucag

SEQ ID NO: 443523 - RNA, 23 nt, Human
acuauaaaguuguucugauuuac

SEQ ID NO: 443524 - RNA, 22 nt, Human
ugaagccacagagcaucugccu

SEQ ID NO: 443525 - RNA, 22 nt, Human
gcacugcaucuacuggcaagua

SEQ ID NO: 443526 - RNA, 22 nt, Human
ccagggugggaggcugaaggcg

SEQ ID NO: 443527 - RNA, 22 nt, Human
aaaaguuugugcaaacacucag

SEQ ID NO: 443528 - RNA, 22 nt, Human
cugggcugcagcgggagcgacg

SEQ ID NO: 443529 - RNA, 22 nt, Human
acuguauuuggauauaagaucu

SEQ ID NO: 443530 - RNA, 22 nt, Human
cccaggaggcagagcuugcagu

SEQ ID NO: 443531 - RNA, 22 nt, Human
gggcacugugcuaggugcugag

SEQ ID NO: 443532 - RNA, 22 nt, Human
gcauguguggaggagaugugcu

SEQ ID NO: 443533 - RNA, 22 nt, Human
uagcugccuagacagcuauagc

SEQ ID NO: 443534 - RNA, 22 nt, Human
ucaggcugaggucaucugcauc

SEQ ID NO: 443535 - RNA, 23 nt, Human
acugggcuuaugaggaggcuugu

SEQ ID NO: 443536 - RNA, 22 nt, Human
auuucucaguguacauuauguu

SEQ ID NO: 443537 - RNA, 22 nt, Human
ucugggcugggagcguguggac

SEQ ID NO: 443538 - RNA, 22 nt, Human
gcagcuggaagugacacucugu

SEQ ID NO: 443539 - RNA, 18 nt, Human
uuugcaaaggaaguaugg

SEQ ID NO: 443540 - RNA, 22 nt, Human
agaauaaaugcuaccuaucaca

SEQ ID NO: 443541 - RNA, 22 nt, Human
ccacaguagcauccaaacagua

SEQ ID NO: 443542 - RNA, 20 nt, Human
uaaaugcaucuguucaacug

SEQ ID NO: 443543 - RNA, 22 nt, Human
uacaugaaauaggauucuggag

SEQ ID NO: 443544 - RNA, 22 nt, Human
ggguggcaucucucugagcugu

SEQ ID NO: 443545 - RNA, 20 nt, Human
ugcagaagaacguucugguu

SEQ ID NO: 443546 - RNA, 22 nt, Human
ugcagaagaaaacagcugugug

SEQ ID NO: 443547 - RNA, 22 nt, Human
uggcucuccagagccuauggua

SEQ ID NO: 443548 - RNA, 22 nt, Human
cugccuucuuucaaggguaagc

SEQ ID NO: 443549 - RNA, 22 nt, Human
acaggcacaccuuccugcaggc

SEQ ID NO: 443550 - RNA, 22 nt, Human
ugaagcaaugauagcagaauga

SEQ ID NO: 443551 - RNA, 22 nt, Human
gaggucaggcuugcagcagggu

SEQ ID NO: 443552 - RNA, 19 nt, Human
ccagcagaagccacuccug

SEQ ID NO: 443553 - RNA, 22 nt, Human
gacaugauggaaaaaaaugcuc

SEQ ID NO: 443554 - RNA, 22 nt, Human
aggagcugagggagcgcccuug

SEQ ID NO: 443555 - RNA, 22 nt, Human
acaauaugggauauacauuuua

SEQ ID NO: 443556 - RNA, 22 nt, Human
gcaguaggaguuuccagggugg

SEQ ID NO: 443557 - RNA, 22 nt, Human
gcccacagcucguuccucuccu

SEQ ID NO: 443558 - RNA, 22 nt, Human
gguccaguccugcucaccacuu

SEQ ID NO: 443559 - RNA, 22 nt, Human
ggcacugggagaggugagacgg

SEQ ID NO: 443560 - RNA, 22 nt, Human
cagaggaaguuccuugaugaga

SEQ ID NO: 443561 - RNA, 22 nt, Human
auauacagggagaaacagcuua

SEQ ID NO: 443562 - RNA, 20 nt, Human
cagcccuugauuuacaaucc

SEQ ID NO: 443563 - RNA, 22 nt, Human
gcaguacuuuaagggaugaagc

SEQ ID NO: 443564 - RNA, 23 nt, Human
ucagaauuccaguuucuuugaag

SEQ ID NO: 443565 - RNA, 22 nt, Human
cuugaugagccuagugcuuaga

SEQ ID NO: 443566 - RNA, 22 nt, Human
aaaggcaaaggcugguauggcu

SEQ ID NO: 443567 - RNA, 23 nt, Human
gaauacaaagcagaugguccagc

SEQ ID NO: 443568 - RNA, 22 nt, Human
uugcauaugaagcugacuuaaa

SEQ ID NO: 443569 - RNA, 22 nt, Human
uuucacauucuucugaaucuac

SEQ ID NO: 443570 - RNA, 19 nt, Human
cugagccucaguuuccuag

SEQ ID NO: 443571 - RNA, 22 nt, Human
uucauaugcagauuaacaaaua

SEQ ID NO: 443572 - RNA, 22 nt, Human
agugugugaccuuuuaauuuaa

SEQ ID NO: 443573 - RNA, 22 nt, Human
acuuauuagacaucuucauugu

SEQ ID NO: 443574 - RNA, 20 nt, Human
cccaggcagagcuagcggca

SEQ ID NO: 443575 - RNA, 22 nt, Human
augccaaagauguuugauagaa

SEQ ID NO: 443576 - RNA, 22 nt, Human
agagguaagcaguggcaagugc

SEQ ID NO: 443577 - RNA, 22 nt, Human
uuuauccaccagggacuaggac

SEQ ID NO: 443578 - RNA, 22 nt, Human
augaauguaaguggauuucuuu

SEQ ID NO: 443579 - RNA, 22 nt, Human
gaaagagaaccugggccuagau

SEQ ID NO: 443580 - RNA, 22 nt, Human
cugagccuuauucaccagcccu

SEQ ID NO: 443581 - RNA, 22 nt, Human
gcucccagacugaccagaggug

SEQ ID NO: 443582 - RNA, 22 nt, Human
cugggagguggagguugcauug

SEQ ID NO: 443583 - RNA, 22 nt, Human
uucauacuaaaguguaagaugu

SEQ ID NO: 443584 - RNA, 22 nt, Human
agagacuucugccuuagcaaga

SEQ ID NO: 443585 - RNA, 22 nt, Human
aaagcagaggugauaugacuua

SEQ ID NO: 443586 - RNA, 19 nt, Human
ggaaggccacggcaggcuu

SEQ ID NO: 443587 - RNA, 22 nt, Human
agauauguuuguauauauuugu

SEQ ID NO: 443588 - RNA, 21 nt, Human
ucagaguguguuacagcaagc

SEQ ID NO: 443589 - RNA, 22 nt, Human
gacagaggguuccaaaauugau

SEQ ID NO: 443590 - RNA, 22 nt, Human
ccugucauacuaacguaguggg

SEQ ID NO: 443591 - RNA, 22 nt, Human
ucuuggauuuuaauggaucaaa

SEQ ID NO: 443592 - RNA, 22 nt, Human
cagcuguucuugggacagacag

SEQ ID NO: 443593 - RNA, 22 nt, Human
acagccuguuugaucuggugcu

SEQ ID NO: 443594 - RNA, 22 nt, Human
caauagaaggcacagauaggua

SEQ ID NO: 443595 - RNA, 22 nt, Human
accagccugucugagucguggg

SEQ ID NO: 443596 - RNA, 22 nt, Human
cucaggaggugguagaggcccu

SEQ ID NO: 443597 - RNA, 22 nt, Human
uggagcagccaugaugacagag

SEQ ID NO: 443598 - RNA, 22 nt, Human
auuuaaauuuucugauggagag

SEQ ID NO: 443599 - RNA, 22 nt, Human
uugaacaaucaaaagaauucau

SEQ ID NO: 443600 - RNA, 22 nt, Human
augcccuggggcuaccucugag

SEQ ID NO: 443601 - RNA, 22 nt, Human
ucauccugaagaaccugcuucc

SEQ ID NO: 443602 - RNA, 22 nt, Human
gcagcugccuauucagggcuug

SEQ ID NO: 443603 - RNA, 22 nt, Human
agaagcugccuacaugaccagc

SEQ ID NO: 443604 - RNA, 20 nt, Human
cugccaugauugauagagug

SEQ ID NO: 443605 - RNA, 22 nt, Human
acacugaaggcuacaagguuga

SEQ ID NO: 443606 - RNA, 22 nt, Human
acagaacugagaauucucuauc

SEQ ID NO: 443607 - RNA, 22 nt, Human
gccagcagguugucaaggagcu

SEQ ID NO: 443608 - RNA, 22 nt, Human
cacuaaguugguguuaauuagu

SEQ ID NO: 443609 - RNA, 22 nt, Human
aggaagcucggagagggcaaau

SEQ ID NO: 443610 - RNA, 19 nt, Human
uggcucuguuucucuggag

SEQ ID NO: 443611 - RNA, 22 nt, Human
aacaggcaauuuaggacucuuu

SEQ ID NO: 443612 - RNA, 22 nt, Human
ucaggcugcccguucagggcuc

SEQ ID NO: 443613 - RNA, 22 nt, Human
cacccagccuucacacaggagu

SEQ ID NO: 443614 - RNA, 22 nt, Human
gcaggaacccagacaaccaggg

SEQ ID NO: 443615 - RNA, 22 nt, Human
aggcuccuugcucacaggcuca

SEQ ID NO: 443616 - RNA, 22 nt, Human
ugccagugggugugcagagacu

SEQ ID NO: 443617 - RNA, 22 nt, Human
uggcaccugaacuuagaggugu

SEQ ID NO: 443618 - RNA, 22 nt, Human
aaguugauggcgucuuugagau

SEQ ID NO: 443619 - RNA, 17 nt, Human
agaaagaggauccacag

SEQ ID NO: 443620 - RNA, 22 nt, Human
aaauucaguguucuucccguaa

SEQ ID NO: 443621 - RNA, 22 nt, Human
gaggccugaaaggggaccuaug

SEQ ID NO: 443622 - RNA, 22 nt, Human
uuuuuguugcagagaggccacu

SEQ ID NO: 443623 - RNA, 19 nt, Human
ugggaugaugcagaaggua

SEQ ID NO: 443624 - RNA, 22 nt, Human
gcaggaugaaggcagaggcuga

SEQ ID NO: 443625 - RNA, 22 nt, Human
uuauugugugcguuagccuaug

SEQ ID NO: 443626 - RNA, 22 nt, Human
ucugucacaauuugcuuacucu

SEQ ID NO: 443627 - RNA, 22 nt, Human
agacagcaugauacaugaugcu

SEQ ID NO: 443628 - RNA, 22 nt, Human
cccagcauuucugggcugcacu

SEQ ID NO: 443629 - RNA, 22 nt, Human
cuggagcugcuguccuugggug

SEQ ID NO: 443630 - RNA, 20 nt, Human
ggccucugaggacaaggaga

SEQ ID NO: 443631 - RNA, 22 nt, Human
gugcauauaugcacauaugugu

SEQ ID NO: 443632 - RNA, 22 nt, Human
uaggaggccauccagccugccu

SEQ ID NO: 443633 - RNA, 22 nt, Human
cagaacauuccaugugcccugc

SEQ ID NO: 443634 - RNA, 22 nt, Human
acugcaaagccagauauuauca

SEQ ID NO: 443635 - RNA, 22 nt, Human
gggcaggggucaguggccccaa

SEQ ID NO: 443636 - RNA, 22 nt, Human
auauuacauaaacaugagugaa

SEQ ID NO: 443637 - RNA, 22 nt, Human
gcucagugcaucauuccaggcu

SEQ ID NO: 443638 - RNA, 17 nt, Human
agaugcuggccacaugu

SEQ ID NO: 443639 - RNA, 22 nt, Human
cucaggacccaccuuauuagga

SEQ ID NO: 443640 - RNA, 22 nt, Human
ccagcagcugcuaugugguuuu

SEQ ID NO: 443641 - RNA, 22 nt, Human
uugauuuuuccagcuucuagag

SEQ ID NO: 443642 - RNA, 22 nt, Human
gcugaggcuccucgggaggaca

SEQ ID NO: 443643 - RNA, 22 nt, Human
uuucagaaggggagaaagguca

SEQ ID NO: 443644 - RNA, 20 nt, Human
agcaggcugcagggugaaau

SEQ ID NO: 443645 - RNA, 22 nt, Human
uugcauuguugcaaugaaguau

SEQ ID NO: 443646 - RNA, 22 nt, Human
gcuggugagauuuuauguuucc

SEQ ID NO: 443647 - RNA, 22 nt, Human
agaggcugaaugaugucaucau

SEQ ID NO: 443648 - RNA, 22 nt, Human
gagcugccagacaugggaauga

SEQ ID NO: 443649 - RNA, 22 nt, Human
uucuaagucacucagauuuugg

SEQ ID NO: 443650 - RNA, 23 nt, Human
agcaggcaucuguggcacaaggc

SEQ ID NO: 443651 - RNA, 22 nt, Human
acccucccauuuccauguagca

SEQ ID NO: 443652 - RNA, 22 nt, Human
guuaacauucaauuaaacaguc

SEQ ID NO: 443653 - RNA, 22 nt, Human
gaaaguuuauagguuauauaau

SEQ ID NO: 443654 - RNA, 22 nt, Human
ugcuggagaacugcucuguguu

SEQ ID NO: 443655 - RNA, 22 nt, Human
agcaacccguccuugggggacu

SEQ ID NO: 443656 - RNA, 22 nt, Human
caagaucaaggugucagcaggu

SEQ ID NO: 443657 - RNA, 22 nt, Human
caagaucaagguaucagcagau

SEQ ID NO: 443658 - RNA, 22 nt, Human
agcuggugugccacuguugggg

SEQ ID NO: 443659 - RNA, 22 nt, Human
ccaucugacugccacccaggcc

SEQ ID NO: 443660 - RNA, 22 nt, Human
aacaaguuagggucuuuuacuu

SEQ ID NO: 443661 - RNA, 23 nt, Human
aucugaaaaggcauuuucuuccc

SEQ ID NO: 443662 - RNA, 22 nt, Human
ugcacacauguuuacaagcauc

SEQ ID NO: 443663 - RNA, 22 nt, Human
gaggcagaggaagguggucucu

SEQ ID NO: 443664 - RNA, 22 nt, Human
uucuacaugagaaaauguauuu

SEQ ID NO: 443665 - RNA, 22 nt, Human
agcagcugaccagugaguccug

SEQ ID NO: 443666 - RNA, 22 nt, Human
aagcacaguaaaagcagauuuu

SEQ ID NO: 443667 - RNA, 22 nt, Human
cuggaggcugaguugggucucc

SEQ ID NO: 443668 - RNA, 22 nt, Human
gauugcuuauacacaagaugaa

SEQ ID NO: 443669 - RNA, 22 nt, Human
uuuccucacacagaagaucuug

SEQ ID NO: 443670 - RNA, 22 nt, Human
cuggagucggcgccccaacaga

SEQ ID NO: 443671 - RNA, 22 nt, Human
cccaggcugaugggaugggcca

SEQ ID NO: 443672 - RNA, 22 nt, Human
agagacagaucugagggaccuc

SEQ ID NO: 443673 - RNA, 22 nt, Human
gcucagggccuggcugcggacu

SEQ ID NO: 443674 - RNA, 22 nt, Human
gacccagcuuaagucacauguu

SEQ ID NO: 443675 - RNA, 20 nt, Human
gccuggaggcagagauaaag

SEQ ID NO: 443676 - RNA, 22 nt, Human
gucugggcuccuggcaggcagc

SEQ ID NO: 443677 - RNA, 22 nt, Human
cccagcucucugcucuuagccu

SEQ ID NO: 443678 - RNA, 19 nt, Human
agcaggcuaggcugccucu

SEQ ID NO: 443679 - RNA, 22 nt, Human
auuagcaauugcccugugcaau

SEQ ID NO: 443680 - RNA, 22 nt, Human
acagcugugacuuagagaaguu

SEQ ID NO: 443681 - RNA, 22 nt, Human
agaaaggaggaagaaugaccuc

SEQ ID NO: 443682 - RNA, 22 nt, Human
ugcacacaguggacaagucuug

SEQ ID NO: 443683 - RNA, 22 nt, Human
uugcccacuggcuguuggucag

SEQ ID NO: 443684 - RNA, 22 nt, Human
ggaagccaggccaaugagaaca

SEQ ID NO: 443685 - RNA, 22 nt, Human
cccaggcuggaauuccaggccu

SEQ ID NO: 443686 - RNA, 22 nt, Human
uaggcuggaacuuaggcagagg

SEQ ID NO: 443687 - RNA, 22 nt, Human
cccugccuacaggguuuucuuu

SEQ ID NO: 443688 - RNA, 22 nt, Human
aggccuggcaugagaccugaga

SEQ ID NO: 443689 - RNA, 22 nt, Human
gauuucuaaggaggcugaacuu

SEQ ID NO: 443690 - RNA, 22 nt, Human
gugccagcuguccauguuccuc

SEQ ID NO: 443691 - RNA, 20 nt, Human
acaauuuccucacuauaugc

SEQ ID NO: 443692 - RNA, 22 nt, Human
cuaaaggcuaggucugaacuca

SEQ ID NO: 443693 - RNA, 22 nt, Human
agcuguuuuuuccucaccacuu

SEQ ID NO: 443694 - RNA, 22 nt, Human
aguaucuuuacuuaaauaguca

SEQ ID NO: 443695 - RNA, 19 nt, Human
uccugcugugugaagggga

SEQ ID NO: 443696 - RNA, 22 nt, Human
cagcauuuaucuuguagcagga

SEQ ID NO: 443697 - RNA, 22 nt, Human
guaugguuuauagggaaauugu

SEQ ID NO: 443698 - RNA, 22 nt, Human
cugaggagcaaccccgugcccu

SEQ ID NO: 443699 - RNA, 22 nt, Human
acaguucaagacaucaguauga

SEQ ID NO: 443700 - RNA, 22 nt, Human
cagagacaggaucucgaagacu

SEQ ID NO: 443701 - RNA, 22 nt, Human
gcuggagccauuggcuuggccu

SEQ ID NO: 443702 - RNA, 22 nt, Human
agcccuaaauuaucuuuauuuu

SEQ ID NO: 443703 - RNA, 22 nt, Human
ccacaguaaauggauucagacc

SEQ ID NO: 443704 - RNA, 22 nt, Human
agcagagcuauucuugugcaau

SEQ ID NO: 443705 - RNA, 22 nt, Human
gcugugcuuuugguagauccca

SEQ ID NO: 443706 - RNA, 22 nt, Human
gcagcccaauggacugagacag

SEQ ID NO: 443707 - RNA, 18 nt, Human
auaugcuugagcuaagga

SEQ ID NO: 443708 - RNA, 22 nt, Human
gugaagaucugagcccucaggu

SEQ ID NO: 443709 - RNA, 22 nt, Human
ccagagcugagggagccugagc

SEQ ID NO: 443710 - RNA, 22 nt, Human
agagugggacacgggcgcuguc

SEQ ID NO: 443711 - RNA, 22 nt, Human
cagcugaguggacccuagaggc

SEQ ID NO: 443712 - RNA, 22 nt, Human
augagacuaccuguaauguggc

SEQ ID NO: 443713 - RNA, 22 nt, Human
gagaagcaaucaguggccaccc

SEQ ID NO: 443714 - RNA, 22 nt, Human
agcugcccuggcggagcugcuc

SEQ ID NO: 443715 - RNA, 22 nt, Human
ucuuggcugcagagccggcaag

SEQ ID NO: 443716 - RNA, 22 nt, Human
ugaaagacaagguuuuuucaga

SEQ ID NO: 443717 - RNA, 22 nt, Human
uucuuauagaagcaaccauugu

SEQ ID NO: 443718 - RNA, 22 nt, Human
ugagaaggccugugugacaggg

SEQ ID NO: 443719 - RNA, 22 nt, Human
ucagcuucuccaagugacaugg

SEQ ID NO: 443720 - RNA, 22 nt, Human
gcaaacauucaggaguacagga

SEQ ID NO: 443721 - RNA, 22 nt, Human
cuucuugaaaccugcucccuca

SEQ ID NO: 443722 - RNA, 23 nt, Human
uggcucugagagguucagaugcu

SEQ ID NO: 443723 - RNA, 19 nt, Human
gcaggcaguggcauucgga

SEQ ID NO: 443724 - RNA, 22 nt, Human
uuuguacagugauguuguaugc

SEQ ID NO: 443725 - RNA, 22 nt, Human
guauaugagaaccauggaggug

SEQ ID NO: 443726 - RNA, 22 nt, Human
accagggcagccgagguguguc

SEQ ID NO: 443727 - RNA, 22 nt, Human
caaggcaguuccccagagggcu

SEQ ID NO: 443728 - RNA, 22 nt, Human
aauggcuuuaggaauccagugc

SEQ ID NO: 443729 - RNA, 22 nt, Human
gcuuggcuggaaauagguugag

SEQ ID NO: 443730 - RNA, 22 nt, Human
ggcugcagcggauuggggauug

SEQ ID NO: 443731 - RNA, 18 nt, Human
uccagcgugcuccagggc

SEQ ID NO: 443732 - RNA, 22 nt, Human
uacccagcuucaagucaggacu

SEQ ID NO: 443733 - RNA, 22 nt, Human
ugucacauguguggcauuuuuc

SEQ ID NO: 443734 - RNA, 23 nt, Human
ucaugaguggcugcggggcugag

SEQ ID NO: 443735 - RNA, 18 nt, Human
uaaaugcauguuaauaac

SEQ ID NO: 443736 - RNA, 22 nt, Human
gggaaguuugugggaggaauau

SEQ ID NO: 443737 - RNA, 22 nt, Human
gggcccuggauuuaagcaugga

SEQ ID NO: 443738 - RNA, 22 nt, Human
uggggcuggcuauugucucccu

SEQ ID NO: 443739 - RNA, 22 nt, Human
auaaggcaagcugucaguuugu

SEQ ID NO: 443740 - RNA, 22 nt, Human
gcugucaggccaugugggccuu

SEQ ID NO: 443741 - RNA, 21 nt, Human
ucuaaugacauccucugacaa

SEQ ID NO: 443742 - RNA, 22 nt, Human
gguuccugugccucuagcuggc

SEQ ID NO: 443743 - RNA, 19 nt, Human
gacaggaaggcuaccagua

SEQ ID NO: 443744 - RNA, 22 nt, Human
acccugagggguauagcagaag

SEQ ID NO: 443745 - RNA, 18 nt, Human
caguccuguuucuacagg

SEQ ID NO: 443746 - RNA, 22 nt, Human
cauguaaaaagaagaaucugga

SEQ ID NO: 443747 - RNA, 22 nt, Human
agagcugcaggguggacccagg

SEQ ID NO: 443748 - RNA, 22 nt, Human
cagcauggggcuuggagucagc

SEQ ID NO: 443749 - RNA, 21 nt, Human
ugaggaugugcagcagcagga

SEQ ID NO: 443750 - RNA, 22 nt, Human
cugggagcugaggcugacgcug

SEQ ID NO: 443751 - RNA, 22 nt, Human
gagagcuggccagcuucaguau

SEQ ID NO: 443752 - RNA, 22 nt, Human
ggcaggagauaaaauauuaguu

SEQ ID NO: 443753 - RNA, 21 nt, Human
guggcucugccaggacugaaa

SEQ ID NO: 443754 - RNA, 18 nt, Human
caggccuuugagacagaa

SEQ ID NO: 443755 - RNA, 22 nt, Human
ccaguccugcucccugaccacc

SEQ ID NO: 443756 - RNA, 22 nt, Human
cugggcuuuugagucacaaggg

SEQ ID NO: 443757 - RNA, 22 nt, Human
uuuacacauaccucuuuaaagu

SEQ ID NO: 443758 - RNA, 22 nt, Human
gcaacauucauguucuguaacc

SEQ ID NO: 443759 - RNA, 22 nt, Human
gcaucuaaacuugcaucauugu

SEQ ID NO: 443760 - RNA, 20 nt, Human
uucaugggagcaaagaggcc

SEQ ID NO: 443761 - RNA, 22 nt, Human
gcccaaggucccauggcagcac

SEQ ID NO: 443762 - RNA, 22 nt, Human
ugcuagggauguagcagugaag

SEQ ID NO: 443763 - RNA, 22 nt, Human
ugcauuaugcuacccagaagcu

SEQ ID NO: 443764 - RNA, 22 nt, Human
aguuuuuccugauuuuacagaa

SEQ ID NO: 443765 - RNA, 22 nt, Human
gccagcugaggccgugcaggcu

SEQ ID NO: 443766 - RNA, 22 nt, Human
uuaacacuaucugucauaauua

SEQ ID NO: 443767 - RNA, 22 nt, Human
aagagcuguaugccauaugauu

SEQ ID NO: 443768 - RNA, 22 nt, Human
ugauucaacuuucauaacaaaa

SEQ ID NO: 443769 - RNA, 22 nt, Human
uauaauuuuaagugguaaauua

SEQ ID NO: 443770 - RNA, 22 nt, Human
ccuggcagucaggggaguccuu

SEQ ID NO: 443771 - RNA, 22 nt, Human
ucaugcagaggaaggcuaguuu

SEQ ID NO: 443772 - RNA, 22 nt, Human
ccuguguguaggccaggggagu

SEQ ID NO: 443773 - RNA, 22 nt, Human
ugcagcccaggcgucagguggu

SEQ ID NO: 443774 - RNA, 22 nt, Human
uacagcaaugcuacaagaugac

SEQ ID NO: 443775 - RNA, 22 nt, Human
acugccucuuggugcugagaga

SEQ ID NO: 443776 - RNA, 19 nt, Human
ccaggccugcgggcguugg

SEQ ID NO: 443777 - RNA, 22 nt, Human
auaaaggcaacaccaggguaug

SEQ ID NO: 443778 - RNA, 22 nt, Human
ucuggcuucccacucugccggg

SEQ ID NO: 443779 - RNA, 22 nt, Human
uuagacauuaaaugccauuuaa

SEQ ID NO: 443780 - RNA, 22 nt, Human
ggagcccucaccggcgagugcc

SEQ ID NO: 443781 - RNA, 17 nt, Human
cagaaggaagcauggca

SEQ ID NO: 443782 - RNA, 22 nt, Human
cagauucaaccuaagacaaucu

SEQ ID NO: 443783 - RNA, 22 nt, Human
ugggcagagaguagaggcaacg

SEQ ID NO: 443784 - RNA, 22 nt, Human
cuuuuguugcccuugucgcagg

SEQ ID NO: 443785 - RNA, 22 nt, Human
acccagaggugucuagcaagcu

SEQ ID NO: 443786 - RNA, 22 nt, Human
cugagcagcaauugcuggccca

SEQ ID NO: 443787 - RNA, 22 nt, Human
cugugugugaacacagcccagc

SEQ ID NO: 443788 - RNA, 22 nt, Human
agauaugucccugucuaauauu

SEQ ID NO: 443789 - RNA, 22 nt, Human
gccuggaggggacagucucugg

SEQ ID NO: 443790 - RNA, 22 nt, Human
cagagcaguggagaguaggucu

SEQ ID NO: 443791 - RNA, 22 nt, Human
caaaugaauagggagugugaug

SEQ ID NO: 443792 - RNA, 19 nt, Human
cccaguccuuguccugggc

SEQ ID NO: 443793 - RNA, 22 nt, Human
agacacagucugucuggaggag

SEQ ID NO: 443794 - RNA, 22 nt, Human
guugauuugaagagcagaaagu

SEQ ID NO: 443795 - RNA, 22 nt, Human
ccugaagcaaggguaggcaggu

SEQ ID NO: 443796 - RNA, 22 nt, Human
augcuugcccauguuucugaag

SEQ ID NO: 443797 - RNA, 22 nt, Human
gcagcuggacccacacggcuua

SEQ ID NO: 443798 - RNA, 22 nt, Human
gaggccuuccucucaagcacau

SEQ ID NO: 443799 - RNA, 22 nt, Human
aaugaggccaguagaaggaagu

SEQ ID NO: 443800 - RNA, 22 nt, Human
ugagccugcaauaagcacagcc

SEQ ID NO: 443801 - RNA, 22 nt, Human
cuucauuggcuuccauagaugc

SEQ ID NO: 443802 - RNA, 23 nt, Human
agguccuggacauaugugcauca

SEQ ID NO: 443803 - RNA, 22 nt, Human
agggggcaucagguccuggcuc

SEQ ID NO: 443804 - RNA, 22 nt, Human
gagcucugggaaacaaagugua

SEQ ID NO: 443805 - RNA, 23 nt, Human
uggcagugaucaaaagcuuacau

SEQ ID NO: 443806 - RNA, 22 nt, Human
ucagcccuggcacugucuccca

SEQ ID NO: 443807 - RNA, 22 nt, Human
cagaggcugcucuggguggcau

SEQ ID NO: 443808 - RNA, 22 nt, Human
ugugcuauuuuugcauaugugu

SEQ ID NO: 443809 - RNA, 21 nt, Human
gauuaaauuuaagcuacaugc

SEQ ID NO: 443810 - RNA, 22 nt, Human
cugcccugaccugccucagagu

SEQ ID NO: 443811 - RNA, 22 nt, Human
gagcagggccacuucuguaccu

SEQ ID NO: 443812 - RNA, 22 nt, Human
gcuguuucugguucuguuccua

SEQ ID NO: 443813 - RNA, 22 nt, Human
uuccuuccucuuucacaacagc

SEQ ID NO: 443814 - RNA, 22 nt, Human
uugauuuucaauucauugacaa

SEQ ID NO: 443815 - RNA, 22 nt, Human
ucccagccacagguguagcccu

SEQ ID NO: 443816 - RNA, 22 nt, Human
cagcaguggcugcaggcagcug

SEQ ID NO: 443817 - RNA, 22 nt, Human
ucaaaaauguuuuauauuggua

SEQ ID NO: 443818 - RNA, 17 nt, Human
ccagagcuacugagacu

SEQ ID NO: 443819 - RNA, 22 nt, Human
ugcagcugaaccuagagucugu

SEQ ID NO: 443820 - RNA, 22 nt, Human
guagccagaucugcugugucug

SEQ ID NO: 443821 - RNA, 22 nt, Human
uucuggagaaucaccaccaggc

SEQ ID NO: 443822 - RNA, 22 nt, Human
uuugcaaaccggagcucugcaa

SEQ ID NO: 443823 - RNA, 22 nt, Human
gcccacacaccagcucaggagg

SEQ ID NO: 443824 - RNA, 22 nt, Human
auugcugaaaguauuuuaugac

SEQ ID NO: 443825 - RNA, 22 nt, Human
ggguugaggcggaugucggcgg

SEQ ID NO: 443826 - RNA, 22 nt, Human
uuugcaaauaccaugaaacuug

SEQ ID NO: 443827 - RNA, 17 nt, Human
ugcugccaagucccaac

SEQ ID NO: 443828 - RNA, 22 nt, Human
gcccagcacauugcugaggacc

SEQ ID NO: 443829 - RNA, 22 nt, Human
aucaaauauaauaauuuucgcu

SEQ ID NO: 443830 - RNA, 22 nt, Human
gcugugugaaaacugggccugg

SEQ ID NO: 443831 - RNA, 22 nt, Human
caggcagcagccacucugguau

SEQ ID NO: 443832 - RNA, 22 nt, Human
ugugugugaaccauugagggcu

SEQ ID NO: 443833 - RNA, 22 nt, Human
ccuggcugugcauugccggccc

SEQ ID NO: 443834 - RNA, 22 nt, Human
gccuggagaauuaaaaggaagg

SEQ ID NO: 443835 - RNA, 22 nt, Human
gcaauaaacucucucaagccac

SEQ ID NO: 443836 - RNA, 22 nt, Human
ggagaaugauucuuugcucacu

SEQ ID NO: 443837 - RNA, 22 nt, Human
uuaacacuccuaacuacagucu

SEQ ID NO: 443838 - RNA, 22 nt, Human
ccaggccccagggcuggcuuuc

SEQ ID NO: 443839 - RNA, 22 nt, Human
uuucagagguaugcugcuuauc

SEQ ID NO: 443840 - RNA, 22 nt, Human
aggcauggcacugagcagcuuc

SEQ ID NO: 443841 - RNA, 22 nt, Human
cagccagccucucaaccaugca

SEQ ID NO: 443842 - RNA, 22 nt, Human
cugggcuacguguugacagcau

SEQ ID NO: 443843 - RNA, 22 nt, Human
acaagagauuaucuacagauga

SEQ ID NO: 443844 - RNA, 22 nt, Human
cuggguuccauguagccaagag

SEQ ID NO: 443845 - RNA, 22 nt, Human
uuuuaaaggauacucuugucua

SEQ ID NO: 443846 - RNA, 22 nt, Human
ucugggaggggcugccauugcu

SEQ ID NO: 443847 - RNA, 22 nt, Human
gagcugaguaugaaggauguga

SEQ ID NO: 443848 - RNA, 22 nt, Human
uacaggaaggagcacaucggga

SEQ ID NO: 443849 - RNA, 22 nt, Human
cuacugaguccuucagcugcca

SEQ ID NO: 443850 - RNA, 22 nt, Human
aggacuccauguguccuggaga

SEQ ID NO: 443851 - RNA, 22 nt, Human
aaguucaagucuccugaguaua

SEQ ID NO: 443852 - RNA, 22 nt, Human
gagggaagauuccccauauggg

SEQ ID NO: 443853 - RNA, 23 nt, Human
uagagcagggaaaucugucagag

SEQ ID NO: 443854 - RNA, 21 nt, Human
gacaggggaagaagcaaggag

SEQ ID NO: 443855 - RNA, 22 nt, Human
cuaaauuauuugcacauuagag

SEQ ID NO: 443856 - RNA, 22 nt, Human
aggcugaggagggauguugcuu

SEQ ID NO: 443857 - RNA, 22 nt, Human
ggucccugaagaggccuggggu

SEQ ID NO: 443858 - RNA, 23 nt, Human
ggccuguguuuugucugaaguac

SEQ ID NO: 443859 - RNA, 17 nt, Human
ugguggcuggagucagg

SEQ ID NO: 443860 - RNA, 22 nt, Human
uucuuauaaguuaauauuucca

SEQ ID NO: 443861 - RNA, 22 nt, Human
ucuggccacuugcuucacacug

SEQ ID NO: 443862 - RNA, 21 nt, Human
acagcagggcuggcaugacag

SEQ ID NO: 443863 - RNA, 22 nt, Human
cuuucuagacuguccagaugau

SEQ ID NO: 443864 - RNA, 22 nt, Human
gaggcuggagauauuccaaucu

SEQ ID NO: 443865 - RNA, 22 nt, Human
gagggggcucccugaagccagu

SEQ ID NO: 443866 - RNA, 22 nt, Human
cccaggguccggauaacccugg

SEQ ID NO: 443867 - RNA, 22 nt, Human
uucuaacuaauuggaaauggaa

SEQ ID NO: 443868 - RNA, 22 nt, Human
gguucugacaagcugggauggu

SEQ ID NO: 443869 - RNA, 23 nt, Human
cccagcuuucccacugccgagag

SEQ ID NO: 443870 - RNA, 22 nt, Human
ucuugaauuguacucccauaag

SEQ ID NO: 443871 - RNA, 23 nt, Human
aguuuuucugcaugguucuguau

SEQ ID NO: 443872 - RNA, 22 nt, Human
aaaauuuugcccuauccuucau

SEQ ID NO: 443873 - RNA, 22 nt, Human
aaugaugguuaaacacuggagg

SEQ ID NO: 443874 - RNA, 22 nt, Human
cugcagaggccucgccuccucu

SEQ ID NO: 443875 - RNA, 22 nt, Human
ggacugggagaauggaggcaag

SEQ ID NO: 443876 - RNA, 22 nt, Human
cagcagcaggcgcacggccguc

SEQ ID NO: 443877 - RNA, 22 nt, Human
aagcucugaggugagcaaucgg

SEQ ID NO: 443878 - RNA, 22 nt, Human
ggugugccuggggcuuagcugc

SEQ ID NO: 443879 - RNA, 22 nt, Human
aggaggccgggauucuggagau

SEQ ID NO: 443880 - RNA, 22 nt, Human
uguacaaagaguauagcuuuga

SEQ ID NO: 443881 - RNA, 22 nt, Human
auucauuagccacuaacuagca

SEQ ID NO: 443882 - RNA, 21 nt, Human
gcagccacagccaccaagcua

SEQ ID NO: 443883 - RNA, 22 nt, Human
auuauauugaguauaaccagag

SEQ ID NO: 443884 - RNA, 21 nt, Human
cugcaaauaccuaguuaucug

SEQ ID NO: 443885 - RNA, 22 nt, Human
augugugugcauuucucucccu

SEQ ID NO: 443886 - RNA, 22 nt, Human
uggaaugacagagagucugaau

SEQ ID NO: 443887 - RNA, 22 nt, Human
ccucugaggugagcccagcugg

SEQ ID NO: 443888 - RNA, 19 nt, Human
aagagucacaggcagcccu

SEQ ID NO: 443889 - RNA, 22 nt, Human
ccuccugggcuccugucugcac

SEQ ID NO: 443890 - RNA, 22 nt, Human
gaaaggagucagucuuacugaa

SEQ ID NO: 443891 - RNA, 22 nt, Human
ggagguagccucaaaagcagcu

SEQ ID NO: 443892 - RNA, 22 nt, Human
uucacaagucuggaauaugcua

SEQ ID NO: 443893 - RNA, 22 nt, Human
ugauuucuuccuugucauuaga

SEQ ID NO: 443894 - RNA, 22 nt, Human
uucuagaagugucuaugucugu

SEQ ID NO: 443895 - RNA, 22 nt, Human
cucuccccgguacgagcggccg

SEQ ID NO: 443896 - RNA, 22 nt, Human
gagcugccuguugcauagcaac

SEQ ID NO: 443897 - RNA, 22 nt, Human
aaugcaaacuucuuguuacuug

SEQ ID NO: 443898 - RNA, 22 nt, Human
ggcccugggcccucuagcuugu

SEQ ID NO: 443899 - RNA, 22 nt, Human
gcugaagcagauccaggugugg

SEQ ID NO: 443900 - RNA, 22 nt, Human
aauagcauguaaguuuaaaaga

SEQ ID NO: 443901 - RNA, 22 nt, Human
uaaaugcaguuaguacuugcca

SEQ ID NO: 443902 - RNA, 22 nt, Human
cugcaggcaucuaacugugggc

SEQ ID NO: 443903 - RNA, 22 nt, Human
gcaaaugcucuccuuggucagg

SEQ ID NO: 443904 - RNA, 22 nt, Human
gugcaauauugccauguucuug

SEQ ID NO: 443905 - RNA, 22 nt, Human
ggcucuggaaaguguccuugau

SEQ ID NO: 443906 - RNA, 22 nt, Human
ccagagcugcauccagcagguu

SEQ ID NO: 443907 - RNA, 22 nt, Human
acaggccuauguuccauugcag

SEQ ID NO: 443908 - RNA, 22 nt, Human
uguggccaccagagcugcuauu

SEQ ID NO: 443909 - RNA, 22 nt, Human
auaugacauaaaaucauuuuug

SEQ ID NO: 443910 - RNA, 22 nt, Human
cgcagcugcacggggcugagcc

SEQ ID NO: 443911 - RNA, 22 nt, Human
gcacagagggcagugagccucu

SEQ ID NO: 443912 - RNA, 22 nt, Human
uuucucaaguacugcacaugaa

SEQ ID NO: 443913 - RNA, 22 nt, Human
cccugccugugggcaucaacau

SEQ ID NO: 443914 - RNA, 22 nt, Human
uuauuuacaacucuucucuucc

SEQ ID NO: 443915 - RNA, 22 nt, Human
gccagagcacaggcugguagua

SEQ ID NO: 443916 - RNA, 22 nt, Human
auucagcaugcaauuagguaau

SEQ ID NO: 443917 - RNA, 22 nt, Human
aggcuggcugagcugcagccug

SEQ ID NO: 443918 - RNA, 22 nt, Human
acuguguggaccacucugaggc

SEQ ID NO: 443919 - RNA, 22 nt, Human
uuuauacauggagaauuuuugc

SEQ ID NO: 443920 - RNA, 22 nt, Human
ugcagaagugagucaugaggaa

SEQ ID NO: 443921 - RNA, 22 nt, Human
gccuggugguauccuggcaaga

SEQ ID NO: 443922 - RNA, 22 nt, Human
acuuugcagcugaggacauuuc

SEQ ID NO: 443923 - RNA, 19 nt, Human
ccuccccuuggaccagcaa

SEQ ID NO: 443924 - RNA, 22 nt, Human
ucaggagcagggggaagcucug

SEQ ID NO: 443925 - RNA, 22 nt, Human
ugggugcuucgucagcucugag

SEQ ID NO: 443926 - RNA, 22 nt, Human
gcuggugcauuagcugcaguuc

SEQ ID NO: 443927 - RNA, 22 nt, Human
cagguccuuuaguguccagaac

SEQ ID NO: 443928 - RNA, 22 nt, Human
ugaggcaggaguucaggcugcg

SEQ ID NO: 443929 - RNA, 22 nt, Human
ugcccagcugucaaaguagaua

SEQ ID NO: 443930 - RNA, 22 nt, Human
ccauuuugucuccugaaaucua

SEQ ID NO: 443931 - RNA, 22 nt, Human
cgccggcuugaggcaggcggca

SEQ ID NO: 443932 - RNA, 22 nt, Human
agcccuccuuuguucaugcugc

SEQ ID NO: 443933 - RNA, 22 nt, Human
uauuguacugaggaauaaagcu

SEQ ID NO: 443934 - RNA, 22 nt, Human
uuuuuugucuugaagaaauggu

SEQ ID NO: 443935 - RNA, 22 nt, Human
gaacacugagaaagucagcuuu

SEQ ID NO: 443936 - RNA, 22 nt, Human
agaggcaggagguugacuugag

SEQ ID NO: 443937 - RNA, 22 nt, Human
uggaaagagguagaggaucugg

SEQ ID NO: 443938 - RNA, 22 nt, Human
aagcagagcaagcguauuuauu

SEQ ID NO: 443939 - RNA, 20 nt, Human
guaaaauauggucuuugggu

SEQ ID NO: 443940 - RNA, 20 nt, Human
aacuuugcauuuuauucucc

SEQ ID NO: 443941 - RNA, 22 nt, Human
uuauaguaugugcauaugugug

SEQ ID NO: 443942 - RNA, 22 nt, Human
aguuuucucacaucaaaaauga

SEQ ID NO: 443943 - RNA, 22 nt, Human
aggggcugccuggcuuggcacu

SEQ ID NO: 443944 - RNA, 22 nt, Human
ggcagcagaacuggcccuguau

SEQ ID NO: 443945 - RNA, 22 nt, Human
cauguuuucuaggcuuucacaa

SEQ ID NO: 443946 - RNA, 22 nt, Human
ugugaauaccuugaauucauca

SEQ ID NO: 443947 - RNA, 22 nt, Human
acauaauaggugccugaauauu

SEQ ID NO: 443948 - RNA, 22 nt, Human
ggccugggcccacugucaagag

SEQ ID NO: 443949 - RNA, 22 nt, Human
agugcaggccccaggccaggcc

SEQ ID NO: 443950 - RNA, 17 nt, Human
ugagaaguaggcaucau

SEQ ID NO: 443951 - RNA, 22 nt, Human
caguaucuugcuuauagacaca

SEQ ID NO: 443952 - RNA, 20 nt, Human
ccacaggaguccagucgacc

SEQ ID NO: 443953 - RNA, 23 nt, Human
uuauugcauccaaaugcauuccu

SEQ ID NO: 443954 - RNA, 21 nt, Human
ugcagcagaguaagcagggga

SEQ ID NO: 443955 - RNA, 22 nt, Human
auugaagagaagcuaaauagag

SEQ ID NO: 443956 - RNA, 22 nt, Human
cagcugagaccagaaugcaggu

SEQ ID NO: 443957 - RNA, 22 nt, Human
cagcugagaaaggcaggcucac

SEQ ID NO: 443958 - RNA, 22 nt, Human
cacauuuaagugcuuguucaga

SEQ ID NO: 443959 - RNA, 22 nt, Human
ucaguccucucuggguuucuua

SEQ ID NO: 443960 - RNA, 22 nt, Human
guggcagagguuccucagugug

SEQ ID NO: 443961 - RNA, 22 nt, Human
ggccaggugcgguggcucacac

SEQ ID NO: 443962 - RNA, 22 nt, Human
uuugguuuuuaccugcugagag

SEQ ID NO: 443963 - RNA, 22 nt, Human
gcaagcagcccagaacagcucu

SEQ ID NO: 443964 - RNA, 22 nt, Human
acugcauuugguaaagucaaga

SEQ ID NO: 443965 - RNA, 22 nt, Human
ugagcaauaugugaauuuucuu

SEQ ID NO: 443966 - RNA, 22 nt, Human
cugaggucaauuaaucaacaac

SEQ ID NO: 443967 - RNA, 22 nt, Human
uucuaaauuuuggaagaugcag

SEQ ID NO: 443968 - RNA, 19 nt, Human
agccuggagggcuggucac

SEQ ID NO: 443969 - RNA, 22 nt, Human
gguggcagcgucuaucugacau

SEQ ID NO: 443970 - RNA, 22 nt, Human
uucagagaugacaccugguguu

SEQ ID NO: 443971 - RNA, 22 nt, Human
auuugcauaauagugauuugua

SEQ ID NO: 443972 - RNA, 22 nt, Human
gagcucuggcagggcaggucug

SEQ ID NO: 443973 - RNA, 22 nt, Human
aaggaagaggcagguuuugcug

SEQ ID NO: 443974 - RNA, 22 nt, Human
auguagaacagguuaaugacag

SEQ ID NO: 443975 - RNA, 22 nt, Human
uggagcaggccggaaguggcuu

SEQ ID NO: 443976 - RNA, 19 nt, Human
cugcugggugcugagggag

SEQ ID NO: 443977 - RNA, 22 nt, Human
cuuuauuccuacaagauuuucu

SEQ ID NO: 443978 - RNA, 22 nt, Human
aagcacaggagacgcacagcca

SEQ ID NO: 443979 - RNA, 22 nt, Human
aaaacacugccugcuugacuga

SEQ ID NO: 443980 - RNA, 22 nt, Human
aagaacugugcuccaggcucca

SEQ ID NO: 443981 - RNA, 22 nt, Human
cccccaggcucugacacaggag

SEQ ID NO: 443982 - RNA, 22 nt, Human
ccugggcuggaguacagcagug

SEQ ID NO: 443983 - RNA, 22 nt, Human
gcucuccaaacccuguggcuuu

SEQ ID NO: 443984 - RNA, 22 nt, Human
uggcauuugcucccuuguguuc

SEQ ID NO: 443985 - RNA, 22 nt, Human
auuugcaaagucguaucuguga

SEQ ID NO: 443986 - RNA, 22 nt, Human
cuggcuccacucccugccugac

SEQ ID NO: 443987 - RNA, 22 nt, Human
acugcauuaucaccaagaugua

SEQ ID NO: 443988 - RNA, 22 nt, Human
uccucagcaaacacuucacucu

SEQ ID NO: 443989 - RNA, 22 nt, Human
aggucucugaguacugcuggac

SEQ ID NO: 443990 - RNA, 22 nt, Human
acagcagccagccacugugagc

SEQ ID NO: 443991 - RNA, 22 nt, Human
ugggcagauguccucugaagug

SEQ ID NO: 443992 - RNA, 23 nt, Human
ggcaccaggccauggagcgggag

SEQ ID NO: 443993 - RNA, 22 nt, Human
acaaaugaacauauaagcuuga

SEQ ID NO: 443994 - RNA, 22 nt, Human
cagcagcacucugcgggucccc

SEQ ID NO: 443995 - RNA, 22 nt, Human
uuuguaaaggccugaauuucag

SEQ ID NO: 443996 - RNA, 22 nt, Human
ccucagggucugaggagaccgu

SEQ ID NO: 443997 - RNA, 22 nt, Human
aguuggguuugugucaguugca

SEQ ID NO: 443998 - RNA, 22 nt, Human
cauucagagcuuucuuaucaua

SEQ ID NO: 443999 - RNA, 22 nt, Human
ggaaaagaaagggacugauugg

SEQ ID NO: 444000 - RNA, 22 nt, Human
cacaggaauaagucaaacuuca

SEQ ID NO: 444001 - RNA, 22 nt, Human
aaacaucaccauuuuaccuaau

SEQ ID NO: 444002 - RNA, 22 nt, Human
agccaagcacucaacuccugga

SEQ ID NO: 444003 - RNA, 22 nt, Human
ucaggcuggaaugcaguggggc

SEQ ID NO: 444004 - RNA, 22 nt, Human
uggggacagggcucagcaauuu

SEQ ID NO: 444005 - RNA, 19 nt, Human
ugagaagguuuccgugggu

SEQ ID NO: 444006 - RNA, 22 nt, Human
cccugggcagucugcacuucag

SEQ ID NO: 444007 - RNA, 22 nt, Human
auggaggaugugcagcaugggc

SEQ ID NO: 444008 - RNA, 22 nt, Human
guguaaguaucuuuguaucuuu

SEQ ID NO: 444009 - RNA, 22 nt, Human
gagaggaacucccagugccugg

SEQ ID NO: 444010 - RNA, 19 nt, Human
uuggaaggagccagagugg

SEQ ID NO: 444011 - RNA, 22 nt, Human
gcaacauugcuucugaacauag

SEQ ID NO: 444012 - RNA, 22 nt, Human
gagacacaagaagacaugcaca

SEQ ID NO: 444013 - RNA, 22 nt, Human
agccaaagaucagugugcaagu

SEQ ID NO: 444014 - RNA, 22 nt, Human
cccugggcaagcccuauuuucc

SEQ ID NO: 444015 - RNA, 22 nt, Human
aaugcuuugucugcuccagacu

SEQ ID NO: 444016 - RNA, 22 nt, Human
aaaagugaugggauggcacuuc

SEQ ID NO: 444017 - RNA, 22 nt, Human
uugacaaagauauauucaugcu

SEQ ID NO: 444018 - RNA, 20 nt, Human
gaggccucagccucagcucc

SEQ ID NO: 444019 - RNA, 22 nt, Human
uucaauagaaaugacauucuuu

SEQ ID NO: 444020 - RNA, 22 nt, Human
ugaauucugcuguagcaagucc

SEQ ID NO: 444021 - RNA, 22 nt, Human
ugaauaugcuuugcaauccuaa

SEQ ID NO: 444022 - RNA, 22 nt, Human
uggggcagggaugggaaacuau

SEQ ID NO: 444023 - RNA, 22 nt, Human
ccagcucuaaacggcucugugg

SEQ ID NO: 444024 - RNA, 22 nt, Human
ccagaaaacucuacaugcuugu

SEQ ID NO: 444025 - RNA, 22 nt, Human
uccugugucucagcgugaagca

SEQ ID NO: 444026 - RNA, 22 nt, Human
uaacacuauccagauaugauaa

SEQ ID NO: 444027 - RNA, 22 nt, Human
ugcagcuguaacagaggccuca

SEQ ID NO: 444028 - RNA, 22 nt, Human
uucaaguagcuaaauuagcugc

SEQ ID NO: 444029 - RNA, 22 nt, Human
acagcaagccagcuugucacug

SEQ ID NO: 444030 - RNA, 22 nt, Human
gcccugcugucuucagaguaua

SEQ ID NO: 444031 - RNA, 22 nt, Human
auaauggcuucugaguauuagg

SEQ ID NO: 444032 - RNA, 20 nt, Human
gcaaggcacagugaggaggg

SEQ ID NO: 444033 - RNA, 22 nt, Human
cauuugcauaugaagaaguaag

SEQ ID NO: 444034 - RNA, 22 nt, Human
ucccagagcucuggagguugga

SEQ ID NO: 444035 - RNA, 22 nt, Human
gccuggaguacuccuugaagug

SEQ ID NO: 444036 - RNA, 22 nt, Human
cuuugcaagggauuucaugucu

SEQ ID NO: 444037 - RNA, 22 nt, Human
ugacacagaaauuaagcuguca

SEQ ID NO: 444038 - RNA, 22 nt, Human
auucacacacauuuagagcaga

SEQ ID NO: 444039 - RNA, 22 nt, Human
ugccagggagcccugcugacca

SEQ ID NO: 444040 - RNA, 22 nt, Human
ggcagaggaaggaugaauucac

SEQ ID NO: 444041 - RNA, 18 nt, Human
cugugggcuggugcauga

SEQ ID NO: 444042 - RNA, 22 nt, Human
cagagggccaucucuaucuuca

SEQ ID NO: 444043 - RNA, 22 nt, Human
ugugaauauacuuaaugccacu

SEQ ID NO: 444044 - RNA, 22 nt, Human
uuacaguaccuguauggccacu

SEQ ID NO: 444045 - RNA, 22 nt, Human
uugcagcuguuacugauagaua

SEQ ID NO: 444046 - RNA, 22 nt, Human
uguauuucaauuuuagcaccaa

SEQ ID NO: 444047 - RNA, 22 nt, Human
cugucaguaggcucccaucauu

SEQ ID NO: 444048 - RNA, 22 nt, Human
auugcuuuuagugaaauuauau

SEQ ID NO: 444049 - RNA, 22 nt, Human
acauggugugcugagaaugaca

SEQ ID NO: 444050 - RNA, 22 nt, Human
agucaguguucuccggagaggc

SEQ ID NO: 444051 - RNA, 16 nt, Human
ugggcagaugagaaga

SEQ ID NO: 444052 - RNA, 22 nt, Human
cguguguguaccugcgcauuua

SEQ ID NO: 444053 - RNA, 22 nt, Human
acaggucaacgagagcaggcaa

SEQ ID NO: 444054 - RNA, 22 nt, Human
aguguccaacucagcuugucaa

SEQ ID NO: 444055 - RNA, 18 nt, Human
uguuuccuccuggaggcu

SEQ ID NO: 444056 - RNA, 22 nt, Human
gagggcacucgagacuacggca

SEQ ID NO: 444057 - RNA, 22 nt, Human
aaaugcauguauguaauaugcu

SEQ ID NO: 444058 - RNA, 22 nt, Human
uugcagaagggcacagugauca

SEQ ID NO: 444059 - RNA, 22 nt, Human
ucagucuauccagcucagaucc

SEQ ID NO: 444060 - RNA, 18 nt, Human
cagucccaaaccuuagga

SEQ ID NO: 444061 - RNA, 22 nt, Human
uuaauuuauguccaaaccagau

SEQ ID NO: 444062 - RNA, 22 nt, Human
aguuucuagcaaggauuguuga

SEQ ID NO: 444063 - RNA, 22 nt, Human
aaauuuuguauucuaguucuag

SEQ ID NO: 444064 - RNA, 22 nt, Human
caguguccucagccagcagcua

SEQ ID NO: 444065 - RNA, 22 nt, Human
guguuaaaaaucccaugauaug

SEQ ID NO: 444066 - RNA, 22 nt, Human
auaugacagcggauucacauau

SEQ ID NO: 444067 - RNA, 22 nt, Human
ucugaggcauacccaggccccc

SEQ ID NO: 444068 - RNA, 22 nt, Human
aaggcaauuuggaagaggcaga

SEQ ID NO: 444069 - RNA, 22 nt, Human
gaggagcuggcagcgucuccgc

SEQ ID NO: 444070 - RNA, 22 nt, Human
cacagaaguguguauaacucuu

SEQ ID NO: 444071 - RNA, 20 nt, Human
ucugucucugagcuagacuu

SEQ ID NO: 444072 - RNA, 22 nt, Human
aggccagcaagaaagagagucu

SEQ ID NO: 444073 - RNA, 22 nt, Human
aauuucaauuacuuuugcacca

SEQ ID NO: 444074 - RNA, 22 nt, Human
acuaggagaaaacuuacacuga

SEQ ID NO: 444075 - RNA, 22 nt, Human
agacccugcaccucucgugggc

SEQ ID NO: 444076 - RNA, 22 nt, Human
aggaaaggccuuugcauuuggu

SEQ ID NO: 444077 - RNA, 23 nt, Human
cucccuggaguuucuggaagaug

SEQ ID NO: 444078 - RNA, 22 nt, Human
aggcagcuggaggcagagacua

SEQ ID NO: 444079 - RNA, 22 nt, Human
uuaacauccuguuuaaauuugg

SEQ ID NO: 444080 - RNA, 22 nt, Human
aggcacagauuuggggaaagca

SEQ ID NO: 444081 - RNA, 22 nt, Human
auauucacuggguacuaaaaag

SEQ ID NO: 444082 - RNA, 22 nt, Human
acagcagagacacucaggaggc

SEQ ID NO: 444083 - RNA, 22 nt, Human
gugcauaugguuacagcaccgc

SEQ ID NO: 444084 - RNA, 22 nt, Human
acuucucuucauagguggcaau

SEQ ID NO: 444085 - RNA, 22 nt, Human
aauaaauguuaagauugucuca

SEQ ID NO: 444086 - RNA, 22 nt, Human
agcagccccucggcgggugcgc

SEQ ID NO: 444087 - RNA, 22 nt, Human
agagggagcccagucauagcug

SEQ ID NO: 444088 - RNA, 22 nt, Human
ggcaagcauaaccuguacagcc

SEQ ID NO: 444089 - RNA, 22 nt, Human
aaggcagaaagggaugugagug

SEQ ID NO: 444090 - RNA, 22 nt, Human
cagcccaggccgacaguuccuc

SEQ ID NO: 444091 - RNA, 22 nt, Human
agggaugauggaaagaagcagg

SEQ ID NO: 444092 - RNA, 22 nt, Human
cuuaaucucaccugcaaagucc

SEQ ID NO: 444093 - RNA, 22 nt, Human
uuaagcauuuauuaugugccag

SEQ ID NO: 444094 - RNA, 22 nt, Human
cgcugccaggauccccugccgg

SEQ ID NO: 444095 - RNA, 22 nt, Human
aagccagauuucacucuuaauu

SEQ ID NO: 444096 - RNA, 22 nt, Human
acuuggcaaguaucuauaaagu

SEQ ID NO: 444097 - RNA, 22 nt, Human
cagaacugggcagggagcagag

SEQ ID NO: 444098 - RNA, 22 nt, Human
aaaugcacagguuuuaaauccu

SEQ ID NO: 444099 - RNA, 22 nt, Human
ccuggagcaggagcugcagagg

SEQ ID NO: 444100 - RNA, 22 nt, Human
agcagggcugcagugugucuuu

SEQ ID NO: 444101 - RNA, 22 nt, Human
cucucuggaagggggagcugau

SEQ ID NO: 444102 - RNA, 22 nt, Human
acagaguauuggaaaggcagug

SEQ ID NO: 444103 - RNA, 16 nt, Human
uugcccacuuguucau

SEQ ID NO: 444104 - RNA, 22 nt, Human
cagagcuggguuugggaaaccu

SEQ ID NO: 444105 - RNA, 22 nt, Human
caguccucucacucaggccuuu

SEQ ID NO: 444106 - RNA, 20 nt, Human
agcccuguuuccuggagaga

SEQ ID NO: 444107 - RNA, 22 nt, Human
gagcagugacuggagcaugaga

SEQ ID NO: 444108 - RNA, 22 nt, Human
cugggaggcggagguuguagug

SEQ ID NO: 444109 - RNA, 22 nt, Human
ugcaggcucaccugccagggcc

SEQ ID NO: 444110 - RNA, 23 nt, Human
uugcaaauuucaguuaguucaug

SEQ ID NO: 444111 - RNA, 22 nt, Human
agauuccuaguguuauuucugu

SEQ ID NO: 444112 - RNA, 22 nt, Human
acacauuucuaaauuuuuaccg

SEQ ID NO: 444113 - RNA, 22 nt, Human
caguuacucaauaauucuugcg

SEQ ID NO: 444114 - RNA, 16 nt, Human
ggcagcagcuccgugc

SEQ ID NO: 444115 - RNA, 22 nt, Human
caugcagcaggaucucauuccc

SEQ ID NO: 444116 - RNA, 22 nt, Human
uaaaggcacugcgucccucaaa

SEQ ID NO: 444117 - RNA, 22 nt, Human
gcaggcugccaccuucugaguu

SEQ ID NO: 444118 - RNA, 20 nt, Human
gugucuggaguacuagagag

SEQ ID NO: 444119 - RNA, 22 nt, Human
guaggcagucucucaggugauc

SEQ ID NO: 444120 - RNA, 22 nt, Human
uuaauaaaguaugaauuggaaa

SEQ ID NO: 444121 - RNA, 22 nt, Human
aaugacaagacauagucucuga

SEQ ID NO: 444122 - RNA, 22 nt, Human
aggcagcguagcaaggcuagua

SEQ ID NO: 444123 - RNA, 22 nt, Human
gagauggcucucagaucuuuga

SEQ ID NO: 444124 - RNA, 22 nt, Human
ucccagccaggcucuaccacuu

SEQ ID NO: 444125 - RNA, 22 nt, Human
gcuggccauucucuuugagaug

SEQ ID NO: 444126 - RNA, 22 nt, Human
gcucagagguuguucuuggguu

SEQ ID NO: 444127 - RNA, 22 nt, Human
gcaacaggcaguuugcucaugu

SEQ ID NO: 444128 - RNA, 22 nt, Human
acaagguauccacauuaaaugu

SEQ ID NO: 444129 - RNA, 17 nt, Human
ccacacccuuuccuucc

SEQ ID NO: 444130 - RNA, 22 nt, Human
uauauuaacacccacuugccuc

SEQ ID NO: 444131 - RNA, 22 nt, Human
cccagcucaucaggagccgccc

SEQ ID NO: 444132 - RNA, 22 nt, Human
ugggcagaucuuugguggcuag

SEQ ID NO: 444133 - RNA, 22 nt, Human
cccugagcauucaugugagcuu

SEQ ID NO: 444134 - RNA, 18 nt, Human
aaaauaacaaaguuggcu

SEQ ID NO: 444135 - RNA, 22 nt, Human
ugcaacaggcugugacauggaa

SEQ ID NO: 444136 - RNA, 22 nt, Human
ucuuccucccuacagagcucag

SEQ ID NO: 444137 - RNA, 22 nt, Human
uugcagcuucgagucuaucugu

SEQ ID NO: 444138 - RNA, 22 nt, Human
uggcuacagaauuggcccuguu

SEQ ID NO: 444139 - RNA, 22 nt, Human
auuccucagcaggccuuuuguu

SEQ ID NO: 444140 - RNA, 22 nt, Human
uucacaauuucccuucaucagg

SEQ ID NO: 444141 - RNA, 22 nt, Human
aggccuggccuuuauguucaag

SEQ ID NO: 444142 - RNA, 22 nt, Human
ccugggcucugaggagggaguc

SEQ ID NO: 444143 - RNA, 22 nt, Human
cuucugggcauucagcugcaca

SEQ ID NO: 444144 - RNA, 22 nt, Human
acagcaguggguugccaguggg

SEQ ID NO: 444145 - RNA, 22 nt, Human
gugacccaugcagugguuuugg

SEQ ID NO: 444146 - RNA, 22 nt, Human
cccuggcucugccucagagccc

SEQ ID NO: 444147 - RNA, 21 nt, Human
uguccaagguaugcacugggg

SEQ ID NO: 444148 - RNA, 22 nt, Human
cuccaaggaagccccaagggau

SEQ ID NO: 444149 - RNA, 22 nt, Human
ucaggaaaauacugcuuaucca

SEQ ID NO: 444150 - RNA, 22 nt, Human
caggagcagaggguggucagca

SEQ ID NO: 444151 - RNA, 23 nt, Human
aggaaguuaaggcagacagacag

SEQ ID NO: 444152 - RNA, 22 nt, Human
guggagcaugugaggacugagu

SEQ ID NO: 444153 - RNA, 22 nt, Human
ggcaguggcuccucucuacucc

SEQ ID NO: 444154 - RNA, 23 nt, Human
ggccauggagacuuagaaugggc

SEQ ID NO: 444155 - RNA, 22 nt, Human
agggcagaggcggacacggaag

SEQ ID NO: 444156 - RNA, 19 nt, Human
uguggccaugguucagcug

SEQ ID NO: 444157 - RNA, 22 nt, Human
aaagucacuuccuucugucagc

SEQ ID NO: 444158 - RNA, 22 nt, Human
gcuccagggacccaagagaaaa

SEQ ID NO: 444159 - RNA, 22 nt, Human
cuagggucaggggccugcgucg

SEQ ID NO: 444160 - RNA, 22 nt, Human
uaacuuuaguguaugagguaag

SEQ ID NO: 444161 - RNA, 22 nt, Human
cugggcacuuuggggagccuac

SEQ ID NO: 444162 - RNA, 22 nt, Human
gccugccugaaggcuguaccag

SEQ ID NO: 444163 - RNA, 22 nt, Human
ccagcagaggggcggagugcag

SEQ ID NO: 444164 - RNA, 22 nt, Human
guuaacauaggaguuuguugua

SEQ ID NO: 444165 - RNA, 22 nt, Human
aggaagggcuguuucuccaaga

SEQ ID NO: 444166 - RNA, 22 nt, Human
cagcaggcccaggugcugguga

SEQ ID NO: 444167 - RNA, 22 nt, Human
augaggagucaaggagucggag

SEQ ID NO: 444168 - RNA, 22 nt, Human
gaagcaaaaugucugcacauau

SEQ ID NO: 444169 - RNA, 22 nt, Human
ccagcccuugaggucuguccau

SEQ ID NO: 444170 - RNA, 22 nt, Human
ugucagugaguuggguccugag

SEQ ID NO: 444171 - RNA, 22 nt, Human
ggcagggucuggacugaaagcu

SEQ ID NO: 444172 - RNA, 22 nt, Human
caggcuguggaucaggagccuu

SEQ ID NO: 444173 - RNA, 22 nt, Human
gggacuggcacagggcugggag

SEQ ID NO: 444174 - RNA, 22 nt, Human
gugacagaguuuuagaucucau

SEQ ID NO: 444175 - RNA, 22 nt, Human
gcacagcucgagcucaggaggg

SEQ ID NO: 444176 - RNA, 22 nt, Human
gagccucguggcggccacugcg

SEQ ID NO: 444177 - RNA, 22 nt, Human
gaccacugaugacaugaggaga

SEQ ID NO: 444178 - RNA, 22 nt, Human
ugcagaaguauuccaggcccca

SEQ ID NO: 444179 - RNA, 22 nt, Human
gugcauguuaaugguguacaaa

SEQ ID NO: 444180 - RNA, 22 nt, Human
acagauguaaucuauucacauu

SEQ ID NO: 444181 - RNA, 22 nt, Human
ugaguccuaaagcugugcccuu

SEQ ID NO: 444182 - RNA, 22 nt, Human
uuaacaguuaaacaauuggcua

SEQ ID NO: 444183 - RNA, 22 nt, Human
ggcaaacacaccucggugagaa

SEQ ID NO: 444184 - RNA, 22 nt, Human
caauuucagaccuuuccuugga

SEQ ID NO: 444185 - RNA, 22 nt, Human
ucagaaaccagcucucucaauu

SEQ ID NO: 444186 - RNA, 22 nt, Human
uuuacagucaccaaacuuugcu

SEQ ID NO: 444187 - RNA, 22 nt, Human
ggcaggacagucccaguucaaa

SEQ ID NO: 444188 - RNA, 21 nt, Human
ggugcucgcugaugaggagug

SEQ ID NO: 444189 - RNA, 22 nt, Human
cugaggccucucuccugggcuu

SEQ ID NO: 444190 - RNA, 22 nt, Human
aagcccuguucuuucucucacc

SEQ ID NO: 444191 - RNA, 22 nt, Human
augcauauagaacauuugacau

SEQ ID NO: 444192 - RNA, 22 nt, Human
aaaguuuuguugauuguggaau

SEQ ID NO: 444193 - RNA, 23 nt, Human
gcucagguggcucagggacugau

SEQ ID NO: 444194 - RNA, 22 nt, Human
agagaugacugauggcugauua

SEQ ID NO: 444195 - RNA, 22 nt, Human
cuggcagucugguggaaggccu

SEQ ID NO: 444196 - RNA, 21 nt, Human
agggcagauuagcuguaagag

SEQ ID NO: 444197 - RNA, 22 nt, Human
caggcauggagaggcagagacu

SEQ ID NO: 444198 - RNA, 22 nt, Human
uuuggggcucagcaggcuguuu

SEQ ID NO: 444199 - RNA, 22 nt, Human
uucaacauguucuacauaaggg

SEQ ID NO: 444200 - RNA, 17 nt, Human
ugaggccugcaucagug

SEQ ID NO: 444201 - RNA, 22 nt, Human
gcucccaccuccagccugaguu

SEQ ID NO: 444202 - RNA, 22 nt, Human
aacuuuuaaaauacacagacaa

SEQ ID NO: 444203 - RNA, 22 nt, Human
aggaagcugccugggaugggaa

SEQ ID NO: 444204 - RNA, 22 nt, Human
guuuauacagugcaugguguua

SEQ ID NO: 444205 - RNA, 22 nt, Human
cuucaguucuaaaguagaaugu

SEQ ID NO: 444206 - RNA, 22 nt, Human
uuuagcaauuagaauccagcau

SEQ ID NO: 444207 - RNA, 22 nt, Human
ccugccugcuuucugcuuugca

SEQ ID NO: 444208 - RNA, 22 nt, Human
uugcaaauuauauaagggaugc

SEQ ID NO: 444209 - RNA, 22 nt, Human
uauugcaagcaauuccaaaagg

SEQ ID NO: 444210 - RNA, 22 nt, Human
acaguaauuaaacauucugauu

SEQ ID NO: 444211 - RNA, 22 nt, Human
aagagcugcaucuaagccauga

SEQ ID NO: 444212 - RNA, 22 nt, Human
cagcuuguuaccgagggagggu

SEQ ID NO: 444213 - RNA, 22 nt, Human
gcuggcuggagugagcuacccu

SEQ ID NO: 444214 - RNA, 22 nt, Human
gcccagcaggacagagugguuu

SEQ ID NO: 444215 - RNA, 22 nt, Human
ugagacagcagucagggaaaua

SEQ ID NO: 444216 - RNA, 22 nt, Human
gggugagacagaaagagcaaaa

SEQ ID NO: 444217 - RNA, 22 nt, Human
aaugcagaguaaauauuuaauu

SEQ ID NO: 444218 - RNA, 22 nt, Human
agcuccugugugaagccucccu

SEQ ID NO: 444219 - RNA, 23 nt, Human
aauucaaauucagugugacuagg

SEQ ID NO: 444220 - RNA, 21 nt, Human
gaucuuuacuuuccuacuuac

SEQ ID NO: 444221 - RNA, 22 nt, Human
cagcccuuggcuggcuccuugc

SEQ ID NO: 444222 - RNA, 22 nt, Human
gcacagagcuuguuuacauuug

SEQ ID NO: 444223 - RNA, 22 nt, Human
ggacagcauaucagcagggcag

SEQ ID NO: 444224 - RNA, 22 nt, Human
gagccagccuucuucugagguc

SEQ ID NO: 444225 - RNA, 22 nt, Human
ugcacaaagcauucuagacgca

SEQ ID NO: 444226 - RNA, 22 nt, Human
gggcuucucccuaaggacucug

SEQ ID NO: 444227 - RNA, 22 nt, Human
auauuaaugggauuuagucagg

SEQ ID NO: 444228 - RNA, 22 nt, Human
agcccuucaaccugccuacucc

SEQ ID NO: 444229 - RNA, 22 nt, Human
uucccuuuguuaaauuggaaga

SEQ ID NO: 444230 - RNA, 22 nt, Human
aauagcaaacagacaugcacaa

SEQ ID NO: 444231 - RNA, 22 nt, Human
caagaauauaaauacuuucaaa

SEQ ID NO: 444232 - RNA, 22 nt, Human
cuguggagcuuguggcaguggg

SEQ ID NO: 444233 - RNA, 18 nt, Human
auacaagcucuguuacuu

SEQ ID NO: 444234 - RNA, 22 nt, Human
cauguucaucagaucaauugua

SEQ ID NO: 444235 - RNA, 22 nt, Human
agacagggccacucauccucac

SEQ ID NO: 444236 - RNA, 22 nt, Human
caguacuuggucaaggaagcag

SEQ ID NO: 444237 - RNA, 22 nt, Human
caggcacacauccgugagagau

SEQ ID NO: 444238 - RNA, 22 nt, Human
gacagucugggcacacaugaaa

SEQ ID NO: 444239 - RNA, 22 nt, Human
agcaguuuuuauaacacuggaa

SEQ ID NO: 444240 - RNA, 22 nt, Human
ugccagcaguagcaguaggcca

SEQ ID NO: 444241 - RNA, 22 nt, Human
cagcucccgccaucgggaggca

SEQ ID NO: 444242 - RNA, 22 nt, Human
gcuuugcacucugauccuuccc

SEQ ID NO: 444243 - RNA, 22 nt, Human
cgcagcugcugcucugaaacag

SEQ ID NO: 444244 - RNA, 22 nt, Human
gaaaggagugaauauuugugac

SEQ ID NO: 444245 - RNA, 22 nt, Human
cacaguacgcacccgauacaug

SEQ ID NO: 444246 - RNA, 22 nt, Human
aagcaggcucacgccaggcagu

SEQ ID NO: 444247 - RNA, 22 nt, Human
ugcaauaaggaguaauaguaaa

SEQ ID NO: 444248 - RNA, 22 nt, Human
ugggcucugguuuccuggcugg

SEQ ID NO: 444249 - RNA, 22 nt, Human
aguuuuucuccccuggcuucau

SEQ ID NO: 444250 - RNA, 19 nt, Human
cucagucuggcucugccug

SEQ ID NO: 444251 - RNA, 22 nt, Human
cccgagugucuacucacuccca

SEQ ID NO: 444252 - RNA, 20 nt, Human
guuuuucuugggcgagcuau

SEQ ID NO: 444253 - RNA, 21 nt, Human
agcagcagcaguggggcuucu

SEQ ID NO: 444254 - RNA, 22 nt, Human
auaaaggccaaaauuugcauuu

SEQ ID NO: 444255 - RNA, 22 nt, Human
ucuuaagaaagugacaaauagg

SEQ ID NO: 444256 - RNA, 22 nt, Human
uggcaggcaaguucagcuccac

SEQ ID NO: 444257 - RNA, 22 nt, Human
agagcugaggauccagcugagc

SEQ ID NO: 444258 - RNA, 22 nt, Human
uuucuaguaaucaauauaaagu

SEQ ID NO: 444259 - RNA, 22 nt, Human
ucaugcaguuucuuaucugcca

SEQ ID NO: 444260 - RNA, 19 nt, Human
gcuuuggagggagguucua

SEQ ID NO: 444261 - RNA, 22 nt, Human
ucauucaagauuucaauagauu

SEQ ID NO: 444262 - RNA, 22 nt, Human
cuugaugagucagaacugaagg

SEQ ID NO: 444263 - RNA, 22 nt, Human
ucuuuaugagaaaaagauugua

SEQ ID NO: 444264 - RNA, 22 nt, Human
uauuuccagaggaguauagaag

SEQ ID NO: 444265 - RNA, 22 nt, Human
cuggcuccucaguauuccacuu

SEQ ID NO: 444266 - RNA, 22 nt, Human
gacaggcaggccagggcugugg

SEQ ID NO: 444267 - RNA, 22 nt, Human
ugcaaauauuccaugcuguuca

SEQ ID NO: 444268 - RNA, 22 nt, Human
agagccugaggccaggaaaaug

SEQ ID NO: 444269 - RNA, 22 nt, Human
acaauuucugaucagugaauuu

SEQ ID NO: 444270 - RNA, 22 nt, Human
ucuuauaaucucuauuuuaaug

SEQ ID NO: 444271 - RNA, 22 nt, Human
gaaguauagcagauguuauuua

SEQ ID NO: 444272 - RNA, 22 nt, Human
uggccagcccuucagccaugcc

SEQ ID NO: 444273 - RNA, 22 nt, Human
ugacagcauaacacuggucuug

SEQ ID NO: 444274 - RNA, 22 nt, Human
auguuaaaugguuuauuauuaa

SEQ ID NO: 444275 - RNA, 22 nt, Human
acuaauugagugcaugaucuuu

SEQ ID NO: 444276 - RNA, 22 nt, Human
ugucccagguccuagaugacca

SEQ ID NO: 444277 - RNA, 22 nt, Human
auuuuacuaaguggauaucugu

SEQ ID NO: 444278 - RNA, 22 nt, Human
auacauucagcagugcucauga

SEQ ID NO: 444279 - RNA, 22 nt, Human
cccagggagguagcaggagaaa

SEQ ID NO: 444280 - RNA, 22 nt, Human
caggcccucguggugagcuggg

SEQ ID NO: 444281 - RNA, 22 nt, Human
cagugcauagauccugaggccu

SEQ ID NO: 444282 - RNA, 22 nt, Human
gcucagggaaagagcuccuguc

SEQ ID NO: 444283 - RNA, 19 nt, Human
ggcagaagguguaggggga

SEQ ID NO: 444284 - RNA, 22 nt, Human
agaaggaaggcugagugcugau

SEQ ID NO: 444285 - RNA, 22 nt, Human
agaggcuggauugagcauagac

SEQ ID NO: 444286 - RNA, 22 nt, Human
agcgagggaggucugaggacag

SEQ ID NO: 444287 - RNA, 22 nt, Human
ugacucuguaccugucugccuu

SEQ ID NO: 444288 - RNA, 22 nt, Human
uucaaacuuaaggagcagcaga

SEQ ID NO: 444289 - RNA, 22 nt, Human
aaguacauuauaugagcagaau

SEQ ID NO: 444290 - RNA, 22 nt, Human
ucacucaauaucccaguggggc

SEQ ID NO: 444291 - RNA, 22 nt, Human
acacugaauguuuaagaacuug

SEQ ID NO: 444292 - RNA, 22 nt, Human
agccccaggcccggacgccucu

SEQ ID NO: 444293 - RNA, 22 nt, Human
guggcagagccaaggcuggagc

SEQ ID NO: 444294 - RNA, 22 nt, Human
gaggugaaaguuauucauuuau

SEQ ID NO: 444295 - RNA, 22 nt, Human
caggcagcccugcaccaagugu

SEQ ID NO: 444296 - RNA, 22 nt, Human
ucuuuaaucauaaccaagaugg

SEQ ID NO: 444297 - RNA, 21 nt, Human
aaaaguuugacaggaaaggga

SEQ ID NO: 444298 - RNA, 22 nt, Human
agggcagagauuaauuaagaca

SEQ ID NO: 444299 - RNA, 22 nt, Human
ccugcacuaccuggggcugcug

SEQ ID NO: 444300 - RNA, 22 nt, Human
gagcccugcgugucugggggca

SEQ ID NO: 444301 - RNA, 22 nt, Human
agcuccugaaaauccagacugg

SEQ ID NO: 444302 - RNA, 22 nt, Human
aggccagcucacccuggcuccu

SEQ ID NO: 444303 - RNA, 22 nt, Human
uaaaacagcagggcagagaagu

SEQ ID NO: 444304 - RNA, 22 nt, Human
uuugaacaugcugcaugauaau

SEQ ID NO: 444305 - RNA, 22 nt, Human
cagcccuugggccauccuagaa

SEQ ID NO: 444306 - RNA, 22 nt, Human
aucucuaauuuaaaaaguaaca

SEQ ID NO: 444307 - RNA, 22 nt, Human
ucuccaggacugagcuccagcc

SEQ ID NO: 444308 - RNA, 22 nt, Human
ugccugggagugaccaagacuc

SEQ ID NO: 444309 - RNA, 22 nt, Human
cagaggaagcuggguguggagu

SEQ ID NO: 444310 - RNA, 22 nt, Human
uccuuuaucugcucagaaagua

SEQ ID NO: 444311 - RNA, 22 nt, Human
uucuuuuaauagagauccugug

SEQ ID NO: 444312 - RNA, 22 nt, Human
ugggccuggaguuuguccagag

SEQ ID NO: 444313 - RNA, 21 nt, Human
aggucccagguuugggcagca

SEQ ID NO: 444314 - RNA, 22 nt, Human
uggcacugggacagaugcucuc

SEQ ID NO: 444315 - RNA, 22 nt, Human
acagggaaggagcauagaaaaa

SEQ ID NO: 444316 - RNA, 22 nt, Human
aacaggaaacaaguuguuagga

SEQ ID NO: 444317 - RNA, 22 nt, Human
agcuggcccucgagagccaauu

SEQ ID NO: 444318 - RNA, 22 nt, Human
caauucaugugagcggacucuu

SEQ ID NO: 444319 - RNA, 22 nt, Human
gcuuugcaggaaaccagugcau

SEQ ID NO: 444320 - RNA, 22 nt, Human
uaaggcaugcuagcaguaugaa

SEQ ID NO: 444321 - RNA, 22 nt, Human
ucaauagaaaugcagagucuca

SEQ ID NO: 444322 - RNA, 22 nt, Human
gagggcccuggcuggcuccagc

SEQ ID NO: 444323 - RNA, 22 nt, Human
augacuucguuuucucucugca

SEQ ID NO: 444324 - RNA, 22 nt, Human
ugcauguggaccccuggugccu

SEQ ID NO: 444325 - RNA, 22 nt, Human
gcuuuagaaauaucacugugga

SEQ ID NO: 444326 - RNA, 19 nt, Human
acccagagcccuuugcagg

SEQ ID NO: 444327 - RNA, 22 nt, Human
ccugccuggaucagccauccug

SEQ ID NO: 444328 - RNA, 22 nt, Human
aggcccuuaggaccccugcgug

SEQ ID NO: 444329 - RNA, 22 nt, Human
aaguacaacgcauacagagaaa

SEQ ID NO: 444330 - RNA, 22 nt, Human
uaagagacuauugagcaucuug

SEQ ID NO: 444331 - RNA, 22 nt, Human
augacaaacccaggauguaaca

SEQ ID NO: 444332 - RNA, 22 nt, Human
ugccaaggguaugggcaagaua

SEQ ID NO: 444333 - RNA, 22 nt, Human
aaauucagcauccugcacugga

SEQ ID NO: 444334 - RNA, 17 nt, Human
cagcccugccguuccca

SEQ ID NO: 444335 - RNA, 22 nt, Human
aaugacaauaaucauuaacuuu

SEQ ID NO: 444336 - RNA, 22 nt, Human
cugcccagaagccagaugggca

SEQ ID NO: 444337 - RNA, 22 nt, Human
cagcacugcugcuguacacaca

SEQ ID NO: 444338 - RNA, 22 nt, Human
aucuugaaugaaugacucuuua

SEQ ID NO: 444339 - RNA, 22 nt, Human
cagcccuggugagguuggcuau

SEQ ID NO: 444340 - RNA, 22 nt, Human
ggccaggcuggucucagacuuc

SEQ ID NO: 444341 - RNA, 22 nt, Human
ggcagcugugaagugccucaca

SEQ ID NO: 444342 - RNA, 22 nt, Human
agagacagacacaucgggcugc

SEQ ID NO: 444343 - RNA, 22 nt, Human
cacagaggcucaaagccaggug

SEQ ID NO: 444344 - RNA, 21 nt, Human
agcagaggcagaauguaugca

SEQ ID NO: 444345 - RNA, 22 nt, Human
ggagggcugccagguggagcgg

SEQ ID NO: 444346 - RNA, 22 nt, Human
uucuguuacaagugaaaaaaug

SEQ ID NO: 444347 - RNA, 22 nt, Human
ccagcccuuugugguucacuga

SEQ ID NO: 444348 - RNA, 17 nt, Human
ucaggcugugccuggua

SEQ ID NO: 444349 - RNA, 22 nt, Human
ucagcagcagcucagcauguuu

SEQ ID NO: 444350 - RNA, 22 nt, Human
ccaccagcuuugccacccugcu

SEQ ID NO: 444351 - RNA, 22 nt, Human
gaggugaguggaucacgagguc

SEQ ID NO: 444352 - RNA, 22 nt, Human
uugguuuugggauguacaaagg

SEQ ID NO: 444353 - RNA, 22 nt, Human
gcacuucacaugccuuuuccug

SEQ ID NO: 444354 - RNA, 20 nt, Human
aggaagccaaaggcugucuu

SEQ ID NO: 444355 - RNA, 21 nt, Human
ugaaagaggauguggucauuc

SEQ ID NO: 444356 - RNA, 20 nt, Human
agcuguuuacauggauuucu

SEQ ID NO: 444357 - RNA, 22 nt, Human
uccuggguagagaccugaugaa

SEQ ID NO: 444358 - RNA, 22 nt, Human
caagguuccagaauuaugcucu

SEQ ID NO: 444359 - RNA, 22 nt, Human
aggcagcugaggucuggcgccc

SEQ ID NO: 444360 - RNA, 22 nt, Human
uggcagcuggagggcaauggcc

SEQ ID NO: 444361 - RNA, 22 nt, Human
uccaaguauaaauuagauacug

SEQ ID NO: 444362 - RNA, 20 nt, Human
caaggccuggaucuaguugc

SEQ ID NO: 444363 - RNA, 22 nt, Human
ugucuuaacauaaaaggaaauc

SEQ ID NO: 444364 - RNA, 22 nt, Human
agcagcaggaggccauugucuu

SEQ ID NO: 444365 - RNA, 22 nt, Human
cuuaacaugggggguaagucug

SEQ ID NO: 444366 - RNA, 22 nt, Human
acucugugugaguagagccugu

SEQ ID NO: 444367 - RNA, 22 nt, Human
ggcucugccauuuccuagcugc

SEQ ID NO: 444368 - RNA, 22 nt, Human
aagcugccuuccaugugaggaa

SEQ ID NO: 444369 - RNA, 22 nt, Human
ggcugccucugaugugcagacg

SEQ ID NO: 444370 - RNA, 22 nt, Human
ccugagagcccuagccaggcgc

SEQ ID NO: 444371 - RNA, 22 nt, Human
gcugccuguguggccacucacu

SEQ ID NO: 444372 - RNA, 22 nt, Human
auuucagaugaccaaauggaaa

SEQ ID NO: 444373 - RNA, 22 nt, Human
cugucaucacaguugagcagcc

SEQ ID NO: 444374 - RNA, 22 nt, Human
uugacuucagccuguacuugua

SEQ ID NO: 444375 - RNA, 22 nt, Human
aguucacagggaagguuauugu

SEQ ID NO: 444376 - RNA, 22 nt, Human
uuauucuucuucucuugccagg

SEQ ID NO: 444377 - RNA, 22 nt, Human
ucaggcccagagucacggaucc

SEQ ID NO: 444378 - RNA, 22 nt, Human
auucuuuagccagcagguauau

SEQ ID NO: 444379 - RNA, 19 nt, Human
caggacaguuugccaagaa

SEQ ID NO: 444380 - RNA, 22 nt, Human
gaauuuuaauaaagguuuauca

SEQ ID NO: 444381 - RNA, 22 nt, Human
guuuuguugcugcagagcucaa

SEQ ID NO: 444382 - RNA, 22 nt, Human
cagguggggggcuuccgagccu

SEQ ID NO: 444383 - RNA, 22 nt, Human
gacuuugccacugaccuccaac

SEQ ID NO: 444384 - RNA, 22 nt, Human
ugaagcuacaaaagauuauugc

SEQ ID NO: 444385 - RNA, 22 nt, Human
augcaguuuaaggcacaauuag

SEQ ID NO: 444386 - RNA, 22 nt, Human
caggccugucugcacaugaggc

SEQ ID NO: 444387 - RNA, 22 nt, Human
aauuucuaauugaaucucucuu

SEQ ID NO: 444388 - RNA, 22 nt, Human
gcucccagcaauugaggcagcc

SEQ ID NO: 444389 - RNA, 22 nt, Human
ggcagcccaccagcccacgucu

SEQ ID NO: 444390 - RNA, 22 nt, Human
guuuuacaagguuaaucagcag

SEQ ID NO: 444391 - RNA, 22 nt, Human
gguuccuggcagauguagggcu

SEQ ID NO: 444392 - RNA, 22 nt, Human
ccagcuggucugugcucauguu

SEQ ID NO: 444393 - RNA, 22 nt, Human
aagcagaaguugaucuaccaua

SEQ ID NO: 444394 - RNA, 22 nt, Human
uuguguguacugguuaugggca

SEQ ID NO: 444395 - RNA, 22 nt, Human
uuucagagaggcuucaaaucuu

SEQ ID NO: 444396 - RNA, 22 nt, Human
ugcugucccuaagucucuucaa

SEQ ID NO: 444397 - RNA, 22 nt, Human
gaggcugauucggggaacagca

SEQ ID NO: 444398 - RNA, 22 nt, Human
agcccugggcguuacugggaug

SEQ ID NO: 444399 - RNA, 22 nt, Human
ugggaggcccaggccuggcagg

SEQ ID NO: 444400 - RNA, 22 nt, Human
agcuaaggaugacuaguacuuc

SEQ ID NO: 444401 - RNA, 23 nt, Human
uuuauccaacucuguaaucucuc

SEQ ID NO: 444402 - RNA, 22 nt, Human
guugaugaaaaugaauugcaug

SEQ ID NO: 444403 - RNA, 21 nt, Human
ucgugcagcagcugaggcuug

SEQ ID NO: 444404 - RNA, 22 nt, Human
cagugguugcuugcauggcucc

SEQ ID NO: 444405 - RNA, 22 nt, Human
cuggagccaugucuugacugcu

SEQ ID NO: 444406 - RNA, 22 nt, Human
cuggccugugggcugucuccgg

SEQ ID NO: 444407 - RNA, 22 nt, Human
ucucacugcaaauauuauguau

SEQ ID NO: 444408 - RNA, 23 nt, Human
ucacuuugauguaauugaaaagc

SEQ ID NO: 444409 - RNA, 22 nt, Human
cucuccucagaacaggcccucu

SEQ ID NO: 444410 - RNA, 22 nt, Human
ggccuuccagggaagacagggc

SEQ ID NO: 444411 - RNA, 22 nt, Human
cugugcccuggccaggccucuc

SEQ ID NO: 444412 - RNA, 22 nt, Human
cugagggagaagucacgggcag

SEQ ID NO: 444413 - RNA, 22 nt, Human
ccaggaggcagaaguugcagug

SEQ ID NO: 444414 - RNA, 22 nt, Human
uuuaacacuaguuucuuuaacu

SEQ ID NO: 444415 - RNA, 22 nt, Human
aaagacauuagcuuagauguca

SEQ ID NO: 444416 - RNA, 22 nt, Human
caaggccugccucuggcagaaa

SEQ ID NO: 444417 - RNA, 22 nt, Human
cagggagaggccucuguugccc

SEQ ID NO: 444418 - RNA, 22 nt, Human
uacaguaccugccacguuguug

SEQ ID NO: 444419 - RNA, 22 nt, Human
auuugguaguccugauaagauu

SEQ ID NO: 444420 - RNA, 22 nt, Human
aggcuccugagaggcagaggcu

SEQ ID NO: 444421 - RNA, 22 nt, Human
ucagcugccucucccuggaaga

SEQ ID NO: 444422 - RNA, 18 nt, Human
gagcccugggagaucucu

SEQ ID NO: 444423 - RNA, 22 nt, Human
agcuaaggacuggaggguuucu

SEQ ID NO: 444424 - RNA, 22 nt, Human
cugcagcagggcuugcccaccu

SEQ ID NO: 444425 - RNA, 22 nt, Human
uccugaagagcccugcucugug

SEQ ID NO: 444426 - RNA, 22 nt, Human
auuccaaagguuaaugcccauu

SEQ ID NO: 444427 - RNA, 22 nt, Human
ccuggcagacugugagggcagg

SEQ ID NO: 444428 - RNA, 22 nt, Human
ugcugcagaaauucugugagga

SEQ ID NO: 444429 - RNA, 22 nt, Human
uucagaauaacuuuuuauugaa

SEQ ID NO: 444430 - RNA, 22 nt, Human
aagcaggcuagauugaagggcu

SEQ ID NO: 444431 - RNA, 20 nt, Human
uggcucucucuaguaagugg

SEQ ID NO: 444432 - RNA, 22 nt, Human
uucagaaguagcuaagcaguca

SEQ ID NO: 444433 - RNA, 22 nt, Human
aagcagguuacauacauuaucu

SEQ ID NO: 444434 - RNA, 22 nt, Human
ugauaauguucgagaaugaaga

SEQ ID NO: 444435 - RNA, 20 nt, Human
acaugcacguguguauauau

SEQ ID NO: 444436 - RNA, 18 nt, Human
gcagccccucuuccuucc

SEQ ID NO: 444437 - RNA, 21 nt, Human
ggggcagagcuaggcccugca

SEQ ID NO: 444438 - RNA, 22 nt, Human
agcagcaguguguggucauguu

SEQ ID NO: 444439 - RNA, 22 nt, Human
ucuacaaagaagaauuaauguc

SEQ ID NO: 444440 - RNA, 22 nt, Human
gcagccagccccucugaccucu

SEQ ID NO: 444441 - RNA, 17 nt, Human
guauucuuugccuucca

SEQ ID NO: 444442 - RNA, 22 nt, Human
agcugccaccucugccuuuggg

SEQ ID NO: 444443 - RNA, 22 nt, Human
ugagcugaguggcaggucucag

SEQ ID NO: 444444 - RNA, 22 nt, Human
agcagcucuggcacuguagcau

SEQ ID NO: 444445 - RNA, 22 nt, Human
ugggcaggggcccugcuuccgu

SEQ ID NO: 444446 - RNA, 22 nt, Human
aaacacaucauucaugucguca

SEQ ID NO: 444447 - RNA, 23 nt, Human
gccugggacucaggaggagcuca

SEQ ID NO: 444448 - RNA, 22 nt, Human
ucagaauugcagggagggcagg

SEQ ID NO: 444449 - RNA, 22 nt, Human
acauguacuguuggugaagagg

SEQ ID NO: 444450 - RNA, 22 nt, Human
cccagcucucgcacuuacuagc

SEQ ID NO: 444451 - RNA, 22 nt, Human
agggaugggucuaacccagaac

SEQ ID NO: 444452 - RNA, 23 nt, Human
acuaaauggggcuuugcuuaaag

SEQ ID NO: 444453 - RNA, 22 nt, Human
gcaggagugacauggaugugga

SEQ ID NO: 444454 - RNA, 22 nt, Human
cuucuccucugaguccugggag

SEQ ID NO: 444455 - RNA, 22 nt, Human
uugggaguaauaaaaaauucca

SEQ ID NO: 444456 - RNA, 22 nt, Human
aggcugagucgggaggaucacu

SEQ ID NO: 444457 - RNA, 22 nt, Human
uugcuuuagguauagaauccau

SEQ ID NO: 444458 - RNA, 22 nt, Human
gugcugagauuggagugagcag

SEQ ID NO: 444459 - RNA, 22 nt, Human
cuuuggcuguccucuuggcugg

SEQ ID NO: 444460 - RNA, 22 nt, Human
cagcuagucagaggcagggcca

SEQ ID NO: 444461 - RNA, 22 nt, Human
aacaggaaugaggagaaaaggu

SEQ ID NO: 444462 - RNA, 20 nt, Human
gcucccugguagaaauguuu

SEQ ID NO: 444463 - RNA, 22 nt, Human
cccaccaguacagaugguagau

SEQ ID NO: 444464 - RNA, 22 nt, Human
ugcaaauuugacuucacacauc

SEQ ID NO: 444465 - RNA, 22 nt, Human
aaaggcaucuagccaaguugag

SEQ ID NO: 444466 - RNA, 22 nt, Human
agagguggagcucuuggcauca

SEQ ID NO: 444467 - RNA, 22 nt, Human
uauaggaaauaggucuucugug

SEQ ID NO: 444468 - RNA, 22 nt, Human
ugcucacugaacucuugcuguc

SEQ ID NO: 444469 - RNA, 22 nt, Human
gcaaauucuaggccccucucca

SEQ ID NO: 444470 - RNA, 22 nt, Human
cugggcagugguggcaucuuug

SEQ ID NO: 444471 - RNA, 22 nt, Human
agcaggcugcuggcguugaagu

SEQ ID NO: 444472 - RNA, 22 nt, Human
cacugcauggaugauggcugua

SEQ ID NO: 444473 - RNA, 22 nt, Human
caaacuuacuguguuuaaagag

SEQ ID NO: 444474 - RNA, 22 nt, Human
gcacccaggccggcgacugcag

SEQ ID NO: 444475 - RNA, 22 nt, Human
uugcauauccuccaacacaugg

SEQ ID NO: 444476 - RNA, 20 nt, Human
gugggcagcaggcauacugg

SEQ ID NO: 444477 - RNA, 22 nt, Human
gcagcugugggccucggagagc

SEQ ID NO: 444478 - RNA, 22 nt, Human
aagagcaucaaugacucgcagu

SEQ ID NO: 444479 - RNA, 22 nt, Human
gaggcugguuugccuuuuggca

SEQ ID NO: 444480 - RNA, 22 nt, Human
agagacaggguuuugccauguu

SEQ ID NO: 444481 - RNA, 22 nt, Human
gagguaacacuguucagugggc

SEQ ID NO: 444482 - RNA, 21 nt, Human
aaucagaggcuuccuaguugg

SEQ ID NO: 444483 - RNA, 22 nt, Human
uggaggaaguugcuggaaguca

SEQ ID NO: 444484 - RNA, 22 nt, Human
ugcaggagaaaguacggagcgu

SEQ ID NO: 444485 - RNA, 22 nt, Human
aagaugauagaucugucaaugu

SEQ ID NO: 444486 - RNA, 22 nt, Human
cuacagcuggccuuggaaaacu

SEQ ID NO: 444487 - RNA, 22 nt, Human
caguuucuguggucucuuuuca

SEQ ID NO: 444488 - RNA, 22 nt, Human
ucagaggaagcaucaaguucuc

SEQ ID NO: 444489 - RNA, 22 nt, Human
acaauuuauccauuguauaguu

SEQ ID NO: 444490 - RNA, 22 nt, Human
gcaauaaauaacauggaagaca

SEQ ID NO: 444491 - RNA, 22 nt, Human
caggcugggcugguguuagagu

SEQ ID NO: 444492 - RNA, 23 nt, Human
augcccuguagaggcugcugacc

SEQ ID NO: 444493 - RNA, 22 nt, Human
uauguacauauacacgugugug

SEQ ID NO: 444494 - RNA, 22 nt, Human
gaccagagaaaggcacuggaag

SEQ ID NO: 444495 - RNA, 22 nt, Human
acauacuugaagcaagugauca

SEQ ID NO: 444496 - RNA, 17 nt, Human
gcuuuggaaagccuucc

SEQ ID NO: 444497 - RNA, 22 nt, Human
ucacuuugaugacauuguagcu

SEQ ID NO: 444498 - RNA, 22 nt, Human
uucagcaaggcaugugcaggag

SEQ ID NO: 444499 - RNA, 22 nt, Human
agcaccugucacaagcagaagg

SEQ ID NO: 444500 - RNA, 22 nt, Human
caggccuggcugcagcucgccu

SEQ ID NO: 444501 - RNA, 22 nt, Human
ugggagugaggcagagucuauc

SEQ ID NO: 444502 - RNA, 22 nt, Human
ccugccuguacuagagacccag

SEQ ID NO: 444503 - RNA, 17 nt, Human
agcagaagucagaggga

SEQ ID NO: 444504 - RNA, 22 nt, Human
uccucccugggagcuucugagu

SEQ ID NO: 444505 - RNA, 22 nt, Human
ucugcccacugcucugcugccc

SEQ ID NO: 444506 - RNA, 22 nt, Human
aggcagcaaagaaaugaugcug

SEQ ID NO: 444507 - RNA, 22 nt, Human
uaugccaaggaucaauauguau

SEQ ID NO: 444508 - RNA, 22 nt, Human
uacaaugagcugagccagaggc

SEQ ID NO: 444509 - RNA, 22 nt, Human
caauacuuuaguaaaauggccc

SEQ ID NO: 444510 - RNA, 22 nt, Human
ugggcagaaggaagagccaccu

SEQ ID NO: 444511 - RNA, 22 nt, Human
agcugagguuaguauaaaugug

SEQ ID NO: 444512 - RNA, 22 nt, Human
gcccucuggcacagagaugcag

SEQ ID NO: 444513 - RNA, 22 nt, Human
ugacaauacagagagagcaaaa

SEQ ID NO: 444514 - RNA, 22 nt, Human
caguggguccuaaguacaguuc

SEQ ID NO: 444515 - RNA, 22 nt, Human
uacagcgaaaauuuagcuugau

SEQ ID NO: 444516 - RNA, 22 nt, Human
ggcugccaggagaagcucagug

SEQ ID NO: 444517 - RNA, 22 nt, Human
guccucagagugggcagguccu

SEQ ID NO: 444518 - RNA, 22 nt, Human
ucccaaggcacagggcagggac

SEQ ID NO: 444519 - RNA, 22 nt, Human
caauuucauuaauagauauaga

SEQ ID NO: 444520 - RNA, 20 nt, Human
uaacaguugaagaacaagga

SEQ ID NO: 444521 - RNA, 22 nt, Human
cagagacaaccugguagagaaa

SEQ ID NO: 444522 - RNA, 22 nt, Human
cuguuuucaaagagagagaaug

SEQ ID NO: 444523 - RNA, 22 nt, Human
agcagugggugacagagcugag

SEQ ID NO: 444524 - RNA, 22 nt, Human
cccagggauguggcagauguua

SEQ ID NO: 444525 - RNA, 22 nt, Human
acuggcaguuugagaaugcauu

SEQ ID NO: 444526 - RNA, 22 nt, Human
aggaaaaaccuguuaaugguag

SEQ ID NO: 444527 - RNA, 22 nt, Human
cgcagcugcaaaggaaacauuu

SEQ ID NO: 444528 - RNA, 22 nt, Human
uccaacauuuaucaagguuguu

SEQ ID NO: 444529 - RNA, 22 nt, Human
cagaagagaugaaauaguauua

SEQ ID NO: 444530 - RNA, 22 nt, Human
agcacaauauaaagugaacgca

SEQ ID NO: 444531 - RNA, 22 nt, Human
auaauggcaugacaguuauaua

SEQ ID NO: 444532 - RNA, 22 nt, Human
aucuaagagagagagcaugucu

SEQ ID NO: 444533 - RNA, 21 nt, Human
gugcccuguucccacaugccc

SEQ ID NO: 444534 - RNA, 22 nt, Human
ucaggccucagaaauugcacug

SEQ ID NO: 444535 - RNA, 22 nt, Human
acaggcagagaguggcggacuc

SEQ ID NO: 444536 - RNA, 22 nt, Human
ucucccaggucauacacagaga

SEQ ID NO: 444537 - RNA, 22 nt, Human
uauguacaugauuucauuugcu

SEQ ID NO: 444538 - RNA, 22 nt, Human
ugcaaauaaauuucuguucauu

SEQ ID NO: 444539 - RNA, 22 nt, Human
gcugaguguaaugauggcagag

SEQ ID NO: 444540 - RNA, 21 nt, Human
agacacugguuuagcauucau

SEQ ID NO: 444541 - RNA, 22 nt, Human
ugaacagaucaauagaacugac

SEQ ID NO: 444542 - RNA, 22 nt, Human
gcagugggcaacaagagcugga

SEQ ID NO: 444543 - RNA, 22 nt, Human
cuagaggggaaaaaggucuugu

SEQ ID NO: 444544 - RNA, 15 nt, Human
aacaggcauuuauau

SEQ ID NO: 444545 - RNA, 22 nt, Human
gucccaggcagagucaggaggg

SEQ ID NO: 444546 - RNA, 22 nt, Human
guuuacaacaucuuguccuuca

SEQ ID NO: 444547 - RNA, 22 nt, Human
ugcuggcuggagugccucugga

SEQ ID NO: 444548 - RNA, 22 nt, Human
aagagcaaguggguagugaagc

SEQ ID NO: 444549 - RNA, 21 nt, Human
acaggccuuaggggccauuca

SEQ ID NO: 444550 - RNA, 22 nt, Human
acagcaggcacacaaggauaga

SEQ ID NO: 444551 - RNA, 22 nt, Human
uacaaugacucucaguuuggcu

SEQ ID NO: 444552 - RNA, 22 nt, Human
ggcuggcauuuacacaaugcau

SEQ ID NO: 444553 - RNA, 22 nt, Human
agagcuguucaacguagcaaug

SEQ ID NO: 444554 - RNA, 22 nt, Human
uucaacauuuaucaguuuauca

SEQ ID NO: 444555 - RNA, 22 nt, Human
gacagcagcauguuuacaggcc

SEQ ID NO: 444556 - RNA, 22 nt, Human
caugagaucugcagggaugggc

SEQ ID NO: 444557 - RNA, 22 nt, Human
uaagaaauuuaguuauagaaug

SEQ ID NO: 444558 - RNA, 22 nt, Human
ucaugcagcaauaugcauuagg

SEQ ID NO: 444559 - RNA, 22 nt, Human
augcauaucacagucuccaugu

SEQ ID NO: 444560 - RNA, 22 nt, Human
accagggcuuacagcaguagcu

SEQ ID NO: 444561 - RNA, 22 nt, Human
uauuccaacugucauagucaua

SEQ ID NO: 444562 - RNA, 22 nt, Human
caacagcuuuagaaacacuuuc

SEQ ID NO: 444563 - RNA, 22 nt, Human
gaggccagccccucuugaaggc

SEQ ID NO: 444564 - RNA, 22 nt, Human
auucacaaugauacauaagcga

SEQ ID NO: 444565 - RNA, 17 nt, Human
ggagacagggucuuuaa

SEQ ID NO: 444566 - RNA, 20 nt, Human
aagcucugcuucaugugguc

SEQ ID NO: 444567 - RNA, 22 nt, Human
agcugggaggugggcagugaga

SEQ ID NO: 444568 - RNA, 22 nt, Human
cuugcuuuguccagaaauucag

SEQ ID NO: 444569 - RNA, 22 nt, Human
caauagcagcuucugaaugcaa

SEQ ID NO: 444570 - RNA, 22 nt, Human
caaggcagcguuccuuucugga

SEQ ID NO: 444571 - RNA, 22 nt, Human
ugagcaauuaacagagucuaaa

SEQ ID NO: 444572 - RNA, 22 nt, Human
aggaggcccuagagcucuagag

SEQ ID NO: 444573 - RNA, 22 nt, Human
cagcccuggugccaagguuccc

SEQ ID NO: 444574 - RNA, 22 nt, Human
cuuuacaaagcaauuuugucuc

SEQ ID NO: 444575 - RNA, 22 nt, Human
agaagggcuacacgggcucucc

SEQ ID NO: 444576 - RNA, 22 nt, Human
acccagagauggaccuggcugc

SEQ ID NO: 444577 - RNA, 22 nt, Human
ugguggcaauguccuggagaag

SEQ ID NO: 444578 - RNA, 22 nt, Human
uccuccagugucuggggccuug

SEQ ID NO: 444579 - RNA, 22 nt, Human
ccuguggcugccacuuggguga

SEQ ID NO: 444580 - RNA, 22 nt, Human
auaaagcauacuuuguaugacu

SEQ ID NO: 444581 - RNA, 22 nt, Human
aaggaagacucgcaggucuaug

SEQ ID NO: 444582 - RNA, 22 nt, Human
acugggccuugccauggcagcc

SEQ ID NO: 444583 - RNA, 22 nt, Human
uagcaacagcaauagugguauu

SEQ ID NO: 444584 - RNA, 22 nt, Human
ccugggcugcucauggggauga

SEQ ID NO: 444585 - RNA, 22 nt, Human
uccuggacaagcccuucacccu

SEQ ID NO: 444586 - RNA, 22 nt, Human
ugugggacagggacagcaagag

SEQ ID NO: 444587 - RNA, 22 nt, Human
uggaccucacugucugcuggua

SEQ ID NO: 444588 - RNA, 22 nt, Human
cugggacuuuacccuguggccc

SEQ ID NO: 444589 - RNA, 22 nt, Human
gcaggauggugcccuuucugcc

SEQ ID NO: 444590 - RNA, 22 nt, Human
cagcaggggaacugugggccag

SEQ ID NO: 444591 - RNA, 22 nt, Human
acuuagcagaguugaauguacu

SEQ ID NO: 444592 - RNA, 17 nt, Human
gcuugggcugccuguug

SEQ ID NO: 444593 - RNA, 22 nt, Human
uucaacuaauguuuauuuuaug

SEQ ID NO: 444594 - RNA, 22 nt, Human
uaauaccacugugcucauuaua

SEQ ID NO: 444595 - RNA, 22 nt, Human
cccaggaaaagcagugccagca

SEQ ID NO: 444596 - RNA, 22 nt, Human
guggccuggcgagcuggcgcgg

SEQ ID NO: 444597 - RNA, 22 nt, Human
cuauucagccucuaagacaagu

SEQ ID NO: 444598 - RNA, 21 nt, Human
agugucauuugaucauuguua

SEQ ID NO: 444599 - RNA, 22 nt, Human
agcauuuagucuuuauugcagc

SEQ ID NO: 444600 - RNA, 22 nt, Human
gcugagggcagccuccuagguc

SEQ ID NO: 444601 - RNA, 22 nt, Human
uuccuuucucuggacugcagcc

SEQ ID NO: 444602 - RNA, 22 nt, Human
ucugucacccagagugcagugg

SEQ ID NO: 444603 - RNA, 22 nt, Human
cagcagggcccccgggugcgcc

SEQ ID NO: 444604 - RNA, 22 nt, Human
ucugagagucucugaggcagau

SEQ ID NO: 444605 - RNA, 22 nt, Human
ccugccugcaaaaugggacaag

SEQ ID NO: 444606 - RNA, 20 nt, Human
cugacccaaucucugucccc

SEQ ID NO: 444607 - RNA, 22 nt, Human
uggucaguugcaucagagaagu

SEQ ID NO: 444608 - RNA, 22 nt, Human
gaaggagcuaaagggagcccug

SEQ ID NO: 444609 - RNA, 20 nt, Human
guggccuguccuguuguggg

SEQ ID NO: 444610 - RNA, 22 nt, Human
gcucuugacagcuacaucuggc

SEQ ID NO: 444611 - RNA, 22 nt, Human
cacauuuacuuuuaucccuugg

SEQ ID NO: 444612 - RNA, 22 nt, Human
ugaauacaggaaaauauacuga

SEQ ID NO: 444613 - RNA, 22 nt, Human
gcaagcuggcuguuagaggaug

SEQ ID NO: 444614 - RNA, 22 nt, Human
acucagagcuuggcuccuugcu

SEQ ID NO: 444615 - RNA, 22 nt, Human
gccaccccauagguguuaggug

SEQ ID NO: 444616 - RNA, 22 nt, Human
uggagaguguagacuucagagu

SEQ ID NO: 444617 - RNA, 22 nt, Human
gcaggccugggagucaucuugu

SEQ ID NO: 444618 - RNA, 22 nt, Human
aaugaauggguuuaauauuuua

SEQ ID NO: 444619 - RNA, 22 nt, Human
acagcaguuaacgaucagacuc

SEQ ID NO: 444620 - RNA, 20 nt, Human
uuggaagguggagaagagga

SEQ ID NO: 444621 - RNA, 22 nt, Human
gaggugagaagggggucagaug

SEQ ID NO: 444622 - RNA, 22 nt, Human
augcuuuauuguuaggucaugu

SEQ ID NO: 444623 - RNA, 22 nt, Human
cccuggcugccagucaccagac

SEQ ID NO: 444624 - RNA, 22 nt, Human
augaacaugugacucagaccug

SEQ ID NO: 444625 - RNA, 22 nt, Human
gaggcugcuuugaugacaggag

SEQ ID NO: 444626 - RNA, 22 nt, Human
caguagcuuacuuuucuugauc

SEQ ID NO: 444627 - RNA, 22 nt, Human
augcccaaugucacaauuuuug

SEQ ID NO: 444628 - RNA, 22 nt, Human
augcaauauagggaagauagau

SEQ ID NO: 444629 - RNA, 22 nt, Human
uuccucagaaaauacuguccaa

SEQ ID NO: 444630 - RNA, 22 nt, Human
uuggcagggcaucagacacgug

SEQ ID NO: 444631 - RNA, 23 nt, Human
uggagcugacagucagagggagg

SEQ ID NO: 444632 - RNA, 22 nt, Human
gaagagguagcauuggcaggug

SEQ ID NO: 444633 - RNA, 22 nt, Human
gcagccaggcuacagcgggcuu

SEQ ID NO: 444634 - RNA, 22 nt, Human
ggaaaagaauugcagugaagua

SEQ ID NO: 444635 - RNA, 22 nt, Human
agcaggcagccauuuggaaggc

SEQ ID NO: 444636 - RNA, 22 nt, Human
gcagcacaaaguccccagggac

SEQ ID NO: 444637 - RNA, 22 nt, Human
uugcuuuacuuugccauucguu

SEQ ID NO: 444638 - RNA, 22 nt, Human
auggcccuguuuaugguaaggc

SEQ ID NO: 444639 - RNA, 22 nt, Human
gcuggcagaagagcugguucaa

SEQ ID NO: 444640 - RNA, 22 nt, Human
ucagcucuacacacaccugugu

SEQ ID NO: 444641 - RNA, 17 nt, Human
uuguguguaguucugau

SEQ ID NO: 444642 - RNA, 22 nt, Human
cagucagggacaccagcuagga

SEQ ID NO: 444643 - RNA, 22 nt, Human
gggcuccugccuccuggcaccu

SEQ ID NO: 444644 - RNA, 22 nt, Human
ccuguguggccaggcuggaguc

SEQ ID NO: 444645 - RNA, 22 nt, Human
ccacagaaaguugucuagagua

SEQ ID NO: 444646 - RNA, 18 nt, Human
agcuuagcauacuuuucc

SEQ ID NO: 444647 - RNA, 22 nt, Human
aaacauucucagcccugcuugc

SEQ ID NO: 444648 - RNA, 22 nt, Human
uuucaaacuguacuuuccccua

SEQ ID NO: 444649 - RNA, 22 nt, Human
uggggcagccacauagacaaca

SEQ ID NO: 444650 - RNA, 23 nt, Human
ccacagagcugccaauuccugug

SEQ ID NO: 444651 - RNA, 22 nt, Human
aaguucaaauuggggccuguga

SEQ ID NO: 444652 - RNA, 22 nt, Human
uuucaaaggaggcugagaggau

SEQ ID NO: 444653 - RNA, 22 nt, Human
ucaaguauuuauuucugcuggc

SEQ ID NO: 444654 - RNA, 22 nt, Human
augcccuggacuagcuauacuu

SEQ ID NO: 444655 - RNA, 22 nt, Human
uguguguguccucauuugcaga

SEQ ID NO: 444656 - RNA, 22 nt, Human
uuauccaaacuggugaaucauu

SEQ ID NO: 444657 - RNA, 22 nt, Human
acucccagguugccuggcaggc

SEQ ID NO: 444658 - RNA, 18 nt, Human
gaggccugagaaccaggu

SEQ ID NO: 444659 - RNA, 22 nt, Human
ccugggucuucagucugcuggu

SEQ ID NO: 444660 - RNA, 22 nt, Human
gcaggccuguaaugaagggaca

SEQ ID NO: 444661 - RNA, 22 nt, Human
cuccucugucuaccacgagggu

SEQ ID NO: 444662 - RNA, 22 nt, Human
ugcccagccaauuuguuauguu

SEQ ID NO: 444663 - RNA, 22 nt, Human
gccucugucauagcucauguga

SEQ ID NO: 444664 - RNA, 22 nt, Human
ccacagaguuacaaaacaguca

SEQ ID NO: 444665 - RNA, 22 nt, Human
guuuuucuaggaccaugugauu

SEQ ID NO: 444666 - RNA, 17 nt, Human
ggcagcugccacuuuuu

SEQ ID NO: 444667 - RNA, 22 nt, Human
agaaacagaaccaggugucauu

SEQ ID NO: 444668 - RNA, 22 nt, Human
uguggccagcagguggcugugu

SEQ ID NO: 444669 - RNA, 22 nt, Human
uuucucccaaagugcaaccaca

SEQ ID NO: 444670 - RNA, 22 nt, Human
agauugggauuagagaucugua

SEQ ID NO: 444671 - RNA, 22 nt, Human
ccugccugucaucgccugcgcc

SEQ ID NO: 444672 - RNA, 22 nt, Human
cuuacagugacccugcagauuu

SEQ ID NO: 444673 - RNA, 22 nt, Human
uucuuuuaauguucugaaguuu

SEQ ID NO: 444674 - RNA, 22 nt, Human
uuugcucaguucucuguauuuu

SEQ ID NO: 444675 - RNA, 22 nt, Human
cacugcaaaggggaaagaagca

SEQ ID NO: 444676 - RNA, 23 nt, Human
gugcacagucaagcccagcuuag

SEQ ID NO: 444677 - RNA, 22 nt, Human
uuuaaaaccaaagaaagccucu

SEQ ID NO: 444678 - RNA, 22 nt, Human
agcaguggaccucagugcuauu

SEQ ID NO: 444679 - RNA, 22 nt, Human
agcaggcugccuuccaaagccu

SEQ ID NO: 444680 - RNA, 22 nt, Human
gccugguguccagaggcgagug

SEQ ID NO: 444681 - RNA, 22 nt, Human
augcccugcugccaucuggccg

SEQ ID NO: 444682 - RNA, 21 nt, Human
ucagaauuaccccuggaucug

SEQ ID NO: 444683 - RNA, 22 nt, Human
gagcccugagaguugugaggcc

SEQ ID NO: 444684 - RNA, 22 nt, Human
uagaaacacagagagacccaug

SEQ ID NO: 444685 - RNA, 22 nt, Human
caggcagcugggucaccguccc

SEQ ID NO: 444686 - RNA, 20 nt, Human
acaugaaaggaaacaggaaa

SEQ ID NO: 444687 - RNA, 22 nt, Human
caggggccaaggguccagaccu

SEQ ID NO: 444688 - RNA, 22 nt, Human
ugccugucuuuccucccucgua

SEQ ID NO: 444689 - RNA, 22 nt, Human
gccagcagcucuugggcgggca

SEQ ID NO: 444690 - RNA, 22 nt, Human
aauucacaggagguauuugucc

SEQ ID NO: 444691 - RNA, 22 nt, Human
cuugugcaaauccucgagcaca

SEQ ID NO: 444692 - RNA, 23 nt, Human
gccaggcuccggucuguggccac

SEQ ID NO: 444693 - RNA, 22 nt, Human
gcagauuucuaauaagcaaugu

SEQ ID NO: 444694 - RNA, 22 nt, Human
uacuucaugaguuaauaugcag

SEQ ID NO: 444695 - RNA, 22 nt, Human
ggcugcagcagagggacucacg

SEQ ID NO: 444696 - RNA, 22 nt, Human
uuucacaacguuguggugagag

SEQ ID NO: 444697 - RNA, 22 nt, Human
caggcagcucgaugccuuguug

SEQ ID NO: 444698 - RNA, 22 nt, Human
aaaguucacugaccagcacugg

SEQ ID NO: 444699 - RNA, 22 nt, Human
cagcccuuccaggcagaauucu

SEQ ID NO: 444700 - RNA, 22 nt, Human
aaaggaggaauggagagaugcu

SEQ ID NO: 444701 - RNA, 22 nt, Human
ucugcagcgugcaggcuggugc

SEQ ID NO: 444702 - RNA, 17 nt, Human
acaaugcagucucuagu

SEQ ID NO: 444703 - RNA, 22 nt, Human
gagcccugcggagccccgaggc

SEQ ID NO: 444704 - RNA, 20 nt, Human
uugaaaaugcauugugcagu

SEQ ID NO: 444705 - RNA, 22 nt, Human
acaggccugacacacagagggc

SEQ ID NO: 444706 - RNA, 22 nt, Human
auccugaggaaggugcagagau

SEQ ID NO: 444707 - RNA, 22 nt, Human
gauucuuaugagugaacuuuac

SEQ ID NO: 444708 - RNA, 22 nt, Human
gauuuuaucgucauccuucugg

SEQ ID NO: 444709 - RNA, 22 nt, Human
cucuggcuguuugcagcucaag

SEQ ID NO: 444710 - RNA, 22 nt, Human
aauguacaauaagacaaagagg

SEQ ID NO: 444711 - RNA, 22 nt, Human
ucugucaccgagggcauccaaa

SEQ ID NO: 444712 - RNA, 22 nt, Human
agcccuggggcuggugcuuacc

SEQ ID NO: 444713 - RNA, 23 nt, Human
cugcagccgcguggggacgugga

SEQ ID NO: 444714 - RNA, 22 nt, Human
uaauuuuaacugugcuguuugg

SEQ ID NO: 444715 - RNA, 22 nt, Human
caggcagcugcuggguucagcc

SEQ ID NO: 444716 - RNA, 22 nt, Human
aacaggaaaacagcacaauagc

SEQ ID NO: 444717 - RNA, 22 nt, Human
ggcagcuggguuggccagaaac

SEQ ID NO: 444718 - RNA, 19 nt, Human
cacaauuaugagacacuua

SEQ ID NO: 444719 - RNA, 22 nt, Human
cccaggaggcagagguugcagu

SEQ ID NO: 444720 - RNA, 22 nt, Human
aguggcuuuuuaguggcagaug

SEQ ID NO: 444721 - RNA, 22 nt, Human
ccagcuccuucugucuguggag

SEQ ID NO: 444722 - RNA, 22 nt, Human
ccaagaggcagaaugcagagaa

SEQ ID NO: 444723 - RNA, 22 nt, Human
gaggcccaggucaagcagccac

SEQ ID NO: 444724 - RNA, 22 nt, Human
gagggcucuaccaaguaacucu

SEQ ID NO: 444725 - RNA, 22 nt, Human
cagcagcuucuguugaucagaa

SEQ ID NO: 444726 - RNA, 22 nt, Human
ugcuuucagauaucuguuucaa

SEQ ID NO: 444727 - RNA, 22 nt, Human
acaggaguuuaagaaauauuuc

SEQ ID NO: 444728 - RNA, 22 nt, Human
agacaucucccaugcauuuuua

SEQ ID NO: 444729 - RNA, 22 nt, Human
uuacuuuggauggucaagaaag

SEQ ID NO: 444730 - RNA, 22 nt, Human
agcugcauuucagugaaauauu

SEQ ID NO: 444731 - RNA, 22 nt, Human
ugcagcuggaacuuagaggaga

SEQ ID NO: 444732 - RNA, 22 nt, Human
agcuggugcucaggggcaugga

SEQ ID NO: 444733 - RNA, 22 nt, Human
cagaggcagaggucaucucugg

SEQ ID NO: 444734 - RNA, 21 nt, Human
ccuggcuccagaacuuccggu

SEQ ID NO: 444735 - RNA, 22 nt, Human
acacacuucacccuugagcuaa

SEQ ID NO: 444736 - RNA, 22 nt, Human
caggugccgggaaugcagcaau

SEQ ID NO: 444737 - RNA, 22 nt, Human
ugcaauaauguaugucacuccc

SEQ ID NO: 444738 - RNA, 22 nt, Human
acauuuaaguuaaaaccucagu

SEQ ID NO: 444739 - RNA, 22 nt, Human
gugugccagacaugaugcuaug

SEQ ID NO: 444740 - RNA, 22 nt, Human
guucaagugucaaguguuggaa

SEQ ID NO: 444741 - RNA, 22 nt, Human
auguagcagauauuugugcaca

SEQ ID NO: 444742 - RNA, 22 nt, Human
ugcaauaaagugcuauaaaucc

SEQ ID NO: 444743 - RNA, 22 nt, Human
ugagaagcagcuuacagguguc

SEQ ID NO: 444744 - RNA, 22 nt, Human
augcccugcugcuggggcagug

SEQ ID NO: 444745 - RNA, 22 nt, Human
cuauuuugccugccuagaaauc

SEQ ID NO: 444746 - RNA, 22 nt, Human
aggcagcuagagagugaaacug

SEQ ID NO: 444747 - RNA, 22 nt, Human
uagcaacaagugacuaucuaua

SEQ ID NO: 444748 - RNA, 22 nt, Human
caggagccccaggcugacaaua

SEQ ID NO: 444749 - RNA, 22 nt, Human
cugucccucaucaccucugggu

SEQ ID NO: 444750 - RNA, 22 nt, Human
cgcagcugaccuuuuacaaaac

SEQ ID NO: 444751 - RNA, 23 nt, Human
gguuccugagcagggaucuggaa

SEQ ID NO: 444752 - RNA, 22 nt, Human
gagccuggccuccugccucagc

SEQ ID NO: 444753 - RNA, 22 nt, Human
aagacagagggaagcaaugaug

SEQ ID NO: 444754 - RNA, 22 nt, Human
auccugggcagugugucacucu

SEQ ID NO: 444755 - RNA, 22 nt, Human
gaauugcuaaccaauucaaaau

SEQ ID NO: 444756 - RNA, 22 nt, Human
cacuucaaauauggcuucauga

SEQ ID NO: 444757 - RNA, 22 nt, Human
ucuaaugaguuagauaauuuug

SEQ ID NO: 444758 - RNA, 22 nt, Human
guggccuggaaaggcuggucug

SEQ ID NO: 444759 - RNA, 22 nt, Human
ugaggacaugagugggacagag

SEQ ID NO: 444760 - RNA, 22 nt, Human
acacggaaaaggagacagaggg

SEQ ID NO: 444761 - RNA, 22 nt, Human
aagugcaauuugaaauucugca

SEQ ID NO: 444762 - RNA, 22 nt, Human
agcugccagggacugggcaugg

SEQ ID NO: 444763 - RNA, 21 nt, Human
ugccagcauguaggcuaguug

SEQ ID NO: 444764 - RNA, 22 nt, Human
gaagagagaacauuacauaaac

SEQ ID NO: 444765 - RNA, 22 nt, Human
ucaggccuccagguuaccauuu

SEQ ID NO: 444766 - RNA, 19 nt, Human
gcuguauuaaagauacaug

SEQ ID NO: 444767 - RNA, 22 nt, Human
ucagcaguuauuccccuacaga

SEQ ID NO: 444768 - RNA, 22 nt, Human
ggaugcugacuuuggagcaugg

SEQ ID NO: 444769 - RNA, 22 nt, Human
uuuucauuuuuguagaugcaag

SEQ ID NO: 444770 - RNA, 21 nt, Human
aaauugccacacauuucuucc

SEQ ID NO: 444771 - RNA, 22 nt, Human
aacucaaagaugcaugacgcuu

SEQ ID NO: 444772 - RNA, 22 nt, Human
gacaggugugaugauuuaggcu

SEQ ID NO: 444773 - RNA, 22 nt, Human
uaagagcagaacagcaacauau

SEQ ID NO: 444774 - RNA, 22 nt, Human
agagacaggaguucuguuucca

SEQ ID NO: 444775 - RNA, 22 nt, Human
aauuggaaaaugcuacauauca

SEQ ID NO: 444776 - RNA, 22 nt, Human
gcuggcugaggucuagcucuuu

SEQ ID NO: 444777 - RNA, 21 nt, Human
aacauuucugggagaacucac

SEQ ID NO: 444778 - RNA, 22 nt, Human
gaggccagcgcgcagcacuuuu

SEQ ID NO: 444779 - RNA, 22 nt, Human
guguccagggccguguugucuu

SEQ ID NO: 444780 - RNA, 22 nt, Human
ugggaacaacaugcacugccac

SEQ ID NO: 444781 - RNA, 22 nt, Human
ccagcagcucagcuacugguca

SEQ ID NO: 444782 - RNA, 17 nt, Human
uagcugccccgaaugcu

SEQ ID NO: 444783 - RNA, 22 nt, Human
auacagccuauucuuaccauug

SEQ ID NO: 444784 - RNA, 23 nt, Human
ccccucugguggcucagcuccug

SEQ ID NO: 444785 - RNA, 18 nt, Human
acacugcagcagucugcu

SEQ ID NO: 444786 - RNA, 22 nt, Human
ccaggccuggccaggggaugcc

SEQ ID NO: 444787 - RNA, 22 nt, Human
gcagggaccugccacugcuguc

SEQ ID NO: 444788 - RNA, 22 nt, Human
ggcugggcaaacaagacucuuc

SEQ ID NO: 444789 - RNA, 22 nt, Human
ucucagcaacgauccggaguaa

SEQ ID NO: 444790 - RNA, 22 nt, Human
acacagagcuggaacugcuuca

SEQ ID NO: 444791 - RNA, 22 nt, Human
agccaugcuccuuccccucugg

SEQ ID NO: 444792 - RNA, 22 nt, Human
gcagggugauagugaggcucag

SEQ ID NO: 444793 - RNA, 22 nt, Human
gggauuugugggauggccagug

SEQ ID NO: 444794 - RNA, 22 nt, Human
uggcccugcuggccaaaggcua

SEQ ID NO: 444795 - RNA, 22 nt, Human
ucccugggccuccugcuaugca

SEQ ID NO: 444796 - RNA, 22 nt, Human
aguucaagcaaugcuggaagaa

SEQ ID NO: 444797 - RNA, 22 nt, Human
auaaggcagugacuucaucuau

SEQ ID NO: 444798 - RNA, 22 nt, Human
agacaucuugcacacauauacu

SEQ ID NO: 444799 - RNA, 22 nt, Human
uggaaaggacaguugcugauag

SEQ ID NO: 444800 - RNA, 22 nt, Human
gugcacaucgugcagguuuguu

SEQ ID NO: 444801 - RNA, 22 nt, Human
auagcuuuuugucauagagucu

SEQ ID NO: 444802 - RNA, 23 nt, Human
gccuucagcucgggaaggcuccc

SEQ ID NO: 444803 - RNA, 22 nt, Human
aagcacauugccuggcacauag

SEQ ID NO: 444804 - RNA, 22 nt, Human
cauuuaauccauagaggaaugu

SEQ ID NO: 444805 - RNA, 22 nt, Human
gaggcuucuggaaagccuggca

SEQ ID NO: 444806 - RNA, 22 nt, Human
aagucccugguuccuagcaaaa

SEQ ID NO: 444807 - RNA, 22 nt, Human
agccaggcugcaguuggcuggc

SEQ ID NO: 444808 - RNA, 21 nt, Human
gggugcuguggucaugcagga

SEQ ID NO: 444809 - RNA, 22 nt, Human
ggcuccuguccuccuggagcuc

SEQ ID NO: 444810 - RNA, 18 nt, Human
agacuuugaguuagaggg

SEQ ID NO: 444811 - RNA, 22 nt, Human
uccugccuugccugggacauca

SEQ ID NO: 444812 - RNA, 22 nt, Human
aggacagcauuuucagcaucuc

SEQ ID NO: 444813 - RNA, 22 nt, Human
gggagggaaagcuugaucuguc

SEQ ID NO: 444814 - RNA, 22 nt, Human
agcugguggggaagcugcaggu

SEQ ID NO: 444815 - RNA, 22 nt, Human
cuggcagcuuagcacucugguu

SEQ ID NO: 444816 - RNA, 22 nt, Human
aggcugucugaccccagagccc

SEQ ID NO: 444817 - RNA, 22 nt, Human
agauuauuuaagacaggaacca

SEQ ID NO: 444818 - RNA, 22 nt, Human
agguccugaugaucucugagag

SEQ ID NO: 444819 - RNA, 22 nt, Human
uuccaugaagggcagccucuca

SEQ ID NO: 444820 - RNA, 22 nt, Human
ucucugcucugugccucaguuu

SEQ ID NO: 444821 - RNA, 22 nt, Human
auggguuuauagguggacuuuu

SEQ ID NO: 444822 - RNA, 22 nt, Human
cugccuggguucaaguccuguu

SEQ ID NO: 444823 - RNA, 22 nt, Human
cauugcaacuucaaacuccugg

SEQ ID NO: 444824 - RNA, 22 nt, Human
uauguacaaucagcaguucaua

SEQ ID NO: 444825 - RNA, 22 nt, Human
ucagagaaauaauugcugaguu

SEQ ID NO: 444826 - RNA, 17 nt, Human
ugagcaguagaagaugc

SEQ ID NO: 444827 - RNA, 22 nt, Human
agggacaguauccaucucacag

SEQ ID NO: 444828 - RNA, 22 nt, Human
cucauuaaaggaaaucaccugc

SEQ ID NO: 444829 - RNA, 22 nt, Human
cuuugcagaagaaaccuacaaa

SEQ ID NO: 444830 - RNA, 22 nt, Human
cagagcuggagcuugaauggag

SEQ ID NO: 444831 - RNA, 22 nt, Human
ugcauuauuugcaugugccugu

SEQ ID NO: 444832 - RNA, 22 nt, Human
auagacauuauaacacagagcu

SEQ ID NO: 444833 - RNA, 22 nt, Human
guguacaaaaugucuccaugga

SEQ ID NO: 444834 - RNA, 22 nt, Human
ucucacugggucacagcagagg

SEQ ID NO: 444835 - RNA, 22 nt, Human
acagagcaauucuuggguguuu

SEQ ID NO: 444836 - RNA, 22 nt, Human
cauuucacacauaaacuugggu

SEQ ID NO: 444837 - RNA, 22 nt, Human
cgcagcugccuugucagccguu

SEQ ID NO: 444838 - RNA, 22 nt, Human
ggcccugugguuuugcaaaguc

SEQ ID NO: 444839 - RNA, 22 nt, Human
auccccagaaaauaggugccua

SEQ ID NO: 444840 - RNA, 22 nt, Human
ugagcuggagucuguggcuccu

SEQ ID NO: 444841 - RNA, 22 nt, Human
cagcagcaacaacggaagccuu

SEQ ID NO: 444842 - RNA, 22 nt, Human
aaguucaagucugcaucuuuuu

SEQ ID NO: 444843 - RNA, 22 nt, Human
uaaauuguuuucuagaaguugu

SEQ ID NO: 444844 - RNA, 22 nt, Human
gagaugagugggggaucucuca

SEQ ID NO: 444845 - RNA, 23 nt, Human
ugcagccacucaggagcucagug

SEQ ID NO: 444846 - RNA, 22 nt, Human
ccaguccugccacccugucuau

SEQ ID NO: 444847 - RNA, 22 nt, Human
guuucagauauauuuguacuua

SEQ ID NO: 444848 - RNA, 22 nt, Human
aggcugccucgugagcucgcug

SEQ ID NO: 444849 - RNA, 22 nt, Human
cagagcugacccaaggauugaa

SEQ ID NO: 444850 - RNA, 22 nt, Human
ccuggggagccgccugagcccc

SEQ ID NO: 444851 - RNA, 22 nt, Human
gauuuuucaguauaaaauauau

SEQ ID NO: 444852 - RNA, 20 nt, Human
agugcaagaaagcacagcug

SEQ ID NO: 444853 - RNA, 22 nt, Human
ugcucaggaggaggcugugagg

SEQ ID NO: 444854 - RNA, 22 nt, Human
ugcaaauagccuauauuuauag

SEQ ID NO: 444855 - RNA, 22 nt, Human
gaucuuuagccaagacacacca

SEQ ID NO: 444856 - RNA, 22 nt, Human
gcugggaaccaugggaaggcag

SEQ ID NO: 444857 - RNA, 21 nt, Human
gucuggaugcccuucucuugg

SEQ ID NO: 444858 - RNA, 22 nt, Human
uucucacaguaccuaacaugua

SEQ ID NO: 444859 - RNA, 23 nt, Human
uccugccagaugacuccuuucuu

SEQ ID NO: 444860 - RNA, 22 nt, Human
auuccaaacucuuucccugucg

SEQ ID NO: 444861 - RNA, 22 nt, Human
gccuuccaccuaggccucugcu

SEQ ID NO: 444862 - RNA, 22 nt, Human
gugcccugaaagaguuaauuca

SEQ ID NO: 444863 - RNA, 22 nt, Human
gcagagugaagggagaggugug

SEQ ID NO: 444864 - RNA, 22 nt, Human
ugaagcuacagaccuucgcggu

SEQ ID NO: 444865 - RNA, 22 nt, Human
auuugacaacuucugguggcau

SEQ ID NO: 444866 - RNA, 22 nt, Human
agcugagcugcagaugacugua

SEQ ID NO: 444867 - RNA, 22 nt, Human
uuucuacauguuuucuauugaa

SEQ ID NO: 444868 - RNA, 22 nt, Human
auuaguugaacaaguuaaguaa

SEQ ID NO: 444869 - RNA, 22 nt, Human
aaauuaguacauugcaaagucc

SEQ ID NO: 444870 - RNA, 22 nt, Human
cacaggaauuagcagccuaaaa

SEQ ID NO: 444871 - RNA, 22 nt, Human
gccugucugcagggcugucauu

SEQ ID NO: 444872 - RNA, 21 nt, Human
ccagcagcucaaggaucucuu

SEQ ID NO: 444873 - RNA, 22 nt, Human
aaacuuuuccugcucuuguccu

SEQ ID NO: 444874 - RNA, 22 nt, Human
gccuggaguucagccaaguccc

SEQ ID NO: 444875 - RNA, 22 nt, Human
aacaggcuauuucuuuacaaac

SEQ ID NO: 444876 - RNA, 22 nt, Human
aggugccagcucucaggcagga

SEQ ID NO: 444877 - RNA, 22 nt, Human
gccuguccuggaugcucugcaa

SEQ ID NO: 444878 - RNA, 22 nt, Human
aguucaaagcugcaguaaugga

SEQ ID NO: 444879 - RNA, 22 nt, Human
ucccagcccagacuucuccagu

SEQ ID NO: 444880 - RNA, 22 nt, Human
ugcacaguaaacaugacuggag

SEQ ID NO: 444881 - RNA, 22 nt, Human
cacagaggcggaaaauucugaa

SEQ ID NO: 444882 - RNA, 22 nt, Human
cuagggagacucgcaggacuca

SEQ ID NO: 444883 - RNA, 22 nt, Human
uuuagacacuagggaugcagug

SEQ ID NO: 444884 - RNA, 22 nt, Human
ugaacagauggcccagcagagg

SEQ ID NO: 444885 - RNA, 22 nt, Human
cugagacccagacaccugagga

SEQ ID NO: 444886 - RNA, 19 nt, Human
ccuggccagacuucugccc

SEQ ID NO: 444887 - RNA, 22 nt, Human
uauacacaaggugugcauuugu

SEQ ID NO: 444888 - RNA, 22 nt, Human
uugugugugagccuucaccaca

SEQ ID NO: 444889 - RNA, 22 nt, Human
acaggcugacuuccugccaugu

SEQ ID NO: 444890 - RNA, 22 nt, Human
ggugggcagcucuuggcaggca

SEQ ID NO: 444891 - RNA, 22 nt, Human
uaucuuuugaguucucaagaug

SEQ ID NO: 444892 - RNA, 22 nt, Human
cagcugccugucuggaggcaau

SEQ ID NO: 444893 - RNA, 22 nt, Human
aggccucuguagggcccugaag

SEQ ID NO: 444894 - RNA, 22 nt, Human
guucuacaugacacucaacauu

SEQ ID NO: 444895 - RNA, 22 nt, Human
auggaguggggacugcagugga

SEQ ID NO: 444896 - RNA, 22 nt, Human
aaaggaaaauaaguaguuccau

SEQ ID NO: 444897 - RNA, 22 nt, Human
auggcuugucuaugagugcucu

SEQ ID NO: 444898 - RNA, 22 nt, Human
gcugucaccaaagcaggcacug

SEQ ID NO: 444899 - RNA, 22 nt, Human
cagaggcucuuccucacugccc

SEQ ID NO: 444900 - RNA, 22 nt, Human
uugagaaauaagcaugucuaga

SEQ ID NO: 444901 - RNA, 22 nt, Human
gcaagcugcuuaagcucauugu

SEQ ID NO: 444902 - RNA, 20 nt, Human
uuugucuguuaaguguuucu

SEQ ID NO: 444903 - RNA, 22 nt, Human
gcccugugcgacucuagagguu

SEQ ID NO: 444904 - RNA, 22 nt, Human
ugggggugcccuaugaggaagc

SEQ ID NO: 444905 - RNA, 22 nt, Human
cugagaggcggagguugcagug

SEQ ID NO: 444906 - RNA, 22 nt, Human
aauaguauuuauuuggaaaaag

SEQ ID NO: 444907 - RNA, 22 nt, Human
cuucaauaccugcguugcuagu

SEQ ID NO: 444908 - RNA, 22 nt, Human
cugccacuuucacccagugcuc

SEQ ID NO: 444909 - RNA, 22 nt, Human
aggagacauacuauaggaauau

SEQ ID NO: 444910 - RNA, 22 nt, Human
auugugauuagagaauauagag

SEQ ID NO: 444911 - RNA, 22 nt, Human
ucuggccacccgaggccccugc

SEQ ID NO: 444912 - RNA, 22 nt, Human
cagcuguuugggcauggccaga

SEQ ID NO: 444913 - RNA, 22 nt, Human
cagcccugucccugagggaccu

SEQ ID NO: 444914 - RNA, 22 nt, Human
aagagacuuguccgaaguugua

SEQ ID NO: 444915 - RNA, 22 nt, Human
gcuuugcuggcuugaaaugcug

SEQ ID NO: 444916 - RNA, 22 nt, Human
ccucgcggcacucgggccggau

SEQ ID NO: 444917 - RNA, 22 nt, Human
uuauauccaaaggcaaggagga

SEQ ID NO: 444918 - RNA, 21 nt, Human
gcucuugaauaagcauaauaa

SEQ ID NO: 444919 - RNA, 18 nt, Human
aagccagagaccacugcc

SEQ ID NO: 444920 - RNA, 22 nt, Human
acagaugguuauugucauuucu

SEQ ID NO: 444921 - RNA, 22 nt, Human
caccacuggaggucuuggcuuu

SEQ ID NO: 444922 - RNA, 22 nt, Human
cuauuauuauguuaacuggacu

SEQ ID NO: 444923 - RNA, 22 nt, Human
uugacaaaggaccuugcuauuu

SEQ ID NO: 444924 - RNA, 20 nt, Human
gugcccugugggcuauuuuc

SEQ ID NO: 444925 - RNA, 22 nt, Human
aauuucaaugcacucaugguug

SEQ ID NO: 444926 - RNA, 19 nt, Human
uuucacaaagagagcguga

SEQ ID NO: 444927 - RNA, 22 nt, Human
gccucugcaucaucacuccagc

SEQ ID NO: 444928 - RNA, 22 nt, Human
gaggcugcugagagcccuguuu

SEQ ID NO: 444929 - RNA, 22 nt, Human
ucagcaguugcccccucccagc

SEQ ID NO: 444930 - RNA, 22 nt, Human
aagccagguuccauggaggagc

SEQ ID NO: 444931 - RNA, 22 nt, Human
gcccacaggggaccugguggcu

SEQ ID NO: 444932 - RNA, 22 nt, Human
cuuaacauccugcauuuuucuu

SEQ ID NO: 444933 - RNA, 18 nt, Human
uggcucugcagccagaug

SEQ ID NO: 444934 - RNA, 19 nt, Human
ccaggccuggcgucuccgc

SEQ ID NO: 444935 - RNA, 22 nt, Human
ugcauuuguucagugaaauguu

SEQ ID NO: 444936 - RNA, 22 nt, Human
agaagcagcaagcccuucaaag

SEQ ID NO: 444937 - RNA, 22 nt, Human
aaggcuggcaauauauuuguua

SEQ ID NO: 444938 - RNA, 22 nt, Human
cagaggaggcgguauacacugc

SEQ ID NO: 444939 - RNA, 22 nt, Human
cuucccugauaagagccucaga

SEQ ID NO: 444940 - RNA, 22 nt, Human
uacagcccaagaaguuuauacg

SEQ ID NO: 444941 - RNA, 22 nt, Human
uuggaaauacgaguaguaucau

SEQ ID NO: 444942 - RNA, 23 nt, Human
uagcaggcuuucuuuucucucac

SEQ ID NO: 444943 - RNA, 22 nt, Human
uuauugcaaaggaagagcuuga

SEQ ID NO: 444944 - RNA, 22 nt, Human
ccaggccuggaccaugccaggg

SEQ ID NO: 444945 - RNA, 22 nt, Human
gagacugucacuugggaccugu

SEQ ID NO: 444946 - RNA, 22 nt, Human
agcugccacagagccuggccag

SEQ ID NO: 444947 - RNA, 22 nt, Human
aucaugcaugguacucuugugc

SEQ ID NO: 444948 - RNA, 22 nt, Human
gucaugccuggcuucuuagaca

SEQ ID NO: 444949 - RNA, 22 nt, Human
aauguggcauugucauuauugg

SEQ ID NO: 444950 - RNA, 22 nt, Human
ccugugucaucagcuguggcua

SEQ ID NO: 444951 - RNA, 22 nt, Human
gccuuggccuuccuaggccuga

SEQ ID NO: 444952 - RNA, 19 nt, Human
ugcauugagggcugucuca

SEQ ID NO: 444953 - RNA, 22 nt, Human
gucccagggaugcagacaugag

SEQ ID NO: 444954 - RNA, 22 nt, Human
cccauggcagucagagauaaga

SEQ ID NO: 444955 - RNA, 22 nt, Human
ucauguacauguaagucagaaa

SEQ ID NO: 444956 - RNA, 22 nt, Human
gggcuggugaggcugcccugca

SEQ ID NO: 444957 - RNA, 22 nt, Human
aggacacacuucugaggucuuu

SEQ ID NO: 444958 - RNA, 22 nt, Human
auguuuuauguuccacucaagg

SEQ ID NO: 444959 - RNA, 22 nt, Human
gggcucuggaguucuagaaaga

SEQ ID NO: 444960 - RNA, 22 nt, Human
agagauguucauucagcauguu

SEQ ID NO: 444961 - RNA, 21 nt, Human
uuaauuuauucaugauagcua

SEQ ID NO: 444962 - RNA, 22 nt, Human
gggaugagaguagggugugaaa

SEQ ID NO: 444963 - RNA, 22 nt, Human
ugccucagagugggcuugcuau

SEQ ID NO: 444964 - RNA, 22 nt, Human
ccugccuggagcugagugugga

SEQ ID NO: 444965 - RNA, 22 nt, Human
ggcagcuguuuguccuccuguu

SEQ ID NO: 444966 - RNA, 21 nt, Human
gagcauggcuuacaucagcag

SEQ ID NO: 444967 - RNA, 22 nt, Human
gaagccaagccagcugauggag

SEQ ID NO: 444968 - RNA, 20 nt, Human
agcuggccuguccuaggccu

SEQ ID NO: 444969 - RNA, 21 nt, Human
cacagaggcgcuguauggcug

SEQ ID NO: 444970 - RNA, 22 nt, Human
gcuguguccucacacagccuuu

SEQ ID NO: 444971 - RNA, 22 nt, Human
ggcucugcuucucaccuguucc

SEQ ID NO: 444972 - RNA, 22 nt, Human
uuucagaguugucuucuugacc

SEQ ID NO: 444973 - RNA, 23 nt, Human
agcaggcugcuucuccacagcug

SEQ ID NO: 444974 - RNA, 22 nt, Human
aauucauauggauaugcuagua

SEQ ID NO: 444975 - RNA, 22 nt, Human
caaaugaagggagcugaagucu

SEQ ID NO: 444976 - RNA, 22 nt, Human
caauucaucuggguagguagcc

SEQ ID NO: 444977 - RNA, 16 nt, Human
uugcccugaggggagg

SEQ ID NO: 444978 - RNA, 22 nt, Human
acguuugcuuucuuuggccugg

SEQ ID NO: 444979 - RNA, 22 nt, Human
cagcccuggcagcuuucagggu

SEQ ID NO: 444980 - RNA, 22 nt, Human
agugcuggaaagggacggagga

SEQ ID NO: 444981 - RNA, 21 nt, Human
acacuucaguuuuuaaaggga

SEQ ID NO: 444982 - RNA, 22 nt, Human
uggcccagggaguucauggugu

SEQ ID NO: 444983 - RNA, 22 nt, Human
uuuccucauuuaucugcuggga

SEQ ID NO: 444984 - RNA, 22 nt, Human
uuuauguaauuucauaggugug

SEQ ID NO: 444985 - RNA, 22 nt, Human
guguugaugacauuuuagaaac

SEQ ID NO: 444986 - RNA, 22 nt, Human
uacaacacugguucgacaugug

SEQ ID NO: 444987 - RNA, 22 nt, Human
uuguuuuggagaugagcuaaaa

SEQ ID NO: 444988 - RNA, 22 nt, Human
auuuuaucugcuuacuuucagg

SEQ ID NO: 444989 - RNA, 22 nt, Human
ugcagcugcucuucauuucccc

SEQ ID NO: 444990 - RNA, 19 nt, Human
ugagacagggauucaggug

SEQ ID NO: 444991 - RNA, 22 nt, Human
aaaguucuauuggauagugcug

SEQ ID NO: 444992 - RNA, 22 nt, Human
ugggcacagggguaggaaugag

SEQ ID NO: 444993 - RNA, 22 nt, Human
cauuagcacucuaaggaagaga

SEQ ID NO: 444994 - RNA, 22 nt, Human
aaaguugauuuggagggauauu

SEQ ID NO: 444995 - RNA, 22 nt, Human
gcagcuguaaagcagaaauagu

SEQ ID NO: 444996 - RNA, 22 nt, Human
cagccugcagggcugccuguug

SEQ ID NO: 444997 - RNA, 22 nt, Human
uuacaguaaucgaguguugugg

SEQ ID NO: 444998 - RNA, 22 nt, Human
cggagcugccugccaagccugc

SEQ ID NO: 444999 - RNA, 22 nt, Human
gcagccaggaagcccaggacac

SEQ ID NO: 445000 - RNA, 22 nt, Human
acauuuaaccaaacuguuuaau

SEQ ID NO: 445001 - RNA, 22 nt, Human
cugacccauauaagaguggagg

SEQ ID NO: 445002 - RNA, 22 nt, Human
aagcaggcaucuuggaggucaa

SEQ ID NO: 445003 - RNA, 20 nt, Human
ucacaggagggaaggcaggu

SEQ ID NO: 445004 - RNA, 22 nt, Human
auauuaauuauuuacacaugag

SEQ ID NO: 445005 - RNA, 22 nt, Human
ccagaggaucaguacuggcugg

SEQ ID NO: 445006 - RNA, 22 nt, Human
aggaaaggauuggcuucucugu

SEQ ID NO: 445007 - RNA, 19 nt, Human
cuccaagugccaaggacag

SEQ ID NO: 445008 - RNA, 22 nt, Human
ggaaggaagugaccaggauauc

SEQ ID NO: 445009 - RNA, 22 nt, Human
uuagcaauaugaaugcauuugc

SEQ ID NO: 445010 - RNA, 22 nt, Human
caacaaguguucguaaagugcc

SEQ ID NO: 445011 - RNA, 22 nt, Human
cauuuggccauuccagucacau

SEQ ID NO: 445012 - RNA, 22 nt, Human
cugcuuugauuagaagaguaca

SEQ ID NO: 445013 - RNA, 22 nt, Human
cagcuguuguuaugucugcagg

SEQ ID NO: 445014 - RNA, 22 nt, Human
ccucccuggccagagcagcagc

SEQ ID NO: 445015 - RNA, 22 nt, Human
aauugcccgcacauugagaggu

SEQ ID NO: 445016 - RNA, 22 nt, Human
uuaaggcauagcuuguguugac

SEQ ID NO: 445017 - RNA, 22 nt, Human
acauuaaauuucauagugauua

SEQ ID NO: 445018 - RNA, 22 nt, Human
acagcagcgugaaguguguuau

SEQ ID NO: 445019 - RNA, 20 nt, Human
ucccucccuccagcucuggg

SEQ ID NO: 445020 - RNA, 22 nt, Human
ccugccugggcucacuugccag

SEQ ID NO: 445021 - RNA, 22 nt, Human
aaggcagcuucaccacagcauu

SEQ ID NO: 445022 - RNA, 22 nt, Human
gaagaauauauaaugauuuugu

SEQ ID NO: 445023 - RNA, 20 nt, Human
ccugccugccucggcucauu

SEQ ID NO: 445024 - RNA, 22 nt, Human
cagcugccacuugcucucggcu

SEQ ID NO: 445025 - RNA, 22 nt, Human
cuuuggcagccucagcugcagg

SEQ ID NO: 445026 - RNA, 22 nt, Human
cagccagguucaaguccuuaua

SEQ ID NO: 445027 - RNA, 22 nt, Human
aggcagacuuccugcuuggauc

SEQ ID NO: 445028 - RNA, 22 nt, Human
agcagagccagaauuggaccag

SEQ ID NO: 445029 - RNA, 22 nt, Human
uuuuaguuacugcaguagcaaa

SEQ ID NO: 445030 - RNA, 22 nt, Human
augccaggccccacgcugggca

SEQ ID NO: 445031 - RNA, 20 nt, Human
ccuggcugcauucaggacgg

SEQ ID NO: 445032 - RNA, 22 nt, Human
uagcaacagaaaauaggagugc

SEQ ID NO: 445033 - RNA, 22 nt, Human
aggaagagcccgggugacauaa

SEQ ID NO: 445034 - RNA, 22 nt, Human
cuguguggccucaagccagccu

SEQ ID NO: 445035 - RNA, 22 nt, Human
cuggagccuagguugaccuggg

SEQ ID NO: 445036 - RNA, 22 nt, Human
uaaacaucugaauccugcuucc

SEQ ID NO: 445037 - RNA, 22 nt, Human
gcugcccagcaggccccagggg

SEQ ID NO: 445038 - RNA, 22 nt, Human
ucagcaguagagggggcacagu

SEQ ID NO: 445039 - RNA, 20 nt, Human
uucagagucagcaaaugcag

SEQ ID NO: 445040 - RNA, 22 nt, Human
uugaaugauccuaucuagcaca

SEQ ID NO: 445041 - RNA, 22 nt, Human
ugagccuggguggucgaggcug

SEQ ID NO: 445042 - RNA, 22 nt, Human
ggggcagagcauagcuccaauu

SEQ ID NO: 445043 - RNA, 22 nt, Human
auuaaauuaaguggcuaauuua

SEQ ID NO: 445044 - RNA, 19 nt, Human
ucuccaggcaggugagcga

SEQ ID NO: 445045 - RNA, 20 nt, Human
auucagaauaggcauguaaa

SEQ ID NO: 445046 - RNA, 22 nt, Human
cuauucagguguccauuaaucc

SEQ ID NO: 445047 - RNA, 22 nt, Human
guuucagaguuagugcuggcug

SEQ ID NO: 445048 - RNA, 22 nt, Human
ggguaauuggaaauauuaauag

SEQ ID NO: 445049 - RNA, 22 nt, Human
gcacuucaugacuuugucaaau

SEQ ID NO: 445050 - RNA, 19 nt, Human
cuggugcuugagugaguca

SEQ ID NO: 445051 - RNA, 22 nt, Human
cuuugcagugauuguucuugga

SEQ ID NO: 445052 - RNA, 22 nt, Human
acauaacacucuucucuaguga

SEQ ID NO: 445053 - RNA, 22 nt, Human
uggcucugugcuucuaguaucu

SEQ ID NO: 445054 - RNA, 22 nt, Human
ggcccagccggcgagucucgcg

SEQ ID NO: 445055 - RNA, 22 nt, Human
gagggguguggagccaucaguu

SEQ ID NO: 445056 - RNA, 22 nt, Human
agggcuggcuaggugcguuccc

SEQ ID NO: 445057 - RNA, 22 nt, Human
uucucuaaaauuaagugaggua

SEQ ID NO: 445058 - RNA, 22 nt, Human
cugauuccugauucaugcucuu

SEQ ID NO: 445059 - RNA, 22 nt, Human
ugacuggauugucauuacgacg

SEQ ID NO: 445060 - RNA, 22 nt, Human
gccagucucccucaguccucug

SEQ ID NO: 445061 - RNA, 22 nt, Human
cuggggcugcgguggaggagcc

SEQ ID NO: 445062 - RNA, 22 nt, Human
gcucagaguggccuggcuaggg

SEQ ID NO: 445063 - RNA, 22 nt, Human
aaguacaugcuguaaugauugg

SEQ ID NO: 445064 - RNA, 22 nt, Human
gagacagaugcugcuggagcau

SEQ ID NO: 445065 - RNA, 22 nt, Human
acugcaucugaaacauggguca

SEQ ID NO: 445066 - RNA, 22 nt, Human
ggcaggcacugugcuaggcgcu

SEQ ID NO: 445067 - RNA, 22 nt, Human
agcugcaggcccaugcucaguc

SEQ ID NO: 445068 - RNA, 22 nt, Human
guucaaauugauuuugguaaag

SEQ ID NO: 445069 - RNA, 22 nt, Human
ugaagagaagaaaauuaucuuu

SEQ ID NO: 445070 - RNA, 22 nt, Human
uuugcaaacacuuaagaagaga

SEQ ID NO: 445071 - RNA, 17 nt, Human
agcaggaccccagagca

SEQ ID NO: 445072 - RNA, 22 nt, Human
aggcaagcagucagucuaugag

SEQ ID NO: 445073 - RNA, 22 nt, Human
ugcagcucauugcuggggucug

SEQ ID NO: 445074 - RNA, 23 nt, Human
uaggccucccuggagcacccagc

SEQ ID NO: 445075 - RNA, 22 nt, Human
uaauguauaacaaauacucauc

SEQ ID NO: 445076 - RNA, 20 nt, Human
agcagcuguguuuucauccu

SEQ ID NO: 445077 - RNA, 22 nt, Human
ccucacagcccuuggcccagga

SEQ ID NO: 445078 - RNA, 22 nt, Human
uccauuauacuucugauucaaa

SEQ ID NO: 445079 - RNA, 22 nt, Human
guucugaggcaaaggcagcagc

SEQ ID NO: 445080 - RNA, 23 nt, Human
guggagccacaucacaggcuccu

SEQ ID NO: 445081 - RNA, 22 nt, Human
auuguuaacuauagcaucuggu

SEQ ID NO: 445082 - RNA, 22 nt, Human
agguucgggcacuuacaaaugg

SEQ ID NO: 445083 - RNA, 22 nt, Human
uuucaaagucaauaucauuacc

SEQ ID NO: 445084 - RNA, 22 nt, Human
gugggccucuugaggguggcua

SEQ ID NO: 445085 - RNA, 20 nt, Human
ugaauagagagcacauaugc

SEQ ID NO: 445086 - RNA, 22 nt, Human
uguccugugcacuguagcaugu

SEQ ID NO: 445087 - RNA, 22 nt, Human
agccuccuguagcccucaccca

SEQ ID NO: 445088 - RNA, 19 nt, Human
ucucuggggacacuuucac

SEQ ID NO: 445089 - RNA, 22 nt, Human
cccagagagguaaaacagccuu

SEQ ID NO: 445090 - RNA, 22 nt, Human
agccagagaacagcaggaaaug

SEQ ID NO: 445091 - RNA, 22 nt, Human
auucaaagcccaguaaacauug

SEQ ID NO: 445092 - RNA, 22 nt, Human
ggcaggcgugguggccucagaa

SEQ ID NO: 445093 - RNA, 22 nt, Human
caagauucauuuuguccuuguc

SEQ ID NO: 445094 - RNA, 22 nt, Human
aggcuucuugggcuucauucug

SEQ ID NO: 445095 - RNA, 22 nt, Human
uucuuuuagaauuuccuaaggu

SEQ ID NO: 445096 - RNA, 22 nt, Human
gcagugcuaaguagcuggccca

SEQ ID NO: 445097 - RNA, 22 nt, Human
agcccuucaagagcucuguccu

SEQ ID NO: 445098 - RNA, 22 nt, Human
cagcccagagccaguucccgcu

SEQ ID NO: 445099 - RNA, 22 nt, Human
gaaaggagaggguuaaggagcu

SEQ ID NO: 445100 - RNA, 22 nt, Human
ccauacugaggacacauuguga

SEQ ID NO: 445101 - RNA, 22 nt, Human
aagcugccuagaguugaauguc

SEQ ID NO: 445102 - RNA, 22 nt, Human
cuggcucccggggaucgagcac

SEQ ID NO: 445103 - RNA, 22 nt, Human
ugcagcugguaucccauggauu

SEQ ID NO: 445104 - RNA, 23 nt, Human
ugcaggcuaggaagagagccuuc

SEQ ID NO: 445105 - RNA, 22 nt, Human
cucucuccuuagcugcagacca

SEQ ID NO: 445106 - RNA, 19 nt, Human
ggcagucacggucaggagc

SEQ ID NO: 445107 - RNA, 20 nt, Human
ugggccugagccugugggcu

SEQ ID NO: 445108 - RNA, 22 nt, Human
auggcauuauagcaaugguuug

SEQ ID NO: 445109 - RNA, 22 nt, Human
caacauucaaccaacauuuaug

SEQ ID NO: 445110 - RNA, 22 nt, Human
caggaacauguuggaaagaaau

SEQ ID NO: 445111 - RNA, 22 nt, Human
agacauagaaaaucauuaggaa

SEQ ID NO: 445112 - RNA, 22 nt, Human
agcaggcuaaucuugcugaaca

SEQ ID NO: 445113 - RNA, 23 nt, Human
gugugccaagcacugugccagga

SEQ ID NO: 445114 - RNA, 22 nt, Human
gauacagcucuggccagaugug

SEQ ID NO: 445115 - RNA, 22 nt, Human
auaaugcaccuuugaguauggc

SEQ ID NO: 445116 - RNA, 22 nt, Human
aggcagccauuaccaagggcau

SEQ ID NO: 445117 - RNA, 22 nt, Human
ccugccugaaggucagccaccc

SEQ ID NO: 445118 - RNA, 21 nt, Human
uacaugaagcugguguuuguc

SEQ ID NO: 445119 - RNA, 22 nt, Human
agcaacaggcauaauguguuga

SEQ ID NO: 445120 - RNA, 22 nt, Human
uauguacaagcacacaugugac

SEQ ID NO: 445121 - RNA, 20 nt, Human
gcacugaaauucaauguuug

SEQ ID NO: 445122 - RNA, 22 nt, Human
uuacaaugagaaaugguuggca

SEQ ID NO: 445123 - RNA, 22 nt, Human
guccuggggauuauagaguguu

SEQ ID NO: 445124 - RNA, 22 nt, Human
gacccuguuucuacaaauaauu

SEQ ID NO: 445125 - RNA, 22 nt, Human
gggcucugggauucagagcaag

SEQ ID NO: 445126 - RNA, 22 nt, Human
gcagagauuaugccauggaaag

SEQ ID NO: 445127 - RNA, 22 nt, Human
aggcacagcacaccuggccccc

SEQ ID NO: 445128 - RNA, 22 nt, Human
uuucuaguaaaagcuaauuacc

SEQ ID NO: 445129 - RNA, 22 nt, Human
uauaauuuaucaugucacaguu

SEQ ID NO: 445130 - RNA, 22 nt, Human
cucugucccagacccaccucuc

SEQ ID NO: 445131 - RNA, 22 nt, Human
auugauaaauugcaauggggcu

SEQ ID NO: 445132 - RNA, 22 nt, Human
aacccacaaaggauuucagcuc

SEQ ID NO: 445133 - RNA, 22 nt, Human
gccaggcugcuggcugcugucc

SEQ ID NO: 445134 - RNA, 22 nt, Human
cugcccugugaggguccuuggg

SEQ ID NO: 445135 - RNA, 22 nt, Human
guuuuacaaaugacggcauuca

SEQ ID NO: 445136 - RNA, 19 nt, Human
ucucccagcugagaagggc

SEQ ID NO: 445137 - RNA, 22 nt, Human
ccaggaggaugguuguuaggug

SEQ ID NO: 445138 - RNA, 22 nt, Human
agcagcugccagagagaguucc

SEQ ID NO: 445139 - RNA, 22 nt, Human
uaaaguuggaccugauuuuauu

SEQ ID NO: 445140 - RNA, 22 nt, Human
uggagcugggaguccugggcug

SEQ ID NO: 445141 - RNA, 22 nt, Human
ugaggccuuaguaacccugcac

SEQ ID NO: 445142 - RNA, 22 nt, Human
uguuucagucccuguguucaau

SEQ ID NO: 445143 - RNA, 22 nt, Human
uaguaaaucucagaaaaagauc

SEQ ID NO: 445144 - RNA, 22 nt, Human
gcccagaaguugaggcugcagu

SEQ ID NO: 445145 - RNA, 22 nt, Human
uuuaaaaaacuagucugagucu

SEQ ID NO: 445146 - RNA, 22 nt, Human
ucuauacaaguuucacuuugac

SEQ ID NO: 445147 - RNA, 22 nt, Human
uauugcuuuuauuucuauggac

SEQ ID NO: 445148 - RNA, 22 nt, Human
ccagcccucacugaggccucuc

SEQ ID NO: 445149 - RNA, 22 nt, Human
ggaaucagaugaggggcagagc

SEQ ID NO: 445150 - RNA, 22 nt, Human
gguguccugggcaggcagcuga

SEQ ID NO: 445151 - RNA, 20 nt, Human
agugucugggccucaggccc

SEQ ID NO: 445152 - RNA, 22 nt, Human
gcucagagcaucccagugaaug

SEQ ID NO: 445153 - RNA, 22 nt, Human
ggcacacaaaggcagcauuuga

SEQ ID NO: 445154 - RNA, 22 nt, Human
gugccugggguugagcuaugaa

SEQ ID NO: 445155 - RNA, 22 nt, Human
cuaugaccccagcaugaauaag

SEQ ID NO: 445156 - RNA, 22 nt, Human
ucugcagcuuuuugguggggug

SEQ ID NO: 445157 - RNA, 22 nt, Human
uaggacaggcuaaaagggauaa

SEQ ID NO: 445158 - RNA, 22 nt, Human
agcagcugucccuuaacaucag

SEQ ID NO: 445159 - RNA, 22 nt, Human
auaguuuacaaaaaugaugcau

SEQ ID NO: 445160 - RNA, 22 nt, Human
ggaggacacuggcucugccuuc

SEQ ID NO: 445161 - RNA, 22 nt, Human
uuauuugcccauguuuagcaga

SEQ ID NO: 445162 - RNA, 22 nt, Human
agugggcaugaucuggugucug

SEQ ID NO: 445163 - RNA, 22 nt, Human
ucaggcugcaguggcaaaagac

SEQ ID NO: 445164 - RNA, 22 nt, Human
gaagcuaaugauuuauuuucug

SEQ ID NO: 445165 - RNA, 22 nt, Human
uugcaaauucgucacuguuaaa

SEQ ID NO: 445166 - RNA, 22 nt, Human
gacagcaggaugugaggggaug

SEQ ID NO: 445167 - RNA, 20 nt, Human
uuuagcaaaagggacugcuc

SEQ ID NO: 445168 - RNA, 22 nt, Human
ugggccugauucuugaauccug

SEQ ID NO: 445169 - RNA, 22 nt, Human
ggcuuggagucauacugagaau

SEQ ID NO: 445170 - RNA, 22 nt, Human
aaacugcacacgaugugccuga

SEQ ID NO: 445171 - RNA, 19 nt, Human
aaggcagcaguagcaucca

SEQ ID NO: 445172 - RNA, 22 nt, Human
ucacaggccuggggcagagggc

SEQ ID NO: 445173 - RNA, 22 nt, Human
uuauaacaacaguuuacuuuaa

SEQ ID NO: 445174 - RNA, 22 nt, Human
ggcagcagggucuagauugaug

SEQ ID NO: 445175 - RNA, 22 nt, Human
aguucuuuucuagauucuggau

SEQ ID NO: 445176 - RNA, 22 nt, Human
uacuuugcaugcuugugugauc

SEQ ID NO: 445177 - RNA, 22 nt, Human
uggacaggugagugacucaggg

SEQ ID NO: 445178 - RNA, 22 nt, Human
uugcuugcccugcagcauacuu

SEQ ID NO: 445179 - RNA, 22 nt, Human
aaaugccucuggguuauucuag

SEQ ID NO: 445180 - RNA, 22 nt, Human
gccuggugugcgccgcgcagcu

SEQ ID NO: 445181 - RNA, 22 nt, Human
agacaacaccaaaugcuagugu

SEQ ID NO: 445182 - RNA, 22 nt, Human
aauuuccugggauaaaaagcca

SEQ ID NO: 445183 - RNA, 22 nt, Human
cagcugugauuccugcugucca

SEQ ID NO: 445184 - RNA, 22 nt, Human
ugacaaguuuccuggugauuuu

SEQ ID NO: 445185 - RNA, 22 nt, Human
augcauauugauuauagauuca

SEQ ID NO: 445186 - RNA, 22 nt, Human
uaaggcagauguggaaucaauu

SEQ ID NO: 445187 - RNA, 20 nt, Human
uggagcuguaaucuugucug

SEQ ID NO: 445188 - RNA, 22 nt, Human
ugguacaaagccucuuugccuc

SEQ ID NO: 445189 - RNA, 21 nt, Human
aagagacauuucucaucagca

SEQ ID NO: 445190 - RNA, 22 nt, Human
gagacagaucucggcuccaugc

SEQ ID NO: 445191 - RNA, 22 nt, Human
cccagcagccuggauguucuuu

SEQ ID NO: 445192 - RNA, 22 nt, Human
aggcacagagagguuaaaugca

SEQ ID NO: 445193 - RNA, 22 nt, Human
gcugggaggaucucucccuguc

SEQ ID NO: 445194 - RNA, 22 nt, Human
ccacaggaccagaggagaucac

SEQ ID NO: 445195 - RNA, 22 nt, Human
auguaaauuguacugacacacg

SEQ ID NO: 445196 - RNA, 22 nt, Human
guuaaauucgaugauggauaaa

SEQ ID NO: 445197 - RNA, 22 nt, Human
acucugcaauguggcaagaaca

SEQ ID NO: 445198 - RNA, 22 nt, Human
uuucucccuuuauaagacugua

SEQ ID NO: 445199 - RNA, 22 nt, Human
agcagcugaucaaagcacuuau

SEQ ID NO: 445200 - RNA, 22 nt, Human
gcuggagaccucagagaaccca

SEQ ID NO: 445201 - RNA, 18 nt, Human
ucucucagggaaacagaa

SEQ ID NO: 445202 - RNA, 22 nt, Human
gcaaacaucuuuauuuggcaag

SEQ ID NO: 445203 - RNA, 20 nt, Human
uuucucccaagugcaagggu

SEQ ID NO: 445204 - RNA, 22 nt, Human
agggucuguggaugcaucuggg

SEQ ID NO: 445205 - RNA, 22 nt, Human
ccaggcauccauugcuuccucu

SEQ ID NO: 445206 - RNA, 22 nt, Human
gaacacaacucagaaugcuggu

SEQ ID NO: 445207 - RNA, 22 nt, Human
ugugugugacucauacuagaac

SEQ ID NO: 445208 - RNA, 22 nt, Human
uauuuccauguuagaacuaagu

SEQ ID NO: 445209 - RNA, 22 nt, Human
agguaaggaaauugaggcaauu

SEQ ID NO: 445210 - RNA, 22 nt, Human
uaaagccaacacuuuacugcuc

SEQ ID NO: 445211 - RNA, 22 nt, Human
ugcaggcugcagucucaggugg

SEQ ID NO: 445212 - RNA, 22 nt, Human
ugucauauguugaugaaagaga

SEQ ID NO: 445213 - RNA, 22 nt, Human
uagagcugcuggacuguaacag

SEQ ID NO: 445214 - RNA, 22 nt, Human
gcccuguauccaagucccaucu

SEQ ID NO: 445215 - RNA, 21 nt, Human
guggcccugguguggcugcac

SEQ ID NO: 445216 - RNA, 22 nt, Human
ucacauuuuaucuauuuuaagu

SEQ ID NO: 445217 - RNA, 22 nt, Human
ugacagcagcauagugagcaau

SEQ ID NO: 445218 - RNA, 22 nt, Human
agaaggcagaaaguccagguau

SEQ ID NO: 445219 - RNA, 19 nt, Human
cugucaggggcuggauguu

SEQ ID NO: 445220 - RNA, 22 nt, Human
gagagcaggaggcagcgggacg

SEQ ID NO: 445221 - RNA, 21 nt, Human
cuccucaggaccagccacagg

SEQ ID NO: 445222 - RNA, 20 nt, Human
auuuauguauagcuuguugu

SEQ ID NO: 445223 - RNA, 22 nt, Human
cguuuauuuugaagauuccacu

SEQ ID NO: 445224 - RNA, 22 nt, Human
uuccaugacaccgagggaaguc

SEQ ID NO: 445225 - RNA, 22 nt, Human
ccuuggcugaggagggagcuga

SEQ ID NO: 445226 - RNA, 22 nt, Human
gcuauucauggagcauguacug

SEQ ID NO: 445227 - RNA, 23 nt, Human
ggacacagagauaagugagacaa

SEQ ID NO: 445228 - RNA, 21 nt, Human
agagaccagcuguuacuccca

SEQ ID NO: 445229 - RNA, 22 nt, Human
cucuggcuggcaccugaucuga

SEQ ID NO: 445230 - RNA, 22 nt, Human
aacaucaucaugaacaacuaau

SEQ ID NO: 445231 - RNA, 22 nt, Human
acaggcaaacacagaaaguagg

SEQ ID NO: 445232 - RNA, 22 nt, Human
cacauguucuugaagccaacuc

SEQ ID NO: 445233 - RNA, 22 nt, Human
agcagcuguacuuucaucuguu

SEQ ID NO: 445234 - RNA, 22 nt, Human
aggaggcacucacucucagggu

SEQ ID NO: 445235 - RNA, 19 nt, Human
ucccagagucuagagguug

SEQ ID NO: 445236 - RNA, 22 nt, Human
uuugcaaaguccauugaaguua

SEQ ID NO: 445237 - RNA, 22 nt, Human
gcuuugcuuccuguucuagccu

SEQ ID NO: 445238 - RNA, 22 nt, Human
gaucuuuucagaauuuaucagu

SEQ ID NO: 445239 - RNA, 22 nt, Human
cagcuguuacugaaguaaaaug

SEQ ID NO: 445240 - RNA, 22 nt, Human
guuagagacaucucugguuucu

SEQ ID NO: 445241 - RNA, 22 nt, Human
aaaggucauugaaaaggaggaa

SEQ ID NO: 445242 - RNA, 22 nt, Human
agaggcugugcccaccaggcaa

SEQ ID NO: 445243 - RNA, 22 nt, Human
ucaggcugugggcacuggccau

SEQ ID NO: 445244 - RNA, 22 nt, Human
uggcucagagccuugagagcug

SEQ ID NO: 445245 - RNA, 22 nt, Human
cugaagcugggcacuuccuuuu

SEQ ID NO: 445246 - RNA, 22 nt, Human
ugguacaagcagacucagcaga

SEQ ID NO: 445247 - RNA, 22 nt, Human
acuuugcacuucaauauaacuu

SEQ ID NO: 445248 - RNA, 22 nt, Human
uugcuagcugguguaugcauug

SEQ ID NO: 445249 - RNA, 22 nt, Human
cuggcccuaugagccuccugau

SEQ ID NO: 445250 - RNA, 22 nt, Human
agcugcagucaagcugggccac

SEQ ID NO: 445251 - RNA, 23 nt, Human
uugaggcaaacucuuuucugaaa

SEQ ID NO: 445252 - RNA, 22 nt, Human
aacauguaccuacaaucagaau

SEQ ID NO: 445253 - RNA, 22 nt, Human
gcuaggcucggaagcagcaggg

SEQ ID NO: 445254 - RNA, 22 nt, Human
agucaacagaguggccgcagcg

SEQ ID NO: 445255 - RNA, 22 nt, Human
uugcuuuagggcaaauauuuca

SEQ ID NO: 445256 - RNA, 22 nt, Human
guuaacauaggcuuagggguuu

SEQ ID NO: 445257 - RNA, 22 nt, Human
ggcagggacaggauaggguuuu

SEQ ID NO: 445258 - RNA, 22 nt, Human
aaagacauggcaagagaugggg

SEQ ID NO: 445259 - RNA, 22 nt, Human
cccucccaagcacucugacaua

SEQ ID NO: 445260 - RNA, 20 nt, Human
cuggguggcaagcaaggggg

SEQ ID NO: 445261 - RNA, 22 nt, Human
cacaggaaugaacagggaaaga

SEQ ID NO: 445262 - RNA, 22 nt, Human
augcccuggacuucuaguauuc

SEQ ID NO: 445263 - RNA, 22 nt, Human
uuucuuauacuauauugucauc

SEQ ID NO: 445264 - RNA, 22 nt, Human
uaccaguaauguaacuuugcaa

SEQ ID NO: 445265 - RNA, 22 nt, Human
cuggcaccuccagcucauggcc

SEQ ID NO: 445266 - RNA, 22 nt, Human
aauugcccuuacaguaaucaga

SEQ ID NO: 445267 - RNA, 22 nt, Human
cuggggauccuuuuugcaucua

SEQ ID NO: 445268 - RNA, 22 nt, Human
cccaggagagaggggauaaagc

SEQ ID NO: 445269 - RNA, 22 nt, Human
ugaagcugugggcaguggagcc

SEQ ID NO: 445270 - RNA, 23 nt, Human
gugcucugcggucugcuagucug

SEQ ID NO: 445271 - RNA, 22 nt, Human
gacagcagggacauguaggaag

SEQ ID NO: 445272 - RNA, 22 nt, Human
gagacagaguuucacucuuguu

SEQ ID NO: 445273 - RNA, 20 nt, Human
ucuuggcugugugaggacac

SEQ ID NO: 445274 - RNA, 22 nt, Human
uaucagcaccgcggacagcauc

SEQ ID NO: 445275 - RNA, 22 nt, Human
uugcauugaaaauauauuuuaa

SEQ ID NO: 445276 - RNA, 19 nt, Human
gcaggccaggaggcggagg

SEQ ID NO: 445277 - RNA, 22 nt, Human
guuuccugacccuggcccagca

SEQ ID NO: 445278 - RNA, 22 nt, Human
acugaagucucuuuuguucucu

SEQ ID NO: 445279 - RNA, 22 nt, Human
gggcugcuuauacugaugauaa

SEQ ID NO: 445280 - RNA, 22 nt, Human
cucagcuccaggugugcaucuu

SEQ ID NO: 445281 - RNA, 22 nt, Human
agacauaggauuccacauagca

SEQ ID NO: 445282 - RNA, 21 nt, Human
agcuggcucucucuggagaga

SEQ ID NO: 445283 - RNA, 22 nt, Human
gauucaaaaauaagcuccuauu

SEQ ID NO: 445284 - RNA, 22 nt, Human
uaaguguugaucugagugcuaa

SEQ ID NO: 445285 - RNA, 21 nt, Human
agacagagugcagucuacaua

SEQ ID NO: 445286 - RNA, 22 nt, Human
ggcugugcgggcagccguggga

SEQ ID NO: 445287 - RNA, 22 nt, Human
ggaggggcauaguucaccauca

SEQ ID NO: 445288 - RNA, 22 nt, Human
acagagguggaccucagcaggc

SEQ ID NO: 445289 - RNA, 22 nt, Human
aagaagagaaaugugcugcugg

SEQ ID NO: 445290 - RNA, 22 nt, Human
uuucaaacauuccugggagacu

SEQ ID NO: 445291 - RNA, 22 nt, Human
cgugagggcauggcagugagga

SEQ ID NO: 445292 - RNA, 22 nt, Human
ucagaauucagagggagugggg

SEQ ID NO: 445293 - RNA, 22 nt, Human
gugccagaggcagugaggaguu

SEQ ID NO: 445294 - RNA, 22 nt, Human
ggccccagggaagaaggugguc

SEQ ID NO: 445295 - RNA, 22 nt, Human
guagaaauuccauuuacuuuga

SEQ ID NO: 445296 - RNA, 22 nt, Human
uauagagcuuuggcauugauua

SEQ ID NO: 445297 - RNA, 22 nt, Human
ugagccguggucucugagggug

SEQ ID NO: 445298 - RNA, 22 nt, Human
uuuauuguuuagaagggggcug

SEQ ID NO: 445299 - RNA, 22 nt, Human
aaauuuuccugguaaagaugga

SEQ ID NO: 445300 - RNA, 22 nt, Human
ucaauagauaaagcuacauaaa

SEQ ID NO: 445301 - RNA, 22 nt, Human
guccugcggccucaguggugag

SEQ ID NO: 445302 - RNA, 22 nt, Human
uuugggcauuagaauauucuuu

SEQ ID NO: 445303 - RNA, 22 nt, Human
cauuuguaguuaaaaaugucuc

SEQ ID NO: 445304 - RNA, 22 nt, Human
gagcuggaagucuguggucaga

SEQ ID NO: 445305 - RNA, 23 nt, Human
aacacauugcuaauuacauucaa

SEQ ID NO: 445306 - RNA, 22 nt, Human
uccagcagaaaagagguaggga

SEQ ID NO: 445307 - RNA, 22 nt, Human
uuuaagacuuaggaaagaggau

SEQ ID NO: 445308 - RNA, 22 nt, Human
acacagaguaucuuuugccuag

SEQ ID NO: 445309 - RNA, 22 nt, Human
ccuggcagcgugccgagcugcg

SEQ ID NO: 445310 - RNA, 22 nt, Human
acauucuacaguuaaccauuag

SEQ ID NO: 445311 - RNA, 22 nt, Human
agcacugcuuuagagccucugc

SEQ ID NO: 445312 - RNA, 22 nt, Human
ggaagaggcucucauugagggc

SEQ ID NO: 445313 - RNA, 22 nt, Human
gcgagggcacgcgguugaaggc

SEQ ID NO: 445314 - RNA, 22 nt, Human
gagcaaagcuuuuagggccuuu

SEQ ID NO: 445315 - RNA, 22 nt, Human
aucuucaauugaaaacuagccu

SEQ ID NO: 445316 - RNA, 18 nt, Human
ucagucuauuguauaaga

SEQ ID NO: 445317 - RNA, 22 nt, Human
aaacugcacaagggugcauagc

SEQ ID NO: 445318 - RNA, 22 nt, Human
cucagccccaauuugcccucuu

SEQ ID NO: 445319 - RNA, 22 nt, Human
caaagauuuuagaauuugcaau

SEQ ID NO: 445320 - RNA, 22 nt, Human
uuuauugucaaucuauucccag

SEQ ID NO: 445321 - RNA, 22 nt, Human
ucauacaacuaagaguuucaga

SEQ ID NO: 445322 - RNA, 19 nt, Human
gcagucuguugaagggcag

SEQ ID NO: 445323 - RNA, 22 nt, Human
ggaggcaggaaagacagguuca

SEQ ID NO: 445324 - RNA, 19 nt, Human
gucaggcacgugagagcau

SEQ ID NO: 445325 - RNA, 21 nt, Human
ucacaacuuugaauuucaaua

SEQ ID NO: 445326 - RNA, 22 nt, Human
uggagaauucuauguugagggg

SEQ ID NO: 445327 - RNA, 22 nt, Human
gugcagggcuggcaccggaggc

SEQ ID NO: 445328 - RNA, 22 nt, Human
agacagacauucuagagccacc

SEQ ID NO: 445329 - RNA, 21 nt, Human
auggaaaaacagguagagcau

SEQ ID NO: 445330 - RNA, 22 nt, Human
agagaaaugggguaaucuuuca

SEQ ID NO: 445331 - RNA, 22 nt, Human
ggccccagccucaguccccuga

SEQ ID NO: 445332 - RNA, 22 nt, Human
guggcagagugcgguucugacc

SEQ ID NO: 445333 - RNA, 22 nt, Human
uagaaaagauaacauucugugc

SEQ ID NO: 445334 - RNA, 22 nt, Human
agugacacggagagacagcaug

SEQ ID NO: 445335 - RNA, 22 nt, Human
acagauggcacuuuuuaggacu

SEQ ID NO: 445336 - RNA, 22 nt, Human
gagcagcagguggggcuggcuu

SEQ ID NO: 445337 - RNA, 22 nt, Human
aacacaggggguuacaaauugu

SEQ ID NO: 445338 - RNA, 22 nt, Human
agcucccaggcagucaugagga

SEQ ID NO: 445339 - RNA, 22 nt, Human
gagugcaggccugagcaccauc

SEQ ID NO: 445340 - RNA, 22 nt, Human
uacaggaaguaaguaaugaaau

SEQ ID NO: 445341 - RNA, 22 nt, Human
caggugcccagcuccugcugug

SEQ ID NO: 445342 - RNA, 22 nt, Human
ucccacuuaacugugacuucuc

SEQ ID NO: 445343 - RNA, 22 nt, Human
ugcauauaucuuauuuuucugu

SEQ ID NO: 445344 - RNA, 22 nt, Human
cuacagagaacucagcugcccu

SEQ ID NO: 445345 - RNA, 22 nt, Human
ccacugucugcaggccucagca

SEQ ID NO: 445346 - RNA, 22 nt, Human
cagcugguggcugaugaccguc

SEQ ID NO: 445347 - RNA, 22 nt, Human
ggagaggcuuccagagucgugc

SEQ ID NO: 445348 - RNA, 21 nt, Human
gcuccuggugcugcguggcgc

SEQ ID NO: 445349 - RNA, 22 nt, Human
ucagcaggucugaggcggggcc

SEQ ID NO: 445350 - RNA, 22 nt, Human
aggcugccaaagcuucugucuc

SEQ ID NO: 445351 - RNA, 21 nt, Human
uuugggcaaaauuaaaugaga

SEQ ID NO: 445352 - RNA, 22 nt, Human
uuuauucagcagcagcaguggu

SEQ ID NO: 445353 - RNA, 18 nt, Human
ugcacagcugugggcugg

SEQ ID NO: 445354 - RNA, 22 nt, Human
gauucaaaaguuugagcuccaa

SEQ ID NO: 445355 - RNA, 21 nt, Human
acagcagacaggcuuaggacc

SEQ ID NO: 445356 - RNA, 22 nt, Human
gccuggaggggccaggguggua

SEQ ID NO: 445357 - RNA, 22 nt, Human
ucucagagauguuagggaagag

SEQ ID NO: 445358 - RNA, 22 nt, Human
gcuggucacucugggagcugcu

SEQ ID NO: 445359 - RNA, 22 nt, Human
auccaugaagguacuucucagg

SEQ ID NO: 445360 - RNA, 22 nt, Human
guguccagagaaacucacagcu

SEQ ID NO: 445361 - RNA, 22 nt, Human
cagcccuucuuccaaccagcuu

SEQ ID NO: 445362 - RNA, 23 nt, Human
cacaccaggagccgucugggcca

SEQ ID NO: 445363 - RNA, 22 nt, Human
ugacacagggcaugcagcagaa

SEQ ID NO: 445364 - RNA, 23 nt, Human
aggaagcuaaguguggcugcgga

SEQ ID NO: 445365 - RNA, 22 nt, Human
uagcauaacagguaagagugag

SEQ ID NO: 445366 - RNA, 22 nt, Human
agcagaagaaagccacaugacu

SEQ ID NO: 445367 - RNA, 19 nt, Human
ccagcagcuuugauucucu

SEQ ID NO: 445368 - RNA, 22 nt, Human
gaagagagagugggguucugcg

SEQ ID NO: 445369 - RNA, 22 nt, Human
agccuggaguucccaggagaag

SEQ ID NO: 445370 - RNA, 22 nt, Human
uuacagcaaagugcgcagaccu

SEQ ID NO: 445371 - RNA, 22 nt, Human
ccugagagagaagcgaccuggu

SEQ ID NO: 445372 - RNA, 22 nt, Human
ugagcuguagcagaugcuguug

SEQ ID NO: 445373 - RNA, 22 nt, Human
cauagaaaagaguagguaaugu

SEQ ID NO: 445374 - RNA, 18 nt, Human
ucaguacugcagagagaa

SEQ ID NO: 445375 - RNA, 22 nt, Human
ugggcccugacuucaagcaucc

SEQ ID NO: 445376 - RNA, 22 nt, Human
uuuauacuucauaaugucuauu

SEQ ID NO: 445377 - RNA, 22 nt, Human
ggaugcugggagacagcaggca

SEQ ID NO: 445378 - RNA, 22 nt, Human
uuugagaagauguaauguuaag

SEQ ID NO: 445379 - RNA, 22 nt, Human
aagguccuguagccacagagcc

SEQ ID NO: 445380 - RNA, 22 nt, Human
aagagcuggagcugcuacagga

SEQ ID NO: 445381 - RNA, 22 nt, Human
uggagcaggaagucuauggcug

SEQ ID NO: 445382 - RNA, 22 nt, Human
cccagccucagcuuuacuucca

SEQ ID NO: 445383 - RNA, 22 nt, Human
gcuggcugccuuacuuugugga

SEQ ID NO: 445384 - RNA, 22 nt, Human
ugcugaggcccaggagcacuuu

SEQ ID NO: 445385 - RNA, 17 nt, Human
ugagacagggcaggccc

SEQ ID NO: 445386 - RNA, 22 nt, Human
aagaugaaucaguauguguccu

SEQ ID NO: 445387 - RNA, 22 nt, Human
uacaggaaccagauuguucagc

SEQ ID NO: 445388 - RNA, 22 nt, Human
agacagcaugagccugcugaug

SEQ ID NO: 445389 - RNA, 22 nt, Human
uacaaucaggauaauaauagug

SEQ ID NO: 445390 - RNA, 22 nt, Human
gcaggagcagucaggggcagcu

SEQ ID NO: 445391 - RNA, 22 nt, Human
ucagaggaaacaaucuuuagua

SEQ ID NO: 445392 - RNA, 19 nt, Human
ucucccaugccugugucua

SEQ ID NO: 445393 - RNA, 22 nt, Human
caggacaguuugcuuugcccug

SEQ ID NO: 445394 - RNA, 21 nt, Human
ugcaggcuacuucugacucua

SEQ ID NO: 445395 - RNA, 22 nt, Human
ucucugggacacugggucaguu

SEQ ID NO: 445396 - RNA, 22 nt, Human
cuaauauuuuuagaaaucacga

SEQ ID NO: 445397 - RNA, 22 nt, Human
ccuguucacccuccaugcacag

SEQ ID NO: 445398 - RNA, 22 nt, Human
cuguacaaaguagcugcuggga

SEQ ID NO: 445399 - RNA, 22 nt, Human
cuuugcuaguguuucaguagac

SEQ ID NO: 445400 - RNA, 23 nt, Human
ccuggcagcaaacgaggagguua

SEQ ID NO: 445401 - RNA, 22 nt, Human
ccagcagcagcguccaaggaga

SEQ ID NO: 445402 - RNA, 22 nt, Human
uggcagcuauuacaaggaaguc

SEQ ID NO: 445403 - RNA, 22 nt, Human
uauucaaagugcgaggucaggg

SEQ ID NO: 445404 - RNA, 22 nt, Human
ucagggacugcagagggaagcu

SEQ ID NO: 445405 - RNA, 22 nt, Human
gcacccagccagcaucucagag

SEQ ID NO: 445406 - RNA, 22 nt, Human
cauaauuaggcaguugaucauu

SEQ ID NO: 445407 - RNA, 20 nt, Human
ucuuauacagaaaacauuuu

SEQ ID NO: 445408 - RNA, 22 nt, Human
uuugggcaaagguagaaggaga

SEQ ID NO: 445409 - RNA, 22 nt, Human
aagauuuucucaacuguauuug

SEQ ID NO: 445410 - RNA, 22 nt, Human
caggauggucagaugcauuguc

SEQ ID NO: 445411 - RNA, 22 nt, Human
ugcacacaggucuaggacaugg

SEQ ID NO: 445412 - RNA, 22 nt, Human
acagaauugauggaaaucucag

SEQ ID NO: 445413 - RNA, 22 nt, Human
uauacaguuaaguuucuucagu

SEQ ID NO: 445414 - RNA, 22 nt, Human
aacaauaacuagacaugccaug

SEQ ID NO: 445415 - RNA, 22 nt, Human
acaggcagguugagaaacauuu

SEQ ID NO: 445416 - RNA, 20 nt, Human
ugcccacaauucacaaugcc

SEQ ID NO: 445417 - RNA, 22 nt, Human
uuuauccaucaucugcugaagg

SEQ ID NO: 445418 - RNA, 22 nt, Human
caggccuccuaugagcacuagc

SEQ ID NO: 445419 - RNA, 22 nt, Human
cccuggcaugcaugucccuggc

SEQ ID NO: 445420 - RNA, 22 nt, Human
gcagggucugaggccacagagg

SEQ ID NO: 445421 - RNA, 22 nt, Human
aauuuuaugccuugcacguugg

SEQ ID NO: 445422 - RNA, 22 nt, Human
ugggccacaagccaugggacca

SEQ ID NO: 445423 - RNA, 22 nt, Human
gcagcagaguuugggagauggu

SEQ ID NO: 445424 - RNA, 23 nt, Human
uccuuccuuugagaggcuccauc

SEQ ID NO: 445425 - RNA, 22 nt, Human
cugcccuguggcucugagucau

SEQ ID NO: 445426 - RNA, 22 nt, Human
gggcuaaguggaucagucagga

SEQ ID NO: 445427 - RNA, 22 nt, Human
ucaucugaggcaccagagcaua

SEQ ID NO: 445428 - RNA, 20 nt, Human
guggaugaucaguguagugg

SEQ ID NO: 445429 - RNA, 22 nt, Human
caaggcugcugcgggucgcacc

SEQ ID NO: 445430 - RNA, 22 nt, Human
cgcaggcuccggggugcccugg

SEQ ID NO: 445431 - RNA, 22 nt, Human
ucugggaguggguccaaggaau

SEQ ID NO: 445432 - RNA, 18 nt, Human
ucaaacugucauugguga

SEQ ID NO: 445433 - RNA, 22 nt, Human
augcaguuuaucuccaaaucau

SEQ ID NO: 445434 - RNA, 22 nt, Human
auuuuacuacuccaauuaauga

SEQ ID NO: 445435 - RNA, 22 nt, Human
cacagaggaaaggcaguuggua

SEQ ID NO: 445436 - RNA, 19 nt, Human
agacagagcucaguggguu

SEQ ID NO: 445437 - RNA, 22 nt, Human
aggaaaggugagagcggccgcg

SEQ ID NO: 445438 - RNA, 22 nt, Human
acagcaggauuuggcgauguug

SEQ ID NO: 445439 - RNA, 22 nt, Human
gugcugagcaucaugaggcacu

SEQ ID NO: 445440 - RNA, 22 nt, Human
uagcugagagcucacuugagga

SEQ ID NO: 445441 - RNA, 22 nt, Human
uuagugucuucuucauccucug

SEQ ID NO: 445442 - RNA, 22 nt, Human
ggggacagucgaucuagugauu

SEQ ID NO: 445443 - RNA, 21 nt, Human
ugugucacuaacuagaggcua

SEQ ID NO: 445444 - RNA, 18 nt, Human
ugaggcagucagugaugg

SEQ ID NO: 445445 - RNA, 22 nt, Human
aggagguugccagucugggggu

SEQ ID NO: 445446 - RNA, 22 nt, Human
ugugugccagccuacgaggagc

SEQ ID NO: 445447 - RNA, 22 nt, Human
cuuuacaaacuauaaagugcgg

SEQ ID NO: 445448 - RNA, 22 nt, Human
uggaaaccuacugauacaggag

SEQ ID NO: 445449 - RNA, 22 nt, Human
gccccagccaaggugacacgaa

SEQ ID NO: 445450 - RNA, 22 nt, Human
aaaugugaguuauagcaauaga

SEQ ID NO: 445451 - RNA, 22 nt, Human
auuuuguugaugguggaguagc

SEQ ID NO: 445452 - RNA, 23 nt, Human
cccagaggagcagggcgugagau

SEQ ID NO: 445453 - RNA, 22 nt, Human
ccagcucugccaagcgucagcu

SEQ ID NO: 445454 - RNA, 22 nt, Human
gcccagaaagcaucauugugga

SEQ ID NO: 445455 - RNA, 22 nt, Human
caggacacagaauaaggcaguu

SEQ ID NO: 445456 - RNA, 22 nt, Human
aagcccagaugggagcauuuca

SEQ ID NO: 445457 - RNA, 22 nt, Human
acacugcuucucuggcagagcc

SEQ ID NO: 445458 - RNA, 22 nt, Human
agcugcccuucucuugcccuug

SEQ ID NO: 445459 - RNA, 17 nt, Human
ccagaugcccugucucc

SEQ ID NO: 445460 - RNA, 22 nt, Human
ucccagccuggacccugccagu

SEQ ID NO: 445461 - RNA, 22 nt, Human
gcaaacauccacugcccuugua

SEQ ID NO: 445462 - RNA, 22 nt, Human
ugcagcaaaaggucagagggag

SEQ ID NO: 445463 - RNA, 22 nt, Human
ggccugagcagacagcaugaug

SEQ ID NO: 445464 - RNA, 22 nt, Human
uuagcaaauaucuugaaacagg

SEQ ID NO: 445465 - RNA, 22 nt, Human
gagguggcuccuucagggaaua

SEQ ID NO: 445466 - RNA, 22 nt, Human
aacauugaguucuacuuccauu

SEQ ID NO: 445467 - RNA, 22 nt, Human
ccagccugguucagaauuggcu

SEQ ID NO: 445468 - RNA, 22 nt, Human
ucaagguugccaggaaggaaga

SEQ ID NO: 445469 - RNA, 22 nt, Human
aggaugggccugggauaugcuu

SEQ ID NO: 445470 - RNA, 19 nt, Human
gggcccagcauggaggguu

SEQ ID NO: 445471 - RNA, 22 nt, Human
cagacauggaaauuuaguguua

SEQ ID NO: 445472 - RNA, 21 nt, Human
ucaggcugaugucgauguuag

SEQ ID NO: 445473 - RNA, 22 nt, Human
cagcuccccaugguuccugaag

SEQ ID NO: 445474 - RNA, 22 nt, Human
aagugauuuagucuuauaaagg

SEQ ID NO: 445475 - RNA, 22 nt, Human
acugcagggcauccuggccaag

SEQ ID NO: 445476 - RNA, 23 nt, Human
ugacagagcaagacuuggucuca

SEQ ID NO: 445477 - RNA, 22 nt, Human
agcaggugagcacagccaggcu

SEQ ID NO: 445478 - RNA, 22 nt, Human
ucccagccuuccuuguggugaa

SEQ ID NO: 445479 - RNA, 22 nt, Human
cacagaggugauaguggucaag

SEQ ID NO: 445480 - RNA, 22 nt, Human
ccagaggcagacuuacacucca

SEQ ID NO: 445481 - RNA, 22 nt, Human
ccuggcaguuuugcccaggauu

SEQ ID NO: 445482 - RNA, 22 nt, Human
uuuccaaauaaggucacacuca

SEQ ID NO: 445483 - RNA, 22 nt, Human
ugcaggcucacccuggagcuga

SEQ ID NO: 445484 - RNA, 22 nt, Human
guuauugacucucuuguggcuu

SEQ ID NO: 445485 - RNA, 22 nt, Human
aacaucucuguauuuuauagac

SEQ ID NO: 445486 - RNA, 22 nt, Human
ccaggguggcguagaugcuggg

SEQ ID NO: 445487 - RNA, 22 nt, Human
uccuucuuucaccucauaguca

SEQ ID NO: 445488 - RNA, 22 nt, Human
ucuuugcauggacauguguuuu

SEQ ID NO: 445489 - RNA, 23 nt, Human
cugcagucgccggccugggugcc

SEQ ID NO: 445490 - RNA, 22 nt, Human
acaggccauaaaggcaggcccu

SEQ ID NO: 445491 - RNA, 22 nt, Human
acauuucugcuagaauagguga

SEQ ID NO: 445492 - RNA, 17 nt, Human
cagacaggcugucaccc

SEQ ID NO: 445493 - RNA, 22 nt, Human
aucuggugacacgaggagcugg

SEQ ID NO: 445494 - RNA, 22 nt, Human
acagugaaugcccaagaaaagu

SEQ ID NO: 445495 - RNA, 22 nt, Human
ggaacauuuuuuaaggcagaaa

SEQ ID NO: 445496 - RNA, 20 nt, Human
uuuauucagccuacccucuu

SEQ ID NO: 445497 - RNA, 22 nt, Human
agcaggacaauaugggaucagg

SEQ ID NO: 445498 - RNA, 22 nt, Human
agagcuguuuggacaucugagu

SEQ ID NO: 445499 - RNA, 22 nt, Human
ggccccaggucugaacacgcug

SEQ ID NO: 445500 - RNA, 22 nt, Human
aaaugacaauaaaaguccaugc

SEQ ID NO: 445501 - RNA, 22 nt, Human
cuccuguauguugggcuucaca

SEQ ID NO: 445502 - RNA, 22 nt, Human
aaagagcuaacauugccgagau

SEQ ID NO: 445503 - RNA, 22 nt, Human
cagacagacagccguggccacc

SEQ ID NO: 445504 - RNA, 22 nt, Human
gccuggagagcacugugcgcuu

SEQ ID NO: 445505 - RNA, 22 nt, Human
ugaagcuauauaaguuacagca

SEQ ID NO: 445506 - RNA, 22 nt, Human
cacaggaagcugacugcuggca

SEQ ID NO: 445507 - RNA, 22 nt, Human
cuuguuuuggcuaguaugaugu

SEQ ID NO: 445508 - RNA, 22 nt, Human
uuuucaugucauguccuugagg

SEQ ID NO: 445509 - RNA, 22 nt, Human
aaagacauggaacuagagaugg

SEQ ID NO: 445510 - RNA, 22 nt, Human
agaaagcaucuccauuguaggu

SEQ ID NO: 445511 - RNA, 22 nt, Human
caaguucacuugucuacaaggg

SEQ ID NO: 445512 - RNA, 22 nt, Human
cagcaagauuaagggcagaaaa

SEQ ID NO: 445513 - RNA, 22 nt, Human
gccuucugauaucucuuggcau

SEQ ID NO: 445514 - RNA, 22 nt, Human
acugauuucagggaugagaaga

SEQ ID NO: 445515 - RNA, 22 nt, Human
ucaggcugagaaaaucuggacc

SEQ ID NO: 445516 - RNA, 22 nt, Human
aacaguacuugauaauuugcac

SEQ ID NO: 445517 - RNA, 22 nt, Human
uuccuuccccuagcugagaaac

SEQ ID NO: 445518 - RNA, 22 nt, Human
cuuauagauggcgaucuucuug

SEQ ID NO: 445519 - RNA, 22 nt, Human
cuggagccugcaguuuucacuu

SEQ ID NO: 445520 - RNA, 22 nt, Human
ugugcucugaagagugcauguc

SEQ ID NO: 445521 - RNA, 22 nt, Human
ucagaauuuaaaauguguagau

SEQ ID NO: 445522 - RNA, 22 nt, Human
cccaggcacagauuaucccaau

SEQ ID NO: 445523 - RNA, 22 nt, Human
cagacaggaaguucagaagaaa

SEQ ID NO: 445524 - RNA, 22 nt, Human
ucagcaggggccguugggugga

SEQ ID NO: 445525 - RNA, 22 nt, Human
gaaaugaaacaggcuuuuaagg

SEQ ID NO: 445526 - RNA, 20 nt, Human
auguuaaauagcauuuagag

SEQ ID NO: 445527 - RNA, 22 nt, Human
uaaauuuuuguuaacagccucu

SEQ ID NO: 445528 - RNA, 22 nt, Human
gcaggccugucuugcucgcccu

SEQ ID NO: 445529 - RNA, 22 nt, Human
agcaggcugaugggcaugcuug

SEQ ID NO: 445530 - RNA, 22 nt, Human
aagccagccagugccagucuua

SEQ ID NO: 445531 - RNA, 22 nt, Human
gagcacagaacuaaaugcuggu

SEQ ID NO: 445532 - RNA, 22 nt, Human
uggauugauaagagacaaguga

SEQ ID NO: 445533 - RNA, 22 nt, Human
guuuauuauacaacaaaagcua

SEQ ID NO: 445534 - RNA, 22 nt, Human
guccccucagccacccaugggg

SEQ ID NO: 445535 - RNA, 20 nt, Human
agagccuggaaaaagacauc

SEQ ID NO: 445536 - RNA, 22 nt, Human
augugcuuauggucucugguug

SEQ ID NO: 445537 - RNA, 21 nt, Human
ccagaggccucucuuggccac

SEQ ID NO: 445538 - RNA, 22 nt, Human
ccagagaauuuuagacaaaaau

SEQ ID NO: 445539 - RNA, 22 nt, Human
ugggccugggcuccuguccucu

SEQ ID NO: 445540 - RNA, 20 nt, Human
agacccuguguccuguggcc

SEQ ID NO: 445541 - RNA, 22 nt, Human
cugugggccuagucuggccuag

SEQ ID NO: 445542 - RNA, 22 nt, Human
uaugugcacauuagagagaugg

SEQ ID NO: 445543 - RNA, 22 nt, Human
cucugcccgugccuuucccagu

SEQ ID NO: 445544 - RNA, 17 nt, Human
gagugcugguggagcuc

SEQ ID NO: 445545 - RNA, 22 nt, Human
caggcagacuuugagaaugaug

SEQ ID NO: 445546 - RNA, 22 nt, Human
cugcucugcagcuuggacuccc

SEQ ID NO: 445547 - RNA, 22 nt, Human
aggcuggaguacaguggcuauu

SEQ ID NO: 445548 - RNA, 22 nt, Human
gugagagguuccuguuagaacu

SEQ ID NO: 445549 - RNA, 20 nt, Human
cagcccuuuauccuccuaug

SEQ ID NO: 445550 - RNA, 22 nt, Human
acagagguguguguaggacagu

SEQ ID NO: 445551 - RNA, 22 nt, Human
gugcaaaaguaauuacaguuuu

SEQ ID NO: 445552 - RNA, 22 nt, Human
auugcaaaugagucuuaauaua

SEQ ID NO: 445553 - RNA, 22 nt, Human
acuucauugcuaagaacaaggu

SEQ ID NO: 445554 - RNA, 22 nt, Human
ugagcugagaacacuugggcua

SEQ ID NO: 445555 - RNA, 22 nt, Human
gcaaggcugggagaugaggccu

SEQ ID NO: 445556 - RNA, 22 nt, Human
caggcagccugagggaucuggg

SEQ ID NO: 445557 - RNA, 22 nt, Human
ucccuggggaagggcaagcaag

SEQ ID NO: 445558 - RNA, 22 nt, Human
uaaaugccauucguuucauaca

SEQ ID NO: 445559 - RNA, 22 nt, Human
ccaggcccaggguacugaccaa

SEQ ID NO: 445560 - RNA, 22 nt, Human
ggucccaggcucccucuugucc

SEQ ID NO: 445561 - RNA, 22 nt, Human
uacuauaacuucgaaguccugg

SEQ ID NO: 445562 - RNA, 22 nt, Human
gagguagggcagaggcugaaug

SEQ ID NO: 445563 - RNA, 22 nt, Human
agcagcaacugcuagaguggca

SEQ ID NO: 445564 - RNA, 20 nt, Human
gaaggcaaugguuuggcaca

SEQ ID NO: 445565 - RNA, 22 nt, Human
aguacuuuuuguucaauugugc

SEQ ID NO: 445566 - RNA, 22 nt, Human
agaucaaggugucagcaggcuu

SEQ ID NO: 445567 - RNA, 22 nt, Human
gaugauuuucuguguuagaaga

SEQ ID NO: 445568 - RNA, 22 nt, Human
gcagcagugcgggcagcuacag

SEQ ID NO: 445569 - RNA, 22 nt, Human
uggucaaugaagauacacuauu

SEQ ID NO: 445570 - RNA, 22 nt, Human
uuugucaaucccuugaaaaccu

SEQ ID NO: 445571 - RNA, 22 nt, Human
ggagauggcuggcagguagaug

SEQ ID NO: 445572 - RNA, 22 nt, Human
acuguacacgugucauuuacag

SEQ ID NO: 445573 - RNA, 22 nt, Human
cuguuucaugaaugcaauuuca

SEQ ID NO: 445574 - RNA, 22 nt, Human
cagaggcugggaccucaggcau

SEQ ID NO: 445575 - RNA, 22 nt, Human
caggcugaucagggcugggaug

SEQ ID NO: 445576 - RNA, 22 nt, Human
ugaaaaaacaaguuggcccauu

SEQ ID NO: 445577 - RNA, 22 nt, Human
cugcagcuuuuugugcuuguaa

SEQ ID NO: 445578 - RNA, 21 nt, Human
aggcagcucaggcccagagag

SEQ ID NO: 445579 - RNA, 22 nt, Human
uucuugauucuuccuugaagga

SEQ ID NO: 445580 - RNA, 21 nt, Human
cccuucuuacucaagcucauu

SEQ ID NO: 445581 - RNA, 22 nt, Human
ucagaauuuucuggaauggagc

SEQ ID NO: 445582 - RNA, 22 nt, Human
uuccugaaucccaaggagagcu

SEQ ID NO: 445583 - RNA, 20 nt, Human
ggcagggcaucaacagcucu

SEQ ID NO: 445584 - RNA, 22 nt, Human
ucugccuguucaagucuucuag

SEQ ID NO: 445585 - RNA, 20 nt, Human
aggcagcugggaaaugaggg

SEQ ID NO: 445586 - RNA, 18 nt, Human
agcauggcacaggcuccc

SEQ ID NO: 445587 - RNA, 22 nt, Human
acuugcaucuuagagacucacc

SEQ ID NO: 445588 - RNA, 22 nt, Human
caggaaggcccaccuguccugu

SEQ ID NO: 445589 - RNA, 22 nt, Human
uugcaaaaccauccuaaguaaa

SEQ ID NO: 445590 - RNA, 22 nt, Human
ggcacagccacuuuggagaacu

SEQ ID NO: 445591 - RNA, 22 nt, Human
ucacagcuccagacugcaacuc

SEQ ID NO: 445592 - RNA, 22 nt, Human
gaaguauaugucuuuaaucuau

SEQ ID NO: 445593 - RNA, 22 nt, Human
cuuccugcccacuuccugcugg

SEQ ID NO: 445594 - RNA, 22 nt, Human
gcuaaugauagcaagauaaaca

SEQ ID NO: 445595 - RNA, 22 nt, Human
gaaugaauucagcacauggaau

SEQ ID NO: 445596 - RNA, 22 nt, Human
agagcagucaggcuaggacacu

SEQ ID NO: 445597 - RNA, 22 nt, Human
aaauucuuucauggcuaauaag

SEQ ID NO: 445598 - RNA, 22 nt, Human
gaggcuggcagaaaagcacagg

SEQ ID NO: 445599 - RNA, 22 nt, Human
cagcagcagauucagcgucugg

SEQ ID NO: 445600 - RNA, 22 nt, Human
ucaggcucccugcugggcucug

SEQ ID NO: 445601 - RNA, 22 nt, Human
cuugggcaagcagcauucagaa

SEQ ID NO: 445602 - RNA, 22 nt, Human
aaggaaagaguaugcaccuugu

SEQ ID NO: 445603 - RNA, 22 nt, Human
uugggcugaacccugcagcuga

SEQ ID NO: 445604 - RNA, 22 nt, Human
cagcacagugcagaugcugacu

SEQ ID NO: 445605 - RNA, 22 nt, Human
ggcagccaugucccagggcuuc

SEQ ID NO: 445606 - RNA, 17 nt, Human
uagcagcaguaauugug

SEQ ID NO: 445607 - RNA, 22 nt, Human
aauguaaaauaucuuguacuug

SEQ ID NO: 445608 - RNA, 22 nt, Human
cagagugaaauaggggaucaag

SEQ ID NO: 445609 - RNA, 22 nt, Human
ccagagcugauuccugggacuu

SEQ ID NO: 445610 - RNA, 22 nt, Human
uaggaauuuugcaugggaauuu

SEQ ID NO: 445611 - RNA, 20 nt, Human
uuaagaaaagcacauccugc

SEQ ID NO: 445612 - RNA, 22 nt, Human
cagcagcugauggggaagugau

SEQ ID NO: 445613 - RNA, 22 nt, Human
aaguccugccagcaaauguaua

SEQ ID NO: 445614 - RNA, 22 nt, Human
gcagcgcuacucacagcucuga

SEQ ID NO: 445615 - RNA, 18 nt, Human
ccacuuugcagccuggcc

SEQ ID NO: 445616 - RNA, 17 nt, Human
cuggagccaagagggcc

SEQ ID NO: 445617 - RNA, 22 nt, Human
aucuaauuuucacucauuugcu

SEQ ID NO: 445618 - RNA, 19 nt, Human
ggcagcuggacgcuguuca

SEQ ID NO: 445619 - RNA, 22 nt, Human
gccccagcucugccacaacuag

SEQ ID NO: 445620 - RNA, 22 nt, Human
cauguacaugcaugggcacugu

SEQ ID NO: 445621 - RNA, 22 nt, Human
uugggagguaauggagccaagu

SEQ ID NO: 445622 - RNA, 19 nt, Human
uccccagcaccucugaguc

SEQ ID NO: 445623 - RNA, 22 nt, Human
uuucagagagaucaacauagcu

SEQ ID NO: 445624 - RNA, 22 nt, Human
uauuaaauauaucuguuaguug

SEQ ID NO: 445625 - RNA, 22 nt, Human
gaaagaaugcuauagugacuuc

SEQ ID NO: 445626 - RNA, 23 nt, Human
uuuuuugucuugcuaggcugccc

SEQ ID NO: 445627 - RNA, 22 nt, Human
uguuuucauggagaugguggcg

SEQ ID NO: 445628 - RNA, 22 nt, Human
cucacagaugcugugggucagg

SEQ ID NO: 445629 - RNA, 22 nt, Human
aggcuccacccuacagagcucc

SEQ ID NO: 445630 - RNA, 22 nt, Human
aggccucugggucuccucugac

SEQ ID NO: 445631 - RNA, 20 nt, Human
ggccuuggguuucgccuguu

SEQ ID NO: 445632 - RNA, 22 nt, Human
uucagggacuuugauguaucag

SEQ ID NO: 445633 - RNA, 22 nt, Human
auccuuuaguccuacaacucga

SEQ ID NO: 445634 - RNA, 22 nt, Human
gugugugugcaucucuuuuauu

SEQ ID NO: 445635 - RNA, 23 nt, Human
agaggccagccuuuggagacacc

SEQ ID NO: 445636 - RNA, 22 nt, Human
uuggagagaggcugcucaggcu

SEQ ID NO: 445637 - RNA, 21 nt, Human
aguguguguggaaugagaaua

SEQ ID NO: 445638 - RNA, 22 nt, Human
ucccauugccauagauaggaca

SEQ ID NO: 445639 - RNA, 22 nt, Human
gcaggcaggaaggacuaaguaa

SEQ ID NO: 445640 - RNA, 22 nt, Human
aagcuaaggguguuuaagcagg

SEQ ID NO: 445641 - RNA, 22 nt, Human
ugagcagagcaauaggacucuc

SEQ ID NO: 445642 - RNA, 22 nt, Human
ugcauauuauaaagagaauuag

SEQ ID NO: 445643 - RNA, 22 nt, Human
ccagggcaggggcuggaguuca

SEQ ID NO: 445644 - RNA, 22 nt, Human
uaauuauucuagucacauagca

SEQ ID NO: 445645 - RNA, 23 nt, Human
acaaugcacuuuaaaugguuccc

SEQ ID NO: 445646 - RNA, 22 nt, Human
ggugcaggcgguggggcaagua

SEQ ID NO: 445647 - RNA, 22 nt, Human
acaguacugcuguucuuguccu

SEQ ID NO: 445648 - RNA, 22 nt, Human
auaaaugugaauuagagcuuug

SEQ ID NO: 445649 - RNA, 22 nt, Human
cugcaggcugagcgccugccgg

SEQ ID NO: 445650 - RNA, 22 nt, Human
auaaauuaggaucugggguucc

SEQ ID NO: 445651 - RNA, 22 nt, Human
aguuuacacuuuugauucuuau

SEQ ID NO: 445652 - RNA, 22 nt, Human
ggugggcaggcgaggcccaggu

SEQ ID NO: 445653 - RNA, 22 nt, Human
uuuagacauagcugaaaucauu

SEQ ID NO: 445654 - RNA, 22 nt, Human
cccagcagauggcuaugugcua

SEQ ID NO: 445655 - RNA, 22 nt, Human
aggccagccuuguaaaugccuc

SEQ ID NO: 445656 - RNA, 22 nt, Human
ccagcagcauccugcagcacuu

SEQ ID NO: 445657 - RNA, 22 nt, Human
uuaaaggcugaucuuaauauua

SEQ ID NO: 445658 - RNA, 22 nt, Human
cacaguuugguauagaagugau

SEQ ID NO: 445659 - RNA, 20 nt, Human
auguauauuacuggcuguga

SEQ ID NO: 445660 - RNA, 22 nt, Human
uggagcagcuaagccucugaga

SEQ ID NO: 445661 - RNA, 18 nt, Human
ucugggcuucccgaggcu

SEQ ID NO: 445662 - RNA, 22 nt, Human
ugacagagacagauugaagcuu

SEQ ID NO: 445663 - RNA, 22 nt, Human
aagaacaugaguuaugaugauu

SEQ ID NO: 445664 - RNA, 22 nt, Human
gcugccaugguccaggcuccag

SEQ ID NO: 445665 - RNA, 22 nt, Human
ggccccacgggggaguccuagu

SEQ ID NO: 445666 - RNA, 22 nt, Human
gaagcacauggcugugagcaac

SEQ ID NO: 445667 - RNA, 22 nt, Human
uggcagauaaacaugugauaaa

SEQ ID NO: 445668 - RNA, 22 nt, Human
gagcccugaacaacagcaggaa

SEQ ID NO: 445669 - RNA, 22 nt, Human
aaauuuuaaggcuggaacuuaa

SEQ ID NO: 445670 - RNA, 22 nt, Human
cugugggcgccugucagccuca

SEQ ID NO: 445671 - RNA, 22 nt, Human
cagagacauguggccugcacgu

SEQ ID NO: 445672 - RNA, 22 nt, Human
cuggcucccagcuuucagggag

SEQ ID NO: 445673 - RNA, 22 nt, Human
uaggaaauucucuugcuaaguu

SEQ ID NO: 445674 - RNA, 22 nt, Human
agcccaaggcuucccugcuggc

SEQ ID NO: 445675 - RNA, 22 nt, Human
cuggaagggucagagugaugag

SEQ ID NO: 445676 - RNA, 22 nt, Human
ccugggcuccacuccaagagca

SEQ ID NO: 445677 - RNA, 22 nt, Human
aggucacccguuugacuaucca

SEQ ID NO: 445678 - RNA, 22 nt, Human
cacuggcuugauggguaaugcc

SEQ ID NO: 445679 - RNA, 22 nt, Human
gugcccugcaugccccggguau

SEQ ID NO: 445680 - RNA, 22 nt, Human
ccuggcuccgguucaagggaaa

SEQ ID NO: 445681 - RNA, 22 nt, Human
auaaagcaaauaggacuauugc

SEQ ID NO: 445682 - RNA, 22 nt, Human
cagcaggcuguggaaauccugg

SEQ ID NO: 445683 - RNA, 22 nt, Human
aagcagccuggcaugaugcuuu

SEQ ID NO: 445684 - RNA, 22 nt, Human
agguccuggucuugagucuuaa

SEQ ID NO: 445685 - RNA, 22 nt, Human
augcagcagccccuugaggugc

SEQ ID NO: 445686 - RNA, 22 nt, Human
cugcuggggucagagcacuggg

SEQ ID NO: 445687 - RNA, 22 nt, Human
aucuaacugggcuauuuuauug

SEQ ID NO: 445688 - RNA, 22 nt, Human
ugcccaggauugugaggucagg

SEQ ID NO: 445689 - RNA, 22 nt, Human
uuugcuuugggagguugucugg

SEQ ID NO: 445690 - RNA, 22 nt, Human
uucaaguaggccagcugcaugg

SEQ ID NO: 445691 - RNA, 22 nt, Human
cucuguuuggcgcugcuccuuc

SEQ ID NO: 445692 - RNA, 22 nt, Human
aaugccuuggagagccuagagg

SEQ ID NO: 445693 - RNA, 22 nt, Human
aaauauuugucugaggcgguug

SEQ ID NO: 445694 - RNA, 22 nt, Human
auagaaauggcagcuggugcua

SEQ ID NO: 445695 - RNA, 22 nt, Human
acagagcacauagauuggaguu

SEQ ID NO: 445696 - RNA, 22 nt, Human
agagccugugggagaugcagcu

SEQ ID NO: 445697 - RNA, 22 nt, Human
ucuccucaccaccagcagcaga

SEQ ID NO: 445698 - RNA, 22 nt, Human
ccucacagaggggcagccaucu

SEQ ID NO: 445699 - RNA, 22 nt, Human
cugcaaaucaaguucuuauaau

SEQ ID NO: 445700 - RNA, 22 nt, Human
cccaggagaauauaauguucuu

SEQ ID NO: 445701 - RNA, 22 nt, Human
ugcaaauacaaaaugguacagc

SEQ ID NO: 445702 - RNA, 22 nt, Human
ggugcauggaaagaguaaguaa

SEQ ID NO: 445703 - RNA, 22 nt, Human
uuuugguagaaucaacaaugua

SEQ ID NO: 445704 - RNA, 22 nt, Human
gcugccugucccaggaugagga

SEQ ID NO: 445705 - RNA, 22 nt, Human
acagagcuguacaugugccaug

SEQ ID NO: 445706 - RNA, 22 nt, Human
uuuggcaaagaucaacauguua

SEQ ID NO: 445707 - RNA, 22 nt, Human
cgggcagauugggaagguucau

SEQ ID NO: 445708 - RNA, 22 nt, Human
aagggcaggcacccacccucac

SEQ ID NO: 445709 - RNA, 22 nt, Human
ccagagcuccagggcuacagaa

SEQ ID NO: 445710 - RNA, 22 nt, Human
gcaggaugggagcuucacucug

SEQ ID NO: 445711 - RNA, 21 nt, Human
gcccagaguuaagcccaccca

SEQ ID NO: 445712 - RNA, 22 nt, Human
cuuggcugggaacugugauuca

SEQ ID NO: 445713 - RNA, 22 nt, Human
gacauucauuaagccuuucugu

SEQ ID NO: 445714 - RNA, 22 nt, Human
aaacugcaugaagcugauuuua

SEQ ID NO: 445715 - RNA, 22 nt, Human
gagauauaagaucuagaaagga

SEQ ID NO: 445716 - RNA, 22 nt, Human
cacaggcaggagguucuccagu

SEQ ID NO: 445717 - RNA, 19 nt, Human
uugugugucagucagaguu

SEQ ID NO: 445718 - RNA, 22 nt, Human
ucccagaggaaauggcagcuga

SEQ ID NO: 445719 - RNA, 22 nt, Human
ucuuugcaggccaaauuguuaa

SEQ ID NO: 445720 - RNA, 22 nt, Human
agcaggagcugugggaagaugg

SEQ ID NO: 445721 - RNA, 22 nt, Human
auugcuuucuuuggggaacugu

SEQ ID NO: 445722 - RNA, 22 nt, Human
gaaauacaaagccagccauuuu

SEQ ID NO: 445723 - RNA, 21 nt, Human
caucaugcuuguguuggagaa

SEQ ID NO: 445724 - RNA, 22 nt, Human
aguuauauaacuaucuagaugc

SEQ ID NO: 445725 - RNA, 22 nt, Human
gcccugcagugcggagguggca

SEQ ID NO: 445726 - RNA, 22 nt, Human
agcagacauggcuuggaugugg

SEQ ID NO: 445727 - RNA, 22 nt, Human
aggauuuguauagcuuucuuuu

SEQ ID NO: 445728 - RNA, 22 nt, Human
uccuuuccaugcuucuagaggc

SEQ ID NO: 445729 - RNA, 20 nt, Human
ugcuuuuauaccuauaauga

SEQ ID NO: 445730 - RNA, 21 nt, Human
aaauucaccuaguaaaacuuc

SEQ ID NO: 445731 - RNA, 22 nt, Human
uucuuuuaauuucugucugcag

SEQ ID NO: 445732 - RNA, 22 nt, Human
gugcacagauuuaauuuuauuc

SEQ ID NO: 445733 - RNA, 18 nt, Human
cucucuggucuggauccc

SEQ ID NO: 445734 - RNA, 22 nt, Human
aauuuuguuuaagugaucugcu

SEQ ID NO: 445735 - RNA, 22 nt, Human
ggaagcuccccaagccugcccu

SEQ ID NO: 445736 - RNA, 22 nt, Human
uaguugaagagaugaaugacca

SEQ ID NO: 445737 - RNA, 22 nt, Human
agcccagguugaggcugcagug

SEQ ID NO: 445738 - RNA, 22 nt, Human
acagaauacucauaagaagggg

SEQ ID NO: 445739 - RNA, 22 nt, Human
acaauacuauuuucaguauccu

SEQ ID NO: 445740 - RNA, 22 nt, Human
agacccugcauuuuccaggguu

SEQ ID NO: 445741 - RNA, 22 nt, Human
agccagcaucccuucagucucc

SEQ ID NO: 445742 - RNA, 22 nt, Human
cauguucaccuguggcacuagu

SEQ ID NO: 445743 - RNA, 19 nt, Human
ucaugcaguggggggugug

SEQ ID NO: 445744 - RNA, 20 nt, Human
ggcaggcuuuauauggaggg

SEQ ID NO: 445745 - RNA, 22 nt, Human
ucagcagggccuccuugugcag

SEQ ID NO: 445746 - RNA, 22 nt, Human
auggcugagaugggcuccaggc

SEQ ID NO: 445747 - RNA, 22 nt, Human
augaggcaugugaggagaaggg

SEQ ID NO: 445748 - RNA, 22 nt, Human
ugagaaggugaaaguguggaga

SEQ ID NO: 445749 - RNA, 22 nt, Human
agaaaagguugaaaguaggauu

SEQ ID NO: 445750 - RNA, 22 nt, Human
gccuggagcucuccacuugggg

SEQ ID NO: 445751 - RNA, 22 nt, Human
cagucuaaguuaauuuccacaa

SEQ ID NO: 445752 - RNA, 22 nt, Human
uuucaacaggaugauaauaggc

SEQ ID NO: 445753 - RNA, 22 nt, Human
uuugcugacuggaugcaguugg

SEQ ID NO: 445754 - RNA, 22 nt, Human
acagaauuaaugaaaauuacaa

SEQ ID NO: 445755 - RNA, 22 nt, Human
ugugcccauuccacuugaguac

SEQ ID NO: 445756 - RNA, 22 nt, Human
uacagcacggugcauuuacuac

SEQ ID NO: 445757 - RNA, 22 nt, Human
guuccugagaaauaaagagaga

SEQ ID NO: 445758 - RNA, 22 nt, Human
ugcaggugccucuugagcuugu

SEQ ID NO: 445759 - RNA, 22 nt, Human
acaucaugagagacuuaaauug

SEQ ID NO: 445760 - RNA, 22 nt, Human
uuuaagacucuuguaguacaca

SEQ ID NO: 445761 - RNA, 22 nt, Human
ggcaauaaaugacuucugcauu

SEQ ID NO: 445762 - RNA, 22 nt, Human
gggacaauggaggccucucucc

SEQ ID NO: 445763 - RNA, 22 nt, Human
cuguuucaauuugaggaucagc

SEQ ID NO: 445764 - RNA, 22 nt, Human
aggaauuguguuguaguggaga

SEQ ID NO: 445765 - RNA, 22 nt, Human
cuguuucaaaacuaguacaaca

SEQ ID NO: 445766 - RNA, 22 nt, Human
aacuaaaccaugacauuauauu

SEQ ID NO: 445767 - RNA, 22 nt, Human
aaguggacuaauacaaggacua

SEQ ID NO: 445768 - RNA, 22 nt, Human
cauuuguaguaucuguuuauau

SEQ ID NO: 445769 - RNA, 23 nt, Human
cacuggugggguuuaaaagaagc

SEQ ID NO: 445770 - RNA, 22 nt, Human
aggagcagcccacuccuguccu

SEQ ID NO: 445771 - RNA, 22 nt, Human
ccugcugcuaugaaggugacag

SEQ ID NO: 445772 - RNA, 22 nt, Human
cuauuauuuccucaucuauaaa

SEQ ID NO: 445773 - RNA, 22 nt, Human
ugcccagccaguuuaugguaau

SEQ ID NO: 445774 - RNA, 22 nt, Human
ugacauucuguuaagucucaua

SEQ ID NO: 445775 - RNA, 19 nt, Human
cugaaaaacauucucagga

SEQ ID NO: 445776 - RNA, 17 nt, Human
agcagcuggcacaggag

SEQ ID NO: 445777 - RNA, 22 nt, Human
ggaggggcagccauggaacucc

SEQ ID NO: 445778 - RNA, 22 nt, Human
uuugcaaaaugucuuguguuag

SEQ ID NO: 445779 - RNA, 22 nt, Human
aaacacuugcaaaaugguuccu

SEQ ID NO: 445780 - RNA, 22 nt, Human
cccuguauagauacaggucaua

SEQ ID NO: 445781 - RNA, 22 nt, Human
ucagcagggagaggagaaugca

SEQ ID NO: 445782 - RNA, 22 nt, Human
caggaagcugugaaggagacgg

SEQ ID NO: 445783 - RNA, 22 nt, Human
agcuccuguucugagagcagga

SEQ ID NO: 445784 - RNA, 22 nt, Human
guuuccucugcugguuuucauu

SEQ ID NO: 445785 - RNA, 22 nt, Human
cucugggcuuguugaccugcac

SEQ ID NO: 445786 - RNA, 22 nt, Human
gggaaggccgguccagucaggu

SEQ ID NO: 445787 - RNA, 22 nt, Human
ggcugaauguuggacacuuacg

SEQ ID NO: 445788 - RNA, 22 nt, Human
uucagcaaaauaucucagauag

SEQ ID NO: 445789 - RNA, 22 nt, Human
gacaggcacgaaauugggcugg

SEQ ID NO: 445790 - RNA, 22 nt, Human
aaggggccucacagaugggcuu

SEQ ID NO: 445791 - RNA, 22 nt, Human
ccagggagcggggcugggucuc

SEQ ID NO: 445792 - RNA, 22 nt, Human
agagcugaaaaagcugacccgg

SEQ ID NO: 445793 - RNA, 22 nt, Human
gcagcagaggcccuacucuuug

SEQ ID NO: 445794 - RNA, 22 nt, Human
ggcaccagcacuugggauggcu

SEQ ID NO: 445795 - RNA, 22 nt, Human
gacaagacuauguagaaaguau

SEQ ID NO: 445796 - RNA, 22 nt, Human
aaagcacauaguagaaggauuu

SEQ ID NO: 445797 - RNA, 22 nt, Human
gguaaauuuuaugugaugaaac

SEQ ID NO: 445798 - RNA, 22 nt, Human
uauuuuacuauuuggcaaaguc

SEQ ID NO: 445799 - RNA, 22 nt, Human
gaaauauugggacucagagcuu

SEQ ID NO: 445800 - RNA, 19 nt, Human
acagcagggauuuuuggag

SEQ ID NO: 445801 - RNA, 22 nt, Human
guuauuguccagcacaguuggg

SEQ ID NO: 445802 - RNA, 22 nt, Human
uacagaggguaauugaucaagg

SEQ ID NO: 445803 - RNA, 22 nt, Human
uucuuaauggcaaaggauuuua

SEQ ID NO: 445804 - RNA, 22 nt, Human
ccucagucugucugaucugcca

SEQ ID NO: 445805 - RNA, 22 nt, Human
ugcuuucaaugaauuguauacu

SEQ ID NO: 445806 - RNA, 22 nt, Human
aaggcugguggauuaugagguc

SEQ ID NO: 445807 - RNA, 22 nt, Human
auuagcaaguuuuccagcuaau

SEQ ID NO: 445808 - RNA, 22 nt, Human
cagcuggcagcccuggcccugc

SEQ ID NO: 445809 - RNA, 22 nt, Human
agccaggccuuuucucaagguu

SEQ ID NO: 445810 - RNA, 22 nt, Human
uuuuccucaggaaugcuaagcu

SEQ ID NO: 445811 - RNA, 22 nt, Human
caggcuuggagggcaguggcau

SEQ ID NO: 445812 - RNA, 22 nt, Human
ugcagcagccaagguucugugc

SEQ ID NO: 445813 - RNA, 22 nt, Human
cucaguacuuuauguauaugau

SEQ ID NO: 445814 - RNA, 22 nt, Human
cuugaugaaauuuuucaauugu

SEQ ID NO: 445815 - RNA, 21 nt, Human
gcaaccagaccacagggcagu

SEQ ID NO: 445816 - RNA, 22 nt, Human
aaggaagagaauccuucucaga

SEQ ID NO: 445817 - RNA, 22 nt, Human
acauuuaaugauccuacuguga

SEQ ID NO: 445818 - RNA, 22 nt, Human
cagcugguacucaguucuuguc

SEQ ID NO: 445819 - RNA, 22 nt, Human
aguuuccuuggauucaauuugg

SEQ ID NO: 445820 - RNA, 21 nt, Human
uggcugccuacaugcugcagg

SEQ ID NO: 445821 - RNA, 22 nt, Human
cuccuucccuaccaucaauguu

SEQ ID NO: 445822 - RNA, 22 nt, Human
ggaacaggaaaggagggaugcu

SEQ ID NO: 445823 - RNA, 22 nt, Human
ggaagaaaaugggcaacaggug

SEQ ID NO: 445824 - RNA, 22 nt, Human
agccuguguuuuuucuauugca

SEQ ID NO: 445825 - RNA, 22 nt, Human
cuuuugcaccuuuuaaguaaug

SEQ ID NO: 445826 - RNA, 22 nt, Human
gaaggcugcauggaggcugugg

SEQ ID NO: 445827 - RNA, 22 nt, Human
agcugguggagccuuucuguuu

SEQ ID NO: 445828 - RNA, 22 nt, Human
uuugggcacacaaauauuuuau

SEQ ID NO: 445829 - RNA, 22 nt, Human
gcuuccaggcuuccuaccuuug

SEQ ID NO: 445830 - RNA, 22 nt, Human
acacagaguuugacacauggga

SEQ ID NO: 445831 - RNA, 17 nt, Human
uccuggcaguccccugg

SEQ ID NO: 445832 - RNA, 22 nt, Human
ggcagacaccuuuaugucuaau

SEQ ID NO: 445833 - RNA, 22 nt, Human
aggaggccgcugaugggcuccc

SEQ ID NO: 445834 - RNA, 22 nt, Human
cagcuccagcccaggcagcucc

SEQ ID NO: 445835 - RNA, 22 nt, Human
uaauagaauaguggaaacauug

SEQ ID NO: 445836 - RNA, 22 nt, Human
uacagcacaaagggccuuuacc

SEQ ID NO: 445837 - RNA, 22 nt, Human
ucuaacuugugaguauagauga

SEQ ID NO: 445838 - RNA, 22 nt, Human
uauauucauuuuaaagccaucu

SEQ ID NO: 445839 - RNA, 22 nt, Human
uugaagauuauucuauuaaaag

SEQ ID NO: 445840 - RNA, 22 nt, Human
gcucagagaugucugcugccuu

SEQ ID NO: 445841 - RNA, 22 nt, Human
agaagcagaaggaagcagggcc

SEQ ID NO: 445842 - RNA, 22 nt, Human
gucuggccauuugcccauugug

SEQ ID NO: 445843 - RNA, 22 nt, Human
ucagcagccgcagcugacucag

SEQ ID NO: 445844 - RNA, 22 nt, Human
ucuaacagaaauucugacaaaa

SEQ ID NO: 445845 - RNA, 22 nt, Human
ugaugaggacccaucaccuggu

SEQ ID NO: 445846 - RNA, 22 nt, Human
cugguucccagcaggaguguag

SEQ ID NO: 445847 - RNA, 22 nt, Human
uggaaagacauucagccgcugg

SEQ ID NO: 445848 - RNA, 22 nt, Human
ccugggcuugcaucugugcugg

SEQ ID NO: 445849 - RNA, 22 nt, Human
uaacaucuaagggagagaaagu

SEQ ID NO: 445850 - RNA, 22 nt, Human
gcccaagguauaucagagacag

SEQ ID NO: 445851 - RNA, 22 nt, Human
cacagaggacuguagcggggag

SEQ ID NO: 445852 - RNA, 22 nt, Human
agcuaaggaaucagaagagguu

SEQ ID NO: 445853 - RNA, 22 nt, Human
agacaauggagggaaauacuuc

SEQ ID NO: 445854 - RNA, 22 nt, Human
gcaggcugugaggcucagaugg

SEQ ID NO: 445855 - RNA, 22 nt, Human
cucuaauacugaccaagucacc

SEQ ID NO: 445856 - RNA, 22 nt, Human
uuggaaaauguauuucuagaag

SEQ ID NO: 445857 - RNA, 22 nt, Human
cuggugccuccucccugugcuu

SEQ ID NO: 445858 - RNA, 22 nt, Human
aagcccuggcccaaccuugauu

SEQ ID NO: 445859 - RNA, 22 nt, Human
cagcaggcugcgauugcucauu

SEQ ID NO: 445860 - RNA, 22 nt, Human
gcaaauauuucuaauuccugaa

SEQ ID NO: 445861 - RNA, 22 nt, Human
cugaggugagcuucccugggcu

SEQ ID NO: 445862 - RNA, 22 nt, Human
gaaggcuagaaacgaugcuuau

SEQ ID NO: 445863 - RNA, 22 nt, Human
ggcucuggugaggguaggagau

SEQ ID NO: 445864 - RNA, 22 nt, Human
ucccagccuuaucuccccuggc

SEQ ID NO: 445865 - RNA, 23 nt, Human
caucaugcaaucuugggauuucu

SEQ ID NO: 445866 - RNA, 22 nt, Human
gcugccacuuggucaugucaug

SEQ ID NO: 445867 - RNA, 22 nt, Human
cccaggcuggagugcaauggug

SEQ ID NO: 445868 - RNA, 22 nt, Human
agacagagauacuauguuguca

SEQ ID NO: 445869 - RNA, 22 nt, Human
agacacagugcugggugcugag

SEQ ID NO: 445870 - RNA, 22 nt, Human
agcauccagaugccugauguca

SEQ ID NO: 445871 - RNA, 22 nt, Human
cugcucagaggaaggaaugucu

SEQ ID NO: 445872 - RNA, 22 nt, Human
gcaaguuuagcuaacuggccca

SEQ ID NO: 445873 - RNA, 22 nt, Human
ucaacacucuuuggcacaguua

SEQ ID NO: 445874 - RNA, 22 nt, Human
cacugccugugagcugugugcc

SEQ ID NO: 445875 - RNA, 22 nt, Human
ugaugaggaccuggucucugcu

SEQ ID NO: 445876 - RNA, 22 nt, Human
ggcuccuguccccucagcugcu

SEQ ID NO: 445877 - RNA, 22 nt, Human
ucccaggacaggccacauggaa

SEQ ID NO: 445878 - RNA, 22 nt, Human
cugagagaucaagccacaggau

SEQ ID NO: 445879 - RNA, 17 nt, Human
ggugagaccucccacuc

SEQ ID NO: 445880 - RNA, 22 nt, Human
auuuaucaccaguuagcugacu

SEQ ID NO: 445881 - RNA, 22 nt, Human
aauauuauacagucaaccucuu

SEQ ID NO: 445882 - RNA, 22 nt, Human
aggcccugcauuguacugaggg

SEQ ID NO: 445883 - RNA, 22 nt, Human
agacagcaauaugggagacgga

SEQ ID NO: 445884 - RNA, 22 nt, Human
gagcuaaguuucuggaggcaga

SEQ ID NO: 445885 - RNA, 22 nt, Human
agccucuuccagcuccuuucua

SEQ ID NO: 445886 - RNA, 22 nt, Human
cacaauuuggacuucacugguu

SEQ ID NO: 445887 - RNA, 22 nt, Human
uuucaaagcaacugaaaaggaa

SEQ ID NO: 445888 - RNA, 22 nt, Human
uugcagcucugauccagggacc

SEQ ID NO: 445889 - RNA, 22 nt, Human
cuggccugggagcugcuagcgu

SEQ ID NO: 445890 - RNA, 22 nt, Human
auguggauuugggagugaucag

SEQ ID NO: 445891 - RNA, 22 nt, Human
ucaggaaaguguucucagagga

SEQ ID NO: 445892 - RNA, 22 nt, Human
cugaggcuuguccucucagcuu

SEQ ID NO: 445893 - RNA, 22 nt, Human
uucaauagcauacuuuugcucu

SEQ ID NO: 445894 - RNA, 22 nt, Human
ugggccuccgcauggcccagcg

SEQ ID NO: 445895 - RNA, 22 nt, Human
aagccacagaucguucugucac

SEQ ID NO: 445896 - RNA, 22 nt, Human
uccaagaucuacagcaguuuag

SEQ ID NO: 445897 - RNA, 22 nt, Human
aaacagcucaagaaguuacucu

SEQ ID NO: 445898 - RNA, 22 nt, Human
ccaggaaauagugcugugaucu

SEQ ID NO: 445899 - RNA, 22 nt, Human
ucucacaagcucaaggauuagu

SEQ ID NO: 445900 - RNA, 22 nt, Human
agacaauggagagcagaguacu

SEQ ID NO: 445901 - RNA, 22 nt, Human
uugugucccccuuugagagcca

SEQ ID NO: 445902 - RNA, 22 nt, Human
aacugcauuuaacaaauacucu

SEQ ID NO: 445903 - RNA, 22 nt, Human
gaggauuugauggcuuucuccc

SEQ ID NO: 445904 - RNA, 23 nt, Human
cauguacacacagcuguacagug

SEQ ID NO: 445905 - RNA, 22 nt, Human
gcugaggucaggagcugugggg

SEQ ID NO: 445906 - RNA, 19 nt, Human
ugcacacagauaaguaucu

SEQ ID NO: 445907 - RNA, 22 nt, Human
ccuggagcucacugggagccgg

SEQ ID NO: 445908 - RNA, 18 nt, Human
aacuaaagaucuuuaagc

SEQ ID NO: 445909 - RNA, 22 nt, Human
uuuuauacuuaagacagaguuu

SEQ ID NO: 445910 - RNA, 22 nt, Human
aggccuccuggcuccaggccuu

SEQ ID NO: 445911 - RNA, 22 nt, Human
aaacacuucaaggacuucuguc

SEQ ID NO: 445912 - RNA, 21 nt, Human
uuuaaggccagcaggagguga

SEQ ID NO: 445913 - RNA, 22 nt, Human
cucuccuggggagcacacacac

SEQ ID NO: 445914 - RNA, 22 nt, Human
aagacauuggcauugacuguaa

SEQ ID NO: 445915 - RNA, 22 nt, Human
cccaggagguggagguugcagu

SEQ ID NO: 445916 - RNA, 22 nt, Human
agccucuguagaaagcagugug

SEQ ID NO: 445917 - RNA, 22 nt, Human
ccugagacaugaaccaggcucc

SEQ ID NO: 445918 - RNA, 22 nt, Human
gugccagggggcacugaacaga

SEQ ID NO: 445919 - RNA, 22 nt, Human
aauuucaagucuugaagaagua

SEQ ID NO: 445920 - RNA, 22 nt, Human
augcuuuuaugucacaugguca

SEQ ID NO: 445921 - RNA, 22 nt, Human
uccugccuguuuaccuguacuu

SEQ ID NO: 445922 - RNA, 22 nt, Human
ucucccagaaguccucaguaca

SEQ ID NO: 445923 - RNA, 22 nt, Human
uccagccuugccacuuuucugu

SEQ ID NO: 445924 - RNA, 21 nt, Human
guggcccugccgcagugucca

SEQ ID NO: 445925 - RNA, 22 nt, Human
aacugcauuguacuaaacuugu

SEQ ID NO: 445926 - RNA, 22 nt, Human
agccugggaauuuagaguucgg

SEQ ID NO: 445927 - RNA, 22 nt, Human
ucaaggugcugugcugugcuag

SEQ ID NO: 445928 - RNA, 22 nt, Human
agacauuggcuaaaaguagugu

SEQ ID NO: 445929 - RNA, 22 nt, Human
cccuggcagaaugucucugggc

SEQ ID NO: 445930 - RNA, 22 nt, Human
guccugugugagugcaccaccu

SEQ ID NO: 445931 - RNA, 22 nt, Human
ugcucagggacaauggagaggg

SEQ ID NO: 445932 - RNA, 22 nt, Human
agcucccagaguccucugccca

SEQ ID NO: 445933 - RNA, 20 nt, Human
agaaauauugaguucagagg

SEQ ID NO: 445934 - RNA, 22 nt, Human
agggcacagccuaaagccuaug

SEQ ID NO: 445935 - RNA, 22 nt, Human
aauuaaauugguuuagagagga

SEQ ID NO: 445936 - RNA, 22 nt, Human
uuuucuaaaagaagucacugau

SEQ ID NO: 445937 - RNA, 22 nt, Human
aagcacaucuccugugcagaac

SEQ ID NO: 445938 - RNA, 22 nt, Human
aagauacaaaugucaauauugg

SEQ ID NO: 445939 - RNA, 22 nt, Human
cugggcugcaucaaagaggcau

SEQ ID NO: 445940 - RNA, 18 nt, Human
caauuuuacccagucccu

SEQ ID NO: 445941 - RNA, 22 nt, Human
ggcaggcuugguggcaccgguu

SEQ ID NO: 445942 - RNA, 22 nt, Human
ugggcagaaugugggauccaga

SEQ ID NO: 445943 - RNA, 22 nt, Human
uuuucuccagggaacaagguga

SEQ ID NO: 445944 - RNA, 22 nt, Human
aaggcaauuggcuuguauaaga

SEQ ID NO: 445945 - RNA, 22 nt, Human
ucagccuuugaagggcugcagg

SEQ ID NO: 445946 - RNA, 22 nt, Human
uggccagcuuugacuguaaacc

SEQ ID NO: 445947 - RNA, 22 nt, Human
uaaaaugacuuccuccaacauc

SEQ ID NO: 445948 - RNA, 22 nt, Human
ugaggcccagccgcccugagag

SEQ ID NO: 445949 - RNA, 22 nt, Human
uguuugcaacaacuagauggag

SEQ ID NO: 445950 - RNA, 22 nt, Human
agcaagcauugcugguuagguc

SEQ ID NO: 445951 - RNA, 22 nt, Human
ucagcagggccaugcucucucu

SEQ ID NO: 445952 - RNA, 22 nt, Human
aucuuucagagcuccaucaggg

SEQ ID NO: 445953 - RNA, 22 nt, Human
gggcuccagccacuggcugagg

SEQ ID NO: 445954 - RNA, 22 nt, Human
ccacagaggacaacugccuggc

SEQ ID NO: 445955 - RNA, 22 nt, Human
gaagcuaaugagauaaaugcca

SEQ ID NO: 445956 - RNA, 22 nt, Human
ugaacgcagguccacauggcuc

SEQ ID NO: 445957 - RNA, 22 nt, Human
ugauuuucaugggugaucuuug

SEQ ID NO: 445958 - RNA, 22 nt, Human
cacaaggagguccugaggaagc

SEQ ID NO: 445959 - RNA, 22 nt, Human
agaagccaacagggcaggagag

SEQ ID NO: 445960 - RNA, 22 nt, Human
ucagagguaaaaacucacugua

SEQ ID NO: 445961 - RNA, 22 nt, Human
acagaguuaaaguggaguuuaa

SEQ ID NO: 445962 - RNA, 22 nt, Human
gagcaacacgcaguaguauacg

SEQ ID NO: 445963 - RNA, 22 nt, Human
agcuggugugccaguuccaguu

SEQ ID NO: 445964 - RNA, 20 nt, Human
ucacauccucucccaacaug

SEQ ID NO: 445965 - RNA, 22 nt, Human
ucugcagcuugcacaggcaggc

SEQ ID NO: 445966 - RNA, 22 nt, Human
acacuuuguuguggcauauacg

SEQ ID NO: 445967 - RNA, 22 nt, Human
uugaugauguuucugccuugcc

SEQ ID NO: 445968 - RNA, 22 nt, Human
agcaaggcagcuuucacugcuu

SEQ ID NO: 445969 - RNA, 22 nt, Human
uggaaggagacugggaagugug

SEQ ID NO: 445970 - RNA, 20 nt, Human
aaagugcacagauacagcuc

SEQ ID NO: 445971 - RNA, 22 nt, Human
uagcaacaccaucuggugagaa

SEQ ID NO: 445972 - RNA, 19 nt, Human
uagaagcagggaagcugag

SEQ ID NO: 445973 - RNA, 22 nt, Human
agcccagccugauucuacaccc

SEQ ID NO: 445974 - RNA, 22 nt, Human
agucugagucuaaaggcuugag

SEQ ID NO: 445975 - RNA, 22 nt, Human
cacauuuaugggcugggaggca

SEQ ID NO: 445976 - RNA, 22 nt, Human
auaaaugccucagaaucauccc

SEQ ID NO: 445977 - RNA, 22 nt, Human
gggagguucuguucgcacuuga

SEQ ID NO: 445978 - RNA, 22 nt, Human
uaguucaaccgucuucuccccu

SEQ ID NO: 445979 - RNA, 22 nt, Human
uccucuccaugucucacgccac

SEQ ID NO: 445980 - RNA, 22 nt, Human
agaauauucaucuguauucuua

SEQ ID NO: 445981 - RNA, 22 nt, Human
aggucccugcagcagacugcca

SEQ ID NO: 445982 - RNA, 22 nt, Human
guuucagaaauguucuccugcu

SEQ ID NO: 445983 - RNA, 22 nt, Human
gcaccugcaggaugagccaggg

SEQ ID NO: 445984 - RNA, 22 nt, Human
agcucaggucauuccagggaug

SEQ ID NO: 445985 - RNA, 22 nt, Human
ccaggccuuccaguacgcagaa

SEQ ID NO: 445986 - RNA, 22 nt, Human
ugggccugggucuuugcugcca

SEQ ID NO: 445987 - RNA, 22 nt, Human
cagcaugguggagcugcucuuu

SEQ ID NO: 445988 - RNA, 22 nt, Human
agcacugugauuuauaacauuu

SEQ ID NO: 445989 - RNA, 22 nt, Human
ugaggcagaguaagauacauga

SEQ ID NO: 445990 - RNA, 22 nt, Human
auuuauguaucuguguagauca

SEQ ID NO: 445991 - RNA, 22 nt, Human
guauaucucuuacauacacaca

SEQ ID NO: 445992 - RNA, 22 nt, Human
uugcccugucucacuauguuaa

SEQ ID NO: 445993 - RNA, 22 nt, Human
gagcacagggaauagacagaua

SEQ ID NO: 445994 - RNA, 22 nt, Human
cucccugggcagauguggcucu

SEQ ID NO: 445995 - RNA, 22 nt, Human
gccagccugugcuuggccaggc

SEQ ID NO: 445996 - RNA, 22 nt, Human
cugguccccagacugggcuuag

SEQ ID NO: 445997 - RNA, 22 nt, Human
caugagauaauuuuucuccagu

SEQ ID NO: 445998 - RNA, 22 nt, Human
ugacagaaagaauaugucaauc

SEQ ID NO: 445999 - RNA, 22 nt, Human
uuuaacagaugcuaugucuacc

SEQ ID NO: 446000 - RNA, 22 nt, Human
uauuuaucaagguaggagaaua

SEQ ID NO: 446001 - RNA, 22 nt, Human
gagcccagguucugcuuccagc

SEQ ID NO: 446002 - RNA, 22 nt, Human
ccagcugucuugagaggaggca

SEQ ID NO: 446003 - RNA, 22 nt, Human
cccaggaggguggccucugccc

SEQ ID NO: 446004 - RNA, 22 nt, Human
ucagcagggcauacugagccua

SEQ ID NO: 446005 - RNA, 23 nt, Human
ugggccuggaaagccuuagagag

SEQ ID NO: 446006 - RNA, 22 nt, Human
gcaugugucuccccaguggagg

SEQ ID NO: 446007 - RNA, 22 nt, Human
aaggaaagcugugguucugaga

SEQ ID NO: 446008 - RNA, 22 nt, Human
cagcccuugaugauaauuuauc

SEQ ID NO: 446009 - RNA, 22 nt, Human
gccugagagucuccagaccuug

SEQ ID NO: 446010 - RNA, 22 nt, Human
gagcagagucuauuuccacacu

SEQ ID NO: 446011 - RNA, 22 nt, Human
ucuaugaaucaauuuuaacauc

SEQ ID NO: 446012 - RNA, 22 nt, Human
cagcagccuacaaugcacagaa

SEQ ID NO: 446013 - RNA, 17 nt, Human
aggagucucagaugagc

SEQ ID NO: 446014 - RNA, 22 nt, Human
agagaaggaaagcugacauggg

SEQ ID NO: 446015 - RNA, 22 nt, Human
ucuuugcagccccaggaagugg

SEQ ID NO: 446016 - RNA, 22 nt, Human
gcugagucuugagcacugagca

SEQ ID NO: 446017 - RNA, 22 nt, Human
cuauucaacuugacuguuucac

SEQ ID NO: 446018 - RNA, 22 nt, Human
ccaggccugauugggaaucuug

SEQ ID NO: 446019 - RNA, 22 nt, Human
ugucagaacucuauugaugucc

SEQ ID NO: 446020 - RNA, 23 nt, Human
uacagcaaggacaacauaggugg

SEQ ID NO: 446021 - RNA, 22 nt, Human
uggccuuccuggugacucauga

SEQ ID NO: 446022 - RNA, 22 nt, Human
ggcacagcaggagcuaugugaa

SEQ ID NO: 446023 - RNA, 22 nt, Human
aaggcaaugucauggcucuugc

SEQ ID NO: 446024 - RNA, 22 nt, Human
cacagacagugucccuuuguug

SEQ ID NO: 446025 - RNA, 22 nt, Human
cugccaggccuccgcugucccc

SEQ ID NO: 446026 - RNA, 22 nt, Human
gcucagggucccuuggugcugg

SEQ ID NO: 446027 - RNA, 22 nt, Human
acagaccaaguuuccagcaggu

SEQ ID NO: 446028 - RNA, 22 nt, Human
uuuagcaacgaagcacucgaca

SEQ ID NO: 446029 - RNA, 23 nt, Human
cauggaaaacugaaagcugaccu

SEQ ID NO: 446030 - RNA, 22 nt, Human
aagucacauucugagguauugg

SEQ ID NO: 446031 - RNA, 22 nt, Human
gugcaugugucuuuauaguaga

SEQ ID NO: 446032 - RNA, 22 nt, Human
cugagaggcagccagagaaaau

SEQ ID NO: 446033 - RNA, 19 nt, Human
agcaggcagguggcccagg

SEQ ID NO: 446034 - RNA, 22 nt, Human
caggccaggcugcauuugcccc

SEQ ID NO: 446035 - RNA, 20 nt, Human
ugcugcaguuucaugggacu

SEQ ID NO: 446036 - RNA, 22 nt, Human
uaaagccacuucauucuagucu

SEQ ID NO: 446037 - RNA, 22 nt, Human
ucauaggaguagcagugagagg

SEQ ID NO: 446038 - RNA, 22 nt, Human
cagggcucaucugugugaccag

SEQ ID NO: 446039 - RNA, 22 nt, Human
gcugagggcuguaacagcagag

SEQ ID NO: 446040 - RNA, 22 nt, Human
gagcacugagcuggaauuggag

SEQ ID NO: 446041 - RNA, 22 nt, Human
cuggggugugcucagagcaggg

SEQ ID NO: 446042 - RNA, 22 nt, Human
cucuaaauccacgguauaguug

SEQ ID NO: 446043 - RNA, 22 nt, Human
gcugagaggcagccagacccuc

SEQ ID NO: 446044 - RNA, 21 nt, Human
ugagccaggcugacggcugug

SEQ ID NO: 446045 - RNA, 22 nt, Human
uaggccucaggaccccagggcu

SEQ ID NO: 446046 - RNA, 22 nt, Human
cagggagccugaauguuccagg

SEQ ID NO: 446047 - RNA, 21 nt, Human
gcacagugccaggcacacagu

SEQ ID NO: 446048 - RNA, 17 nt, Human
uagagcugguucaggag

SEQ ID NO: 446049 - RNA, 22 nt, Human
guucaaauucuaugaaauaugu

SEQ ID NO: 446050 - RNA, 20 nt, Human
gugggcagaugugugcaugg

SEQ ID NO: 446051 - RNA, 22 nt, Human
aggcugcagaacagucaggugc

SEQ ID NO: 446052 - RNA, 22 nt, Human
aggcccucucauuccagaggca

SEQ ID NO: 446053 - RNA, 22 nt, Human
uuugcaaauauguguuucuauu

SEQ ID NO: 446054 - RNA, 22 nt, Human
auuucagacuguguuggaaaau

SEQ ID NO: 446055 - RNA, 23 nt, Human
aaagaucaaaguggcaggccugu

SEQ ID NO: 446056 - RNA, 22 nt, Human
uccuguggagaggacuggaggu

SEQ ID NO: 446057 - RNA, 22 nt, Human
cugcaggcccccuuccuggagu

SEQ ID NO: 446058 - RNA, 20 nt, Human
agcacagcgcgguguuccuu

SEQ ID NO: 446059 - RNA, 19 nt, Human
acuuugcaugugugucuaa

SEQ ID NO: 446060 - RNA, 22 nt, Human
caccacugcuuccugccaucug

SEQ ID NO: 446061 - RNA, 22 nt, Human
gcuaaggccuuaacucauggag

SEQ ID NO: 446062 - RNA, 22 nt, Human
gaagcccuaauacacaguaccu

SEQ ID NO: 446063 - RNA, 22 nt, Human
gagguccucuguguccgcgggc

SEQ ID NO: 446064 - RNA, 22 nt, Human
cauuuguaggaugcuucuuguu

SEQ ID NO: 446065 - RNA, 22 nt, Human
uccagagccuauauguucaacu

SEQ ID NO: 446066 - RNA, 22 nt, Human
uauagcaaaauaguuuccacac

SEQ ID NO: 446067 - RNA, 22 nt, Human
ccagggugagugucauggguua

SEQ ID NO: 446068 - RNA, 22 nt, Human
auuaaauuagcaaacugugaaa

SEQ ID NO: 446069 - RNA, 22 nt, Human
gaggaaaauauucagggagguu

SEQ ID NO: 446070 - RNA, 22 nt, Human
uucaaacucuugcucugcuagu

SEQ ID NO: 446071 - RNA, 21 nt, Human
ugaauuucgguauggcuauaa

SEQ ID NO: 446072 - RNA, 22 nt, Human
cagcuguugcagcacugagaga

SEQ ID NO: 446073 - RNA, 22 nt, Human
ucacagccuggacaguugccug

SEQ ID NO: 446074 - RNA, 22 nt, Human
uacuccacacgcuauuauaaug

SEQ ID NO: 446075 - RNA, 18 nt, Human
uccugccugugccccagg

SEQ ID NO: 446076 - RNA, 22 nt, Human
ugacacagggaaagcggaucca

SEQ ID NO: 446077 - RNA, 22 nt, Human
cuaaugaagcugcuuucuauga

SEQ ID NO: 446078 - RNA, 22 nt, Human
gcaaacaugugcucauuuugug

SEQ ID NO: 446079 - RNA, 22 nt, Human
uucauacuguuuaaguucuguu

SEQ ID NO: 446080 - RNA, 22 nt, Human
ucccagaguucaaugggaaggu

SEQ ID NO: 446081 - RNA, 22 nt, Human
uccagcagggaauuaguagucu

SEQ ID NO: 446082 - RNA, 22 nt, Human
auggagagugaaagucucucua

SEQ ID NO: 446083 - RNA, 22 nt, Human
cagggcucagaagacagaccuc

SEQ ID NO: 446084 - RNA, 22 nt, Human
acaggccucaagacacccaggu

SEQ ID NO: 446085 - RNA, 22 nt, Human
aagccauuuguuguccuucagg

SEQ ID NO: 446086 - RNA, 22 nt, Human
cucuggcuuugcucaugcaucc

SEQ ID NO: 446087 - RNA, 22 nt, Human
aacuaaaucuggcauuuagagc

SEQ ID NO: 446088 - RNA, 22 nt, Human
aaugauggucauggcaacuuuu

SEQ ID NO: 446089 - RNA, 22 nt, Human
ugguccagaugccuuggcuuua

SEQ ID NO: 446090 - RNA, 22 nt, Human
gagcggaggcuuggaggccagc

SEQ ID NO: 446091 - RNA, 22 nt, Human
acaguaaccucuccucugaagg

SEQ ID NO: 446092 - RNA, 22 nt, Human
uuucagagaugcagaauucagg

SEQ ID NO: 446093 - RNA, 22 nt, Human
gaagccccaaacccucgccauc

SEQ ID NO: 446094 - RNA, 18 nt, Human
ucagcuggggcugcagcc

SEQ ID NO: 446095 - RNA, 22 nt, Human
ugggagcagccaacauggccuu

SEQ ID NO: 446096 - RNA, 22 nt, Human
gccacaugcaauugcagcacgu

SEQ ID NO: 446097 - RNA, 22 nt, Human
cucccucaggccuuagcccugc

SEQ ID NO: 446098 - RNA, 22 nt, Human
gaugauuucuccauucccuucu

SEQ ID NO: 446099 - RNA, 22 nt, Human
gccugccuguuggcugaggugc

SEQ ID NO: 446100 - RNA, 22 nt, Human
ggcuccagggucucuccuugug

SEQ ID NO: 446101 - RNA, 22 nt, Human
gugggcaaggucccugccagcu

SEQ ID NO: 446102 - RNA, 22 nt, Human
agcuccugcccaggaaggcucu

SEQ ID NO: 446103 - RNA, 20 nt, Human
cagcaggaaaagugccucag

SEQ ID NO: 446104 - RNA, 22 nt, Human
gagcuucccucugcagucccug

SEQ ID NO: 446105 - RNA, 22 nt, Human
gcagacuguaccuggaagaggg

SEQ ID NO: 446106 - RNA, 23 nt, Human
aaacugcaucucugagccucagc

SEQ ID NO: 446107 - RNA, 19 nt, Human
ccaggccaucccaguuccc

SEQ ID NO: 446108 - RNA, 22 nt, Human
agggcagaaauauugauacugu

SEQ ID NO: 446109 - RNA, 19 nt, Human
ugguacaaaccaagagaga

SEQ ID NO: 446110 - RNA, 22 nt, Human
ccugaaaaucaagguaguuugg

SEQ ID NO: 446111 - RNA, 22 nt, Human
gccagcagggcggagccaucua

SEQ ID NO: 446112 - RNA, 22 nt, Human
ugucccagacacaguaugcgcu

SEQ ID NO: 446113 - RNA, 22 nt, Human
auuuucucuuuguauaugcuag

SEQ ID NO: 446114 - RNA, 22 nt, Human
cagagcagccuccagggggagc

SEQ ID NO: 446115 - RNA, 22 nt, Human
uaggguaguaccaugcugccag

SEQ ID NO: 446116 - RNA, 22 nt, Human
caggguggaagcuguagagugg

SEQ ID NO: 446117 - RNA, 22 nt, Human
acagaauugaagcugaguaaau

SEQ ID NO: 446118 - RNA, 22 nt, Human
cagagaacaaagcugaggguuu

SEQ ID NO: 446119 - RNA, 22 nt, Human
uauuuauaccaggugaucggag

SEQ ID NO: 446120 - RNA, 22 nt, Human
gaaggcaagugcuccuuggguc

SEQ ID NO: 446121 - RNA, 22 nt, Human
ucucuaaaguagaaaagacccc

SEQ ID NO: 446122 - RNA, 22 nt, Human
ucuccacaccagaaggagcuga

SEQ ID NO: 446123 - RNA, 20 nt, Human
uuugggcacggcuagauuuu

SEQ ID NO: 446124 - RNA, 22 nt, Human
acagccaggagccaugggcagg

SEQ ID NO: 446125 - RNA, 22 nt, Human
uagccucuggaauccuuucucu

SEQ ID NO: 446126 - RNA, 22 nt, Human
ccuuucucuggcagcaggacag

SEQ ID NO: 446127 - RNA, 22 nt, Human
ggcuccuucaagccugucacug

SEQ ID NO: 446128 - RNA, 22 nt, Human
guauucuuaaggauugagcaaa

SEQ ID NO: 446129 - RNA, 22 nt, Human
ccugucugaggaggugcucuuu

SEQ ID NO: 446130 - RNA, 22 nt, Human
uucuggauguuguagucugaga

SEQ ID NO: 446131 - RNA, 22 nt, Human
gagcuagggaggaggcuugcuc

SEQ ID NO: 446132 - RNA, 22 nt, Human
acaggccuugguccugaccuaa

SEQ ID NO: 446133 - RNA, 21 nt, Human
ggccuuggcgggggccgaauu

SEQ ID NO: 446134 - RNA, 21 nt, Human
ugcaguucaagucaaucuacu

SEQ ID NO: 446135 - RNA, 22 nt, Human
uauguacaccggggaagguggg

SEQ ID NO: 446136 - RNA, 22 nt, Human
gcaguggggcgcugggaguugg

SEQ ID NO: 446137 - RNA, 22 nt, Human
ggaauaaagaaucugguucccc

SEQ ID NO: 446138 - RNA, 22 nt, Human
caggucagaggcgcagccccca

SEQ ID NO: 446139 - RNA, 22 nt, Human
cuggcuccauccuugagcucug

SEQ ID NO: 446140 - RNA, 22 nt, Human
ccuggcucugguucccucagcu

SEQ ID NO: 446141 - RNA, 22 nt, Human
uagaaauaaaucugcagcuggg

SEQ ID NO: 446142 - RNA, 22 nt, Human
auagcuuucuuaaauauauaaa

SEQ ID NO: 446143 - RNA, 19 nt, Human
aggcagaggcuuggcuagc

SEQ ID NO: 446144 - RNA, 22 nt, Human
uuagcauucucauuugcauaaa

SEQ ID NO: 446145 - RNA, 22 nt, Human
uugcccuggggcuggccuggca

SEQ ID NO: 446146 - RNA, 22 nt, Human
ugggccacggggguggagagcu

SEQ ID NO: 446147 - RNA, 22 nt, Human
augacagaaggccucccugaca

SEQ ID NO: 446148 - RNA, 22 nt, Human
ugugugugcaggagagcaggug

SEQ ID NO: 446149 - RNA, 22 nt, Human
gcaggggcaggagaucucaggc

SEQ ID NO: 446150 - RNA, 23 nt, Human
ugccagcagggaaugggaaggac

SEQ ID NO: 446151 - RNA, 22 nt, Human
aggcaaggugcuacagacagug

SEQ ID NO: 446152 - RNA, 22 nt, Human
uuuuaacacucagcacuaucuc

SEQ ID NO: 446153 - RNA, 22 nt, Human
aaauuauuuucagaauggagaa

SEQ ID NO: 446154 - RNA, 22 nt, Human
uggagguugggaugcuugugau

SEQ ID NO: 446155 - RNA, 18 nt, Human
uuccaugauuccuuucac

SEQ ID NO: 446156 - RNA, 22 nt, Human
gugacccagguagguaagcaau

SEQ ID NO: 446157 - RNA, 22 nt, Human
ggccucgcggcuucugguggcu

SEQ ID NO: 446158 - RNA, 22 nt, Human
cugggcuguucugccccugggu

SEQ ID NO: 446159 - RNA, 22 nt, Human
ugaggcugacaaaagaugaggu

SEQ ID NO: 446160 - RNA, 19 nt, Human
ugcagcugucucuauauua

SEQ ID NO: 446161 - RNA, 22 nt, Human
uuuccucaacugucaaaugggg

SEQ ID NO: 446162 - RNA, 22 nt, Human
uggcuccuucauucuccugcca

SEQ ID NO: 446163 - RNA, 21 nt, Human
uuuauuaacaacuguggacgu

SEQ ID NO: 446164 - RNA, 22 nt, Human
ugauucuguucuccuugagaau

SEQ ID NO: 446165 - RNA, 22 nt, Human
uauguacacacacaugcaugua

SEQ ID NO: 446166 - RNA, 22 nt, Human
uggaugugagaaggaucaggcu

SEQ ID NO: 446167 - RNA, 22 nt, Human
ugcacuccaggcugggugacag

SEQ ID NO: 446168 - RNA, 22 nt, Human
augauccaaagccacaggggca

SEQ ID NO: 446169 - RNA, 22 nt, Human
uauuugaagggagaaagugcca

SEQ ID NO: 446170 - RNA, 21 nt, Human
ccagcuguuccucguccgaug

SEQ ID NO: 446171 - RNA, 21 nt, Human
agaaaauggcguuuuagauuu

SEQ ID NO: 446172 - RNA, 22 nt, Human
aagacaagcaucaaaucaggca

SEQ ID NO: 446173 - RNA, 22 nt, Human
ugcaauuuuuaucaauucagca

SEQ ID NO: 446174 - RNA, 22 nt, Human
ucaggaaauggaauucuugugu

SEQ ID NO: 446175 - RNA, 22 nt, Human
cagaaggcagcaaaugaaaacc

SEQ ID NO: 446176 - RNA, 22 nt, Human
gcucagaguuaauuggaugggu

SEQ ID NO: 446177 - RNA, 22 nt, Human
uaacaugcuaauuugcagauag

SEQ ID NO: 446178 - RNA, 22 nt, Human
cuccuacaguguuugaguccag

SEQ ID NO: 446179 - RNA, 22 nt, Human
uuguguguagacucagccauug

SEQ ID NO: 446180 - RNA, 22 nt, Human
ugugggaggucuggaaggcucc

SEQ ID NO: 446181 - RNA, 22 nt, Human
ucagaauucuagcucuucccuu

SEQ ID NO: 446182 - RNA, 22 nt, Human
uuuacagcuacuguccuauuuc

SEQ ID NO: 446183 - RNA, 22 nt, Human
uugaacagcuguuacauuguua

SEQ ID NO: 446184 - RNA, 22 nt, Human
ugaggaagugguuguaugguuu

SEQ ID NO: 446185 - RNA, 22 nt, Human
aguucagaguaaauguugaagg

SEQ ID NO: 446186 - RNA, 22 nt, Human
uuccuuuuacaaauagccuccu

SEQ ID NO: 446187 - RNA, 22 nt, Human
cagcccuuaagagucaucccuc

SEQ ID NO: 446188 - RNA, 22 nt, Human
uaaagcccucugaucacacugg

SEQ ID NO: 446189 - RNA, 22 nt, Human
uugugaucuguguugauggccu

SEQ ID NO: 446190 - RNA, 22 nt, Human
ugcccagcacugugccagucac

SEQ ID NO: 446191 - RNA, 22 nt, Human
caggaaagagcugccaggcagg

SEQ ID NO: 446192 - RNA, 22 nt, Human
ccagaggcuggguucaccucag

SEQ ID NO: 446193 - RNA, 22 nt, Human
ccagucacucugugagagcuac

SEQ ID NO: 446194 - RNA, 22 nt, Human
aaaggaagaugccaggacucug

SEQ ID NO: 446195 - RNA, 22 nt, Human
gagcccuguaggaaucucucaa

SEQ ID NO: 446196 - RNA, 22 nt, Human
ucaggcugugucuuuaaacaau

SEQ ID NO: 446197 - RNA, 22 nt, Human
guuaacauuucuaggugcaggg

SEQ ID NO: 446198 - RNA, 22 nt, Human
caguccugaauacuggacggug

SEQ ID NO: 446199 - RNA, 22 nt, Human
uuucaucauguuggcagauugg

SEQ ID NO: 446200 - RNA, 22 nt, Human
guucuaggcuaggggaguaaga

SEQ ID NO: 446201 - RNA, 22 nt, Human
gaacccaguccaggugcagccu

SEQ ID NO: 446202 - RNA, 22 nt, Human
ucccuguacuuacacagcgucc

SEQ ID NO: 446203 - RNA, 22 nt, Human
uaccaaaagcuuguuucauaca

SEQ ID NO: 446204 - RNA, 22 nt, Human
uuugcuuucuugauucagauua

SEQ ID NO: 446205 - RNA, 22 nt, Human
guauucuugguuaucaaaauac

SEQ ID NO: 446206 - RNA, 22 nt, Human
ucagcccuagaaagucuaagca

SEQ ID NO: 446207 - RNA, 22 nt, Human
ccugggcagguguggcuucccc

SEQ ID NO: 446208 - RNA, 22 nt, Human
uucaagguaugguagcugguca

SEQ ID NO: 446209 - RNA, 22 nt, Human
cagucccaucucccagguggcu

SEQ ID NO: 446210 - RNA, 22 nt, Human
aggccaggcaacauucugaagu

SEQ ID NO: 446211 - RNA, 22 nt, Human
cagcugagaguagaaauggagg

SEQ ID NO: 446212 - RNA, 20 nt, Human
ugcucuggggguggagagac

SEQ ID NO: 446213 - RNA, 22 nt, Human
ugcaaaaauugcuggaaucuuu

SEQ ID NO: 446214 - RNA, 22 nt, Human
cagugucaccaggcgagucucc

SEQ ID NO: 446215 - RNA, 22 nt, Human
ugcccacaucugcuuauuucau

SEQ ID NO: 446216 - RNA, 22 nt, Human
ugagacaguuggugaaaucuaa

SEQ ID NO: 446217 - RNA, 22 nt, Human
aguuuacaacaguagcuaugga

SEQ ID NO: 446218 - RNA, 22 nt, Human
uugcacauuuccuagaauuuca

SEQ ID NO: 446219 - RNA, 23 nt, Human
aucuagaaaccugaugacucugu

SEQ ID NO: 446220 - RNA, 22 nt, Human
uuccugagaacauggcagcuua

SEQ ID NO: 446221 - RNA, 22 nt, Human
gcacagagcuggcccuccaggc

SEQ ID NO: 446222 - RNA, 22 nt, Human
cccaggagauggagguugcagu

SEQ ID NO: 446223 - RNA, 22 nt, Human
ucuggacauccuggagaaugac

SEQ ID NO: 446224 - RNA, 22 nt, Human
ggcagccagagggcagcuggau

SEQ ID NO: 446225 - RNA, 19 nt, Human
cagcugccuuuucuuugca

SEQ ID NO: 446226 - RNA, 22 nt, Human
cugggcugugguguggcccaaa

SEQ ID NO: 446227 - RNA, 22 nt, Human
augcaugugcauggcucuaucu

SEQ ID NO: 446228 - RNA, 22 nt, Human
aagcccuggaacuuuccuagcc

SEQ ID NO: 446229 - RNA, 22 nt, Human
acaauauuguacccagaaguuu

SEQ ID NO: 446230 - RNA, 18 nt, Human
gagcagcaggaucaagaa

SEQ ID NO: 446231 - RNA, 19 nt, Human
uuugugaagaaaaugaugc

SEQ ID NO: 446232 - RNA, 22 nt, Human
ugggccuggguuccuccugggc

SEQ ID NO: 446233 - RNA, 23 nt, Human
uaguguauaucaacauuuguccc

SEQ ID NO: 446234 - RNA, 22 nt, Human
aaaugcacagaaaggaugugga

SEQ ID NO: 446235 - RNA, 22 nt, Human
ugcaugauagagaugguauuag

SEQ ID NO: 446236 - RNA, 22 nt, Human
cagcagagcugugugggaaggg

SEQ ID NO: 446237 - RNA, 22 nt, Human
uggcacagacagcacagcaaug

SEQ ID NO: 446238 - RNA, 22 nt, Human
uuuccaaauaaggucacauucu

SEQ ID NO: 446239 - RNA, 22 nt, Human
ugauacagagcaagcaucuuuu

SEQ ID NO: 446240 - RNA, 22 nt, Human
agcugagcacauucaaacaggu

SEQ ID NO: 446241 - RNA, 22 nt, Human
caggccucaggggcucaggcug

SEQ ID NO: 446242 - RNA, 22 nt, Human
gcaaggcagcauccuuuugagg

SEQ ID NO: 446243 - RNA, 22 nt, Human
uaucauuuaacagaaucauugc

SEQ ID NO: 446244 - RNA, 22 nt, Human
gcagacagggcuacagagguac

SEQ ID NO: 446245 - RNA, 22 nt, Human
ucauuguugcguuaaugucuuc

SEQ ID NO: 446246 - RNA, 22 nt, Human
cagcugaguuuccaagucugcc

SEQ ID NO: 446247 - RNA, 19 nt, Human
cauacaauuaccauaggau

SEQ ID NO: 446248 - RNA, 22 nt, Human
ucagaauuggaacgugaagauu

SEQ ID NO: 446249 - RNA, 22 nt, Human
gagaagaaaauuccgugaacac

SEQ ID NO: 446250 - RNA, 22 nt, Human
gaauuucaaagagguuaagagg

SEQ ID NO: 446251 - RNA, 22 nt, Human
agcuguuuuacugguuguauaa

SEQ ID NO: 446252 - RNA, 22 nt, Human
gugucccagcagcacauuggcu

SEQ ID NO: 446253 - RNA, 22 nt, Human
aagagacuauggugucuaugaa

SEQ ID NO: 446254 - RNA, 20 nt, Human
ggggacccagaaucacagcu

SEQ ID NO: 446255 - RNA, 22 nt, Human
uagcugcccaucuuuccuuuag

SEQ ID NO: 446256 - RNA, 22 nt, Human
cucagggaauugaaucuccuug

SEQ ID NO: 446257 - RNA, 22 nt, Human
cacaggcacgccucuggccagg

SEQ ID NO: 446258 - RNA, 20 nt, Human
cugcuugggacacugccaga

SEQ ID NO: 446259 - RNA, 22 nt, Human
uauggcuuuucuuuccuagugu

SEQ ID NO: 446260 - RNA, 23 nt, Human
gguggcaggaguggaugcugagc

SEQ ID NO: 446261 - RNA, 22 nt, Human
gugcuugggggaaguaacagac

SEQ ID NO: 446262 - RNA, 22 nt, Human
ugaugcauugccgacuuacugg

SEQ ID NO: 446263 - RNA, 20 nt, Human
ugagaaggggucagcuguac

SEQ ID NO: 446264 - RNA, 22 nt, Human
cauuucuagacaaguccuggag

SEQ ID NO: 446265 - RNA, 22 nt, Human
acugcauugagguuucauacuu

SEQ ID NO: 446266 - RNA, 22 nt, Human
uuccaugaaggagacugagaag

SEQ ID NO: 446267 - RNA, 18 nt, Human
uaacaucggcuaugcauc

SEQ ID NO: 446268 - RNA, 17 nt, Human
acaagcaguggccaugg

SEQ ID NO: 446269 - RNA, 22 nt, Human
cucagggauggugaagcaccca

SEQ ID NO: 446270 - RNA, 22 nt, Human
gagcugccugugugccaugaug

SEQ ID NO: 446271 - RNA, 22 nt, Human
cagcagcuggugagacacagcc

SEQ ID NO: 446272 - RNA, 22 nt, Human
cuuucucuugagcaagagcugu

SEQ ID NO: 446273 - RNA, 22 nt, Human
ucugggcucugggaauuaggga

SEQ ID NO: 446274 - RNA, 22 nt, Human
augcauauuuucuguuggugac

SEQ ID NO: 446275 - RNA, 22 nt, Human
ugggcacuguagcuggugcugg

SEQ ID NO: 446276 - RNA, 18 nt, Human
gagcugccauauuuaguu

SEQ ID NO: 446277 - RNA, 22 nt, Human
guaggcagauaggagugcagcc

SEQ ID NO: 446278 - RNA, 22 nt, Human
agggagcagcagccacaggaug

SEQ ID NO: 446279 - RNA, 22 nt, Human
cuguccucuguccucagcagga

SEQ ID NO: 446280 - RNA, 22 nt, Human
agaaggcagaugggacggagca

SEQ ID NO: 446281 - RNA, 22 nt, Human
ucugagagccucuagccuaagu

SEQ ID NO: 446282 - RNA, 22 nt, Human
agggguggagaguguugccagu

SEQ ID NO: 446283 - RNA, 22 nt, Human
acccccaaacaucaagggcuga

SEQ ID NO: 446284 - RNA, 22 nt, Human
uaaaggcuuuauuuuccaguca

SEQ ID NO: 446285 - RNA, 22 nt, Human
agguggcauuuacaccauggga

SEQ ID NO: 446286 - RNA, 23 nt, Human
uaauuuuagccuuacaggacccu

SEQ ID NO: 446287 - RNA, 22 nt, Human
cugcagcugccagugauuucag

SEQ ID NO: 446288 - RNA, 22 nt, Human
auucaaacaggccaauugaccu

SEQ ID NO: 446289 - RNA, 22 nt, Human
gcacugaaauuauaugcauuug

SEQ ID NO: 446290 - RNA, 22 nt, Human
aagagagacaauagguagcauu

SEQ ID NO: 446291 - RNA, 22 nt, Human
acauucaaaaagcaucugucac

SEQ ID NO: 446292 - RNA, 22 nt, Human
cuggggcagagcccagcaauuu

SEQ ID NO: 446293 - RNA, 22 nt, Human
uggcacagaaaaaugcuccauu

SEQ ID NO: 446294 - RNA, 22 nt, Human
ucuuugcaugaguucccucugu

SEQ ID NO: 446295 - RNA, 22 nt, Human
uuugcaaaugcucugcagagcu

SEQ ID NO: 446296 - RNA, 22 nt, Human
guccacagagggcugggcaggc

SEQ ID NO: 446297 - RNA, 22 nt, Human
cugccugugcaugcagucagaa

SEQ ID NO: 446298 - RNA, 22 nt, Human
gaggcacauauauacagagccc

SEQ ID NO: 446299 - RNA, 22 nt, Human
gcaggagccaggccgagcuggu

SEQ ID NO: 446300 - RNA, 22 nt, Human
aggcagcuuaagcccuggccca

SEQ ID NO: 446301 - RNA, 22 nt, Human
auucaaguacaguuuucuucuu

SEQ ID NO: 446302 - RNA, 22 nt, Human
ggcugagcacuuuaggcaggag

SEQ ID NO: 446303 - RNA, 22 nt, Human
agacauagauaggcacugauug

SEQ ID NO: 446304 - RNA, 22 nt, Human
auuugcugauggcauuugagcu

SEQ ID NO: 446305 - RNA, 22 nt, Human
ggaagaaagguggacaacaggu

SEQ ID NO: 446306 - RNA, 22 nt, Human
uaugcauuuuauagugcaaagc

SEQ ID NO: 446307 - RNA, 22 nt, Human
ccugggagguggagguugcagu

SEQ ID NO: 446308 - RNA, 22 nt, Human
agcccugcgugccaggggacug

SEQ ID NO: 446309 - RNA, 22 nt, Human
uucccagugaggaagcaaugca

SEQ ID NO: 446310 - RNA, 22 nt, Human
ggcagggugccuggcuccuguu

SEQ ID NO: 446311 - RNA, 22 nt, Human
aaggaagguucauagucaaaga

SEQ ID NO: 446312 - RNA, 22 nt, Human
gaacagagaagcuuuacuaaag

SEQ ID NO: 446313 - RNA, 22 nt, Human
uugcaaauauuccccuaggucu

SEQ ID NO: 446314 - RNA, 22 nt, Human
guucuuuaggggcccaauuucc

SEQ ID NO: 446315 - RNA, 22 nt, Human
cccaggcugaguuagagguguc

SEQ ID NO: 446316 - RNA, 22 nt, Human
uagaacagaggguugcccagau

SEQ ID NO: 446317 - RNA, 22 nt, Human
ccuccagcgcgauccacuccgg

SEQ ID NO: 446318 - RNA, 22 nt, Human
auaggagacuguucuuggcuuc

SEQ ID NO: 446319 - RNA, 19 nt, Human
agcagcagcuaccacuugu

SEQ ID NO: 446320 - RNA, 22 nt, Human
ugguccaggguguaguacagag

SEQ ID NO: 446321 - RNA, 19 nt, Human
auaaggcaauuggauuugg

SEQ ID NO: 446322 - RNA, 22 nt, Human
ucuggcagcuauccucuggcca

SEQ ID NO: 446323 - RNA, 23 nt, Human
agacccagagacuggcucugcuc

SEQ ID NO: 446324 - RNA, 22 nt, Human
gcagagugagccgaggcugcuc

SEQ ID NO: 446325 - RNA, 22 nt, Human
uuuauagaugucuguauuauaa

SEQ ID NO: 446326 - RNA, 23 nt, Human
gccugccugaccugugcaaaguc

SEQ ID NO: 446327 - RNA, 22 nt, Human
aaauucagauggcuuucuuuuc

SEQ ID NO: 446328 - RNA, 22 nt, Human
gaggcugcaggcaaugcugccc

SEQ ID NO: 446329 - RNA, 22 nt, Human
gggaugccaguccuggcccugc

SEQ ID NO: 446330 - RNA, 22 nt, Human
aaagacauuagauuaacguaca

SEQ ID NO: 446331 - RNA, 22 nt, Human
ucugaggguuguagagagggac

SEQ ID NO: 446332 - RNA, 22 nt, Human
aagcucugcucagcagacuagg

SEQ ID NO: 446333 - RNA, 22 nt, Human
gcugucuugcucacucuugcag

SEQ ID NO: 446334 - RNA, 22 nt, Human
aaggcaaugguuucugugccuu

SEQ ID NO: 446335 - RNA, 22 nt, Human
aggcaacaugacucacuugcac

SEQ ID NO: 446336 - RNA, 19 nt, Human
agccagcaggccucugagc

SEQ ID NO: 446337 - RNA, 22 nt, Human
cacugcucgcugcagcauggcc

SEQ ID NO: 446338 - RNA, 22 nt, Human
cccaggaggccaagguugcagu

SEQ ID NO: 446339 - RNA, 22 nt, Human
accaccccagaauuuuucaagg

SEQ ID NO: 446340 - RNA, 22 nt, Human
gagccugaaauacaggucacug

SEQ ID NO: 446341 - RNA, 22 nt, Human
ucaggcuguauaucuugcacuc

SEQ ID NO: 446342 - RNA, 22 nt, Human
caguggguaggaaaggcucuuc

SEQ ID NO: 446343 - RNA, 22 nt, Human
ggagagagaccuccaugcccag

SEQ ID NO: 446344 - RNA, 22 nt, Human
ucauugaauuugguucaauaug

SEQ ID NO: 446345 - RNA, 22 nt, Human
ccuggccaguuuccaggcccug

SEQ ID NO: 446346 - RNA, 22 nt, Human
ccagcccuugagauggaaggga

SEQ ID NO: 446347 - RNA, 21 nt, Human
acaguacuugagaucuuuuga

SEQ ID NO: 446348 - RNA, 22 nt, Human
gcugacacuuagaagugcccug

SEQ ID NO: 446349 - RNA, 22 nt, Human
uguguguguuucugcucauaca

SEQ ID NO: 446350 - RNA, 22 nt, Human
cugugugugucugcagcauacu

SEQ ID NO: 446351 - RNA, 22 nt, Human
acugcuuuaucugagaaguccu

SEQ ID NO: 446352 - RNA, 22 nt, Human
cagaauuuuucgaauguacugu

SEQ ID NO: 446353 - RNA, 22 nt, Human
caggcuugauuauucagacaau

SEQ ID NO: 446354 - RNA, 22 nt, Human
ucuggcucucauacucgccagu

SEQ ID NO: 446355 - RNA, 19 nt, Human
gcuggggaauggauauuga

SEQ ID NO: 446356 - RNA, 22 nt, Human
uugcaaaaaccacaauuacuuu

SEQ ID NO: 446357 - RNA, 22 nt, Human
guggagcccugguagggacccc

SEQ ID NO: 446358 - RNA, 22 nt, Human
acccagagucagacagccaugg

SEQ ID NO: 446359 - RNA, 22 nt, Human
ugggcacuauggcucugugcac

SEQ ID NO: 446360 - RNA, 22 nt, Human
cugcauuucacauuuaaacuuu

SEQ ID NO: 446361 - RNA, 22 nt, Human
aggcccugagaaaaucccugca

SEQ ID NO: 446362 - RNA, 22 nt, Human
agugaaaucagguuuugacugc

SEQ ID NO: 446363 - RNA, 22 nt, Human
ugucccuggaacuauggcucca

SEQ ID NO: 446364 - RNA, 22 nt, Human
cccuggagcuagucugagcaga

SEQ ID NO: 446365 - RNA, 22 nt, Human
ccacagagacaggguccuugcu

SEQ ID NO: 446366 - RNA, 22 nt, Human
gucuggaaauuuaagguaugag

SEQ ID NO: 446367 - RNA, 22 nt, Human
auugcaaagcauugugagcgca

SEQ ID NO: 446368 - RNA, 22 nt, Human
cccucagcuccacccucagcag

SEQ ID NO: 446369 - RNA, 22 nt, Human
guuuguuuauacaaaagauccu

SEQ ID NO: 446370 - RNA, 22 nt, Human
acuuucuauggcuuauuaugag

SEQ ID NO: 446371 - RNA, 22 nt, Human
cagaauuugaaguaauauucca

SEQ ID NO: 446372 - RNA, 21 nt, Human
guucaaauccugacacuacac

SEQ ID NO: 446373 - RNA, 22 nt, Human
uuuuuauaggucagggcaaguc

SEQ ID NO: 446374 - RNA, 21 nt, Human
gcagaaaggaaucuuaggucc

SEQ ID NO: 446375 - RNA, 22 nt, Human
acacaugauaagaaaguuuaaa

SEQ ID NO: 446376 - RNA, 22 nt, Human
agcuguguguuuccacugagcu

SEQ ID NO: 446377 - RNA, 22 nt, Human
cuccugggaaaugaaggggcag

SEQ ID NO: 446378 - RNA, 19 nt, Human
gggcuuggggcugaagccu

SEQ ID NO: 446379 - RNA, 22 nt, Human
agcaaauucagaagcagaaugg

SEQ ID NO: 446380 - RNA, 22 nt, Human
uucuagucuauggcuagauagu

SEQ ID NO: 446381 - RNA, 22 nt, Human
cugcagcugcucauguuacuug

SEQ ID NO: 446382 - RNA, 22 nt, Human
gcuggccacacugcugauggag

SEQ ID NO: 446383 - RNA, 19 nt, Human
ugaggccaaggucacagau

SEQ ID NO: 446384 - RNA, 22 nt, Human
ugcccugucuaagcugucagua

SEQ ID NO: 446385 - RNA, 22 nt, Human
ggagacagcaggaagaaauauc

SEQ ID NO: 446386 - RNA, 22 nt, Human
aacaucuuuguaguguucuccu

SEQ ID NO: 446387 - RNA, 22 nt, Human
caggccugguugagcccugaga

SEQ ID NO: 446388 - RNA, 22 nt, Human
gccagcugucuaagagaguaaa

SEQ ID NO: 446389 - RNA, 22 nt, Human
uccaggcaucccccaggacaga

SEQ ID NO: 446390 - RNA, 22 nt, Human
aacuuuuucugggauggagggu

SEQ ID NO: 446391 - RNA, 22 nt, Human
cucaggagaugacagaagguau

SEQ ID NO: 446392 - RNA, 18 nt, Human
cagagcagagguggagcg

SEQ ID NO: 446393 - RNA, 22 nt, Human
ugcaaauucuuuacucugugau

SEQ ID NO: 446394 - RNA, 19 nt, Human
uguuuuguuaaagcagucc

SEQ ID NO: 446395 - RNA, 22 nt, Human
gcacugaugcaaaaaucacuca

SEQ ID NO: 446396 - RNA, 22 nt, Human
aagcccuggcucagcucaccag

SEQ ID NO: 446397 - RNA, 17 nt, Human
agcagcuggguugaucu

SEQ ID NO: 446398 - RNA, 17 nt, Human
ugugagcaucuauagaa

SEQ ID NO: 446399 - RNA, 22 nt, Human
ucuuucuucagcccuguaagau

SEQ ID NO: 446400 - RNA, 22 nt, Human
aaaauucauagaacuguacgcu

SEQ ID NO: 446401 - RNA, 22 nt, Human
cagcccagacaccaucauucua

SEQ ID NO: 446402 - RNA, 22 nt, Human
gcauaucaugacuucuaucuua

SEQ ID NO: 446403 - RNA, 22 nt, Human
uguuuuguuuaugagagcacag

SEQ ID NO: 446404 - RNA, 22 nt, Human
cacaugaacaugcuggaaaagc

SEQ ID NO: 446405 - RNA, 22 nt, Human
ugcacagagagaugagacacgu

SEQ ID NO: 446406 - RNA, 22 nt, Human
agcccuggagcaaaggugucuu

SEQ ID NO: 446407 - RNA, 22 nt, Human
ugggcagacuaaggucaaagcu

SEQ ID NO: 446408 - RNA, 22 nt, Human
cagagucccagaugccccuccu

SEQ ID NO: 446409 - RNA, 22 nt, Human
auuuucucacaauccuaugggg

SEQ ID NO: 446410 - RNA, 22 nt, Human
gggcuggcucccagguguugaa

SEQ ID NO: 446411 - RNA, 22 nt, Human
agguuccuuauggggauggcua

SEQ ID NO: 446412 - RNA, 22 nt, Human
agagggcuuugauucucaguuc

SEQ ID NO: 446413 - RNA, 22 nt, Human
acacagaaccucauagccucuc

SEQ ID NO: 446414 - RNA, 22 nt, Human
agaaacagcauuagcaucaauu

SEQ ID NO: 446415 - RNA, 22 nt, Human
uuggaaaggagauucuauugug

SEQ ID NO: 446416 - RNA, 22 nt, Human
ugauuuucuccauuguaaauuc

SEQ ID NO: 446417 - RNA, 22 nt, Human
agcuaagguguccuggaggccc

SEQ ID NO: 446418 - RNA, 18 nt, Human
ugagccgguagauggggu

SEQ ID NO: 446419 - RNA, 22 nt, Human
uuccuuuugcaagguccucuag

SEQ ID NO: 446420 - RNA, 19 nt, Human
ccagcccugucacuucuug

SEQ ID NO: 446421 - RNA, 22 nt, Human
cuggaugcuuccucucugcuag

SEQ ID NO: 446422 - RNA, 22 nt, Human
ugaaagucucuguuauagagaa

SEQ ID NO: 446423 - RNA, 22 nt, Human
gccuggagggucccucucugga

SEQ ID NO: 446424 - RNA, 22 nt, Human
cagcuggugucaggcacugcag

SEQ ID NO: 446425 - RNA, 22 nt, Human
cauauuuuaguugcugaacagc

SEQ ID NO: 446426 - RNA, 22 nt, Human
uggcacuuagaucagguugggu

SEQ ID NO: 446427 - RNA, 22 nt, Human
acaaagauguuuaaagcauuua

SEQ ID NO: 446428 - RNA, 22 nt, Human
gaguuacauuuggugacacuuc

SEQ ID NO: 446429 - RNA, 22 nt, Human
gccuguccacuaaacagccaag

SEQ ID NO: 446430 - RNA, 22 nt, Human
cccagagccucauucuguuggg

SEQ ID NO: 446431 - RNA, 22 nt, Human
aauugcuugucuucuucccuac

SEQ ID NO: 446432 - RNA, 22 nt, Human
ucaggguaaaccuucacuguga

SEQ ID NO: 446433 - RNA, 22 nt, Human
gggcaguggguggcugcagccu

SEQ ID NO: 446434 - RNA, 22 nt, Human
cucuccagggaagcaguguacu

SEQ ID NO: 446435 - RNA, 22 nt, Human
cagcccagcgcaaacaacuggc

SEQ ID NO: 446436 - RNA, 22 nt, Human
uuuaucuuuaggacuuugcaga

SEQ ID NO: 446437 - RNA, 22 nt, Human
uccugccuagcaggugaccuau

SEQ ID NO: 446438 - RNA, 22 nt, Human
uuguuucuucauuuagaagcuu

SEQ ID NO: 446439 - RNA, 22 nt, Human
gaggccaggacaugaaagcuga

SEQ ID NO: 446440 - RNA, 20 nt, Human
uugcaaauaucgugggucag

SEQ ID NO: 446441 - RNA, 22 nt, Human
ccugggucuugguucaugcucu

SEQ ID NO: 446442 - RNA, 22 nt, Human
uuauacauguguuuugagauga

SEQ ID NO: 446443 - RNA, 22 nt, Human
ucuguggcacgauugcacugca

SEQ ID NO: 446444 - RNA, 23 nt, Human
gugagcagcccacuaggaaugcc

SEQ ID NO: 446445 - RNA, 22 nt, Human
cauuuguagcuauuuacuguau

SEQ ID NO: 446446 - RNA, 22 nt, Human
aaacaagagcuuacauggcugc

SEQ ID NO: 446447 - RNA, 22 nt, Human
acauucaaccaauguuugcuau

SEQ ID NO: 446448 - RNA, 22 nt, Human
cuugacacugucacucaggcca

SEQ ID NO: 446449 - RNA, 17 nt, Human
acugaagcauuuaugau

SEQ ID NO: 446450 - RNA, 22 nt, Human
gcagagcucaagguguucagcu

SEQ ID NO: 446451 - RNA, 22 nt, Human
gccuggguccacugaucaugcu

SEQ ID NO: 446452 - RNA, 22 nt, Human
gucucccaauccgggacagccu

SEQ ID NO: 446453 - RNA, 22 nt, Human
aucuuuuaugagcguucugaca

SEQ ID NO: 446454 - RNA, 22 nt, Human
gacagacaggugugguaggcac

SEQ ID NO: 446455 - RNA, 22 nt, Human
auugcccaauaauaaaauggua

SEQ ID NO: 446456 - RNA, 22 nt, Human
aacaucaucagaugggugcuug

SEQ ID NO: 446457 - RNA, 22 nt, Human
caguacuuaacuuauaggagag

SEQ ID NO: 446458 - RNA, 22 nt, Human
ugagacaguaauuguauaguuu

SEQ ID NO: 446459 - RNA, 22 nt, Human
gugcaaaaguaauugcaguuuu

SEQ ID NO: 446460 - RNA, 22 nt, Human
ugcccagcacccagcaugaugc

SEQ ID NO: 446461 - RNA, 22 nt, Human
acagcagcuugucuguucuuua

SEQ ID NO: 446462 - RNA, 22 nt, Human
uacacaaucuguuuuuccauuu

SEQ ID NO: 446463 - RNA, 22 nt, Human
uucaauaggaugcaugauauaa

SEQ ID NO: 446464 - RNA, 17 nt, Human
ugccagccugucccagg

SEQ ID NO: 446465 - RNA, 22 nt, Human
caaaugaagguggugggucauu

SEQ ID NO: 446466 - RNA, 23 nt, Human
gcccagagaggcucaccaggaau

SEQ ID NO: 446467 - RNA, 22 nt, Human
caaugcacauggacaucaggcu

SEQ ID NO: 446468 - RNA, 21 nt, Human
guucaaauggguagauucaca

SEQ ID NO: 446469 - RNA, 22 nt, Human
uggaugagaaacucuggugacu

SEQ ID NO: 446470 - RNA, 20 nt, Human
cuccccucuacagagggcug

SEQ ID NO: 446471 - RNA, 22 nt, Human
uucucacaauucuuguauuugc

SEQ ID NO: 446472 - RNA, 22 nt, Human
agccacagagcaggagaccuuu

SEQ ID NO: 446473 - RNA, 22 nt, Human
gugaauaacuuucuauguuaau

SEQ ID NO: 446474 - RNA, 22 nt, Human
cuuuguuuuacucagaggcaug

SEQ ID NO: 446475 - RNA, 22 nt, Human
caggcagcugcgacaagagagc

SEQ ID NO: 446476 - RNA, 21 nt, Human
aagcaggacauaugaugcccu

SEQ ID NO: 446477 - RNA, 22 nt, Human
uccugccuaccuugcggaggug

SEQ ID NO: 446478 - RNA, 22 nt, Human
ucagaggauugccucagcgagc

SEQ ID NO: 446479 - RNA, 22 nt, Human
uacauauuugucuuuguacugu

SEQ ID NO: 446480 - RNA, 22 nt, Human
cuggugccauucuguggccuag

SEQ ID NO: 446481 - RNA, 22 nt, Human
caguggccaugguggcaggggu

SEQ ID NO: 446482 - RNA, 22 nt, Human
gacuuugcccuaaugaggucuc

SEQ ID NO: 446483 - RNA, 22 nt, Human
gcagggaagacccggagcagcg

SEQ ID NO: 446484 - RNA, 22 nt, Human
ccacugucuuuuccaggcugaa

SEQ ID NO: 446485 - RNA, 22 nt, Human
cuccuuccaacaagagaaagag

SEQ ID NO: 446486 - RNA, 19 nt, Human
uugcuucaggcugugugcu

SEQ ID NO: 446487 - RNA, 22 nt, Human
cagcauuuaaugcagugcuucc

SEQ ID NO: 446488 - RNA, 17 nt, Human
uuauuuuuugggcugag

SEQ ID NO: 446489 - RNA, 20 nt, Human
gagguagggcuuaaggcaag

SEQ ID NO: 446490 - RNA, 22 nt, Human
cauuccaaggccaagucuaaga

SEQ ID NO: 446491 - RNA, 22 nt, Human
ucagaguguggugagaugugca

SEQ ID NO: 446492 - RNA, 22 nt, Human
cuggcaggcggagguugcagug

SEQ ID NO: 446493 - RNA, 22 nt, Human
ccagccuggguguuagaagaca

SEQ ID NO: 446494 - RNA, 22 nt, Human
gcagacuggucuucagccuugg

SEQ ID NO: 446495 - RNA, 22 nt, Human
uggccuggcccugaggcccugu

SEQ ID NO: 446496 - RNA, 22 nt, Human
uuuacuacuucauugacuuacg

SEQ ID NO: 446497 - RNA, 22 nt, Human
augcauaugcaaugcacaauuu

SEQ ID NO: 446498 - RNA, 22 nt, Human
uugcccugucuuaagcuggcaa

SEQ ID NO: 446499 - RNA, 22 nt, Human
ggcccacacugacagcugagcu

SEQ ID NO: 446500 - RNA, 22 nt, Human
cauuuguaucauauguaucuua

SEQ ID NO: 446501 - RNA, 22 nt, Human
gcagcuggcccugacacgcaga

SEQ ID NO: 446502 - RNA, 22 nt, Human
aacacuuuccguagguuuagua

SEQ ID NO: 446503 - RNA, 20 nt, Human
caggccagagguuugauggc

SEQ ID NO: 446504 - RNA, 22 nt, Human
gcuuccucccugcugcucacua

SEQ ID NO: 446505 - RNA, 22 nt, Human
ccagaagaggacacagugugga

SEQ ID NO: 446506 - RNA, 23 nt, Human
uuuaaccuuggucaagaauuucc

SEQ ID NO: 446507 - RNA, 22 nt, Human
ggccccagcagugcuuguuuau

SEQ ID NO: 446508 - RNA, 22 nt, Human
uggugagaugcagcaacagaca

SEQ ID NO: 446509 - RNA, 22 nt, Human
uggacuccagugucuguguucu

SEQ ID NO: 446510 - RNA, 22 nt, Human
ugacaaauguuaauucagugga

SEQ ID NO: 446511 - RNA, 22 nt, Human
aggcugagccacggggcuggcu

SEQ ID NO: 446512 - RNA, 22 nt, Human
cccuaggcugggcucuuggcuu

SEQ ID NO: 446513 - RNA, 22 nt, Human
gucuggaaggaggagauggagc

SEQ ID NO: 446514 - RNA, 20 nt, Human
uaaaugcaugaauguaaggc

SEQ ID NO: 446515 - RNA, 22 nt, Human
ggcagcugaagaggaacuuugg

SEQ ID NO: 446516 - RNA, 22 nt, Human
ugugaauauccauuuguuucag

SEQ ID NO: 446517 - RNA, 21 nt, Human
cuuuggcaagggagaagucac

SEQ ID NO: 446518 - RNA, 22 nt, Human
cugccacuagcuuucacaucuu

SEQ ID NO: 446519 - RNA, 23 nt, Human
cucugcaggagagugggcagggc

SEQ ID NO: 446520 - RNA, 22 nt, Human
cccagcuccuuggaugggcagg

SEQ ID NO: 446521 - RNA, 22 nt, Human
ugcaggcuauccuuugcugcaa

SEQ ID NO: 446522 - RNA, 22 nt, Human
ugagcccagucugucugacaug

SEQ ID NO: 446523 - RNA, 22 nt, Human
cuggagcucuguguguuccuga

SEQ ID NO: 446524 - RNA, 21 nt, Human
uguucacauggagcagaaugu

SEQ ID NO: 446525 - RNA, 22 nt, Human
ggcagccacccugggaggcaga

SEQ ID NO: 446526 - RNA, 22 nt, Human
uucagaauauuuguuuuacaug

SEQ ID NO: 446527 - RNA, 22 nt, Human
ucugcugcugaccaacacugug

SEQ ID NO: 446528 - RNA, 22 nt, Human
gcaggcugugguauguugggca

SEQ ID NO: 446529 - RNA, 22 nt, Human
gcacuuuguggauuguauuucc

SEQ ID NO: 446530 - RNA, 22 nt, Human
gcuuagcagucacacauuguuc

SEQ ID NO: 446531 - RNA, 22 nt, Human
ugagcaggcgcagcaggagguc

SEQ ID NO: 446532 - RNA, 22 nt, Human
ugagccuggccugcagagacca

SEQ ID NO: 446533 - RNA, 22 nt, Human
cccagcagaccgcugugauggc

SEQ ID NO: 446534 - RNA, 22 nt, Human
uuuggcagagucauuucagaaa

SEQ ID NO: 446535 - RNA, 22 nt, Human
ggcaauuucaugugguuuaaac

SEQ ID NO: 446536 - RNA, 22 nt, Human
uaguugacaucaucagccugga

SEQ ID NO: 446537 - RNA, 22 nt, Human
gcccaagggcaucaaguucuac

SEQ ID NO: 446538 - RNA, 22 nt, Human
aucugcaucagacuuugcauga

SEQ ID NO: 446539 - RNA, 22 nt, Human
cacaauuuggugcuaaagaaag

SEQ ID NO: 446540 - RNA, 22 nt, Human
gcacccagcccagggcgugaug

SEQ ID NO: 446541 - RNA, 22 nt, Human
cuggccuaaaauugcuucugca

SEQ ID NO: 446542 - RNA, 22 nt, Human
ggccuugggauguggcugcagc

SEQ ID NO: 446543 - RNA, 22 nt, Human
aggcaggcucaggcccaugcuu

SEQ ID NO: 446544 - RNA, 22 nt, Human
auagaauuuguacuuguagaac

SEQ ID NO: 446545 - RNA, 22 nt, Human
guuugacacugagauaaauaaa

SEQ ID NO: 446546 - RNA, 22 nt, Human
aagacagaccacgugacagggc

SEQ ID NO: 446547 - RNA, 22 nt, Human
aacaucucauggacuacauucu

SEQ ID NO: 446548 - RNA, 22 nt, Human
acaaaacaguguuccugccccu

SEQ ID NO: 446549 - RNA, 22 nt, Human
cacauuuaauugguuuagggug

SEQ ID NO: 446550 - RNA, 22 nt, Human
uugggcaaaguguuucuggagc

SEQ ID NO: 446551 - RNA, 22 nt, Human
cugugcagcuuggcuucaggcc

SEQ ID NO: 446552 - RNA, 22 nt, Human
agcagcagaaaguugauggcag

SEQ ID NO: 446553 - RNA, 22 nt, Human
cagcugcccauccugggaaaug

SEQ ID NO: 446554 - RNA, 22 nt, Human
uacagggauuccugccgcucgc

SEQ ID NO: 446555 - RNA, 22 nt, Human
aaucuggucuaagugaggauag

SEQ ID NO: 446556 - RNA, 17 nt, Human
aagacaagacaaaugca

SEQ ID NO: 446557 - RNA, 22 nt, Human
auuccaaagacagaagcagcug

SEQ ID NO: 446558 - RNA, 22 nt, Human
gggcuggagccagcuguggcug

SEQ ID NO: 446559 - RNA, 22 nt, Human
cacaguuauauguucacaagga

SEQ ID NO: 446560 - RNA, 22 nt, Human
ugcaggcuuggaucacaucucc

SEQ ID NO: 446561 - RNA, 20 nt, Human
gcugaggucauuaugccuca

SEQ ID NO: 446562 - RNA, 22 nt, Human
guuuguuuuaagauaggaugga

SEQ ID NO: 446563 - RNA, 22 nt, Human
gcagcugagcgugaggaagagu

SEQ ID NO: 446564 - RNA, 22 nt, Human
agcaggcugagcacccaggggg

SEQ ID NO: 446565 - RNA, 22 nt, Human
gagcccugauuugcagcauuug

SEQ ID NO: 446566 - RNA, 22 nt, Human
aggcuaggaacagcccggcccu

SEQ ID NO: 446567 - RNA, 22 nt, Human
agucacaugaguuucucuuuau

SEQ ID NO: 446568 - RNA, 22 nt, Human
uugcucaguggcagggcuggua

SEQ ID NO: 446569 - RNA, 22 nt, Human
caggcugaggguuaggccuuag

SEQ ID NO: 446570 - RNA, 22 nt, Human
cuuagaaaugcagauucucagg

SEQ ID NO: 446571 - RNA, 22 nt, Human
gcccagcaccucucucaggguu

SEQ ID NO: 446572 - RNA, 22 nt, Human
gucaggaaaaauugauaauuuu

SEQ ID NO: 446573 - RNA, 22 nt, Human
ugcagcugugggagaaucucug

SEQ ID NO: 446574 - RNA, 22 nt, Human
gcuccccauugaucugcaggcu

SEQ ID NO: 446575 - RNA, 22 nt, Human
cugugggcucccagcuucucuc

SEQ ID NO: 446576 - RNA, 22 nt, Human
acagcaguggugcacugagcca

SEQ ID NO: 446577 - RNA, 22 nt, Human
cucccuggcacagcgagagguu

SEQ ID NO: 446578 - RNA, 22 nt, Human
gugcccugggccuucagggcca

SEQ ID NO: 446579 - RNA, 22 nt, Human
acuugauuuuuauaauaaaugg

SEQ ID NO: 446580 - RNA, 22 nt, Human
ucccagagugugggcaucaagg

SEQ ID NO: 446581 - RNA, 20 nt, Human
agaaaauguuuucagcugga

SEQ ID NO: 446582 - RNA, 22 nt, Human
guucuauguugagauagcuaau

SEQ ID NO: 446583 - RNA, 22 nt, Human
agaggguaacaagaggccugga

SEQ ID NO: 446584 - RNA, 23 nt, Human
agggaagaaacaugaagggcugu

SEQ ID NO: 446585 - RNA, 22 nt, Human
uggagagaacagugucugaaag

SEQ ID NO: 446586 - RNA, 22 nt, Human
agagcucaagacgcucacagua

SEQ ID NO: 446587 - RNA, 22 nt, Human
gcuaaggcacaaauagcuuugc

SEQ ID NO: 446588 - RNA, 22 nt, Human
augauacaucuuguuuauuuca

SEQ ID NO: 446589 - RNA, 19 nt, Human
ucacagcaucugucugaac

SEQ ID NO: 446590 - RNA, 22 nt, Human
gcuggugauugccucaggaggc

SEQ ID NO: 446591 - RNA, 18 nt, Human
acaggcugugggaauggu

SEQ ID NO: 446592 - RNA, 22 nt, Human
ccagccucacuggcaucaccua

SEQ ID NO: 446593 - RNA, 22 nt, Human
cggccuucucccugggcaucac

SEQ ID NO: 446594 - RNA, 22 nt, Human
cucuuuuagagaugaaaauugg

SEQ ID NO: 446595 - RNA, 22 nt, Human
cauaggaaugaggacaauuagc

SEQ ID NO: 446596 - RNA, 22 nt, Human
cagggccucauccucagagauu

SEQ ID NO: 446597 - RNA, 22 nt, Human
aaaugccuauuuguuccuucag

SEQ ID NO: 446598 - RNA, 22 nt, Human
uugcagggaccugcagaaagcu

SEQ ID NO: 446599 - RNA, 22 nt, Human
ugcagcugugaaagggaaccaa

SEQ ID NO: 446600 - RNA, 22 nt, Human
augcauauuuucuacuauaucg

SEQ ID NO: 446601 - RNA, 22 nt, Human
uggcagggaauacagauguuua

SEQ ID NO: 446602 - RNA, 22 nt, Human
gcagggcugcugaaacuuguuu

SEQ ID NO: 446603 - RNA, 22 nt, Human
agugacaacaaguugacuagaa

SEQ ID NO: 446604 - RNA, 22 nt, Human
aaggaaagauucucucucuaga

SEQ ID NO: 446605 - RNA, 22 nt, Human
agaauuuuugcaguuuagccau

SEQ ID NO: 446606 - RNA, 22 nt, Human
acaggaggagcuguuucaggga

SEQ ID NO: 446607 - RNA, 22 nt, Human
uagagacaccaguaccauucug

SEQ ID NO: 446608 - RNA, 22 nt, Human
aagauucacagagugaaugaaa

SEQ ID NO: 446609 - RNA, 22 nt, Human
uuauuuaaaauguagguuggga

SEQ ID NO: 446610 - RNA, 22 nt, Human
ugcaguuuuggccauugaaggc

SEQ ID NO: 446611 - RNA, 22 nt, Human
caggaggacauacuggcucaca

SEQ ID NO: 446612 - RNA, 22 nt, Human
cuuguuuuggaacagagugaau

SEQ ID NO: 446613 - RNA, 22 nt, Human
gcaaggaacaaaugcucugcuu

SEQ ID NO: 446614 - RNA, 22 nt, Human
cauuauugaugcaacagcccuu

SEQ ID NO: 446615 - RNA, 22 nt, Human
ugcauugaucauauccuuccug

SEQ ID NO: 446616 - RNA, 22 nt, Human
cagggagaucuuggcuccuggu

SEQ ID NO: 446617 - RNA, 22 nt, Human
aaggcuggggugcagacggccu

SEQ ID NO: 446618 - RNA, 22 nt, Human
uguggcuuuugcuagcuuugca

SEQ ID NO: 446619 - RNA, 22 nt, Human
cucaggccauucuuccagcugc

SEQ ID NO: 446620 - RNA, 22 nt, Human
aagcagaaaaacugagcuccaa

SEQ ID NO: 446621 - RNA, 22 nt, Human
uggcucucuuguaagguaguag

SEQ ID NO: 446622 - RNA, 22 nt, Human
ucagugcagaauagugaugcau

SEQ ID NO: 446623 - RNA, 22 nt, Human
gugcauauuuugcacacagaug

SEQ ID NO: 446624 - RNA, 22 nt, Human
cuucaaauccuguguagggcua

SEQ ID NO: 446625 - RNA, 22 nt, Human
ccauuacuuuccaauauaucag

SEQ ID NO: 446626 - RNA, 22 nt, Human
acacauuauagagaguauaaua

SEQ ID NO: 446627 - RNA, 21 nt, Human
agcaaaggcaggagagguuuc

SEQ ID NO: 446628 - RNA, 22 nt, Human
uggugcugacaguucugagugc

SEQ ID NO: 446629 - RNA, 22 nt, Human
agaaguaggcagggcuguauca

SEQ ID NO: 446630 - RNA, 22 nt, Human
uguacaaaguuaaaccuauaua

SEQ ID NO: 446631 - RNA, 22 nt, Human
agcuguuuaaaugacuuacuuu

SEQ ID NO: 446632 - RNA, 22 nt, Human
agagggaucacccuguuucugg

SEQ ID NO: 446633 - RNA, 22 nt, Human
caggcuggaguuaccuuuaggg

SEQ ID NO: 446634 - RNA, 22 nt, Human
cccagggcccuggacagcuaca

SEQ ID NO: 446635 - RNA, 18 nt, Human
auuaaggcuuugauagua

SEQ ID NO: 446636 - RNA, 22 nt, Human
caggcaagauuagagaugagca

SEQ ID NO: 446637 - RNA, 22 nt, Human
auuucucagugaaaugacaggc

SEQ ID NO: 446638 - RNA, 22 nt, Human
acaacauucuuaaauacacuga

SEQ ID NO: 446639 - RNA, 22 nt, Human
cacaggaaggccuucucacaau

SEQ ID NO: 446640 - RNA, 22 nt, Human
ccaggcaucacgggcauguggc

SEQ ID NO: 446641 - RNA, 22 nt, Human
cagcugagaaggucugaucagg

SEQ ID NO: 446642 - RNA, 23 nt, Human
ggggacagagggcagcccgcauc

SEQ ID NO: 446643 - RNA, 22 nt, Human
gucagcaguggcagcucccggg

SEQ ID NO: 446644 - RNA, 22 nt, Human
ggaaggggagcuggaaagggua

SEQ ID NO: 446645 - RNA, 22 nt, Human
aaggcagcaggauuuggugacu

SEQ ID NO: 446646 - RNA, 22 nt, Human
aggaauuugggguuacaugaug

SEQ ID NO: 446647 - RNA, 22 nt, Human
ggcagggacuauguuucaugga

SEQ ID NO: 446648 - RNA, 22 nt, Human
ucugcugcuacagacucucuag

SEQ ID NO: 446649 - RNA, 22 nt, Human
cagcagcaucaggucugugguu

SEQ ID NO: 446650 - RNA, 22 nt, Human
gcagacgucaccgagucgaugg

SEQ ID NO: 446651 - RNA, 22 nt, Human
cagcuguugugauuuccaggag

SEQ ID NO: 446652 - RNA, 22 nt, Human
aaggcuggagaugguuggaaug

SEQ ID NO: 446653 - RNA, 22 nt, Human
gcagaagaccaugguggaaaga

SEQ ID NO: 446654 - RNA, 22 nt, Human
acucugggccccagguggagcu

SEQ ID NO: 446655 - RNA, 22 nt, Human
cccuggagggcagacagaugcc

SEQ ID NO: 446656 - RNA, 22 nt, Human
ucugggcuggcuuuaugcugac

SEQ ID NO: 446657 - RNA, 22 nt, Human
caacauucuuaucacuauaagc

SEQ ID NO: 446658 - RNA, 17 nt, Human
aggcuccuccuaagguc

SEQ ID NO: 446659 - RNA, 22 nt, Human
acagcagcauaaacugacuaag

SEQ ID NO: 446660 - RNA, 22 nt, Human
agucccagcucugccacuuacu

SEQ ID NO: 446661 - RNA, 22 nt, Human
uugcagcucucugaagguugca

SEQ ID NO: 446662 - RNA, 22 nt, Human
uacagaguuuuccugccaagaa

SEQ ID NO: 446663 - RNA, 22 nt, Human
gaaugauauauuagcagauuuu

SEQ ID NO: 446664 - RNA, 22 nt, Human
acagagcuuaauucaggagcuu

SEQ ID NO: 446665 - RNA, 22 nt, Human
ugcuucaggagaugucaccaug

SEQ ID NO: 446666 - RNA, 23 nt, Human
gggggccguccuggggauuauag

SEQ ID NO: 446667 - RNA, 22 nt, Human
ucagaauuauguaggccugguu

SEQ ID NO: 446668 - RNA, 22 nt, Human
acagagcacugcccugugccgc

SEQ ID NO: 446669 - RNA, 22 nt, Human
aaguucagccugguuuuaaugc

SEQ ID NO: 446670 - RNA, 22 nt, Human
caggcugcugacaggcuuggag

SEQ ID NO: 446671 - RNA, 22 nt, Human
gcccagcuuuuugaggcaggca

SEQ ID NO: 446672 - RNA, 22 nt, Human
ggcugguuugacaaacugacaa

SEQ ID NO: 446673 - RNA, 22 nt, Human
auuguuaauguugcacuaaggu

SEQ ID NO: 446674 - RNA, 22 nt, Human
ucugucucaaguucuugcacuc

SEQ ID NO: 446675 - RNA, 22 nt, Human
cagcaguggaacuacccaggga

SEQ ID NO: 446676 - RNA, 22 nt, Human
uagccggguguugugucaugca

SEQ ID NO: 446677 - RNA, 22 nt, Human
caaggcaggccaguuucaaggc

SEQ ID NO: 446678 - RNA, 22 nt, Human
cccaggucuaugccagcucuga

SEQ ID NO: 446679 - RNA, 22 nt, Human
accuccccauuaggucacccac

SEQ ID NO: 446680 - RNA, 22 nt, Human
ugggccucaugcccagccaccc

SEQ ID NO: 446681 - RNA, 22 nt, Human
aucugaagggaaguggaaggca

SEQ ID NO: 446682 - RNA, 22 nt, Human
ugucccagauacuggacauaga

SEQ ID NO: 446683 - RNA, 22 nt, Human
aaagggaaguugcacauguucc

SEQ ID NO: 446684 - RNA, 22 nt, Human
auuccucauuuguugagaacca

SEQ ID NO: 446685 - RNA, 22 nt, Human
caggcagauuugcugcccucca

SEQ ID NO: 446686 - RNA, 21 nt, Human
uccugccuuaguccagagcag

SEQ ID NO: 446687 - RNA, 22 nt, Human
uuggaaauggcuguaguuauga

SEQ ID NO: 446688 - RNA, 17 nt, Human
ggccuguguggcugcag

SEQ ID NO: 446689 - RNA, 22 nt, Human
uugcaaaaacugcaauuacuuu

SEQ ID NO: 446690 - RNA, 23 nt, Human
ucagagaaguuguaggcugggga

SEQ ID NO: 446691 - RNA, 22 nt, Human
gcaggcaguugcaguuuucuag

SEQ ID NO: 446692 - RNA, 22 nt, Human
uuggccagguguccagcccagg

SEQ ID NO: 446693 - RNA, 22 nt, Human
gaggccucaggaaugucgugug

SEQ ID NO: 446694 - RNA, 22 nt, Human
aggcugcaggucugggucaugu

SEQ ID NO: 446695 - RNA, 22 nt, Human
aggcaggauugcugacaacaau

SEQ ID NO: 446696 - RNA, 22 nt, Human
uuugagguuagcuagcagauca

SEQ ID NO: 446697 - RNA, 22 nt, Human
ugacacaguaucaaacaugauu

SEQ ID NO: 446698 - RNA, 22 nt, Human
ugcauuugucuugucucaugaa

SEQ ID NO: 446699 - RNA, 22 nt, Human
cuuugcaaaaguuaauuguuga

SEQ ID NO: 446700 - RNA, 22 nt, Human
aagacaauaauuuuugggcagg

SEQ ID NO: 446701 - RNA, 20 nt, Human
cagcuuggaugagaggcuga

SEQ ID NO: 446702 - RNA, 22 nt, Human
cugccaggcacugggcucugca

SEQ ID NO: 446703 - RNA, 22 nt, Human
uuauacagcauugcuagugaug

SEQ ID NO: 446704 - RNA, 22 nt, Human
gaauuuuagaauaugugggcuu

SEQ ID NO: 446705 - RNA, 22 nt, Human
uuggcacuucacgagacagcua

SEQ ID NO: 446706 - RNA, 22 nt, Human
ccagagaauccggagaguccau

SEQ ID NO: 446707 - RNA, 22 nt, Human
ugacuucaaaggcucuacuccu

SEQ ID NO: 446708 - RNA, 22 nt, Human
uauuuccagcaguaagaagaca

SEQ ID NO: 446709 - RNA, 21 nt, Human
ucagcuugaaucuagagauag

SEQ ID NO: 446710 - RNA, 22 nt, Human
ugcagaagcagagccgguggcc

SEQ ID NO: 446711 - RNA, 22 nt, Human
ugacccugcuucuuggugcagg

SEQ ID NO: 446712 - RNA, 22 nt, Human
gaggaaggcuaaggggcuuaga

SEQ ID NO: 446713 - RNA, 22 nt, Human
uagcagcaauucaggugugaug

SEQ ID NO: 446714 - RNA, 22 nt, Human
uccaggcucagcacuugcuacu

SEQ ID NO: 446715 - RNA, 22 nt, Human
uaacacugguuaucccugugca

SEQ ID NO: 446716 - RNA, 22 nt, Human
agcaggaaagaaaaaucugugu

SEQ ID NO: 446717 - RNA, 22 nt, Human
ugcaggcauuggugagagaagc

SEQ ID NO: 446718 - RNA, 22 nt, Human
acaaguuuauuugauuagaaca

SEQ ID NO: 446719 - RNA, 22 nt, Human
ucagcucugcacuccacugugg

SEQ ID NO: 446720 - RNA, 22 nt, Human
cugaggccuaagacaugaauga

SEQ ID NO: 446721 - RNA, 22 nt, Human
cagguggcuucucccuaggcca

SEQ ID NO: 446722 - RNA, 22 nt, Human
cauuagagcagauaauaugugu

SEQ ID NO: 446723 - RNA, 22 nt, Human
ugugcaguuucuauguugucca

SEQ ID NO: 446724 - RNA, 22 nt, Human
agccuggccugggcaggcacau

SEQ ID NO: 446725 - RNA, 22 nt, Human
cacacaugcauguaagaccucu

SEQ ID NO: 446726 - RNA, 22 nt, Human
gccugccuucggugcgcagcgg

SEQ ID NO: 446727 - RNA, 19 nt, Human
ucagaauucugucucuuga

SEQ ID NO: 446728 - RNA, 22 nt, Human
cagugcaguugguggcaggggu

SEQ ID NO: 446729 - RNA, 22 nt, Human
ggagccugguuacuagagccug

SEQ ID NO: 446730 - RNA, 22 nt, Human
uuuccuuugcccaauacauguc

SEQ ID NO: 446731 - RNA, 21 nt, Human
ucaagacagcauauuuaagaa

SEQ ID NO: 446732 - RNA, 22 nt, Human
agccaggauggucucgaucggc

SEQ ID NO: 446733 - RNA, 22 nt, Human
cagcuggugagcuuaguagggu

SEQ ID NO: 446734 - RNA, 22 nt, Human
uucaaguagaaaguauugauga

SEQ ID NO: 446735 - RNA, 22 nt, Human
ucuuugcaugcauuuucccuua

SEQ ID NO: 446736 - RNA, 18 nt, Human
auauucaagaagacagag

SEQ ID NO: 446737 - RNA, 22 nt, Human
gccuggcuccuaagagcacaac

SEQ ID NO: 446738 - RNA, 22 nt, Human
guccugggccugcugaggcuga

SEQ ID NO: 446739 - RNA, 22 nt, Human
aaguguuucuuggaauguugcg

SEQ ID NO: 446740 - RNA, 22 nt, Human
ugucacauaauuuaucuguagg

SEQ ID NO: 446741 - RNA, 22 nt, Human
ucauucaauguaagcauauaua

SEQ ID NO: 446742 - RNA, 22 nt, Human
ugccuucucccuuggacccuga

SEQ ID NO: 446743 - RNA, 22 nt, Human
acagaguuuauguguguacaaa

SEQ ID NO: 446744 - RNA, 22 nt, Human
uuucagaguuauguaagaaaau

SEQ ID NO: 446745 - RNA, 22 nt, Human
gcuggccaggugcuuugguucu

SEQ ID NO: 446746 - RNA, 21 nt, Human
ggcagcugugguuaauugaac

SEQ ID NO: 446747 - RNA, 22 nt, Human
uggagcagggcaucacugugcg

SEQ ID NO: 446748 - RNA, 22 nt, Human
uuuuccucugcagagcaguuag

SEQ ID NO: 446749 - RNA, 22 nt, Human
agcauuauguccaugcuaaauu

SEQ ID NO: 446750 - RNA, 20 nt, Human
caaguucaccuucuccucuc

SEQ ID NO: 446751 - RNA, 22 nt, Human
ugcacacacggagauaggcuuu

SEQ ID NO: 446752 - RNA, 22 nt, Human
aguuaaguaaacauuucccaga

SEQ ID NO: 446753 - RNA, 22 nt, Human
auuuugaaaccaaguuauuucc

SEQ ID NO: 446754 - RNA, 22 nt, Human
ucucugcugagaagggcuggca

SEQ ID NO: 446755 - RNA, 22 nt, Human
ucuuugcauuuuaugccguuau

SEQ ID NO: 446756 - RNA, 22 nt, Human
ugccugggccuucccaccucug

SEQ ID NO: 446757 - RNA, 22 nt, Human
gcuguucugcgucccaggcugg

SEQ ID NO: 446758 - RNA, 22 nt, Human
uuuugcaaaguacauuaucagg

SEQ ID NO: 446759 - RNA, 22 nt, Human
gcagcuggagcaucuucucauc

SEQ ID NO: 446760 - RNA, 22 nt, Human
uuucuuaugugcagagugagua

SEQ ID NO: 446761 - RNA, 22 nt, Human
augauggaggccgugauggacg

SEQ ID NO: 446762 - RNA, 23 nt, Human
agaauuucaaaguccagcacauu

SEQ ID NO: 446763 - RNA, 22 nt, Human
ggagguagucugagucauaggc

SEQ ID NO: 446764 - RNA, 22 nt, Human
cucagaauaauguuucuaaagg

SEQ ID NO: 446765 - RNA, 22 nt, Human
cugcccuggguuuuaugggagu

SEQ ID NO: 446766 - RNA, 22 nt, Human
gcagauggugccaugucuugug

SEQ ID NO: 446767 - RNA, 22 nt, Human
aaggaagcagcaaugcaugauu

SEQ ID NO: 446768 - RNA, 23 nt, Human
aaucuggcugauguuuuuucucu

SEQ ID NO: 446769 - RNA, 22 nt, Human
uuuaacaugugaauuuuggaag

SEQ ID NO: 446770 - RNA, 22 nt, Human
aaggcaaugcuaagagguuugg

SEQ ID NO: 446771 - RNA, 22 nt, Human
ucuuuauuuuaugcuugugcaa

SEQ ID NO: 446772 - RNA, 22 nt, Human
agccucugacugucagcaaggu

SEQ ID NO: 446773 - RNA, 22 nt, Human
uacagcaaugguucuaagaguc

SEQ ID NO: 446774 - RNA, 22 nt, Human
cagcccugcugccuuagugccu

SEQ ID NO: 446775 - RNA, 22 nt, Human
ucagccugcgucauggugacac

SEQ ID NO: 446776 - RNA, 22 nt, Human
acagccugcugccugcuucuug

SEQ ID NO: 446777 - RNA, 22 nt, Human
cagaggaagggugcugcgaaag

SEQ ID NO: 446778 - RNA, 22 nt, Human
cccuggaggaccccaauguggc

SEQ ID NO: 446779 - RNA, 22 nt, Human
uuccagaggagugauucagagg

SEQ ID NO: 446780 - RNA, 22 nt, Human
auugcaaaggucccauucaaga

SEQ ID NO: 446781 - RNA, 22 nt, Human
uggccagccagaaagaagccuu

SEQ ID NO: 446782 - RNA, 22 nt, Human
acauaguucagagcagcagacc

SEQ ID NO: 446783 - RNA, 22 nt, Human
uccagccaacugccuagggagc

SEQ ID NO: 446784 - RNA, 22 nt, Human
ucccagagccaagcuauggaug

SEQ ID NO: 446785 - RNA, 22 nt, Human
gaggcugggaaguccaagauca

SEQ ID NO: 446786 - RNA, 22 nt, Human
ccagagcuucggggcggcugua

SEQ ID NO: 446787 - RNA, 22 nt, Human
uuugggcagaagcugaaugucu

SEQ ID NO: 446788 - RNA, 22 nt, Human
gcucugucuucagcacacagua

SEQ ID NO: 446789 - RNA, 22 nt, Human
caguccugggcacagcccuggg

SEQ ID NO: 446790 - RNA, 22 nt, Human
ugggcagggaucucuuuugcaa

SEQ ID NO: 446791 - RNA, 22 nt, Human
ugcagacagagaaaugaggccc

SEQ ID NO: 446792 - RNA, 22 nt, Human
agccuggcccugcugaacucug

SEQ ID NO: 446793 - RNA, 22 nt, Human
aggacuuagaacauuauguacu

SEQ ID NO: 446794 - RNA, 22 nt, Human
gugcacagaaacauacaaugug

SEQ ID NO: 446795 - RNA, 22 nt, Human
ugggcagacauugaguuuguuc

SEQ ID NO: 446796 - RNA, 22 nt, Human
acucagagcagagcagccugag

SEQ ID NO: 446797 - RNA, 22 nt, Human
aagcauuugguucugaagacuc

SEQ ID NO: 446798 - RNA, 22 nt, Human
auaugccagcuccaaguaagag

SEQ ID NO: 446799 - RNA, 22 nt, Human
ggccccagguagaagauauaga

SEQ ID NO: 446800 - RNA, 22 nt, Human
gcaggaacuugggugaagucag

SEQ ID NO: 446801 - RNA, 22 nt, Human
gggcucugggucgugucuccau

SEQ ID NO: 446802 - RNA, 22 nt, Human
uuaguugauagccaaaauuuau

SEQ ID NO: 446803 - RNA, 17 nt, Human
aggcaggcagagcggga

SEQ ID NO: 446804 - RNA, 22 nt, Human
uggcagcaccagcaguguccuu

SEQ ID NO: 446805 - RNA, 22 nt, Human
aaauggaucuuuuuauaaugca

SEQ ID NO: 446806 - RNA, 22 nt, Human
agccaagcaccacuggcacucg

SEQ ID NO: 446807 - RNA, 22 nt, Human
uuugggcagaaacaugcgcccc

SEQ ID NO: 446808 - RNA, 22 nt, Human
ugacagaaugugacucucagau

SEQ ID NO: 446809 - RNA, 22 nt, Human
uauauuaaaugaccaguuuuaa

SEQ ID NO: 446810 - RNA, 22 nt, Human
caggaguccugaaaucugauga

SEQ ID NO: 446811 - RNA, 22 nt, Human
aggcccuguuaugagccacugu

SEQ ID NO: 446812 - RNA, 22 nt, Human
uuauguguguacaugcauaugu

SEQ ID NO: 446813 - RNA, 20 nt, Human
ucugaggcugagcucuacuu

SEQ ID NO: 446814 - RNA, 22 nt, Human
uccugucagugaggcagaugaa

SEQ ID NO: 446815 - RNA, 22 nt, Human
gaaggcaguaaauggcuguuuu

SEQ ID NO: 446816 - RNA, 21 nt, Human
agcugggccucagccugcagu

SEQ ID NO: 446817 - RNA, 22 nt, Human
ucagggcaagucucagaagguu

SEQ ID NO: 446818 - RNA, 22 nt, Human
ugcauauucuccuuuauuuugu

SEQ ID NO: 446819 - RNA, 22 nt, Human
uacugcaugguggaguggagcu

SEQ ID NO: 446820 - RNA, 22 nt, Human
aagcagcugauuucacagcuca

SEQ ID NO: 446821 - RNA, 22 nt, Human
agccaagcugaucuccugcuga

SEQ ID NO: 446822 - RNA, 22 nt, Human
aaagugcagaacuguucucacu

SEQ ID NO: 446823 - RNA, 22 nt, Human
ggggcagauggaacagagcaca

SEQ ID NO: 446824 - RNA, 22 nt, Human
ccaggccucaccugcccaccua

SEQ ID NO: 446825 - RNA, 21 nt, Human
gucuuuuaagugaagagaggc

SEQ ID NO: 446826 - RNA, 22 nt, Human
uagugaauaguccaaucccgca

SEQ ID NO: 446827 - RNA, 22 nt, Human
ugucacagagcaacuauuucuu

SEQ ID NO: 446828 - RNA, 22 nt, Human
uuguuuugcuaaagggucauca

SEQ ID NO: 446829 - RNA, 18 nt, Human
aaagaaggauuggagagc

SEQ ID NO: 446830 - RNA, 22 nt, Human
uucuggcuccagaugcuucugu

SEQ ID NO: 446831 - RNA, 22 nt, Human
auucuuuacauuggcuucuucc

SEQ ID NO: 446832 - RNA, 22 nt, Human
guugcuuuuuugauagguggaa

SEQ ID NO: 446833 - RNA, 22 nt, Human
gccaggcuggggggagaugucu

SEQ ID NO: 446834 - RNA, 21 nt, Human
agcagcagaucuggugagggc

SEQ ID NO: 446835 - RNA, 22 nt, Human
agcagcuggggccugugacgau

SEQ ID NO: 446836 - RNA, 22 nt, Human
aacucacuuuguggcuucugaa

SEQ ID NO: 446837 - RNA, 22 nt, Human
gcuccaggguggaugacaauuc

SEQ ID NO: 446838 - RNA, 22 nt, Human
caggaggcaucauggagcggac

SEQ ID NO: 446839 - RNA, 22 nt, Human
ggcucugcugcaagucuuccuc

SEQ ID NO: 446840 - RNA, 22 nt, Human
agggcccaguggagagcugagc

SEQ ID NO: 446841 - RNA, 22 nt, Human
caguauguuuauuagaacugca

SEQ ID NO: 446842 - RNA, 22 nt, Human
caguacuugggggguucuaagu

SEQ ID NO: 446843 - RNA, 22 nt, Human
gccuggugaaaggcagagagcg

SEQ ID NO: 446844 - RNA, 22 nt, Human
ugcagcugugccugaaaaguac

SEQ ID NO: 446845 - RNA, 22 nt, Human
gcagacaggcccaguggaggga

SEQ ID NO: 446846 - RNA, 22 nt, Human
uccagcucuaacaugcugggcc

SEQ ID NO: 446847 - RNA, 22 nt, Human
gugcaauaaauaaauagauugu

SEQ ID NO: 446848 - RNA, 22 nt, Human
caggagcucuuaaggaugugau

SEQ ID NO: 446849 - RNA, 22 nt, Human
cugcccugcccaggccuugggc

SEQ ID NO: 446850 - RNA, 22 nt, Human
uucaguaaaacacugcaauguc

SEQ ID NO: 446851 - RNA, 22 nt, Human
ccaggcugcuguugguguccgc

SEQ ID NO: 446852 - RNA, 22 nt, Human
ucaggagggcuaagacuguagc

SEQ ID NO: 446853 - RNA, 22 nt, Human
gacagcaggugcuugggaaagg

SEQ ID NO: 446854 - RNA, 23 nt, Human
aaauucaguccuucaacucugag

SEQ ID NO: 446855 - RNA, 22 nt, Human
ccagcucuuuuggcugagugag

SEQ ID NO: 446856 - RNA, 22 nt, Human
aggaaaggccucagcagaaacc

SEQ ID NO: 446857 - RNA, 22 nt, Human
uccucagacuucccuuugugua

SEQ ID NO: 446858 - RNA, 22 nt, Human
agaggcugagaaacccucuucu

SEQ ID NO: 446859 - RNA, 22 nt, Human
ggggcagagaauaaaaaccuaa

SEQ ID NO: 446860 - RNA, 22 nt, Human
aaggcagccgugugacugcaug

SEQ ID NO: 446861 - RNA, 22 nt, Human
uagcaggcaucucagagauaau

SEQ ID NO: 446862 - RNA, 22 nt, Human
gcccagccuccaagcuccaagg

SEQ ID NO: 446863 - RNA, 22 nt, Human
augugcauuaaaugucaauguu

SEQ ID NO: 446864 - RNA, 22 nt, Human
ucaggccuagggagccacacca

SEQ ID NO: 446865 - RNA, 21 nt, Human
cuccugggcuaagauauagug

SEQ ID NO: 446866 - RNA, 22 nt, Human
ccagcagcaggccaggcccucc

SEQ ID NO: 446867 - RNA, 22 nt, Human
aaucacuuugcacucuuauuug

SEQ ID NO: 446868 - RNA, 20 nt, Human
uauuggaucuaagaaauggg

SEQ ID NO: 446869 - RNA, 22 nt, Human
ggacugaaugccagucuaugga

SEQ ID NO: 446870 - RNA, 22 nt, Human
acagaugauuuuuaugaaaaca

SEQ ID NO: 446871 - RNA, 22 nt, Human
gagcccgagcgcguacccggcg

SEQ ID NO: 446872 - RNA, 22 nt, Human
uccacaguuuugccacuagcug

SEQ ID NO: 446873 - RNA, 22 nt, Human
aaggcagaggaaggucuaguuu

SEQ ID NO: 446874 - RNA, 22 nt, Human
agagcugggacuuggacucaau

SEQ ID NO: 446875 - RNA, 22 nt, Human
caauaguucgguccugaaggcc

SEQ ID NO: 446876 - RNA, 22 nt, Human
gcacccagaggucagcagugcu

SEQ ID NO: 446877 - RNA, 22 nt, Human
ucuucaaaaauacagguuuuca

SEQ ID NO: 446878 - RNA, 22 nt, Human
ggaggcagaacuucccgucagu

SEQ ID NO: 446879 - RNA, 22 nt, Human
ggagcaagucccaggcacuagu

SEQ ID NO: 446880 - RNA, 22 nt, Human
cugccacuuacuaggcauggug

SEQ ID NO: 446881 - RNA, 22 nt, Human
ccccagcucagugcagggacau

SEQ ID NO: 446882 - RNA, 22 nt, Human
aucuuauugcuguugccagaua

SEQ ID NO: 446883 - RNA, 22 nt, Human
cugccuggcauggagaagagaa

SEQ ID NO: 446884 - RNA, 22 nt, Human
auggaugaaggcgaggaugagg

SEQ ID NO: 446885 - RNA, 22 nt, Human
cagacaggcaggugcugcuuug

SEQ ID NO: 446886 - RNA, 22 nt, Human
uugugaauggugccgcaauaaa

SEQ ID NO: 446887 - RNA, 19 nt, Human
uggaccugugcccauggcu

SEQ ID NO: 446888 - RNA, 22 nt, Human
ccagccagccuugaucugagua

SEQ ID NO: 446889 - RNA, 18 nt, Human
uuauucagacgcauauga

SEQ ID NO: 446890 - RNA, 22 nt, Human
agccccacacucucucugagaa

SEQ ID NO: 446891 - RNA, 22 nt, Human
gagacacagcagauauucaauc

SEQ ID NO: 446892 - RNA, 22 nt, Human
gcuugacuaggcucuggcgaca

SEQ ID NO: 446893 - RNA, 22 nt, Human
gcagcaccaaccagggccuguu

SEQ ID NO: 446894 - RNA, 22 nt, Human
gcucccagaaccaaggcugggg

SEQ ID NO: 446895 - RNA, 22 nt, Human
aacauucuacuguacugcauug

SEQ ID NO: 446896 - RNA, 22 nt, Human
caggcagcauuuacucugauga

SEQ ID NO: 446897 - RNA, 22 nt, Human
gcuccacuugcagcuaggcuug

SEQ ID NO: 446898 - RNA, 22 nt, Human
guccuggggauacagaagugaa

SEQ ID NO: 446899 - RNA, 22 nt, Human
uccaccccugggaaugucaaua

SEQ ID NO: 446900 - RNA, 22 nt, Human
aaucacaaaugcaaguugucac

SEQ ID NO: 446901 - RNA, 17 nt, Human
ugcauuguuggaaauuu

SEQ ID NO: 446902 - RNA, 22 nt, Human
agagaucuguggauucauuguc

SEQ ID NO: 446903 - RNA, 22 nt, Human
ugggccugccccaggcuucagc

SEQ ID NO: 446904 - RNA, 22 nt, Human
cuucugcaggcccugucugacc

SEQ ID NO: 446905 - RNA, 22 nt, Human
uuuauucacuucagugccaaag

SEQ ID NO: 446906 - RNA, 22 nt, Human
uaugcaaaucauuagauuuccu

SEQ ID NO: 446907 - RNA, 22 nt, Human
gacagcaagagacagagcaucc

SEQ ID NO: 446908 - RNA, 22 nt, Human
gaagccacguuaaauuggcugu

SEQ ID NO: 446909 - RNA, 19 nt, Human
ccucucccaugcuuaccuc

SEQ ID NO: 446910 - RNA, 22 nt, Human
uuacaguagauacaaugaguaa

SEQ ID NO: 446911 - RNA, 22 nt, Human
gccacaggcuuaggagggaggu

SEQ ID NO: 446912 - RNA, 22 nt, Human
aagcacagacacaaaaggcuuu

SEQ ID NO: 446913 - RNA, 22 nt, Human
ugaggcacauccaggccagcuc

SEQ ID NO: 446914 - RNA, 22 nt, Human
ugugccagaaaauaugcugagg

SEQ ID NO: 446915 - RNA, 23 nt, Human
gccuggagaaaagcugcaguuca

SEQ ID NO: 446916 - RNA, 22 nt, Human
cuccuuccccuacucagcaucc

SEQ ID NO: 446917 - RNA, 22 nt, Human
cuacccaggcuggagugcagua

SEQ ID NO: 446918 - RNA, 22 nt, Human
ucccccaaaugaaugaggaaua

SEQ ID NO: 446919 - RNA, 22 nt, Human
uauguacaguccuuaacuuaaa

SEQ ID NO: 446920 - RNA, 22 nt, Human
auaaauggcuuucauuccuagg

SEQ ID NO: 446921 - RNA, 22 nt, Human
uguaugugcuugagaagguggg

SEQ ID NO: 446922 - RNA, 22 nt, Human
gcagcccuagcgacaaauugau

SEQ ID NO: 446923 - RNA, 22 nt, Human
uuuauuuggcauccagggagaa

SEQ ID NO: 446924 - RNA, 22 nt, Human
ugagagcacacagaaauauuuu

SEQ ID NO: 446925 - RNA, 22 nt, Human
aaaauugaggcucauguuaaau

SEQ ID NO: 446926 - RNA, 22 nt, Human
acugaguguaggacuuugaguu

SEQ ID NO: 446927 - RNA, 22 nt, Human
accagggcggcuugaggaggca

SEQ ID NO: 446928 - RNA, 19 nt, Human
gacuccaacuuuaagcaug

SEQ ID NO: 446929 - RNA, 22 nt, Human
caggaaugacugcagauggggc

SEQ ID NO: 446930 - RNA, 22 nt, Human
acaugcaugaaauccauaaaca

SEQ ID NO: 446931 - RNA, 22 nt, Human
uauuacaaauuauaaugggaga

SEQ ID NO: 446932 - RNA, 22 nt, Human
cagagcugcagauugaaggcau

SEQ ID NO: 446933 - RNA, 19 nt, Human
gcuuccagcacugcaggag

SEQ ID NO: 446934 - RNA, 21 nt, Human
ggccccagcccauggguucuc

SEQ ID NO: 446935 - RNA, 22 nt, Human
uauugugaguauaacugcauuu

SEQ ID NO: 446936 - RNA, 22 nt, Human
aaguauuucuggccugugaaag

SEQ ID NO: 446937 - RNA, 22 nt, Human
ccaggaaguaugacccaacaga

SEQ ID NO: 446938 - RNA, 22 nt, Human
ugauacagaauugauaucugag

SEQ ID NO: 446939 - RNA, 22 nt, Human
gcccagaguggccacuuggcuc

SEQ ID NO: 446940 - RNA, 22 nt, Human
agcuggcuauacuugaaaaguc

SEQ ID NO: 446941 - RNA, 22 nt, Human
ccucugggcagguagcagcagc

SEQ ID NO: 446942 - RNA, 19 nt, Human
caguggccuggaggucucu

SEQ ID NO: 446943 - RNA, 22 nt, Human
ucaggccugcaggcuuccugga

SEQ ID NO: 446944 - RNA, 22 nt, Human
guucugcugugucucagcaggu

SEQ ID NO: 446945 - RNA, 22 nt, Human
guucaaguucauaucucuuaac

SEQ ID NO: 446946 - RNA, 21 nt, Human
agcugagguaaggcaagagag

SEQ ID NO: 446947 - RNA, 22 nt, Human
acagagcaugcucaguguguga

SEQ ID NO: 446948 - RNA, 22 nt, Human
ccuuugcaacagaaagaccuga

SEQ ID NO: 446949 - RNA, 22 nt, Human
augcauauauacauacacaguc

SEQ ID NO: 446950 - RNA, 22 nt, Human
cagcugaggaauacuagaugua

SEQ ID NO: 446951 - RNA, 22 nt, Human
ggcagcuggggcagugcccugu

SEQ ID NO: 446952 - RNA, 22 nt, Human
uuucucaaaagacagaagugaa

SEQ ID NO: 446953 - RNA, 22 nt, Human
gacagcugugcaggagaagggg

SEQ ID NO: 446954 - RNA, 22 nt, Human
cagcuccaaagccccacugucc

SEQ ID NO: 446955 - RNA, 22 nt, Human
gugcacagauucagagguuuug

SEQ ID NO: 446956 - RNA, 22 nt, Human
agcugaagcucagcccaguagu

SEQ ID NO: 446957 - RNA, 22 nt, Human
guuccucacguggacagaugau

SEQ ID NO: 446958 - RNA, 22 nt, Human
accagagaaaacacagcaggcu

SEQ ID NO: 446959 - RNA, 22 nt, Human
aagggcaggagaagacggauau

SEQ ID NO: 446960 - RNA, 22 nt, Human
agccacagcaacaagugcaauu

SEQ ID NO: 446961 - RNA, 22 nt, Human
uuggccagugaaccaggccugg

SEQ ID NO: 446962 - RNA, 20 nt, Human
ucuccagaugcagaugacau

SEQ ID NO: 446963 - RNA, 20 nt, Human
aagauucauuguaauuaggg

SEQ ID NO: 446964 - RNA, 22 nt, Human
aagcacugagcacaguggcuga

SEQ ID NO: 446965 - RNA, 22 nt, Human
auguuauuuuggaaaauacaaa

SEQ ID NO: 446966 - RNA, 18 nt, Human
uuuguuggguugccuuua

SEQ ID NO: 446967 - RNA, 22 nt, Human
acaggggcuccgaaggugaggg

SEQ ID NO: 446968 - RNA, 22 nt, Human
ucugccuggaugauggcagggc

SEQ ID NO: 446969 - RNA, 22 nt, Human
uaugugcaugcugacuugagga

SEQ ID NO: 446970 - RNA, 22 nt, Human
gcuuccagggcucagucacugc

SEQ ID NO: 446971 - RNA, 22 nt, Human
ugcacacacaugaaguagcaug

SEQ ID NO: 446972 - RNA, 22 nt, Human
ucaggccugcaaaugaauggua

SEQ ID NO: 446973 - RNA, 22 nt, Human
accacaggacccaugagucagu

SEQ ID NO: 446974 - RNA, 20 nt, Human
cagcaguggaugagaguuuu

SEQ ID NO: 446975 - RNA, 22 nt, Human
uacauugcuagaaauguauuuu

SEQ ID NO: 446976 - RNA, 23 nt, Human
gccuggccaccccagggcugcuu

SEQ ID NO: 446977 - RNA, 22 nt, Human
uccagaggugaacacccaggca

SEQ ID NO: 446978 - RNA, 22 nt, Human
cagcccugcuuccccgcuaguu

SEQ ID NO: 446979 - RNA, 20 nt, Human
ccugccuguguuugugauga

SEQ ID NO: 446980 - RNA, 22 nt, Human
aauccuggaauacaagagugaa

SEQ ID NO: 446981 - RNA, 22 nt, Human
auaaaaaggacagauguggucu

SEQ ID NO: 446982 - RNA, 22 nt, Human
uugcccugaagaacgucccaga

SEQ ID NO: 446983 - RNA, 22 nt, Human
aaaugcauuucacuaauguuuc

SEQ ID NO: 446984 - RNA, 22 nt, Human
gaguccaguuagugaggcuggg

SEQ ID NO: 446985 - RNA, 18 nt, Human
ugccauccccagucaagu

SEQ ID NO: 446986 - RNA, 22 nt, Human
aaguguauuuuuguacuaacau

SEQ ID NO: 446987 - RNA, 22 nt, Human
cugugggcugaaagugcucccg

SEQ ID NO: 446988 - RNA, 22 nt, Human
augaagcugaccuugucuugcu

SEQ ID NO: 446989 - RNA, 22 nt, Human
augcacaauuaggauauagcuu

SEQ ID NO: 446990 - RNA, 22 nt, Human
caggacagcugggccaccacca

SEQ ID NO: 446991 - RNA, 22 nt, Human
uuacaguaacauuuucagucug

SEQ ID NO: 446992 - RNA, 22 nt, Human
auuacagaagauaugcucaaca

SEQ ID NO: 446993 - RNA, 19 nt, Human
ugaggcacaugauaagaac

SEQ ID NO: 446994 - RNA, 22 nt, Human
uguguguguuuauaaaucuaaa

SEQ ID NO: 446995 - RNA, 22 nt, Human
ugcagcugacccacuccagucc

SEQ ID NO: 446996 - RNA, 22 nt, Human
ucaggaggccugaguagcucua

SEQ ID NO: 446997 - RNA, 22 nt, Human
ccugucagaugaaguaauugug

SEQ ID NO: 446998 - RNA, 22 nt, Human
auagaaauguauuuuggacuag

SEQ ID NO: 446999 - RNA, 22 nt, Human
cagaucuguaguaaaagaucuc

SEQ ID NO: 447000 - RNA, 22 nt, Human
ccugggcucaagugaugguccc

SEQ ID NO: 447001 - RNA, 22 nt, Human
gaggcagcaugguaccuuggag

SEQ ID NO: 447002 - RNA, 18 nt, Human
ccuuugcaaaggggguua

SEQ ID NO: 447003 - RNA, 22 nt, Human
uggagaugaacauggugauguu

SEQ ID NO: 447004 - RNA, 22 nt, Human
gaaaaugugucaucccuacugu

SEQ ID NO: 447005 - RNA, 22 nt, Human
ugguggcaacauugcuggagug

SEQ ID NO: 447006 - RNA, 20 nt, Human
uaacaguuguagaggguuuu

SEQ ID NO: 447007 - RNA, 22 nt, Human
cucuggcuuguuaaugcauauu

SEQ ID NO: 447008 - RNA, 22 nt, Human
aagccaaugauacgggugaucu

SEQ ID NO: 447009 - RNA, 22 nt, Human
ucuuugcaguggugaauaaaga

SEQ ID NO: 447010 - RNA, 22 nt, Human
ucaggaaauggacaucuuugcu

SEQ ID NO: 447011 - RNA, 22 nt, Human
ugacauaauaauccaaacauac

SEQ ID NO: 447012 - RNA, 22 nt, Human
gccugucugcgucacgcuuauu

SEQ ID NO: 447013 - RNA, 22 nt, Human
agaaaaggauugauggaucaga

SEQ ID NO: 447014 - RNA, 22 nt, Human
acugguacuguucugcggauca

SEQ ID NO: 447015 - RNA, 19 nt, Human
acagagcucucugcuucug

SEQ ID NO: 447016 - RNA, 22 nt, Human
augcuuuacgacaaaaaacuca

SEQ ID NO: 447017 - RNA, 22 nt, Human
cuacacaguucugccuaauggc

SEQ ID NO: 447018 - RNA, 21 nt, Human
ugcugccaucaugcagagaug

SEQ ID NO: 447019 - RNA, 22 nt, Human
uugcaaaugugaguuuagacug

SEQ ID NO: 447020 - RNA, 22 nt, Human
gcagcagcucagccgggcacug

SEQ ID NO: 447021 - RNA, 22 nt, Human
gcugccucaggcaccuccuggc

SEQ ID NO: 447022 - RNA, 22 nt, Human
uuuacagacaacuuaauagggg

SEQ ID NO: 447023 - RNA, 19 nt, Human
caagugaagccugggaugg

SEQ ID NO: 447024 - RNA, 22 nt, Human
augacccaagcucauggcuccc

SEQ ID NO: 447025 - RNA, 22 nt, Human
cagaacagucgccugcauggau

SEQ ID NO: 447026 - RNA, 22 nt, Human
gcaggacacagaugcaaggcca

SEQ ID NO: 447027 - RNA, 22 nt, Human
ucaggcuggggugcuaaggugu

SEQ ID NO: 447028 - RNA, 22 nt, Human
cccagccugugacagccguccu

SEQ ID NO: 447029 - RNA, 22 nt, Human
auuugaagaaaguuuucuagau

SEQ ID NO: 447030 - RNA, 23 nt, Human
acuuugcagagccccuugaaaca

SEQ ID NO: 447031 - RNA, 22 nt, Human
acacaggaacucugagaggugg

SEQ ID NO: 447032 - RNA, 22 nt, Human
aaggcagagauauucuugaucu

SEQ ID NO: 447033 - RNA, 22 nt, Human
caggaugagguagaggcagaua

SEQ ID NO: 447034 - RNA, 22 nt, Human
cagagcagggugcaccuugggc

SEQ ID NO: 447035 - RNA, 22 nt, Human
ugggcuggcccaccacaccucg

SEQ ID NO: 447036 - RNA, 22 nt, Human
ugucagugguagacccagaggu

SEQ ID NO: 447037 - RNA, 22 nt, Human
acaggggugcauggugcauggu

SEQ ID NO: 447038 - RNA, 22 nt, Human
cccauggcuuaggagggagugu

SEQ ID NO: 447039 - RNA, 22 nt, Human
ccuggccacucagguguggggc

SEQ ID NO: 447040 - RNA, 22 nt, Human
aagcuuuugacuugguagggaa

SEQ ID NO: 447041 - RNA, 22 nt, Human
aacaccuaaaaaucauuguuga

SEQ ID NO: 447042 - RNA, 22 nt, Human
aaaucacuuaaauggcuuauuu

SEQ ID NO: 447043 - RNA, 19 nt, Human
cagaggcaccagguauaga

SEQ ID NO: 447044 - RNA, 22 nt, Human
aaggcaggaugcggacccaucu

SEQ ID NO: 447045 - RNA, 22 nt, Human
ggcugccagugagugcagaccg

SEQ ID NO: 447046 - RNA, 22 nt, Human
aaggaagauauaucaagcuuaa

SEQ ID NO: 447047 - RNA, 22 nt, Human
gcauuauuaauagcugcaugag

SEQ ID NO: 447048 - RNA, 22 nt, Human
gucaauaucuugguuguacuau

SEQ ID NO: 447049 - RNA, 22 nt, Human
caugagauuugggaggggccag

SEQ ID NO: 447050 - RNA, 22 nt, Human
ucuaaauuacuuugggcaguau

SEQ ID NO: 447051 - RNA, 22 nt, Human
agggagccaggggccagcuauu

SEQ ID NO: 447052 - RNA, 22 nt, Human
ugcagccaucuuucuuggagga

SEQ ID NO: 447053 - RNA, 22 nt, Human
cacuuaagcaguuaauuuaucu

SEQ ID NO: 447054 - RNA, 19 nt, Human
auaaggcagugacuuuuuu

SEQ ID NO: 447055 - RNA, 22 nt, Human
ccccagcacuaccagaagccag

SEQ ID NO: 447056 - RNA, 22 nt, Human
aggacagcccuugagagcacau

SEQ ID NO: 447057 - RNA, 22 nt, Human
uacuauaaagucuuaaugaguc

SEQ ID NO: 447058 - RNA, 22 nt, Human
cccaggagguggagcuugcagu

SEQ ID NO: 447059 - RNA, 22 nt, Human
caguaugucuacuggacaaagu

SEQ ID NO: 447060 - RNA, 22 nt, Human
gccuuggcugaugugcgaauga

SEQ ID NO: 447061 - RNA, 21 nt, Human
cccuguguuccacagcagaca

SEQ ID NO: 447062 - RNA, 19 nt, Human
auuucaagagguuuauugg

SEQ ID NO: 447063 - RNA, 22 nt, Human
ggagaagaggagcuggaagccu

SEQ ID NO: 447064 - RNA, 22 nt, Human
ucauuuguugaacuuuagugcg

SEQ ID NO: 447065 - RNA, 22 nt, Human
ucaggaagggcucagucugugc

SEQ ID NO: 447066 - RNA, 19 nt, Human
cugugagucuuguggccuc

SEQ ID NO: 447067 - RNA, 22 nt, Human
auuuugaaaagcauuugaguaa

SEQ ID NO: 447068 - RNA, 21 nt, Human
agcaggaggcagucacagcuc

SEQ ID NO: 447069 - RNA, 19 nt, Human
agcagcuggagguggagug

SEQ ID NO: 447070 - RNA, 22 nt, Human
acaguuuuuucaacauuggaau

SEQ ID NO: 447071 - RNA, 22 nt, Human
ugugcacauucuaggacuagua

SEQ ID NO: 447072 - RNA, 22 nt, Human
agcugcucaggagagccagguc

SEQ ID NO: 447073 - RNA, 22 nt, Human
gcccucagaggacagcugacuu

SEQ ID NO: 447074 - RNA, 22 nt, Human
cagguccuggcaucaggcaggu

SEQ ID NO: 447075 - RNA, 22 nt, Human
ucccuggcugggggcugccuug

SEQ ID NO: 447076 - RNA, 22 nt, Human
uaaggcagcauaauuaggccac

SEQ ID NO: 447077 - RNA, 22 nt, Human
uuuaacauguaauugcugcuuu

SEQ ID NO: 447078 - RNA, 22 nt, Human
uggccagguugggcuuugcagc

SEQ ID NO: 447079 - RNA, 22 nt, Human
gccuggcuaguuagugucaggu

SEQ ID NO: 447080 - RNA, 22 nt, Human
aggguggagggagucccugagc

SEQ ID NO: 447081 - RNA, 22 nt, Human
caagggaagaggacagggaccu

SEQ ID NO: 447082 - RNA, 22 nt, Human
cacuucaaggaauaucuagaaa

SEQ ID NO: 447083 - RNA, 18 nt, Human
uaaaggaagugggagagg

SEQ ID NO: 447084 - RNA, 22 nt, Human
aggaaaaagaguugcugccuuc

SEQ ID NO: 447085 - RNA, 22 nt, Human
caucagugagccccuugaugag

SEQ ID NO: 447086 - RNA, 22 nt, Human
gacuguguccaugugcuggauu

SEQ ID NO: 447087 - RNA, 22 nt, Human
ggguccagcuacaucagggugg

SEQ ID NO: 447088 - RNA, 22 nt, Human
acucaacagggaacaagaucag

SEQ ID NO: 447089 - RNA, 22 nt, Human
cuggcuggucaucagcaguacg

SEQ ID NO: 447090 - RNA, 22 nt, Human
gaauuuuaucuuauuacuugca

SEQ ID NO: 447091 - RNA, 22 nt, Human
aaauaacuuaugaucgucuggc

SEQ ID NO: 447092 - RNA, 20 nt, Human
ugccuuggagcagccaaggu

SEQ ID NO: 447093 - RNA, 22 nt, Human
uuuucuccuuucuaggucacau

SEQ ID NO: 447094 - RNA, 19 nt, Human
ugcagccccuaccacauuc

SEQ ID NO: 447095 - RNA, 22 nt, Human
aacaugcaaagcuaugauguau

SEQ ID NO: 447096 - RNA, 22 nt, Human
aggacacagacugauugcagca

SEQ ID NO: 447097 - RNA, 22 nt, Human
gugggcuggacccuccugcucc

SEQ ID NO: 447098 - RNA, 22 nt, Human
ccaggaaagaggaagaacgcau

SEQ ID NO: 447099 - RNA, 22 nt, Human
uggaaaaacugagacuuagaca

SEQ ID NO: 447100 - RNA, 22 nt, Human
auaaaggcagaguagggaggaa

SEQ ID NO: 447101 - RNA, 22 nt, Human
cuggccuggucuggccucucca

SEQ ID NO: 447102 - RNA, 22 nt, Human
ucacuggucuuuggcuucucag

SEQ ID NO: 447103 - RNA, 22 nt, Human
cuccugagcucugaggaagcuu

SEQ ID NO: 447104 - RNA, 22 nt, Human
aggacugacuuuugccaugaaa

SEQ ID NO: 447105 - RNA, 22 nt, Human
uauguacaccggggaagguggg

SEQ ID NO: 447106 - RNA, 22 nt, Human
agcugccaucugaagaacugca

SEQ ID NO: 447107 - RNA, 22 nt, Human
ugcugucuguuuacuggcuaua

SEQ ID NO: 447108 - RNA, 22 nt, Human
cagggccacacggaagggaaca

SEQ ID NO: 447109 - RNA, 22 nt, Human
cagcugcccugccuugcccuua

SEQ ID NO: 447110 - RNA, 22 nt, Human
ugugugccagccuacgaggagc

SEQ ID NO: 447111 - RNA, 22 nt, Human
gggaccuggcaccuuugcucug

SEQ ID NO: 447112 - RNA, 22 nt, Human
ugcccacauggugccauggcca

SEQ ID NO: 447113 - RNA, 22 nt, Human
gcucccacgcaauucuuuucag

SEQ ID NO: 447114 - RNA, 22 nt, Human
cggcugagacggccauagacac

SEQ ID NO: 447115 - RNA, 21 nt, Human
uucuccccagcgaauccucgg

SEQ ID NO: 447116 - RNA, 22 nt, Human
ccugcagcuccggauuucuggg

SEQ ID NO: 447117 - RNA, 22 nt, Human
uuugaaagacagaauauuuuug

SEQ ID NO: 447118 - RNA, 22 nt, Human
cccugccuacaggguuuucuuu

SEQ ID NO: 447119 - RNA, 22 nt, Human
caugaagcacagcucucuuuuu

SEQ ID NO: 447120 - RNA, 22 nt, Human
cugcagcuauauuuucccacag

SEQ ID NO: 447121 - RNA, 22 nt, Human
ccugcaguuuguugugaccccg

SEQ ID NO: 447122 - RNA, 22 nt, Human
aagaagagaaaugugcugcugg

SEQ ID NO: 447123 - RNA, 22 nt, Human
cucugggcaccaaagagcagcu

SEQ ID NO: 447124 - RNA, 22 nt, Human
uauuuucuguggaggaccagau

SEQ ID NO: 447125 - RNA, 21 nt, Human
gcucagaguauugcacuguuu

SEQ ID NO: 447126 - RNA, 22 nt, Human
ggggugggguuacucauugugc

SEQ ID NO: 447127 - RNA, 22 nt, Human
uggcagagaaccugggcuuugu

SEQ ID NO: 447128 - RNA, 22 nt, Human
ggcagggagagcaugcugauaa

SEQ ID NO: 447129 - RNA, 22 nt, Human
aggcugagcuggcccuugaaau

SEQ ID NO: 447130 - RNA, 23 nt, Human
cugaggccugcugcguucagguu

SEQ ID NO: 447131 - RNA, 22 nt, Human
uggcacuggaaucguagccuug

SEQ ID NO: 447132 - RNA, 22 nt, Human
caguggagaggcaugcuuggca

SEQ ID NO: 447133 - RNA, 22 nt, Human
cagagcaugaauaaaaguuaca

SEQ ID NO: 447134 - RNA, 22 nt, Human
aggcagaggagaaugaucuucc

SEQ ID NO: 447135 - RNA, 22 nt, Human
guaguucugcagugucaccuga

SEQ ID NO: 447136 - RNA, 22 nt, Human
gguccuggaaauugacggaaag

SEQ ID NO: 447137 - RNA, 22 nt, Human
acaugauauuaaugucuuauuu

SEQ ID NO: 447138 - RNA, 17 nt, Human
aaaauucuguaaagagg

SEQ ID NO: 447139 - RNA, 18 nt, Human
aggcacuggaauuaaggg

SEQ ID NO: 447140 - RNA, 22 nt, Human
cugccuggccugaucuccacgc

SEQ ID NO: 447141 - RNA, 22 nt, Human
gggggcucugacucccucagcu

SEQ ID NO: 447142 - RNA, 20 nt, Human
auuccauaguuggcacuuuu

SEQ ID NO: 447143 - RNA, 22 nt, Human
ucauguaaguauagaaagcagu

SEQ ID NO: 447144 - RNA, 22 nt, Human
auggacaggcugagcuuccuca

SEQ ID NO: 447145 - RNA, 22 nt, Human
gcagauggacuguaugaccuga

SEQ ID NO: 447146 - RNA, 22 nt, Human
gcuuccucgcugggcagaggca

SEQ ID NO: 447147 - RNA, 22 nt, Human
uaaacaugugagugugcauaua

SEQ ID NO: 447148 - RNA, 22 nt, Human
ugggaccugcuccuggaaugag

SEQ ID NO: 447149 - RNA, 22 nt, Human
agcugaggcauggacaggcugc

SEQ ID NO: 447150 - RNA, 22 nt, Human
cagcccuguccagcagagggug

SEQ ID NO: 447151 - RNA, 22 nt, Human
gcagaagcuguucgaaggccgc

SEQ ID NO: 447152 - RNA, 22 nt, Human
gugcaggagguaacauagcaaa

SEQ ID NO: 447153 - RNA, 22 nt, Human
ggcugcuggcauugagguaggu

SEQ ID NO: 447154 - RNA, 22 nt, Human
agcugguggauuaugcuguaca

SEQ ID NO: 447155 - RNA, 17 nt, Human
cucugcagugcauggcu

SEQ ID NO: 447156 - RNA, 22 nt, Human
guauuuuaagugacuacuaggu

SEQ ID NO: 447157 - RNA, 23 nt, Human
aaagacugcugagaauuuuagga

SEQ ID NO: 447158 - RNA, 22 nt, Human
cuggcucagugccuucagaagu

SEQ ID NO: 447159 - RNA, 22 nt, Human
cccuggcaugcaugucccuggc

SEQ ID NO: 447160 - RNA, 22 nt, Human
gggcucucgauuagacccuggg

SEQ ID NO: 447161 - RNA, 22 nt, Human
agugaaauagcauuuaugaagc

SEQ ID NO: 447162 - RNA, 22 nt, Human
gggaggucagggugccugcugg

SEQ ID NO: 447163 - RNA, 22 nt, Human
acauuucugucuuagggacugu

SEQ ID NO: 447164 - RNA, 22 nt, Human
ugccaggggaccuagggauguc

SEQ ID NO: 447165 - RNA, 22 nt, Human
ucagccagguaauguggagaug

SEQ ID NO: 447166 - RNA, 22 nt, Human
cagagccugccaccuuucuccc

SEQ ID NO: 447167 - RNA, 22 nt, Human
uggcagcuguguccagguagaa

SEQ ID NO: 447168 - RNA, 22 nt, Human
ugggaggaaugucacugagcca

SEQ ID NO: 447169 - RNA, 22 nt, Human
aggcagcagccacaaggccuga

SEQ ID NO: 447170 - RNA, 21 nt, Human
uaaaacuguaacuuuguccug

SEQ ID NO: 447171 - RNA, 22 nt, Human
uccagccaugacucggacagug

SEQ ID NO: 447172 - RNA, 22 nt, Human
gcaugggcuuucucagaguucu

SEQ ID NO: 447173 - RNA, 17 nt, Human
ugcauuguaggcuagcc

SEQ ID NO: 447174 - RNA, 22 nt, Human
agccacagcccacaggacucuu

SEQ ID NO: 447175 - RNA, 22 nt, Human
gaacaguaaauuuaugcagcac

SEQ ID NO: 447176 - RNA, 22 nt, Human
agaggcaggaagagcugauuuu

SEQ ID NO: 447177 - RNA, 22 nt, Human
agggcagccugagugcuggccc

SEQ ID NO: 447178 - RNA, 22 nt, Human
cagagcggccacuagagggcgc

SEQ ID NO: 447179 - RNA, 22 nt, Human
cugaggcucugggugucacugu

SEQ ID NO: 447180 - RNA, 22 nt, Human
aggaaaaucgagucuggaggca

SEQ ID NO: 447181 - RNA, 22 nt, Human
uugaucagguugcuguggugua

SEQ ID NO: 447182 - RNA, 22 nt, Human
ggagaagcaggugcuuuggguc

SEQ ID NO: 447183 - RNA, 22 nt, Human
uauuuugacuauuaaaccaaca

SEQ ID NO: 447184 - RNA, 22 nt, Human
aagggagguaaagcuauuuaaa

SEQ ID NO: 447185 - RNA, 22 nt, Human
ucaucaguguccuuaucacuua

SEQ ID NO: 447186 - RNA, 22 nt, Human
uggccugguccuugucaaggca

SEQ ID NO: 447187 - RNA, 22 nt, Human
agcuuuguggcuuugcaagacu

SEQ ID NO: 447188 - RNA, 22 nt, Human
ucauuacagagauauaaucuac

SEQ ID NO: 447189 - RNA, 22 nt, Human
agccuggaauuaaggaaaugca

SEQ ID NO: 447190 - RNA, 22 nt, Human
aaggcauagucuuuaaguucug

SEQ ID NO: 447191 - RNA, 22 nt, Human
ugccaaggguaugggcaagaua

SEQ ID NO: 447192 - RNA, 22 nt, Human
uuucacauuuuauacuuaagcc

SEQ ID NO: 447193 - RNA, 22 nt, Human
uggugccuugggccuacagcgc

SEQ ID NO: 447194 - RNA, 22 nt, Human
uugcugaaguuaaugcuugcaa

SEQ ID NO: 447195 - RNA, 22 nt, Human
auguuacaauucaaaaugcugc

SEQ ID NO: 447196 - RNA, 22 nt, Human
aaaugugucaguuucauucucu

SEQ ID NO: 447197 - RNA, 22 nt, Human
aguguguguuugggcgguuuau

SEQ ID NO: 447198 - RNA, 22 nt, Human
uggcagcuccuggggccagcac

SEQ ID NO: 447199 - RNA, 22 nt, Human
cccugagagugagugccaccuu

SEQ ID NO: 447200 - RNA, 22 nt, Human
ucacagacacagggagaagcau

SEQ ID NO: 447201 - RNA, 22 nt, Human
gaaggcugucagagaggagggc

SEQ ID NO: 447202 - RNA, 22 nt, Human
ccagaagagaucacaguucuug

SEQ ID NO: 447203 - RNA, 22 nt, Human
cugggcagagcuaacaccugag

SEQ ID NO: 447204 - RNA, 22 nt, Human
gcugaagcugcagcaggaggaa

SEQ ID NO: 447205 - RNA, 22 nt, Human
agcucugacauugauucucagc

SEQ ID NO: 447206 - RNA, 22 nt, Human
ccagucuggcaggagggggaac

SEQ ID NO: 447207 - RNA, 22 nt, Human
accugagcaugccaggagagug

SEQ ID NO: 447208 - RNA, 22 nt, Human
ucugugaacaucacauugacag

SEQ ID NO: 447209 - RNA, 22 nt, Human
gaggcugguucugaaguacugu

SEQ ID NO: 447210 - RNA, 22 nt, Human
uacaagaaauuucugcauauau

SEQ ID NO: 447211 - RNA, 22 nt, Human
cuggagcuaauaauccaucuga

SEQ ID NO: 447212 - RNA, 22 nt, Human
gcugagcucccagcaguaucug

SEQ ID NO: 447213 - RNA, 22 nt, Human
cugcugugaguuuggaggucua

SEQ ID NO: 447214 - RNA, 22 nt, Human
ucucaggagccacagcgggagu

SEQ ID NO: 447215 - RNA, 22 nt, Human
ggcugccugaggcagugagaga

SEQ ID NO: 447216 - RNA, 21 nt, Human
gcagccacugccuucaacaau

SEQ ID NO: 447217 - RNA, 22 nt, Human
ucugggcucugucagcaccucu

SEQ ID NO: 447218 - RNA, 22 nt, Human
ugugugacccccagugaagccu

SEQ ID NO: 447219 - RNA, 22 nt, Human
caggcugccgugaagcaggccu

SEQ ID NO: 447220 - RNA, 22 nt, Human
augcaacaaaugcuacgaaucg

SEQ ID NO: 447221 - RNA, 22 nt, Human
auguccuuccauuuugaucugu

SEQ ID NO: 447222 - RNA, 22 nt, Human
uaaguucaaugaacucaguucu

SEQ ID NO: 447223 - RNA, 22 nt, Human
aucaaguuuucuuaguugacug

SEQ ID NO: 447224 - RNA, 22 nt, Human
uuagaaaauuugcuucuuugga

SEQ ID NO: 447225 - RNA, 22 nt, Human
cucacugucuguacuagcugau

SEQ ID NO: 447226 - RNA, 22 nt, Human
ugugaaagcaagucuaguucuc

SEQ ID NO: 447227 - RNA, 22 nt, Human
acacaucuuagacugaaauaug

SEQ ID NO: 447228 - RNA, 22 nt, Human
gggaccuggacaugugugugcu

SEQ ID NO: 447229 - RNA, 22 nt, Human
ccagccaguccagcauuggugu

SEQ ID NO: 447230 - RNA, 18 nt, Human
ucacagugcucuugccua

SEQ ID NO: 447231 - RNA, 20 nt, Human
ugaaggccagcagcauaggg

SEQ ID NO: 447232 - RNA, 22 nt, Human
ccuggccuccuggccuucucau

SEQ ID NO: 447233 - RNA, 22 nt, Human
acagagccaaaaggacauagua

SEQ ID NO: 447234 - RNA, 20 nt, Human
aggcucagcugagcucuugg

SEQ ID NO: 447235 - RNA, 22 nt, Human
aggcugaggcuggcagcuccag

SEQ ID NO: 447236 - RNA, 22 nt, Human
cugagagccuccuguuggcuag

SEQ ID NO: 447237 - RNA, 22 nt, Human
ugagccuguccugugcauguga

SEQ ID NO: 447238 - RNA, 22 nt, Human
cacaugggugugccuggaggaa

SEQ ID NO: 447239 - RNA, 22 nt, Human
auagucuuagucuauaguuuug

SEQ ID NO: 447240 - RNA, 22 nt, Human
cagagggcacaugguuuccuca

SEQ ID NO: 447241 - RNA, 23 nt, Human
uucuuauuuacuuuggaaucucc

SEQ ID NO: 447242 - RNA, 22 nt, Human
cugccacuagcuuucacaucuu

SEQ ID NO: 447243 - RNA, 22 nt, Human
gaaucauuggaaccacauccaa

SEQ ID NO: 447244 - RNA, 22 nt, Human
uuugaaaauuuaagugcuacac

SEQ ID NO: 447245 - RNA, 19 nt, Human
ugaaauggcaguugcuaaa

SEQ ID NO: 447246 - RNA, 22 nt, Human
cauugcacuucugcuuuuccuc

SEQ ID NO: 447247 - RNA, 22 nt, Human
uccaguggcacuggagacuaga

SEQ ID NO: 447248 - RNA, 22 nt, Human
cugagccaaggggacagugaca

SEQ ID NO: 447249 - RNA, 22 nt, Human
gccucugcugcaagccugguug

SEQ ID NO: 447250 - RNA, 22 nt, Human
caggcacucauucagagaggug

SEQ ID NO: 447251 - RNA, 22 nt, Human
cugucuguucagauucauuacu

SEQ ID NO: 447252 - RNA, 22 nt, Human
ggcaggugcaccugagccaucu

SEQ ID NO: 447253 - RNA, 22 nt, Human
gccacccugagcugggccaggg

SEQ ID NO: 447254 - RNA, 22 nt, Human
ccagaggacuugggggcugaau

SEQ ID NO: 447255 - RNA, 22 nt, Human
ugagccuggcggaagcagcgug

SEQ ID NO: 447256 - RNA, 22 nt, Human
ucgggguagacgccagcucgga

SEQ ID NO: 447257 - RNA, 22 nt, Human
cucagagcccaggguacacccg

SEQ ID NO: 447258 - RNA, 19 nt, Human
cuguggcugaccucuggcc

SEQ ID NO: 447259 - RNA, 23 nt, Human
ucagugauguugaaccuagcagu

SEQ ID NO: 447260 - RNA, 22 nt, Human
ggcagcugaccuagcaccaucc

SEQ ID NO: 447261 - RNA, 22 nt, Human
ugaagccaucccucagauggcc

SEQ ID NO: 447262 - RNA, 22 nt, Human
gaagaacacuucaugauucauu

SEQ ID NO: 447263 - RNA, 22 nt, Human
uccucaggauguggaguagaau

SEQ ID NO: 447264 - RNA, 22 nt, Human
agcagggcucugccaugggccc

SEQ ID NO: 447265 - RNA, 22 nt, Human
gaauuguacgcuuuacauaggu

SEQ ID NO: 447266 - RNA, 22 nt, Human
ugagccaggcucaagugauccu

SEQ ID NO: 447267 - RNA, 22 nt, Human
ucagacaguuugcagugugccu

SEQ ID NO: 447268 - RNA, 22 nt, Human
ugacagggugauuaugagagcu

SEQ ID NO: 447269 - RNA, 22 nt, Human
cuguugucuccucucagauuau

SEQ ID NO: 447270 - RNA, 22 nt, Human
ugggccuguggcuuggcucuag

SEQ ID NO: 447271 - RNA, 22 nt, Human
gagcacagccaaaguaagaagg

SEQ ID NO: 447272 - RNA, 22 nt, Human
uaaaucucacuggguauauugg

SEQ ID NO: 447273 - RNA, 22 nt, Human
uuucaauguaacauuuccaggc

SEQ ID NO: 447274 - RNA, 22 nt, Human
agcagccauccuuagagaaaga

SEQ ID NO: 447275 - RNA, 22 nt, Human
aggcugcagaacagucaggugc

SEQ ID NO: 447276 - RNA, 22 nt, Human
aagcagccucauuugugguaag

SEQ ID NO: 447277 - RNA, 22 nt, Human
acccaggaggcagagguugcag

SEQ ID NO: 447278 - RNA, 22 nt, Human
aagccagguuccauggaggagc

SEQ ID NO: 447279 - RNA, 22 nt, Human
cucaggaggaggaaguucauug

SEQ ID NO: 447280 - RNA, 22 nt, Human
gagccugccucuagucucuaga

SEQ ID NO: 447281 - RNA, 22 nt, Human
agguggggccaaaugcuacagu

SEQ ID NO: 447282 - RNA, 22 nt, Human
ugcagggcagcuagggagcuuu

SEQ ID NO: 447283 - RNA, 19 nt, Human
cagagcugcuggccucguc

SEQ ID NO: 447284 - RNA, 22 nt, Human
cagcaggcccagaguuucaugg

SEQ ID NO: 447285 - RNA, 22 nt, Human
aguguuguaugggaugacugcu

SEQ ID NO: 447286 - RNA, 22 nt, Human
gcagggcagaccuccagccuau

SEQ ID NO: 447287 - RNA, 22 nt, Human
gccagguguaguggccacaccu

SEQ ID NO: 447288 - RNA, 22 nt, Human
ucagagaugcagugccaccuac

SEQ ID NO: 447289 - RNA, 22 nt, Human
agucuucccugugccagagugu

SEQ ID NO: 447290 - RNA, 22 nt, Human
cuggcugcaggaugaggcugcc

SEQ ID NO: 447291 - RNA, 22 nt, Human
aggugucuucagggugagacag

SEQ ID NO: 447292 - RNA, 22 nt, Human
uacauauuugucuuuguacugu

SEQ ID NO: 447293 - RNA, 22 nt, Human
ggagaugguggaagcuggugca

SEQ ID NO: 447294 - RNA, 17 nt, Human
gauuuccugaaguucuu

SEQ ID NO: 447295 - RNA, 22 nt, Human
gccagagcaugcacugccugca

SEQ ID NO: 447296 - RNA, 22 nt, Human
cacauugaaaugacccaauaau

SEQ ID NO: 447297 - RNA, 22 nt, Human
cugaggugcuauggaggauacg

SEQ ID NO: 447298 - RNA, 18 nt, Human
agcagagcccaugcauuc

SEQ ID NO: 447299 - RNA, 22 nt, Human
auguaacauugaauuauauagu

SEQ ID NO: 447300 - RNA, 22 nt, Human
cagccugcucucagauguugag

SEQ ID NO: 447301 - RNA, 22 nt, Human
ggguguccugugccaagcuggg

SEQ ID NO: 447302 - RNA, 22 nt, Human
aagacugugucuauggcuacuc

SEQ ID NO: 447303 - RNA, 22 nt, Human
ugcauuaucuuuaauguucuca

SEQ ID NO: 447304 - RNA, 22 nt, Human
uucuuuccaaccagauauuggu

SEQ ID NO: 447305 - RNA, 22 nt, Human
uauucuugucuuuuccagaaau

SEQ ID NO: 447306 - RNA, 22 nt, Human
auaaggcagaaauagggaaagu

SEQ ID NO: 447307 - RNA, 22 nt, Human
ucaggcacugcuuucugauaug

SEQ ID NO: 447308 - RNA, 22 nt, Human
guucuccauucagcuuccugug

SEQ ID NO: 447309 - RNA, 22 nt, Human
cagagcuggggacuguuggaug

SEQ ID NO: 447310 - RNA, 22 nt, Human
ucucagagcaucauuuucuuag

SEQ ID NO: 447311 - RNA, 22 nt, Human
agaauucuguucuucgggugug

SEQ ID NO: 447312 - RNA, 22 nt, Human
cagguggggcagcugugggagc

SEQ ID NO: 447313 - RNA, 22 nt, Human
acugcagacucuacaguuauaa

SEQ ID NO: 447314 - RNA, 22 nt, Human
gcagcuuucugcaaugucaucc

SEQ ID NO: 447315 - RNA, 22 nt, Human
gccccucccagucaggagcacu

SEQ ID NO: 447316 - RNA, 22 nt, Human
ccugugugcugaugacgacaga

SEQ ID NO: 447317 - RNA, 22 nt, Human
cacagguguaugaauaugucca

SEQ ID NO: 447318 - RNA, 22 nt, Human
gugcagggcuggcaccggaggc

SEQ ID NO: 447319 - RNA, 19 nt, Human
uggcagaggacaaggacuu

SEQ ID NO: 447320 - RNA, 22 nt, Human
uaaauguguguagccaucugug

SEQ ID NO: 447321 - RNA, 22 nt, Human
aagcccagcugaaagcauuuuu

SEQ ID NO: 447322 - RNA, 22 nt, Human
agugucauuccagggacccucg

SEQ ID NO: 447323 - RNA, 22 nt, Human
ugaugaauaaacuugagaguca

SEQ ID NO: 447324 - RNA, 22 nt, Human
agauacauuguucuaagcauug

SEQ ID NO: 447325 - RNA, 22 nt, Human
gaacuguaguuaauacuacaca

SEQ ID NO: 447326 - RNA, 22 nt, Human
acagugugguuugagcacuggg

SEQ ID NO: 447327 - RNA, 22 nt, Human
agcagggccucuggcacugguc

SEQ ID NO: 447328 - RNA, 22 nt, Human
ccagcuccgggaguugcugcug

SEQ ID NO: 447329 - RNA, 22 nt, Human
ccaaggcuucccagagaugcuc

SEQ ID NO: 447330 - RNA, 22 nt, Human
agauacauugaguuuccuccug

SEQ ID NO: 447331 - RNA, 22 nt, Human
cuuauuuugcugaugacccagg

SEQ ID NO: 447332 - RNA, 22 nt, Human
ugcagaagaaaacagcugugug

SEQ ID NO: 447333 - RNA, 22 nt, Human
gaggcgagaagcuggagauggu

SEQ ID NO: 447334 - RNA, 22 nt, Human
acauuguagacuuuucauaugu

SEQ ID NO: 447335 - RNA, 21 nt, Human
agccugggaggcggagguugc

SEQ ID NO: 447336 - RNA, 22 nt, Human
uugcucuguaauaaucuggggu

SEQ ID NO: 447337 - RNA, 22 nt, Human
ccugggaggcugugggucugcu

SEQ ID NO: 447338 - RNA, 22 nt, Human
caggugccucaggaugagacaa

SEQ ID NO: 447339 - RNA, 22 nt, Human
uccuucagaaaaccucagucuu

SEQ ID NO: 447340 - RNA, 22 nt, Human
ccugucuggccuuccacggggg

SEQ ID NO: 447341 - RNA, 22 nt, Human
agcagggcuuugucucugugaa

SEQ ID NO: 447342 - RNA, 22 nt, Human
ugcagcagguuccaaaggguua

SEQ ID NO: 447343 - RNA, 22 nt, Human
ucagaggaauaaugcugcauuu

SEQ ID NO: 447344 - RNA, 22 nt, Human
aguggagacaggacagucgaua

SEQ ID NO: 447345 - RNA, 22 nt, Human
ggcccuguuagagcucccacaa

SEQ ID NO: 447346 - RNA, 22 nt, Human
uggcucagcuuuccccaucugg

SEQ ID NO: 447347 - RNA, 21 nt, Human
cagaggccucaugcucugugc

SEQ ID NO: 447348 - RNA, 22 nt, Human
gcucuggaagcaucugagagga

SEQ ID NO: 447349 - RNA, 22 nt, Human
gcccagcuggcuuccagcacau

SEQ ID NO: 447350 - RNA, 19 nt, Human
ccugggaggcggagguugc

SEQ ID NO: 447351 - RNA, 22 nt, Human
gcccugugcgacucuagagguu

SEQ ID NO: 447352 - RNA, 22 nt, Human
cagagcuguugcggggcuuggc

SEQ ID NO: 447353 - RNA, 19 nt, Human
acauggcaucccaggaggu

SEQ ID NO: 447354 - RNA, 19 nt, Human
uuacaucugcaacacuggu

SEQ ID NO: 447355 - RNA, 22 nt, Human
auauuugucaauucacuguuca

SEQ ID NO: 447356 - RNA, 22 nt, Human
gcuuuuucaaaugaaagcuggu

SEQ ID NO: 447357 - RNA, 22 nt, Human
cacagcugaaguagccaugugg

SEQ ID NO: 447358 - RNA, 22 nt, Human
aaagggcugucaaauaagcaac

SEQ ID NO: 447359 - RNA, 22 nt, Human
ggggcagagagaaggaagcuug

SEQ ID NO: 447360 - RNA, 22 nt, Human
uguguugugacauucuuggaug

SEQ ID NO: 447361 - RNA, 22 nt, Human
cuuggucauuuggggcugcuau

SEQ ID NO: 447362 - RNA, 22 nt, Human
ucuggcuccaccuccuuuacua

SEQ ID NO: 447363 - RNA, 22 nt, Human
gcagagccaggcuggggcaggu

SEQ ID NO: 447364 - RNA, 22 nt, Human
cagagccaaaccucagggcccg

SEQ ID NO: 447365 - RNA, 22 nt, Human
augaggcaggauuaagcuauca

SEQ ID NO: 447366 - RNA, 22 nt, Human
uaaggaaagugccaugauuucu

SEQ ID NO: 447367 - RNA, 22 nt, Human
ugugccugaguuggcugaguac

SEQ ID NO: 447368 - RNA, 22 nt, Human
cagcccagcagggucuggcccu

SEQ ID NO: 447369 - RNA, 22 nt, Human
acauguuagaaaugcagaaucu

SEQ ID NO: 447370 - RNA, 22 nt, Human
gaaggcugagcagacaggccaa

SEQ ID NO: 447371 - RNA, 22 nt, Human
aaugggaggauuuucucucuug

SEQ ID NO: 447372 - RNA, 23 nt, Human
gaggcagcuccugcagugcccug

SEQ ID NO: 447373 - RNA, 21 nt, Human
cacuauuuauauaugccagcu

SEQ ID NO: 447374 - RNA, 22 nt, Human
cagaaauguucuaaugauucag

SEQ ID NO: 447375 - RNA, 22 nt, Human
ccugaggggcugcaggccagcu

SEQ ID NO: 447376 - RNA, 21 nt, Human
agaauaaugguaucauuugcu

SEQ ID NO: 447377 - RNA, 22 nt, Human
ugagguggcuagggaggcacuc

SEQ ID NO: 447378 - RNA, 22 nt, Human
cacugcuuucacaguuuguucc

SEQ ID NO: 447379 - RNA, 22 nt, Human
gaggcucagagaagucauggua

SEQ ID NO: 447380 - RNA, 22 nt, Human
cauuucuguacauguuuuggug

SEQ ID NO: 447381 - RNA, 22 nt, Human
cuggcagguuuggugucuggug

SEQ ID NO: 447382 - RNA, 20 nt, Human
cuuugccuauucucugccug

SEQ ID NO: 447383 - RNA, 22 nt, Human
cccugcagccuugcaugccuuc

SEQ ID NO: 447384 - RNA, 22 nt, Human
augaaaaguucgaucuagaagg

SEQ ID NO: 447385 - RNA, 23 nt, Human
uugaaagguagcuggcagcuaga

SEQ ID NO: 447386 - RNA, 22 nt, Human
ucugggugaugaaaugcacugu

SEQ ID NO: 447387 - RNA, 22 nt, Human
ugcaggugguuuggacacugcu

SEQ ID NO: 447388 - RNA, 22 nt, Human
gggacagacccaugggccaggu

SEQ ID NO: 447389 - RNA, 21 nt, Human
gcucuuggaaggggcucagcu

SEQ ID NO: 447390 - RNA, 22 nt, Human
auguccagaguguccuggaaag

SEQ ID NO: 447391 - RNA, 20 nt, Human
cucaguguggccugaguguu

SEQ ID NO: 447392 - RNA, 22 nt, Human
uagggcaguuauaacauuagug

SEQ ID NO: 447393 - RNA, 22 nt, Human
ggcugccuucagacuccagcuu

SEQ ID NO: 447394 - RNA, 22 nt, Human
agugcauauaugaagaguauga

SEQ ID NO: 447395 - RNA, 22 nt, Human
ugggcagauguggcucuccuug

SEQ ID NO: 447396 - RNA, 22 nt, Human
gagggaccccaggcuggcccuu

SEQ ID NO: 447397 - RNA, 22 nt, Human
uugcaaaggggaauaaagcaau

SEQ ID NO: 447398 - RNA, 22 nt, Human
gaggaguguauuccacaccacu

SEQ ID NO: 447399 - RNA, 22 nt, Human
gagggcugugaaggagcggguu

SEQ ID NO: 447400 - RNA, 22 nt, Human
uggagaaggccggccaggagug

SEQ ID NO: 447401 - RNA, 22 nt, Human
uccaugccaggcagucgaugca

SEQ ID NO: 447402 - RNA, 22 nt, Human
gccagcagggcccaaaugcugg

SEQ ID NO: 447403 - RNA, 22 nt, Human
gggagccacaguuuauagugau

SEQ ID NO: 447404 - RNA, 22 nt, Human
auguuuuauauuuugcagcagu

SEQ ID NO: 447405 - RNA, 22 nt, Human
ggcugagcacuuuaggcaggag

SEQ ID NO: 447406 - RNA, 22 nt, Human
uucuacacucacccagcuguaa

SEQ ID NO: 447407 - RNA, 22 nt, Human
cagccagguaugggcgugcggg

SEQ ID NO: 447408 - RNA, 22 nt, Human
aaguaugacauuuaagacaauu

SEQ ID NO: 447409 - RNA, 22 nt, Human
gcaggagagucugugccagguu

SEQ ID NO: 447410 - RNA, 22 nt, Human
ucaacacuauccaggcaaucuu

SEQ ID NO: 447411 - RNA, 20 nt, Human
caggccagagguuugauggc

SEQ ID NO: 447412 - RNA, 22 nt, Human
cauucugugauucuaaaucccu

SEQ ID NO: 447413 - RNA, 22 nt, Human
ucagggcaaugucccucagaag

SEQ ID NO: 447414 - RNA, 23 nt, Human
cagaggcaucggauucaacauca

SEQ ID NO: 447415 - RNA, 19 nt, Human
uuagggacaugaauucuag

SEQ ID NO: 447416 - RNA, 22 nt, Human
agagcccucucauuggcuuauu

SEQ ID NO: 447417 - RNA, 23 nt, Human
gccugggacucaggaggagcuca

SEQ ID NO: 447418 - RNA, 18 nt, Human
cauuaugugguuauagaa

SEQ ID NO: 447419 - RNA, 22 nt, Human
ggagagagaugccgccuugcuc

SEQ ID NO: 447420 - RNA, 22 nt, Human
ccaggcucugagccucacucuu

SEQ ID NO: 447421 - RNA, 22 nt, Human
uuucuucucgacaccuuauccc

SEQ ID NO: 447422 - RNA, 22 nt, Human
ucagaggucccuagcaggagug

SEQ ID NO: 447423 - RNA, 22 nt, Human
gagagcugucagcguagcaccg

SEQ ID NO: 447424 - RNA, 22 nt, Human
ccagagaguaucauggagagua

SEQ ID NO: 447425 - RNA, 22 nt, Human
gugggcagugguuugcgcgguc

SEQ ID NO: 447426 - RNA, 22 nt, Human
gaugcaggauagcuucacccag

SEQ ID NO: 447427 - RNA, 22 nt, Human
aaggugaaacuggaagcuggcc

SEQ ID NO: 447428 - RNA, 22 nt, Human
agugugaguaauucagggaggg

SEQ ID NO: 447429 - RNA, 22 nt, Human
cugaggcucccucgggucugcu

SEQ ID NO: 447430 - RNA, 22 nt, Human
ugcuuaauauugugauguaaua

SEQ ID NO: 447431 - RNA, 22 nt, Human
uuguggaaauacagacuccaag

SEQ ID NO: 447432 - RNA, 22 nt, Human
cugcaggcugagcgccugccgg

SEQ ID NO: 447433 - RNA, 22 nt, Human
gaggcucagagggagcaugguc

SEQ ID NO: 447434 - RNA, 21 nt, Human
cgggcuggccgggcccucacc

SEQ ID NO: 447435 - RNA, 22 nt, Human
ugggcuccguugccuggggcag

SEQ ID NO: 447436 - RNA, 22 nt, Human
aaguaaaagcuuuaccaugcgc

SEQ ID NO: 447437 - RNA, 22 nt, Human
uucucagugaaguuuagaacau

SEQ ID NO: 447438 - RNA, 17 nt, Human
ugaagaugcauggcagc

SEQ ID NO: 447439 - RNA, 22 nt, Human
cucuguccuaugcuugauagaa

SEQ ID NO: 447440 - RNA, 22 nt, Human
accucugcaguagggcugugcc

SEQ ID NO: 447441 - RNA, 22 nt, Human
acuguacaaccucugccccugu

SEQ ID NO: 447442 - RNA, 22 nt, Human
gagaaagauggaaucuuacagg

SEQ ID NO: 447443 - RNA, 22 nt, Human
cacccagcauuggcuaagagag

SEQ ID NO: 447444 - RNA, 22 nt, Human
ugcuggaggaguuuacuguggc

SEQ ID NO: 447445 - RNA, 22 nt, Human
cccagcucaucaggagccgccc

SEQ ID NO: 447446 - RNA, 22 nt, Human
aaaggugacugcagcagcuauu

SEQ ID NO: 447447 - RNA, 22 nt, Human
ucagcuccucaugcaggggaua

SEQ ID NO: 447448 - RNA, 20 nt, Human
agugucugggccucaggccc

SEQ ID NO: 447449 - RNA, 20 nt, Human
gugcaauggcgcaaucucgg

SEQ ID NO: 447450 - RNA, 22 nt, Human
gucccuggucuaccguggcuuc

SEQ ID NO: 447451 - RNA, 22 nt, Human
ugguggccuugauggcaucugc

SEQ ID NO: 447452 - RNA, 22 nt, Human
cugggguggauggguccaaguu

SEQ ID NO: 447453 - RNA, 23 nt, Human
cacugcagcguggucuggcagga

SEQ ID NO: 447454 - RNA, 22 nt, Human
gcuccuggucuggagcuucaag

SEQ ID NO: 447455 - RNA, 20 nt, Human
cauuuguuagcuuucuacug

SEQ ID NO: 447456 - RNA, 22 nt, Human
aagacagagggaagcaaugaug

SEQ ID NO: 447457 - RNA, 22 nt, Human
gagcccuccauggagccaggca

SEQ ID NO: 447458 - RNA, 23 nt, Human
agucaguguaaguuuggaaugca

SEQ ID NO: 447459 - RNA, 22 nt, Human
cccaggcacacugaagugacau

SEQ ID NO: 447460 - RNA, 19 nt, Human
ugcucauggggacuucucc

SEQ ID NO: 447461 - RNA, 22 nt, Human
accccaagacaguagaagagaa

SEQ ID NO: 447462 - RNA, 22 nt, Human
cucugcauuuuaacagaugauu

SEQ ID NO: 447463 - RNA, 22 nt, Human
uuguuucaggaugguuuguuac

SEQ ID NO: 447464 - RNA, 22 nt, Human
aggcugcaggucugggucaugu

SEQ ID NO: 447465 - RNA, 22 nt, Human
agaguccaugaagacagcugag

SEQ ID NO: 447466 - RNA, 22 nt, Human
aggcugcagugcagguaggauu

SEQ ID NO: 447467 - RNA, 22 nt, Human
cagcuccugcagcugcugccgu

SEQ ID NO: 447468 - RNA, 22 nt, Human
gcauggcaagaucaggagacca

SEQ ID NO: 447469 - RNA, 22 nt, Human
ccagcugagaaguguaaaguga

SEQ ID NO: 447470 - RNA, 22 nt, Human
agcacaggaccaaggaagcugu

SEQ ID NO: 447471 - RNA, 22 nt, Human
ugccaggcugaacagggucuua

SEQ ID NO: 447472 - RNA, 22 nt, Human
gucagcaggguccccuugagug

SEQ ID NO: 447473 - RNA, 22 nt, Human
aggcagaaaauagucauccaaa

SEQ ID NO: 447474 - RNA, 22 nt, Human
cucugcaggggaggcaugcacu

SEQ ID NO: 447475 - RNA, 22 nt, Human
uguggccuugcagccuggaggu

SEQ ID NO: 447476 - RNA, 22 nt, Human
uggaccugcuggaugggcaggu

SEQ ID NO: 447477 - RNA, 22 nt, Human
cccugcagaaccacagacaaac

SEQ ID NO: 447478 - RNA, 22 nt, Human
aguggcagaagccaagucugca

SEQ ID NO: 447479 - RNA, 18 nt, Human
acauuucuccuucugacc

SEQ ID NO: 447480 - RNA, 22 nt, Human
agaccauggccauccuaggaaa

SEQ ID NO: 447481 - RNA, 22 nt, Human
aagggcaggugggcauuucugg

SEQ ID NO: 447482 - RNA, 22 nt, Human
agugaccauuuucagcuagagg

SEQ ID NO: 447483 - RNA, 22 nt, Human
uggcccugcuuaugucucucuu

SEQ ID NO: 447484 - RNA, 22 nt, Human
ccucuggguaucuguggaagua

SEQ ID NO: 447485 - RNA, 22 nt, Human
ugggggugacuaucucgggaau

SEQ ID NO: 447486 - RNA, 22 nt, Human
agcagggggccacagucacagc

SEQ ID NO: 447487 - RNA, 22 nt, Human
gcaggauggugcccuuucugcc

SEQ ID NO: 447488 - RNA, 22 nt, Human
cuccaggcucguccaagaucga

SEQ ID NO: 447489 - RNA, 22 nt, Human
ucucugaaggggagcuguuuaa

SEQ ID NO: 447490 - RNA, 22 nt, Human
ucccaggacaggccacauggaa

SEQ ID NO: 447491 - RNA, 20 nt, Human
uggcaucucucaauuguagg

SEQ ID NO: 447492 - RNA, 19 nt, Human
cacaucagcagggcugugg

SEQ ID NO: 447493 - RNA, 22 nt, Human
gggagggaggugaugcuuggcu

SEQ ID NO: 447494 - RNA, 22 nt, Human
cucuguagaaacagggcagaag

SEQ ID NO: 447495 - RNA, 22 nt, Human
uuucuucucacccaggacagag

SEQ ID NO: 447496 - RNA, 22 nt, Human
gaagcagcgaaguggaagggac

SEQ ID NO: 447497 - RNA, 22 nt, Human
aagaagguguggaaagaugcuc

SEQ ID NO: 447498 - RNA, 22 nt, Human
uccucagaaaccccugugaggu

SEQ ID NO: 447499 - RNA, 22 nt, Human
acagagagggagugauaaaucc

SEQ ID NO: 447500 - RNA, 22 nt, Human
gcaaggcugagcacauuugcau

SEQ ID NO: 447501 - RNA, 19 nt, Human
guccaguguuuuccaguca

SEQ ID NO: 447502 - RNA, 22 nt, Human
aagauuuagggccaguuuacau

SEQ ID NO: 447503 - RNA, 22 nt, Human
aguguuugucccguuagaaaug

SEQ ID NO: 447504 - RNA, 22 nt, Human
acagagccuccaggagugcugg

SEQ ID NO: 447505 - RNA, 22 nt, Human
aggcuggcgacaucuggcgggc

SEQ ID NO: 447506 - RNA, 22 nt, Human
ggucucuguugccuccaucaag

SEQ ID NO: 447507 - RNA, 22 nt, Human
cugcuguguuggcauuggauag

SEQ ID NO: 447508 - RNA, 19 nt, Human
aguguguacugaaagcacu

SEQ ID NO: 447509 - RNA, 22 nt, Human
cucuggagcaccgggcuaucca

SEQ ID NO: 447510 - RNA, 22 nt, Human
agaugcugcuccacaggccagg

SEQ ID NO: 447511 - RNA, 22 nt, Human
cucccaggguagggagagacua

SEQ ID NO: 447512 - RNA, 22 nt, Human
ucugggagagcacguggcugac

SEQ ID NO: 447513 - RNA, 22 nt, Human
cagaggcucuuccucacugccc

SEQ ID NO: 447514 - RNA, 22 nt, Human
cccuggagugccggaaucaaga

SEQ ID NO: 447515 - RNA, 20 nt, Human
aaaagcagccagagauggua

SEQ ID NO: 447516 - RNA, 22 nt, Human
gugugccaccagucaaggugaa

SEQ ID NO: 447517 - RNA, 22 nt, Human
uuccucaguuagugccugaggc

SEQ ID NO: 447518 - RNA, 22 nt, Human
auucaagagcccauguuuccug

SEQ ID NO: 447519 - RNA, 22 nt, Human
cugggcagguauacaaaaaaug

SEQ ID NO: 447520 - RNA, 22 nt, Human
aagaaauauugggccuuauaaa

SEQ ID NO: 447521 - RNA, 22 nt, Human
ucucugguggcuccaucaguag

SEQ ID NO: 447522 - RNA, 22 nt, Human
aggcagggucuugcuauguugc

SEQ ID NO: 447523 - RNA, 21 nt, Human
auugaaagucaacaaucaguu

SEQ ID NO: 447524 - RNA, 22 nt, Human
ugcagggccccucugcaugagu

SEQ ID NO: 447525 - RNA, 22 nt, Human
gcagacuggucuucagccuugg

SEQ ID NO: 447526 - RNA, 22 nt, Human
ucugggcacugcugagccugua

SEQ ID NO: 447527 - RNA, 21 nt, Human
gagugucuaauccaggcuguc

SEQ ID NO: 447528 - RNA, 22 nt, Human
uccagcagaccaucaaggcuca

SEQ ID NO: 447529 - RNA, 22 nt, Human
gggauggacuuggggacuccag

SEQ ID NO: 447530 - RNA, 22 nt, Human
ccugccuggagcugagugugga

SEQ ID NO: 447531 - RNA, 22 nt, Human
cuccaguggcaaguccgggcgg

SEQ ID NO: 447532 - RNA, 22 nt, Human
guggcagcggcccaggccgucu

SEQ ID NO: 447533 - RNA, 22 nt, Human
gauuuagagaauguuuuguaag

SEQ ID NO: 447534 - RNA, 22 nt, Human
ucagagugugagacauauugga

SEQ ID NO: 447535 - RNA, 22 nt, Human
aagaggaacugggggcugaguc

SEQ ID NO: 447536 - RNA, 22 nt, Human
uaagcauaacuaaaaaugauuu

SEQ ID NO: 447537 - RNA, 22 nt, Human
uuccacuuaguggaagggcaug

SEQ ID NO: 447538 - RNA, 22 nt, Human
ccugccugcaccuucucugggg

SEQ ID NO: 447539 - RNA, 22 nt, Human
uggcagcauuuuuuccagaaca

SEQ ID NO: 447540 - RNA, 19 nt, Human
ucugugcugggaggcagca

SEQ ID NO: 447541 - RNA, 22 nt, Human
caccagguggaaaugucacagc

SEQ ID NO: 447542 - RNA, 22 nt, Human
ugaggaggucagagucuggcug

SEQ ID NO: 447543 - RNA, 22 nt, Human
acagucuugcuguauggucagg

SEQ ID NO: 447544 - RNA, 22 nt, Human
cugcuuuagacaacugcuggga

SEQ ID NO: 447545 - RNA, 22 nt, Human
ucaaagucucugcuucuguaac

SEQ ID NO: 447546 - RNA, 22 nt, Human
ugcucuguauucuauggcaguu

SEQ ID NO: 447547 - RNA, 22 nt, Human
cauuacauuucaaaauguuucc

SEQ ID NO: 447548 - RNA, 22 nt, Human
uuugucuugaggcuggggaagu

SEQ ID NO: 447549 - RNA, 22 nt, Human
aaggagcuuguucgccuuccuc

SEQ ID NO: 447550 - RNA, 22 nt, Human
gaguuauuuguagggauuauau

SEQ ID NO: 447551 - RNA, 22 nt, Human
ugcuuuauuuauaaaauagcaa

SEQ ID NO: 447552 - RNA, 22 nt, Human
aggguggggugcuacaucuuua

SEQ ID NO: 447553 - RNA, 22 nt, Human
aagacaaagggguccuuggaug

SEQ ID NO: 447554 - RNA, 22 nt, Human
cagaaugagauaacccagauug

SEQ ID NO: 447555 - RNA, 22 nt, Human
uuucacauucagauauagacuu

SEQ ID NO: 447556 - RNA, 22 nt, Human
uggcugaggucuggggcuucug

SEQ ID NO: 447557 - RNA, 22 nt, Human
caccagggcagcagccuagucu

SEQ ID NO: 447558 - RNA, 22 nt, Human
ucaguuuuuacggucacaggga

SEQ ID NO: 447559 - RNA, 22 nt, Human
agggcugacaaauggcagugac

SEQ ID NO: 447560 - RNA, 22 nt, Human
agagggcccauguugggcugcu

SEQ ID NO: 447561 - RNA, 22 nt, Human
agugggcagcccaggaggucuu

SEQ ID NO: 447562 - RNA, 22 nt, Human
ugaccugcguaggugguuucug

SEQ ID NO: 447563 - RNA, 22 nt, Human
cuugaaagcacuccuuugacug

SEQ ID NO: 447564 - RNA, 22 nt, Human
gccaggcuccccggaucccugg

SEQ ID NO: 447565 - RNA, 22 nt, Human
gucucaguaagaaaggcuccug

SEQ ID NO: 447566 - RNA, 21 nt, Human
ggucagggggugccuccaggu

SEQ ID NO: 447567 - RNA, 23 nt, Human
ugucccagagggagggauaggcu

SEQ ID NO: 447568 - RNA, 22 nt, Human
aagggccuccuggggagccugg

SEQ ID NO: 447569 - RNA, 22 nt, Human
cugggagcuagcucugagcuga

SEQ ID NO: 447570 - RNA, 22 nt, Human
aagagaaggauucugagccugg

SEQ ID NO: 447571 - RNA, 22 nt, Human
caggcacugugcugagcucugc

SEQ ID NO: 447572 - RNA, 22 nt, Human
uuagagccaguuacaaggucaa

SEQ ID NO: 447573 - RNA, 22 nt, Human
ccucuuugugccugcaggcugc

SEQ ID NO: 447574 - RNA, 22 nt, Human
ccacagggugucaucagcuuga

SEQ ID NO: 447575 - RNA, 20 nt, Human
gacaggagaguuagguaggu

SEQ ID NO: 447576 - RNA, 22 nt, Human
gagggucccgagcccugucaga

SEQ ID NO: 447577 - RNA, 22 nt, Human
acagucucuccacacugcaggg

SEQ ID NO: 447578 - RNA, 22 nt, Human
cucuccaggacuuuggcccaau

SEQ ID NO: 447579 - RNA, 22 nt, Human
caggaaugaggucguaaguguc

SEQ ID NO: 447580 - RNA, 22 nt, Human
aagggacuuugucagcuuucca

SEQ ID NO: 447581 - RNA, 22 nt, Human
gaaaacacuuugaucugaaagu

SEQ ID NO: 447582 - RNA, 22 nt, Human
gaagcccagggcguggccgggc

SEQ ID NO: 447583 - RNA, 22 nt, Human
agucaguuaaccucacagcauc

SEQ ID NO: 447584 - RNA, 22 nt, Human
ugccaggcugcccuccagucug

SEQ ID NO: 447585 - RNA, 22 nt, Human
agauacaaaagauaagauuuag

SEQ ID NO: 447586 - RNA, 22 nt, Human
ggaaagaaucaagugauccugu

SEQ ID NO: 447587 - RNA, 19 nt, Human
gaagaagcuugagaaguag

SEQ ID NO: 447588 - RNA, 22 nt, Human
aaauuaguacauugcaaagucc

SEQ ID NO: 447589 - RNA, 22 nt, Human
ucccacacagcccgcucaccgg

SEQ ID NO: 447590 - RNA, 22 nt, Human
gcugucugcaucucuagagcuu

SEQ ID NO: 447591 - RNA, 22 nt, Human
cugggagguggagguugcauug

SEQ ID NO: 447592 - RNA, 22 nt, Human
ggauggcaggacaaggacccag

SEQ ID NO: 447593 - RNA, 22 nt, Human
gagucacauuaauuuaauuuua

SEQ ID NO: 447594 - RNA, 22 nt, Human
ugggcagacauugaguuuguuc

SEQ ID NO: 447595 - RNA, 22 nt, Human
gagcuggcuaauacugacuuau

SEQ ID NO: 447596 - RNA, 22 nt, Human
ucaggcugguccccacagugga

SEQ ID NO: 447597 - RNA, 22 nt, Human
gggagagguuacccgagcaacu

SEQ ID NO: 447598 - RNA, 18 nt, Human
ccagcaugccagaggcug

SEQ ID NO: 447599 - RNA, 22 nt, Human
cagugggugaugaguccugggg

SEQ ID NO: 447600 - RNA, 22 nt, Human
agugaaaacacuaguucuugcc

SEQ ID NO: 447601 - RNA, 21 nt, Human
uuguucuuccagaagcaaagu

SEQ ID NO: 447602 - RNA, 19 nt, Human
agacacacuugauaugugu

SEQ ID NO: 447603 - RNA, 21 nt, Human
auuauuauuucuguguccagc

SEQ ID NO: 447604 - RNA, 22 nt, Human
ugaagccauaggacagaggaua

SEQ ID NO: 447605 - RNA, 22 nt, Human
cugagauggaguuucgcucuuc

SEQ ID NO: 447606 - RNA, 19 nt, Human
guggccucggagcgcgcgg

SEQ ID NO: 447607 - RNA, 22 nt, Human
auauuagguuggugcaaaagua

SEQ ID NO: 447608 - RNA, 22 nt, Human
cccaguuguugccggcucugga

SEQ ID NO: 447609 - RNA, 22 nt, Human
ugucagagagcaggcaguagaa

SEQ ID NO: 447610 - RNA, 22 nt, Human
ugggcuguccagcaccugggcu

SEQ ID NO: 447611 - RNA, 22 nt, Human
cuggccacuggagguggcaccc

SEQ ID NO: 447612 - RNA, 22 nt, Human
gaggccugggagccuguccucc

SEQ ID NO: 447613 - RNA, 22 nt, Human
agagguagagguugcagugagc

SEQ ID NO: 447614 - RNA, 18 nt, Human
auccuugaugagaggucu

SEQ ID NO: 447615 - RNA, 22 nt, Human
uccugccuugccugggacauca

SEQ ID NO: 447616 - RNA, 22 nt, Human
uuucugcucgcucucaaucagg

SEQ ID NO: 447617 - RNA, 22 nt, Human
caaaugcauagaaagaugaaac

SEQ ID NO: 447618 - RNA, 22 nt, Human
uaccuuuugcuuauuaugacac

SEQ ID NO: 447619 - RNA, 20 nt, Human
cagggccacgcuccaaggca

SEQ ID NO: 447620 - RNA, 22 nt, Human
aacaaauguguggcaguguggg

SEQ ID NO: 447621 - RNA, 22 nt, Human
caagugucuauaucagugcuug

SEQ ID NO: 447622 - RNA, 22 nt, Human
ggcuggguuauuuauggccaag

SEQ ID NO: 447623 - RNA, 22 nt, Human
caguguguggauccucccagga

SEQ ID NO: 447624 - RNA, 22 nt, Human
cccuggccagcucaugucugag

SEQ ID NO: 447625 - RNA, 22 nt, Human
gcagcaggagaguuuguccugc

SEQ ID NO: 447626 - RNA, 22 nt, Human
cugggaugucuauagaacacuu

SEQ ID NO: 447627 - RNA, 22 nt, Human
gcagugcugaucccauggcaga

SEQ ID NO: 447628 - RNA, 18 nt, Human
cagcugugcccuguuugg

SEQ ID NO: 447629 - RNA, 22 nt, Human
gcagauggcugagccugcagau

SEQ ID NO: 447630 - RNA, 22 nt, Human
cuggcucccguuguccuugaag

SEQ ID NO: 447631 - RNA, 22 nt, Human
ccugucuguauugguuugcuau

SEQ ID NO: 447632 - RNA, 22 nt, Human
uuuacaaccucauauucugaug

SEQ ID NO: 447633 - RNA, 22 nt, Human
auaaggcagucacuggaauguu

SEQ ID NO: 447634 - RNA, 22 nt, Human
gggcugccaagccugccugccu

SEQ ID NO: 447635 - RNA, 22 nt, Human
cuuugcauacaauuuuuagaaa

SEQ ID NO: 447636 - RNA, 22 nt, Human
gggcagguguuuccaaggugag

SEQ ID NO: 447637 - RNA, 22 nt, Human
acacacaacucauuguguaaua

SEQ ID NO: 447638 - RNA, 22 nt, Human
gggcacugugcuaggugcugag

SEQ ID NO: 447639 - RNA, 22 nt, Human
ucaauucaacacaugcacauug

SEQ ID NO: 447640 - RNA, 22 nt, Human
gagcacccuuugcacaucaguc

SEQ ID NO: 447641 - RNA, 22 nt, Human
cucugugcccuacugcucagcu

SEQ ID NO: 447642 - RNA, 22 nt, Human
aucuggcugcugugcuuaagcu

SEQ ID NO: 447643 - RNA, 22 nt, Human
agagucuuccaggcagccugag

SEQ ID NO: 447644 - RNA, 22 nt, Human
agagcagcacguuguccccaca

SEQ ID NO: 447645 - RNA, 22 nt, Human
ugguuacacagcauguggacuu

SEQ ID NO: 447646 - RNA, 22 nt, Human
cugggccuuggauugacacugu

SEQ ID NO: 447647 - RNA, 22 nt, Human
uugcagagugguugugaggauu

SEQ ID NO: 447648 - RNA, 22 nt, Human
ggagcauguggggugagcaggg

SEQ ID NO: 447649 - RNA, 22 nt, Human
ccauaaucuggcuuugagagag

SEQ ID NO: 447650 - RNA, 22 nt, Human
ucuguacaguaccagauaguaa

SEQ ID NO: 447651 - RNA, 22 nt, Human
ugugggaggaauuagaauggga

SEQ ID NO: 447652 - RNA, 22 nt, Human
ucaggaaagaagaugcucagug

SEQ ID NO: 447653 - RNA, 21 nt, Human
ugucagaaauaagcaugugau

SEQ ID NO: 447654 - RNA, 22 nt, Human
gcuggccugggcucaagaccag

SEQ ID NO: 447655 - RNA, 22 nt, Human
aaguggaggccgaguucacgca

SEQ ID NO: 447656 - RNA, 22 nt, Human
caccagggacaaugcuaggggu

SEQ ID NO: 447657 - RNA, 20 nt, Human
ccucaagcagacugacagcu

SEQ ID NO: 447658 - RNA, 19 nt, Human
aggcagucauuggaauaua

SEQ ID NO: 447659 - RNA, 22 nt, Human
uaagaacaagcuggggguucca

SEQ ID NO: 447660 - RNA, 22 nt, Human
ugggcagauguccucugaagug

SEQ ID NO: 447661 - RNA, 22 nt, Human
cuggguggaaagugcugagaau

SEQ ID NO: 447662 - RNA, 22 nt, Human
uguaugcaaauuuauuagcaca

SEQ ID NO: 447663 - RNA, 22 nt, Human
cuggagaggccccaagauauuu

SEQ ID NO: 447664 - RNA, 22 nt, Human
acaaaaagcuccauuacugucc

SEQ ID NO: 447665 - RNA, 22 nt, Human
uuugucaucccuuuugaaacug

SEQ ID NO: 447666 - RNA, 22 nt, Human
cucaggaugaaagucaugguga

SEQ ID NO: 447667 - RNA, 22 nt, Human
acaaaauuguguuaaacuuuau

SEQ ID NO: 447668 - RNA, 22 nt, Human
aaagaucagucugaagcaacau

SEQ ID NO: 447669 - RNA, 22 nt, Human
gauuuccuugcauauugguaau

SEQ ID NO: 447670 - RNA, 22 nt, Human
auuaauuuccaggcacugugcu

SEQ ID NO: 447671 - RNA, 22 nt, Human
gggcagccucggugccugcugc

SEQ ID NO: 447672 - RNA, 22 nt, Human
ggggaugguggcauuuguaaaa

SEQ ID NO: 447673 - RNA, 22 nt, Human
cccuggagggauuucucaauca

SEQ ID NO: 447674 - RNA, 22 nt, Human
gaguguggugaacaggagcacc

SEQ ID NO: 447675 - RNA, 22 nt, Human
aggagagagaacacuugggucc

SEQ ID NO: 447676 - RNA, 21 nt, Human
ucucuggaauuagaccauguu

SEQ ID NO: 447677 - RNA, 22 nt, Human
uacaaacuuguuuuaaguaagu

SEQ ID NO: 447678 - RNA, 22 nt, Human
acuguacacagugguguacugu

SEQ ID NO: 447679 - RNA, 22 nt, Human
ucauacauaacuuguacaguga

SEQ ID NO: 447680 - RNA, 22 nt, Human
ugugaaggcagagccagugaaa

SEQ ID NO: 447681 - RNA, 22 nt, Human
ugggggagauuagagcuucuua

SEQ ID NO: 447682 - RNA, 22 nt, Human
ggcagugaugucaaacagugaa

SEQ ID NO: 447683 - RNA, 22 nt, Human
ucuggcucaucucuccagguaa

SEQ ID NO: 447684 - RNA, 22 nt, Human
gcaggcaguuauuuaguagaau

SEQ ID NO: 447685 - RNA, 19 nt, Human
uggcagcauugguaccuug

SEQ ID NO: 447686 - RNA, 22 nt, Human
uaguggagaggauguggagaaa

SEQ ID NO: 447687 - RNA, 22 nt, Human
ggucaggguauaaucaagugag

SEQ ID NO: 447688 - RNA, 20 nt, Human
uaugaguauuacuuucagga

SEQ ID NO: 447689 - RNA, 22 nt, Human
uauguacacauacacuuguaau

SEQ ID NO: 447690 - RNA, 22 nt, Human
ucugucauugcaauaaaauuuc

SEQ ID NO: 447691 - RNA, 20 nt, Human
ggcugccuccuuccuuuccu

SEQ ID NO: 447692 - RNA, 22 nt, Human
cccuggggcugagggauggccg

SEQ ID NO: 447693 - RNA, 22 nt, Human
gccuaauaacuagcuguguaac

SEQ ID NO: 447694 - RNA, 22 nt, Human
aaggucauggcaaauuacuuuu

SEQ ID NO: 447695 - RNA, 22 nt, Human
uuugcauuaguuuagauuucaa

SEQ ID NO: 447696 - RNA, 22 nt, Human
ccuccugggcuccugucugcac

SEQ ID NO: 447697 - RNA, 22 nt, Human
auguuacacauaggcauaaaug

SEQ ID NO: 447698 - RNA, 22 nt, Human
uggcaggguggcaacuuuuggu

SEQ ID NO: 447699 - RNA, 22 nt, Human
gcaggcagagagggguuuccag

SEQ ID NO: 447700 - RNA, 22 nt, Human
uggccugguuauauugcuauca

SEQ ID NO: 447701 - RNA, 22 nt, Human
agggcugagacuaaggccagau

SEQ ID NO: 447702 - RNA, 22 nt, Human
ggcucagguuuaaagugcuuua

SEQ ID NO: 447703 - RNA, 22 nt, Human
caagggcuucaaguggccaaga

SEQ ID NO: 447704 - RNA, 21 nt, Human
cagagcugaaggguguagugu

SEQ ID NO: 447705 - RNA, 22 nt, Human
ggccagaggccauccuccugcu

SEQ ID NO: 447706 - RNA, 22 nt, Human
gagccagcugagcugcacuguc

SEQ ID NO: 447707 - RNA, 22 nt, Human
agcugccuccauggucaaagau

SEQ ID NO: 447708 - RNA, 22 nt, Human
uucaggaucauuuguuuuaucu

SEQ ID NO: 447709 - RNA, 22 nt, Human
uggcucagagagggagugugga

SEQ ID NO: 447710 - RNA, 22 nt, Human
ucagguguuagaagaaauuuca

SEQ ID NO: 447711 - RNA, 22 nt, Human
gcccugagacugagcauggguu

SEQ ID NO: 447712 - RNA, 22 nt, Human
uauguacaucguugaauucaaa

SEQ ID NO: 447713 - RNA, 20 nt, Human
gccaggcacuguucucaaua

SEQ ID NO: 447714 - RNA, 20 nt, Human
agagccuugaggaagaugau

SEQ ID NO: 447715 - RNA, 22 nt, Human
auuauaaagaacaugugugugg

SEQ ID NO: 447716 - RNA, 22 nt, Human
uggccacagccucugccaguuc

SEQ ID NO: 447717 - RNA, 22 nt, Human
ucuggccuacuggaguccauga

SEQ ID NO: 447718 - RNA, 22 nt, Human
ugagcagaacacgggauccaug

SEQ ID NO: 447719 - RNA, 22 nt, Human
ucucagugacacucuucauaca

SEQ ID NO: 447720 - RNA, 22 nt, Human
auugaaagauauacuguucuca

SEQ ID NO: 447721 - RNA, 22 nt, Human
aaggcagccgugugacugcaug

SEQ ID NO: 447722 - RNA, 22 nt, Human
gauggcagcagcagccagggau

SEQ ID NO: 447723 - RNA, 22 nt, Human
ggaugcuggggaccaaucucug

SEQ ID NO: 447724 - RNA, 22 nt, Human
gcagggaccugccacugcuguc

SEQ ID NO: 447725 - RNA, 22 nt, Human
ucagggcaaaagggaaaccauu

SEQ ID NO: 447726 - RNA, 20 nt, Human
cccugcagccaugggagugg

SEQ ID NO: 447727 - RNA, 22 nt, Human
aggcccugcccagagcuccucg

SEQ ID NO: 447728 - RNA, 22 nt, Human
gacucugcuacaggccgagguu

SEQ ID NO: 447729 - RNA, 22 nt, Human
agggccuggcgcguggccgccg

SEQ ID NO: 447730 - RNA, 22 nt, Human
ugggcagccaucccagccucuc

SEQ ID NO: 447731 - RNA, 22 nt, Human
ugcccuuggguaacuugcugau

SEQ ID NO: 447732 - RNA, 21 nt, Human
ggcacugagccagauggacuc

SEQ ID NO: 447733 - RNA, 22 nt, Human
ggcaguggguggaucucaggga

SEQ ID NO: 447734 - RNA, 22 nt, Human
uguccucagauaugucuacucu

SEQ ID NO: 447735 - RNA, 22 nt, Human
uugcuuccucgaggccagcgug

SEQ ID NO: 447736 - RNA, 22 nt, Human
cagauggccagaggcagcugca

SEQ ID NO: 447737 - RNA, 22 nt, Human
ggucagccuuggauuugguagc

SEQ ID NO: 447738 - RNA, 22 nt, Human
uuuccaaauaaggucacauucu

SEQ ID NO: 447739 - RNA, 22 nt, Human
uggcagcagccauggaaggccc

SEQ ID NO: 447740 - RNA, 22 nt, Human
aaggcuuucagcuaacuugauu

SEQ ID NO: 447741 - RNA, 22 nt, Human
ucuuggagacucuuguauauuu

SEQ ID NO: 447742 - RNA, 22 nt, Human
aggaagccuggcauuaaaaagc

SEQ ID NO: 447743 - RNA, 22 nt, Human
ugggcucucuggcaggaaggcu

SEQ ID NO: 447744 - RNA, 22 nt, Human
gcucugcuggagggaaagagaa

SEQ ID NO: 447745 - RNA, 22 nt, Human
ugcuggccaauggcagaggcgg

SEQ ID NO: 447746 - RNA, 22 nt, Human
caagauggacauaaggagagaa

SEQ ID NO: 447747 - RNA, 23 nt, Human
ugcugggguaguuuguggcacag

SEQ ID NO: 447748 - RNA, 22 nt, Human
gcugcuucucugauggagucca

SEQ ID NO: 447749 - RNA, 22 nt, Human
gcuggcuguuggagguaccugc

SEQ ID NO: 447750 - RNA, 20 nt, Human
cccaggugucugaagcucug

SEQ ID NO: 447751 - RNA, 22 nt, Human
uccuuuggagcuugacugguag

SEQ ID NO: 447752 - RNA, 22 nt, Human
uccuggauucugcccugaaggc

SEQ ID NO: 447753 - RNA, 17 nt, Human
ucagcaaagacaaagga

SEQ ID NO: 447754 - RNA, 22 nt, Human
aaacaacuucugcacuaugggu

SEQ ID NO: 447755 - RNA, 22 nt, Human
agauguggauccuaggguagaa

SEQ ID NO: 447756 - RNA, 22 nt, Human
caguuucuuggaugccaauuuc

SEQ ID NO: 447757 - RNA, 22 nt, Human
aagcugccaccagcccagggca

SEQ ID NO: 447758 - RNA, 22 nt, Human
gacauaaaauucaauaauuugu

SEQ ID NO: 447759 - RNA, 22 nt, Human
ccagagccugcugagccccauu

SEQ ID NO: 447760 - RNA, 18 nt, Human
ccuggagcuccacagcaa

SEQ ID NO: 447761 - RNA, 22 nt, Human
gugcaggguagcgacggcagga

SEQ ID NO: 447762 - RNA, 22 nt, Human
cucacugcaaguuccaccuacc

SEQ ID NO: 447763 - RNA, 22 nt, Human
ugccugagugauguggcagcca

SEQ ID NO: 447764 - RNA, 22 nt, Human
ucugccugcuaacuccugcacc

SEQ ID NO: 447765 - RNA, 22 nt, Human
aggaaagggguagguguggacg

SEQ ID NO: 447766 - RNA, 22 nt, Human
ucagcuuucucagaggccuaac

SEQ ID NO: 447767 - RNA, 22 nt, Human
cacugagaggucucauuuccaa

SEQ ID NO: 447768 - RNA, 22 nt, Human
gaauucugggagagaucugaca

SEQ ID NO: 447769 - RNA, 22 nt, Human
aagacugucugggacaagauga

SEQ ID NO: 447770 - RNA, 22 nt, Human
ugucuuuagagucacaaaacca

SEQ ID NO: 447771 - RNA, 22 nt, Human
cagcaggguauacagggaauuu

SEQ ID NO: 447772 - RNA, 22 nt, Human
cagcugcccaagccccagaugu

SEQ ID NO: 447773 - RNA, 22 nt, Human
aaaagcagagacucuggagcua

SEQ ID NO: 447774 - RNA, 22 nt, Human
agucccagagaggucggggcca

SEQ ID NO: 447775 - RNA, 22 nt, Human
ucccagccggugccuggguccc

SEQ ID NO: 447776 - RNA, 22 nt, Human
uggcugcuagccagagcuucag

SEQ ID NO: 447777 - RNA, 22 nt, Human
acaguaccugcucucaagcaaa

SEQ ID NO: 447778 - RNA, 20 nt, Human
gccuggaggcagagauaaag

SEQ ID NO: 447779 - RNA, 22 nt, Human
aagacauugucauuuuauaauu

SEQ ID NO: 447780 - RNA, 22 nt, Human
caggggcuuaagugacagaagg

SEQ ID NO: 447781 - RNA, 22 nt, Human
uucgaguuggcuuuauuaaacu

SEQ ID NO: 447782 - RNA, 22 nt, Human
aucuaagauguauugagcacuu

SEQ ID NO: 447783 - RNA, 22 nt, Human
uccaagaagucaucuaaacugu

SEQ ID NO: 447784 - RNA, 22 nt, Human
aaggaaccuggaguagagggag

SEQ ID NO: 447785 - RNA, 22 nt, Human
gccucugcaggugcgguuaucc

SEQ ID NO: 447786 - RNA, 22 nt, Human
agggcuggcuaggugcguuccc

SEQ ID NO: 447787 - RNA, 22 nt, Human
ucuggccauggcaagccgagug

SEQ ID NO: 447788 - RNA, 22 nt, Human
cucaggauggaagccuacagga

SEQ ID NO: 447789 - RNA, 22 nt, Human
gagguuagaggucagugcaguc

SEQ ID NO: 447790 - RNA, 22 nt, Human
uucuuuuacauuaagauuucag

SEQ ID NO: 447791 - RNA, 22 nt, Human
ucuuugcaugcauuuucccuua

SEQ ID NO: 447792 - RNA, 22 nt, Human
aaaugguaagacaacacauuau

SEQ ID NO: 447793 - RNA, 22 nt, Human
gcagaugguggggcaggaaaau

SEQ ID NO: 447794 - RNA, 22 nt, Human
cacucugcgcugggcgccagcg

SEQ ID NO: 447795 - RNA, 22 nt, Human
cccaggagagaggccaguuggc

SEQ ID NO: 447796 - RNA, 22 nt, Human
gaagcagcuaggaucuucauuu

SEQ ID NO: 447797 - RNA, 22 nt, Human
uauaucuuauaugugcagguac

SEQ ID NO: 447798 - RNA, 22 nt, Human
aggcugaggcagguggaucauu

SEQ ID NO: 447799 - RNA, 19 nt, Human
ucuggagcugaugcaggug

SEQ ID NO: 447800 - RNA, 22 nt, Human
guguacauauugagucugcuga

SEQ ID NO: 447801 - RNA, 22 nt, Human
ugcugugggcaguacauaagcu

SEQ ID NO: 447802 - RNA, 22 nt, Human
aggcucaggugccucauucaca

SEQ ID NO: 447803 - RNA, 22 nt, Human
ugauuuccucuacuagcaauua

SEQ ID NO: 447804 - RNA, 19 nt, Human
uggcugggcgugccuccgu

SEQ ID NO: 447805 - RNA, 22 nt, Human
ccgggcgggggcucucgucacc

SEQ ID NO: 447806 - RNA, 22 nt, Human
caugggcaguuggcagggcuca

SEQ ID NO: 447807 - RNA, 22 nt, Human
aaguuauaucaucucauugacg

SEQ ID NO: 447808 - RNA, 22 nt, Human
aggagccccucuucaguccugg

SEQ ID NO: 447809 - RNA, 22 nt, Human
ccucacucugcacccugcagca

SEQ ID NO: 447810 - RNA, 23 nt, Human
ccagccucugggucuucauccag

SEQ ID NO: 447811 - RNA, 22 nt, Human
agggaggugguuccccagugga

SEQ ID NO: 447812 - RNA, 20 nt, Human
ucagugauuuugaagaggaa

SEQ ID NO: 447813 - RNA, 22 nt, Human
gugccugguuuggggaauguuc

SEQ ID NO: 447814 - RNA, 21 nt, Human
gugguucuagagaaacagaau

SEQ ID NO: 447815 - RNA, 22 nt, Human
uuguaacagcugcuuaauagag

SEQ ID NO: 447816 - RNA, 22 nt, Human
aaauguaguauguugcauguau

SEQ ID NO: 447817 - RNA, 22 nt, Human
cuggccaggcuugggacagaca

SEQ ID NO: 447818 - RNA, 22 nt, Human
uguuacuuaucucacgugaugc

SEQ ID NO: 447819 - RNA, 23 nt, Human
gaguguucauagcaggcucuugc

SEQ ID NO: 447820 - RNA, 18 nt, Human
cccagcuuagcgccccuc

SEQ ID NO: 447821 - RNA, 22 nt, Human
uaacagaagagcaggcagcccu

SEQ ID NO: 447822 - RNA, 22 nt, Human
gugagaguguuuggaaauagaa

SEQ ID NO: 447823 - RNA, 22 nt, Human
ggcucaggccuguaauccuagc

SEQ ID NO: 447824 - RNA, 21 nt, Human
ggauggauagggaagagauuu

SEQ ID NO: 447825 - RNA, 22 nt, Human
cacaagacuuauuuguguagaa

SEQ ID NO: 447826 - RNA, 22 nt, Human
ccugggagguggagguugcagc

SEQ ID NO: 447827 - RNA, 22 nt, Human
acuguggaugccaaaggggagg

SEQ ID NO: 447828 - RNA, 22 nt, Human
agacagcaggggagucugguuu

SEQ ID NO: 447829 - RNA, 22 nt, Human
agcaggugggcaugaaagcuga

SEQ ID NO: 447830 - RNA, 22 nt, Human
cagcagugugcaggugugcugg

SEQ ID NO: 447831 - RNA, 22 nt, Human
uggcacagacagaucaggaguc

SEQ ID NO: 447832 - RNA, 22 nt, Human
cuauuuuaagaggccauuaggu

SEQ ID NO: 447833 - RNA, 22 nt, Human
cagcccagcacuaaguagauuu

SEQ ID NO: 447834 - RNA, 22 nt, Human
ugauucuauggaaggcauaagg

SEQ ID NO: 447835 - RNA, 22 nt, Human
agagcuggauggucaagauggc

SEQ ID NO: 447836 - RNA, 22 nt, Human
gagugcagaugaacagaagauu

SEQ ID NO: 447837 - RNA, 22 nt, Human
uaaauucugaucaaguuccuuc

SEQ ID NO: 447838 - RNA, 22 nt, Human
agcgggugcugugucagcccuc

SEQ ID NO: 447839 - RNA, 22 nt, Human
ucucccagugucuggcagucag

SEQ ID NO: 447840 - RNA, 22 nt, Human
aaagaacuuauccuagaauuug

SEQ ID NO: 447841 - RNA, 22 nt, Human
cccaagaucuuucgugcacuaa

SEQ ID NO: 447842 - RNA, 22 nt, Human
ggagugggcagcacugcccugu

SEQ ID NO: 447843 - RNA, 19 nt, Human
ugucuuaauuaacucagag

SEQ ID NO: 447844 - RNA, 22 nt, Human
gugucauggaaaauugcaaugg

SEQ ID NO: 447845 - RNA, 22 nt, Human
gcagauggugggggaggaguac

SEQ ID NO: 447846 - RNA, 22 nt, Human
cagcuuugcaggcuggucagug

SEQ ID NO: 447847 - RNA, 22 nt, Human
gcacacaggcaguuuccagcca

SEQ ID NO: 447848 - RNA, 20 nt, Human
aguguuccggaagacuggca

SEQ ID NO: 447849 - RNA, 17 nt, Human
aggcuggcucacaggga

SEQ ID NO: 447850 - RNA, 19 nt, Human
uuuggcacucugaaguguu

SEQ ID NO: 447851 - RNA, 22 nt, Human
aagcaauauacugauaugauua

SEQ ID NO: 447852 - RNA, 22 nt, Human
cagggacugagauccagacugu

SEQ ID NO: 447853 - RNA, 22 nt, Human
uaggaaaagcacaggauguucu

SEQ ID NO: 447854 - RNA, 22 nt, Human
cccaccaguacagaugguagau

SEQ ID NO: 447855 - RNA, 22 nt, Human
uucaggauccccuugaugggcu

SEQ ID NO: 447856 - RNA, 22 nt, Human
ggcuggcauccagggaaaucca

SEQ ID NO: 447857 - RNA, 22 nt, Human
uuuauuagauuaucaaagaggu

SEQ ID NO: 447858 - RNA, 21 nt, Human
ggagucauuagucauuuccuu

SEQ ID NO: 447859 - RNA, 22 nt, Human
gggcagugguuacacagcugag

SEQ ID NO: 447860 - RNA, 22 nt, Human
aagaaaguggguaauaugauuu

SEQ ID NO: 447861 - RNA, 23 nt, Human
uccugagaugagacagugcugcc

SEQ ID NO: 447862 - RNA, 19 nt, Human
aggcagaggcuuggcuagc

SEQ ID NO: 447863 - RNA, 22 nt, Human
gcagagaggauauuauugucca

SEQ ID NO: 447864 - RNA, 22 nt, Human
caggcugaggcaguaggguuug

SEQ ID NO: 447865 - RNA, 19 nt, Human
ccaguagagacagcugcag

SEQ ID NO: 447866 - RNA, 22 nt, Human
ccagagacgucggucagggcgc

SEQ ID NO: 447867 - RNA, 22 nt, Human
gucaggauuauaauccccaugg

SEQ ID NO: 447868 - RNA, 22 nt, Human
uuaagaauggaaugaggaauuu

SEQ ID NO: 447869 - RNA, 22 nt, Human
ggagccugugggaugagaugug

SEQ ID NO: 447870 - RNA, 22 nt, Human
gcuggugagcaaaggagaagga

SEQ ID NO: 447871 - RNA, 22 nt, Human
ucaggcagaccaccgugggcag

SEQ ID NO: 447872 - RNA, 18 nt, Human
uccugccugcgggcuccc

SEQ ID NO: 447873 - RNA, 22 nt, Human
aggcagcaugggccccagcucc

SEQ ID NO: 447874 - RNA, 22 nt, Human
ucuuugcaucccuuccauaguu

SEQ ID NO: 447875 - RNA, 22 nt, Human
gaaaguuugccucucucuugag

SEQ ID NO: 447876 - RNA, 22 nt, Human
gcucugggcugcccucuggaca

SEQ ID NO: 447877 - RNA, 21 nt, Human
ccuccaggugauuccgugcuc

SEQ ID NO: 447878 - RNA, 22 nt, Human
cagugaggaagcugucuggacc

SEQ ID NO: 447879 - RNA, 22 nt, Human
agacuguagggauagaggucuu

SEQ ID NO: 447880 - RNA, 22 nt, Human
caggccugagacaucugagaua

SEQ ID NO: 447881 - RNA, 22 nt, Human
ugaaggaaagagggaacauccc

SEQ ID NO: 447882 - RNA, 22 nt, Human
ucaggcugaaucauccuagcuu

SEQ ID NO: 447883 - RNA, 22 nt, Human
ugggccugacucaccugccucc

SEQ ID NO: 447884 - RNA, 19 nt, Human
gcuucccaccagccagccc

SEQ ID NO: 447885 - RNA, 22 nt, Human
acauuucuggaguuucucaaca

SEQ ID NO: 447886 - RNA, 22 nt, Human
uuagccaugcccuagaagagga

SEQ ID NO: 447887 - RNA, 23 nt, Human
auacauacagucuuacugacuuu

SEQ ID NO: 447888 - RNA, 22 nt, Human
guagggacuguucucaccugag

SEQ ID NO: 447889 - RNA, 22 nt, Human
caggagccccaggcugacaaua

SEQ ID NO: 447890 - RNA, 22 nt, Human
ucagagaggcaauacuguuuaa

SEQ ID NO: 447891 - RNA, 22 nt, Human
augcuauacauaugacaucaca

SEQ ID NO: 447892 - RNA, 22 nt, Human
aggucaaaccacagcucuaggc

SEQ ID NO: 447893 - RNA, 21 nt, Human
uccugccuuaguccagagcag

SEQ ID NO: 447894 - RNA, 22 nt, Human
cugcuguguuccuccugcaucu

SEQ ID NO: 447895 - RNA, 23 nt, Human
uuugcaaauuggacacaaccaca

SEQ ID NO: 447896 - RNA, 22 nt, Human
agaugugguaguugaagggaag

SEQ ID NO: 447897 - RNA, 22 nt, Human
auaaacagaguaguugcuacug

SEQ ID NO: 447898 - RNA, 22 nt, Human
aggcugucaucuuugcaggcag

SEQ ID NO: 447899 - RNA, 22 nt, Human
gucccagggaagaaggcagcac

SEQ ID NO: 447900 - RNA, 22 nt, Human
ggccugcuucucagugagcuug

SEQ ID NO: 447901 - RNA, 22 nt, Human
cugccugugccaaugcuccuuu

SEQ ID NO: 447902 - RNA, 22 nt, Human
uggcucagcuuacuuuugaggg

SEQ ID NO: 447903 - RNA, 22 nt, Human
gcagagcucuguucuuaucucc

SEQ ID NO: 447904 - RNA, 22 nt, Human
cagcuuuaggacucauaauaaa

SEQ ID NO: 447905 - RNA, 22 nt, Human
uagacagauuucuuguuagaca

SEQ ID NO: 447906 - RNA, 17 nt, Human
uuucuccuuccaucuca

SEQ ID NO: 447907 - RNA, 22 nt, Human
gcaucuaaauaaacgugggagu

SEQ ID NO: 447908 - RNA, 22 nt, Human
uuaaguccuugguaauuuucuu

SEQ ID NO: 447909 - RNA, 22 nt, Human
aaggcugaggagggccugcagg

SEQ ID NO: 447910 - RNA, 18 nt, Human
ggcugccuguuccugaag

SEQ ID NO: 447911 - RNA, 22 nt, Human
ggccuguccagccugccuggcu

SEQ ID NO: 447912 - RNA, 22 nt, Human
uccagaccuagggcaccccagu

SEQ ID NO: 447913 - RNA, 22 nt, Human
gaauguaauagucaguagaaca

SEQ ID NO: 447914 - RNA, 17 nt, Human
uuucagauucacuuucu

SEQ ID NO: 447915 - RNA, 22 nt, Human
ugaguagcggcuauguguaacu

SEQ ID NO: 447916 - RNA, 22 nt, Human
uauaagaaacaaggcaaauuuu

SEQ ID NO: 447917 - RNA, 22 nt, Human
cagcuuuaguaacccacugcuc

SEQ ID NO: 447918 - RNA, 22 nt, Human
ucucugagcccaauguagcaau

SEQ ID NO: 447919 - RNA, 22 nt, Human
gcagaggagcaagcuggacacc

SEQ ID NO: 447920 - RNA, 22 nt, Human
cuguugucccugggagcucagc

SEQ ID NO: 447921 - RNA, 22 nt, Human
uagcacauaacuuagaauaguu

SEQ ID NO: 447922 - RNA, 21 nt, Human
ugaggccugccagucucagaa

SEQ ID NO: 447923 - RNA, 22 nt, Human
uacaaaguuugggguccucaaa

SEQ ID NO: 447924 - RNA, 22 nt, Human
caggggcuguuugccucaggcc

SEQ ID NO: 447925 - RNA, 22 nt, Human
aaagaugucauacacauuaaga

SEQ ID NO: 447926 - RNA, 22 nt, Human
cagcuuuggcccagucgggagg

SEQ ID NO: 447927 - RNA, 18 nt, Human
uacaugcauaaaugaagc

SEQ ID NO: 447928 - RNA, 22 nt, Human
auggcagccugagcagaggaau

SEQ ID NO: 447929 - RNA, 22 nt, Human
aagugguagacaaagauaauug

SEQ ID NO: 447930 - RNA, 22 nt, Human
cacugaagcuuucauucucuug

SEQ ID NO: 447931 - RNA, 22 nt, Human
uggcaguguauagguggcuccu

SEQ ID NO: 447932 - RNA, 22 nt, Human
guagaagugaugucauguuaua

SEQ ID NO: 447933 - RNA, 22 nt, Human
gaggggaagacuucuggacagu

SEQ ID NO: 447934 - RNA, 20 nt, Human
gccugcagguuggaugggau

SEQ ID NO: 447935 - RNA, 22 nt, Human
cccaggaggcagagcuugcagu

SEQ ID NO: 447936 - RNA, 18 nt, Human
gccugccuagagcuugcc

SEQ ID NO: 447937 - RNA, 22 nt, Human
caagacaagaucuaagcaugcu

SEQ ID NO: 447938 - RNA, 22 nt, Human
uggucucuucuuccaagauggc

SEQ ID NO: 447939 - RNA, 19 nt, Human
agcagccauagacaauaug

SEQ ID NO: 447940 - RNA, 22 nt, Human
cagcuccccaugguuccugaag

SEQ ID NO: 447941 - RNA, 22 nt, Human
uggagcaggccggaaguggcuu

SEQ ID NO: 447942 - RNA, 22 nt, Human
cccaaggccucuccuuggcuug

SEQ ID NO: 447943 - RNA, 22 nt, Human
cagagcagggguuucccagguu

SEQ ID NO: 447944 - RNA, 15 nt, Human
aaucuggcggcaagu

SEQ ID NO: 447945 - RNA, 18 nt, Human
uggcucagauggcuuuaa

SEQ ID NO: 447946 - RNA, 22 nt, Human
uggugcuguggaggggcagaag

SEQ ID NO: 447947 - RNA, 22 nt, Human
gagcuggaagucuguggucaga

SEQ ID NO: 447948 - RNA, 22 nt, Human
ugggccacaagccaugggacca

SEQ ID NO: 447949 - RNA, 22 nt, Human
agcuggccuuagugagcaccug

SEQ ID NO: 447950 - RNA, 22 nt, Human
aaaucaguucacguucugaggu

SEQ ID NO: 447951 - RNA, 22 nt, Human
cccucaggagaugucagcugga

SEQ ID NO: 447952 - RNA, 22 nt, Human
aaaaucugguaauuugaaugug

SEQ ID NO: 447953 - RNA, 22 nt, Human
ccuggagguggagguugcagug

SEQ ID NO: 447954 - RNA, 22 nt, Human
ccagcagcccucuuccaagacu

SEQ ID NO: 447955 - RNA, 22 nt, Human
uuuguaaauagcaguacucaug

SEQ ID NO: 447956 - RNA, 22 nt, Human
agaugaagauaucugcaggggc

SEQ ID NO: 447957 - RNA, 20 nt, Human
uccugcagucgcuagcgccc

SEQ ID NO: 447958 - RNA, 22 nt, Human
gcugccucaggcaccuccuggc

SEQ ID NO: 447959 - RNA, 22 nt, Human
auaguacacauccuacaauguu

SEQ ID NO: 447960 - RNA, 22 nt, Human
uugacaauugggagauauaaag

SEQ ID NO: 447961 - RNA, 17 nt, Human
gcugagaggcagcacag

SEQ ID NO: 447962 - RNA, 22 nt, Human
agggcacaagacucugagcccc

SEQ ID NO: 447963 - RNA, 21 nt, Human
agagagaaggccauauggucc

SEQ ID NO: 447964 - RNA, 22 nt, Human
gaagucugcugcucaggaguuu

SEQ ID NO: 447965 - RNA, 23 nt, Human
agaugagccaacaccuccaugcc

SEQ ID NO: 447966 - RNA, 22 nt, Human
caguggccugagccaggcuucc

SEQ ID NO: 447967 - RNA, 22 nt, Human
agggacaguuacaucaucagac

SEQ ID NO: 447968 - RNA, 22 nt, Human
ugagaagcaguuucaguaagaa

SEQ ID NO: 447969 - RNA, 22 nt, Human
ucccagagccaagcuauggaug

SEQ ID NO: 447970 - RNA, 22 nt, Human
acaugaaaagacuaucugauua

SEQ ID NO: 447971 - RNA, 20 nt, Human
ggccuuggccucuuugcagc

SEQ ID NO: 447972 - RNA, 22 nt, Human
ccugccugacagagaagguuca

SEQ ID NO: 447973 - RNA, 22 nt, Human
gcagcugagcgugaggaagagu

SEQ ID NO: 447974 - RNA, 22 nt, Human
ugugaagguaaggaggggcaag

SEQ ID NO: 447975 - RNA, 22 nt, Human
gagccucguggcggccacugcg

SEQ ID NO: 447976 - RNA, 22 nt, Human
uagcuuuaggcacguuugaauu

SEQ ID NO: 447977 - RNA, 22 nt, Human
cacugaaggcuaggauuagaug

SEQ ID NO: 447978 - RNA, 22 nt, Human
uguaaaaccaaaucaaucuagu

SEQ ID NO: 447979 - RNA, 22 nt, Human
ucacaagauacaguuagaagca

SEQ ID NO: 447980 - RNA, 20 nt, Human
ugucagugccugaggcacag

SEQ ID NO: 447981 - RNA, 22 nt, Human
cuggcuggcaaguagaacacaa

SEQ ID NO: 447982 - RNA, 22 nt, Human
aagaauguuaguuucugauaca

SEQ ID NO: 447983 - RNA, 22 nt, Human
aggcugaggcagguggaucacc

SEQ ID NO: 447984 - RNA, 22 nt, Human
aggcccaguagugcugccuuua

SEQ ID NO: 447985 - RNA, 22 nt, Human
gcugaggcuccucgggaggaca

SEQ ID NO: 447986 - RNA, 22 nt, Human
gggagccuugggagugccagcc

SEQ ID NO: 447987 - RNA, 22 nt, Human
uucuacaugguugcucagaggg

SEQ ID NO: 447988 - RNA, 22 nt, Human
cagggccuccccggcagucuuu

SEQ ID NO: 447989 - RNA, 22 nt, Human
augggcagacagggagcucacg

SEQ ID NO: 447990 - RNA, 22 nt, Human
agggaaaggcugaugcuguggg

SEQ ID NO: 447991 - RNA, 22 nt, Human
cugccgaguacagccauagaaa

SEQ ID NO: 447992 - RNA, 22 nt, Human
augugguugaagaauuacaucu

SEQ ID NO: 447993 - RNA, 22 nt, Human
ugccaggccaaugaaggcaggg

SEQ ID NO: 447994 - RNA, 18 nt, Human
ggagccagucugucucug

SEQ ID NO: 447995 - RNA, 22 nt, Human
ggguggaggagaacaggcccca

SEQ ID NO: 447996 - RNA, 22 nt, Human
guaaaguucuauuugaauuuag

SEQ ID NO: 447997 - RNA, 22 nt, Human
acccagagcugggcuuggcaaa

SEQ ID NO: 447998 - RNA, 22 nt, Human
uucuaucauacuugaauacauu

SEQ ID NO: 447999 - RNA, 22 nt, Human
cagcuucucagaaagcugaggu

SEQ ID NO: 448000 - RNA, 20 nt, Human
ucauuacagugcuaagaugu

SEQ ID NO: 448001 - RNA, 22 nt, Human
acauuugacauuuaguaucagc

SEQ ID NO: 448002 - RNA, 22 nt, Human
gcuguccucugaucucuggagg

SEQ ID NO: 448003 - RNA, 19 nt, Human
ggcccaaguacugagugcc

SEQ ID NO: 448004 - RNA, 22 nt, Human
aaucagaaaauucaguggaauu

SEQ ID NO: 448005 - RNA, 22 nt, Human
gacccagccugguuuuuauagg

SEQ ID NO: 448006 - RNA, 22 nt, Human
uggucaacaggcagggaugaaa

SEQ ID NO: 448007 - RNA, 22 nt, Human
uucagagacagcaaccaggaca

SEQ ID NO: 448008 - RNA, 22 nt, Human
guggagccaggggcuguaggua

SEQ ID NO: 448009 - RNA, 22 nt, Human
ggcaggagauaaaauauuaguu

SEQ ID NO: 448010 - RNA, 22 nt, Human
caagagcuacccugugccauau

SEQ ID NO: 448011 - RNA, 22 nt, Human
ggcagcuuuuaucccugacaga

SEQ ID NO: 448012 - RNA, 22 nt, Human
cccagccugucuuucccaauga

SEQ ID NO: 448013 - RNA, 22 nt, Human
ucugagagguuaagcaauuuga

SEQ ID NO: 448014 - RNA, 22 nt, Human
cagggcucagaagacagaccuc

SEQ ID NO: 448015 - RNA, 22 nt, Human
auuacacauagacauucguuca

SEQ ID NO: 448016 - RNA, 22 nt, Human
acagagaaagugggcugaagau

SEQ ID NO: 448017 - RNA, 22 nt, Human
ugggccuguugggguugaguua

SEQ ID NO: 448018 - RNA, 22 nt, Human
cucccagagaccaagcugagaa

SEQ ID NO: 448019 - RNA, 22 nt, Human
agagggcaugcuugguggccug

SEQ ID NO: 448020 - RNA, 22 nt, Human
aguaaaaauugaggugcaaaau

SEQ ID NO: 448021 - RNA, 19 nt, Human
gggaccugacuaauuggca

SEQ ID NO: 448022 - RNA, 22 nt, Human
aucaguuugauaauaaggcuug

SEQ ID NO: 448023 - RNA, 22 nt, Human
ggcuuuaucaaaugagacccug

SEQ ID NO: 448024 - RNA, 22 nt, Human
cccauuuaucccaagguuacuc

SEQ ID NO: 448025 - RNA, 22 nt, Human
agggagguccaucccugcagag

SEQ ID NO: 448026 - RNA, 22 nt, Human
aggaccaacauagcagcagugg

SEQ ID NO: 448027 - RNA, 22 nt, Human
cagggccucauccucagagauu

SEQ ID NO: 448028 - RNA, 20 nt, Human
uccagccacuuccgcugguc

SEQ ID NO: 448029 - RNA, 22 nt, Human
uagcagggguagauagagugug

SEQ ID NO: 448030 - RNA, 22 nt, Human
ugggcccaagagagucuccaac

SEQ ID NO: 448031 - RNA, 17 nt, Human
ugcugccaagucccaac

SEQ ID NO: 448032 - RNA, 22 nt, Human
agcaguggcuggauggugugcu

SEQ ID NO: 448033 - RNA, 22 nt, Human
gcucccagauuucagccuugug

SEQ ID NO: 448034 - RNA, 22 nt, Human
gccugccucaaaaucccaguuc

SEQ ID NO: 448035 - RNA, 22 nt, Human
uuguuuuggaagaacuuacucu

SEQ ID NO: 448036 - RNA, 22 nt, Human
auguuauuuuggaaaauacaaa

SEQ ID NO: 448037 - RNA, 22 nt, Human
gaaugaauucagcacauggaau

SEQ ID NO: 448038 - RNA, 22 nt, Human
ggcugagcaauuuugaugacau

SEQ ID NO: 448039 - RNA, 22 nt, Human
gggcacagaagucuaagacauc

SEQ ID NO: 448040 - RNA, 22 nt, Human
uucuacuuuagcaugcucauuc

SEQ ID NO: 448041 - RNA, 22 nt, Human
ucccaggcuggcaggcagcagu

SEQ ID NO: 448042 - RNA, 22 nt, Human
uggagccagagcgcagccuggg

SEQ ID NO: 448043 - RNA, 22 nt, Human
acauacauaugacaacuuuccu

SEQ ID NO: 448044 - RNA, 22 nt, Human
uagagcuguaucaaagagccuu

SEQ ID NO: 448045 - RNA, 22 nt, Human
cagagccagcccacuguucccg

SEQ ID NO: 448046 - RNA, 18 nt, Human
gaucgggggcgccccaag

SEQ ID NO: 448047 - RNA, 22 nt, Human
ccugucaggguuugccucagaa

SEQ ID NO: 448048 - RNA, 22 nt, Human
agccuggaguucccaggagaag

SEQ ID NO: 448049 - RNA, 22 nt, Human
gugggcagacagugcuuugcag

SEQ ID NO: 448050 - RNA, 22 nt, Human
ggcugggccagggccuguggac

SEQ ID NO: 448051 - RNA, 22 nt, Human
agcagccagagaaugaugcagu

SEQ ID NO: 448052 - RNA, 22 nt, Human
uucacaggaggguggaugcaug

SEQ ID NO: 448053 - RNA, 22 nt, Human
aucuggcuuaccuagggugccu

SEQ ID NO: 448054 - RNA, 22 nt, Human
auacauauaugguacuuccugg

SEQ ID NO: 448055 - RNA, 22 nt, Human
aacuuucuuucacagaaguauc

SEQ ID NO: 448056 - RNA, 22 nt, Human
uugaggcugcacaguacaggcu

SEQ ID NO: 448057 - RNA, 22 nt, Human
aggagcugagggagcgcccuug

SEQ ID NO: 448058 - RNA, 22 nt, Human
ugaagcaaacgcuucuguuccu

SEQ ID NO: 448059 - RNA, 22 nt, Human
ccaggcugcucacaagcugccc

SEQ ID NO: 448060 - RNA, 22 nt, Human
agggcugccugacuccagagcc

SEQ ID NO: 448061 - RNA, 21 nt, Human
ccugggccaaauucccuggac

SEQ ID NO: 448062 - RNA, 22 nt, Human
cuuuauguccuugaagaguugu

SEQ ID NO: 448063 - RNA, 22 nt, Human
uggcagcuuccugcucauagga

SEQ ID NO: 448064 - RNA, 22 nt, Human
acugcaggagacacagcugcug

SEQ ID NO: 448065 - RNA, 22 nt, Human
cauuuguauguuccuccuuagg

SEQ ID NO: 448066 - RNA, 22 nt, Human
gcaggccuccccugcuggagcu

SEQ ID NO: 448067 - RNA, 22 nt, Human
ugcagaagaauguaggcauaag

SEQ ID NO: 448068 - RNA, 21 nt, Human
uagggcucuauuuuuauuuca

SEQ ID NO: 448069 - RNA, 22 nt, Human
caggcagccaggggaccugucc

SEQ ID NO: 448070 - RNA, 20 nt, Human
ugcagggcucugcuucucuc

SEQ ID NO: 448071 - RNA, 19 nt, Human
ucaaaggcaaggaggaacu

SEQ ID NO: 448072 - RNA, 22 nt, Human
agggcccauagaucgucagcuu

SEQ ID NO: 448073 - RNA, 22 nt, Human
agcaccugcacaguggaggaaa

SEQ ID NO: 448074 - RNA, 22 nt, Human
gggggcuggaauauccaucaac

SEQ ID NO: 448075 - RNA, 22 nt, Human
ggagccaguauuuaguggucuu

SEQ ID NO: 448076 - RNA, 22 nt, Human
uacauucuggaaaggcacagac

SEQ ID NO: 448077 - RNA, 22 nt, Human
uacauuaucuuguuaucuuuca

SEQ ID NO: 448078 - RNA, 22 nt, Human
agccuggaggaggaguugagca

SEQ ID NO: 448079 - RNA, 22 nt, Human
cugcuuuguaaaauagacauaa

SEQ ID NO: 448080 - RNA, 21 nt, Human
acauuuucuguuuuaggaagu

SEQ ID NO: 448081 - RNA, 22 nt, Human
gagagcccugcuccuaucccag

SEQ ID NO: 448082 - RNA, 22 nt, Human
gcaaugauauugaagugaugaa

SEQ ID NO: 448083 - RNA, 22 nt, Human
agucccagaugacccagcuacu

SEQ ID NO: 448084 - RNA, 22 nt, Human
cuuucagagguuacucaggaaa

SEQ ID NO: 448085 - RNA, 22 nt, Human
gaggcagcugaaggagugacag

SEQ ID NO: 448086 - RNA, 22 nt, Human
uuccucagaaaauacuguccaa

SEQ ID NO: 448087 - RNA, 22 nt, Human
ccuuucagaugggcauggaccg

SEQ ID NO: 448088 - RNA, 22 nt, Human
ccagcagcccacaggcgucccu

SEQ ID NO: 448089 - RNA, 21 nt, Human
aauuagggugccucuuauaau

SEQ ID NO: 448090 - RNA, 22 nt, Human
aggcacugaagaacucuuuuug

SEQ ID NO: 448091 - RNA, 22 nt, Human
cagacacagcaauucuguguug

SEQ ID NO: 448092 - RNA, 22 nt, Human
gcaggggaguggaugauggauu

SEQ ID NO: 448093 - RNA, 22 nt, Human
cuuugcaauagaggcacacaug

SEQ ID NO: 448094 - RNA, 22 nt, Human
gcccagagagaugcuguagacc

SEQ ID NO: 448095 - RNA, 22 nt, Human
guccucuguagggcugggccac

SEQ ID NO: 448096 - RNA, 22 nt, Human
gcucuuccauuucucuugaacu

SEQ ID NO: 448097 - RNA, 22 nt, Human
uugaggagucaggggcacggaa

SEQ ID NO: 448098 - RNA, 22 nt, Human
uggcagaguaggauggcccugu

SEQ ID NO: 448099 - RNA, 22 nt, Human
cacaagagagugcgcguugcaa

SEQ ID NO: 448100 - RNA, 23 nt, Human
cuuuucauugccuuagcgcagag

SEQ ID NO: 448101 - RNA, 22 nt, Human
uaguggagaaguggagucugug

SEQ ID NO: 448102 - RNA, 22 nt, Human
gcugagccccccugcguggguc

SEQ ID NO: 448103 - RNA, 22 nt, Human
uccagucaagcuugagaauuuc

SEQ ID NO: 448104 - RNA, 22 nt, Human
agauggggcugaaaguuccaau

SEQ ID NO: 448105 - RNA, 23 nt, Human
ggagugcaauggcgccaucucgg

SEQ ID NO: 448106 - RNA, 22 nt, Human
gcccagcaccucucucaggguu

SEQ ID NO: 448107 - RNA, 20 nt, Human
gcagagcuguucugugggga

SEQ ID NO: 448108 - RNA, 22 nt, Human
ucaccgccuugcccggccgggc

SEQ ID NO: 448109 - RNA, 22 nt, Human
caauuucugggccucacacaag

SEQ ID NO: 448110 - RNA, 22 nt, Human
aacaggcaggagaauucugccu

SEQ ID NO: 448111 - RNA, 22 nt, Human
ugucccagcagcuggguucucu

SEQ ID NO: 448112 - RNA, 22 nt, Human
auccuugaaugacucugcccuc

SEQ ID NO: 448113 - RNA, 22 nt, Human
uuguaacaggcacucugugcca

SEQ ID NO: 448114 - RNA, 22 nt, Human
caaaagaagcucuuggggcuag

SEQ ID NO: 448115 - RNA, 22 nt, Human
ugcagcaggagccaggccuggu

SEQ ID NO: 448116 - RNA, 22 nt, Human
guugaaagaucauguggcugcc

SEQ ID NO: 448117 - RNA, 22 nt, Human
uagaaaucuacuuagacuuucu

SEQ ID NO: 448118 - RNA, 22 nt, Human
cuggcucaggaaaguugcugcu

SEQ ID NO: 448119 - RNA, 22 nt, Human
ucuggcuccguguccgcuccca

SEQ ID NO: 448120 - RNA, 22 nt, Human
ggcagccauacucagaccuggg

SEQ ID NO: 448121 - RNA, 20 nt, Human
gcauccagacacccagcugc

SEQ ID NO: 448122 - RNA, 22 nt, Human
uguaucaaggguuuauguaagc

SEQ ID NO: 448123 - RNA, 22 nt, Human
acauuucucauucuccccuaac

SEQ ID NO: 448124 - RNA, 19 nt, Human
ucucacaucagcuccuagc

SEQ ID NO: 448125 - RNA, 22 nt, Human
uggccuggggaagaccaugggc

SEQ ID NO: 448126 - RNA, 22 nt, Human
ucucccagaaguccucaguaca

SEQ ID NO: 448127 - RNA, 22 nt, Human
cugggaggugaacagaaaaacu

SEQ ID NO: 448128 - RNA, 22 nt, Human
aauacagauauucagugguacu

SEQ ID NO: 448129 - RNA, 22 nt, Human
auaaaacuuauuagaauugugu

SEQ ID NO: 448130 - RNA, 22 nt, Human
cccuggagggcagacagaugcc

SEQ ID NO: 448131 - RNA, 22 nt, Human
aagaaacugaaaguggcuucau

SEQ ID NO: 448132 - RNA, 22 nt, Human
cagcacacagugacucgcaccu

SEQ ID NO: 448133 - RNA, 22 nt, Human
ccaggcagagggauccccaucc

SEQ ID NO: 448134 - RNA, 22 nt, Human
gccuggcaggccugggccagca

SEQ ID NO: 448135 - RNA, 22 nt, Human
ucccagaaaaaggaggcuauga

SEQ ID NO: 448136 - RNA, 22 nt, Human
gcauggcauuaacaagauggaa

SEQ ID NO: 448137 - RNA, 21 nt, Human
gccacguuucagucuucucag

SEQ ID NO: 448138 - RNA, 22 nt, Human
uuaucauugucgcagucuaauu

SEQ ID NO: 448139 - RNA, 22 nt, Human
auucucuguuuccaagaugaaa

SEQ ID NO: 448140 - RNA, 22 nt, Human
ucauccaguucacauggugagu

SEQ ID NO: 448141 - RNA, 22 nt, Human
gacucagugauuugacaugccu

SEQ ID NO: 448142 - RNA, 22 nt, Human
gugcuuaauacaugucaauaac

SEQ ID NO: 448143 - RNA, 22 nt, Human
ggcugccugccuccaagccggg

SEQ ID NO: 448144 - RNA, 22 nt, Human
agcccagcaaagggagguucag

SEQ ID NO: 448145 - RNA, 22 nt, Human
gaggagagaagcuaacggugcu

SEQ ID NO: 448146 - RNA, 22 nt, Human
augcuguguuuuaaauggaaau

SEQ ID NO: 448147 - RNA, 22 nt, Human
ugauacagucagcucacaauug

SEQ ID NO: 448148 - RNA, 22 nt, Human
gcagugaagccagaucugaaau

SEQ ID NO: 448149 - RNA, 22 nt, Human
ggccucucuggcauggcugccc

SEQ ID NO: 448150 - RNA, 22 nt, Human
cccaggcaguagaaagaagagg

SEQ ID NO: 448151 - RNA, 22 nt, Human
uccacauucucuguuacagaua

SEQ ID NO: 448152 - RNA, 22 nt, Human
gaggaggaaacccuguuccucu

SEQ ID NO: 448153 - RNA, 22 nt, Human
auucagcaaugagcuuggauuu

SEQ ID NO: 448154 - RNA, 22 nt, Human
ccuggcugcuauagcagcaugu

SEQ ID NO: 448155 - RNA, 22 nt, Human
gccugccuuugugaggaagcgg

SEQ ID NO: 448156 - RNA, 22 nt, Human
uagcuuuaagaugagaugugga

SEQ ID NO: 448157 - RNA, 21 nt, Human
ugggcacugagggugcugcuc

SEQ ID NO: 448158 - RNA, 22 nt, Human
ugauuuccugugcgcccuuagg

SEQ ID NO: 448159 - RNA, 22 nt, Human
accugagccuagggagguugag

SEQ ID NO: 448160 - RNA, 22 nt, Human
gcaccacaucaaugaggggagc

SEQ ID NO: 448161 - RNA, 22 nt, Human
ggguuucaugguucucacaaug

SEQ ID NO: 448162 - RNA, 22 nt, Human
gaggugagaagggggucagaug

SEQ ID NO: 448163 - RNA, 23 nt, Human
uggcucuguggaucccucaggag

SEQ ID NO: 448164 - RNA, 21 nt, Human
acaguucaugauaacuccauc

SEQ ID NO: 448165 - RNA, 22 nt, Human
ggcugagggccagggcuagucu

SEQ ID NO: 448166 - RNA, 22 nt, Human
ucagaggaucaugucccuacuc

SEQ ID NO: 448167 - RNA, 22 nt, Human
gggggcaguaaggauauggaaa

SEQ ID NO: 448168 - RNA, 22 nt, Human
aggucacacuuggaucauagaa

SEQ ID NO: 448169 - RNA, 22 nt, Human
ggagcugcucagagccaguccc

SEQ ID NO: 448170 - RNA, 23 nt, Human
gcugagguacauuuacaggaaga

SEQ ID NO: 448171 - RNA, 22 nt, Human
gcucccagggaccgcagggcag

SEQ ID NO: 448172 - RNA, 22 nt, Human
aacaaauguguuuuguaauuaa

SEQ ID NO: 448173 - RNA, 22 nt, Human
gcagugguccaguucacaccca

SEQ ID NO: 448174 - RNA, 22 nt, Human
aguuuauguagaauuggcaaua

SEQ ID NO: 448175 - RNA, 22 nt, Human
uggcagaguuauggguauuuau

SEQ ID NO: 448176 - RNA, 22 nt, Human
aggagccaagauggggcaagua

SEQ ID NO: 448177 - RNA, 22 nt, Human
caagaaauuucuuaagaacuaa

SEQ ID NO: 448178 - RNA, 22 nt, Human
gcucucugguuccagucaggaa

SEQ ID NO: 448179 - RNA, 21 nt, Human
ggcagccucuguggaagggga

SEQ ID NO: 448180 - RNA, 22 nt, Human
agcugccacaugcccaagggca

SEQ ID NO: 448181 - RNA, 22 nt, Human
gcacagaacuucucuuaguagg

SEQ ID NO: 448182 - RNA, 22 nt, Human
accaggcuugaugauuugcuua

SEQ ID NO: 448183 - RNA, 17 nt, Human
agccccucagcgucacc

SEQ ID NO: 448184 - RNA, 22 nt, Human
guuacaaaugccaaagcugaga

SEQ ID NO: 448185 - RNA, 22 nt, Human
ugcuggggagugauugaccauc

SEQ ID NO: 448186 - RNA, 22 nt, Human
uucagagagaaaccagugggaa

SEQ ID NO: 448187 - RNA, 22 nt, Human
agggcagagcugucuaaauggc

SEQ ID NO: 448188 - RNA, 22 nt, Human
caguucuaauuaauaggaguaa

SEQ ID NO: 448189 - RNA, 22 nt, Human
auucaaguccagcuucucuaca

SEQ ID NO: 448190 - RNA, 22 nt, Human
gucagcaccucuuuggggagcu

SEQ ID NO: 448191 - RNA, 22 nt, Human
gggcccuggauuuaagcaugga

SEQ ID NO: 448192 - RNA, 22 nt, Human
aaagaacaaauuagcuguuuua

SEQ ID NO: 448193 - RNA, 22 nt, Human
agcuccuccugugccaggccag

SEQ ID NO: 448194 - RNA, 22 nt, Human
ucuggcucuguguccccaccca

SEQ ID NO: 448195 - RNA, 22 nt, Human
agaggcuccaccuucucugucc

SEQ ID NO: 448196 - RNA, 22 nt, Human
ucacuugccuagcccaguucag

SEQ ID NO: 448197 - RNA, 22 nt, Human
gcuggcugcgucaucacagggc

SEQ ID NO: 448198 - RNA, 22 nt, Human
gucccagaugucuggaacuccc

SEQ ID NO: 448199 - RNA, 21 nt, Human
agagaauugccuuagauguuc

SEQ ID NO: 448200 - RNA, 22 nt, Human
uucacagacuuuccauagauug

SEQ ID NO: 448201 - RNA, 22 nt, Human
gcugagacuggcagcaggaagu

SEQ ID NO: 448202 - RNA, 22 nt, Human
gucccacugggcaacuagaaaa

SEQ ID NO: 448203 - RNA, 22 nt, Human
ucagagccaaucauggugcauu

SEQ ID NO: 448204 - RNA, 22 nt, Human
aggcccuguuaugagccacugu

SEQ ID NO: 448205 - RNA, 22 nt, Human
acuuugaaacuaaaauucauua

SEQ ID NO: 448206 - RNA, 22 nt, Human
uggcagagcccagacuccaguc

SEQ ID NO: 448207 - RNA, 22 nt, Human
gagacagaguuucacucuuguu

SEQ ID NO: 448208 - RNA, 22 nt, Human
gcaugguggccuuaggguagcc

SEQ ID NO: 448209 - RNA, 18 nt, Human
uggagcaggaagccuggc

SEQ ID NO: 448210 - RNA, 22 nt, Human
ucacacagauugguagagcuga

SEQ ID NO: 448211 - RNA, 22 nt, Human
cugccuuggcccuaguucaugg

SEQ ID NO: 448212 - RNA, 22 nt, Human
cuggcaggaaguuagaugguaa

SEQ ID NO: 448213 - RNA, 22 nt, Human
uggcugggccgggccuugugcc

SEQ ID NO: 448214 - RNA, 22 nt, Human
acacacagguaaaggagccugg

SEQ ID NO: 448215 - RNA, 22 nt, Human
aaaugcaucagcucauaagaga

SEQ ID NO: 448216 - RNA, 21 nt, Human
ucauuugugaucugauuucca

SEQ ID NO: 448217 - RNA, 22 nt, Human
ggagcugcauuuagggagccuu

SEQ ID NO: 448218 - RNA, 22 nt, Human
cagaagcaaaugccuugcugag

SEQ ID NO: 448219 - RNA, 22 nt, Human
uuugggaagaggaaucucugga

SEQ ID NO: 448220 - RNA, 22 nt, Human
gggcacugaaugccaagcuagg

SEQ ID NO: 448221 - RNA, 22 nt, Human
caggagcugggucuggaagcag

SEQ ID NO: 448222 - RNA, 22 nt, Human
augggaggcagacacuaaguuc

SEQ ID NO: 448223 - RNA, 22 nt, Human
aucuggcuuacgaagcacuggu

SEQ ID NO: 448224 - RNA, 22 nt, Human
gaguccaguucuuuccagcagu

SEQ ID NO: 448225 - RNA, 22 nt, Human
cagcugccccauaaaucacagu

SEQ ID NO: 448226 - RNA, 22 nt, Human
aaagcaaugaugguagacacgu

SEQ ID NO: 448227 - RNA, 22 nt, Human
gcagagugauggaaugugggug

SEQ ID NO: 448228 - RNA, 22 nt, Human
ggcauuugagccauuggccugu

SEQ ID NO: 448229 - RNA, 22 nt, Human
gcugccugauuuacauagugaa

SEQ ID NO: 448230 - RNA, 22 nt, Human
acagaauuaaugaaaauuacaa

SEQ ID NO: 448231 - RNA, 22 nt, Human
cacauguaguaagcaggcaaug

SEQ ID NO: 448232 - RNA, 20 nt, Human
aguagcagugugacauugac

SEQ ID NO: 448233 - RNA, 22 nt, Human
uuacaaagagaaguuguagaau

SEQ ID NO: 448234 - RNA, 22 nt, Human
accaucagucauugucaguggg

SEQ ID NO: 448235 - RNA, 22 nt, Human
cuccagggagcuguggagguuu

SEQ ID NO: 448236 - RNA, 22 nt, Human
ccauggccgccgcugcucagga

SEQ ID NO: 448237 - RNA, 22 nt, Human
uucagagaagcaaaggcagauu

SEQ ID NO: 448238 - RNA, 22 nt, Human
ggaaccaggaguuacacgaguu

SEQ ID NO: 448239 - RNA, 22 nt, Human
ugucccagacauaaguggacau

SEQ ID NO: 448240 - RNA, 22 nt, Human
uggcacugccaaccugcuaggu

SEQ ID NO: 448241 - RNA, 21 nt, Human
gcaaguacuaucaucauuauc

SEQ ID NO: 448242 - RNA, 22 nt, Human
acacagggauauuucagguggu

SEQ ID NO: 448243 - RNA, 22 nt, Human
gcaaaaacugcaauuacuuuug

SEQ ID NO: 448244 - RNA, 23 nt, Human
ucagggacaugaugugucauauc

SEQ ID NO: 448245 - RNA, 21 nt, Human
aguuugaugcaauuucugaga

SEQ ID NO: 448246 - RNA, 22 nt, Human
uauuagggaacugcaagacuaa

SEQ ID NO: 448247 - RNA, 22 nt, Human
gcugucuugcucacucuugcag

SEQ ID NO: 448248 - RNA, 22 nt, Human
uggcagggccugcucaucaucc

SEQ ID NO: 448249 - RNA, 21 nt, Human
gagcugggcgaggcuccgggg

SEQ ID NO: 448250 - RNA, 22 nt, Human
uggagcagcaucacuuugagcu

SEQ ID NO: 448251 - RNA, 22 nt, Human
cugaaaauguuacacaggaaga

SEQ ID NO: 448252 - RNA, 22 nt, Human
caggaaagggaugggcugccac

SEQ ID NO: 448253 - RNA, 22 nt, Human
cugugucccaguaccuugggua

SEQ ID NO: 448254 - RNA, 22 nt, Human
gagggugguggcuuaaggugcu

SEQ ID NO: 448255 - RNA, 22 nt, Human
uggcucuguucgccaucaggag

SEQ ID NO: 448256 - RNA, 22 nt, Human
cccagcuugcccaggacugagg

SEQ ID NO: 448257 - RNA, 22 nt, Human
gggcagcucucacagcagccaa

SEQ ID NO: 448258 - RNA, 19 nt, Human
gccucugcuggggacaggc

SEQ ID NO: 448259 - RNA, 22 nt, Human
uugaacaguuuugucagguuca

SEQ ID NO: 448260 - RNA, 22 nt, Human
uacccaggagaaacagcagggc

SEQ ID NO: 448261 - RNA, 22 nt, Human
cagggcagaaggcacucuacuc

SEQ ID NO: 448262 - RNA, 22 nt, Human
aaggcacugaaaaauugugugu

SEQ ID NO: 448263 - RNA, 22 nt, Human
aggcaugugacccuggacucag

SEQ ID NO: 448264 - RNA, 22 nt, Human
ccugcccuagagaugacacaau

SEQ ID NO: 448265 - RNA, 22 nt, Human
cauuucuaagaaggcugcacau

SEQ ID NO: 448266 - RNA, 22 nt, Human
agagccugugggagaugcagcu

SEQ ID NO: 448267 - RNA, 22 nt, Human
ucauuuguugaacuuuagugcg

SEQ ID NO: 448268 - RNA, 22 nt, Human
caaaggcuuccacugcauccuu

SEQ ID NO: 448269 - RNA, 22 nt, Human
gggucucucucggcuccacgcg

SEQ ID NO: 448270 - RNA, 22 nt, Human
cagccagaaccuaggaugagcu

SEQ ID NO: 448271 - RNA, 21 nt, Human
ggagaaggacaauguugagua

SEQ ID NO: 448272 - RNA, 22 nt, Human
ugucucaggggcauugaaauaa

SEQ ID NO: 448273 - RNA, 22 nt, Human
cugcaggcaucuaacugugggc

SEQ ID NO: 448274 - RNA, 22 nt, Human
uucuuuccacagaggggaugau

SEQ ID NO: 448275 - RNA, 21 nt, Human
acagagccgggcacaaagcug

SEQ ID NO: 448276 - RNA, 22 nt, Human
cuggagccagccagggcccucu

SEQ ID NO: 448277 - RNA, 21 nt, Human
cucaaagaccaaaaguguaga

SEQ ID NO: 448278 - RNA, 22 nt, Human
agagaaaagaguucaggcuuug

SEQ ID NO: 448279 - RNA, 22 nt, Human
guaaacaucgacccaacagggg

SEQ ID NO: 448280 - RNA, 22 nt, Human
cacagcugcccuacuccaugug

SEQ ID NO: 448281 - RNA, 22 nt, Human
accaggggaugguuggcacugu

SEQ ID NO: 448282 - RNA, 22 nt, Human
acagcuugcaauggcuuucaac

SEQ ID NO: 448283 - RNA, 23 nt, Human
ucacagggcacuggcugggguug

SEQ ID NO: 448284 - RNA, 22 nt, Human
ccaaaggccaggcacugagguu

SEQ ID NO: 448285 - RNA, 22 nt, Human
agguaaagacagugaaagaggg

SEQ ID NO: 448286 - RNA, 22 nt, Human
ugcagaagcagagccgguggcc

SEQ ID NO: 448287 - RNA, 21 nt, Human
gacaggggaagaagcaaggag

SEQ ID NO: 448288 - RNA, 17 nt, Human
aggccucccuccaggcc

SEQ ID NO: 448289 - RNA, 22 nt, Human
uucugcaucugaauuuaaguac

SEQ ID NO: 448290 - RNA, 22 nt, Human
cccuuccuugugacuggugggg

SEQ ID NO: 448291 - RNA, 22 nt, Human
gcacagaagagcuuuggaauga

SEQ ID NO: 448292 - RNA, 22 nt, Human
cucaggaugcaggucacaggac

SEQ ID NO: 448293 - RNA, 22 nt, Human
auguguaggugaaucgaggcug

SEQ ID NO: 448294 - RNA, 22 nt, Human
guccucuguguaggcugcagac

SEQ ID NO: 448295 - RNA, 22 nt, Human
guguguccaggcgggagucaag

SEQ ID NO: 448296 - RNA, 22 nt, Human
ucuauauuccagauacagauua

SEQ ID NO: 448297 - RNA, 22 nt, Human
guggccagcaagugcugccucu

SEQ ID NO: 448298 - RNA, 22 nt, Human
agccuucauaaucuugggcuuu

SEQ ID NO: 448299 - RNA, 22 nt, Human
cacauaauugaacgugaugagu

SEQ ID NO: 448300 - RNA, 22 nt, Human
gagauuuccauauuuuguaaca

SEQ ID NO: 448301 - RNA, 22 nt, Human
ucuggcucggauuugucuagca

SEQ ID NO: 448302 - RNA, 22 nt, Human
auuaagggccaauccuccagcc

SEQ ID NO: 448303 - RNA, 22 nt, Human
ugaccaaaggugguuuauuugg

SEQ ID NO: 448304 - RNA, 22 nt, Human
ggcagcucacugauuagcaauu

SEQ ID NO: 448305 - RNA, 22 nt, Human
ggcagauggaagaggcuggguc

SEQ ID NO: 448306 - RNA, 22 nt, Human
ccugccaggacauugcuugaag

SEQ ID NO: 448307 - RNA, 22 nt, Human
cacucccuucaggagccuagga

SEQ ID NO: 448308 - RNA, 22 nt, Human
acugggccuggauuggcguguc

SEQ ID NO: 448309 - RNA, 22 nt, Human
cagagguagaaggcaugcagug

SEQ ID NO: 448310 - RNA, 22 nt, Human
acugucuccucaucaugccugg

SEQ ID NO: 448311 - RNA, 19 nt, Human
acacugaauguagaauugg

SEQ ID NO: 448312 - RNA, 22 nt, Human
ucaguggauuggaugagaucug

SEQ ID NO: 448313 - RNA, 22 nt, Human
cagcuuccaucuccacugcccu

SEQ ID NO: 448314 - RNA, 22 nt, Human
ggcucaggacugcagcguagag

SEQ ID NO: 448315 - RNA, 22 nt, Human
ugaguccaccuuaguauauggg

SEQ ID NO: 448316 - RNA, 22 nt, Human
aggccagguuccucaaucuuga

SEQ ID NO: 448317 - RNA, 22 nt, Human
cauugcuuugugcauauuuaaa

SEQ ID NO: 448318 - RNA, 22 nt, Human
ggugcagaucuuucucuucagg

SEQ ID NO: 448319 - RNA, 22 nt, Human
ugcuguuauacuuagcugguua

SEQ ID NO: 448320 - RNA, 17 nt, Human
agccaggcauaugaagu

SEQ ID NO: 448321 - RNA, 20 nt, Human
aguuauaguaucuagccaug

SEQ ID NO: 448322 - RNA, 22 nt, Human
cugcucuguuaauuaaacuuug

SEQ ID NO: 448323 - RNA, 22 nt, Human
uagucucugcuuugcccuuggc

SEQ ID NO: 448324 - RNA, 22 nt, Human
ggcaggugugagaucgaggcca

SEQ ID NO: 448325 - RNA, 22 nt, Human
ucaaagucauggcuaguaauga

SEQ ID NO: 448326 - RNA, 22 nt, Human
gacagacauuuccugauccaau

SEQ ID NO: 448327 - RNA, 22 nt, Human
uaaggccaaacuauuauaguuc

SEQ ID NO: 448328 - RNA, 22 nt, Human
uaauuucuagggacuaaggugc

SEQ ID NO: 448329 - RNA, 22 nt, Human
aggagcugaaacuucucauaug

SEQ ID NO: 448330 - RNA, 23 nt, Human
ucuccuccuagauacagucaugg

SEQ ID NO: 448331 - RNA, 22 nt, Human
acagauuugacugguaccuggc

SEQ ID NO: 448332 - RNA, 22 nt, Human
ccaccagcuucagcagccgcgg

SEQ ID NO: 448333 - RNA, 22 nt, Human
ugcauaaacagauacuucaugu

SEQ ID NO: 448334 - RNA, 22 nt, Human
cgaugguucuggcugcuuguau

SEQ ID NO: 448335 - RNA, 22 nt, Human
ggacacaagcuccggggcugca

SEQ ID NO: 448336 - RNA, 22 nt, Human
aggggugaaggcccgauaggag

SEQ ID NO: 448337 - RNA, 22 nt, Human
auuuauuaagcaucugcuaugu

SEQ ID NO: 448338 - RNA, 22 nt, Human
uuuugaaagccagguuuguaug

SEQ ID NO: 448339 - RNA, 22 nt, Human
augggguggaguccgggcagcg

SEQ ID NO: 448340 - RNA, 22 nt, Human
ccaggccaaauucagucagcag

SEQ ID NO: 448341 - RNA, 18 nt, Human
ccuggcagccaugcgcgc

SEQ ID NO: 448342 - RNA, 22 nt, Human
acugcagccuagggaccacagu

SEQ ID NO: 448343 - RNA, 22 nt, Human
uacaaagucagaauaacaggug

SEQ ID NO: 448344 - RNA, 22 nt, Human
ucagagugugacuuggucauga

SEQ ID NO: 448345 - RNA, 22 nt, Human
agaugauggccauguccucucc

SEQ ID NO: 448346 - RNA, 22 nt, Human
cugggcucagaugagaggaagg

SEQ ID NO: 448347 - RNA, 22 nt, Human
accaaggaagagauucucaguu

SEQ ID NO: 448348 - RNA, 22 nt, Human
cccugagaugccucacccuagu

SEQ ID NO: 448349 - RNA, 22 nt, Human
agggcugcuauguugauucaga

SEQ ID NO: 448350 - RNA, 22 nt, Human
aauccagguggcggagguugug

SEQ ID NO: 448351 - RNA, 22 nt, Human
ugggcccugacuucaagcaucc

SEQ ID NO: 448352 - RNA, 22 nt, Human
uagagaaauaagcuuugccuug

SEQ ID NO: 448353 - RNA, 22 nt, Human
uugauguacagaauuguucaca

SEQ ID NO: 448354 - RNA, 22 nt, Human
gcacugcagccucagauggugg

SEQ ID NO: 448355 - RNA, 22 nt, Human
ggcagggcaggaaagucaggaa

SEQ ID NO: 448356 - RNA, 22 nt, Human
agcaauauuucagcuagcaggu

SEQ ID NO: 448357 - RNA, 22 nt, Human
gcacacacuguuuuccucacau

SEQ ID NO: 448358 - RNA, 22 nt, Human
uacagaauguguaucauuacca

SEQ ID NO: 448359 - RNA, 22 nt, Human
cugaggucaauuaaucaacaac

SEQ ID NO: 448360 - RNA, 19 nt, Human
cucagcuguagcucaugug

SEQ ID NO: 448361 - RNA, 22 nt, Human
acaggccucaagacacccaggu

SEQ ID NO: 448362 - RNA, 22 nt, Human
caggggcuuuuccucuauaagg

SEQ ID NO: 448363 - RNA, 22 nt, Human
aggguaggguaaaugaugcauc

SEQ ID NO: 448364 - RNA, 22 nt, Human
acacagggcaaugcuuugaccu

SEQ ID NO: 448365 - RNA, 22 nt, Human
guuauguaugggggccuuauga

SEQ ID NO: 448366 - RNA, 22 nt, Human
auucuuggcaaggagauuuaaa

SEQ ID NO: 448367 - RNA, 22 nt, Human
ugguaauuaauuugauagguuc

SEQ ID NO: 448368 - RNA, 19 nt, Human
augucccaccgccccugag

SEQ ID NO: 448369 - RNA, 20 nt, Human
uauuuagauucaaguaugga

SEQ ID NO: 448370 - RNA, 22 nt, Human
caaaacugucuagagagagaag

SEQ ID NO: 448371 - RNA, 22 nt, Human
gcuguggcugaagaugcaggga

SEQ ID NO: 448372 - RNA, 21 nt, Human
cuguccaguaauuccuggcac

SEQ ID NO: 448373 - RNA, 22 nt, Human
caguguggcugagacagaggcu

SEQ ID NO: 448374 - RNA, 20 nt, Human
aaaaacaguaaugcugaaga

SEQ ID NO: 448375 - RNA, 22 nt, Human
acuucuggugucauacugcauu

SEQ ID NO: 448376 - RNA, 22 nt, Human
uggcagagucugggcuugggca

SEQ ID NO: 448377 - RNA, 18 nt, Human
auuuugaacaaugcugua

SEQ ID NO: 448378 - RNA, 21 nt, Human
ggccucugccuugccccacuc

SEQ ID NO: 448379 - RNA, 22 nt, Human
gcgagggcacgcgguugaaggc

SEQ ID NO: 448380 - RNA, 22 nt, Human
cagagcugguguuacaagucca

SEQ ID NO: 448381 - RNA, 23 nt, Human
agucucagcuggaaacauguguc

SEQ ID NO: 448382 - RNA, 22 nt, Human
aaggcugagacagcacaggucc

SEQ ID NO: 448383 - RNA, 22 nt, Human
guuuagaauucuaacuuuaagg

SEQ ID NO: 448384 - RNA, 22 nt, Human
gccaugcuugguaugcugugag

SEQ ID NO: 448385 - RNA, 22 nt, Human
caggcagcaggagcccugcucg

SEQ ID NO: 448386 - RNA, 22 nt, Human
cagcugccagcuucucuccauc

SEQ ID NO: 448387 - RNA, 22 nt, Human
agauacauagcugugagcacac

SEQ ID NO: 448388 - RNA, 22 nt, Human
aaggggaaguagcaccagaggu

SEQ ID NO: 448389 - RNA, 22 nt, Human
gacuguguccaugugcuggauu

SEQ ID NO: 448390 - RNA, 22 nt, Human
cucugagcccgcugcagcccca

SEQ ID NO: 448391 - RNA, 22 nt, Human
ugagagugguucagcucagaag

SEQ ID NO: 448392 - RNA, 22 nt, Human
acugaaggaaagccuuugcaug

SEQ ID NO: 448393 - RNA, 22 nt, Human
ucacagacaauuguuuuggugu

SEQ ID NO: 448394 - RNA, 22 nt, Human
gcacagaacagagaaauagcca

SEQ ID NO: 448395 - RNA, 22 nt, Human
gaaaacuaacggaaaaguuagg

SEQ ID NO: 448396 - RNA, 22 nt, Human
uucauguauuuaucauguaaau

SEQ ID NO: 448397 - RNA, 22 nt, Human
aggccuggccccaguugcuagg

SEQ ID NO: 448398 - RNA, 22 nt, Human
gccacugcacuccagcccaggc

SEQ ID NO: 448399 - RNA, 22 nt, Human
caggggcuagcacuuaauguuu

SEQ ID NO: 448400 - RNA, 22 nt, Human
uggccugcccagagcagcucug

SEQ ID NO: 448401 - RNA, 22 nt, Human
ccugcucugguuuagucagucu

SEQ ID NO: 448402 - RNA, 22 nt, Human
ccacccuuggguucggaggccg

SEQ ID NO: 448403 - RNA, 22 nt, Human
ccugccuguaagauggguacaa

SEQ ID NO: 448404 - RNA, 21 nt, Human
guauucuuuaugaagugaaaa

SEQ ID NO: 448405 - RNA, 22 nt, Human
agcuuuauucaugauuucaggg

SEQ ID NO: 448406 - RNA, 22 nt, Human
ucuggcugcugcgugagugcuu

SEQ ID NO: 448407 - RNA, 22 nt, Human
caggaagagaacauggaggcug

SEQ ID NO: 448408 - RNA, 22 nt, Human
cuacauuuugugauuaugaaau

SEQ ID NO: 448409 - RNA, 22 nt, Human
ugccaggagagugcaugcaggg

SEQ ID NO: 448410 - RNA, 22 nt, Human
aggagucauaaaugugaacaaa

SEQ ID NO: 448411 - RNA, 22 nt, Human
gacccugccaugagugacaggg

SEQ ID NO: 448412 - RNA, 22 nt, Human
ucuccaagcagggcugcaaggc

SEQ ID NO: 448413 - RNA, 22 nt, Human
cuggagccaugucuugacugcu

SEQ ID NO: 448414 - RNA, 22 nt, Human
cagcugccacaccucuuucucu

SEQ ID NO: 448415 - RNA, 23 nt, Human
ggggccugcaccggucugcgcgg

SEQ ID NO: 448416 - RNA, 22 nt, Human
agcaggaacgaguucaugggga

SEQ ID NO: 448417 - RNA, 22 nt, Human
ucaaggaggugcuuggcuucac

SEQ ID NO: 448418 - RNA, 22 nt, Human
ugggggaagagcuuguuaaagu

SEQ ID NO: 448419 - RNA, 22 nt, Human
ugaagaagccaauugguaggcu

SEQ ID NO: 448420 - RNA, 22 nt, Human
gggcugucaugugucagugacc

SEQ ID NO: 448421 - RNA, 19 nt, Human
uagcugccuguuaccucca

SEQ ID NO: 448422 - RNA, 22 nt, Human
cuggggccacaacggcgcacgc

SEQ ID NO: 448423 - RNA, 22 nt, Human
ggccuggcucuugcccagccug

SEQ ID NO: 448424 - RNA, 22 nt, Human
acugcuuuucagagucugccug

SEQ ID NO: 448425 - RNA, 20 nt, Human
cccuccagcaaccaggacuu

SEQ ID NO: 448426 - RNA, 22 nt, Human
gcaguccucucauuggccuccu

SEQ ID NO: 448427 - RNA, 22 nt, Human
cacuggggugggccugguagag

SEQ ID NO: 448428 - RNA, 18 nt, Human
cagggccccagaauuauc

SEQ ID NO: 448429 - RNA, 20 nt, Human
caggcaguuugugguuaggg

SEQ ID NO: 448430 - RNA, 22 nt, Human
aauuccugucuuaacaguucug

SEQ ID NO: 448431 - RNA, 22 nt, Human
aguauuucuaguugguucuacu

SEQ ID NO: 448432 - RNA, 23 nt, Human
uggacgccgacuuuggaggcgcu

SEQ ID NO: 448433 - RNA, 22 nt, Human
ccagagugacgugaagugugaa

SEQ ID NO: 448434 - RNA, 22 nt, Human
gauucuuacuucuaagcaagcu

SEQ ID NO: 448435 - RNA, 22 nt, Human
ccagagagucgaugggggacac

SEQ ID NO: 448436 - RNA, 22 nt, Human
cagcugccugucuggaggcaau

SEQ ID NO: 448437 - RNA, 22 nt, Human
gcuugaaaauucauagguauuu

SEQ ID NO: 448438 - RNA, 22 nt, Human
aggcugcuuucauggccgcccc

SEQ ID NO: 448439 - RNA, 22 nt, Human
gccuggagggucccucucugga

SEQ ID NO: 448440 - RNA, 20 nt, Human
ugcuuuaugcuauacuuugu

SEQ ID NO: 448441 - RNA, 20 nt, Human
ugggccuguggcagaagucu

SEQ ID NO: 448442 - RNA, 22 nt, Human
uucuuaaaacuuauggacaggu

SEQ ID NO: 448443 - RNA, 22 nt, Human
caggaacagcaccaggagcuag

SEQ ID NO: 448444 - RNA, 19 nt, Human
ucccgcccacugagcgugc

SEQ ID NO: 448445 - RNA, 22 nt, Human
uggcaggggaggugcuugcuua

SEQ ID NO: 448446 - RNA, 22 nt, Human
ucugccuggauuuuggaaagcu

SEQ ID NO: 448447 - RNA, 22 nt, Human
accaugaugcauccuuaaggaa

SEQ ID NO: 448448 - RNA, 22 nt, Human
cugggcugugguguggcccaaa

SEQ ID NO: 448449 - RNA, 22 nt, Human
uaagacacaugcguacaagaua

SEQ ID NO: 448450 - RNA, 22 nt, Human
uuccucaugggguuccuucaga

SEQ ID NO: 448451 - RNA, 22 nt, Human
uccaggcauaaugcccaguggu

SEQ ID NO: 448452 - RNA, 22 nt, Human
cacaggcagccuuguagaagaa

SEQ ID NO: 448453 - RNA, 22 nt, Human
caguguuccaggcggcagugaa

SEQ ID NO: 448454 - RNA, 20 nt, Human
agaguaacuggcacauaggg

SEQ ID NO: 448455 - RNA, 22 nt, Human
aaacaguagaaguguauuuuau

SEQ ID NO: 448456 - RNA, 22 nt, Human
agugauuugggugucagaaagu

SEQ ID NO: 448457 - RNA, 22 nt, Human
ucuccugugcacccucccugug

SEQ ID NO: 448458 - RNA, 22 nt, Human
gaggcagcaaaauauaucauaa

SEQ ID NO: 448459 - RNA, 22 nt, Human
cucuggaguuagugaucugggc

SEQ ID NO: 448460 - RNA, 22 nt, Human
ggugggcaggcgaggcccaggu

SEQ ID NO: 448461 - RNA, 22 nt, Human
cuggggcugcagcgaucuucau

SEQ ID NO: 448462 - RNA, 22 nt, Human
ucaccaggcuggaaugcagugg

SEQ ID NO: 448463 - RNA, 22 nt, Human
uggguggcacuucuggggucca

SEQ ID NO: 448464 - RNA, 22 nt, Human
acagaggcagugugagauacug

SEQ ID NO: 448465 - RNA, 22 nt, Human
ugcuuuauaaccauuucugugg

SEQ ID NO: 448466 - RNA, 22 nt, Human
gcauuccugagaaugcagagug

SEQ ID NO: 448467 - RNA, 22 nt, Human
caggcagcuagauuuauaacaa

SEQ ID NO: 448468 - RNA, 22 nt, Human
aaaauccucuaauucuagaaua

SEQ ID NO: 448469 - RNA, 22 nt, Human
ggcagggaggaggugaaaguga

SEQ ID NO: 448470 - RNA, 22 nt, Human
gcugagugauugauauuuuagu

SEQ ID NO: 448471 - RNA, 22 nt, Human
gugugcagaagacacaagacau

SEQ ID NO: 448472 - RNA, 22 nt, Human
agucucugcaugccugcugugc

SEQ ID NO: 448473 - RNA, 22 nt, Human
cagggccucuccuccaggaacu

SEQ ID NO: 448474 - RNA, 22 nt, Human
uaacacacugaaggugagaugg

SEQ ID NO: 448475 - RNA, 22 nt, Human
aaggucauugguucugaauucu

SEQ ID NO: 448476 - RNA, 22 nt, Human
uaggagcuaaaauauuuuauau

SEQ ID NO: 448477 - RNA, 22 nt, Human
uacauugugauguuucaauaca

SEQ ID NO: 448478 - RNA, 22 nt, Human
agucauauguggcauuuucuaa

SEQ ID NO: 448479 - RNA, 22 nt, Human
ugcucccagggacucuggcugg

SEQ ID NO: 448480 - RNA, 22 nt, Human
uuuuaaucaugcuucuaugucc

SEQ ID NO: 448481 - RNA, 22 nt, Human
aucuggcucauucagggaacgg

SEQ ID NO: 448482 - RNA, 22 nt, Human
cauugcacuuuggguccaggac

SEQ ID NO: 448483 - RNA, 22 nt, Human
uuugacagacauuuacuacauu

SEQ ID NO: 448484 - RNA, 22 nt, Human
uggccuggaaccuggcagggac

SEQ ID NO: 448485 - RNA, 22 nt, Human
uuucagaucauuuuuuaaguac

SEQ ID NO: 448486 - RNA, 22 nt, Human
acauuucugcuagaauagguga

SEQ ID NO: 448487 - RNA, 22 nt, Human
ccacagggcacaagggagguug

SEQ ID NO: 448488 - RNA, 21 nt, Human
ggagcugcaggagccgaaggc

SEQ ID NO: 448489 - RNA, 22 nt, Human
gaaaggagggaaacagagcggu

SEQ ID NO: 448490 - RNA, 22 nt, Human
uuuacauggaauauugucuugu

SEQ ID NO: 448491 - RNA, 22 nt, Human
cucccugguguccccuccagga

SEQ ID NO: 448492 - RNA, 22 nt, Human
ugccugggaaccaauccuggcu

SEQ ID NO: 448493 - RNA, 22 nt, Human
ucucuguaguugggcagcugcu

SEQ ID NO: 448494 - RNA, 22 nt, Human
uguggcugacuccuggucccca

SEQ ID NO: 448495 - RNA, 22 nt, Human
ggcagcucaccucugguccagg

SEQ ID NO: 448496 - RNA, 22 nt, Human
uucauaguguuuccuuccagug

SEQ ID NO: 448497 - RNA, 22 nt, Human
ccuggagcacagcccaguccca

SEQ ID NO: 448498 - RNA, 22 nt, Human
cagcaucuuucucuucuggagu

SEQ ID NO: 448499 - RNA, 23 nt, Human
gccucugcucugcguuggggacu

SEQ ID NO: 448500 - RNA, 22 nt, Human
uauuuuagguaauauccauugu

SEQ ID NO: 448501 - RNA, 22 nt, Human
ccugggcauaaaucacuccaag

SEQ ID NO: 448502 - RNA, 22 nt, Human
cacccagcuuuugcauccuccg

SEQ ID NO: 448503 - RNA, 22 nt, Human
uuccucaucugugcaccucacu

SEQ ID NO: 448504 - RNA, 19 nt, Human
agggcugcucuggccuggg

SEQ ID NO: 448505 - RNA, 22 nt, Human
gccauuuucugucuuguuuauu

SEQ ID NO: 448506 - RNA, 22 nt, Human
gggccaugagagguucaucaac

SEQ ID NO: 448507 - RNA, 22 nt, Human
auccuugacacacuccaguacu

SEQ ID NO: 448508 - RNA, 22 nt, Human
ggcccagcacagugcuuggggg

SEQ ID NO: 448509 - RNA, 22 nt, Human
cagcaguguggaagcugagggg

SEQ ID NO: 448510 - RNA, 22 nt, Human
uuaagucauuucugauuauaga

SEQ ID NO: 448511 - RNA, 22 nt, Human
cugucucuguugccuguaggug

SEQ ID NO: 448512 - RNA, 22 nt, Human
gaggugggaugugugugcuacu

SEQ ID NO: 448513 - RNA, 22 nt, Human
uaacagaaauuuuaguuagggg

SEQ ID NO: 448514 - RNA, 22 nt, Human
gggagcuguaagggacagguag

SEQ ID NO: 448515 - RNA, 22 nt, Human
cccaggucugccagccuguggg

SEQ ID NO: 448516 - RNA, 20 nt, Human
acauugauuauguuuguaga

SEQ ID NO: 448517 - RNA, 22 nt, Human
cagcuuauucaguaagcacaua

SEQ ID NO: 448518 - RNA, 22 nt, Human
aucuggcucuuccuggaguucc

SEQ ID NO: 448519 - RNA, 22 nt, Human
aagaacauguuaaaagauucac

SEQ ID NO: 448520 - RNA, 17 nt, Human
uccagagcacagagcuc

SEQ ID NO: 448521 - RNA, 22 nt, Human
gcuccacuugcagcuaggcuug

SEQ ID NO: 448522 - RNA, 22 nt, Human
uggccugggccggcagauauac

SEQ ID NO: 448523 - RNA, 22 nt, Human
ugcucuguaacaaauugacaug

SEQ ID NO: 448524 - RNA, 22 nt, Human
uuggagcccugaggaucuggau

SEQ ID NO: 448525 - RNA, 22 nt, Human
aguucuuuugugaacauaugcu

SEQ ID NO: 448526 - RNA, 22 nt, Human
aaaggucauugaaaaggaggaa

SEQ ID NO: 448527 - RNA, 22 nt, Human
caggcugcggucggcucugguc

SEQ ID NO: 448528 - RNA, 22 nt, Human
cucacaggagaaagucaugguc

SEQ ID NO: 448529 - RNA, 22 nt, Human
acagaaauauucguggugcuug

SEQ ID NO: 448530 - RNA, 22 nt, Human
acuguggcgucaggaagaaauu

SEQ ID NO: 448531 - RNA, 22 nt, Human
uccagggagauggcagaggcug

SEQ ID NO: 448532 - RNA, 22 nt, Human
uugggcugaacccugcagcuga

SEQ ID NO: 448533 - RNA, 22 nt, Human
uggcucaggcuugaaaauagau

SEQ ID NO: 448534 - RNA, 22 nt, Human
uccagccuaggggaacagcugc

SEQ ID NO: 448535 - RNA, 22 nt, Human
gccagcucccaagugagccccu

SEQ ID NO: 448536 - RNA, 22 nt, Human
acugucuuccaggucuggaggu

SEQ ID NO: 448537 - RNA, 22 nt, Human
uaaggccaccguuauagaacca

SEQ ID NO: 448538 - RNA, 22 nt, Human
uggcugagaaaaaagagcuaua

SEQ ID NO: 448539 - RNA, 22 nt, Human
ggauccuuaacuaucacaguga

SEQ ID NO: 448540 - RNA, 22 nt, Human
cagagccuuccuagcagacucu

SEQ ID NO: 448541 - RNA, 22 nt, Human
uuacaaagcguugagacaagua

SEQ ID NO: 448542 - RNA, 22 nt, Human
cagggccaguucucgcagcagu

SEQ ID NO: 448543 - RNA, 22 nt, Human
ggagccaggcaaucuguacuuu

SEQ ID NO: 448544 - RNA, 22 nt, Human
ucccugggccacagcugugagc

SEQ ID NO: 448545 - RNA, 22 nt, Human
agagccuggagguucugcugaa

SEQ ID NO: 448546 - RNA, 22 nt, Human
ggcaggagcucagguugguucc

SEQ ID NO: 448547 - RNA, 22 nt, Human
acacuguguggucucucucgga

SEQ ID NO: 448548 - RNA, 23 nt, Human
agcuucauugaccuccgcagggg

SEQ ID NO: 448549 - RNA, 22 nt, Human
ucccuggggauguuggccugcc

SEQ ID NO: 448550 - RNA, 22 nt, Human
cagcugccacuugcucucggcu

SEQ ID NO: 448551 - RNA, 22 nt, Human
uccaugagacagauacuguaag

SEQ ID NO: 448552 - RNA, 22 nt, Human
uaaggcauucucaugcugugaa

SEQ ID NO: 448553 - RNA, 22 nt, Human
cggcagagcuuccugcucagcg

SEQ ID NO: 448554 - RNA, 21 nt, Human
ucuguacaucauugagucccc

SEQ ID NO: 448555 - RNA, 17 nt, Human
uuugaaaggaugucagu

SEQ ID NO: 448556 - RNA, 22 nt, Human
cucuuuccucagccacagucua

SEQ ID NO: 448557 - RNA, 22 nt, Human
agaugguguuuccccaggugga

SEQ ID NO: 448558 - RNA, 20 nt, Human
ccagcauguacacaugugga

SEQ ID NO: 448559 - RNA, 19 nt, Human
uggcugagcuggacugagg

SEQ ID NO: 448560 - RNA, 23 nt, Human
aggauguaggauguauggcagag

SEQ ID NO: 448561 - RNA, 22 nt, Human
agcuggcauacuuugcuaggaa

SEQ ID NO: 448562 - RNA, 22 nt, Human
ccacugggggcugcaggcacuc

SEQ ID NO: 448563 - RNA, 22 nt, Human
gcagagccagaauggccaggac

SEQ ID NO: 448564 - RNA, 22 nt, Human
agcugaggaggaaugaugggua

SEQ ID NO: 448565 - RNA, 22 nt, Human
ggucagggggaucugugaggua

SEQ ID NO: 448566 - RNA, 22 nt, Human
cagagacauuaagugccaugau

SEQ ID NO: 448567 - RNA, 22 nt, Human
uggcuucuuagaccaguggccu

SEQ ID NO: 448568 - RNA, 22 nt, Human
gccugcagggugaugggcugcc

SEQ ID NO: 448569 - RNA, 22 nt, Human
aacaugauggggaagaacaaga

SEQ ID NO: 448570 - RNA, 22 nt, Human
uucuuucacucaagaaggaucu

SEQ ID NO: 448571 - RNA, 22 nt, Human
cuggcucucugagauauugagu

SEQ ID NO: 448572 - RNA, 22 nt, Human
gccugugcauagcagcggacuc

SEQ ID NO: 448573 - RNA, 22 nt, Human
auaucacaaacaagucuguacu

SEQ ID NO: 448574 - RNA, 22 nt, Human
guacaaaaguuauugcgguuuu

SEQ ID NO: 448575 - RNA, 19 nt, Human
agccuggagggcuggucac

SEQ ID NO: 448576 - RNA, 22 nt, Human
aaagaguucuaugaucuuucca

SEQ ID NO: 448577 - RNA, 22 nt, Human
auggaaaggcuguggaaacuua

SEQ ID NO: 448578 - RNA, 22 nt, Human
ugcccuguuaucuuggaagagu

SEQ ID NO: 448579 - RNA, 22 nt, Human
uauauguguggauucuuguaga

SEQ ID NO: 448580 - RNA, 22 nt, Human
ucagaggaggcauuuaaacaga

SEQ ID NO: 448581 - RNA, 22 nt, Human
agggcucccgugaggugacugc

SEQ ID NO: 448582 - RNA, 22 nt, Human
cuguagccaguuuggccucacc

SEQ ID NO: 448583 - RNA, 22 nt, Human
uguguacauaucuauccuagau

SEQ ID NO: 448584 - RNA, 22 nt, Human
ggccuugggaggagggucagaa

SEQ ID NO: 448585 - RNA, 22 nt, Human
uggccuugggcagguggccugc

SEQ ID NO: 448586 - RNA, 22 nt, Human
aggucauuggggacuaucuccg

SEQ ID NO: 448587 - RNA, 21 nt, Human
gaaaggucuuaacuuacagag

SEQ ID NO: 448588 - RNA, 22 nt, Human
ccugaggcuuaaucugucccaa

SEQ ID NO: 448589 - RNA, 23 nt, Human
ugccagaggcagucacaguggug

SEQ ID NO: 448590 - RNA, 22 nt, Human
gugcauugcgaugcagacgacc

SEQ ID NO: 448591 - RNA, 22 nt, Human
gagcccucucuguaggcaagua

SEQ ID NO: 448592 - RNA, 22 nt, Human
ggagugggaacaaugacauggu

SEQ ID NO: 448593 - RNA, 22 nt, Human
cagccagggucaggcagcuucu

SEQ ID NO: 448594 - RNA, 22 nt, Human
gcagaggcuccauuuuacagau

SEQ ID NO: 448595 - RNA, 18 nt, Human
cguuuuuccgggauugca

SEQ ID NO: 448596 - RNA, 22 nt, Human
cuggccuuggugcuugcagaca

SEQ ID NO: 448597 - RNA, 22 nt, Human
agagcuggacgucugagcccua

SEQ ID NO: 448598 - RNA, 22 nt, Human
ucacauuuuaucuauuuuaagu

SEQ ID NO: 448599 - RNA, 22 nt, Human
cauuagggacugaggaauaagg

SEQ ID NO: 448600 - RNA, 22 nt, Human
cagugucuccagaugcuccaau

SEQ ID NO: 448601 - RNA, 22 nt, Human
gagccugaaauacaggucacug

SEQ ID NO: 448602 - RNA, 22 nt, Human
auuauuagauucuuaauuguaa

SEQ ID NO: 448603 - RNA, 22 nt, Human
ugcuuuauugcaucaguguggg

SEQ ID NO: 448604 - RNA, 22 nt, Human
guaggcagauaggagugcagcc

SEQ ID NO: 448605 - RNA, 21 nt, Human
aaagaacaggcagauguucuu

SEQ ID NO: 448606 - RNA, 22 nt, Human
ccaggugucuguggccagcccu

SEQ ID NO: 448607 - RNA, 22 nt, Human
gccaggcuccaggcccuccuga

SEQ ID NO: 448608 - RNA, 22 nt, Human
guugaguggguuaggaugcuga

SEQ ID NO: 448609 - RNA, 22 nt, Human
ucaugucaguuucuucuauaaa

SEQ ID NO: 448610 - RNA, 22 nt, Human
augaggcagucuggccugaggg

SEQ ID NO: 448611 - RNA, 21 nt, Human
agaaaauggcguuuuagauuu

SEQ ID NO: 448612 - RNA, 22 nt, Human
auucacaauuagaaguagauaa

SEQ ID NO: 448613 - RNA, 22 nt, Human
caggcugcagaggccuuucaug

SEQ ID NO: 448614 - RNA, 22 nt, Human
gaggcucaacccacagggguug

SEQ ID NO: 448615 - RNA, 22 nt, Human
uguucccaagauaagauuauga

SEQ ID NO: 448616 - RNA, 22 nt, Human
gugccagcaguuauggugauuu

SEQ ID NO: 448617 - RNA, 22 nt, Human
gcuggugccuuguuguuguuac

SEQ ID NO: 448618 - RNA, 22 nt, Human
agaagccacuggagguugagau

SEQ ID NO: 448619 - RNA, 22 nt, Human
ccugucugcaugaucccugcca

SEQ ID NO: 448620 - RNA, 22 nt, Human
cagcaggguagguuguaucagu

SEQ ID NO: 448621 - RNA, 22 nt, Human
ugcugccuuagcagccaggcaa

SEQ ID NO: 448622 - RNA, 22 nt, Human
aggcugagguaggaggaucgcu

SEQ ID NO: 448623 - RNA, 22 nt, Human
cuggggcugcgguggaggagcc

SEQ ID NO: 448624 - RNA, 22 nt, Human
cagcagcaacaacggaagccuu

SEQ ID NO: 448625 - RNA, 22 nt, Human
ccagccaggcauugcaaacuga

SEQ ID NO: 448626 - RNA, 22 nt, Human
cccuggagguggagguugcagg

SEQ ID NO: 448627 - RNA, 22 nt, Human
cagcaguggcugcaggcagcug

SEQ ID NO: 448628 - RNA, 22 nt, Human
augaaacaugagaaauggagag

SEQ ID NO: 448629 - RNA, 22 nt, Human
agagggcugccucagucagcua

SEQ ID NO: 448630 - RNA, 22 nt, Human
ugccugucagggggagugggaa

SEQ ID NO: 448631 - RNA, 22 nt, Human
uccucaggaucuaggagugcuu

SEQ ID NO: 448632 - RNA, 22 nt, Human
uagugaaauuuaugcacagcua

SEQ ID NO: 448633 - RNA, 22 nt, Human
ugaaggaaugagggaguggguc

SEQ ID NO: 448634 - RNA, 22 nt, Human
gaggaaacauuguagaagcagu

SEQ ID NO: 448635 - RNA, 22 nt, Human
gagggcucuacucaccacccug

SEQ ID NO: 448636 - RNA, 22 nt, Human
acuguacaaauauugcaaaaua

SEQ ID NO: 448637 - RNA, 22 nt, Human
gaugaggggucauuggcuggga

SEQ ID NO: 448638 - RNA, 21 nt, Human
aagcaggacauaugaugcccu

SEQ ID NO: 448639 - RNA, 22 nt, Human
gagcuuuagcugagaccugcuu

SEQ ID NO: 448640 - RNA, 22 nt, Human
gccuucaggaaaucaguccuug

SEQ ID NO: 448641 - RNA, 22 nt, Human
ucagcugaaguggagaagcaga

SEQ ID NO: 448642 - RNA, 22 nt, Human
gagagaagaauguuccgaggcc

SEQ ID NO: 448643 - RNA, 22 nt, Human
gcucuggagauggagccuugag

SEQ ID NO: 448644 - RNA, 22 nt, Human
uugugguuaaccgcacauuuuu

SEQ ID NO: 448645 - RNA, 22 nt, Human
ucugcagaauucgaggaagaaa

SEQ ID NO: 448646 - RNA, 22 nt, Human
gaggcucacuuucauccucuuc

SEQ ID NO: 448647 - RNA, 22 nt, Human
cccaggcagcccuucugacgca

SEQ ID NO: 448648 - RNA, 22 nt, Human
gaugcacagugacccugccagu

SEQ ID NO: 448649 - RNA, 22 nt, Human
uugcauugugauuacagaggug

SEQ ID NO: 448650 - RNA, 22 nt, Human
gaagccaggggccugacaggca

SEQ ID NO: 448651 - RNA, 22 nt, Human
gcugcucuacccaugcaucugu

SEQ ID NO: 448652 - RNA, 22 nt, Human
uuacuuuggauggucaagaaag

SEQ ID NO: 448653 - RNA, 22 nt, Human
gcugcagugagccaagaucgug

SEQ ID NO: 448654 - RNA, 22 nt, Human
aggagccaggaaaccugcucug

SEQ ID NO: 448655 - RNA, 22 nt, Human
agaaagaacgcacuugugcugc

SEQ ID NO: 448656 - RNA, 22 nt, Human
ccagcugucugguuccagagcc

SEQ ID NO: 448657 - RNA, 21 nt, Human
ucuuugcaucaguuguuuucu

SEQ ID NO: 448658 - RNA, 22 nt, Human
uuagaaaggagcuuauuucuuu

SEQ ID NO: 448659 - RNA, 22 nt, Human
uagaaacccauguuuauucagu

SEQ ID NO: 448660 - RNA, 22 nt, Human
caggcagcguccugcuuccugu

SEQ ID NO: 448661 - RNA, 22 nt, Human
aaacacaccuuuggaacuguga

SEQ ID NO: 448662 - RNA, 18 nt, Human
agccuggaggguugaagu

SEQ ID NO: 448663 - RNA, 22 nt, Human
cauacauuuugcauauuuacca

SEQ ID NO: 448664 - RNA, 22 nt, Human
augcacccagugucuggacuau

SEQ ID NO: 448665 - RNA, 22 nt, Human
uuauuaaugaguacaaguuauu

SEQ ID NO: 448666 - RNA, 22 nt, Human
uggcccuguguccugcugccag

SEQ ID NO: 448667 - RNA, 22 nt, Human
ggcucaccauuuucacucucug

SEQ ID NO: 448668 - RNA, 22 nt, Human
ggcagagaugugggucagaauc

SEQ ID NO: 448669 - RNA, 22 nt, Human
ucacauuuucuacuacuguacg

SEQ ID NO: 448670 - RNA, 22 nt, Human
ucauuacaguguuuauaugucu

SEQ ID NO: 448671 - RNA, 22 nt, Human
caccugcagggggagucaagag

SEQ ID NO: 448672 - RNA, 22 nt, Human
auaauuuaaauuaguaugugau

SEQ ID NO: 448673 - RNA, 22 nt, Human
gcugagcugcuguucauccugc

SEQ ID NO: 448674 - RNA, 22 nt, Human
ucugcagauuuaucagcagcug

SEQ ID NO: 448675 - RNA, 22 nt, Human
uccuuugacuucuugcagucca

SEQ ID NO: 448676 - RNA, 22 nt, Human
gggcacugcuuugcucugucac

SEQ ID NO: 448677 - RNA, 22 nt, Human
agagccuggacuuuucugagcc

SEQ ID NO: 448678 - RNA, 22 nt, Human
ugguccagacauuucugaggua

SEQ ID NO: 448679 - RNA, 22 nt, Human
cagcugagcucccaggccauca

SEQ ID NO: 448680 - RNA, 22 nt, Human
gaaaugcagauucugauucugu

SEQ ID NO: 448681 - RNA, 22 nt, Human
cucacugugccuuuucccaaac

SEQ ID NO: 448682 - RNA, 22 nt, Human
gaugguuugguaaaaguauguu

SEQ ID NO: 448683 - RNA, 22 nt, Human
gcuggcucagggacuagaguuu

SEQ ID NO: 448684 - RNA, 22 nt, Human
acugucuuguguuaaagaacca

SEQ ID NO: 448685 - RNA, 22 nt, Human
agagcugcccacacagcagauu

SEQ ID NO: 448686 - RNA, 22 nt, Human
gcagaagaccaugguggaaaga

SEQ ID NO: 448687 - RNA, 22 nt, Human
uggcagucggacuucuaucuca

SEQ ID NO: 448688 - RNA, 22 nt, Human
guccuggcccacuggcaggcug

SEQ ID NO: 448689 - RNA, 22 nt, Human
ccagaaggcggagauugcagug

SEQ ID NO: 448690 - RNA, 22 nt, Human
gucucagggacugcuucugggg

SEQ ID NO: 448691 - RNA, 22 nt, Human
uuacuucuuacaaaagaaauau

SEQ ID NO: 448692 - RNA, 22 nt, Human
cuggagcauccaugcccagggu

SEQ ID NO: 448693 - RNA, 22 nt, Human
ggcaugggguguauguggcacg

SEQ ID NO: 448694 - RNA, 22 nt, Human
aggcugaggcuuuccuuggaga

SEQ ID NO: 448695 - RNA, 22 nt, Human
uguacacaauucuuaacauaca

SEQ ID NO: 448696 - RNA, 22 nt, Human
ucuucuccagugcuucugcaca

SEQ ID NO: 448697 - RNA, 22 nt, Human
acucugcuuauugcugcaggca

SEQ ID NO: 448698 - RNA, 22 nt, Human
cugugcaagcccaagauaaaac

SEQ ID NO: 448699 - RNA, 22 nt, Human
ggggcccagcaccccuccucgc

SEQ ID NO: 448700 - RNA, 22 nt, Human
cagucccaccaggaucgcucuu

SEQ ID NO: 448701 - RNA, 22 nt, Human
aucaaaguccaucagaagguag

SEQ ID NO: 448702 - RNA, 22 nt, Human
ucugcucuaguugcuuccugcc

SEQ ID NO: 448703 - RNA, 22 nt, Human
gcagaggcauuucugacgcugc

SEQ ID NO: 448704 - RNA, 22 nt, Human
ggcacugagaggcucuuccuaa

SEQ ID NO: 448705 - RNA, 22 nt, Human
ccagcuuuccugcgaguugauu

SEQ ID NO: 448706 - RNA, 22 nt, Human
acagguggcauaggcaguuuga

SEQ ID NO: 448707 - RNA, 22 nt, Human
aaaugcuguaacugauauucug

SEQ ID NO: 448708 - RNA, 22 nt, Human
ugaaggagcucaaugaugaugc

SEQ ID NO: 448709 - RNA, 22 nt, Human
auuauuuuaugugcggccugau

SEQ ID NO: 448710 - RNA, 22 nt, Human
ccuuucucuuugcugaucaugu

SEQ ID NO: 448711 - RNA, 22 nt, Human
ugggccacuugaaaguggaugu

SEQ ID NO: 448712 - RNA, 22 nt, Human
agugcugucccgacaacugagg

SEQ ID NO: 448713 - RNA, 22 nt, Human
agccacagucaaccuguccaua

SEQ ID NO: 448714 - RNA, 22 nt, Human
uggaggcaucagagugcuuggc

SEQ ID NO: 448715 - RNA, 22 nt, Human
gcaaaggcuucuuuuauucucc

SEQ ID NO: 448716 - RNA, 22 nt, Human
ucuguacaaaggcuauuuggag

SEQ ID NO: 448717 - RNA, 22 nt, Human
ugcagggagggcccagcaaucu

SEQ ID NO: 448718 - RNA, 22 nt, Human
aucaggauccaccuugagccug

SEQ ID NO: 448719 - RNA, 22 nt, Human
agagccugggaauuugcauguu

SEQ ID NO: 448720 - RNA, 22 nt, Human
acagagguguguguaggacagu

SEQ ID NO: 448721 - RNA, 19 nt, Human
acuuucuccaggaccuguu

SEQ ID NO: 448722 - RNA, 22 nt, Human
augggaggaugcucgggugcuc

SEQ ID NO: 448723 - RNA, 23 nt, Human
ugaaggccuggaggacgcguugu

SEQ ID NO: 448724 - RNA, 22 nt, Human
gcagcuuucuugcccuaaucuu

SEQ ID NO: 448725 - RNA, 22 nt, Human
caugaauauacauccugauggc

SEQ ID NO: 448726 - RNA, 22 nt, Human
ccuuuauucaauuaguccuaau

SEQ ID NO: 448727 - RNA, 23 nt, Human
ucagagaaguuguaggcugggga

SEQ ID NO: 448728 - RNA, 22 nt, Human
cauguacacucauguaacuaua

SEQ ID NO: 448729 - RNA, 22 nt, Human
cagguggggagaguguggagca

SEQ ID NO: 448730 - RNA, 22 nt, Human
uaaugcaguacugauauaaaca

SEQ ID NO: 448731 - RNA, 22 nt, Human
uaguuuuuucaacaaauggugc

SEQ ID NO: 448732 - RNA, 22 nt, Human
caggguccaucuuucaucacug

SEQ ID NO: 448733 - RNA, 20 nt, Human
gccugagcuauugccaggau

SEQ ID NO: 448734 - RNA, 22 nt, Human
ccuuggcccuagccucaggcaa

SEQ ID NO: 448735 - RNA, 22 nt, Human
gugcucuguguauuaggauguc

SEQ ID NO: 448736 - RNA, 22 nt, Human
uucauauaaauggaaucagaau

SEQ ID NO: 448737 - RNA, 22 nt, Human
ucaggcugcuggccagcaggcu

SEQ ID NO: 448738 - RNA, 19 nt, Human
uuugugaagaaaaugaugc

SEQ ID NO: 448739 - RNA, 18 nt, Human
ggaaaccacaggguucug

SEQ ID NO: 448740 - RNA, 22 nt, Human
ggacuggccggcgcugaggccc

SEQ ID NO: 448741 - RNA, 22 nt, Human
acaguaauauugaugcucguca

SEQ ID NO: 448742 - RNA, 23 nt, Human
aggcagugucucuuauccugucc

SEQ ID NO: 448743 - RNA, 22 nt, Human
acuccuggggcugccaucacag

SEQ ID NO: 448744 - RNA, 22 nt, Human
ucaaaugcggucauggcuuuua

SEQ ID NO: 448745 - RNA, 22 nt, Human
ucaucacauguguagucauccc

SEQ ID NO: 448746 - RNA, 22 nt, Human
augauucagcaauuuuauaucu

SEQ ID NO: 448747 - RNA, 22 nt, Human
aaaucagugcucauuugaaagg

SEQ ID NO: 448748 - RNA, 22 nt, Human
uccauuuuguagguaugcuaca

SEQ ID NO: 448749 - RNA, 22 nt, Human
cuuaauuucaaacugcuaguga

SEQ ID NO: 448750 - RNA, 22 nt, Human
uaaaucaguuucucuuauuggu

SEQ ID NO: 448751 - RNA, 22 nt, Human
uagcauuucacugaucuucacu

SEQ ID NO: 448752 - RNA, 22 nt, Human
cagagcuguuacuauucaugaa

SEQ ID NO: 448753 - RNA, 22 nt, Human
uuuuaucuucauuccuaucuac

SEQ ID NO: 448754 - RNA, 22 nt, Human
gucccuuggcucacaaacagcu

SEQ ID NO: 448755 - RNA, 23 nt, Human
cagaccuggcagucauccucaac

SEQ ID NO: 448756 - RNA, 22 nt, Human
auacauuagcucauaugauuaa

SEQ ID NO: 448757 - RNA, 22 nt, Human
uugaaucauuacaauagauaag

SEQ ID NO: 448758 - RNA, 22 nt, Human
aaaaaugcugugguagcugugu

SEQ ID NO: 448759 - RNA, 23 nt, Human
agaggccaacuucuugccccucc

SEQ ID NO: 448760 - RNA, 22 nt, Human
ccugggagcuguggaaaggcug

SEQ ID NO: 448761 - RNA, 22 nt, Human
ccccuuccgucucuugaguguc

SEQ ID NO: 448762 - RNA, 22 nt, Human
aucaguuuaacugucaagagcc

SEQ ID NO: 448763 - RNA, 20 nt, Human
ucucaggccccaguuuucuu

SEQ ID NO: 448764 - RNA, 22 nt, Human
ggcuucugaaaucucugugcgu

SEQ ID NO: 448765 - RNA, 22 nt, Human
aggucaaguuuagauagaguua

SEQ ID NO: 448766 - RNA, 22 nt, Human
guauuagguuggugcaaaauug

SEQ ID NO: 448767 - RNA, 22 nt, Human
auggacagugugaagcagauag

SEQ ID NO: 448768 - RNA, 22 nt, Human
cagcugccccuccagggcuggg

SEQ ID NO: 448769 - RNA, 18 nt, Human
uuuuacucauagcaggcc

SEQ ID NO: 448770 - RNA, 22 nt, Human
gcuccuggcuccaggcagccaa

SEQ ID NO: 448771 - RNA, 22 nt, Human
uggcucugagacacaggcucuc

SEQ ID NO: 448772 - RNA, 22 nt, Human
uacacuuuuuacuacagauucu

SEQ ID NO: 448773 - RNA, 22 nt, Human
uuucuggcagcgggacaggggu

SEQ ID NO: 448774 - RNA, 22 nt, Human
gcaccugcaggaugagccaggg

SEQ ID NO: 448775 - RNA, 22 nt, Human
ugaggcaggagaauggcgggaa

SEQ ID NO: 448776 - RNA, 22 nt, Human
aucagcaagcaugguuaggugu

SEQ ID NO: 448777 - RNA, 22 nt, Human
agccagaggccagccugccuca

SEQ ID NO: 448778 - RNA, 22 nt, Human
acaggugaccugcucauaugaa

SEQ ID NO: 448779 - RNA, 17 nt, Human
accagccucuccugggg

SEQ ID NO: 448780 - RNA, 22 nt, Human
cugagagcagggacuugagcca

SEQ ID NO: 448781 - RNA, 22 nt, Human
uugucuguccaggcaccccaag

SEQ ID NO: 448782 - RNA, 22 nt, Human
gcagggacgcagcacucuccgu

SEQ ID NO: 448783 - RNA, 21 nt, Human
ugcaggcaggcagagaugcug

SEQ ID NO: 448784 - RNA, 22 nt, Human
aagggcucugugcuugucccau

SEQ ID NO: 448785 - RNA, 22 nt, Human
cuguuuauacgacagguggagg

SEQ ID NO: 448786 - RNA, 22 nt, Human
caguggagagacuuuuacucuu

SEQ ID NO: 448787 - RNA, 22 nt, Human
ucccagaggcaguugguaacuu

SEQ ID NO: 448788 - RNA, 22 nt, Human
agcagggcaaagucaggcuaac

SEQ ID NO: 448789 - RNA, 22 nt, Human
gguccccagcaguggcugcuuc

SEQ ID NO: 448790 - RNA, 22 nt, Human
gagaaaauagcauguguaguau

SEQ ID NO: 448791 - RNA, 22 nt, Human
auggcccaggccuccuguggcu

SEQ ID NO: 448792 - RNA, 22 nt, Human
ggccucugaggacagccuuggc

SEQ ID NO: 448793 - RNA, 22 nt, Human
ucugccagaaguucugagagua

SEQ ID NO: 448794 - RNA, 22 nt, Human
ccucucauagucuguauccuuu

SEQ ID NO: 448795 - RNA, 22 nt, Human
aaaugaacucuuccugcauccc

SEQ ID NO: 448796 - RNA, 21 nt, Human
aggcuguccuuugccagcccu

SEQ ID NO: 448797 - RNA, 22 nt, Human
aaaugucuuugaguauuucugc

SEQ ID NO: 448798 - RNA, 22 nt, Human
aggaacugauuuauaacuuuag

SEQ ID NO: 448799 - RNA, 22 nt, Human
gccuggaggggccaggguggua

SEQ ID NO: 448800 - RNA, 22 nt, Human
cuggagccacuuuuuauccuuu

SEQ ID NO: 448801 - RNA, 22 nt, Human
accagcuguguccuggcugcag

SEQ ID NO: 448802 - RNA, 21 nt, Human
ucagcagcaucugccuagagu

SEQ ID NO: 448803 - RNA, 22 nt, Human
ugagcuucaaaauaugugaauc

SEQ ID NO: 448804 - RNA, 22 nt, Human
uggggcagaguaggauuuuggc

SEQ ID NO: 448805 - RNA, 22 nt, Human
agcagcugcagagggcuccccc

SEQ ID NO: 448806 - RNA, 22 nt, Human
gggcacuguguucagagugcag

SEQ ID NO: 448807 - RNA, 22 nt, Human
uggccuuguguuuuagagaaag

SEQ ID NO: 448808 - RNA, 22 nt, Human
gcagggcagcugaagcuaggug

SEQ ID NO: 448809 - RNA, 22 nt, Human
guuaauuuaguagaguccagau

SEQ ID NO: 448810 - RNA, 22 nt, Human
uuaauuuucucaucugugaaau

SEQ ID NO: 448811 - RNA, 22 nt, Human
gccugcagccucaagggcugag

SEQ ID NO: 448812 - RNA, 22 nt, Human
agcagcucugagaggccagcac

SEQ ID NO: 448813 - RNA, 22 nt, Human
ccagcuuuggaguguuguugcu

SEQ ID NO: 448814 - RNA, 22 nt, Human
cacucugcagcugaagggcugg

SEQ ID NO: 448815 - RNA, 22 nt, Human
aagggcuccaagagguagcugg

SEQ ID NO: 448816 - RNA, 22 nt, Human
uuccuuccgggcaccaggcacu

SEQ ID NO: 448817 - RNA, 22 nt, Human
gcaggccugacuguagggggca

SEQ ID NO: 448818 - RNA, 22 nt, Human
uuucuguuaggcaucauuuuaa

SEQ ID NO: 448819 - RNA, 22 nt, Human
augcccaaugucacaauuuuug

SEQ ID NO: 448820 - RNA, 22 nt, Human
uaaggcacgcauaagagggggc

SEQ ID NO: 448821 - RNA, 22 nt, Human
aagaauguggguggauaugaug

SEQ ID NO: 448822 - RNA, 22 nt, Human
cccucuacagggaagcgcuuuc

SEQ ID NO: 448823 - RNA, 22 nt, Human
ucgggcucgcucuccuagcgga

SEQ ID NO: 448824 - RNA, 22 nt, Human
gcucccugaaaagaacaaaguc

SEQ ID NO: 448825 - RNA, 22 nt, Human
agugccaggagcaaggagcucc

SEQ ID NO: 448826 - RNA, 22 nt, Human
ugaugaaacugagguuccaaga

SEQ ID NO: 448827 - RNA, 23 nt, Human
agggguggucaguacccgcagug

SEQ ID NO: 448828 - RNA, 22 nt, Human
agccugagugcuuaggacuguu

SEQ ID NO: 448829 - RNA, 22 nt, Human
cauuucuagggaucauaaagua

SEQ ID NO: 448830 - RNA, 22 nt, Human
gguguccucaugauuuucuaga

SEQ ID NO: 448831 - RNA, 22 nt, Human
ucucccaguccucugugcuuac

SEQ ID NO: 448832 - RNA, 22 nt, Human
ugacagaaauaguucuuaauuu

SEQ ID NO: 448833 - RNA, 22 nt, Human
uuuuccuucugauacuccauuu

SEQ ID NO: 448834 - RNA, 22 nt, Human
gguguccuugcagaaggcggcg

SEQ ID NO: 448835 - RNA, 20 nt, Human
aagggagaauaaugauugua

SEQ ID NO: 448836 - RNA, 22 nt, Human
gggguugguuuaaaugcuugag

SEQ ID NO: 448837 - RNA, 22 nt, Human
ggaggccaggguggguggaucg

SEQ ID NO: 448838 - RNA, 22 nt, Human
aguacuuuacuucuuacaguuu

SEQ ID NO: 448839 - RNA, 22 nt, Human
cagagcucagagcugccaggca

SEQ ID NO: 448840 - RNA, 22 nt, Human
caguuucuucaucaguuaagca

SEQ ID NO: 448841 - RNA, 21 nt, Human
auuuucauuaauucagugugg

SEQ ID NO: 448842 - RNA, 22 nt, Human
uguguauucagcaagcgaaaca

SEQ ID NO: 448843 - RNA, 22 nt, Human
uggcucaggggucuggcucugu

SEQ ID NO: 448844 - RNA, 22 nt, Human
gagggcuccucacauucucuau

SEQ ID NO: 448845 - RNA, 22 nt, Human
aucuggcuauuucuggucgggg

SEQ ID NO: 448846 - RNA, 22 nt, Human
auugucuucuggucuuaucuuu

SEQ ID NO: 448847 - RNA, 22 nt, Human
aaugucugcucuacucaggagg

SEQ ID NO: 448848 - RNA, 20 nt, Human
ggaagccagcauccuugagg

SEQ ID NO: 448849 - RNA, 22 nt, Human
cggcagcaaaggaagccagguc

SEQ ID NO: 448850 - RNA, 22 nt, Human
cggcuggggcuguccccaugac

SEQ ID NO: 448851 - RNA, 22 nt, Human
uucugugaaucuuuuuucccac

SEQ ID NO: 448852 - RNA, 22 nt, Human
cugaggcaugaaugugggcuuu

SEQ ID NO: 448853 - RNA, 22 nt, Human
agacucugauaagcaacucuug

SEQ ID NO: 448854 - RNA, 22 nt, Human
ggaggaagagguuguucucuca

SEQ ID NO: 448855 - RNA, 22 nt, Human
agacaacaccaaaugcuagugu

SEQ ID NO: 448856 - RNA, 22 nt, Human
accagggcaaauguuuguacuc

SEQ ID NO: 448857 - RNA, 22 nt, Human
uuuaaaaaacuagucugagucu

SEQ ID NO: 448858 - RNA, 22 nt, Human
ccuggaugauccaugucaugga

SEQ ID NO: 448859 - RNA, 22 nt, Human
gaaaugcagaaccugagaccau

SEQ ID NO: 448860 - RNA, 22 nt, Human
agaaaucuaagaugcucaagga

SEQ ID NO: 448861 - RNA, 21 nt, Human
uaaaugugagcagggcugggc

SEQ ID NO: 448862 - RNA, 22 nt, Human
acaguaauuaaaauggaucugc

SEQ ID NO: 448863 - RNA, 22 nt, Human
gaaaugugaccuacuuccuugu

SEQ ID NO: 448864 - RNA, 18 nt, Human
gugugcaguugcaggggu

SEQ ID NO: 448865 - RNA, 22 nt, Human
gccaggcaggccacgcuguguu

SEQ ID NO: 448866 - RNA, 22 nt, Human
aagacauuuauuugaaucaauu

SEQ ID NO: 448867 - RNA, 22 nt, Human
aagccucuggggccucaucugu

SEQ ID NO: 448868 - RNA, 23 nt, Human
aggagccaggaaccagcuucccc

SEQ ID NO: 448869 - RNA, 22 nt, Human
ugaagcaggaaccagcagcauu

SEQ ID NO: 448870 - RNA, 22 nt, Human
uggcagcuggagggcaauggcc

SEQ ID NO: 448871 - RNA, 23 nt, Human
agggcuccuuguugauuagcauu

SEQ ID NO: 448872 - RNA, 22 nt, Human
ucccuggagauaacuucuggga

SEQ ID NO: 448873 - RNA, 22 nt, Human
gggcugagagcuggaaucugag

SEQ ID NO: 448874 - RNA, 22 nt, Human
aguacaaaggcccuugauuacu

SEQ ID NO: 448875 - RNA, 22 nt, Human
uuauuuaauuuucucacucaga

SEQ ID NO: 448876 - RNA, 22 nt, Human
ggucccaguccucucccugcua

SEQ ID NO: 448877 - RNA, 22 nt, Human
cugcagaggccucgccuccucu

SEQ ID NO: 448878 - RNA, 22 nt, Human
agggcagcuggaagguggcuuc

SEQ ID NO: 448879 - RNA, 22 nt, Human
ccuucugcucccuggccagggc

SEQ ID NO: 448880 - RNA, 22 nt, Human
cugagcugaaacuugagaggcu

SEQ ID NO: 448881 - RNA, 22 nt, Human
accucugccaagaugugcuccc

SEQ ID NO: 448882 - RNA, 22 nt, Human
ccuggagggcgccgcacagucc

SEQ ID NO: 448883 - RNA, 22 nt, Human
gcuucuaucccuccacugcacu

SEQ ID NO: 448884 - RNA, 22 nt, Human
caaggccaaagggccacuguca

SEQ ID NO: 448885 - RNA, 22 nt, Human
acugucugcaaaacucauacuc

SEQ ID NO: 448886 - RNA, 22 nt, Human
cccagggaagggcuaccugagg

SEQ ID NO: 448887 - RNA, 20 nt, Human
ccugucugcaauggagguca

SEQ ID NO: 448888 - RNA, 22 nt, Human
gaugcacuugccccuccucaga

SEQ ID NO: 448889 - RNA, 22 nt, Human
uucuuucagaacacaagugauu

SEQ ID NO: 448890 - RNA, 22 nt, Human
cagcaggcucugaguggcugcc

SEQ ID NO: 448891 - RNA, 21 nt, Human
agagaagggacucuuccaguc

SEQ ID NO: 448892 - RNA, 22 nt, Human
ccugccugauuccaggauggcu

SEQ ID NO: 448893 - RNA, 20 nt, Human
uguuucuuuuaaugagcggc

SEQ ID NO: 448894 - RNA, 22 nt, Human
gagcuuuaccuuagguucuguu

SEQ ID NO: 448895 - RNA, 20 nt, Human
ucuggcucuuugcuccuccc

SEQ ID NO: 448896 - RNA, 22 nt, Human
gggcuaggcuuggccagcacug

SEQ ID NO: 448897 - RNA, 22 nt, Human
ccuccaggaacuugagagacac

SEQ ID NO: 448898 - RNA, 22 nt, Human
ccagcugggauuaagggaaaau

SEQ ID NO: 448899 - RNA, 22 nt, Human
uguaugcagggcuuguaugcag

SEQ ID NO: 448900 - RNA, 21 nt, Human
ccagcuccaggaccuuggauc

SEQ ID NO: 448901 - RNA, 22 nt, Human
ccuuugggugaauuccucucuu

SEQ ID NO: 448902 - RNA, 22 nt, Human
agggaaggagguuagaacccac

SEQ ID NO: 448903 - RNA, 22 nt, Human
ucagaggaccuuacugagaacc

SEQ ID NO: 448904 - RNA, 22 nt, Human
uccaggacuagcauuucugaua

SEQ ID NO: 448905 - RNA, 22 nt, Human
gccugcagaacugugaggcaau

SEQ ID NO: 448906 - RNA, 22 nt, Human
cuggaagggucuacuuagcaga

SEQ ID NO: 448907 - RNA, 22 nt, Human
uugcagagaucagcagguuuga

SEQ ID NO: 448908 - RNA, 22 nt, Human
cuguguggacugguugaggccc

SEQ ID NO: 448909 - RNA, 17 nt, Human
gagugcugguggagcuc

SEQ ID NO: 448910 - RNA, 20 nt, Human
uggcccuguuuucuccaggc

SEQ ID NO: 448911 - RNA, 22 nt, Human
uggaaagaaaguaaaggcguau

SEQ ID NO: 448912 - RNA, 22 nt, Human
ucagcaguguaguuuaucauuc

SEQ ID NO: 448913 - RNA, 22 nt, Human
caguuucucucauacauauuug

SEQ ID NO: 448914 - RNA, 22 nt, Human
uggcccuguggaggucagugag

SEQ ID NO: 448915 - RNA, 17 nt, Human
ugaggccugcaucagug

SEQ ID NO: 448916 - RNA, 22 nt, Human
uuacaacauauuuagcuugauu

SEQ ID NO: 448917 - RNA, 22 nt, Human
gcucuguguccacagcuggaaa

SEQ ID NO: 448918 - RNA, 22 nt, Human
ggcagucagugugguucauaaa

SEQ ID NO: 448919 - RNA, 22 nt, Human
cuuauaaaguccaucugaacaa

SEQ ID NO: 448920 - RNA, 18 nt, Human
cccacggugcuguagggc

SEQ ID NO: 448921 - RNA, 22 nt, Human
acucugccccgaguucugggaa

SEQ ID NO: 448922 - RNA, 21 nt, Human
aggcagcaggauccagggaca

SEQ ID NO: 448923 - RNA, 22 nt, Human
gaggucaauaauaugugcuuua

SEQ ID NO: 448924 - RNA, 23 nt, Human
gggagccaggaccucgcgcccca

SEQ ID NO: 448925 - RNA, 18 nt, Human
acauuucucucugcguga

SEQ ID NO: 448926 - RNA, 22 nt, Human
agugcagagaccuggucaggca

SEQ ID NO: 448927 - RNA, 22 nt, Human
aaacucuguagcuaaacauaau

SEQ ID NO: 448928 - RNA, 19 nt, Human
aagaagcaauaagcuguga

SEQ ID NO: 448929 - RNA, 22 nt, Human
uucaagauggcaccagugagug

SEQ ID NO: 448930 - RNA, 22 nt, Human
caggcaccccaggugagcacug

SEQ ID NO: 448931 - RNA, 22 nt, Human
uuacacaaacacauuccagaua

SEQ ID NO: 448932 - RNA, 22 nt, Human
cagaguaaggagcugucaaacg

SEQ ID NO: 448933 - RNA, 22 nt, Human
ccaggcauccauugcuuccucu

SEQ ID NO: 448934 - RNA, 22 nt, Human
uggagcaggacugcugcccuca

SEQ ID NO: 448935 - RNA, 22 nt, Human
aggcacugugcugaugucuuau

SEQ ID NO: 448936 - RNA, 22 nt, Human
uuccauauguauauagcuguua

SEQ ID NO: 448937 - RNA, 22 nt, Human
uucauugugaacacauucugcc

SEQ ID NO: 448938 - RNA, 22 nt, Human
ucuuugcaaauguuauuaucuu

SEQ ID NO: 448939 - RNA, 22 nt, Human
ccagggcacguugggacaguac

SEQ ID NO: 448940 - RNA, 22 nt, Human
ggagagugggagcaacuguugc

SEQ ID NO: 448941 - RNA, 22 nt, Human
ucaagucuugaugagacaaacc

SEQ ID NO: 448942 - RNA, 22 nt, Human
gugcagcagggggaagacagug

SEQ ID NO: 448943 - RNA, 22 nt, Human
gcaguggcuaggagucuggcgu

SEQ ID NO: 448944 - RNA, 22 nt, Human
auauacuuggagacuaucauug

SEQ ID NO: 448945 - RNA, 22 nt, Human
uuauuauagauuaugcaagauu

SEQ ID NO: 448946 - RNA, 22 nt, Human
gucucuggguuaagcagugcau

SEQ ID NO: 448947 - RNA, 22 nt, Human
gugcauuggugcgccacuucac

SEQ ID NO: 448948 - RNA, 21 nt, Human
ccagcagcucaaggaucucuu

SEQ ID NO: 448949 - RNA, 22 nt, Human
cuggccuucagacucggacuga

SEQ ID NO: 448950 - RNA, 22 nt, Human
cgcugggggaacagcgagggug

SEQ ID NO: 448951 - RNA, 22 nt, Human
ucagcuuugcaaguuagaaaau

SEQ ID NO: 448952 - RNA, 22 nt, Human
gugcagugacccuggagagcug

SEQ ID NO: 448953 - RNA, 22 nt, Human
gcagugaaucuggcaagaauuu

SEQ ID NO: 448954 - RNA, 22 nt, Human
aacaacuugcguucagagaugu

SEQ ID NO: 448955 - RNA, 23 nt, Human
cagaagcaccuguugacugcugc

SEQ ID NO: 448956 - RNA, 22 nt, Human
aguggcagagccaaguagagcc

SEQ ID NO: 448957 - RNA, 22 nt, Human
uauuuguauuucaugcaguaaa

SEQ ID NO: 448958 - RNA, 21 nt, Human
ggcccugguuacgccuccucu

SEQ ID NO: 448959 - RNA, 21 nt, Human
gcucccuggcugugugaccug

SEQ ID NO: 448960 - RNA, 21 nt, Human
uccauaagagaccaucuccua

SEQ ID NO: 448961 - RNA, 22 nt, Human
caguguuugcuuaaguuauaug

SEQ ID NO: 448962 - RNA, 22 nt, Human
cugcuuugcauagcugccagag

SEQ ID NO: 448963 - RNA, 20 nt, Human
gcagggcaucuuggccccca

SEQ ID NO: 448964 - RNA, 20 nt, Human
gggcaguggcgcuaucucag

SEQ ID NO: 448965 - RNA, 22 nt, Human
agagggagcccagucauagcug

SEQ ID NO: 448966 - RNA, 22 nt, Human
cugaggaggggccugagugaga

SEQ ID NO: 448967 - RNA, 22 nt, Human
agucucugucguagaucagcgu

SEQ ID NO: 448968 - RNA, 20 nt, Human
gccugcagagaaggucagag

SEQ ID NO: 448969 - RNA, 22 nt, Human
auuccauuguguaaggauaucg

SEQ ID NO: 448970 - RNA, 22 nt, Human
gcucuguccagcgugcacagaa

SEQ ID NO: 448971 - RNA, 22 nt, Human
cagucucucagcuuucagcugu

SEQ ID NO: 448972 - RNA, 22 nt, Human
aaaacucugcaguuaguuucua

SEQ ID NO: 448973 - RNA, 22 nt, Human
cuggcuuccaugcuguaguggc

SEQ ID NO: 448974 - RNA, 22 nt, Human
cagugaaguuuaaaguguagau

SEQ ID NO: 448975 - RNA, 22 nt, Human
gucaaguuuauccgcucauuca

SEQ ID NO: 448976 - RNA, 22 nt, Human
caggcuggagugaguguagugg

SEQ ID NO: 448977 - RNA, 22 nt, Human
gcccagcuccucugcagacccu

SEQ ID NO: 448978 - RNA, 22 nt, Human
cagguggaucucuaaggacuga

SEQ ID NO: 448979 - RNA, 22 nt, Human
cugaaggauguguggugggagu

SEQ ID NO: 448980 - RNA, 21 nt, Human
aacugcuggucuuuucugucu

SEQ ID NO: 448981 - RNA, 22 nt, Human
cuggcccauggugagcucuggg

SEQ ID NO: 448982 - RNA, 17 nt, Human
uuccaguuuaguauugu

SEQ ID NO: 448983 - RNA, 22 nt, Human
ccagggccucguguucugagug

SEQ ID NO: 448984 - RNA, 22 nt, Human
cugucuccagggcaggugcagg

SEQ ID NO: 448985 - RNA, 22 nt, Human
ggcuuuauguuuuucauguggu

SEQ ID NO: 448986 - RNA, 22 nt, Human
aaguucuacuguggguaaaaug

SEQ ID NO: 448987 - RNA, 22 nt, Human
ggcuguggcauuaggugaggcc

SEQ ID NO: 448988 - RNA, 22 nt, Human
cuacagacccaccuuggaagaa

SEQ ID NO: 448989 - RNA, 22 nt, Human
aggggugauuugggacaggaca

SEQ ID NO: 448990 - RNA, 22 nt, Human
auacuguuucucuucuacauga

SEQ ID NO: 448991 - RNA, 22 nt, Human
uagaaaucagguuuuuagaaag

SEQ ID NO: 448992 - RNA, 22 nt, Human
cugccucuccccagaguggccc

SEQ ID NO: 448993 - RNA, 22 nt, Human
aaguguauauaugacuuauaaa

SEQ ID NO: 448994 - RNA, 22 nt, Human
uucaggaggugagcaagaaggg

SEQ ID NO: 448995 - RNA, 22 nt, Human
aaugggaagccagaagacaagg

SEQ ID NO: 448996 - RNA, 22 nt, Human
agcccugggaggccagcuugua

SEQ ID NO: 448997 - RNA, 20 nt, Human
ugaugguucuuuccggguug

SEQ ID NO: 448998 - RNA, 22 nt, Human
cacagcagagggagccauugaa

SEQ ID NO: 448999 - RNA, 22 nt, Human
ccugagaccaaguugcagccau

SEQ ID NO: 449000 - RNA, 22 nt, Human
ucccagcccagauuugugugac

SEQ ID NO: 449001 - RNA, 22 nt, Human
ucccagagcucugacaccagcu

SEQ ID NO: 449002 - RNA, 20 nt, Human
ggaagcagagaacuguuuuc

SEQ ID NO: 449003 - RNA, 22 nt, Human
auuucccuccagggaaagcuua

SEQ ID NO: 449004 - RNA, 22 nt, Human
cagcuggguuuaguggggugug

SEQ ID NO: 449005 - RNA, 22 nt, Human
ugucucagaauggcucauaaua

SEQ ID NO: 449006 - RNA, 18 nt, Human
cagcugccagcucaugga

SEQ ID NO: 449007 - RNA, 22 nt, Human
aagaacaguugggaggugagcc

SEQ ID NO: 449008 - RNA, 22 nt, Human
cugcagaggucuugcugauggu

SEQ ID NO: 449009 - RNA, 22 nt, Human
cccugccuuguuggagccuaug

SEQ ID NO: 449010 - RNA, 21 nt, Human
ucccacucuaaauggacugaa

SEQ ID NO: 449011 - RNA, 22 nt, Human
aaggcagcaccgccuccugaaa

SEQ ID NO: 449012 - RNA, 22 nt, Human
ccuggcuguggcggugcucuca

SEQ ID NO: 449013 - RNA, 21 nt, Human
ggcagaaguagcauggacggg

SEQ ID NO: 449014 - RNA, 22 nt, Human
acaggugauucaggcucuggga

SEQ ID NO: 449015 - RNA, 22 nt, Human
aaagagcucacaguccacugga

SEQ ID NO: 449016 - RNA, 22 nt, Human
cugagcugggcucucuugaggg

SEQ ID NO: 449017 - RNA, 22 nt, Human
agccagugggauuagagccucu

SEQ ID NO: 449018 - RNA, 22 nt, Human
agacaucaaugaucagagguag

SEQ ID NO: 449019 - RNA, 21 nt, Human
aaacugaccuugccugagaca

SEQ ID NO: 449020 - RNA, 22 nt, Human
agacagcauggagcugauaaca

SEQ ID NO: 449021 - RNA, 22 nt, Human
guugaaagaugucuugguuccc

SEQ ID NO: 449022 - RNA, 23 nt, Human
aggcugcagaagaauagggucau

SEQ ID NO: 449023 - RNA, 22 nt, Human
cacaaaugacugaaacgacugu

SEQ ID NO: 449024 - RNA, 22 nt, Human
cagcugugcuagaagccacgaa

SEQ ID NO: 449025 - RNA, 22 nt, Human
aguggcagaagucacuggguag

SEQ ID NO: 449026 - RNA, 22 nt, Human
ugaagccaaucugccaggcaga

SEQ ID NO: 449027 - RNA, 21 nt, Human
uccaaaucccauucuguaguc

SEQ ID NO: 449028 - RNA, 22 nt, Human
cugagcugguggaagcaugcag

SEQ ID NO: 449029 - RNA, 22 nt, Human
aauaauuuugagagccuggaaa

SEQ ID NO: 449030 - RNA, 22 nt, Human
cugcucuguuucuuagcugggu

SEQ ID NO: 449031 - RNA, 22 nt, Human
gccugggagggcagcagugugg

SEQ ID NO: 449032 - RNA, 22 nt, Human
ucagcaauaugauaggcuuugu

SEQ ID NO: 449033 - RNA, 22 nt, Human
cugucuuuucauacuuucccuc

SEQ ID NO: 449034 - RNA, 19 nt, Human
ucuggcuccgccucuuagu

SEQ ID NO: 449035 - RNA, 22 nt, Human
cccucccaggaguggccagaga

SEQ ID NO: 449036 - RNA, 22 nt, Human
acauacuaugaauacauguguc

SEQ ID NO: 449037 - RNA, 22 nt, Human
caguuuuucaaaauuacaugau

SEQ ID NO: 449038 - RNA, 22 nt, Human
ccaaaauguuugaaugcaugug

SEQ ID NO: 449039 - RNA, 22 nt, Human
agggucagugaugagggagccc

SEQ ID NO: 449040 - RNA, 22 nt, Human
gucugagaaucuugcauaucau

SEQ ID NO: 449041 - RNA, 23 nt, Human
cagugcagggcaacucagacucc

SEQ ID NO: 449042 - RNA, 22 nt, Human
cugcugugagugguucuugccu

SEQ ID NO: 449043 - RNA, 22 nt, Human
gcuggagcugaguucccugggc

SEQ ID NO: 449044 - RNA, 22 nt, Human
gcugugugacugagagccuggc

SEQ ID NO: 449045 - RNA, 22 nt, Human
cauagagugauguaagguaugu

SEQ ID NO: 449046 - RNA, 22 nt, Human
uccagcuugccuggucuuuugg

SEQ ID NO: 449047 - RNA, 22 nt, Human
auuauauugaguauaaccagag

SEQ ID NO: 449048 - RNA, 22 nt, Human
cugggccugucagggcuuuuug

SEQ ID NO: 449049 - RNA, 22 nt, Human
ggccucuggcaggcaggcccuc

SEQ ID NO: 449050 - RNA, 22 nt, Human
ucagggcucaccagccucugcc

SEQ ID NO: 449051 - RNA, 23 nt, Human
uugcuuagagaccuccucaucag

SEQ ID NO: 449052 - RNA, 22 nt, Human
ccucagaugucuuaaggcacug

SEQ ID NO: 449053 - RNA, 22 nt, Human
gcuggccugcaaagcccggcug

SEQ ID NO: 449054 - RNA, 22 nt, Human
cagagcaggcccacugcccucc

SEQ ID NO: 449055 - RNA, 22 nt, Human
uuuuccucugagcuuugaauaa

SEQ ID NO: 449056 - RNA, 22 nt, Human
ccagcccuugcugaaggguggc

SEQ ID NO: 449057 - RNA, 22 nt, Human
cagggcucccaaauaucucuuc

SEQ ID NO: 449058 - RNA, 22 nt, Human
cugccuccugccgugcagcuuc

SEQ ID NO: 449059 - RNA, 22 nt, Human
gugugccaggaacuggcugcug

SEQ ID NO: 449060 - RNA, 22 nt, Human
cuuagaaauuguuacucauuca

SEQ ID NO: 449061 - RNA, 22 nt, Human
ggcagaggaaggaugaauucac

SEQ ID NO: 449062 - RNA, 22 nt, Human
uacaguauuaugagugauugaa

SEQ ID NO: 449063 - RNA, 20 nt, Human
gcaaggcacagugaggaggg

SEQ ID NO: 449064 - RNA, 22 nt, Human
ucucagagauguuagggaagag

SEQ ID NO: 449065 - RNA, 22 nt, Human
ucaggcuggaaugcaguggggc

SEQ ID NO: 449066 - RNA, 22 nt, Human
ugagcccaggaguuggaggcug

SEQ ID NO: 449067 - RNA, 22 nt, Human
acaggggaauuuacugucauua

SEQ ID NO: 449068 - RNA, 22 nt, Human
ucccuggacaacagacuucacu

SEQ ID NO: 449069 - RNA, 22 nt, Human
agauguguuucuaguuccugca

SEQ ID NO: 449070 - RNA, 22 nt, Human
cugggccuagaggaagcugaca

SEQ ID NO: 449071 - RNA, 22 nt, Human
uagccucucuccuccacaaccu

SEQ ID NO: 449072 - RNA, 22 nt, Human
gcucagggaacuuuuugcaggc

SEQ ID NO: 449073 - RNA, 22 nt, Human
cccuucagcugagugggacagc

SEQ ID NO: 449074 - RNA, 20 nt, Human
gggcagccucgggagugggu

SEQ ID NO: 449075 - RNA, 22 nt, Human
gggcugggcaugguguucccuc

SEQ ID NO: 449076 - RNA, 23 nt, Human
gugauuucagggaacagaaucag

SEQ ID NO: 449077 - RNA, 22 nt, Human
gcugggagucgcgucuguggcc

SEQ ID NO: 449078 - RNA, 22 nt, Human
ugcucugggcaacagccucccu

SEQ ID NO: 449079 - RNA, 22 nt, Human
gauuucuguaacacuucagaua

SEQ ID NO: 449080 - RNA, 22 nt, Human
gugaggggaguaaagccauguu

SEQ ID NO: 449081 - RNA, 21 nt, Human
agcagcugcaguuucuaucug

SEQ ID NO: 449082 - RNA, 22 nt, Human
cagaggcugaugugggaugggc

SEQ ID NO: 449083 - RNA, 22 nt, Human
agccaggaaugcaugcucugcu

SEQ ID NO: 449084 - RNA, 22 nt, Human
ccuguauuagguagacaacuau

SEQ ID NO: 449085 - RNA, 22 nt, Human
uuuagggaugucagaacaggga

SEQ ID NO: 449086 - RNA, 22 nt, Human
auucagaaauagaaaauuugau

SEQ ID NO: 449087 - RNA, 22 nt, Human
aguuuguaucaauuugcuuuau

SEQ ID NO: 449088 - RNA, 22 nt, Human
ucagagagcagaacuuuuuuac

SEQ ID NO: 449089 - RNA, 23 nt, Human
acaguuauagcugugaauaacau

SEQ ID NO: 449090 - RNA, 22 nt, Human
ggucccaggaagugcggcggcg

SEQ ID NO: 449091 - RNA, 22 nt, Human
uccugccuagcaggugaccuau

SEQ ID NO: 449092 - RNA, 22 nt, Human
caggcuugcugcuagagcacuu

SEQ ID NO: 449093 - RNA, 22 nt, Human
acccaggguagagugcaguggc

SEQ ID NO: 449094 - RNA, 22 nt, Human
uguacaaagaguauagcuuuga

SEQ ID NO: 449095 - RNA, 22 nt, Human
ugaaugauuugggugcauucag

SEQ ID NO: 449096 - RNA, 22 nt, Human
gcugucacaagcaucuggggca

SEQ ID NO: 449097 - RNA, 23 nt, Human
cuuucauugugguuucacagagc

SEQ ID NO: 449098 - RNA, 22 nt, Human
acagauuuaggacuguagcgau

SEQ ID NO: 449099 - RNA, 22 nt, Human
agaggccaugcuagaggccugg

SEQ ID NO: 449100 - RNA, 22 nt, Human
gggugggaucuguggagccuca

SEQ ID NO: 449101 - RNA, 22 nt, Human
uggagacugugcuaagggaguu

SEQ ID NO: 449102 - RNA, 22 nt, Human
ccagggcagugggagaaggugc

SEQ ID NO: 449103 - RNA, 22 nt, Human
uacauaauaaggggcauggugu

SEQ ID NO: 449104 - RNA, 22 nt, Human
gagggcuguggggcaugaccag

SEQ ID NO: 449105 - RNA, 22 nt, Human
ucagaggagaccaaggggaaua

SEQ ID NO: 449106 - RNA, 22 nt, Human
guggcugcagagggcacagcau

SEQ ID NO: 449107 - RNA, 22 nt, Human
auaaggcaucucucaguuagca

SEQ ID NO: 449108 - RNA, 22 nt, Human
uuuguuuacucauucauugaug

SEQ ID NO: 449109 - RNA, 22 nt, Human
aaagcagcagcaccugcauuuc

SEQ ID NO: 449110 - RNA, 22 nt, Human
ucaccugggagggcugugguag

SEQ ID NO: 449111 - RNA, 22 nt, Human
acaguggaaaugugggagggga

SEQ ID NO: 449112 - RNA, 22 nt, Human
ccaggaguuggagguugcagug

SEQ ID NO: 449113 - RNA, 21 nt, Human
agaagccaugugguggagaac

SEQ ID NO: 449114 - RNA, 22 nt, Human
gcuggguggaucggaggcucug

SEQ ID NO: 449115 - RNA, 22 nt, Human
ugggccugaguuugggaacugg

SEQ ID NO: 449116 - RNA, 20 nt, Human
uaggcagagcugugcagccu

SEQ ID NO: 449117 - RNA, 22 nt, Human
ggagaaggugcuggucacugug

SEQ ID NO: 449118 - RNA, 22 nt, Human
uuuucauuguaaaucaggaaac

SEQ ID NO: 449119 - RNA, 22 nt, Human
uguagaaauuaguaagaucaac

SEQ ID NO: 449120 - RNA, 22 nt, Human
acaugauucuugauaggcauug

SEQ ID NO: 449121 - RNA, 21 nt, Human
agagucugcauuucugacaag

SEQ ID NO: 449122 - RNA, 22 nt, Human
gucccagggaugcagacaugag

SEQ ID NO: 449123 - RNA, 22 nt, Human
uuuaguagaaugauacagggca

SEQ ID NO: 449124 - RNA, 22 nt, Human
uugcaccauuucacuuccauua

SEQ ID NO: 449125 - RNA, 22 nt, Human
ccaaggcuggagugcaguggcg

SEQ ID NO: 449126 - RNA, 22 nt, Human
guccucugggcuuugagcaguc

SEQ ID NO: 449127 - RNA, 22 nt, Human
acaguguccuuguggucccugu

SEQ ID NO: 449128 - RNA, 22 nt, Human
cuggccacaugugugcugagca

SEQ ID NO: 449129 - RNA, 22 nt, Human
guggugaagccccaucucugcu

SEQ ID NO: 449130 - RNA, 22 nt, Human
ucccaggguccucuucuggaau

SEQ ID NO: 449131 - RNA, 23 nt, Human
agaauuguaaauagaauauaccu

SEQ ID NO: 449132 - RNA, 22 nt, Human
ugucaguguauacauacaguau

SEQ ID NO: 449133 - RNA, 22 nt, Human
cccuggaggcggagcuugcagu

SEQ ID NO: 449134 - RNA, 19 nt, Human
aggguccagggagcggcuc

SEQ ID NO: 449135 - RNA, 22 nt, Human
ugaugcugcugggaguggugcu

SEQ ID NO: 449136 - RNA, 21 nt, Human
ugagccaggcugacggcugug

SEQ ID NO: 449137 - RNA, 22 nt, Human
uuacaucauugagacauacaua

SEQ ID NO: 449138 - RNA, 22 nt, Human
gaguccaguguuuaccaggggu

SEQ ID NO: 449139 - RNA, 22 nt, Human
gaggcagaaguugcagugagca

SEQ ID NO: 449140 - RNA, 22 nt, Human
cugcugugcaggugccuaugau

SEQ ID NO: 449141 - RNA, 22 nt, Human
ggcuggcacugaggagagcucu

SEQ ID NO: 449142 - RNA, 22 nt, Human
accauuuaauaaguauuuccau

SEQ ID NO: 449143 - RNA, 22 nt, Human
gcucuugucaaaaauuaguuga

SEQ ID NO: 449144 - RNA, 22 nt, Human
ggcuucuuccugugaacauguu

SEQ ID NO: 449145 - RNA, 22 nt, Human
uggcugagguaacuaugaauaa

SEQ ID NO: 449146 - RNA, 22 nt, Human
ggccaugguuggggaagacaug

SEQ ID NO: 449147 - RNA, 22 nt, Human
aaagaacaauguggaaucuccu

SEQ ID NO: 449148 - RNA, 18 nt, Human
uccugccugugccccagg

SEQ ID NO: 449149 - RNA, 22 nt, Human
acagcuuuuuacuaauagauug

SEQ ID NO: 449150 - RNA, 22 nt, Human
aggggcucaaagugugcaggga

SEQ ID NO: 449151 - RNA, 22 nt, Human
acacauaagccuaaucaucucc

SEQ ID NO: 449152 - RNA, 18 nt, Human
agcagggcauuuugccau

SEQ ID NO: 449153 - RNA, 22 nt, Human
ggcuagaacuuuacacuuugca

SEQ ID NO: 449154 - RNA, 22 nt, Human
uuuuuccuaagcaguggagcug

SEQ ID NO: 449155 - RNA, 22 nt, Human
gaugccugcauuucaggagagu

SEQ ID NO: 449156 - RNA, 22 nt, Human
gccggggcuggggagagacaug

SEQ ID NO: 449157 - RNA, 22 nt, Human
uccuguggcguuaucaugugau

SEQ ID NO: 449158 - RNA, 22 nt, Human
ucagaaugaaauuucuuucaga

SEQ ID NO: 449159 - RNA, 22 nt, Human
aaacuguaaagcaggugaguag

SEQ ID NO: 449160 - RNA, 22 nt, Human
uguuuuguuuaugagagcacag

SEQ ID NO: 449161 - RNA, 22 nt, Human
ugcugagcgcauccggcggccg

SEQ ID NO: 449162 - RNA, 17 nt, Human
ucucuuucccuuucugc

SEQ ID NO: 449163 - RNA, 22 nt, Human
cuguguggccucaagccagccu

SEQ ID NO: 449164 - RNA, 22 nt, Human
acaguggaaagaacauggauuu

SEQ ID NO: 449165 - RNA, 22 nt, Human
ugcaagggcuuagggggcugug

SEQ ID NO: 449166 - RNA, 21 nt, Human
aauuacagauggaauuacaga

SEQ ID NO: 449167 - RNA, 22 nt, Human
agcugcccccagggcugugcuu

SEQ ID NO: 449168 - RNA, 22 nt, Human
ccugggaagagcugacaggagg

SEQ ID NO: 449169 - RNA, 22 nt, Human
ggagaagggacagacucagcuu

SEQ ID NO: 449170 - RNA, 22 nt, Human
caggggcaagaaugcugucagc

SEQ ID NO: 449171 - RNA, 22 nt, Human
uacaguaaagcugcuaugaauu

SEQ ID NO: 449172 - RNA, 23 nt, Human
uacauuguggauggaguccuggg

SEQ ID NO: 449173 - RNA, 22 nt, Human
uauucacaaaaugagguccuca

SEQ ID NO: 449174 - RNA, 20 nt, Human
uaacagaaguagaagugggu

SEQ ID NO: 449175 - RNA, 22 nt, Human
agacucaagcagauaggaauua

SEQ ID NO: 449176 - RNA, 22 nt, Human
gcugcucugugacagccuccgg

SEQ ID NO: 449177 - RNA, 22 nt, Human
gguagcacauugcauuaggaga

SEQ ID NO: 449178 - RNA, 20 nt, Human
cagcaguggaugagaguuuu

SEQ ID NO: 449179 - RNA, 22 nt, Human
caggcacagaguuauucauuua

SEQ ID NO: 449180 - RNA, 22 nt, Human
uuacaaagcaggucagcugaaa

SEQ ID NO: 449181 - RNA, 22 nt, Human
caacuuuaugauugguuuguca

SEQ ID NO: 449182 - RNA, 22 nt, Human
uuugcauuucucguaaggaaac

SEQ ID NO: 449183 - RNA, 22 nt, Human
cucuuucaguucugauagucuc

SEQ ID NO: 449184 - RNA, 22 nt, Human
aucaggauguuuggcugucaua

SEQ ID NO: 449185 - RNA, 22 nt, Human
uguuauugagguuacuuauaag

SEQ ID NO: 449186 - RNA, 17 nt, Human
uuccuggaagucauucc

SEQ ID NO: 449187 - RNA, 22 nt, Human
uagagcugaguugacuccauuu

SEQ ID NO: 449188 - RNA, 22 nt, Human
aaguggagucccuacaaccagc

SEQ ID NO: 449189 - RNA, 22 nt, Human
uuggcugagagaggaaaagggc

SEQ ID NO: 449190 - RNA, 22 nt, Human
caguaggaaggaugcagaaaaa

SEQ ID NO: 449191 - RNA, 22 nt, Human
agacagcugcucgcagagcuau

SEQ ID NO: 449192 - RNA, 17 nt, Human
cagucgaggaggaccug

SEQ ID NO: 449193 - RNA, 22 nt, Human
caaaguucucggcucaaguccu

SEQ ID NO: 449194 - RNA, 22 nt, Human
ugggccuguugccugaguccau

SEQ ID NO: 449195 - RNA, 22 nt, Human
cuccagggggcauccacacagc

SEQ ID NO: 449196 - RNA, 22 nt, Human
gcucaggaaauaguuuaguguu

SEQ ID NO: 449197 - RNA, 22 nt, Human
uaggcugggaagaaagauucuc

SEQ ID NO: 449198 - RNA, 22 nt, Human
cguguggucccggcaaggcaag

SEQ ID NO: 449199 - RNA, 22 nt, Human
gggcacugcuggaggcucccug

SEQ ID NO: 449200 - RNA, 22 nt, Human
acaucuguuugagaaaaagaag

SEQ ID NO: 449201 - RNA, 21 nt, Human
uagaaaucagcuggugccucu

SEQ ID NO: 449202 - RNA, 22 nt, Human
agggcugccugcucugcauuga

SEQ ID NO: 449203 - RNA, 22 nt, Human
cagcagguauguuuguucagca

SEQ ID NO: 449204 - RNA, 21 nt, Human
gcuuccaagauggcaccuuga

SEQ ID NO: 449205 - RNA, 22 nt, Human
gccagaagacuggagucagcug

SEQ ID NO: 449206 - RNA, 23 nt, Human
gccaggcacaugguggacacgca

SEQ ID NO: 449207 - RNA, 22 nt, Human
ccaaagugcugggguuacaggc

SEQ ID NO: 449208 - RNA, 22 nt, Human
agggccaccucucuggguuccc

SEQ ID NO: 449209 - RNA, 22 nt, Human
ucacagugaugacgugggagca

SEQ ID NO: 449210 - RNA, 22 nt, Human
ccagagccuaagaucugauccu

SEQ ID NO: 449211 - RNA, 22 nt, Human
agagcagugcugaagaguaggg

SEQ ID NO: 449212 - RNA, 22 nt, Human
agcugcaguaaagcucuccagg

SEQ ID NO: 449213 - RNA, 22 nt, Human
cauaauuuuuuuaagucagaac

SEQ ID NO: 449214 - RNA, 22 nt, Human
cagcucaaguuucccaggucag

SEQ ID NO: 449215 - RNA, 22 nt, Human
uagaaacacagaucugguguca

SEQ ID NO: 449216 - RNA, 22 nt, Human
gcagggcaaugaucccgagagg

SEQ ID NO: 449217 - RNA, 22 nt, Human
uucacagaauggcaaguuaugg

SEQ ID NO: 449218 - RNA, 22 nt, Human
cugagcugcggcaggcaccugg

SEQ ID NO: 449219 - RNA, 22 nt, Human
aggaggugacagccugcaucug

SEQ ID NO: 449220 - RNA, 22 nt, Human
ucuggcucaaaauacguacucu

SEQ ID NO: 449221 - RNA, 22 nt, Human
uguauuuaagcuuuaccuaaaa

SEQ ID NO: 449222 - RNA, 22 nt, Human
ggagcagccacgucucagggca

SEQ ID NO: 449223 - RNA, 22 nt, Human
cuauuauuuccucaucuauaaa

SEQ ID NO: 449224 - RNA, 22 nt, Human
uccgccaggacugagggcccau

SEQ ID NO: 449225 - RNA, 22 nt, Human
aucaguuuaaaugggcuguugg

SEQ ID NO: 449226 - RNA, 22 nt, Human
gaggccugcagcguggucccug

SEQ ID NO: 449227 - RNA, 22 nt, Human
cucaggcuugggaggaggccca

SEQ ID NO: 449228 - RNA, 22 nt, Human
agggccagaaucccucagucua

SEQ ID NO: 449229 - RNA, 22 nt, Human
gccuaggagacaagcgugaaag

SEQ ID NO: 449230 - RNA, 22 nt, Human
uuuuccucuguauuugaaaugc

SEQ ID NO: 449231 - RNA, 22 nt, Human
ggcagaguugguggagucaguu

SEQ ID NO: 449232 - RNA, 22 nt, Human
gaggccaggguaccaucaacau

SEQ ID NO: 449233 - RNA, 22 nt, Human
ggcuuuauauuguuugagcaga

SEQ ID NO: 449234 - RNA, 19 nt, Human
agcagagcccugaagaucc

SEQ ID NO: 449235 - RNA, 22 nt, Human
agggaccugucaaugacaguua

SEQ ID NO: 449236 - RNA, 22 nt, Human
aagugaaacauguaucucuuua

SEQ ID NO: 449237 - RNA, 22 nt, Human
uaaagguaacaugaacugcuuu

SEQ ID NO: 449238 - RNA, 22 nt, Human
ccagaggaggggggucuuucug

SEQ ID NO: 449239 - RNA, 22 nt, Human
ucuccgaucacagguuuucaau

SEQ ID NO: 449240 - RNA, 22 nt, Human
gaauuaguguugaaaucagggc

SEQ ID NO: 449241 - RNA, 22 nt, Human
cugcucuggcguacucggcauc

SEQ ID NO: 449242 - RNA, 22 nt, Human
aggcacaggaaugucauccagu

SEQ ID NO: 449243 - RNA, 22 nt, Human
auguuacagaaagcaaagauga

SEQ ID NO: 449244 - RNA, 22 nt, Human
ggcuccacccugcuuccagaag

SEQ ID NO: 449245 - RNA, 22 nt, Human
ugcucuggagggugaagcuuuu

SEQ ID NO: 449246 - RNA, 22 nt, Human
aggagccaugagugacaucaca

SEQ ID NO: 449247 - RNA, 22 nt, Human
ggguccaggucuucaggcagag

SEQ ID NO: 449248 - RNA, 22 nt, Human
aggaccagccuccaggucucuu

SEQ ID NO: 449249 - RNA, 22 nt, Human
ccaggcugugguuuagauagag

SEQ ID NO: 449250 - RNA, 22 nt, Human
gugccugcagcaauccauggca

SEQ ID NO: 449251 - RNA, 22 nt, Human
ucuucuuccuccacagggccca

SEQ ID NO: 449252 - RNA, 22 nt, Human
agcugccaccucugccuuuggg

SEQ ID NO: 449253 - RNA, 22 nt, Human
aaaaacugcaauuacuuuuguc

SEQ ID NO: 449254 - RNA, 22 nt, Human
cagagcauuaaaaccagcucug

SEQ ID NO: 449255 - RNA, 22 nt, Human
uccaggcaucuguauuuuuuaa

SEQ ID NO: 449256 - RNA, 22 nt, Human
agccaggacguugcucagcucc

SEQ ID NO: 449257 - RNA, 22 nt, Human
agucagugaaggcauugcucaa

SEQ ID NO: 449258 - RNA, 21 nt, Human
ggccucugucauccugggaag

SEQ ID NO: 449259 - RNA, 22 nt, Human
uuugcauuuguucaaguauuga

SEQ ID NO: 449260 - RNA, 22 nt, Human
ugggaguguucuuggcuugcuu

SEQ ID NO: 449261 - RNA, 22 nt, Human
uucuaccagaccccagacuugu

SEQ ID NO: 449262 - RNA, 20 nt, Human
uggagcuguaaucuugucug

SEQ ID NO: 449263 - RNA, 22 nt, Human
ucuuguccuaagagcuggauuc

SEQ ID NO: 449264 - RNA, 22 nt, Human
gcccugggauuggguggaggcu

SEQ ID NO: 449265 - RNA, 22 nt, Human
caguggaggcucaagugugcuu

SEQ ID NO: 449266 - RNA, 18 nt, Human
ggcugugcguggaggcug

SEQ ID NO: 449267 - RNA, 22 nt, Human
agauaugacuagaagcucauuu

SEQ ID NO: 449268 - RNA, 22 nt, Human
cuuuuuccagcuucaggguggg

SEQ ID NO: 449269 - RNA, 19 nt, Human
uggaggagaggaaaaguca

SEQ ID NO: 449270 - RNA, 22 nt, Human
gccuggagggcucuagagaggc

SEQ ID NO: 449271 - RNA, 22 nt, Human
gggaccugaggagggguuucag

SEQ ID NO: 449272 - RNA, 22 nt, Human
caggcacuguguuaggcacugu

SEQ ID NO: 449273 - RNA, 22 nt, Human
aauguacaaaagucagccaacu

SEQ ID NO: 449274 - RNA, 22 nt, Human
ccugccagugaagcugacgggc

SEQ ID NO: 449275 - RNA, 22 nt, Human
accugcagguguuuccacacuu

SEQ ID NO: 449276 - RNA, 22 nt, Human
agugacugacaccuguaauccc

SEQ ID NO: 449277 - RNA, 22 nt, Human
cuggaauguagagacagcuuag

SEQ ID NO: 449278 - RNA, 22 nt, Human
auggacaggaacucccuuggca

SEQ ID NO: 449279 - RNA, 20 nt, Human
ucagugauuaucucugagug

SEQ ID NO: 449280 - RNA, 22 nt, Human
ucaaaugcugccuuugugugcc

SEQ ID NO: 449281 - RNA, 22 nt, Human
cauguuaaaauauacauucuga

SEQ ID NO: 449282 - RNA, 22 nt, Human
caaugugugcuuacaggccagu

SEQ ID NO: 449283 - RNA, 23 nt, Human
auucuucauuaucuucuagaaaa

SEQ ID NO: 449284 - RNA, 22 nt, Human
agaagcugacagaugcagcagg

SEQ ID NO: 449285 - RNA, 22 nt, Human
aagagcuggauggaaucuggga

SEQ ID NO: 449286 - RNA, 22 nt, Human
agcaggcuuguuaugucugaga

SEQ ID NO: 449287 - RNA, 22 nt, Human
cauacauugcucauucaguauc

SEQ ID NO: 449288 - RNA, 22 nt, Human
acaguggaggccauaugguccu

SEQ ID NO: 449289 - RNA, 22 nt, Human
ccaagggaaaccgagaggcugg

SEQ ID NO: 449290 - RNA, 22 nt, Human
cagggagcuggcuggcgugagu

SEQ ID NO: 449291 - RNA, 22 nt, Human
uccuucaaagcuccuagugagc

SEQ ID NO: 449292 - RNA, 22 nt, Human
guuccaggcaagugggauagga

SEQ ID NO: 449293 - RNA, 22 nt, Human
cugccuuugcccuugacacugu

SEQ ID NO: 449294 - RNA, 22 nt, Human
uuuuaucagcagggauaacaag

SEQ ID NO: 449295 - RNA, 22 nt, Human
acagugugaugggccugccuga

SEQ ID NO: 449296 - RNA, 22 nt, Human
uaaaggcuuuuagugaugguaa

SEQ ID NO: 449297 - RNA, 22 nt, Human
acagcuguauccccagagcuca

SEQ ID NO: 449298 - RNA, 22 nt, Human
uccaguggugguuugaagggca

SEQ ID NO: 449299 - RNA, 20 nt, Human
uguugauuggugucaucuca

SEQ ID NO: 449300 - RNA, 22 nt, Human
cagggcuggcuguggcaaucuc

SEQ ID NO: 449301 - RNA, 22 nt, Human
caggaaagguagucacaaugua

SEQ ID NO: 449302 - RNA, 22 nt, Human
ccaaggagcugcaggcacuugu

SEQ ID NO: 449303 - RNA, 22 nt, Human
auuuccuagccucucuugcagu

SEQ ID NO: 449304 - RNA, 22 nt, Human
uuccauaaaggugauaguauac

SEQ ID NO: 449305 - RNA, 22 nt, Human
cagggcuggcucaugaaaaguu

SEQ ID NO: 449306 - RNA, 22 nt, Human
auguuucaaauauauagaguug

SEQ ID NO: 449307 - RNA, 22 nt, Human
uucuguuuugcacagacuugaa

SEQ ID NO: 449308 - RNA, 22 nt, Human
ccucagagguguggcaucucug

SEQ ID NO: 449309 - RNA, 22 nt, Human
uauguuuuucaagugcacacua

SEQ ID NO: 449310 - RNA, 16 nt, Human
ugggaccuguggccaa

SEQ ID NO: 449311 - RNA, 21 nt, Human
uguucacauggagcagaaugu

SEQ ID NO: 449312 - RNA, 22 nt, Human
gcucccuccaugaggcagaccg

SEQ ID NO: 449313 - RNA, 20 nt, Human
ugcuccaucuaaagugauua

SEQ ID NO: 449314 - RNA, 22 nt, Human
acccagaggugucuagcaagcu

SEQ ID NO: 449315 - RNA, 22 nt, Human
ggagcugggacccugucaucug

SEQ ID NO: 449316 - RNA, 22 nt, Human
uggagccaaggccaguucucag

SEQ ID NO: 449317 - RNA, 22 nt, Human
ugcagucuuccagcugcacaaa

SEQ ID NO: 449318 - RNA, 22 nt, Human
aggugcagcugguggagucugg

SEQ ID NO: 449319 - RNA, 18 nt, Human
gugacagcugcuagcuca

SEQ ID NO: 449320 - RNA, 22 nt, Human
aagaaaagaaaccugaggcuuu

SEQ ID NO: 449321 - RNA, 22 nt, Human
gguaacaguauguagaguaaga

SEQ ID NO: 449322 - RNA, 22 nt, Human
acauauuuccaugcagcauguc

SEQ ID NO: 449323 - RNA, 22 nt, Human
agggucccgaaggagacagcaa

SEQ ID NO: 449324 - RNA, 22 nt, Human
gugucauuaaccaccaugcaaa

SEQ ID NO: 449325 - RNA, 22 nt, Human
gcucuguacgcaggaugagggg

SEQ ID NO: 449326 - RNA, 22 nt, Human
aaauugugagcuauagaucuag

SEQ ID NO: 449327 - RNA, 22 nt, Human
ccuuggagcggucagcacuggu

SEQ ID NO: 449328 - RNA, 22 nt, Human
gccagagcacaggcugguagua

SEQ ID NO: 449329 - RNA, 22 nt, Human
ugguggccaauucacagggcuc

SEQ ID NO: 449330 - RNA, 22 nt, Human
ggcaggcugcuugggucauguc

SEQ ID NO: 449331 - RNA, 23 nt, Human
aggcagcagguuguccaggguga

SEQ ID NO: 449332 - RNA, 22 nt, Human
acagcuguggccacuugcaucc

SEQ ID NO: 449333 - RNA, 22 nt, Human
ucagcauaucuugagcuucaug

SEQ ID NO: 449334 - RNA, 22 nt, Human
ggcucuggcguccaauggagcg

SEQ ID NO: 449335 - RNA, 22 nt, Human
agaaaugugaauuucauuuccu

SEQ ID NO: 449336 - RNA, 20 nt, Human
auugucagccuucagaggag

SEQ ID NO: 449337 - RNA, 22 nt, Human
ggacuccucuagaaguugaggc

SEQ ID NO: 449338 - RNA, 22 nt, Human
aaucuggcucagaagaagauga

SEQ ID NO: 449339 - RNA, 22 nt, Human
cacaguggcagguguggguugu

SEQ ID NO: 449340 - RNA, 22 nt, Human
gacugccagaaugugaggccug

SEQ ID NO: 449341 - RNA, 22 nt, Human
auauuucaugggguuccauacu

SEQ ID NO: 449342 - RNA, 22 nt, Human
ccagcuuuucuuaucauuauaa

SEQ ID NO: 449343 - RNA, 22 nt, Human
uuagggcuuuucugaauaggcc

SEQ ID NO: 449344 - RNA, 22 nt, Human
ggcucugcuucagaaggcucau

SEQ ID NO: 449345 - RNA, 22 nt, Human
uucuuguauguaugcaaaauca

SEQ ID NO: 449346 - RNA, 20 nt, Human
agggucagagagcgugagug

SEQ ID NO: 449347 - RNA, 22 nt, Human
accacccucagcagagcugaaa

SEQ ID NO: 449348 - RNA, 22 nt, Human
uccauugucuuugguccuagcc

SEQ ID NO: 449349 - RNA, 22 nt, Human
agagcaggcauaaagcuuugaa

SEQ ID NO: 449350 - RNA, 22 nt, Human
agcugcugagagucugccgggc

SEQ ID NO: 449351 - RNA, 22 nt, Human
aaagggagcauggcugcaggga

SEQ ID NO: 449352 - RNA, 22 nt, Human
gcugcccaggguggagccggcu

SEQ ID NO: 449353 - RNA, 22 nt, Human
aagcugcccaagacugaagcau

SEQ ID NO: 449354 - RNA, 22 nt, Human
ggagaggcgaugagucacagcc

SEQ ID NO: 449355 - RNA, 22 nt, Human
aagaguuuucuauaaucuuggc

SEQ ID NO: 449356 - RNA, 22 nt, Human
ggaggugggagacauaggcggc

SEQ ID NO: 449357 - RNA, 22 nt, Human
cugccugcugccuguggagggu

SEQ ID NO: 449358 - RNA, 22 nt, Human
guguuuccucuagaagccaugg

SEQ ID NO: 449359 - RNA, 22 nt, Human
cuuuggaacauacugcugagcu

SEQ ID NO: 449360 - RNA, 22 nt, Human
uaaaugcaguuaguacuugcca

SEQ ID NO: 449361 - RNA, 22 nt, Human
cugaggcuggggaagggaagug

SEQ ID NO: 449362 - RNA, 22 nt, Human
uaaggccagccagcaaaucugu

SEQ ID NO: 449363 - RNA, 22 nt, Human
ugccugggagugaccaagacuc

SEQ ID NO: 449364 - RNA, 22 nt, Human
cuggccugcugggugagguccu

SEQ ID NO: 449365 - RNA, 22 nt, Human
ugagcugggaguggugaugagg

SEQ ID NO: 449366 - RNA, 22 nt, Human
auaaauggcuuucauuccuagg

SEQ ID NO: 449367 - RNA, 22 nt, Human
agccacagucugaugccugaga

SEQ ID NO: 449368 - RNA, 22 nt, Human
gagccagccuucuucugagguc

SEQ ID NO: 449369 - RNA, 18 nt, Human
ccuggaccugucuccuuu

SEQ ID NO: 449370 - RNA, 22 nt, Human
uccagcucaggguuggcucaag

SEQ ID NO: 449371 - RNA, 22 nt, Human
guuuccauggcucuguuaaugg

SEQ ID NO: 449372 - RNA, 22 nt, Human
gguggagcuggaccaggagagg

SEQ ID NO: 449373 - RNA, 22 nt, Human
uggcaucucaaacaggcagauu

SEQ ID NO: 449374 - RNA, 22 nt, Human
guggccuggauagacuccaucu

SEQ ID NO: 449375 - RNA, 22 nt, Human
cacagccuugagcgaggacaag

SEQ ID NO: 449376 - RNA, 22 nt, Human
gaggggcucuuuaauaguaaca

SEQ ID NO: 449377 - RNA, 22 nt, Human
auuguacaaugccuggaacauu

SEQ ID NO: 449378 - RNA, 22 nt, Human
ggaaaaggccauuguuucucug

SEQ ID NO: 449379 - RNA, 22 nt, Human
agccuggagguaaugaggaaac

SEQ ID NO: 449380 - RNA, 22 nt, Human
uguggccucaaggcugcccuca

SEQ ID NO: 449381 - RNA, 22 nt, Human
acucagaggcagcugcucaccc

SEQ ID NO: 449382 - RNA, 22 nt, Human
aaaaaugugaccacaggguguu

SEQ ID NO: 449383 - RNA, 22 nt, Human
agagcccuuucuccaggcaccu

SEQ ID NO: 449384 - RNA, 22 nt, Human
agagcuggaaucagaccucagg

SEQ ID NO: 449385 - RNA, 22 nt, Human
accuuuuuucagaacucuaaag

SEQ ID NO: 449386 - RNA, 22 nt, Human
ugccucugguuaucugguaccu

SEQ ID NO: 449387 - RNA, 22 nt, Human
ggcaggugaccuggccucccag

SEQ ID NO: 449388 - RNA, 22 nt, Human
uuuguuuagaaagagauuggug

SEQ ID NO: 449389 - RNA, 22 nt, Human
cacugaaggcugcagcucagcc

SEQ ID NO: 449390 - RNA, 22 nt, Human
gagaggaguaggcugauggugc

SEQ ID NO: 449391 - RNA, 23 nt, Human
cacuccuguuucuaagccagcau

SEQ ID NO: 449392 - RNA, 22 nt, Human
uauguacacacacaugcaugua

SEQ ID NO: 449393 - RNA, 22 nt, Human
cgcauacauagaaacacacaga

SEQ ID NO: 449394 - RNA, 22 nt, Human
cuuuucaugagucuguuauggg

SEQ ID NO: 449395 - RNA, 22 nt, Human
gaugcagaaaguagacaccauc

SEQ ID NO: 449396 - RNA, 22 nt, Human
auuuccuauagauauggugagu

SEQ ID NO: 449397 - RNA, 22 nt, Human
aaguucaaggcucuagaguucc

SEQ ID NO: 449398 - RNA, 22 nt, Human
agugugugcaugcauucgugca

SEQ ID NO: 449399 - RNA, 22 nt, Human
ccagcuuucauaucaugaggua

SEQ ID NO: 449400 - RNA, 22 nt, Human
agacucaagacugcagaagacg

SEQ ID NO: 449401 - RNA, 22 nt, Human
gagguggccucaagcagucuuc

SEQ ID NO: 449402 - RNA, 22 nt, Human
ucuguucuauuggucuaugugu

SEQ ID NO: 449403 - RNA, 22 nt, Human
aacagcaauagcacuauucauu

SEQ ID NO: 449404 - RNA, 22 nt, Human
augucuuucaaauucugccuag

SEQ ID NO: 449405 - RNA, 22 nt, Human
cggcuggugucgggcacagcaa

SEQ ID NO: 449406 - RNA, 21 nt, Human
uauuugcugccaucuuugagg

SEQ ID NO: 449407 - RNA, 22 nt, Human
gccugagaaggacacagcaggu

SEQ ID NO: 449408 - RNA, 22 nt, Human
gcuggcagaagagcugguucaa

SEQ ID NO: 449409 - RNA, 22 nt, Human
ucucugaguucuccuccagccc

SEQ ID NO: 449410 - RNA, 22 nt, Human
uuuuuccuuggaugugucucuc

SEQ ID NO: 449411 - RNA, 22 nt, Human
gcucagccgaacuucagagcag

SEQ ID NO: 449412 - RNA, 22 nt, Human
aggaggcugguucaggccauau

SEQ ID NO: 449413 - RNA, 22 nt, Human
cagaggcugggaccucaggcau

SEQ ID NO: 449414 - RNA, 22 nt, Human
gccuucaguaguauccucauga

SEQ ID NO: 449415 - RNA, 22 nt, Human
auuguggcuagacagucacaau

SEQ ID NO: 449416 - RNA, 22 nt, Human
aggcgcaggguuuggacccagg

SEQ ID NO: 449417 - RNA, 22 nt, Human
uagaaaagauaacauucugugc

SEQ ID NO: 449418 - RNA, 22 nt, Human
ccugagccugaguggugcaggg

SEQ ID NO: 449419 - RNA, 22 nt, Human
cagcaggcugcgauugcucauu

SEQ ID NO: 449420 - RNA, 22 nt, Human
aucagcaagauguaauuucuau

SEQ ID NO: 449421 - RNA, 22 nt, Human
uuccucagccaaggcugggauc

SEQ ID NO: 449422 - RNA, 22 nt, Human
caagggcagaggcagggccccg

SEQ ID NO: 449423 - RNA, 22 nt, Human
ucaaaggcgguccaggaauaaa

SEQ ID NO: 449424 - RNA, 22 nt, Human
acccaggacucucuuccaguag

SEQ ID NO: 449425 - RNA, 22 nt, Human
gaaaaugugccuuuggguauug

SEQ ID NO: 449426 - RNA, 22 nt, Human
gauucugagcugguguuuuacg

SEQ ID NO: 449427 - RNA, 22 nt, Human
aagccagggauuccugagggag

SEQ ID NO: 449428 - RNA, 22 nt, Human
ggcuucagugagcugagcucac

SEQ ID NO: 449429 - RNA, 22 nt, Human
gcacagggaggcuggccuggcc

SEQ ID NO: 449430 - RNA, 22 nt, Human
gcagagcagcaaauggaaagga

SEQ ID NO: 449431 - RNA, 22 nt, Human
ccucugaggucauggacuuggc

SEQ ID NO: 449432 - RNA, 22 nt, Human
caguccaggccuggaggagcca

SEQ ID NO: 449433 - RNA, 22 nt, Human
cagcugugcugauugcucagua

SEQ ID NO: 449434 - RNA, 22 nt, Human
auuuaucaccaguuagcugacu

SEQ ID NO: 449435 - RNA, 22 nt, Human
ccagcucuuggugcacuuacau

SEQ ID NO: 449436 - RNA, 22 nt, Human
caggugggagcggagacugauu

SEQ ID NO: 449437 - RNA, 18 nt, Human
gugccaggaggcgcagcc

SEQ ID NO: 449438 - RNA, 22 nt, Human
accagagcuggcucugagcacc

SEQ ID NO: 449439 - RNA, 22 nt, Human
ugaggcagcaauuguauuguau

SEQ ID NO: 449440 - RNA, 22 nt, Human
ggccugagcagacagcaugaug

SEQ ID NO: 449441 - RNA, 22 nt, Human
gggagaagaaugugucaauugu

SEQ ID NO: 449442 - RNA, 22 nt, Human
gcucccaccaggcagaccuacc

SEQ ID NO: 449443 - RNA, 22 nt, Human
ggagaggcuuggcccagccugg

SEQ ID NO: 449444 - RNA, 22 nt, Human
gcagcugaagcugcaguuccag

SEQ ID NO: 449445 - RNA, 22 nt, Human
uugguuuagagagugugguuac

SEQ ID NO: 449446 - RNA, 22 nt, Human
cguuggagacacuugaggacuu

SEQ ID NO: 449447 - RNA, 22 nt, Human
ccucagggaggccucuguggcu

SEQ ID NO: 449448 - RNA, 22 nt, Human
gaguccuucuggcuggcaggau

SEQ ID NO: 449449 - RNA, 22 nt, Human
uccaguucuaggucacucucug

SEQ ID NO: 449450 - RNA, 22 nt, Human
gcugcucugcuguguaagcagg

SEQ ID NO: 449451 - RNA, 22 nt, Human
uuccucagccagcacuuagggg

SEQ ID NO: 449452 - RNA, 22 nt, Human
aggcugagaaagugggaagaug

SEQ ID NO: 449453 - RNA, 22 nt, Human
gagcuuggugaugccuccuggu

SEQ ID NO: 449454 - RNA, 22 nt, Human
uccaggaggccucauuuccugu

SEQ ID NO: 449455 - RNA, 22 nt, Human
ccaggguggcguagaugcuggg

SEQ ID NO: 449456 - RNA, 22 nt, Human
gguuucaacuaaaucaagaagg

SEQ ID NO: 449457 - RNA, 22 nt, Human
gacccagcuaaccaggugggga

SEQ ID NO: 449458 - RNA, 22 nt, Human
uagaggugacacugagaccaua

SEQ ID NO: 449459 - RNA, 22 nt, Human
ucucaguguuaucuaucugccu

SEQ ID NO: 449460 - RNA, 22 nt, Human
guccuuugaaggcaaaaggaga

SEQ ID NO: 449461 - RNA, 22 nt, Human
guucagggagggacagaugaag

SEQ ID NO: 449462 - RNA, 21 nt, Human
cugaggcagcacagcuaguca

SEQ ID NO: 449463 - RNA, 23 nt, Human
uauuagggccaggacuggcaaau

SEQ ID NO: 449464 - RNA, 22 nt, Human
ucacagggcauuauggcuccag

SEQ ID NO: 449465 - RNA, 22 nt, Human
ccaaagugcugagauuacaggu

SEQ ID NO: 449466 - RNA, 22 nt, Human
ucuucuuccucauuuauacaua

SEQ ID NO: 449467 - RNA, 22 nt, Human
ggggaccuggccacccauccuu

SEQ ID NO: 449468 - RNA, 22 nt, Human
cuccaguaucuguaggaaaagg

SEQ ID NO: 449469 - RNA, 22 nt, Human
ugcauaaacuucucugguguga

SEQ ID NO: 449470 - RNA, 22 nt, Human
gcugcucuggcucugcaguguc

SEQ ID NO: 449471 - RNA, 22 nt, Human
cucagaguucuccugggaggug

SEQ ID NO: 449472 - RNA, 22 nt, Human
agggucagagucaggugcagua

SEQ ID NO: 449473 - RNA, 20 nt, Human
ucagguagaucuuugagguc

SEQ ID NO: 449474 - RNA, 22 nt, Human
cagggcagagccaggauuucaa

SEQ ID NO: 449475 - RNA, 22 nt, Human
uagcuuuaggaugguucucuug

SEQ ID NO: 449476 - RNA, 22 nt, Human
ucauuuucacacauaaauagca

SEQ ID NO: 449477 - RNA, 22 nt, Human
gcucaggaaacagcagggcuug

SEQ ID NO: 449478 - RNA, 18 nt, Human
uguuuauuuuucucuuac

SEQ ID NO: 449479 - RNA, 22 nt, Human
ugcacacacucugcauauacuu

SEQ ID NO: 449480 - RNA, 22 nt, Human
augcuguguuugagaaccuagg

SEQ ID NO: 449481 - RNA, 17 nt, Human
ggccuugggcugcucuu

SEQ ID NO: 449482 - RNA, 22 nt, Human
acagagcuguacaugugccaug

SEQ ID NO: 449483 - RNA, 22 nt, Human
ucauuucuccgaccugcugucc

SEQ ID NO: 449484 - RNA, 22 nt, Human
caggguggaagcuguagagugg

SEQ ID NO: 449485 - RNA, 20 nt, Human
ugccagggccagcagaggcu

SEQ ID NO: 449486 - RNA, 22 nt, Human
acaguucccgucuugcacagcu

SEQ ID NO: 449487 - RNA, 22 nt, Human
aggcuucagaugaccuuagcau

SEQ ID NO: 449488 - RNA, 22 nt, Human
aaugaacacagcccucuacuuu

SEQ ID NO: 449489 - RNA, 22 nt, Human
uguaggauuuucaccagaccuu

SEQ ID NO: 449490 - RNA, 23 nt, Human
guuuucaacacaauaaauguaac

SEQ ID NO: 449491 - RNA, 22 nt, Human
gaggcucauugcauugugcauu

SEQ ID NO: 449492 - RNA, 19 nt, Human
ucaguuuuagucaucaguu

SEQ ID NO: 449493 - RNA, 21 nt, Human
aaagugguaaggauuauuuug

SEQ ID NO: 449494 - RNA, 22 nt, Human
uuuuccucugcaauaaaagcag

SEQ ID NO: 449495 - RNA, 22 nt, Human
cugcuuuggcucagugacauca

SEQ ID NO: 449496 - RNA, 22 nt, Human
cgcugccaggauccccugccgg

SEQ ID NO: 449497 - RNA, 22 nt, Human
cagaagaguagcugaacaaguu

SEQ ID NO: 449498 - RNA, 22 nt, Human
ugcaauaaguuguguuaucacu

SEQ ID NO: 449499 - RNA, 22 nt, Human
acacaguaugaaaagucuaguu

SEQ ID NO: 449500 - RNA, 22 nt, Human
gaagaagguggcccagggguag

SEQ ID NO: 449501 - RNA, 22 nt, Human
ggguguguuccuaaggaaacca

SEQ ID NO: 449502 - RNA, 22 nt, Human
cugagcuuggccaggaaugaau

SEQ ID NO: 449503 - RNA, 22 nt, Human
auucaguucuaaggucagugcc

SEQ ID NO: 449504 - RNA, 22 nt, Human
caugcacaaagguaagaugcgu

SEQ ID NO: 449505 - RNA, 20 nt, Human
cccuggccuguuucaugccc

SEQ ID NO: 449506 - RNA, 22 nt, Human
ccaggccucuggcugcuuaguc

SEQ ID NO: 449507 - RNA, 22 nt, Human
gcagacuguaucaaugucagua

SEQ ID NO: 449508 - RNA, 22 nt, Human
agcaccugcuuaaugugcagug

SEQ ID NO: 449509 - RNA, 17 nt, Human
auuuccucagggcugag

SEQ ID NO: 449510 - RNA, 22 nt, Human
auggagacgcaagggaccuagg

SEQ ID NO: 449511 - RNA, 22 nt, Human
uggggguguccuggugcacaca

SEQ ID NO: 449512 - RNA, 22 nt, Human
gggaugucacugugccuggcac

SEQ ID NO: 449513 - RNA, 22 nt, Human
uuuccuuccaaaugcccgggag

SEQ ID NO: 449514 - RNA, 22 nt, Human
ggagcuggucagccuugagcau

SEQ ID NO: 449515 - RNA, 21 nt, Human
uuucugaaggcaacaucuauc

SEQ ID NO: 449516 - RNA, 22 nt, Human
cugucaguaggcucccaucauu

SEQ ID NO: 449517 - RNA, 22 nt, Human
ugcuuuaucugacuuggcgcug

SEQ ID NO: 449518 - RNA, 22 nt, Human
agggcaugcuggaggagagaca

SEQ ID NO: 449519 - RNA, 22 nt, Human
ucacauuuguucuugaaucuaa

SEQ ID NO: 449520 - RNA, 22 nt, Human
ccuuagagaguacugggcugcc

SEQ ID NO: 449521 - RNA, 21 nt, Human
agccaggcaagcacccccacu

SEQ ID NO: 449522 - RNA, 22 nt, Human
ccggggacuuaaagugaaggaa

SEQ ID NO: 449523 - RNA, 22 nt, Human
agggcgaggagacggaggcaca

SEQ ID NO: 449524 - RNA, 22 nt, Human
uuccaguugguagaauguaagg

SEQ ID NO: 449525 - RNA, 19 nt, Human
gggcuccuugggccucucu

SEQ ID NO: 449526 - RNA, 22 nt, Human
gcagggugauagugaggcucag

SEQ ID NO: 449527 - RNA, 22 nt, Human
ucacauuuuccuugguaucugu

SEQ ID NO: 449528 - RNA, 22 nt, Human
cuggcagcauggagccugugcu

SEQ ID NO: 449529 - RNA, 22 nt, Human
caaauaucuuuggcaaagagaa

SEQ ID NO: 449530 - RNA, 22 nt, Human
gggcuugcugauuugggcagga

SEQ ID NO: 449531 - RNA, 22 nt, Human
uggcagaguucgcugugccuuu

SEQ ID NO: 449532 - RNA, 22 nt, Human
cagugcaugaaacaauaugcag

SEQ ID NO: 449533 - RNA, 20 nt, Human
agcagcuguguuuucauccu

SEQ ID NO: 449534 - RNA, 22 nt, Human
aaggucauuuuuuccucuguug

SEQ ID NO: 449535 - RNA, 22 nt, Human
gaggccuggagccgccuaggcg

SEQ ID NO: 449536 - RNA, 22 nt, Human
agccaaggacacggagccuccu

SEQ ID NO: 449537 - RNA, 22 nt, Human
augacacaauuuuagagcugaa

SEQ ID NO: 449538 - RNA, 22 nt, Human
cucccaagcugugcugaacugu

SEQ ID NO: 449539 - RNA, 22 nt, Human
uccucuggcccagcugccucug

SEQ ID NO: 449540 - RNA, 22 nt, Human
ccucacaguuuggcuaacugug

SEQ ID NO: 449541 - RNA, 22 nt, Human
uucacaggugacuggggauaac

SEQ ID NO: 449542 - RNA, 22 nt, Human
cacagcuucuccuugauaucgc

SEQ ID NO: 449543 - RNA, 19 nt, Human
cugcucaggucagucuguc

SEQ ID NO: 449544 - RNA, 22 nt, Human
uacauuaacuuacguccacaug

SEQ ID NO: 449545 - RNA, 22 nt, Human
acauuguauaaugauuaucaca

SEQ ID NO: 449546 - RNA, 22 nt, Human
cguguacagucuaucuuuuuuc

SEQ ID NO: 449547 - RNA, 22 nt, Human
acagaagagcacauuuaguaug

SEQ ID NO: 449548 - RNA, 22 nt, Human
guauuuuauggcaugcaguggc

SEQ ID NO: 449549 - RNA, 22 nt, Human
gcccacacaccagcucaggagg

SEQ ID NO: 449550 - RNA, 20 nt, Human
aucagcaacugccacucagu

SEQ ID NO: 449551 - RNA, 22 nt, Human
gugguaauuuaauccuacacug

SEQ ID NO: 449552 - RNA, 22 nt, Human
aggcaguguguagcuggaagag

SEQ ID NO: 449553 - RNA, 22 nt, Human
ucacugcaaggaggcuucucaa

SEQ ID NO: 449554 - RNA, 22 nt, Human
ggcugagcguggcugccguggg

SEQ ID NO: 449555 - RNA, 22 nt, Human
caggguggaauggaaugcuggc

SEQ ID NO: 449556 - RNA, 22 nt, Human
ucaacagaagugauagcuauua

SEQ ID NO: 449557 - RNA, 22 nt, Human
aaagucugagcagaauuucuca

SEQ ID NO: 449558 - RNA, 22 nt, Human
cugugggcugaaagugcucccg

SEQ ID NO: 449559 - RNA, 20 nt, Human
accagguggcugaugacacc

SEQ ID NO: 449560 - RNA, 22 nt, Human
ucaguuuuucuauacuuuguag

SEQ ID NO: 449561 - RNA, 21 nt, Human
acaggcuuuagaaaaugacuc

SEQ ID NO: 449562 - RNA, 22 nt, Human
ccugugugcacacgaggccaug

SEQ ID NO: 449563 - RNA, 22 nt, Human
acagacauuuucuguauugccu

SEQ ID NO: 449564 - RNA, 22 nt, Human
ggagcagacauaaccuuacaga

SEQ ID NO: 449565 - RNA, 21 nt, Human
aagagcuggaucaaggauaag

SEQ ID NO: 449566 - RNA, 22 nt, Human
aaacaaguguaaacuagucugu

SEQ ID NO: 449567 - RNA, 19 nt, Human
gagcagcugcacccauuga

SEQ ID NO: 449568 - RNA, 22 nt, Human
aggccuuaccauagcuguagca

SEQ ID NO: 449569 - RNA, 22 nt, Human
auaauuaauuucaguaaucucc

SEQ ID NO: 449570 - RNA, 22 nt, Human
augggcaguguauuggaaggaa

SEQ ID NO: 449571 - RNA, 22 nt, Human
aaaacuguaggaauugggugcc

SEQ ID NO: 449572 - RNA, 22 nt, Human
cugaaggauucaaaauggcagg

SEQ ID NO: 449573 - RNA, 22 nt, Human
cucuccagaucugcugagccag

SEQ ID NO: 449574 - RNA, 22 nt, Human
ucucugagcaugccauauugcu

SEQ ID NO: 449575 - RNA, 22 nt, Human
cauaucauaggucuuggauaau

SEQ ID NO: 449576 - RNA, 22 nt, Human
gagcugggacauggguccucuc

SEQ ID NO: 449577 - RNA, 22 nt, Human
agcucccaauugacuugaacua

SEQ ID NO: 449578 - RNA, 22 nt, Human
ucuagaaacaugacauugaucu

SEQ ID NO: 449579 - RNA, 22 nt, Human
cucugaccauucccuugauuuu

SEQ ID NO: 449580 - RNA, 21 nt, Human
gagccuucccucugcccuuuc

SEQ ID NO: 449581 - RNA, 22 nt, Human
uugggcucaggaguuugagacc

SEQ ID NO: 449582 - RNA, 22 nt, Human
caggucagagucccccuguccu

SEQ ID NO: 449583 - RNA, 22 nt, Human
uuauggcauauuccucauugua

SEQ ID NO: 449584 - RNA, 22 nt, Human
uggguagaggaauugggcuacc

SEQ ID NO: 449585 - RNA, 22 nt, Human
gauuuauugucccuguccugcu

SEQ ID NO: 449586 - RNA, 22 nt, Human
caggccuggguucaaaucccuu

SEQ ID NO: 449587 - RNA, 22 nt, Human
aagagagaacucccuucgccag

SEQ ID NO: 449588 - RNA, 22 nt, Human
cagggcuggauccuccagacuc

SEQ ID NO: 449589 - RNA, 22 nt, Human
ucucagaguuuacggggcugaa

SEQ ID NO: 449590 - RNA, 21 nt, Human
uuucacaaaaguaugugacaa

SEQ ID NO: 449591 - RNA, 22 nt, Human
uaaaucuccuguuuuucaucua

SEQ ID NO: 449592 - RNA, 20 nt, Human
agcauuugaaauaugacuau

SEQ ID NO: 449593 - RNA, 22 nt, Human
uagcagcucacagccucccauu

SEQ ID NO: 449594 - RNA, 18 nt, Human
cucugcuaaugggcagcu

SEQ ID NO: 449595 - RNA, 22 nt, Human
ugcagggaauccagucuagggu

SEQ ID NO: 449596 - RNA, 22 nt, Human
agaaaagguugaaaguaggauu

SEQ ID NO: 449597 - RNA, 22 nt, Human
aaggcccuaauagagcacauau

SEQ ID NO: 449598 - RNA, 22 nt, Human
aggcugugagcaagaacaccua

SEQ ID NO: 449599 - RNA, 22 nt, Human
uacaagagguauauagaaacag

SEQ ID NO: 449600 - RNA, 22 nt, Human
gcugauuauuacaugucugugg

SEQ ID NO: 449601 - RNA, 22 nt, Human
auuuuucucuccacuccauuaa

SEQ ID NO: 449602 - RNA, 22 nt, Human
cgcagcagccccgugguaggug

SEQ ID NO: 449603 - RNA, 22 nt, Human
uuccuguauuuugcgaauuuuc

SEQ ID NO: 449604 - RNA, 22 nt, Human
cccuggaguagcacugggucgc

SEQ ID NO: 449605 - RNA, 22 nt, Human
gggcuggaggagauccagaggc

SEQ ID NO: 449606 - RNA, 22 nt, Human
caggguggggaaauagcgcccu

SEQ ID NO: 449607 - RNA, 22 nt, Human
gcucugugggugaguagaaucu

SEQ ID NO: 449608 - RNA, 22 nt, Human
cuggcccagucucagaguguca

SEQ ID NO: 449609 - RNA, 22 nt, Human
auguuaaaugguuuauuauuaa

SEQ ID NO: 449610 - RNA, 22 nt, Human
guaggaagcucugaggcuaguu

SEQ ID NO: 449611 - RNA, 22 nt, Human
gggcuguggagccgcgagggcu

SEQ ID NO: 449612 - RNA, 22 nt, Human
gcagggcaaacccagguguuca

SEQ ID NO: 449613 - RNA, 22 nt, Human
aagggcucuucuauuuauggcc

SEQ ID NO: 449614 - RNA, 22 nt, Human
guaauugacucagcucuguuca

SEQ ID NO: 449615 - RNA, 22 nt, Human
ccaaaauuaagccucuuauguu

SEQ ID NO: 449616 - RNA, 22 nt, Human
uccuucagcuuauuucuuagga

SEQ ID NO: 449617 - RNA, 22 nt, Human
uggugguuaugcgcuuuguggg

SEQ ID NO: 449618 - RNA, 22 nt, Human
ggcuuucuaugaacucaaaggc

SEQ ID NO: 449619 - RNA, 22 nt, Human
gccugucugcagggcugucauu

SEQ ID NO: 449620 - RNA, 22 nt, Human
ugggcacuauggcucugugcac

SEQ ID NO: 449621 - RNA, 22 nt, Human
agccucugucaagcuuuucaaa

SEQ ID NO: 449622 - RNA, 22 nt, Human
cacauuugaaggaauuagcauu

SEQ ID NO: 449623 - RNA, 22 nt, Human
ccaggccuccugugaguggacc

SEQ ID NO: 449624 - RNA, 22 nt, Human
agagcuguggauaguccuggau

SEQ ID NO: 449625 - RNA, 22 nt, Human
ugguccugagcaccagccugac

SEQ ID NO: 449626 - RNA, 19 nt, Human
uacauuuguguacacuugu

SEQ ID NO: 449627 - RNA, 22 nt, Human
agucccagaucuccauucgguc

SEQ ID NO: 449628 - RNA, 22 nt, Human
cugugcuuaccugcccagguga

SEQ ID NO: 449629 - RNA, 22 nt, Human
agacaggcagaggcugcagagg

SEQ ID NO: 449630 - RNA, 22 nt, Human
caggguugcaugcaucuguggg

SEQ ID NO: 449631 - RNA, 22 nt, Human
ugaggaagcaaaggcuugugug

SEQ ID NO: 449632 - RNA, 22 nt, Human
cagcuuuagagaaaacauauuu

SEQ ID NO: 449633 - RNA, 22 nt, Human
caccagggcucugagcucugaa

SEQ ID NO: 449634 - RNA, 22 nt, Human
gaagcaaaaugucugcacauau

SEQ ID NO: 449635 - RNA, 22 nt, Human
uggagugaaguaaagaggacaa

SEQ ID NO: 449636 - RNA, 22 nt, Human
uccucugcucagcauuccucac

SEQ ID NO: 449637 - RNA, 22 nt, Human
ugucucagauacgccaucaagg

SEQ ID NO: 449638 - RNA, 22 nt, Human
acguuuucagccuuaauguaga

SEQ ID NO: 449639 - RNA, 22 nt, Human
uuuucucaggugcuuaucuaag

SEQ ID NO: 449640 - RNA, 22 nt, Human
cagagguagccgagugcaaucg

SEQ ID NO: 449641 - RNA, 22 nt, Human
aucuuaaucgaguccaugaaaa

SEQ ID NO: 449642 - RNA, 22 nt, Human
ucucccaggcugcccuguggac

SEQ ID NO: 449643 - RNA, 22 nt, Human
aagcaucucuauguggagagug

SEQ ID NO: 449644 - RNA, 22 nt, Human
aggcagaggaaggguggauuug

SEQ ID NO: 449645 - RNA, 20 nt, Human
ggcagccaaucagcgugccg

SEQ ID NO: 449646 - RNA, 22 nt, Human
ggggcagggagguuaucgccga

SEQ ID NO: 449647 - RNA, 18 nt, Human
uggguggcuagggaguuu

SEQ ID NO: 449648 - RNA, 22 nt, Human
ucaggauguuaauauagcauua

SEQ ID NO: 449649 - RNA, 22 nt, Human
agcagagccaggucucucugua

SEQ ID NO: 449650 - RNA, 23 nt, Human
uccuggugacaugccugagcauc

SEQ ID NO: 449651 - RNA, 22 nt, Human
cagagcucuauguucauggagg

SEQ ID NO: 449652 - RNA, 22 nt, Human
uuguguccugauuugacacaau

SEQ ID NO: 449653 - RNA, 22 nt, Human
guuucauuuacaucuguaggua

SEQ ID NO: 449654 - RNA, 22 nt, Human
gcuggcccagggucaccuagga

SEQ ID NO: 449655 - RNA, 22 nt, Human
ucaaaugcuucuacuccuaaga

SEQ ID NO: 449656 - RNA, 22 nt, Human
ggaagggcaauaaaaucucagg

SEQ ID NO: 449657 - RNA, 22 nt, Human
gggcugagagugacuguucugu

SEQ ID NO: 449658 - RNA, 22 nt, Human
ucaguuuuuaaaugauauaauu

SEQ ID NO: 449659 - RNA, 22 nt, Human
acagaggccgccucucucacgg

SEQ ID NO: 449660 - RNA, 19 nt, Human
uggaagaggaagggaaaua

SEQ ID NO: 449661 - RNA, 22 nt, Human
ugggaggcuuccagaccuugcu

SEQ ID NO: 449662 - RNA, 22 nt, Human
aggcaggucacaugcuuggcga

SEQ ID NO: 449663 - RNA, 22 nt, Human
aagagggcugcaaucuuauugc

SEQ ID NO: 449664 - RNA, 22 nt, Human
cuggugcuggagccuagucccu

SEQ ID NO: 449665 - RNA, 22 nt, Human
agcugccaaguuucucaguuua

SEQ ID NO: 449666 - RNA, 22 nt, Human
aagauuucuuacuuauugaugc

SEQ ID NO: 449667 - RNA, 22 nt, Human
gggcugacgaaggccaugugug

SEQ ID NO: 449668 - RNA, 22 nt, Human
cuggugggaggcaagguggaag

SEQ ID NO: 449669 - RNA, 22 nt, Human
ccagagccggauugugaagugc

SEQ ID NO: 449670 - RNA, 20 nt, Human
ucccaggcugggcuccagcu

SEQ ID NO: 449671 - RNA, 22 nt, Human
ugagcuggucacuccuucugaa

SEQ ID NO: 449672 - RNA, 22 nt, Human
agccccucuguggcucugccuc

SEQ ID NO: 449673 - RNA, 18 nt, Human
caaagcucacguuccauc

SEQ ID NO: 449674 - RNA, 22 nt, Human
uguggcuguguccaccugcugc

SEQ ID NO: 449675 - RNA, 22 nt, Human
ugauggcuaucccuggaagggc

SEQ ID NO: 449676 - RNA, 22 nt, Human
gcagagccugugucugagcaaa

SEQ ID NO: 449677 - RNA, 22 nt, Human
uggacaggaucugagacugaga

SEQ ID NO: 449678 - RNA, 22 nt, Human
acauuucuuccacaugcugcug

SEQ ID NO: 449679 - RNA, 22 nt, Human
ggaagccaguugcuuggugugg

SEQ ID NO: 449680 - RNA, 22 nt, Human
aggcagcaauugaaaucauugu

SEQ ID NO: 449681 - RNA, 21 nt, Human
ggugucaguuuuggucauuag

SEQ ID NO: 449682 - RNA, 22 nt, Human
caguauuuucaggauuuggaag

SEQ ID NO: 449683 - RNA, 22 nt, Human
gaaaauuauugaaaauggcucu

SEQ ID NO: 449684 - RNA, 22 nt, Human
cagggacaauggcagagccuga

SEQ ID NO: 449685 - RNA, 22 nt, Human
aaagcucacaguaauacaaggc

SEQ ID NO: 449686 - RNA, 22 nt, Human
guucauuuaugauguaacaugu

SEQ ID NO: 449687 - RNA, 22 nt, Human
agggcuggccacaugauuuggu

SEQ ID NO: 449688 - RNA, 22 nt, Human
acaggccuuggcaggcauguga

SEQ ID NO: 449689 - RNA, 23 nt, Human
agcagcaaaaauuuaucuuucug

SEQ ID NO: 449690 - RNA, 22 nt, Human
aagcugaggcccauggcaaggu

SEQ ID NO: 449691 - RNA, 22 nt, Human
agaagccagucgcucucccgca

SEQ ID NO: 449692 - RNA, 22 nt, Human
ugaagcagcaaaugaugggaga

SEQ ID NO: 449693 - RNA, 22 nt, Human
ccuccucugggaagauucagag

SEQ ID NO: 449694 - RNA, 22 nt, Human
ugcucccaaacgaccuacugug

SEQ ID NO: 449695 - RNA, 22 nt, Human
agccuggaagaaccugaagucu

SEQ ID NO: 449696 - RNA, 22 nt, Human
uauuaggguaaauuugacaugc

SEQ ID NO: 449697 - RNA, 22 nt, Human
ugggcuccggcggccucaggcu

SEQ ID NO: 449698 - RNA, 22 nt, Human
aucgagggugaguacagcggac

SEQ ID NO: 449699 - RNA, 22 nt, Human
ggcagggcccugauuccugggg

SEQ ID NO: 449700 - RNA, 22 nt, Human
caggguuucaccauguuagcag

SEQ ID NO: 449701 - RNA, 22 nt, Human
uucaauucaauucuaaauauau

SEQ ID NO: 449702 - RNA, 22 nt, Human
ggagucaggagcaggcugggcu

SEQ ID NO: 449703 - RNA, 22 nt, Human
gccugcuggcuguccauugcag

SEQ ID NO: 449704 - RNA, 20 nt, Human
ccugaggguuuguguucuuu

SEQ ID NO: 449705 - RNA, 22 nt, Human
gcuggcaccugcaccaagcagg

SEQ ID NO: 449706 - RNA, 22 nt, Human
ggccgggcaggucucagccagc

SEQ ID NO: 449707 - RNA, 22 nt, Human
ucaguuuugauuccugguucuc

SEQ ID NO: 449708 - RNA, 22 nt, Human
acuuuuuuauaaggaagaagau

SEQ ID NO: 449709 - RNA, 22 nt, Human
ggaggagacaguaaaaagcacg

SEQ ID NO: 449710 - RNA, 22 nt, Human
gcugucaggccaugugggccuu

SEQ ID NO: 449711 - RNA, 18 nt, Human
agggucagugucacuggc

SEQ ID NO: 449712 - RNA, 22 nt, Human
cugagcugagccaaaucugucu

SEQ ID NO: 449713 - RNA, 20 nt, Human
ugaggcaggagaauggcaug

SEQ ID NO: 449714 - RNA, 22 nt, Human
aaaguuugagugauuugacaca

SEQ ID NO: 449715 - RNA, 22 nt, Human
ugucccagcacuuugggagucu

SEQ ID NO: 449716 - RNA, 22 nt, Human
uagaacagaggguugcccagau

SEQ ID NO: 449717 - RNA, 22 nt, Human
auucuccagcucacuguccaua

SEQ ID NO: 449718 - RNA, 22 nt, Human
cccagacuccucuggcuggugg

SEQ ID NO: 449719 - RNA, 22 nt, Human
ugucccaguuuaucugggacug

SEQ ID NO: 449720 - RNA, 22 nt, Human
uuugaaguccaucuggcccagu

SEQ ID NO: 449721 - RNA, 22 nt, Human
ccaagggcucugacuugccugc

SEQ ID NO: 449722 - RNA, 22 nt, Human
agucaguguagaaagcccaggc

SEQ ID NO: 449723 - RNA, 22 nt, Human
ucuuuugugauucuucaguuac

SEQ ID NO: 449724 - RNA, 22 nt, Human
aaaugugcuugugaucagcugu

SEQ ID NO: 449725 - RNA, 22 nt, Human
gucaaguuaagauaaggucaug

SEQ ID NO: 449726 - RNA, 22 nt, Human
gaggccuggaauuccagccugg

SEQ ID NO: 449727 - RNA, 22 nt, Human
cugaggucuagacaccccaggg

SEQ ID NO: 449728 - RNA, 16 nt, Human
ugggcagaugagaaga

SEQ ID NO: 449729 - RNA, 22 nt, Human
aggaccugcuaaugugccaagu

SEQ ID NO: 449730 - RNA, 18 nt, Human
uggagcagguaggcauga

SEQ ID NO: 449731 - RNA, 22 nt, Human
cuggcucuucagugcuugguuc

SEQ ID NO: 449732 - RNA, 22 nt, Human
caggugggagcgaggagcuacu

SEQ ID NO: 449733 - RNA, 22 nt, Human
uccagggaugccagccauguug

SEQ ID NO: 449734 - RNA, 22 nt, Human
ggcagggaguggagacucccua

SEQ ID NO: 449735 - RNA, 22 nt, Human
cagcuggcuccaccucugggcu

SEQ ID NO: 449736 - RNA, 17 nt, Human
gcaaucucagucuccuu

SEQ ID NO: 449737 - RNA, 22 nt, Human
aaagccagagcaagcugucaca

SEQ ID NO: 449738 - RNA, 22 nt, Human
cagcuggcagaaccugcaucca

SEQ ID NO: 449739 - RNA, 22 nt, Human
agccagggagguggagguugca

SEQ ID NO: 449740 - RNA, 22 nt, Human
agccuggcacugccccauccau

SEQ ID NO: 449741 - RNA, 22 nt, Human
aaauguuccauuauuguguaau

SEQ ID NO: 449742 - RNA, 22 nt, Human
ccagccacugggccacugccag

SEQ ID NO: 449743 - RNA, 22 nt, Human
ucaggcagagcuguggagcucu

SEQ ID NO: 449744 - RNA, 18 nt, Human
acauuucuaugcuucugg

SEQ ID NO: 449745 - RNA, 22 nt, Human
aaagccaguucuuagagaaagc

SEQ ID NO: 449746 - RNA, 22 nt, Human
uggccugucuuguugugcuaga

SEQ ID NO: 449747 - RNA, 22 nt, Human
augcauugucugguuucauuuu

SEQ ID NO: 449748 - RNA, 19 nt, Human
uccauaagcuuguguucau

SEQ ID NO: 449749 - RNA, 22 nt, Human
acugugcaaugaguaauaaacu

SEQ ID NO: 449750 - RNA, 22 nt, Human
ucaaaugcacguagagaaaaua

SEQ ID NO: 449751 - RNA, 22 nt, Human
guccagugucuucuacauaaca

SEQ ID NO: 449752 - RNA, 22 nt, Human
gcacagagggcagugagccucu

SEQ ID NO: 449753 - RNA, 22 nt, Human
gccagccugugggggcucugug

SEQ ID NO: 449754 - RNA, 22 nt, Human
ugagccugaguucaaggcugca

SEQ ID NO: 449755 - RNA, 21 nt, Human
aggaggaacccguggcugggc

SEQ ID NO: 449756 - RNA, 22 nt, Human
agguguguauaaacauacauau

SEQ ID NO: 449757 - RNA, 20 nt, Human
ucccuggaggugguggcauc

SEQ ID NO: 449758 - RNA, 21 nt, Human
ucucuggaguuagcagagaga

SEQ ID NO: 449759 - RNA, 22 nt, Human
cuccagggagcugcgggagcca

SEQ ID NO: 449760 - RNA, 22 nt, Human
uacuacauuaauaaaacauuca

SEQ ID NO: 449761 - RNA, 22 nt, Human
cccagcucuuuuagcggcaucu

SEQ ID NO: 449762 - RNA, 22 nt, Human
uucacaauaggagcaugcaaau

SEQ ID NO: 449763 - RNA, 22 nt, Human
auuuggcaacauuaauugaauc

SEQ ID NO: 449764 - RNA, 22 nt, Human
agaacagcagcacgucaagcug

SEQ ID NO: 449765 - RNA, 19 nt, Human
ggaagagaggaaaggugga

SEQ ID NO: 449766 - RNA, 22 nt, Human
agggagaagguuuagcugugag

SEQ ID NO: 449767 - RNA, 22 nt, Human
cgggcuccgggucuuugcaguc

SEQ ID NO: 449768 - RNA, 22 nt, Human
gcaaggagacuguagggccaag

SEQ ID NO: 449769 - RNA, 22 nt, Human
gggggaagacugggcuagugau

SEQ ID NO: 449770 - RNA, 22 nt, Human
uuccuauuuccaugaaacacaa

SEQ ID NO: 449771 - RNA, 22 nt, Human
uagggcugcugcagaugacagg

SEQ ID NO: 449772 - RNA, 22 nt, Human
gucccaggcuuauguggagcuu

SEQ ID NO: 449773 - RNA, 22 nt, Human
cuggcuuccucaggagcagugg

SEQ ID NO: 449774 - RNA, 22 nt, Human
uggccuggggaccugugagacc

SEQ ID NO: 449775 - RNA, 22 nt, Human
aaauuucuaagcagccacuucc

SEQ ID NO: 449776 - RNA, 22 nt, Human
uaguacuuaucucugucauugu

SEQ ID NO: 449777 - RNA, 22 nt, Human
gagauggggaauaggagcaagc

SEQ ID NO: 449778 - RNA, 22 nt, Human
gccccagguugccugucccagg

SEQ ID NO: 449779 - RNA, 22 nt, Human
ucagcuuucucuucuaucgaua

SEQ ID NO: 449780 - RNA, 22 nt, Human
ugaggcuguucuaccagggcca

SEQ ID NO: 449781 - RNA, 19 nt, Human
uuggaaggagccagagugg

SEQ ID NO: 449782 - RNA, 22 nt, Human
ucaguuuuaagguuugagaauu

SEQ ID NO: 449783 - RNA, 22 nt, Human
ggcuuuauuucacuguaccaua

SEQ ID NO: 449784 - RNA, 20 nt, Human
agcccuguuuccuggagaga

SEQ ID NO: 449785 - RNA, 21 nt, Human
ccugggagaucagcugccuuc

SEQ ID NO: 449786 - RNA, 22 nt, Human
ucaucaguuuagaaaaaauaug

SEQ ID NO: 449787 - RNA, 23 nt, Human
ccugaagggucaggguccucagc

SEQ ID NO: 449788 - RNA, 22 nt, Human
aggcugugcacagggcaccugc

SEQ ID NO: 449789 - RNA, 18 nt, Human
uggagccagcucuaggau

SEQ ID NO: 449790 - RNA, 22 nt, Human
ucugagcuacgaugccugucac

SEQ ID NO: 449791 - RNA, 22 nt, Human
acuuugcugcagguuuaaagag

SEQ ID NO: 449792 - RNA, 22 nt, Human
cugggagagaagcgaagcuggg

SEQ ID NO: 449793 - RNA, 22 nt, Human
agaccaagacuauaaugagagg

SEQ ID NO: 449794 - RNA, 22 nt, Human
aucagcaaucaaauugcagagu

SEQ ID NO: 449795 - RNA, 22 nt, Human
ugccaggcuguccugggccugg

SEQ ID NO: 449796 - RNA, 22 nt, Human
uauuucaugugcaccauaauuc

SEQ ID NO: 449797 - RNA, 22 nt, Human
gggcccagcgugguuccaucug

SEQ ID NO: 449798 - RNA, 22 nt, Human
aaucuguuuaguucugcguaug

SEQ ID NO: 449799 - RNA, 22 nt, Human
uggagcugggaguccugggcug

SEQ ID NO: 449800 - RNA, 22 nt, Human
aguuuucuguucuacaauuuga

SEQ ID NO: 449801 - RNA, 22 nt, Human
uccccagccgugaaggagagga

SEQ ID NO: 449802 - RNA, 22 nt, Human
aaagccuucaaguagauguaag

SEQ ID NO: 449803 - RNA, 22 nt, Human
cugcagagguugguucuaagau

SEQ ID NO: 449804 - RNA, 22 nt, Human
uuuaucuuuaggacuuugcaga

SEQ ID NO: 449805 - RNA, 22 nt, Human
cugaggccggagcacugaagag

SEQ ID NO: 449806 - RNA, 22 nt, Human
auccucaguguuucugacaucu

SEQ ID NO: 449807 - RNA, 22 nt, Human
cuuacaaauacacuuaggagag

SEQ ID NO: 449808 - RNA, 22 nt, Human
aguggugcugcgcgcggagcuc

SEQ ID NO: 449809 - RNA, 22 nt, Human
guccucuccaggaggcucugau

SEQ ID NO: 449810 - RNA, 22 nt, Human
gguuucaaauuaaagucuuaag

SEQ ID NO: 449811 - RNA, 22 nt, Human
gaggcagagucacaaagagucu

SEQ ID NO: 449812 - RNA, 22 nt, Human
guuagggagggugcauaugugu

SEQ ID NO: 449813 - RNA, 17 nt, Human
ucuggccuuccugaacu

SEQ ID NO: 449814 - RNA, 22 nt, Human
augggaggcagcagagcccagc

SEQ ID NO: 449815 - RNA, 21 nt, Human
gggugggaggacacagcaggc

SEQ ID NO: 449816 - RNA, 22 nt, Human
cauugcacucuggcuggaacgg

SEQ ID NO: 449817 - RNA, 22 nt, Human
uauucacagcugccgcacucag

SEQ ID NO: 449818 - RNA, 22 nt, Human
uuggaaggagucaaccagcuga

SEQ ID NO: 449819 - RNA, 22 nt, Human
aacagaauaguugauguacagu

SEQ ID NO: 449820 - RNA, 23 nt, Human
uuucacaaugagcauuacagaau

SEQ ID NO: 449821 - RNA, 23 nt, Human
augcaguauaugucaguaguuua

SEQ ID NO: 449822 - RNA, 22 nt, Human
aucaguuucugugaagaacaca

SEQ ID NO: 449823 - RNA, 22 nt, Human
aauuaugauuggucuaaaccag

SEQ ID NO: 449824 - RNA, 22 nt, Human
aggcugccuguuccaaucuccu

SEQ ID NO: 449825 - RNA, 22 nt, Human
auacauguaacugcauuguaau

SEQ ID NO: 449826 - RNA, 22 nt, Human
ccagggcaauaggaacacuuuu

SEQ ID NO: 449827 - RNA, 22 nt, Human
gagcagggccacuucuguaccu

SEQ ID NO: 449828 - RNA, 22 nt, Human
agggggcaggagagaccugcug

SEQ ID NO: 449829 - RNA, 22 nt, Human
aagauuucugcuuuuggaggca

SEQ ID NO: 449830 - RNA, 22 nt, Human
agccagaguugaaugugagucu

SEQ ID NO: 449831 - RNA, 22 nt, Human
cucagaguggggcucccugagg

SEQ ID NO: 449832 - RNA, 22 nt, Human
ugcaggaauagcuacagagcug

SEQ ID NO: 449833 - RNA, 22 nt, Human
gaaaucugaacucuguauccuu

SEQ ID NO: 449834 - RNA, 22 nt, Human
auuaaacaauguaaaguucuug

SEQ ID NO: 449835 - RNA, 22 nt, Human
cugggcuguucugccccugggu

SEQ ID NO: 449836 - RNA, 18 nt, Human
uggcucuggacuugcucc

SEQ ID NO: 449837 - RNA, 22 nt, Human
cucaggccauucuuccagcugc

SEQ ID NO: 449838 - RNA, 21 nt, Human
ccuggcuucagggugcacugg

SEQ ID NO: 449839 - RNA, 22 nt, Human
ccugcagguugcagaggcggaa

SEQ ID NO: 449840 - RNA, 22 nt, Human
gucucagauucagacaucuaca

SEQ ID NO: 449841 - RNA, 22 nt, Human
uccugcagagacagaggccuca

SEQ ID NO: 449842 - RNA, 21 nt, Human
ucacuagugccuucugucauu

SEQ ID NO: 449843 - RNA, 22 nt, Human
agucaccaacaugguucccagg

SEQ ID NO: 449844 - RNA, 22 nt, Human
ggcagggucuggacugaaagcu

SEQ ID NO: 449845 - RNA, 22 nt, Human
uuggccacacucacuagagccc

SEQ ID NO: 449846 - RNA, 22 nt, Human
aagccaggccauucucugguuc

SEQ ID NO: 449847 - RNA, 22 nt, Human
ucccaaggugcucggcaacagg

SEQ ID NO: 449848 - RNA, 19 nt, Human
ccucccacggauuccuucc

SEQ ID NO: 449849 - RNA, 22 nt, Human
auguagcaucuauccugauaaa

SEQ ID NO: 449850 - RNA, 18 nt, Human
ugggauggagaguaacug

SEQ ID NO: 449851 - RNA, 22 nt, Human
aguguauugauuggaacagccu

SEQ ID NO: 449852 - RNA, 18 nt, Human
guuaauuuugaaguucau

SEQ ID NO: 449853 - RNA, 22 nt, Human
gguucacauauugagaguauuc

SEQ ID NO: 449854 - RNA, 22 nt, Human
ucuguaucacccguucccagaa

SEQ ID NO: 449855 - RNA, 22 nt, Human
cuucuggggauggagcccagaa

SEQ ID NO: 449856 - RNA, 22 nt, Human
cagggacagccuugggguggcg

SEQ ID NO: 449857 - RNA, 22 nt, Human
ugugcccauuacacagaggcau

SEQ ID NO: 449858 - RNA, 22 nt, Human
ucauggagacuuugagccuguu

SEQ ID NO: 449859 - RNA, 22 nt, Human
aauaugcauuaacuguguacau

SEQ ID NO: 449860 - RNA, 22 nt, Human
gaggaagaaagcauaggugggg

SEQ ID NO: 449861 - RNA, 16 nt, Human
uagggcugggaaggag

SEQ ID NO: 449862 - RNA, 22 nt, Human
uaaugugugucaucaguagagu

SEQ ID NO: 449863 - RNA, 22 nt, Human
ugaggccugcuuggaauugaau

SEQ ID NO: 449864 - RNA, 22 nt, Human
agcaugaaagcauaggacaguc

SEQ ID NO: 449865 - RNA, 22 nt, Human
ugaaggccagcucuuuaucagc

SEQ ID NO: 449866 - RNA, 22 nt, Human
uuugagguuagcuagcagauca

SEQ ID NO: 449867 - RNA, 19 nt, Human
cuggggcuuugguacugcc

SEQ ID NO: 449868 - RNA, 22 nt, Human
ucuaguucuagaucccugagga

SEQ ID NO: 449869 - RNA, 22 nt, Human
acauagcuuaaaugagaagaua

SEQ ID NO: 449870 - RNA, 22 nt, Human
acaggcuuuuuuagaaugacau

SEQ ID NO: 449871 - RNA, 22 nt, Human
cagcucuguaaauuccuucauc

SEQ ID NO: 449872 - RNA, 22 nt, Human
agaggcagcagucauacuacag

SEQ ID NO: 449873 - RNA, 22 nt, Human
uggcacauagcagguacucagu

SEQ ID NO: 449874 - RNA, 19 nt, Human
cugcagggaugugcagagu

SEQ ID NO: 449875 - RNA, 22 nt, Human
ucccagaggacuguuggugcua

SEQ ID NO: 449876 - RNA, 16 nt, Human
uggcagagguucagcc

SEQ ID NO: 449877 - RNA, 22 nt, Human
acaugauuggacuccuuccccu

SEQ ID NO: 449878 - RNA, 22 nt, Human
aagcugccagcugagcugaggc

SEQ ID NO: 449879 - RNA, 22 nt, Human
ucuuuccuagaggcugaugagu

SEQ ID NO: 449880 - RNA, 22 nt, Human
uggcaguggcucagagugcaga

SEQ ID NO: 449881 - RNA, 22 nt, Human
ccagccugguucagaauuggcu

SEQ ID NO: 449882 - RNA, 23 nt, Human
agcagccauagggaagcaauaca

SEQ ID NO: 449883 - RNA, 22 nt, Human
ugaagcagagugaaggugaauu

SEQ ID NO: 449884 - RNA, 22 nt, Human
acugggccuugccauggcagcc

SEQ ID NO: 449885 - RNA, 22 nt, Human
agcugcucugauaaaccuacuu

SEQ ID NO: 449886 - RNA, 22 nt, Human
gcugccuguguggccacucacu

SEQ ID NO: 449887 - RNA, 22 nt, Human
cagcuggcauaccugggcccgg

SEQ ID NO: 449888 - RNA, 22 nt, Human
augaugguggguaauguguaaa

SEQ ID NO: 449889 - RNA, 22 nt, Human
ucaggcugaaggaggccuaucu

SEQ ID NO: 449890 - RNA, 22 nt, Human
ggaccugccagaacucaggcua

SEQ ID NO: 449891 - RNA, 22 nt, Human
caagggcagcagccucaagcgg

SEQ ID NO: 449892 - RNA, 22 nt, Human
gcaggccucuguugagggccuu

SEQ ID NO: 449893 - RNA, 22 nt, Human
cccagccuggugcacugugggg

SEQ ID NO: 449894 - RNA, 20 nt, Human
cugccuggaggccucuaccu

SEQ ID NO: 449895 - RNA, 22 nt, Human
auugacaauguauuuguaucug

SEQ ID NO: 449896 - RNA, 22 nt, Human
accucaggauguggacacagaa

SEQ ID NO: 449897 - RNA, 22 nt, Human
uugaaggacauccuauuucuag

SEQ ID NO: 449898 - RNA, 22 nt, Human
aaagaaaccuaucagccacaug

SEQ ID NO: 449899 - RNA, 22 nt, Human
ggaggcagaauagagugugggu

SEQ ID NO: 449900 - RNA, 21 nt, Human
ugggaugggucugggaccagc

SEQ ID NO: 449901 - RNA, 19 nt, Human
aggccugggguuuugcacu

SEQ ID NO: 449902 - RNA, 22 nt, Human
augucuuuauaaauguauaaug

SEQ ID NO: 449903 - RNA, 22 nt, Human
aaaaaugaaacggcugguuggc

SEQ ID NO: 449904 - RNA, 20 nt, Human
aacuuuagacauaaucucuu

SEQ ID NO: 449905 - RNA, 22 nt, Human
uccuuuuuaagucguuguggua

SEQ ID NO: 449906 - RNA, 22 nt, Human
agggaggaguccucaaagucau

SEQ ID NO: 449907 - RNA, 22 nt, Human
agucucagcuacuugggaggcu

SEQ ID NO: 449908 - RNA, 22 nt, Human
uggcagcaguggagguagaaag

SEQ ID NO: 449909 - RNA, 22 nt, Human
caguuucuauggcugggcucug

SEQ ID NO: 449910 - RNA, 22 nt, Human
uaacagaauccuguuauugcca

SEQ ID NO: 449911 - RNA, 22 nt, Human
gcagggacagggcagggccuuu

SEQ ID NO: 449912 - RNA, 22 nt, Human
ucccagagcagaugugcuaaag

SEQ ID NO: 449913 - RNA, 22 nt, Human
gccuggaggggacagucucugg

SEQ ID NO: 449914 - RNA, 22 nt, Human
uccucaggcugccuggaagacu

SEQ ID NO: 449915 - RNA, 22 nt, Human
guccucuguuagaaaugugcuu

SEQ ID NO: 449916 - RNA, 22 nt, Human
uguauuuucugaagauaaucaa

SEQ ID NO: 449917 - RNA, 18 nt, Human
acacacacaccuguguau

SEQ ID NO: 449918 - RNA, 22 nt, Human
accaucaguacuggaugcugac

SEQ ID NO: 449919 - RNA, 20 nt, Human
gauuacaaaaugaaaugcau

SEQ ID NO: 449920 - RNA, 22 nt, Human
uugagaagaauguguugaguuu

SEQ ID NO: 449921 - RNA, 22 nt, Human
uagggcagagcuuguacacgau

SEQ ID NO: 449922 - RNA, 22 nt, Human
gccuggagugguccugcugccc

SEQ ID NO: 449923 - RNA, 19 nt, Human
uggcaucuguaaaauggug

SEQ ID NO: 449924 - RNA, 22 nt, Human
ucccagcagggccgaccagccu

SEQ ID NO: 449925 - RNA, 22 nt, Human
ggcuuccuuucacuacccucag

SEQ ID NO: 449926 - RNA, 22 nt, Human
uagcaggguaaauguagaugga

SEQ ID NO: 449927 - RNA, 22 nt, Human
ggcagcagaacuggcccuguau

SEQ ID NO: 449928 - RNA, 22 nt, Human
gagacacacacaggagguggca

SEQ ID NO: 449929 - RNA, 22 nt, Human
agugagcauucguuuggaaccc

SEQ ID NO: 449930 - RNA, 22 nt, Human
uggccucugugggagcugagca

SEQ ID NO: 449931 - RNA, 22 nt, Human
uucaugugaauauauuugucuu

SEQ ID NO: 449932 - RNA, 22 nt, Human
cagcuugcaguacuuguuuuug

SEQ ID NO: 449933 - RNA, 20 nt, Human
gcagagccucacugcaaggg

SEQ ID NO: 449934 - RNA, 22 nt, Human
gaaaggugccccauaggcagga

SEQ ID NO: 449935 - RNA, 22 nt, Human
uagcauuuggcaccaguuauuu

SEQ ID NO: 449936 - RNA, 22 nt, Human
gagggaaagguuaauacaugau

SEQ ID NO: 449937 - RNA, 22 nt, Human
aggcagcaugcucugcuucuac

SEQ ID NO: 449938 - RNA, 22 nt, Human
ugaaggcuguuggauggggaag

SEQ ID NO: 449939 - RNA, 22 nt, Human
uggcugaguucuccaggaguag

SEQ ID NO: 449940 - RNA, 22 nt, Human
aagaaucauccugcaagagucu

SEQ ID NO: 449941 - RNA, 22 nt, Human
ggcugccugcuccuccugcacg

SEQ ID NO: 449942 - RNA, 22 nt, Human
ucugggugcccuuugcucuguu

SEQ ID NO: 449943 - RNA, 22 nt, Human
ggcauggcucggagucagaaca

SEQ ID NO: 449944 - RNA, 22 nt, Human
auuuuucucuuuccacugagau

SEQ ID NO: 449945 - RNA, 22 nt, Human
ucaagucuggagaucuggaacu

SEQ ID NO: 449946 - RNA, 22 nt, Human
gggccuguguguucaggagccu

SEQ ID NO: 449947 - RNA, 22 nt, Human
aaagcagggaugaggcuagagg

SEQ ID NO: 449948 - RNA, 22 nt, Human
gaaaaaugagcugaugucaggg

SEQ ID NO: 449949 - RNA, 22 nt, Human
gagcacagaaucuucccaugca

SEQ ID NO: 449950 - RNA, 22 nt, Human
auggaaagccaguguuccauca

SEQ ID NO: 449951 - RNA, 22 nt, Human
uaagaagcuucugcuaaugccu

SEQ ID NO: 449952 - RNA, 22 nt, Human
agaaugcaguuugaaauaaggu

SEQ ID NO: 449953 - RNA, 22 nt, Human
ucagagccccuccgcuguccca

SEQ ID NO: 449954 - RNA, 22 nt, Human
uuugucauaucacacaauuuug

SEQ ID NO: 449955 - RNA, 22 nt, Human
acucucucacagcuuggcugau

SEQ ID NO: 449956 - RNA, 22 nt, Human
ccagcagaggggcggagugcag

SEQ ID NO: 449957 - RNA, 22 nt, Human
ucaguaacuuacuuauucaccu

SEQ ID NO: 449958 - RNA, 22 nt, Human
cucaaggacuuauucaugccug

SEQ ID NO: 449959 - RNA, 22 nt, Human
gggaagguauuuagcugcugaa

SEQ ID NO: 449960 - RNA, 22 nt, Human
cuggcaggaagaggaaagguca

SEQ ID NO: 449961 - RNA, 22 nt, Human
ucugucacccgagcaggcgaga

SEQ ID NO: 449962 - RNA, 22 nt, Human
ggcagugaaucugagagccugg

SEQ ID NO: 449963 - RNA, 20 nt, Human
cccagggaccugagcuccau

SEQ ID NO: 449964 - RNA, 22 nt, Human
gcugucaguuuuacccacagac

SEQ ID NO: 449965 - RNA, 22 nt, Human
aaaucaguuagugguaggauug

SEQ ID NO: 449966 - RNA, 22 nt, Human
aggcugaggagggauguugcuu

SEQ ID NO: 449967 - RNA, 22 nt, Human
uggagaaggggcagggucucca

SEQ ID NO: 449968 - RNA, 22 nt, Human
agagcccucuucacugccccuu

SEQ ID NO: 449969 - RNA, 22 nt, Human
cucugggcaaguuucuucauga

SEQ ID NO: 449970 - RNA, 22 nt, Human
cucugggcaaguaugauagaaa

SEQ ID NO: 449971 - RNA, 22 nt, Human
ccagaagaccccguccaccucc

SEQ ID NO: 449972 - RNA, 22 nt, Human
uuuagggacaagggucuggggu

SEQ ID NO: 449973 - RNA, 22 nt, Human
agauuucccaaauacuuguuau

SEQ ID NO: 449974 - RNA, 22 nt, Human
aaucaagaaaaugaggauucuu

SEQ ID NO: 449975 - RNA, 22 nt, Human
auaacagauacucucugugagg

SEQ ID NO: 449976 - RNA, 22 nt, Human
ggagcugaaggggugggcucag

SEQ ID NO: 449977 - RNA, 22 nt, Human
ggugaggcagguggcugcugag

SEQ ID NO: 449978 - RNA, 22 nt, Human
aagcgccaugguuccugcgcag

SEQ ID NO: 449979 - RNA, 22 nt, Human
cccugccuucuuggccuuuaaa

SEQ ID NO: 449980 - RNA, 22 nt, Human
cccagggucccugcucucugug

SEQ ID NO: 449981 - RNA, 22 nt, Human
ccaggagcagggcuggcugcac

SEQ ID NO: 449982 - RNA, 22 nt, Human
cuguuaaucugcuugcaugaug

SEQ ID NO: 449983 - RNA, 22 nt, Human
ugagccagaguggagugugccu

SEQ ID NO: 449984 - RNA, 22 nt, Human
ggcacugaucugauuucccucc

SEQ ID NO: 449985 - RNA, 22 nt, Human
ucuguuccaguagaaaggugca

SEQ ID NO: 449986 - RNA, 22 nt, Human
cggggacacacuggcagcuccu

SEQ ID NO: 449987 - RNA, 18 nt, Human
ugugguggagcugccuuc

SEQ ID NO: 449988 - RNA, 22 nt, Human
gggguggauuccuacaggucca

SEQ ID NO: 449989 - RNA, 22 nt, Human
gaaguggaauuacugggucaua

SEQ ID NO: 449990 - RNA, 22 nt, Human
gggaauuauagcugucacaggc

SEQ ID NO: 449991 - RNA, 22 nt, Human
agaaggaguguacaggucaugc

SEQ ID NO: 449992 - RNA, 19 nt, Human
cugucaggggcuggauguu

SEQ ID NO: 449993 - RNA, 22 nt, Human
ucuacuguagugaugcugcagu

SEQ ID NO: 449994 - RNA, 22 nt, Human
agaagugcuccagugaguuggg

SEQ ID NO: 449995 - RNA, 22 nt, Human
cagaagaaaguggggagacaag

SEQ ID NO: 449996 - RNA, 22 nt, Human
acccagcaaagauaaacuuaug

SEQ ID NO: 449997 - RNA, 22 nt, Human
cacaggaaugaacagggaaaga

SEQ ID NO: 449998 - RNA, 22 nt, Human
aaggcccuggcaggaagcagga

SEQ ID NO: 449999 - RNA, 20 nt, Human
ugaaaaggucaggagacaug

SEQ ID NO: 450000 - RNA, 22 nt, Human
ucagaggaugcuguucuuuaau

SEQ ID NO: 450001 - RNA, 22 nt, Human
uaaagccacuucauucuagucu

SEQ ID NO: 450002 - RNA, 22 nt, Human
uugcauaaaagaguauaucuua

SEQ ID NO: 450003 - RNA, 22 nt, Human
caguguccucagccagcagcua

SEQ ID NO: 450004 - RNA, 22 nt, Human
cuuccuguugucacagucugcg

SEQ ID NO: 450005 - RNA, 22 nt, Human
gcacagccagcaucugagggau

SEQ ID NO: 450006 - RNA, 22 nt, Human
cagcccuggcuagggcgagggc

SEQ ID NO: 450007 - RNA, 22 nt, Human
caggauccccaggucgccgucc

SEQ ID NO: 450008 - RNA, 22 nt, Human
cagagccucagaauccugugga

SEQ ID NO: 450009 - RNA, 22 nt, Human
gugccucagcaccgccugcagc

SEQ ID NO: 450010 - RNA, 17 nt, Human
ccucccacaccgcccug

SEQ ID NO: 450011 - RNA, 22 nt, Human
agguuauaugucauacugaagu

SEQ ID NO: 450012 - RNA, 22 nt, Human
uuuccaaagcugaguugagcaa

SEQ ID NO: 450013 - RNA, 22 nt, Human
ggcucccacccauagggcgagu

SEQ ID NO: 450014 - RNA, 22 nt, Human
gagggcaggggucuugcacggu

SEQ ID NO: 450015 - RNA, 22 nt, Human
auuauuagugauguuguuacug

SEQ ID NO: 450016 - RNA, 22 nt, Human
uuuauuagugcuuguaucacug

SEQ ID NO: 450017 - RNA, 22 nt, Human
cagcugccuguauuguccucau

SEQ ID NO: 450018 - RNA, 22 nt, Human
ggcaguagccagggacuggcag

SEQ ID NO: 450019 - RNA, 22 nt, Human
ugagguguguccccagggaggu

SEQ ID NO: 450020 - RNA, 20 nt, Human
ggcacuggaagcacacagga

SEQ ID NO: 450021 - RNA, 22 nt, Human
agggcagccaugagccuucagg

SEQ ID NO: 450022 - RNA, 22 nt, Human
gagcagcugcagugcagacccu

SEQ ID NO: 450023 - RNA, 22 nt, Human
caguaugagaguugaaucaagg

SEQ ID NO: 450024 - RNA, 22 nt, Human
uggcagaguucgcuccuauuca

SEQ ID NO: 450025 - RNA, 22 nt, Human
ugggcacaaacaucugccuguu

SEQ ID NO: 450026 - RNA, 22 nt, Human
cagagagagugggguguggauu

SEQ ID NO: 450027 - RNA, 22 nt, Human
ggcugcaggcaggguauccacu

SEQ ID NO: 450028 - RNA, 22 nt, Human
auaugcacacucugcccacaga

SEQ ID NO: 450029 - RNA, 22 nt, Human
guuaaauucgaugauggauaaa

SEQ ID NO: 450030 - RNA, 22 nt, Human
aggcuuuaaguggccuacagcu

SEQ ID NO: 450031 - RNA, 22 nt, Human
cacaguccagacuccuggaguu

SEQ ID NO: 450032 - RNA, 22 nt, Human
ucccagcagagccagcaagccg

SEQ ID NO: 450033 - RNA, 22 nt, Human
ucucuggaagcgcagaucuguu

SEQ ID NO: 450034 - RNA, 22 nt, Human
agagugaaggccagguuacagu

SEQ ID NO: 450035 - RNA, 22 nt, Human
ccucacagggccaggccccuca

SEQ ID NO: 450036 - RNA, 22 nt, Human
aggaggccgcugaugggcuccc

SEQ ID NO: 450037 - RNA, 22 nt, Human
aguaaugugccugaaauacuug

SEQ ID NO: 450038 - RNA, 22 nt, Human
gccuggcuccuaaggacuggcu

SEQ ID NO: 450039 - RNA, 22 nt, Human
gcuggccucgcaggcaggaugu

SEQ ID NO: 450040 - RNA, 22 nt, Human
aaaucaguaaauguucauuaac

SEQ ID NO: 450041 - RNA, 22 nt, Human
cagcugggugaucuugggcagg

SEQ ID NO: 450042 - RNA, 20 nt, Human
ucauuguguugccaauuccc

SEQ ID NO: 450043 - RNA, 22 nt, Human
uguaucaaaccaaauuaauucu

SEQ ID NO: 450044 - RNA, 22 nt, Human
aacaaauguaaaaugcagaugc

SEQ ID NO: 450045 - RNA, 22 nt, Human
caguagcaggcacucagcacgu

SEQ ID NO: 450046 - RNA, 22 nt, Human
uggaggcaguuuaagucugaga

SEQ ID NO: 450047 - RNA, 22 nt, Human
acucaagauagggaaaguacaa

SEQ ID NO: 450048 - RNA, 22 nt, Human
ccacccagcagaggaggcaaga

SEQ ID NO: 450049 - RNA, 22 nt, Human
ucagaggaaagggaacauaguc

SEQ ID NO: 450050 - RNA, 22 nt, Human
cucagagcaaugaacaugcaaa

SEQ ID NO: 450051 - RNA, 22 nt, Human
uggcacugccuggcagggcccc

SEQ ID NO: 450052 - RNA, 22 nt, Human
cugcccugucuuuuucugauga

SEQ ID NO: 450053 - RNA, 22 nt, Human
ugcccacauucaaaaggugaug

SEQ ID NO: 450054 - RNA, 22 nt, Human
gcugccacgaucucugcuguag

SEQ ID NO: 450055 - RNA, 22 nt, Human
aguaaaauuucugcugaggaga

SEQ ID NO: 450056 - RNA, 22 nt, Human
gagcugccggcccacaguacua

SEQ ID NO: 450057 - RNA, 22 nt, Human
acacaccaugauuuauuuaccc

SEQ ID NO: 450058 - RNA, 22 nt, Human
agcagcucuguuuaccuggagg

SEQ ID NO: 450059 - RNA, 22 nt, Human
gcuaccugagcaagagcuucaa

SEQ ID NO: 450060 - RNA, 20 nt, Human
gccugagcuccgccuccugu

SEQ ID NO: 450061 - RNA, 22 nt, Human
cugcugagcccuggcacaggug

SEQ ID NO: 450062 - RNA, 17 nt, Human
uucucuuccuggauagu

SEQ ID NO: 450063 - RNA, 22 nt, Human
agccaagcugaucuccugcuga

SEQ ID NO: 450064 - RNA, 19 nt, Human
gccacuccugaugcugccc

SEQ ID NO: 450065 - RNA, 22 nt, Human
aggggcugccuggcuuggcacu

SEQ ID NO: 450066 - RNA, 20 nt, Human
uuucagugguuugugccuag

SEQ ID NO: 450067 - RNA, 22 nt, Human
aaugcuagugugauauguaagg

SEQ ID NO: 450068 - RNA, 22 nt, Human
cugagccauccauaccagcuua

SEQ ID NO: 450069 - RNA, 22 nt, Human
uccuucagccaugggcucucca

SEQ ID NO: 450070 - RNA, 22 nt, Human
cccagugccaggcacaggcagc

SEQ ID NO: 450071 - RNA, 22 nt, Human
cggcagagacggcgcuuugaac

SEQ ID NO: 450072 - RNA, 22 nt, Human
agagccacugggagacagagca

SEQ ID NO: 450073 - RNA, 22 nt, Human
gugccuggagcuaauguguaua

SEQ ID NO: 450074 - RNA, 22 nt, Human
caggcagaugcugacaagaguu

SEQ ID NO: 450075 - RNA, 22 nt, Human
cauccaggcaccacaaccagcu

SEQ ID NO: 450076 - RNA, 22 nt, Human
uuguuuuuaugaacauccagga

SEQ ID NO: 450077 - RNA, 22 nt, Human
cugcuggccuagcccauccucu

SEQ ID NO: 450078 - RNA, 22 nt, Human
cuggccagacuacacaugugug

SEQ ID NO: 450079 - RNA, 22 nt, Human
ugggcagggucucuguuaucag

SEQ ID NO: 450080 - RNA, 22 nt, Human
cugggcacaggggagcagaguc

SEQ ID NO: 450081 - RNA, 22 nt, Human
uccaggcaugucugaguccuuc

SEQ ID NO: 450082 - RNA, 22 nt, Human
ugggccuggaguuuguccagag

SEQ ID NO: 450083 - RNA, 22 nt, Human
gcuggccauucucuuugagaug

SEQ ID NO: 450084 - RNA, 22 nt, Human
aggcucugaucagguggcugug

SEQ ID NO: 450085 - RNA, 20 nt, Human
acauccuggugacuagaacu

SEQ ID NO: 450086 - RNA, 22 nt, Human
guguauaacuaucuaucuagua

SEQ ID NO: 450087 - RNA, 22 nt, Human
gagagggccagggugagaacua

SEQ ID NO: 450088 - RNA, 22 nt, Human
agcagagguuuguuggaaaccu

SEQ ID NO: 450089 - RNA, 22 nt, Human
ucugggcucuuaguguacccuc

SEQ ID NO: 450090 - RNA, 22 nt, Human
aaaugucuguuagucauaucau

SEQ ID NO: 450091 - RNA, 22 nt, Human
ucauugaacgaagagcuccauu

SEQ ID NO: 450092 - RNA, 22 nt, Human
uguuuuucaaauauugcucugu

SEQ ID NO: 450093 - RNA, 22 nt, Human
cagcugaguguuggcauguuca

SEQ ID NO: 450094 - RNA, 22 nt, Human
cuucccacagaauucaaucagu

SEQ ID NO: 450095 - RNA, 22 nt, Human
uuuguucacugagcaaugauua

SEQ ID NO: 450096 - RNA, 22 nt, Human
gauuuccuaauguggaucucug

SEQ ID NO: 450097 - RNA, 22 nt, Human
aggugucugggcuuuggaguca

SEQ ID NO: 450098 - RNA, 23 nt, Human
uaguuauuuucucuguaauuugc

SEQ ID NO: 450099 - RNA, 22 nt, Human
cccugcaggggaccugcagccu

SEQ ID NO: 450100 - RNA, 23 nt, Human
uucaaagcuuaagcucuuuccac

SEQ ID NO: 450101 - RNA, 22 nt, Human
cugcaagauuggaagaugcaau

SEQ ID NO: 450102 - RNA, 22 nt, Human
gaagucugacucuuuguaagcu

SEQ ID NO: 450103 - RNA, 22 nt, Human
caggugucaaaauacuaagugg

SEQ ID NO: 450104 - RNA, 22 nt, Human
aggguccugggugcaguugcuu

SEQ ID NO: 450105 - RNA, 22 nt, Human
aucaguuuugggggacauacug

SEQ ID NO: 450106 - RNA, 22 nt, Human
agcugccccaugagaggcaggu

SEQ ID NO: 450107 - RNA, 22 nt, Human
acauuuaaugauccuacuguga

SEQ ID NO: 450108 - RNA, 21 nt, Human
cagaggcaggcucugugugug

SEQ ID NO: 450109 - RNA, 22 nt, Human
acacuaauuaagcugcuuuacu

SEQ ID NO: 450110 - RNA, 22 nt, Human
ccuuucucuuggauaccgauug

SEQ ID NO: 450111 - RNA, 22 nt, Human
auugacaaauggauguugacau

SEQ ID NO: 450112 - RNA, 22 nt, Human
gccuggcuccuaagagcacaac

SEQ ID NO: 450113 - RNA, 22 nt, Human
gugcugcucacaucuggaggua

SEQ ID NO: 450114 - RNA, 23 nt, Human
ugauuuccagugagucaguggga

SEQ ID NO: 450115 - RNA, 22 nt, Human
ucauccaguaugacuggugucu

SEQ ID NO: 450116 - RNA, 22 nt, Human
gaaagcaguaaaugggucccau

SEQ ID NO: 450117 - RNA, 22 nt, Human
ucaggauggcuucugcaucaaa

SEQ ID NO: 450118 - RNA, 22 nt, Human
cuugcuuuguccagaaauucag

SEQ ID NO: 450119 - RNA, 22 nt, Human
uguauagaguuggaagaugacu

SEQ ID NO: 450120 - RNA, 22 nt, Human
ggagagcaggguccugagauac

SEQ ID NO: 450121 - RNA, 22 nt, Human
cccuggaggaaaaucugaggcu

SEQ ID NO: 450122 - RNA, 22 nt, Human
aucugccugcaguggagguggg

SEQ ID NO: 450123 - RNA, 22 nt, Human
cuggagcuggcuuccuuccacu

SEQ ID NO: 450124 - RNA, 22 nt, Human
aagccaagaguuaacuauuugu

SEQ ID NO: 450125 - RNA, 22 nt, Human
gaguuauucuagguccuuugua

SEQ ID NO: 450126 - RNA, 22 nt, Human
aguucucagcuuaguaugcugu

SEQ ID NO: 450127 - RNA, 22 nt, Human
gacacagggggauguguggacg

SEQ ID NO: 450128 - RNA, 22 nt, Human
ucugaagaacugaguaaacaug

SEQ ID NO: 450129 - RNA, 22 nt, Human
uuugggaaacuuaggggucaga

SEQ ID NO: 450130 - RNA, 22 nt, Human
gcccagcuuuucacuuccacac

SEQ ID NO: 450131 - RNA, 22 nt, Human
caggaaccuaaugaaggcucac

SEQ ID NO: 450132 - RNA, 22 nt, Human
gaguccaguuagugaggcuggg

SEQ ID NO: 450133 - RNA, 22 nt, Human
aaaucaguuggaacacaagcag

SEQ ID NO: 450134 - RNA, 22 nt, Human
agauuucccucuuguauuugca

SEQ ID NO: 450135 - RNA, 22 nt, Human
uuugugcagauguauauuugug

SEQ ID NO: 450136 - RNA, 22 nt, Human
agaaaaggcuugaagagguuuu

SEQ ID NO: 450137 - RNA, 22 nt, Human
cagggcaggacagauacauuac

SEQ ID NO: 450138 - RNA, 22 nt, Human
acacaguaccccaaggcugggc

SEQ ID NO: 450139 - RNA, 22 nt, Human
uggagcugaacuuugaggccag

SEQ ID NO: 450140 - RNA, 22 nt, Human
agcuugaguuuuggaugaagug

SEQ ID NO: 450141 - RNA, 22 nt, Human
aaucaguuguucacucugaaaa

SEQ ID NO: 450142 - RNA, 22 nt, Human
uacaaagucacauugaaaugaa

SEQ ID NO: 450143 - RNA, 22 nt, Human
aagucacagcuaaauagcuaag

SEQ ID NO: 450144 - RNA, 22 nt, Human
agacuguacuuucugcagcucu

SEQ ID NO: 450145 - RNA, 22 nt, Human
cacagaaaaaggcuugaaaauc

SEQ ID NO: 450146 - RNA, 23 nt, Human
uggcugagauccuacuguuugcu

SEQ ID NO: 450147 - RNA, 22 nt, Human
uucccaguuagucauuuuuaca

SEQ ID NO: 450148 - RNA, 22 nt, Human
caguuucuuaucuucaaaauug

SEQ ID NO: 450149 - RNA, 22 nt, Human
gugggagcuuuggcaucaggcu

SEQ ID NO: 450150 - RNA, 22 nt, Human
caggcagcagccacucugguau

SEQ ID NO: 450151 - RNA, 22 nt, Human
agcccaugcaacaggccuagcg

SEQ ID NO: 450152 - RNA, 21 nt, Human
gcacagugccaggcacacagu

SEQ ID NO: 450153 - RNA, 20 nt, Human
cucuggcuccgcgugaccgc

SEQ ID NO: 450154 - RNA, 22 nt, Human
uguguccuuuggaggaucagcg

SEQ ID NO: 450155 - RNA, 21 nt, Human
uccucagggccccagagcacu

SEQ ID NO: 450156 - RNA, 22 nt, Human
acagguggggaggcugagguuc

SEQ ID NO: 450157 - RNA, 22 nt, Human
gggccuccggggugagcugugg

SEQ ID NO: 450158 - RNA, 22 nt, Human
cagugauggauauggagaaguc

SEQ ID NO: 450159 - RNA, 22 nt, Human
aauaauuuccagccaacuggaa

SEQ ID NO: 450160 - RNA, 22 nt, Human
ccucuggggguccucagagucu

SEQ ID NO: 450161 - RNA, 22 nt, Human
gggaagccaugcucagagguac

SEQ ID NO: 450162 - RNA, 22 nt, Human
gauuucaaguaucuugggcgag

SEQ ID NO: 450163 - RNA, 22 nt, Human
cacaggaggaggccagagcgua

SEQ ID NO: 450164 - RNA, 23 nt, Human
acaaaugcccauacaucuaguuc

SEQ ID NO: 450165 - RNA, 22 nt, Human
acacugaauguuuaagaacuug

SEQ ID NO: 450166 - RNA, 22 nt, Human
augcaguaaaauaggagguaau

SEQ ID NO: 450167 - RNA, 22 nt, Human
cuacugaguccuucagcugcca

SEQ ID NO: 450168 - RNA, 22 nt, Human
uggggaagggcacccuggagac

SEQ ID NO: 450169 - RNA, 20 nt, Human
ggcugugcccuuccguggcc

SEQ ID NO: 450170 - RNA, 22 nt, Human
cugccagcucucuggaggcucu

SEQ ID NO: 450171 - RNA, 22 nt, Human
ugcucccaggcucuguggucug

SEQ ID NO: 450172 - RNA, 22 nt, Human
cucugugagggucuguacagaa

SEQ ID NO: 450173 - RNA, 22 nt, Human
guguccaucagcagccacugug

SEQ ID NO: 450174 - RNA, 22 nt, Human
uuuauguacauauccacaagga

SEQ ID NO: 450175 - RNA, 22 nt, Human
augaagcugguuuuggcuuggg

SEQ ID NO: 450176 - RNA, 22 nt, Human
cucagggccaaggaugcuguug

SEQ ID NO: 450177 - RNA, 23 nt, Human
aacaauagguuuuggcagaauag

SEQ ID NO: 450178 - RNA, 19 nt, Human
ucaguggagaaaggggaag

SEQ ID NO: 450179 - RNA, 22 nt, Human
aggacaguguggaagagggugc

SEQ ID NO: 450180 - RNA, 22 nt, Human
cugccagccaggccagguaggc

SEQ ID NO: 450181 - RNA, 22 nt, Human
caagcagagacuagauagcugu

SEQ ID NO: 450182 - RNA, 22 nt, Human
augcuguagaucuuagccucua

SEQ ID NO: 450183 - RNA, 21 nt, Human
agcaggaggcagucacagcuc

SEQ ID NO: 450184 - RNA, 22 nt, Human
uggugaagucagcggagcccgg

SEQ ID NO: 450185 - RNA, 22 nt, Human
ccagugcccagucucccugguc

SEQ ID NO: 450186 - RNA, 22 nt, Human
aggcucagcaucugauucauau

SEQ ID NO: 450187 - RNA, 23 nt, Human
ugagaagccaggggagcgugagg

SEQ ID NO: 450188 - RNA, 22 nt, Human
ggcccugagcugaaguacugug

SEQ ID NO: 450189 - RNA, 22 nt, Human
agccagagcagggaauuggaca

SEQ ID NO: 450190 - RNA, 22 nt, Human
agguaguguagcugagugggau

SEQ ID NO: 450191 - RNA, 22 nt, Human
uggcucagcgguggcagcagac

SEQ ID NO: 450192 - RNA, 22 nt, Human
agucccaguucgguucuuccuc

SEQ ID NO: 450193 - RNA, 22 nt, Human
cccagccucuguuugcuccucu

SEQ ID NO: 450194 - RNA, 22 nt, Human
aggccagcaagaaagagagucu

SEQ ID NO: 450195 - RNA, 22 nt, Human
cacuggugacuucugagcugga

SEQ ID NO: 450196 - RNA, 22 nt, Human
aggaaaaaccuguuaaugguag

SEQ ID NO: 450197 - RNA, 22 nt, Human
acugugugggccgcucacuggg

SEQ ID NO: 450198 - RNA, 22 nt, Human
accugcagccacuucucuccuu

SEQ ID NO: 450199 - RNA, 22 nt, Human
uggcagugccccuugaccagug

SEQ ID NO: 450200 - RNA, 22 nt, Human
ugucacauaggcaaaauguuuu

SEQ ID NO: 450201 - RNA, 21 nt, Human
cccagggaagccgcagucacc

SEQ ID NO: 450202 - RNA, 22 nt, Human
cagagcagagugauuguucugg

SEQ ID NO: 450203 - RNA, 22 nt, Human
ugcuggcuguauaugugagagu

SEQ ID NO: 450204 - RNA, 22 nt, Human
cuggagcucuguguguuccuga

SEQ ID NO: 450205 - RNA, 22 nt, Human
gcuggcuguguuucaucucuga

SEQ ID NO: 450206 - RNA, 22 nt, Human
ucugaagggcugaguggaggag

SEQ ID NO: 450207 - RNA, 22 nt, Human
gaggcugcggggaggagccugc

SEQ ID NO: 450208 - RNA, 22 nt, Human
guguuuccuaguuuaaugaaug

SEQ ID NO: 450209 - RNA, 22 nt, Human
aaggcacuagcagaauuaguga

SEQ ID NO: 450210 - RNA, 16 nt, Human
cagaguguaaacagga

SEQ ID NO: 450211 - RNA, 22 nt, Human
gcuggcucuucaguggagauag

SEQ ID NO: 450212 - RNA, 22 nt, Human
gaggagagggcugcgggcccac

SEQ ID NO: 450213 - RNA, 22 nt, Human
ccucugcucccuggugucugag

SEQ ID NO: 450214 - RNA, 22 nt, Human
agaggccaggcugcagagggau

SEQ ID NO: 450215 - RNA, 22 nt, Human
augcugugccuggaaagcggcu

SEQ ID NO: 450216 - RNA, 22 nt, Human
augggaggaagagaagaugucu

SEQ ID NO: 450217 - RNA, 22 nt, Human
caaaggcuucaucucagagcag

SEQ ID NO: 450218 - RNA, 22 nt, Human
aggugcugccccgagaaggaug

SEQ ID NO: 450219 - RNA, 21 nt, Human
gcuccuggugcugcguggcgc

SEQ ID NO: 450220 - RNA, 19 nt, Human
ugcucaggccaaggagccc

SEQ ID NO: 450221 - RNA, 22 nt, Human
cucuggaguggguggccgggag

SEQ ID NO: 450222 - RNA, 22 nt, Human
uagggcagccuuauagcuccca

SEQ ID NO: 450223 - RNA, 19 nt, Human
ugggaguggggaagguccu

SEQ ID NO: 450224 - RNA, 22 nt, Human
gggugcugacuggggccugaaa

SEQ ID NO: 450225 - RNA, 22 nt, Human
cccugcagagaccacugaccuu

SEQ ID NO: 450226 - RNA, 22 nt, Human
cauuuauucucagauccuuguc

SEQ ID NO: 450227 - RNA, 22 nt, Human
ucccagauuguugauggcuuaa

SEQ ID NO: 450228 - RNA, 22 nt, Human
acagauccugguuacagccauu

SEQ ID NO: 450229 - RNA, 22 nt, Human
agcugcuguccuaggcacugua

SEQ ID NO: 450230 - RNA, 22 nt, Human
acagauuuauugaagcugcugc

SEQ ID NO: 450231 - RNA, 22 nt, Human
aggagggugauccgggcugguc

SEQ ID NO: 450232 - RNA, 22 nt, Human
caggugcugcguggcggagcug

SEQ ID NO: 450233 - RNA, 22 nt, Human
gccucaggacuggcauacucau

SEQ ID NO: 450234 - RNA, 22 nt, Human
agccuggagaggcgccauacac

SEQ ID NO: 450235 - RNA, 22 nt, Human
acauuucucaucuaguagagua

SEQ ID NO: 450236 - RNA, 21 nt, Human
agagacugucacugcaguacc

SEQ ID NO: 450237 - RNA, 22 nt, Human
uagccaggucacacuguguguu

SEQ ID NO: 450238 - RNA, 22 nt, Human
ugggcagaggcucugaagucca

SEQ ID NO: 450239 - RNA, 22 nt, Human
cuauuacauuucuggacauuca

SEQ ID NO: 450240 - RNA, 19 nt, Human
ccaggccuccugggagguc

SEQ ID NO: 450241 - RNA, 20 nt, Human
uacuugaauguugcagcagu

SEQ ID NO: 450242 - RNA, 22 nt, Human
caggagugagaugcgaucacuu

SEQ ID NO: 450243 - RNA, 22 nt, Human
agagacaggguuuugccauguu

SEQ ID NO: 450244 - RNA, 22 nt, Human
ugcuggcccuggcucagggaac

SEQ ID NO: 450245 - RNA, 22 nt, Human
cuuccagucuagagcuaucugu

SEQ ID NO: 450246 - RNA, 22 nt, Human
aaauguuccuuuggauuaaacu

SEQ ID NO: 450247 - RNA, 22 nt, Human
accaggcagagcugggccuuaa

SEQ ID NO: 450248 - RNA, 22 nt, Human
gcacagguugcaaaaguucaca

SEQ ID NO: 450249 - RNA, 22 nt, Human
agaggaugguugaggaagaccu

SEQ ID NO: 450250 - RNA, 22 nt, Human
ugacagaaugugacucucagau

SEQ ID NO: 450251 - RNA, 21 nt, Human
ugcugccaucaugcagagaug

SEQ ID NO: 450252 - RNA, 17 nt, Human
acagagguuauacagac

SEQ ID NO: 450253 - RNA, 21 nt, Human
ucacagacuggucagugaggc

SEQ ID NO: 450254 - RNA, 22 nt, Human
cuuccucugcggcgccgggcgc

SEQ ID NO: 450255 - RNA, 22 nt, Human
agucagcagccuggccaggaga

SEQ ID NO: 450256 - RNA, 22 nt, Human
agugggguccucaguaugguuc

SEQ ID NO: 450257 - RNA, 22 nt, Human
ccuggcagcauugguagagauu

SEQ ID NO: 450258 - RNA, 22 nt, Human
cugaggaugguguggucuucuc

SEQ ID NO: 450259 - RNA, 22 nt, Human
aaauuguugaucuacaguaagg

SEQ ID NO: 450260 - RNA, 22 nt, Human
ucagugucuugaccugggugug

SEQ ID NO: 450261 - RNA, 22 nt, Human
cuggccuuggaagggagcccgu

SEQ ID NO: 450262 - RNA, 22 nt, Human
gcagcuggaagugacacucugu

SEQ ID NO: 450263 - RNA, 19 nt, Human
gguagaagggaaguguuuu

SEQ ID NO: 450264 - RNA, 22 nt, Human
ccucuccuugcacccgucccgc

SEQ ID NO: 450265 - RNA, 22 nt, Human
gccuggcugagguggggaggca

SEQ ID NO: 450266 - RNA, 19 nt, Human
gcuuuuuguugucaaaggu

SEQ ID NO: 450267 - RNA, 22 nt, Human
gaggcucaccuagggagcacug

SEQ ID NO: 450268 - RNA, 22 nt, Human
guggcuucuggcugggccucag

SEQ ID NO: 450269 - RNA, 22 nt, Human
gaaggccauugcguccugggau

SEQ ID NO: 450270 - RNA, 22 nt, Human
uacauuccauguguguguauuc

SEQ ID NO: 450271 - RNA, 22 nt, Human
ggcucuggcaaggggaggcuac

SEQ ID NO: 450272 - RNA, 22 nt, Human
cuugaaagucagcagaguggau

SEQ ID NO: 450273 - RNA, 22 nt, Human
uuccucagagggcgcuggggaa

SEQ ID NO: 450274 - RNA, 22 nt, Human
acacugugacaaaggcuguucu

SEQ ID NO: 450275 - RNA, 22 nt, Human
cuguggaguggggaguacuggu

SEQ ID NO: 450276 - RNA, 22 nt, Human
cugccuuccaaccccagacucc

SEQ ID NO: 450277 - RNA, 22 nt, Human
guuacaaagcacuucaagugaa

SEQ ID NO: 450278 - RNA, 22 nt, Human
acauuucuaucauccuguaaug

SEQ ID NO: 450279 - RNA, 22 nt, Human
gccacucaugggaggugugcaa

SEQ ID NO: 450280 - RNA, 22 nt, Human
ugcuggggucauggggcgcccg

SEQ ID NO: 450281 - RNA, 22 nt, Human
ggcugagcucaggggcagcagg

SEQ ID NO: 450282 - RNA, 20 nt, Human
acccagcucugugcccuggg

SEQ ID NO: 450283 - RNA, 22 nt, Human
ggcaaaaaccauaauuacuuuu

SEQ ID NO: 450284 - RNA, 22 nt, Human
gugugggcugcagaggcacagc

SEQ ID NO: 450285 - RNA, 19 nt, Human
ugaagcagcaaacucucag

SEQ ID NO: 450286 - RNA, 20 nt, Human
acugccuugguucaguaggu

SEQ ID NO: 450287 - RNA, 22 nt, Human
ucccuagucgcaucuguggaga

SEQ ID NO: 450288 - RNA, 22 nt, Human
ucccuggcagcuaagggugguc

SEQ ID NO: 450289 - RNA, 22 nt, Human
uaguggaggguguagcugcugg

SEQ ID NO: 450290 - RNA, 22 nt, Human
gguuggaggugggaauagcuag

SEQ ID NO: 450291 - RNA, 20 nt, Human
agugucuggugcagggccuc

SEQ ID NO: 450292 - RNA, 22 nt, Human
cagcauggcuugaguguuuccu

SEQ ID NO: 450293 - RNA, 22 nt, Human
agcuggugcugaagcucuugag

SEQ ID NO: 450294 - RNA, 22 nt, Human
aagaggaaaugauugacuauau

SEQ ID NO: 450295 - RNA, 22 nt, Human
ucccagccuuccagucugguuu

SEQ ID NO: 450296 - RNA, 22 nt, Human
agggaucaaaaaauguacaugc

SEQ ID NO: 450297 - RNA, 22 nt, Human
uccagccaagggagguuacuag

SEQ ID NO: 450298 - RNA, 22 nt, Human
gccucccuggcccacagcagcg

SEQ ID NO: 450299 - RNA, 22 nt, Human
cagagccagcaguggggacagg

SEQ ID NO: 450300 - RNA, 22 nt, Human
ccagugccugugggcauggugc

SEQ ID NO: 450301 - RNA, 22 nt, Human
ucuccuuuaagauuuccucagg

SEQ ID NO: 450302 - RNA, 22 nt, Human
cauauuucagucuaagaugugu

SEQ ID NO: 450303 - RNA, 22 nt, Human
uggagcaggcaucuuucucucu

SEQ ID NO: 450304 - RNA, 22 nt, Human
cagugauguuucugcaucagag

SEQ ID NO: 450305 - RNA, 22 nt, Human
gcagccugaugaucuggguugu

SEQ ID NO: 450306 - RNA, 22 nt, Human
gggcugcuuuuuucuuagcaga

SEQ ID NO: 450307 - RNA, 22 nt, Human
auuugucuucaguagguucuuc

SEQ ID NO: 450308 - RNA, 18 nt, Human
gggcucugauccuucacc

SEQ ID NO: 450309 - RNA, 22 nt, Human
cugggagcugucaggagcgugu

SEQ ID NO: 450310 - RNA, 17 nt, Human
agguggguggaucaccu

SEQ ID NO: 450311 - RNA, 20 nt, Human
uguauauuuucugguguaaa

SEQ ID NO: 450312 - RNA, 23 nt, Human
acacaauagaguacuauucagcc

SEQ ID NO: 450313 - RNA, 22 nt, Human
aaguuacaggagaaagagauca

SEQ ID NO: 450314 - RNA, 19 nt, Human
ggugaccaccuggucagug

SEQ ID NO: 450315 - RNA, 22 nt, Human
ugcuggggguucagaugaguaa

SEQ ID NO: 450316 - RNA, 22 nt, Human
ccagagcuucggggcggcugua

SEQ ID NO: 450317 - RNA, 20 nt, Human
uggcaggaggcagcagugga

SEQ ID NO: 450318 - RNA, 21 nt, Human
acagugugcuucucucccucc

SEQ ID NO: 450319 - RNA, 22 nt, Human
cagcuggcagcccuggcccugc

SEQ ID NO: 450320 - RNA, 22 nt, Human
caggcccauucuaggcuugcua

SEQ ID NO: 450321 - RNA, 22 nt, Human
ccugggcucuauccugacccag

SEQ ID NO: 450322 - RNA, 22 nt, Human
gaaaauguuuccuguuauuugc

SEQ ID NO: 450323 - RNA, 22 nt, Human
caggaacauuuaaccacagggu

SEQ ID NO: 450324 - RNA, 22 nt, Human
gaggagaaauuuggggaccuga

SEQ ID NO: 450325 - RNA, 22 nt, Human
auugcaccuuggguuuugaaag

SEQ ID NO: 450326 - RNA, 22 nt, Human
uuugcauugcauacaaggaacu

SEQ ID NO: 450327 - RNA, 22 nt, Human
uugcacagaugagggugaugcu

SEQ ID NO: 450328 - RNA, 22 nt, Human
ccugggugaaaucucuccugca

SEQ ID NO: 450329 - RNA, 20 nt, Human
ccagucccugagcaccaggg

SEQ ID NO: 450330 - RNA, 22 nt, Human
caguacuucuuggaaacuggau

SEQ ID NO: 450331 - RNA, 22 nt, Human
agggcagacuaggauggaagug

SEQ ID NO: 450332 - RNA, 22 nt, Human
cucuguccacagguuugucccu

SEQ ID NO: 450333 - RNA, 22 nt, Human
acugaaggguaaugugggagcc

SEQ ID NO: 450334 - RNA, 20 nt, Human
aggcacuggggauagguaag

SEQ ID NO: 450335 - RNA, 22 nt, Human
ccauuguaguaucuguuuuagu

SEQ ID NO: 450336 - RNA, 22 nt, Human
guguacaugagaaaucaacuuu

SEQ ID NO: 450337 - RNA, 19 nt, Human
ugcuuccucaccaucuccc

SEQ ID NO: 450338 - RNA, 22 nt, Human
ucaggagcuugguagugugauu

SEQ ID NO: 450339 - RNA, 22 nt, Human
cagugcccaagaugugccaugc

SEQ ID NO: 450340 - RNA, 22 nt, Human
agagugaucagauaucaggugu

SEQ ID NO: 450341 - RNA, 22 nt, Human
cccaggagguggagcuugcagu

SEQ ID NO: 450342 - RNA, 17 nt, Human
uggcuucccugggccac

SEQ ID NO: 450343 - RNA, 22 nt, Human
uugagaagaaauaguuugcaau

SEQ ID NO: 450344 - RNA, 22 nt, Human
aggaccuguguuuuccuugaau

SEQ ID NO: 450345 - RNA, 22 nt, Human
cagagcagugaggaguugugua

SEQ ID NO: 450346 - RNA, 20 nt, Human
cugaacacagaauaagcaca

SEQ ID NO: 450347 - RNA, 20 nt, Human
gugcuucagaagccauugcu

SEQ ID NO: 450348 - RNA, 18 nt, Human
gaagggagcuggaaugca

SEQ ID NO: 450349 - RNA, 22 nt, Human
caguuucuguuuuaaauagcag

SEQ ID NO: 450350 - RNA, 22 nt, Human
gccagaaacauacacaucacuu

SEQ ID NO: 450351 - RNA, 18 nt, Human
cugucuuuuuucucucca

SEQ ID NO: 450352 - RNA, 22 nt, Human
caguggaagcuggcugugaaga

SEQ ID NO: 450353 - RNA, 17 nt, Human
gggcugacaguggccuc

SEQ ID NO: 450354 - RNA, 22 nt, Human
ccagguggaaggucugugcucu

SEQ ID NO: 450355 - RNA, 22 nt, Human
gggggcuguccugugcauugua

SEQ ID NO: 450356 - RNA, 20 nt, Human
agacccucuggacugggccc

SEQ ID NO: 450357 - RNA, 22 nt, Human
cagcuugggucaggugccugcu

SEQ ID NO: 450358 - RNA, 22 nt, Human
gagcgggaggaacggcucgggc

SEQ ID NO: 450359 - RNA, 22 nt, Human
gugcagugaaaaaagaaugucc

SEQ ID NO: 450360 - RNA, 22 nt, Human
cuggugucugcucccucacagc

SEQ ID NO: 450361 - RNA, 22 nt, Human
ccaggcucaggugcgagagaca

SEQ ID NO: 450362 - RNA, 23 nt, Human
cuuuuaacuugaucugagaccag

SEQ ID NO: 450363 - RNA, 22 nt, Human
gagggcugcaaugagacagaga

SEQ ID NO: 450364 - RNA, 22 nt, Human
ugugaggagaggcccagcuccc

SEQ ID NO: 450365 - RNA, 22 nt, Human
gacagggcgcccagccuguuuc

SEQ ID NO: 450366 - RNA, 22 nt, Human
cagcuuuauuucacguguuugu

SEQ ID NO: 450367 - RNA, 22 nt, Human
uggcucagcugacucggcuucu

SEQ ID NO: 450368 - RNA, 22 nt, Human
uacaacauguaaagugguuuaa

SEQ ID NO: 450369 - RNA, 22 nt, Human
ggcugcugcccaccccugcaug

SEQ ID NO: 450370 - RNA, 22 nt, Human
aaggccaacuaggaugagcuag

SEQ ID NO: 450371 - RNA, 21 nt, Human
uaagaacauuaucuucuuccu

SEQ ID NO: 450372 - RNA, 22 nt, Human
aggugucuuugcggcccgccgc

SEQ ID NO: 450373 - RNA, 23 nt, Human
agggcaugaagcagaggacgugg

SEQ ID NO: 450374 - RNA, 22 nt, Human
guccuggguccccgcaggucag

SEQ ID NO: 450375 - RNA, 22 nt, Human
acuuugaaggggaacauuuuaa

SEQ ID NO: 450376 - RNA, 22 nt, Human
uccugcagcugaagcucaugug

SEQ ID NO: 450377 - RNA, 22 nt, Human
agcagaacugaugagacuugag

SEQ ID NO: 450378 - RNA, 22 nt, Human
ucugagagagggucagaugcua

SEQ ID NO: 450379 - RNA, 22 nt, Human
cauuucuguucucuuccuguac

SEQ ID NO: 450380 - RNA, 22 nt, Human
ccuccaguacuccaguccagcg

SEQ ID NO: 450381 - RNA, 22 nt, Human
gguguagcucugugucccacug

SEQ ID NO: 450382 - RNA, 22 nt, Human
aaggaagagaauccuucucaga

SEQ ID NO: 450383 - RNA, 22 nt, Human
acagcuguggggacucuugccc

SEQ ID NO: 450384 - RNA, 20 nt, Human
gaaggaagggggcaagguga

SEQ ID NO: 450385 - RNA, 17 nt, Human
uauguaguacuuauaaa

SEQ ID NO: 450386 - RNA, 19 nt, Human
uaguggagugacaaguucu

SEQ ID NO: 450387 - RNA, 21 nt, Human
gccacugcacuccagccuggg

SEQ ID NO: 450388 - RNA, 22 nt, Human
ggggccugcgagguucaacuuc

SEQ ID NO: 450389 - RNA, 22 nt, Human
ugaggcaggaauggggaaaagu

SEQ ID NO: 450390 - RNA, 20 nt, Human
ucagaggcugccagcugggg

SEQ ID NO: 450391 - RNA, 22 nt, Human
auacaucuaugccuuucugaca

SEQ ID NO: 450392 - RNA, 23 nt, Human
auugaugacuugauuacacuuuu

SEQ ID NO: 450393 - RNA, 21 nt, Human
ggagucagggucuggcugggg

SEQ ID NO: 450394 - RNA, 18 nt, Human
aggagccuuugcacugga

SEQ ID NO: 450395 - RNA, 22 nt, Human
auagcuguuagauuggggucga

SEQ ID NO: 450396 - RNA, 22 nt, Human
uguggugagaaacugguagauu

SEQ ID NO: 450397 - RNA, 22 nt, Human
uuuauauagagauuugugcaug

SEQ ID NO: 450398 - RNA, 22 nt, Human
agggcccuagggaaugagacau

SEQ ID NO: 450399 - RNA, 22 nt, Human
ggcauccaaauaccaagaugua

SEQ ID NO: 450400 - RNA, 22 nt, Human
cuugucagccaauuguggauuu

SEQ ID NO: 450401 - RNA, 22 nt, Human
aggccuggguguucaccagaag

SEQ ID NO: 450402 - RNA, 22 nt, Human
uuuccucugggcccugccaccc

SEQ ID NO: 450403 - RNA, 22 nt, Human
aacaugaagguaggaugguuuu

SEQ ID NO: 450404 - RNA, 22 nt, Human
aggaggaggcuggaguacaccc

SEQ ID NO: 450405 - RNA, 22 nt, Human
ucugggagguaaccaugcugau

SEQ ID NO: 450406 - RNA, 22 nt, Human
gcugucucauacaaggcccugc

SEQ ID NO: 450407 - RNA, 22 nt, Human
guggcauucucggcaccaucug

SEQ ID NO: 450408 - RNA, 22 nt, Human
cauuuguuuagaagucuuuaua

SEQ ID NO: 450409 - RNA, 22 nt, Human
ccugaagagcacucuagaguug

SEQ ID NO: 450410 - RNA, 22 nt, Human
uggaccugcguaggugcugggc

SEQ ID NO: 450411 - RNA, 22 nt, Human
guggagcccugguagggacccc

SEQ ID NO: 450412 - RNA, 22 nt, Human
gcucucuguuauuaagaucuuu

SEQ ID NO: 450413 - RNA, 22 nt, Human
aagauacauaaagguagagucu

SEQ ID NO: 450414 - RNA, 22 nt, Human
aaaaguguccagauuaugaaga

SEQ ID NO: 450415 - RNA, 22 nt, Human
cagcugucuaaguugagcagga

SEQ ID NO: 450416 - RNA, 22 nt, Human
uggccugguuguugcugccguu

SEQ ID NO: 450417 - RNA, 22 nt, Human
agaagaaaugugaaggccacug

SEQ ID NO: 450418 - RNA, 22 nt, Human
uuauucugcacuuuuaaaauau

SEQ ID NO: 450419 - RNA, 22 nt, Human
ucugggcagcagcagcuaguag

SEQ ID NO: 450420 - RNA, 22 nt, Human
caggguagacaguaggugucug

SEQ ID NO: 450421 - RNA, 22 nt, Human
cugggaggcggagguuguagug

SEQ ID NO: 450422 - RNA, 20 nt, Human
cucucccagcacagcuuccu

SEQ ID NO: 450423 - RNA, 22 nt, Human
cagaggcauuacugaaaaggug

SEQ ID NO: 450424 - RNA, 22 nt, Human
ugcugccuuugggaccuggccu

SEQ ID NO: 450425 - RNA, 22 nt, Human
ugcagggaggccccgcagcccu

SEQ ID NO: 450426 - RNA, 23 nt, Human
ucucaggacacacaugucuauca

SEQ ID NO: 450427 - RNA, 22 nt, Human
uaaggcaccauaauauauuuaa

SEQ ID NO: 450428 - RNA, 22 nt, Human
ggcugccucugaugugcagacg

SEQ ID NO: 450429 - RNA, 22 nt, Human
ugggggagccuucacaguagcu
